United States Patent Application Publication US 2025/0084491 A1 - sequence listing, part 21

SEQ ID NO: 392020 - DNA, 75 bp, synthetic construct
  source 1..75: mol_type = other DNA
tttcagcggagcgcgaccgtctgtttaaaaattatcaacgttacctgaaaggcagccaggcggcggtgaatccgt

SEQ ID NO: 392021 - DNA, 75 bp, synthetic construct
  source 1..75: mol_type = other DNA
tttgattctattgatgaactacaaccatccttatacgtttacggcgcagaaggcggtggtgtctattcccattac

SEQ ID NO: 392022 - DNA, 75 bp, synthetic construct
  source 1..75: mol_type = other DNA
agctttaccgctgcgtccggtaatggtcttcatccctgagcaaaaacggcaaattgttgcccaatttcggcaaaa

SEQ ID NO: 392023 - DNA, 75 bp, synthetic construct
  source 1..75: mol_type = other DNA
aacttactgaagcaaaatataatcttgagcagactgtcattcgcgcaccaagcaatggctacgtcactcaggtac

SEQ ID NO: 392024 - DNA, 75 bp, synthetic construct
  source 1..75: mol_type = other DNA
atgactggaaaaaatagagtggttttacctgtctttctggcgttaggattaatatcaacaaatgctaatgcatct

SEQ ID NO: 392025 - DNA, 75 bp, synthetic construct
  source 1..75: mol_type = other DNA
aaggatttttttaatattctgaaaaagaaaaaaggaagcattcgctggagtaaaacttttgatgcccgtaaggca

SEQ ID NO: 392026 - DNA, 75 bp, synthetic construct
  source 1..75: mol_type = other DNA
acagtttgttgccaactccaacaagatgaccgccgtcggggcgtgtggtctgatcgtcacggcattattgttgat

SEQ ID NO: 392027 - DNA, 75 bp, synthetic construct
  source 1..75: mol_type = other DNA
tttcttggtgaatgtcccagcgcagacccggaggcagtaaataaaatactgtctaagttcggcaaggtcagagga

SEQ ID NO: 392028 - DNA, 75 bp, synthetic construct
  source 1..75: mol_type = other DNA
gagtaaaacgtttgatgctcgtaaagattttttaaatcagtgttcaacggctgatccggcggctatatcgaaaat

SEQ ID NO: 392029 - DNA, 75 bp, synthetic construct
  source 1..75: mol_type = other DNA
tcgtattttttactgtgtcctggctgacagcacctgcgtatgcatctgacccttgcgcttcggtactttgcttat

SEQ ID NO: 392030 - DNA, 75 bp, synthetic construct
  source 1..75: mol_type = other DNA
cgcaaaaaatggcgttaattccagcctgcatctttttgtgtttcgctgcgctatcggtgcaggcagaagaaacat

SEQ ID NO: 392031 - DNA, 75 bp, synthetic construct
  source 1..75: mol_type = other DNA
gacggtcgcgggattgatactggtcgcgctttgcttaataggcagccacacacaattttggaccatgcacactat

SEQ ID NO: 392032 - DNA, 75 bp, synthetic construct
  source 1..75: mol_type = other DNA
cccgctgctggggttcttttgcccattgctgacggtgatggcgatttatcgtggtcgcccgggtggggatttttg

SEQ ID NO: 392033 - DNA, 75 bp, synthetic construct
  source 1..75: mol_type = other DNA
ccgatgccggtgccttacggggaaatgctggttggctcccgccgtatatcccaggacatcagcacccgtgatgaa

SEQ ID NO: 392034 - DNA, 75 bp, synthetic construct
  source 1..75: mol_type = other DNA
ccctctatcgaattgccaccaactggagcaggcgcaggggctggttttagggttcgaccaaggaatattgcattt

SEQ ID NO: 392035 - DNA, 75 bp, synthetic construct
  source 1..75: mol_type = other DNA
cagccactggatgagacgctgactcatttgagtggaaaagatgtggctggtcttctcgcataccttggtttggga

SEQ ID NO: 392036 - DNA, 75 bp, synthetic construct
  source 1..75: mol_type = other DNA
ccccaggctggcaaaggcttatccgaccaataaattaccggatttacggggcgaatttatccgtggctgggatga

SEQ ID NO: 392037 - DNA, 75 bp, synthetic construct
  source 1..75: mol_type = other DNA
caagggacggacaaacgcgcgagattgcctcctacctggcttcggaactgaaagaactggggatccagacggatg

SEQ ID NO: 392038 - DNA, 75 bp, synthetic construct
  source 1..75: mol_type = other DNA
cagatgaactggaacgatataacctttggctggattatctggacgcactggaactggtcgatacttccggtgcgc

SEQ ID NO: 392039 - DNA, 75 bp, synthetic construct
  source 1..75: mol_type = other DNA
ctatcggtgcaggcagaagaaacatcggtaacaccacaaccgcctgatattttattagggccgctgtttaatgat

SEQ ID NO: 392040 - DNA, 75 bp, synthetic construct
  source 1..75: mol_type = other DNA
tgcatcttgcgcagcacatgcaggaacgccgcagaatgatgcaatggtggtctaattatctggaactaaataagg

SEQ ID NO: 392041 - DNA, 75 bp, synthetic construct
  source 1..75: mol_type = other DNA
caactggcgaccaaacgcgctgcgctgttggtcatgctgtgctttttgctggcggggtactggctgtgggtgggt

SEQ ID NO: 392042 - DNA, 75 bp, synthetic construct
  source 1..75: mol_type = other DNA
atgtttgattatgaaacattgcgcttcatctggtggctgctgattggcgtgatcctggtggtctttatgatctcc

SEQ ID NO: 392043 - DNA, 75 bp, synthetic construct
  source 1..75: mol_type = other DNA
agccggaatttgccgccgcgaaagatggctataccttcgtatctcaccagcaggaagtggggacaggttatttcg

SEQ ID NO: 392044 - DNA, 75 bp, synthetic construct
  source 1..75: mol_type = other DNA
agaagcagttcccgaaagtgaccgcgcagaaagtgatcgtcagcgaagcaggcgcgtcggtttactcggcttccg

SEQ ID NO: 392045 - DNA, 75 bp, synthetic construct
  source 1..75: mol_type = other DNA
ggcgcgtcggtttactcggcttccgagctggcagcgcaggagttcccggatctcgacgtttcgctgcgtggcgcg

SEQ ID NO: 392046 - DNA, 75 bp, synthetic construct
  source 1..75: mol_type = other DNA
ttctgtcatagcgttttgtcataaagcaaattcagaagaaaatattttattcagacatgtattattcacatgttc

SEQ ID NO: 392047 - DNA, 75 bp, synthetic construct
  source 1..75: mol_type = other DNA
ctttctatattcatctggatgtattaaaaagttggactcaaaaaaacagtaaagtactatgccaactttttgaaa

SEQ ID NO: 392048 - DNA, 75 bp, synthetic construct
  source 1..75: mol_type = other DNA
aagcactatgttgagaaagtgcagcagccggaatttgccgctgcaaaagatggctatacctttgtttctcaccag

SEQ ID NO: 392049 - DNA, 75 bp, synthetic construct
  source 1..75: mol_type = other DNA
cggacctatggtctgccgacgcttatcaccaactgctcgaataactacggtccttatcactttccggaaaaactg

SEQ ID NO: 392050 - DNA, 75 bp, synthetic construct
  source 1..75: mol_type = other DNA
atctggataaccagcagtgggtcaacaacgtgaaaagcggcagttatcaggactggatcgcgaagaactatcagg

SEQ ID NO: 392051 - DNA, 75 bp, synthetic construct
  source 1..75: mol_type = other DNA
catctgtgtgattacattctgtttgattccgcgtgggtcggctacgagcaatttattccgatgatggcggatagc

SEQ ID NO: 392052 - DNA, 75 bp, synthetic construct
  source 1..75: mol_type = other DNA
atttgaataataatgattggtgccgacgagttcaagatggctcttatcaacgtgagcatttggggttagttaaat

SEQ ID NO: 392053 - DNA, 75 bp, synthetic construct
  source 1..75: mol_type = other DNA
gcggacacaacgaaaagaaaaacatcgatgtagtgcttactatttgtgatttgctggatgagattgtaccgaaag

SEQ ID NO: 392054 - DNA, 75 bp, synthetic construct
  source 1..75: mol_type = other DNA
tggcaacgggcagcaaatccgtgactggctgtatgttgaagatcacgcccgcgcgctgtattgcgtggcgaccac

SEQ ID NO: 392055 - DNA, 75 bp, synthetic construct
  source 1..75: mol_type = other DNA
aagtataaattctgaggcttttatcttaccaaagactagcaataaaaatttttctgttaatgctgctaaaattgc

SEQ ID NO: 392056 - DNA, 75 bp, synthetic construct
  source 1..75: mol_type = other DNA
tggaatggaccgcattatcgcgttgcagttgcaaatggcgcgagtgagttaattcctcagactatcgacgagatg

SEQ ID NO: 392057 - DNA, 75 bp, synthetic construct
  source 1..75: mol_type = other DNA
ggccttttcacggtcgtgttgaagacatttattctaattccgctattgaacccgtaggtagcacggagttaaggg

SEQ ID NO: 392058 - DNA, 75 bp, synthetic construct
  source 1..75: mol_type = other DNA
ttggacggatcacgtcgccgcgctgcgtgtatcttcaatgaagcgaaatttgagattctggtgacgaaagatgag

SEQ ID NO: 392059 - DNA, 75 bp, synthetic construct
  source 1..75: mol_type = other DNA
aacaatagaaagtttgtcgcaaagaaaaattcgttactcggaaagtcgctatgccgcgcgattaattggtaatga

SEQ ID NO: 392060 - DNA, 75 bp, synthetic construct
  source 1..75: mol_type = other DNA
aaaagcgatgctgatagagaaccgtatcaatattgagctatgccccggcatcgcggaaatcgattttaatcaaca

SEQ ID NO: 392061 - DNA, 75 bp, synthetic construct
  source 1..75: mol_type = other DNA
gtgttcattccggcgctgatgctgagagtttgtttccctgtcagagtaaacgggggtatgaattcggaggtttgt

SEQ ID NO: 392062 - DNA, 75 bp, synthetic construct
  source 1..75: mol_type = other DNA
cgtgagaataattcctgttctacgttgcgctttttatggccggttatcgcctcgaaaattgatcaaacatacgta

SEQ ID NO: 392063 - DNA, 75 bp, synthetic construct
  source 1..75: mol_type = other DNA
atgaataaccattttggtaaaggcttaatggcgggattaaaagcaacacatgccgacagtgcggttaatgtgact

SEQ ID NO: 392064 - DNA, 75 bp, synthetic construct
  source 1..75: mol_type = other DNA
taatggcgggattaaaagcaacgcatgccgacagtgcggttaatgtgacaaaattctgtgccgattataaacgcg

SEQ ID NO: 392065 - DNA, 75 bp, synthetic construct
  source 1..75: mol_type = other DNA
gaagctcgccagcttaaaattgcaggtgtaaaagcgaatttaactgggagcaaaagcacgccaactgacgggtgg

SEQ ID NO: 392066 - DNA, 75 bp, synthetic construct
  source 1..75: mol_type = other DNA
ctggttctttttatgcacgatgctggagctaccagcgcacaagttacaacaacactgtttcagggactgggcgca

SEQ ID NO: 392067 - DNA, 75 bp, synthetic construct
  source 1..75: mol_type = other DNA
tcaataacaatattgtgctgaaaaagttacgtatcgcattttctctgaaaactgatgatattctggcaatactca

SEQ ID NO: 392068 - DNA, 75 bp, synthetic construct
  source 1..75: mol_type = other DNA
ctgtcggtatgaagagaatttgctgccgccgttttatgacacgctgacgcagtacgttgagatggacaacagctc

SEQ ID NO: 392069 - DNA, 75 bp, synthetic construct
  source 1..75: mol_type = other DNA
gagccattaactcccgtaattcgtcgcgccaaactcatcatgcagaacctgctcgatgaggaactgagcatcagc

SEQ ID NO: 392070 - DNA, 75 bp, synthetic construct
  source 1..75: mol_type = other DNA
tgtcctcaccgcccaaccacccgccgccgaagagagcgagctgatgcagtcgctgcgccaggtgtgcaaactgtc

SEQ ID NO: 392071 - DNA, 75 bp, synthetic construct
  source 1..75: mol_type = other DNA
acgccaccagcgaaacagaatatgccggggctttcgttcctcattcgctggcggttatgcaacttagtgctgata

SEQ ID NO: 392072 - DNA, 75 bp, synthetic construct
  source 1..75: mol_type = other DNA
aacgcagtctgtatgctgaaccccccgatcctttattaaggcaggttattgatcagccatttacgcttggtgtca

SEQ ID NO: 392073 - DNA, 75 bp, synthetic construct
  source 1..75: mol_type = other DNA
cgtgatgttgggcttgcatcgggagagcctgatgtaaggggggattccctccgagtgttttttcctcgttaccca

SEQ ID NO: 392074 - DNA, 75 bp, synthetic construct
  source 1..75: mol_type = other DNA
ggcagtgacgcaaacaatgacgcaatccgcgccagcaatggtcctcaccgacgctgatgcgttcgtcgtcgtaaa

SEQ ID NO: 392075 - DNA, 75 bp, synthetic construct
  source 1..75: mol_type = other DNA
atcctggacagaacgggtgctgcgctggcgctggacggtgcgacatttagtgcacaaacaaccctgaataacgga

SEQ ID NO: 392076 - DNA, 75 bp, synthetic construct
  source 1..75: mol_type = other DNA
acgacggtaaatggtgggaccgttcactttaaaggggaagttgttaacgccgcttgcgcggttgatgcaggctct

SEQ ID NO: 392077 - DNA, 75 bp, synthetic construct
  source 1..75: mol_type = other DNA
tgcacaaacaaccctgaataacggaaccaacaccattccgttccaggcgcgttattatgcaattggtgccgcaac

SEQ ID NO: 392078 - DNA, 75 bp, synthetic construct
  source 1..75: mol_type = other DNA
acagccgtattcccgccatcaccctgaaaggtcagtggctggaagccgccggttttgccaccggcacggcggtag

SEQ ID NO: 392079 - DNA, 75 bp, synthetic construct
  source 1..75: mol_type = other DNA
cagccgccgaagctatcagaacgctgatggatgcgctgattgatatttctgttatcgcaaacaaggcgcataagc

SEQ ID NO: 392080 - DNA, 75 bp, synthetic construct
  source 1..75: mol_type = other DNA
attgatggaaatcataccaacgtactggctctgcagagttcagctgcgggcagcgcaacaaatgttggtgtgcag

SEQ ID NO: 392081 - DNA, 75 bp, synthetic construct
  source 1..75: mol_type = other DNA
ttgttgatgattgttttcagtattacggtgaagacattctgggacagtcgaaagcactaaaacagttgtgcaaag

SEQ ID NO: 392082 - DNA, 75 bp, synthetic construct
  source 1..75: mol_type = other DNA
tgcgccagttgtgtcaggagatgcacgatctgtatgtcagtttcgacgtcaaagacctgcaaaaagcgatgttcc

SEQ ID NO: 392083 - DNA, 75 bp, synthetic construct
  source 1..75: mol_type = other DNA
agcaaattcgcgacgttgcgccagaaaaagccgacctgccgcgtccgtttcgtctggcgattattcagcttggaa

SEQ ID NO: 392084 - DNA, 75 bp, synthetic construct
  source 1..75: mol_type = other DNA
ccttatccacctggcgtgctttgcgtggtacccggggaagtctggggggggcggttcaacgttatttccttgcac

SEQ ID NO: 392085 - DNA, 75 bp, synthetic construct
  source 1..75: mol_type = other DNA
gtcgaaccatcacggcgcgttgatccaggccggtgcgacgccggtgtatctggaggccgcgcgtaacccgttcgg

SEQ ID NO: 392086 - DNA, 75 bp, synthetic construct
  source 1..75: mol_type = other DNA
gcctatattcgcggcgaagtagagttggtgcggatacgtgatgccgaagggcgaattgcggctgaaggggcgctg

SEQ ID NO: 392087 - DNA, 75 bp, synthetic construct
  source 1..75: mol_type = other DNA
ccttatccaccaggcgtgctttgcgtggtgcccggggaagtctggggcggggcggtccagcgttatttccttgcg

SEQ ID NO: 392088 - DNA, 75 bp, synthetic construct
  source 1..75: mol_type = other DNA
acctagctaatgcaaaatgggtcgaaaatgtgaaaagtggtgcctatcagtcatggattgcacagaactatgagg

SEQ ID NO: 392089 - DNA, 75 bp, synthetic construct
  source 1..75: mol_type = other DNA
cagcttacgcaccaagcagcccttattccgcatcaaaagcatccagcgatcatttagtccgcgcgtggaaacgta

SEQ ID NO: 392090 - DNA, 75 bp, synthetic construct
  source 1..75: mol_type = other DNA
ctggaaagccggggcgcgcgaagcgcgtttgggtaatggtattggctacatcgactatagcgattgtccgctggc

SEQ ID NO: 392091 - DNA, 75 bp, synthetic construct
  source 1..75: mol_type = other DNA
atgaagtttatggggatttaccgcatccggatgaggttgcgcaggggagtattcttcctctcttcacggaacaaa

SEQ ID NO: 392092 - DNA, 75 bp, synthetic construct
  source 1..75: mol_type = other DNA
gctctacaccgtggtcactaccggcgtggtgggcgagacttacaatatcggcggccataacgagaagcagaacct

SEQ ID NO: 392093 - DNA, 75 bp, synthetic construct
  source 1..75: mol_type = other DNA
agaaatcttatcgtgagcaaattacctatgttgctgatcgcccagggcatgatcgccgttatgcaattgatgccg

SEQ ID NO: 392094 - DNA, 75 bp, synthetic construct
  source 1..75: mol_type = other DNA
ctgcgaccggaaatcccgcctttcagcatattctcctgaatggtctgataagcactccacaggtccttaccgtaa

SEQ ID NO: 392095 - DNA, 75 bp, synthetic construct
  source 1..75: mol_type = other DNA
tgccttgccgttgcgtccggtgatggttttcatccccgagcaaaacggcaaattgtcgcccaatttcggcaaaac

SEQ ID NO: 392096 - DNA, 75 bp, synthetic construct
  source 1..75: mol_type = other DNA
agtgaaaatcgttggttaacacccagtgttcctttgtttctggccaccgctgcgcgtgtgactgatgatgcactg

SEQ ID NO: 392097 - DNA, 75 bp, synthetic construct
  source 1..75: mol_type = other DNA
tagatgcggatctgcgcgcggctattgagctcgcccagcgtattaagatggaaggtcgccgccgccagttgcagc

SEQ ID NO: 392098 - DNA, 75 bp, synthetic construct
  source 1..75: mol_type = other DNA
tgggtcagtaaaagtgaaattaaacgtgatgccgaggagctaaaacgccttggcgcggaaattgttgatctgggg

SEQ ID NO: 392099 - DNA, 75 bp, synthetic construct
  source 1..75: mol_type = other DNA
gtgacgggctgatgttcgtcaccataacggtaagtcagtgccgcctgtgccagcgcctggcgtgccggtggcggc

SEQ ID NO: 392100 - DNA, 75 bp, synthetic construct
  source 1..75: mol_type = other DNA
cggcggcgcgttccgctggctggacaccctcggtagcgcaaaatacctcgatatggcacagcaatatcagcacct

SEQ ID NO: 392101 - DNA, 75 bp, synthetic construct
  source 1..75: mol_type = other DNA
cacctggctgtggccggatgtccccggcacaccggcactcacagccggagactggccggtcatggaaagcgacac

SEQ ID NO: 392102 - DNA, 75 bp, synthetic construct
  source 1..75: mol_type = other DNA
ccagagggttgagcgtgccgcgcgaagataatgcgcgccgctacattactgatgcggaaccaattgaggtggaga

SEQ ID NO: 392103 - DNA, 75 bp, synthetic construct
  source 1..75: mol_type = other DNA
tatcccctgtttatatactgccattgatgttcacattttccattattggacgaactctgctattcagagttcgtt

SEQ ID NO: 392104 - DNA, 75 bp, synthetic construct
  source 1..75: mol_type = other DNA
aggcccactgggtccatggctgtgtcttggccatgtccttttgctactggataatctttatcaaccactatgggt

SEQ ID NO: 392105 - DNA, 75 bp, synthetic construct
  source 1..75: mol_type = other DNA
attatcgcccgcatgatgatcccgatggtcaacgaagtggtccgctgtctggaagagggcattatcgccactccg

SEQ ID NO: 392106 - DNA, 75 bp, synthetic construct
  source 1..75: mol_type = other DNA
ctggataagctgaaaaaccgtcacaaccagcaggtggtgctgttccataaactggaaaacctgcgcgatcgtctg

SEQ ID NO: 392107 - DNA, 75 bp, synthetic construct
  source 1..75: mol_type = other DNA
cgcctccgccggtaactgggccgtcaaaaacggctggtgtcagaccatgacggaagatggtcaggcgctggtaat

SEQ ID NO: 392108 - DNA, 75 bp, synthetic construct
  source 1..75: mol_type = other DNA
ctcccggtcagtgcagaagttgttgcgttggctgatggcaataacaccgttgctgccagtggttttgtgtgggat

SEQ ID NO: 392109 - DNA, 75 bp, synthetic construct
  source 1..75: mol_type = other DNA
gtggcagcgttggcaaaactttagtttcaacttaccttctcgccccgcgcctgaaagatgcgaaatttttcgcgg

SEQ ID NO: 392110 - DNA, 75 bp, synthetic construct
  source 1..75: mol_type = other DNA
aaatataatatctgtccactggataagacatattcagggtggtcgacggatttaatcctgacgggattaatgggg

SEQ ID NO: 392111 - DNA, 75 bp, synthetic construct
  source 1..75: mol_type = other DNA
ttcacccgcggtgatatgctgaaggtctgtccgaaatttgtcacgtcacttgccggtttttccccgaaacagaca

SEQ ID NO: 392112 - DNA, 75 bp, synthetic construct
  source 1..75: mol_type = other DNA
tctgtccgaaatttgtcacatcacttgccggtttttccccgaaacagacgaccactattaataaagactccgtac

SEQ ID NO: 392113 - DNA, 75 bp, synthetic construct
  source 1..75: mol_type = other DNA
tttttaccaaaatcattaggggattcatcagtgctaagtcggaagatcaggcaaaggctaagctcgctgagtttc

SEQ ID NO: 392114 - DNA, 75 bp, synthetic construct
  source 1..75: mol_type = other DNA
ttattttcatcaatatttttatgcaaatatcatgctaaaattatcttgatgaaatctaatgtcaaaatggctata

SEQ ID NO: 392115 - DNA, 75 bp, synthetic construct
  source 1..75: mol_type = other DNA
gtgcttgtatatctttcaggaattgaaagagctttcttgaattttattacaagttatggtcttggtattggtttt

SEQ ID NO: 392116 - DNA, 75 bp, synthetic construct
  source 1..75: mol_type = other DNA
aactggttgaagaaatcgtatttgaagataacgccatcgtggatattggcgcgtcaaacgtagagcgttttcttt

SEQ ID NO: 392117 - DNA, 75 bp, synthetic construct
  source 1..75: mol_type = other DNA
aaaaactggcccgccgttatacctacatgaaacaggcaattcctgttaaagctaatctcgataaagcatatgcgg

SEQ ID NO: 392118 - DNA, 75 bp, synthetic construct
  source 1..75: mol_type = other DNA
agttttaaaggtgacgacttctcacgtttgattgaggatattgtttttgaagatgcaggcattattgatattggc

SEQ ID NO: 392119 - DNA, 75 bp, synthetic construct
  source 1..75: mol_type = other DNA
actcgcggttgccgcagagtcttcgccagaggcgttaaggattggctatcagaaaagcaacatcagttcggtgct

SEQ ID NO: 392120 - DNA, 75 bp, synthetic construct
  source 1..75: mol_type = other DNA
ctatgcagaaaaaaacggcgcttttattcagggcgtactggcaacctttagtgaggccgatgcgttaacccgcag

SEQ ID NO: 392121 - DNA, 75 bp, synthetic construct
  source 1..75: mol_type = other DNA
tacagcaacacactgccgacctgttttatgaaaatcgtctggtgccgaaaaaagtcgatatccgccaacgcatct

SEQ ID NO: 392122 - DNA, 75 bp, synthetic construct
  source 1..75: mol_type = other DNA
atatgttctggcatccatccgattagcattacgtgctacggatcttttcagcttagaggctctcatttcgccttg

SEQ ID NO: 392123 - DNA, 75 bp, synthetic construct
  source 1..75: mol_type = other DNA
ttcagaaaggttccagttcgcacaacctgttactacgcgcactgcaacaggccgggcttaaattcaccgatatcc

SEQ ID NO: 392124 - DNA, 75 bp, synthetic construct
  source 1..75: mol_type = other DNA
tggcgggattacttagcgtcactacgttcgcggttgctgcggggtcttcgtctgaagcgttacggataggttatc

SEQ ID NO: 392125 - DNA, 75 bp, synthetic construct
  source 1..75: mol_type = other DNA
cctgaaaaactcaaacgaagacacaatgcgaaataaagaagtagaacgcttcaaactgtggccaacttttcggga

SEQ ID NO: 392126 - DNA, 75 bp, synthetic construct
  source 1..75: mol_type = other DNA
ccatctcacactttggacatcgcatcgcagcctatgatgtgacgacactttatccgcttgctttgttcatttcga

SEQ ID NO: 392127 - DNA, 75 bp, synthetic construct
  source 1..75: mol_type = other DNA
aacgtttacgttctattggtgatgaaaaagcaatgctaattgaaaaccgaataaatattgagttatgccccggca

SEQ ID NO: 392128 - DNA, 75 bp, synthetic construct
  source 1..75: mol_type = other DNA
tcaaactcattttattcaaagttttaatgttgaaaatattgacgatctccgggacgtattctctgatagtttcac

SEQ ID NO: 392129 - DNA, 75 bp, synthetic construct
  source 1..75: mol_type = other DNA
atatcgtgttccattctatcaacgtgcctacgtatggacgcaacgaaaccaatggtcagctttgctggaggatat

SEQ ID NO: 392130 - DNA, 75 bp, synthetic construct
  source 1..75: mol_type = other DNA
ctgaacatgaaaatattaatgctgttgaattatatgagaatgagtggaagatctttgaagatacgtactggtcag

SEQ ID NO: 392131 - DNA, 75 bp, synthetic construct
  source 1..75: mol_type = other DNA
ccatgatgggcaagcgccagacagaagaggctgttcgcgatctggaaaaactacttggctatcgtgaaacaaaac

SEQ ID NO: 392132 - DNA, 75 bp, synthetic construct
  source 1..75: mol_type = other DNA
gcaaaatgggtcgaaaatgtgaaaagtggtgcctatcagtcatggattgcacagaactatgagggccgccagtaa

SEQ ID NO: 392133 - DNA, 75 bp, synthetic construct
  source 1..75: mol_type = other DNA
gcagtgatgcacctggctgctgaaagccatgtggatcgttcaattacaggccctgcggcatttattgaaaccaat

SEQ ID NO: 392134 - DNA, 75 bp, synthetic construct
  source 1..75: mol_type = other DNA
gaattacccttatttactgagacgacagcttacgcgccaagcagcccttattccgcatcaaaagcatccagcgat

SEQ ID NO: 392135 - DNA, 75 bp, synthetic construct
  source 1..75: mol_type = other DNA
tctttatcaacgcgctatgggcttcgtggctccagacatcgatattcgtgttattgaaaacagaattgtcgaaac

SEQ ID NO: 392136 - DNA, 75 bp, synthetic construct
  source 1..75: mol_type = other DNA
gacaaacaggaagtagaacacactggagaggttagcctgattcagcgcattcatgaggcccgtaaacgcgcaagg

SEQ ID NO: 392137 - DNA, 75 bp, synthetic construct
  source 1..75: mol_type = other DNA
gtggacacaacgaaaagaaaaacatcgatgtagtgctcactatttgtgatttgctggatgagattgtaccgaaag

SEQ ID NO: 392138 - DNA, 75 bp, synthetic construct
  source 1..75: mol_type = other DNA
gaaaacggcggttaacgtgattggttataccgacagcacgggtggtcacgacctgaacatgcgtctctcccagca

SEQ ID NO: 392139 - DNA, 75 bp, synthetic construct
  source 1..75: mol_type = other DNA
aatctgctatcggcgcaggtctgggctctctcgtgggcgcgggtattggtgcgctctcttcttcgaagaaagatc

SEQ ID NO: 392140 - DNA, 75 bp, synthetic construct
  source 1..75: mol_type = other DNA
gcatgggatggtcagaaagccggaacggcagtgggcgtgctggctctggcgcttgccggaacagaacccacactg

SEQ ID NO: 392141 - DNA, 75 bp, synthetic construct
  source 1..75: mol_type = other DNA
cgttatgtttttgaacatgcggatatttgcgatgctgctgcaatgacacggatttttgctcagcatcaaccggat

SEQ ID NO: 392142 - DNA, 75 bp, synthetic construct
  source 1..75: mol_type = other DNA
atgaaaatagttattactggtggcgcaggatttattggttcagctgtaattcgtcacattataaataatacgcag

SEQ ID NO: 392143 - DNA, 75 bp, synthetic construct
  source 1..75: mol_type = other DNA
ttgatcacccagggcgtggacgccagccgcatccgtactcagggccttggcccggctaacccaatcgccagcaac

SEQ ID NO: 392144 - DNA, 75 bp, synthetic construct
  source 1..75: mol_type = other DNA
gaacaggtattacgtaaccagccagcattgtccgcatttacgtcagaaattaatgccatcagtgccacgatcaca

SEQ ID NO: 392145 - DNA, 75 bp, synthetic construct
  source 1..75: mol_type = other DNA
cccgcagagcggcagcggaaattaaaaagtttgaaaaacgcgatctggcccaggcggtgattaacgccgcatacc

SEQ ID NO: 392146 - DNA, 75 bp, synthetic construct
  source 1..75: mol_type = other DNA
gtcagcttgccaaagacattcagaccgcgcgtgagcatacgcttcgtgagataggtcaaagatatcaatttatgt

SEQ ID NO: 392147 - DNA, 75 bp, synthetic construct
  source 1..75: mol_type = other DNA
gtggaaattaaaaagtttgagaaacgtgatctggcacaggcggttattaatgctgcctatctggtggcctatgca

SEQ ID NO: 392148 - DNA, 75 bp, synthetic construct
  source 1..75: mol_type = other DNA
gcagagcggcaacggaaattaaaaagtttgaaaaacgcgatctggcacaggcggtgattaacgctgcatacctgg

SEQ ID NO: 392149 - DNA, 75 bp, synthetic construct
  source 1..75: mol_type = other DNA
gtgatctggcacaggcggttattaatgctgcctatctggtggcctatgcagatggtgaatgtgaggcttcagaga

SEQ ID NO: 392150 - DNA, 75 bp, synthetic construct
  source 1..75: mol_type = other DNA
cattcgccacgagaatggccggggtccgctaaaaacgctgaacacctggtatgcggcagaagttattgaggaagg

SEQ ID NO: 392151 - DNA, 75 bp, synthetic construct
  source 1..75: mol_type = other DNA
agtaagatctttttcgatgaaatagaacgaattgtgttaagggagaataataagaaagattggactgagattgca

SEQ ID NO: 392152 - DNA, 75 bp, synthetic construct
  source 1..75: mol_type = other DNA
attatcgttggctatgaaggtgataaaataaaaaaacactgtaaatatattaaagatctcaatattacaataata

SEQ ID NO: 392153 - DNA, 75 bp, synthetic construct
  source 1..75: mol_type = other DNA
aaagtttgagaaacgtgatctggcacaggcggttattaatgctgcctatctggtggcctatgcagatggtgaatg

SEQ ID NO: 392154 - DNA, 75 bp, synthetic construct
  source 1..75: mol_type = other DNA
gagttccagaacgagtacggtgcaagccgtgctgaagttatcagggcagcactggctgcgttacgtctggtatca

SEQ ID NO: 392155 - DNA, 75 bp, synthetic construct
  source 1..75: mol_type = other DNA
gccggaagaccaaccgttaataaatagtgcgcatcattacacaccattaaaggtaataaactatacagatttaag

SEQ ID NO: 392156 - DNA, 75 bp, synthetic construct
  source 1..75: mol_type = other DNA
tggttgaaagtggcaaccggtgggatcgccaaatgcacacagtacggtaacaatggcacgctatcggtcagcgac

SEQ ID NO: 392157 - DNA, 75 bp, synthetic construct
  source 1..75: mol_type = other DNA
gctacccaacaacctatggtaatgtgcttcatctcactggtgtaaccgcagtaggagagggtgagttacttattg

SEQ ID NO: 392158 - DNA, 75 bp, synthetic construct
  source 1..75: mol_type = other DNA
tgcggcaactatcaccctgattaccctggtcggttattccgcgatgggtggtgcagtcggtgccggtggtttagg

SEQ ID NO: 392159 - DNA, 75 bp, synthetic construct
  source 1..75: mol_type = other DNA
gttattccgcgatgggtggcgcagtcggtgccggtggcctgggtcagattggctatcaatatggttacatcggct

SEQ ID NO: 392160 - DNA, 75 bp, synthetic construct
  source 1..75: mol_type = other DNA
ttgtcaaaatcggcatggatgtgatgaagaacacccccagcgagatgtttgccaacgcgatcatttccggctggc

SEQ ID NO: 392161 - DNA, 75 bp, synthetic construct
  source 1..75: mol_type = other DNA
tgataagcgtggtatgcgttatgtgcgggttaacgctcctgcaggtgcaacatctggaaaatattaccctgttgt

SEQ ID NO: 392162 - DNA, 75 bp, synthetic construct
  source 1..75: mol_type = other DNA
tgctccggcatttattcgttcacgacgggatacgaccgacgcaaactggtcgccgtgggcgcagctttacacctc

SEQ ID NO: 392163 - DNA, 75 bp, synthetic construct
  source 1..75: mol_type = other DNA
aaaaaattattctcgatcaggccggtggtttattggtcaacgggacgacttcatctgcaatagtggatgatggcg

SEQ ID NO: 392164 - DNA, 75 bp, synthetic construct
  source 1..75: mol_type = other DNA
tcagcggtcgtggtagatgaaggtggtgaattgttggtgtatccaggtggggaagccagcaattgtgagattaat

SEQ ID NO: 392165 - DNA, 75 bp, synthetic construct
  source 1..75: mol_type = other DNA
gggtggtcgggctgaagtgcatgccggtacgctggaaaatgcggtaatacaaggtggaacagtgatcctgttgtc

SEQ ID NO: 392166 - DNA, 75 bp, synthetic construct
  source 1..75: mol_type = other DNA
tggtgctgatctcgttgttaatgatacgacctataagtttggggcaacaaatccagcgactgaatgtatcgcggc

SEQ ID NO: 392167 - DNA, 75 bp, synthetic construct
  source 1..75: mol_type = other DNA
cagagaaacgtctgcagaaagaccagaacggcgctgatatacccgataagggacgcttcctgaacaacattaacg

SEQ ID NO: 392168 - DNA, 75 bp, synthetic construct
  source 1..75: mol_type = other DNA
gacggacggtctacagctctacagttccggtaaggctaaagatttggcggtgaatacggggggacgggctgaaat

SEQ ID NO: 392169 - DNA, 75 bp, synthetic construct
  source 1..75: mol_type = other DNA
cctactcgagcgaaatacgccgggcatggaaccagagccggggctctgcaggcgcacgcacgctggctgaaatgc

SEQ ID NO: 392170 - DNA, 75 bp, synthetic construct
  source 1..75: mol_type = other DNA
ccagcctgctgcgcatgtcgaacgtcaccatccttgtgacgaagggacggcggcaagccgcgttccacctgatga

SEQ ID NO: 392171 - DNA, 75 bp, synthetic construct
  source 1..75: mol_type = other DNA
ttcgtcggattcgaacctctcggggccgatgatatgcgtcttttgcaaggcatcgtggcccttggcggcccgaac

SEQ ID NO: 392172 - DNA, 75 bp, synthetic construct
  source 1..75: mol_type = other DNA
gtatcgcgctgccgctaaacggtggctaccgtcagtatgccgggcgtaaaatgactctcggcattcgcccggaac

SEQ ID NO: 392173 - DNA, 75 bp, synthetic construct
  source 1..75: mol_type = other DNA
aggccccgcaggaaaggatggtgccgccggagcggaaggtaaggcaggtccggcagggccacgaggtgaaagggg

SEQ ID NO: 392174 - DNA, 75 bp, synthetic construct
  source 1..75: mol_type = other DNA
ttcaactaaacgtatctatatcaatgccagcgcgcggcaggcagaggatatgctcgcgcttatgcgtaaatctct

SEQ ID NO: 392175 - DNA, 75 bp, synthetic construct
  source 1..75: mol_type = other DNA
gtcgatagtggtggggggctcaagcacatacaggactgcatcgagcgcctttggaaggtatccatcatcgcccag

SEQ ID NO: 392176 - DNA, 75 bp, synthetic construct
  source 1..75: mol_type = other DNA
ggagccgaagggtgtccccgcccccgggagtcagaacaacagaaacgacaaaacagaaaaatgcctcacactatg

SEQ ID NO: 392177 - DNA, 75 bp, synthetic construct
  source 1..75: mol_type = other DNA
atcactgatgtgctgactgctagcggtaaagcgggtgagtccggtactctggcccgttcgctggatgccatcgct

SEQ ID NO: 392178 - DNA, 75 bp, synthetic construct
  source 1..75: mol_type = other DNA
ctgcgcgggtttgcctacctgtctgcctatggctgcaagacggtggaggaagccattgcttaccgggacaatttc

SEQ ID NO: 392179 - DNA, 75 bp, synthetic construct
  source 1..75: mol_type = other DNA
ggacgttggggcgaacagaagctggtggtgcgactggcgcatcaggagcgcccgacggcaggcagcacgctgtgg

SEQ ID NO: 392180 - DNA, 75 bp, synthetic construct
  source 1..75: mol_type = other DNA
tgaaaacgacatcgctctacgtcacccacgatcaggttgaggcgatgacgcttgcccaacgggtaatggtgatga

SEQ ID NO: 392181 - DNA, 75 bp, synthetic construct
  source 1..75: mol_type = other DNA
ggcacgcatttcgaactggacggcggtattgagctgccgctaaacggtggctaccgtcagtatgccgggcgtaaa

SEQ ID NO: 392182 - DNA, 75 bp, synthetic construct
  source 1..75: mol_type = other DNA
gcattattcatggtgctggcgaaccggtacgactggcagttattcattgaggtaacaggtccagggggaagtggt

SEQ ID NO: 392183 - DNA, 75 bp, synthetic construct
  source 1..75: mol_type = other DNA
gtcagacctgctaacagatcatttgcatatgtacatgttgatgggctaacgggtagcacaggctttgccgttatt

SEQ ID NO: 392184 - DNA, 75 bp, synthetic construct
  source 1..75: mol_type = other DNA
caacaatgtcaacaagagctagtcttaacaatgaaatgataagtcggctggaaataagttatcctgatcgtaata

SEQ ID NO: 392185 - DNA, 75 bp, synthetic construct
  source 1..75: mol_type = other DNA
cagaaataagtaaatcagcttttaaaacaattaaattacttattccttcttcggatataattaccgagttttcac

SEQ ID NO: 392186 - DNA, 75 bp, synthetic construct
  source 1..75: mol_type = other DNA
attcattgcagggcactgacatggtgggaatggcgggggcaggagacagaaaggaatgtgtgttcttagttcagg

SEQ ID NO: 392187 - DNA, 75 bp, synthetic construct
  source 1..75: mol_type = other DNA
taggtagtgttactggcacaactgtgaaacacacatcacccagtaaaatactaagccacgttatatctcactctg

SEQ ID NO: 392188 - DNA, 75 bp, synthetic construct
  source 1..75: mol_type = other DNA
ttatatctcactctgaaaatggtgaagttgaacgaaaatttgattctatatgttcaaatatttcattagcaatat

SEQ ID NO: 392189 - DNA, 75 bp, synthetic construct
  source 1..75: mol_type = other DNA
ctggcagtgctgaaccgctgtctggcgctgattaaggccgaggccagtgcgaaaaaagcgctgaaagccgcacag

SEQ ID NO: 392190 - DNA, 75 bp, synthetic construct
  source 1..75: mol_type = other DNA
agcgaacggtgccgggctacagccggatggtgccctccagcgagatcgccggaaatgattacaacctgaatattc

SEQ ID NO: 392191 - DNA, 75 bp, synthetic construct
  source 1..75: mol_type = other DNA
ccagctttgacgatatggttgcgctgaaaaatgacaaagagatcggcgacaaaatcaacaaaatcatccacaagc

SEQ ID NO: 392192 - DNA, 75 bp, synthetic construct
  source 1..75: mol_type = other DNA
accctgcgttgttattgcgggtcgcgcgatgcagttgggcgacgccatcaaaatcatgaacgacaggctgaaacc

SEQ ID NO: 392193 - DNA, 75 bp, synthetic construct
  source 1..75: mol_type = other DNA
tgccttttctcccgcaggcttttgcgttgacgacgccgcgctctatttctcgtttgaagaaaagtgccgcgattt

SEQ ID NO: 392194 - DNA, 75 bp, synthetic construct
  source 1..75: mol_type = other DNA
ttgagtcagggaaaataaggggtatcacgatgaaaatgcttaaatcgcgaaagctgaaggccgcggaatataaat

SEQ ID NO: 392195 - DNA, 75 bp, synthetic construct
  source 1..75: mol_type = other DNA
ccggtcgagttgacggaacaggcgcgcgagcagggcatccgttgcttttgcggttatggtctgacggagttcgcc

SEQ ID NO: 392196 - DNA, 75 bp, synthetic construct
  source 1..75: mol_type = other DNA
aaaacacattttcggcgttaacgtcgctgcacattcagctggttgaaggcgtacatgctgcggcgtggcagccaa

SEQ ID NO: 392197 - DNA, 75 bp, synthetic construct
  source 1..75: mol_type = other DNA
tccacggtgtgtgcgaaagaagccgatggtctggtggacgtcggttcgccgctgcccggtcgggaagtgaaaatc

SEQ ID NO: 392198 - DNA, 75 bp, synthetic construct
  source 1..75: mol_type = other DNA
gttctgttccgggcaaaacctattccagcaaagcgctgagagatcccctcataatttccccaaagcgtaaccatg

SEQ ID NO: 392199 - DNA, 75 bp, synthetic construct
  source 1..75: mol_type = other DNA
ttttattgccattgctggaagcaccgcgcaagggggcgtgatccatttttatggccaaattgtggaaccggcatg

SEQ ID NO: 392200 - DNA, 75 bp, synthetic construct
  source 1..75: mol_type = other DNA
atgttcagaccttttttagactctctaatgctcggcagtatgttttttccttttattgccatcgcaggaagcagc

SEQ ID NO: 392201 - DNA, 75 bp, synthetic construct
  source 1..75: mol_type = other DNA
ctgccagcggattcgctcggcctgaaatccgccccggcgatattttccgggataaatacggcagcacggtaatga

SEQ ID NO: 392202 - DNA, 75 bp, synthetic construct
  source 1..75: mol_type = other DNA
gtttgtggtgatctccagcagcttcccgtggtatgccgattttgtgcgcgagagttttatcagcgtgcatcagta

SEQ ID NO: 392203 - DNA, 75 bp, synthetic construct
  source 1..75: mol_type = other DNA
tatgactgcgtgatgcctgtttatcagttccggcgtgattttaagctggtgggccatcgtaaagccgtaaatcag

SEQ ID NO: 392204 - DNA, 75 bp, synthetic construct
  source 1..75: mol_type = other DNA
gacgactggttgctttctttgccgctattccatgtctccggccaggggattatgtggcgctggttgtatgctggc

SEQ ID NO: 392205 - DNA, 75 bp, synthetic construct
  source 1..75: mol_type = other DNA
ccgcctgaactgaaaaacggcggtattaaaatttcacgtcaggcgctaaaagagtgggtgcaacgccagcaataa

SEQ ID NO: 392206 - DNA, 75 bp, synthetic construct
  source 1..75: mol_type = other DNA
ctgtactcacgcttcactggtgccaacacaactctggcgtttgctggttaaccgcagttccgtttccctgaaagc

SEQ ID NO: 392207 - DNA, 75 bp, synthetic construct
  source 1..75: mol_type = other DNA
ttgccgccgtaaatcattacctggccggtcatgctggcatcatttctacggcaaaactatttcaactttctcaca

SEQ ID NO: 392208 - DNA, 75 bp, synthetic construct
  source 1..75: mol_type = other DNA
ataaatcagcaatagaaaagacggtagcggataataagaaagatgcggacacgaagatcaccaatcttactagta

SEQ ID NO: 392209 - DNA, 75 bp, synthetic construct
  source 1..75: mol_type = other DNA
atgcaatcaatccaatttaaacgcacacagacggcgggtaaaaaaccaacgccggaacaattatcacagggtgag

SEQ ID NO: 392210 - DNA, 75 bp, synthetic construct
  source 1..75: mol_type = other DNA
aaacgggaaaaagcgaacggttccaatatcggcagagctggagaaggagatcaagaccagtgacaccgggccatt

SEQ ID NO: 392211 - DNA, 75 bp, synthetic construct
  source 1..75: mol_type = other DNA
cgaaggtgcattaattcttgaaagagatagccgtgctgcccgttttagcaacaacgtattcttagaaaaaggatt

SEQ ID NO: 392212 - DNA, 75 bp, synthetic construct
  source 1..75: mol_type = other DNA
aattaaaccttctgttggtgttattgatgggcgcatcattactctattcaatacagaaaacaaacgaggtgtgtt

SEQ ID NO: 392213 - DNA, 75 bp, synthetic construct
  source 1..75: mol_type = other DNA
actaccgaaggaaaattaacgtggggcaaaaatacagctacttctagctttaatatccgtgcgtggggtgctgat

SEQ ID NO: 392214 - DNA, 75 bp, synthetic construct
  source 1..75: mol_type = other DNA
gtttcatcagcagcggaaaggcctagtccaggtggtacgcatctgcattgctgtacaggcctctgataccggcgc

SEQ ID NO: 392215 - DNA, 75 bp, synthetic construct
  source 1..75: mol_type = other DNA
agagcgccaatttaagcggcagaataagttgaacgcctggctggatagtccggaaatacgccaattctgcaagct

SEQ ID NO: 392216 - DNA, 75 bp, synthetic construct
  source 1..75: mol_type = other DNA
attgaaagttgcacgaaccattgctgatattgatcagtctgacattatcacacgtcagcatttgcaggaggcagt

SEQ ID NO: 392217 - DNA, 75 bp, synthetic construct
  source 1..75: mol_type = other DNA
atggtttatgctcaccttgcacctgattacctgcaacacgcagtaacgttaaaccctcttggcggcgggctgacg

SEQ ID NO: 392218 - DNA, 75 bp, synthetic construct
  source 1..75: mol_type = other DNA
ctaaccgcacttttatctggcgataatcttaaggctgtattgttaagcctggctacaggcgggcgctggggtgaa

SEQ ID NO: 392219 - DNA, 75 bp, synthetic construct
  source 1..75: mol_type = other DNA
gagttccagttgtttcatcagcagcggaaaggcctagtccaggtggtacgcatccgcgtcgctgaaccggcctct

SEQ ID NO: 392220 - DNA, 75 bp, synthetic construct
  source 1..75: mol_type = other DNA
gaaggccacgccccgcagtaaacctaccagcagggaaaaagagcgggaaaatatccagaaaatgaaaagcatgat

SEQ ID NO: 392221 - DNA, 75 bp, synthetic construct
  source 1..75: mol_type = other DNA
ccgctggcaacattttgtgcgtcgtaacaacatttcagacccgctttttgtgccggggggaagtactgtggaggt

SEQ ID NO: 392222 - DNA, 75 bp, synthetic construct
  source 1..75: mol_type = other DNA
tttgtccgcagaaacaatatccccgatccggtttttgttccgggtggccgccgcgtggaggtgatcagtgagcag

SEQ ID NO: 392223 - DNA, 75 bp, synthetic construct
  source 1..75: mol_type = other DNA
acgacatacaggagctgctgattggcaaatcagccggtagcgtagcggcggcaaacatcatcatcgcctataacg

SEQ ID NO: 392224 - DNA, 75 bp, synthetic construct
  source 1..75: mol_type = other DNA
tgggcactccggcagaaactgacgcggagttacgtatccgccagtcgcaaagtgttgcgttgccatcaataaccc

SEQ ID NO: 392225 - DNA, 75 bp, synthetic construct
  source 1..75: mol_type = other DNA
ctcaggctatcagagggaataaaggccaggggacagccactcacggtacaacatccgttacggttccggataaat

SEQ ID NO: 392226 - DNA, 75 bp, synthetic construct
  source 1..75: mol_type = other DNA
attaaaagtttttacgggttatacctcacagatagggcagcagatccagcaggctatttccgactatatcaatag

SEQ ID NO: 392227 - DNA, 75 bp, synthetic construct
  source 1..75: mol_type = other DNA
ccctgctcccaggaattgcttacgccgaagagcttcctgcgcccgttaaagcgattgaaaaacagggaattacga

SEQ ID NO: 392228 - DNA, 75 bp, synthetic construct
  source 1..75: mol_type = other DNA
aacccgcgatgcgtttgtcaaaatcggcatggatgtgatgaaaaacacccccagcgagatgtttgccaacgcgat

SEQ ID NO: 392229 - DNA, 75 bp, synthetic construct
  source 1..75: mol_type = other DNA
atggacaatgacaaaatagataaacacagcgacgaacttgaagtagagagcgaagaaaaagaacgcgggaaaaaa

SEQ ID NO: 392230 - DNA, 75 bp, synthetic construct
  source 1..75: mol_type = other DNA
taaatcagcaggatccgtagcatcggcaaacataaccatagcctacgacgaatcagcttcatgtaaaccggcaaa

SEQ ID NO: 392231 - DNA, 75 bp, synthetic construct
  source 1..75: mol_type = other DNA
atggccctcaatttggacacgctcggcttatcggcaacggtaaccgctgaggggatcagcgcgcctgattaccag

SEQ ID NO: 392232 - DNA, 75 bp, synthetic construct
  source 1..75: mol_type = other DNA
cacaagctgtatgagaacgacacaggagcaaccgacagcaatggtctgccgccgcattcaatttccgcgattgtt

SEQ ID NO: 392233 - DNA, 75 bp, synthetic construct
  source 1..75: mol_type = other DNA
caggattaggtttgcaatgtacctatctgactgccagaggcaccagcacggtacaatacttgcacactaaaagtg

SEQ ID NO: 392234 - DNA, 75 bp, synthetic construct
  source 1..75: mol_type = other DNA
atgaaaaagaaaatttctggcttaactgctagtggcaacactcaccctaaatttacgcgcggcgatatttaccgc

SEQ ID NO: 392235 - DNA, 75 bp, synthetic construct
  source 1..75: mol_type = other DNA
gaagatgcagcgcaagcaattgactcttattataaagatagaccattgggtagcattggtacgtttggaactttt

SEQ ID NO: 392236 - DNA, 75 bp, synthetic construct
  source 1..75: mol_type = other DNA
cagaatctgcaagtaagctcatcacaaataaaacgaaagcaataattgttgtgcactatgccggtgtagcatgcg

SEQ ID NO: 392237 - DNA, 75 bp, synthetic construct
  source 1..75: mol_type = other DNA
aactgggcggcaatgacggtttgcgtggttttcagccacagcaaaccgagcaaacgctgcgccagattttgcagg

SEQ ID NO: 392238 - DNA, 75 bp, synthetic construct
  source 1..75: mol_type = other DNA
gcaggccgtgccacgtggtaagccagccagcaacgcaaaagcagaggcgaacatccgaaagatgaaaaacatgat

SEQ ID NO: 392239 - DNA, 75 bp, synthetic construct
  source 1..75: mol_type = other DNA
taatagctgtcagccctgcctcataccaaattacttcccctaggaataacgaaccggatacgctaaaagaattag

SEQ ID NO: 392240 - DNA, 75 bp, synthetic construct
  source 1..75: mol_type = other DNA
ttattctcggtagcctgtttttctctttctttacaatcgctggtaacaatgtgcaaggtggtgttatccattttc

SEQ ID NO: 392241 - DNA, 75 bp, synthetic construct
  source 1..75: mol_type = other DNA
ttgattggaagcaaagagaatgccgcaggattaggtttgcaatgtacctatctgactgccagaggcggctttgtt

SEQ ID NO: 392242 - DNA, 75 bp, synthetic construct
  source 1..75: mol_type = other DNA
gtgcagtatctgcacacaaaaagtggatttttcgggataacagattgcccgctgttacgtaaaagcagtgttgtg

SEQ ID NO: 392243 - DNA, 75 bp, synthetic construct
  source 1..75: mol_type = other DNA
gaaatacggatttaagaaagccttattgaccacatcttgtacagacgccttggagatggcagccattcttttaga

SEQ ID NO: 392244 - DNA, 75 bp, synthetic construct
  source 1..75: mol_type = other DNA
ggtgcgtgcctcccgcgcacgcggtgtactgatgaccagcaatgccgccggagagctggtattcagccgggctgc

SEQ ID NO: 392245 - DNA, 75 bp, synthetic construct
  source 1..75: mol_type = other DNA
gtaaaaataacctgtatgcagaatggggtcgttcatactcaatcttattccggcaaggaacttatgagcggcaaa

SEQ ID NO: 392246 - DNA, 75 bp, synthetic construct
  source 1..75: mol_type = other DNA
ggccgtcggctggctgcagaaataccgcaatgaagccccgacgcgcgtgatgagcaacatcaccgacgctgacgg

SEQ ID NO: 392247 - DNA, 75 bp, synthetic construct
  source 1..75: mol_type = other DNA
ggctggtggagcgcatggaaaaagccgctgcgtcgcttattgccggaatgaaccgccccgggaatcctggagact

SEQ ID NO: 392248 - DNA, 75 bp, synthetic construct
  source 1..75: mol_type = other DNA
tcaatgcctatcttacccgcgttgccgaactgaacggcatcagtgctgatgacgtcagcaagaaattcaccgtcg

SEQ ID NO: 392249 - DNA, 75 bp, synthetic construct
  source 1..75: mol_type = other DNA
atctcctgcagaaaccgatacaagactttcagaaaaagcaacttaagaattatgaggagaaattaaaagtctatg

SEQ ID NO: 392250 - DNA, 75 bp, synthetic construct
  source 1..75: mol_type = other DNA
ggctatcatccagggactggttgatagcataggtacgtcaggtttaatctccgatgaaggcggtgtgatttttaa

SEQ ID NO: 392251 - DNA, 75 bp, synthetic construct
  source 1..75: mol_type = other DNA
aaaaagctctgggagtggttaatgacaggttcattctggaataatacctctgtcgcgaagtcagagataagacgt

SEQ ID NO: 392252 - DNA, 75 bp, synthetic construct
  source 1..75: mol_type = other DNA
ggtgcctgctggaaaacatcaccatgggcgatttcactgcgccggaagctgaggcgaaagccgctgaaacaccgg

SEQ ID NO: 392253 - DNA, 75 bp, synthetic construct
  source 1..75: mol_type = other DNA
gcgacaaagagcgccagaccgcagatttcactgcgcttgagtccaacaagtacgagtgcgatcagattaactttg

SEQ ID NO: 392254 - DNA, 75 bp, synthetic construct
  source 1..75: mol_type = other DNA
aggctatcaaacaaaagctggtaaagcgtgggataaagatatttacagcgcgtggaagcgtcagggaagcaatgc

SEQ ID NO: 392255 - DNA, 75 bp, synthetic construct
  source 1..75: mol_type = other DNA
tatgtggtcgaggcttacgccgccggttgcctgattgaaaacatcaatctcggtgacttcactgcacctgccgca

SEQ ID NO: 392256 - DNA, 75 bp, synthetic construct
  source 1..75: mol_type = other DNA
tatgtggtcgaggcgtatgccgccgggtgcctgctggaaaacatcaccctcggcgatttcaccgcacctgcagca

SEQ ID NO: 392257 - DNA, 75 bp, synthetic construct
  source 1..75: mol_type = other DNA
cgacctgtgggcgcgttttcaggacttccagcgccgcatccgcgacgccattgtccagcgtcaggcactggattt

SEQ ID NO: 392258 - DNA, 75 bp, synthetic construct
  source 1..75: mol_type = other DNA
gcaacctgataataaatcccttttcagagagggttgcatagtactggagttgacccaatcaaccttcacaggcat

SEQ ID NO: 392259 - DNA, 75 bp, synthetic construct
  source 1..75: mol_type = other DNA
atgatgacgctgcaggtgcttaaagggtatgtgtttgcgcttatctggctgcagacctggccattactgttcgcc

SEQ ID NO: 392260 - DNA, 75 bp, synthetic construct
  source 1..75: mol_type = other DNA
gtttaatgattgggatgttcccgatcatggtgatggctgccatgtttaatatgatgacgctgcaggtgcttaaag

SEQ ID NO: 392261 - DNA, 75 bp, synthetic construct
  source 1..75: mol_type = other DNA
ccagtgcctacagccatttttcttcatcggggctcagtgcaacatcgcaggctgcctccggcgtggtggacggga

SEQ ID NO: 392262 - DNA, 75 bp, synthetic construct
  source 1..75: mol_type = other DNA
gcggagcagatatgggacatgaatttcgacagcgatgccaacgtggttgaagtggccattaaacgacttcgggcc

SEQ ID NO: 392263 - DNA, 75 bp, synthetic construct
  source 1..75: mol_type = other DNA
gcagcacggggctcggtcgacgaacgcgtcaaagggctgcgtctgggagcagatgattatctccctaaacccttt

SEQ ID NO: 392264 - DNA, 75 bp, synthetic construct
  source 1..75: mol_type = other DNA
tgttctctctgagttgtcgcaggttcagctcaaaaactcggatattgcgaccaccgcgggttatattgccgtgat

SEQ ID NO: 392265 - DNA, 75 bp, synthetic construct
  source 1..75: mol_type = other DNA
ttgttttatatcgggtcgatcattgccgagcctgcgcgtgaaaccttaagtgcttcgctggcggacgcaagagct

SEQ ID NO: 392266 - DNA, 75 bp, synthetic construct
  source 1..75: mol_type = other DNA
agcaaaactggaacgaccattatcctgatgaagtatcgaaagcacagtcagcaattagcaaagctcttggagatg

SEQ ID NO: 392267 - DNA, 75 bp, synthetic construct
  source 1..75: mol_type = other DNA
aatcagacttctttcgataaaacaatcgctaatgcccatctaatagcggcagcaccagaccttttaaatgccctg

SEQ ID NO: 392268 - DNA, 75 bp, synthetic construct
  source 1..75: mol_type = other DNA
tggctgtcaatttccgggattattgtcgcagtagttgcgatgtcgaaatcattcctgggtacgtactttggcgtt

SEQ ID NO: 392269 - DNA, 75 bp, synthetic construct
  source 1..75: mol_type = other DNA
gaggcacgctgtacagcctgtacagcgtgctggcgtatggaggggggggagccccgctccccagcctgtacagcg

SEQ ID NO: 392270 - DNA, 75 bp, synthetic construct
  source 1..75: mol_type = other DNA
tatcctggtctggatctccacggcgctaaaaggctgggtgatgggctcgcgggaaaaagataccgacagcctgat

SEQ ID NO: 392271 - DNA, 75 bp, synthetic construct
  source 1..75: mol_type = other DNA
cgcaaatgtaggtgatatcaaatttaacgaaacatctgggaaatattacgttgcaataacttcaacaaaaaataa

SEQ ID NO: 392272 - DNA, 75 bp, synthetic construct
  source 1..75: mol_type = other DNA
tggtcagcatgccttcgcaactcttcactatggctcgttcttttaaagccgtagctaatggaaagatttatatcg

SEQ ID NO: 392273 - DNA, 75 bp, synthetic construct
  source 1..75: mol_type = other DNA
gcgcattcattttagtaatgactccagctctacccccagcaatgcggctatatcactgcaacatgcgagtctatt

SEQ ID NO: 392274 - DNA, 75 bp, synthetic construct
  source 1..75: mol_type = other DNA
ggtaaagcgctttcttccggcggtattgcgcgacctgcatttccaggcagcgccagccggagaacatacgttgtc

SEQ ID NO: 392275 - DNA, 75 bp, synthetic construct
  source 1..75: mol_type = other DNA
aagtgttgttgccagccgcatccaccctgacgagagtcattggtgaaatccgtgagcgtgcgacccgccgcttgt

SEQ ID NO: 392276 - DNA, 75 bp, synthetic construct
  source 1..75: mol_type = other DNA
gccatgatttgggtggttgttgagagtgcgctgatgtgcagtgggacgtcgcgtaaccgcgggcggttgcttgct

SEQ ID NO: 392277 - DNA, 75 bp, synthetic construct
  source 1..75: mol_type = other DNA
taaaccggagaagcgtactgtgcagactaacagttacgcgcggaagtttctgatgaactcacaatggcgtcccga

SEQ ID NO: 392278 - DNA, 75 bp, synthetic construct
  source 1..75: mol_type = other DNA
agagtcagtgggatgagatgatgcgaaccgctggttcgctgaagttgggtacaattcatgcgtcagaactcattc

SEQ ID NO: 392279 - DNA, 75 bp, synthetic construct
  source 1..75: mol_type = other DNA
acattacgggattcgatttttgtactggaaggacttcttgagcagcagacagggctgaatccagttgaaatcatg

SEQ ID NO: 392280 - DNA, 75 bp, synthetic construct
  source 1..75: mol_type = other DNA
gcgcaagatttgcacatcagtttatgtgcggtattgatggctgaagcctgtaatatcggactggaaccgctgata

SEQ ID NO: 392281 - DNA, 75 bp, synthetic construct
  source 1..75: mol_type = other DNA
gcgcctggctcagtaatgaacgtcccggcctgatgtttgattttgccacagcatggctgcttcagcacaaggtgc

SEQ ID NO: 392282 - DNA, 75 bp, synthetic construct
  source 1..75: mol_type = other DNA
gaaaaatttgcacctttactaagtataaatgacgaagcatcagtcttgctaagacttagcctattgattgagaat

SEQ ID NO: 392283 - DNA, 75 bp, synthetic construct
  source 1..75: mol_type = other DNA
gctggatgcgccgtaatggcgaagaaattatagatgaagatatcgctcggctatctcccctgatgcacgggcata

SEQ ID NO: 392284 - DNA, 75 bp, synthetic construct
  source 1..75: mol_type = other DNA
gcaaaacgtacggtgcgactgcactgaatggtgctgatctgtccgatcctaataacaccgttaaatctgttgcag

SEQ ID NO: 392285 - DNA, 75 bp, synthetic construct
  source 1..75: mol_type = other DNA
tgagctccgctgtaaccaacctgaacaacaccaccaccaacctgtctgaagcgcagtctcgtattcaggacgccg

SEQ ID NO: 392286 - DNA, 75 bp, synthetic construct
  source 1..75: mol_type = other DNA
catataacgacgcagcaaatggtgttaagaatgccacccagattggtagtctggttcaggttggtgctgatgcaa

SEQ ID NO: 392287 - DNA, 75 bp, synthetic construct
  source 1..75: mol_type = other DNA
gcgtgaacgtgctggcgaaagacggttcgatgaagattcaggttggcgcgaatgacgggcagaccatctctatcg

SEQ ID NO: 392288 - DNA, 75 bp, synthetic construct
  source 1..75: mol_type = other DNA
gcctgtcgctgttgactcagaacaacctgaacaaatctcagtcttccctgagctcagccattgagcgtctgtctt

SEQ ID NO: 392289 - DNA, 75 bp, synthetic construct
  source 1..75: mol_type = other DNA
caacatgtctcgtgcacagatcctgcaacaggcgggtacctctgttctggcgcaggccaaccaggttcctcagaa

SEQ ID NO: 392290 - DNA, 75 bp, synthetic construct
  source 1..75: mol_type = other DNA
ttgcccctacgacagccctatacaaaaatagtgcagggcaattgactgcaacaaaagttgaaaataaagcagcga

SEQ ID NO: 392291 - DNA, 75 bp, synthetic construct
  source 1..75: mol_type = other DNA
gcagcagatggttcactgacaactaaatctgacacaaacatagctggtacagggattgatgctacagcactcgca

SEQ ID NO: 392292 - DNA, 75 bp, synthetic construct
  source 1..75: mol_type = other DNA
agacagtttacaaaaatagcgctggcctttatacgacaaccaaagttgataacaaggctgccacactttccgatc

SEQ ID NO: 392293 - DNA, 75 bp, synthetic construct
  source 1..75: mol_type = other DNA
cgagtgataaacaagcgggtgctgctccgggtactgctctgacaagcggtaaagttcagactgcaaccaccacgc

SEQ ID NO: 392294 - DNA, 75 bp, synthetic construct
  source 1..75: mol_type = other DNA
accggtactaactctgattctgacctgtcatctattcaggacgaaatcaaatcccgtctggatgagattgaccgt

SEQ ID NO: 392295 - DNA, 75 bp, synthetic construct
  source 1..75: mol_type = other DNA
cgcagatcatccaacaggcgggtaactccgtgttgtctaaagctaaccaggtgccgcaacaagttctgtctctgc

SEQ ID NO: 392296 - DNA, 75 bp, synthetic construct
  source 1..75: mol_type = other DNA
cgcagatcatccagcaggcgggtaactctgtgctgtctaaggctaaccaggtgccgcaacaagttctgtctctgc

SEQ ID NO: 392297 - DNA, 75 bp, synthetic construct
  source 1..75: mol_type = other DNA
gtcggtgaacgataaggacaccctgaaagccgggaagctggcgatcgactacgactatacgccagtgccgccgct

SEQ ID NO: 392298 - DNA, 75 bp, synthetic construct
  source 1..75: mol_type = other DNA
actcccaatcctgactatagccccagattctctcattcagcgccgccagaaaacggagagttttgccctctgggg

SEQ ID NO: 392299 - DNA, 75 bp, synthetic construct
  source 1..75: mol_type = other DNA
ttataactatcatcgtcagtccatgaacgaccctacacagcaaaaaaactatttttatgtgaatttcccggcacc

SEQ ID NO: 392300 - DNA, 75 bp, synthetic construct
  source 1..75: mol_type = other DNA
tacgactacacgccagtgccgccacttgaaaacctgatgctgcgtcagcgcatcaccgatcagtacctggtgaat

SEQ ID NO: 392301 - DNA, 75 bp, synthetic construct
  source 1..75: mol_type = other DNA
taagaagccgtcccctaacaacgcacagacgatcccggaagaccatccgatgaaatgggaaaatagcccagtaca

SEQ ID NO: 392302 - DNA, 75 bp, synthetic construct
  source 1..75: mol_type = other DNA
aaaaaacaggtatgaaagccctgttatctgcccagtcacagctcggcgttaaaccgcgcattctcggcgtgccgg

SEQ ID NO: 392303 - DNA, 75 bp, synthetic construct
  source 1..75: mol_type = other DNA
acgcagccgcagttgggcatcagcgatccataccaacttaccgaagaacaatatcaggcggtgctgaaagtgctg

SEQ ID NO: 392304 - DNA, 75 bp, synthetic construct
  source 1..75: mol_type = other DNA
ggtgaatgtgaaaactgcggcgacttccgatgaaatggtcagtctgatgaccaaaggaggttacgatctggtcac

SEQ ID NO: 392305 - DNA, 75 bp, synthetic construct
  source 1..75: mol_type = other DNA
atgagcaagacatttgcccgcagcagcctgtgtgcgctcaccatgacaataatgactgcccacgccgccgagcct

SEQ ID NO: 392306 - DNA, 75 bp, synthetic construct
  source 1..75: mol_type = other DNA
acgccaacggcgaaaaagcggtcttcttcggcgcgatgtatgacctgaaaaactggaatcttccaggcttcgcca

SEQ ID NO: 392307 - DNA, 75 bp, synthetic construct
  source 1..75: mol_type = other DNA
ggatgctaaacctgcgacctggcagagcaatccggatgcgtactacgacaaaaaccggactattgaagagtctgc

SEQ ID NO: 392308 - DNA, 75 bp, synthetic construct
  source 1..75: mol_type = other DNA
ccaatggggtccgaacctgttgatgtacaacactaaaaccttcccgacgccgccggatagctggcaagtggtttt

SEQ ID NO: 392309 - DNA, 75 bp, synthetic construct
  source 1..75: mol_type = other DNA
gctggacaatgtattgcaggagtcaggacgcgaacgcacaattgccatgagtctgccagaattcgagcagtcgct

SEQ ID NO: 392310 - DNA, 75 bp, synthetic construct
  source 1..75: mol_type = other DNA
gcgccaaaatgcgcagcctgatcagtcagggctatctcattggtggcgattgctggctggatgagtcggtgaacg

SEQ ID NO: 392311 - DNA, 75 bp, synthetic construct
  source 1..75: mol_type = other DNA
ctgaccgatgtgctgaccgccagcggcaaagcgggtgagtccggcacgctggcgcgttcactggatgcgattgca

SEQ ID NO: 392312 - DNA, 75 bp, synthetic construct
  source 1..75: mol_type = other DNA
cacccgatccattaccacggtgagcaccgccatcgtgggcatggtctgcacgggcgatgatgccgatgcaaaaat

SEQ ID NO: 392313 - DNA, 75 bp, synthetic construct
  source 1..75: mol_type = other DNA
actacactcgcacggcgcaggtgctgacggacacaatggcagaagcgcacatgtgggcggtggacaaaccgctga

SEQ ID NO: 392314 - DNA, 75 bp, synthetic construct
  source 1..75: mol_type = other DNA
cgtatggctgcaagacagtgcaggaggcgatcacttaccgtgaaaactttagccagcgcgaagggatgctgatct

SEQ ID NO: 392315 - DNA, 75 bp, synthetic construct
  source 1..75: mol_type = other DNA
aaaccgcgcattcttggcgtgccaggccacgataacaaagccgttgcgactgaattgctgagcgtggcgcaaagc

SEQ ID NO: 392316 - DNA, 75 bp, synthetic construct
  source 1..75: mol_type = other DNA
aaagtgcgcaatggcgcggaagccatcacccaacagcgtcctcgctggacaccaatgaatctccaccaggcacag

SEQ ID NO: 392317 - DNA, 75 bp, synthetic construct
  source 1..75: mol_type = other DNA
actacacccgcacggcgcaggtactgacggacacaatggcagaagcgcacatgtgggcggtggacaaaccgctta

SEQ ID NO: 392318 - DNA, 75 bp, synthetic construct
  source 1..75: mol_type = other DNA
gtaaagcgggtgagtccggtactctggcccgttcgctggatgccatcgctcaccaggcaaaacccgtgaccgttg

SEQ ID NO: 392319 - DNA, 75 bp, synthetic construct
  source 1..75: mol_type = other DNA
gcccggaaaaaccggtttatctgtcggtgaaggcagacaactcgatgtttatcggtaacgatccggtcaccgatg

SEQ ID NO: 392320 - DNA, 75 bp, synthetic construct
  source 1..75: mol_type = other DNA
gcttctaccagcacgccgcagccgcgcccggaaaaaccggtttatctgtcggtgaaggcagacaactcgatgttt

SEQ ID NO: 392321 - DNA, 75 bp, synthetic construct
  source 1..75: mol_type = other DNA
cgggcaatacaacaaaagtcagtccatcaccttaagcccacagggcagcgaaaacagtctctatgccgggcactg

SEQ ID NO: 392322 - DNA, 75 bp, synthetic construct
  source 1..75: mol_type = other DNA
atcaggccaacgccctgaaagccgaaggccagcctgtcgctaccgttttcccgaaagagggcgttaccggttggg

SEQ ID NO: 392323 - DNA, 75 bp, synthetic construct
  source 1..75: mol_type = other DNA
ttatatcagaagttaattatgattttagtcacttagatccattcgtaatggtggtgaaaagtgatatggctagaa

SEQ ID NO: 392324 - DNA, 75 bp, synthetic construct
  source 1..75: mol_type = other DNA
gcagatctaccagcgttacccccaggcgacgatcaaattgcgcaactgggattatgattcactggatgcgattac

SEQ ID NO: 392325 - DNA, 75 bp, synthetic construct
  source 1..75: mol_type = other DNA
ggcaccgaagagatctatttcgccacgttccatctcggcgtggatgcggcattgaagttactgccagccataacc

SEQ ID NO: 392326 - DNA, 75 bp, synthetic construct
  source 1..75: mol_type = other DNA
aatgcaatgctttacaggatggcaaataaaccctcccatatgatatttgcgggtagtagtggtagtactgtgaaa

SEQ ID NO: 392327 - DNA, 75 bp, synthetic construct
  source 1..75: mol_type = other DNA
atgtataccggcatttattttttattatatttagaaatattaccatctggaagtgaatactggtttatcctactt

SEQ ID NO: 392328 - DNA, 75 bp, synthetic construct
  source 1..75: mol_type = other DNA
ccgaaatggtagatttacttatattaattagtaatgacgagcctaacggtgtttctgagaccaaagtgatttcta

SEQ ID NO: 392329 - DNA, 75 bp, synthetic construct
  source 1..75: mol_type = other DNA
agagactttgtaaaatctcaggtagagccgaaaattgatggggcataccaggaagccagaggaacggtcggaaat

SEQ ID NO: 392330 - DNA, 75 bp, synthetic construct
  source 1..75: mol_type = other DNA
ggggcgactggtaccggcatgtactgaacgccgttgcggcgtttatgcagaccgaaaactggaaaattatcgaga

SEQ ID NO: 392331 - DNA, 75 bp, synthetic construct
  source 1..75: mol_type = other DNA
cctgtcaaagatgatgattgccgaacaagtctgggacatgaattttgatagtgatgccaatgtggttgaagtcgc

SEQ ID NO: 392332 - DNA, 75 bp, synthetic construct
  source 1..75: mol_type = other DNA
gttaggcggtgatgtccgcctcaccagcgaaaccttaaaactggcgctagcgaaaggtttacaggatgcgggcgt

SEQ ID NO: 392333 - DNA, 75 bp, synthetic construct
  source 1..75: mol_type = other DNA
accggtatttataactaatagcgtaattgacaatattgacggttattgcttggaccttaacagagtggcggtagg

SEQ ID NO: 392334 - DNA, 75 bp, synthetic construct
  source 1..75: mol_type = other DNA
aaagaacgctaaccacaaattcgttcaggtttgggggaatggagcatcatttgactgcgttattctccgcaacag

SEQ ID NO: 392335 - DNA, 75 bp, synthetic construct
  source 1..75: mol_type = other DNA
atgcagcaaacgatgagttttttgagccacgatttgacacaaatgatgccgcgtccggtaagaggcgagcagggc

SEQ ID NO: 392336 - DNA, 75 bp, synthetic construct
  source 1..75: mol_type = other DNA
tggtttctggagctggctagcctggcgtttcgtcgcgggcgtcggttgcgcgatgatctgggtagtggtagaaag

SEQ ID NO: 392337 - DNA, 75 bp, synthetic construct
  source 1..75: mol_type = other DNA
taatctgctgtttatcatgatcgccagtgtgtcgtttatctacttactgatgctgctacgcaatgccggacacac

SEQ ID NO: 392338 - DNA, 75 bp, synthetic construct
  source 1..75: mol_type = other DNA
ttgtttttgaaagtggagaaaggttttgccatgtgatagataaaatatcaggagaacctttatattatccaaacc

SEQ ID NO: 392339 - DNA, 75 bp, synthetic construct
  source 1..75: mol_type = other DNA
ggcgactggatattatcgcctggccgggatacatcgaacgcggacaaactgataaacaatacgactgggtaacgc

SEQ ID NO: 392340 - DNA, 75 bp, synthetic construct
  source 1..75: mol_type = other DNA
ctctatcagacggtaaaaaaaataaagatagggtagatgcttttatagctgagttaaatcataaaagacctttgg

SEQ ID NO: 392341 - DNA, 75 bp, synthetic construct
  source 1..75: mol_type = other DNA
taagtctgagctaaagaaaaattttattatctacggtcctcagcttatttcttgtactaataacaacatgctaat

SEQ ID NO: 392342 - DNA, 75 bp, synthetic construct
  source 1..75: mol_type = other DNA
ccaaacgtagcggaactatcgcctttagcggcgcgtaccacgggcgcacgcattacacgctggcgctgaccggca

SEQ ID NO: 392343 - DNA, 75 bp, synthetic construct
  source 1..75: mol_type = other DNA
ggaaaatctactgcaaaaagccaatgacctgggccagaagctgaaagacggattgttggcaatcgccgaaaaaca

SEQ ID NO: 392344 - DNA, 75 bp, synthetic construct
  source 1..75: mol_type = other DNA
gattcgctccgtttgcagttctacgacggcacacgctggcaggagagctggtcatcacttcaggcgatcccagtg

SEQ ID NO: 392345 - DNA, 75 bp, synthetic construct
  source 1..75: mol_type = other DNA
tagcagtgtgagaggggagagccggatgagtaaggccggacatgtgtcgcttcgcagggcgttgtactatgcccg

SEQ ID NO: 392346 - DNA, 75 bp, synthetic construct
  source 1..75: mol_type = other DNA
cgggcgttccgcgaccgtctggcggctaatggcaagaaaggaaaggtgattctcggcgcgatgatgcgcaagctg

SEQ ID NO: 392347 - DNA, 75 bp, synthetic construct
  source 1..75: mol_type = other DNA
aatggtagccacagtaagactgagtggggacgggcgttccgcgaccgtctggcggctaatggcaagaaaggaaag

SEQ ID NO: 392348 - DNA, 75 bp, synthetic construct
  source 1..75: mol_type = other DNA
aggatcaccaccgcaacgactaccagcgtttccggtgcaaaagtaaacgccgaatttatttacgtttacaatggg

SEQ ID NO: 392349 - DNA, 75 bp, synthetic construct
  source 1..75: mol_type = other DNA
caggcctcagccagtgccaccgccgccggaaaatcggcagaaagcgccgcctcgtccgcttcaacagccacaacg

SEQ ID NO: 392350 - DNA, 75 bp, synthetic construct
  source 1..75: mol_type = other DNA
cgcgaagaagtcagccagcgatgccggcacatcagcccgtgaggcggcaactcatgcaaccgatgctgcaggctc

SEQ ID NO: 392351 - DNA, 75 bp, synthetic construct
  source 1..75: mol_type = other DNA
gcgggctgacagaagtacatcatgccccggaaaatcataagccggatccggaatggtactgctcctctctttgtc

SEQ ID NO: 392352 - DNA, 75 bp, synthetic construct
  source 1..75: mol_type = other DNA
ggcacgctgtgcctgggcatacgctgacagcgcctccataccagacagtgaaactgggtgcggcattattccact

SEQ ID NO: 392353 - DNA, 75 bp, synthetic construct
  source 1..75: mol_type = other DNA
gacaccacttgagataggaacttacagcatatcggagattaacaatttaaacaggaattttctcacatcgtcaag

SEQ ID NO: 392354 - DNA, 75 bp, synthetic construct
  source 1..75: mol_type = other DNA
ggcgaagtgctcggcattgctggtctgctgggggcagggcgcagtgaattgctgaaggcgattgttgggctggag

SEQ ID NO: 392355 - DNA, 75 bp, synthetic construct
  source 1..75: mol_type = other DNA
atggctaacctacgcaaagaagcgcgcggcagagaatgccaggtacgtatttacggcgtatgcaatggtaatcct

SEQ ID NO: 392356 - DNA, 75 bp, synthetic construct
  source 1..75: mol_type = other DNA
ggatggctggaatttgcggaacgggaatgaagcctgacgacctgatcggcgcatgggcttgtagtgactgccacg

SEQ ID NO: 392357 - DNA, 75 bp, synthetic construct
  source 1..75: mol_type = other DNA
gcggcagagaatgccaggtacgtatttacggcatatgcaatggcaatcctgaaactacagttctggcacattacc

SEQ ID NO: 392358 - DNA, 75 bp, synthetic construct
  source 1..75: mol_type = other DNA
agcccggcgcaaaagcagctggtggaaattgcgcgggtgatgaagggcgagccgcgcgtggtcattcttgatgaa

SEQ ID NO: 392359 - DNA, 75 bp, synthetic construct
  source 1..75: mol_type = other DNA
ttgggctggaggagtatgaacagggcgaaattgttatcaacggcgagaaaatcacgcgccccgattacggcgaca

SEQ ID NO: 392360 - DNA, 75 bp, synthetic construct
  source 1..75: mol_type = other DNA
tttatttccgatgcaacggcgaatggtctgattctcatgaaactgccggaaacctggagtacaaatgagaaaatg

SEQ ID NO: 392361 - DNA, 75 bp, synthetic construct
  source 1..75: mol_type = other DNA
gcccttctcttgaagatctggacaaagttgcgcgagaacgggccgccaaccgccgcgccgatgccgcattgtgga

SEQ ID NO: 392362 - DNA, 75 bp, synthetic construct
  source 1..75: mol_type = other DNA
ctttttttagcctgcttcccgtactatattgggttcttaagatggggtttgaccggttacgctttgcgcttatgc

SEQ ID NO: 392363 - DNA, 75 bp, synthetic construct
  source 1..75: mol_type = other DNA
cagcgaactgcatattgccccgtcaacgtattaccactgtcagcaacagcgacattatccggataaacgcagtgc

SEQ ID NO: 392364 - DNA, 75 bp, synthetic construct
  source 1..75: mol_type = other DNA
gcctgttcaccggctacgacgcggaaaaacgcaagtacgataagtccacctggacttacgaactggacgaaaacg

SEQ ID NO: 392365 - DNA, 75 bp, synthetic construct
  source 1..75: mol_type = other DNA
caagcgagaagcagaccgatctgcaaacttacctcgctgccaacacgccaaaaccactgctggaaggccaggtca

SEQ ID NO: 392366 - DNA, 75 bp, synthetic construct
  source 1..75: mol_type = other DNA
tgtcagtgccgcagtcgagaatgcgaagcgccaaaataagcgcataaatgatcgttctgatgatcatgacgtgat

SEQ ID NO: 392367 - DNA, 75 bp, synthetic construct
  source 1..75: mol_type = other DNA
cctccgctgtatcaggaaaaattgccggagcgctggttgaagaagatcgcgtcaaaattctggcaatgattcagg

SEQ ID NO: 392368 - DNA, 75 bp, synthetic construct
  source 1..75: mol_type = other DNA
tctggcggccggagggatcagttttgccctgacggcatcggtcttctggctcagcaccggcgatcgcgatgctgc

SEQ ID NO: 392369 - DNA, 75 bp, synthetic construct
  source 1..75: mol_type = other DNA
ccggtacgcagttcatcaggaatcttgccgtggcatcttccggtgtggcaggtggtgctgtcgggtcagtggcgg

SEQ ID NO: 392370 - DNA, 75 bp, synthetic construct
  source 1..75: mol_type = other DNA
cacctgcgtggttagcgtctcttacaacgctgaagccagaaacctcggtaacggttaaatcgctgctcgattcat

SEQ ID NO: 392371 - DNA, 75 bp, synthetic construct
  source 1..75: mol_type = other DNA
ggtaaatcaactcaggcaatcagggttattaaaaactcattcagagttgaggctcacagaatcagcattcgacga

SEQ ID NO: 392372 - DNA, 75 bp, synthetic construct
  source 1..75: mol_type = other DNA
taaattaaacaatgtgctttataatggcatcattgattacaatcgtggtgttggtcgtcgtggccctgctggcac

SEQ ID NO: 392373 - DNA, 75 bp, synthetic construct
  source 1..75: mol_type = other DNA
tatgcacgcaggcaatttatcattttatttatctgaaccaccatttgcgctgacgcccgtctacgacatgctgcc

SEQ ID NO: 392374 - DNA, 75 bp, synthetic construct
  source 1..75: mol_type = other DNA
acaaggtgtactcacccaaacattgcgcgccgccgctgcccaccagccgggaattattagcgatattggtatcgg

SEQ ID NO: 392375 - DNA, 75 bp, synthetic construct
  source 1..75: mol_type = other DNA
cctttattcgcgccaccacctgcgacagcgaaggctacgccacctttgaagatgaggtgatgtatctcgacgcat

SEQ ID NO: 392376 - DNA, 75 bp, synthetic construct
  source 1..75: mol_type = other DNA
cttttattcgcgccaccacctgcgatagtgaaggctacgcctcatttgaagacgaagtcatgtatctcgacgcac

SEQ ID NO: 392377 - DNA, 75 bp, synthetic construct
  source 1..75: mol_type = other DNA
tggcggcatcctgtagcgggagaaattcccccggatgccttcattaactttgccgaatcgcaaaagatgattgtg

SEQ ID NO: 392378 - DNA, 75 bp, synthetic construct
  source 1..75: mol_type = other DNA
ttgcaccggattacctggcagatgccatgagatttaacccggtagccgacatggcatttaccggacaaaaagagc

SEQ ID NO: 392379 - DNA, 75 bp, synthetic construct
  source 1..75: mol_type = other DNA
aaagaagacggcctgcatttaatcgaaatcgcccctggcgtcgatttacaaaaagatattctcgacaaaatggat

SEQ ID NO: 392380 - DNA, 75 bp, synthetic construct
  source 1..75: mol_type = other DNA
gtcatggcacttacaccccggcacaacatctgcgctttcagcaacgcctgaattacattgacgatatgcaggagt

SEQ ID NO: 392381 - DNA, 75 bp, synthetic construct
  source 1..75: mol_type = other DNA
tatctggcaagtcaggagtcgagctacgtcaccgcagaagtgcatggcgtgtgcggcggcgagcatttaggctaa

SEQ ID NO: 392382 - DNA, 75 bp, synthetic construct
  source 1..75: mol_type = other DNA
atacatgctatgaatgcgagcgtaagttcaagcttacagctgagcattcagtatcgtggacaacgattcgctcaa

SEQ ID NO: 392383 - DNA, 75 bp, synthetic construct
  source 1..75: mol_type = other DNA
gcacagaagctgctctcagcaattttatgcaggcgaatggggcagccctgacatctgcactggctccgttcctga

SEQ ID NO: 392384 - DNA, 75 bp, synthetic construct
  source 1..75: mol_type = other DNA
atgacggcccgggccactcctgcgcaggcgcttaccagttttcgaaacgcccgtattctgtgggctggacatagt

SEQ ID NO: 392385 - DNA, 75 bp, synthetic construct
  source 1..75: mol_type = other DNA
atgacggcccgggccactcctgcgcaggcacttaccagttttcgaaatgcccgtattctgtgggccggacatagt

SEQ ID NO: 392386 - DNA, 75 bp, synthetic construct
  source 1..75: mol_type = other DNA
agaaaaagtactgccggtaggcgtcaaatttggcattaacattgcgccggaccatctgcatagcgaaagctttaa

SEQ ID NO: 392387 - DNA, 75 bp, synthetic construct
  source 1..75: mol_type = other DNA
aaagataatcaggataataacgggtattatgactggaaagatacctggatgtttggcacatctttaacgcagaaa

SEQ ID NO: 392388 - DNA, 75 bp, synthetic construct
  source 1..75: mol_type = other DNA
cttcatggttttgatgagagttttcgaggtcatggctatgaagattttgatttcttggtgcgcttgtataaccat

SEQ ID NO: 392389 - DNA, 75 bp, synthetic construct
  source 1..75: mol_type = other DNA
cgagagaagaaaattatcgtattttcagagataaatataaaaacgctattagtgatgaatgtcattatgacgcaa

SEQ ID NO: 392390 - DNA, 75 bp, synthetic construct
  source 1..75: mol_type = other DNA
acgatggtcgcttgcccattgtgtcgctggaggcggtgcagagtgagtttatctcttctccgggatcgtggccgg

SEQ ID NO: 392391 - DNA, 75 bp, synthetic construct
  source 1..75: mol_type = other DNA
gcgcaaacagaagtgatctgggcgtttgggcgacttatcgccaacagcgatatgcacgcaggtaatttatcgttt

SEQ ID NO: 392392 - DNA, 75 bp, synthetic construct
  source 1..75: mol_type = other DNA
ccatgactctgaaagatttcagtaaatttgtgaaagatgaaattggctttagttacaacggctattaccgttctg

SEQ ID NO: 392393 - DNA, 75 bp, synthetic construct
  source 1..75: mol_type = other DNA
tgactggacttggaacgatgtgtggtacgcatttttactgggcggcatgagtggaacaatggttggacttctctg

SEQ ID NO: 392394 - DNA, 75 bp, synthetic construct
  source 1..75: mol_type = other DNA
caacctgacgccttctctcttttatagttcacggcaggaagattacgatggcgtcgccctcattattggtaatac

SEQ ID NO: 392395 - DNA, 75 bp, synthetic construct
  source 1..75: mol_type = other DNA
gcaaggctactggattagccgcccgttaccgctggacgattttgttcgctggctaaagaaaccgtatacgccgca

SEQ ID NO: 392396 - DNA, 75 bp, synthetic construct
  source 1..75: mol_type = other DNA
cggaatgctggcggtctattacgcataacagcggttcggtacatcgctgtacatatcagccgcattatacataca

SEQ ID NO: 392397 - DNA, 75 bp, synthetic construct
  source 1..75: mol_type = other DNA
atgacctatgcgcatcttgcgcctgactacctgcagaacgccgtcgctctgaatccactaaaaggcggagtgacg

SEQ ID NO: 392398 - DNA, 75 bp, synthetic construct
  source 1..75: mol_type = other DNA
gcagtcgatacatgttttacggcatacctttgccactcacttcatgattaatggtgggaatatcatcactttgca

SEQ ID NO: 392399 - DNA, 75 bp, synthetic construct
  source 1..75: mol_type = other DNA
gacggcggcgaactggtcgttaatgacaccttcggacaacatcgggtaaaactcccggcaggcgatctcgtgttg

SEQ ID NO: 392400 - DNA, 75 bp, synthetic construct
  source 1..75: mol_type = other DNA
taaagtagcacttcctgccgcggtagaagagttacgtaaagccatttttgagctggttaggaacaaagttattca

SEQ ID NO: 392401 - DNA, 75 bp, synthetic construct
  source 1..75: mol_type = other DNA
tgctctccccggcctgtgccagccttgatcagttcaagaactttgaacaacgaggcaatgagtttgcccgtctgg

SEQ ID NO: 392402 - DNA, 75 bp, synthetic construct
  source 1..75: mol_type = other DNA
caatggtccggtggattttaatgtatttcatggcacggtggaggagttgcaggcattcgttgatgggattaaaga

SEQ ID NO: 392403 - DNA, 75 bp, synthetic construct
  source 1..75: mol_type = other DNA
attattgaacttatagaaaaatatcctgatttttttaaaaaagatggaaaacaggtcctatttatggggggctcg

SEQ ID NO: 392404 - DNA, 75 bp, synthetic construct
  source 1..75: mol_type = other DNA
cgcagggcgcacaagttaagagcaatcagcaagtggacacccgcagcgcgttatatgccgcattgcaaactgagg

SEQ ID NO: 392405 - DNA, 75 bp, synthetic construct
  source 1..75: mol_type = other DNA
cgctattagtcgtggtggtatggggactcaattttgtggtcatcaaagtggggcttcacaatatgccgccgttga

SEQ ID NO: 392406 - DNA, 75 bp, synthetic construct
  source 1..75: mol_type = other DNA
attgtcctcggcgcgtttactttcggtgaacagctgcatggcaagcaactggcggggatcgccttagcgatattt

SEQ ID NO: 392407 - DNA, 75 bp, synthetic construct
  source 1..75: mol_type = other DNA
tttttggcgtactggtgttaatcgaagatagtctgaacggtcagcatgtggcgatgctcggctttatgttgaccc

SEQ ID NO: 392408 - DNA, 75 bp, synthetic construct
  source 1..75: mol_type = other DNA
cgttggcgatatcgagctgttctgtcgtgaagcacaagcaccgattgtggcgatcaccggttctaacggcaaaag

SEQ ID NO: 392409 - DNA, 75 bp, synthetic construct
  source 1..75: mol_type = other DNA
tttttgtcgcacgaccgaaagtaccactgaatttgctgctggggtatggattaaccatcagttttgcgcagtttg

SEQ ID NO: 392410 - DNA, 75 bp, synthetic construct
  source 1..75: mol_type = other DNA
aagcgtactgcaatttttgggggcgctactaattatggccggactgtacattaatgtgtttagtttgcgctggca

SEQ ID NO: 392411 - DNA, 75 bp, synthetic construct
  source 1..75: mol_type = other DNA
gctggcatggttactaagcgcggtgttctggtgtgcgctgggggcactgtgtttcttatttatcagtagtttgtt

SEQ ID NO: 392412 - DNA, 75 bp, synthetic construct
  source 1..75: mol_type = other DNA
acaaccgaaaacgtcctgtctgccgtcctcaccctgagggaggtccttatctcccggacacagcagattaccgtc

SEQ ID NO: 392413 - DNA, 75 bp, synthetic construct
  source 1..75: mol_type = other DNA
ggctgtacagcaacatgttgatccgggcgctggaagtgacgacggacaagacaaccgaaaacgtcctgtccgccg

SEQ ID NO: 392414 - DNA, 75 bp, synthetic construct
  source 1..75: mol_type = other DNA
ctgtgctgattatctcccataaagagatgaagtcatggttccgggaaactattacgctggaagttaaagaggggc

SEQ ID NO: 392415 - DNA, 75 bp, synthetic construct
  source 1..75: mol_type = other DNA
taaaagtattgctgcgattattgagcagatcgatttcaaattaacggaacagatcaagctaatcctgagtcatcc

SEQ ID NO: 392416 - DNA, 75 bp, synthetic construct
  source 1..75: mol_type = other DNA
tgtcggcgaaaacgccgaagcccgaacccgtcgatcactggcaacgggcagtccaggccatcgatgaggccatca

SEQ ID NO: 392417 - DNA, 75 bp, synthetic construct
  source 1..75: mol_type = other DNA
gatggaaaccggtttttccggaggcggatcgctgcttgattttgccagtaacctgacggctaccagtttactggg

SEQ ID NO: 392418 - DNA, 75 bp, synthetic construct
  source 1..75: mol_type = other DNA
taagaagctggctcccgtcgtacgcgaactgggctacccttcgaaaaggaatctgcgtcgttggatccgctcatg

SEQ ID NO: 392419 - DNA, 75 bp, synthetic construct
  source 1..75: mol_type = other DNA
agaacagcacgctgaacacaatcaaaacgatgctgtcctctgcaaaaacatacgatattgaaacgccaaaggaaa

SEQ ID NO: 392420 - DNA, 75 bp, synthetic construct
  source 1..75: mol_type = other DNA
cattgtggtgtgcctttttctggcgacgcatatgaaaggcgcttttcgggctgccgggcatcctgaaatcggctt

SEQ ID NO: 392421 - DNA, 75 bp, synthetic construct
  source 1..75: mol_type = other DNA
cgaagacacttgcagaggcaatggctaaacacaaaacgaatcttgagaaagcgttaagcattgagtctgcccttg

SEQ ID NO: 392422 - DNA, 75 bp, synthetic construct
  source 1..75: mol_type = other DNA
agattaatccgtttattgctgtcacgaacggtgcaatagtgatccacacccaacgcctgaaatcagatccagggg

SEQ ID NO: 392423 - DNA, 75 bp, synthetic construct
  source 1..75: mol_type = other DNA
cgtcagcgttttcttagccttgatcaccaggaaaatttttgtttgtggaccaggctggaggagctttccggtcat

SEQ ID NO: 392424 - DNA, 75 bp, synthetic construct
  source 1..75: mol_type = other DNA
cgttgtggcaacgaatgctggcgcgcggctggacgccggtcagtgaatgccgtcttgacgactggcttacgcaag

SEQ ID NO: 392425 - DNA, 75 bp, synthetic construct
  source 1..75: mol_type = other DNA
tcgcgtcgcggaagtgattgatattcccttctgcgtcgccggtggcatcaaatccatcgacgacgcggcgaagat

SEQ ID NO: 392426 - DNA, 75 bp, synthetic construct
  source 1..75: mol_type = other DNA
cacgaaattatcggcgatatcgtcccactggcgaaacgctacgccgacgaaggcgcagacgaattagtgttttac

SEQ ID NO: 392427 - DNA, 75 bp, synthetic construct
  source 1..75: mol_type = other DNA
ggaagccttccgcgatgcaaacgttgacggcgcgctggcggcttccgtgttccacaaacagattatcaatattgg

SEQ ID NO: 392428 - DNA, 75 bp, synthetic construct
  source 1..75: mol_type = other DNA
tgaagccttccgcgatgccgacgttgacggcgcgctagccgcttccgtattccacaaacaaataatcaatattgg

SEQ ID NO: 392429 - DNA, 75 bp, synthetic construct
  source 1..75: mol_type = other DNA
gttgaaaaaagtgcgcgatgtttgccgcgtaccgctgatcgcctctggcggtgcggggaccatggaacacttcct

SEQ ID NO: 392430 - DNA, 75 bp, synthetic construct
  source 1..75: mol_type = other DNA
tcgcgtggcggaagtgatcgacattccgttctgcgtggcgggggggattaaatcgcaggatgacgcagccaaaat

SEQ ID NO: 392431 - DNA, 75 bp, synthetic construct
  source 1..75: mol_type = other DNA
aataccggctcggcccgatgcggctggaagaggcactgaaaacgctggccgggccaggctggctgatgcagaccg

SEQ ID NO: 392432 - DNA, 75 bp, synthetic construct
  source 1..75: mol_type = other DNA
tgaaacgccgctggggactaacccgctgcatccaaacgttatctcgaacccggctgcgcgtatctttaaagacga

SEQ ID NO: 392433 - DNA, 75 bp, synthetic construct
  source 1..75: mol_type = other DNA
cggcggcgcgtatctttaaagacgacgccgaagcattgggtaaagccgataagttcccgtatgtcggaaccacct

SEQ ID NO: 392434 - DNA, 75 bp, synthetic construct
  source 1..75: mol_type = other DNA
ctccctgcgtaatcgcacccgccagtccggctccttcgccatcaggcgcattgtctttctggcgactgattcagg

SEQ ID NO: 392435 - DNA, 75 bp, synthetic construct
  source 1..75: mol_type = other DNA
gctgattgccgaggagcagcgctgtgagcggctggctccctgtcggttactcatccaccagcaggcctggtatct

SEQ ID NO: 392436 - DNA, 75 bp, synthetic construct
  source 1..75: mol_type = other DNA
gggccaggctggctgatgcagaccgatgtactaaaccgcgaggtctgttttcacctgaacacgccgggaacaggg

SEQ ID NO: 392437 - DNA, 75 bp, synthetic construct
  source 1..75: mol_type = other DNA
ctgaacatgatgaaccaggacggcgtgcgtaacgggtatgacctcgagcagctgaaaaaagtgcgtgaggtttgt

SEQ ID NO: 392438 - DNA, 75 bp, synthetic construct
  source 1..75: mol_type = other DNA
ggatgagttatgaagaagtcgatcaatccgcactcatccatctcggcgctaacgttgcttctctcacgttgtcgg

SEQ ID NO: 392439 - DNA, 75 bp, synthetic construct
  source 1..75: mol_type = other DNA
cagcattgttgttttcgacctcggacaaaagaatcctgcatacctttacagcgcccatagcgaaagaaaagtcag

SEQ ID NO: 392440 - DNA, 75 bp, synthetic construct
  source 1..75: mol_type = other DNA
ttatgcgttacgcgaaagtgagcagatagtcatcagcgttggggcatccggggcaattatgggaatagctggcgc

SEQ ID NO: 392441 - DNA, 75 bp, synthetic construct
  source 1..75: mol_type = other DNA
ggaaactatcgcggcgtgctgaatggtattcacccgtgggcggaactgataaacctgatgcgtgggcttgtcgaa

SEQ ID NO: 392442 - DNA, 75 bp, synthetic construct
  source 1..75: mol_type = other DNA
gaaacaggtggcggaatatgcagatggtattggtccggattaccatatgttgattgaggagacatcgcagccggg

SEQ ID NO: 392443 - DNA, 75 bp, synthetic construct
  source 1..75: mol_type = other DNA
cttccgggtgcacacctttgaagaagagattgaatttgttcaggggttaaatcactctaccgggaaaaatattgg

SEQ ID NO: 392444 - DNA, 75 bp, synthetic construct
  source 1..75: mol_type = other DNA
catctcttccgcaggaaatctcgatataaagtcaggcgcggatgtcgccctgaaggcggggggaagtatggcgat

SEQ ID NO: 392445 - DNA, 75 bp, synthetic construct
  source 1..75: mol_type = other DNA
aaactatatggtgaaggcgtgcgattcggcttcaccggaatttatacgggcgatggcagaacatctgccccggta

SEQ ID NO: 392446 - DNA, 75 bp, synthetic construct
  source 1..75: mol_type = other DNA
tctgcagcgggcactggtatctgactggagagcatcatcatcgcgtggcagtgtttccgctgagcgatatccatg

SEQ ID NO: 392447 - DNA, 75 bp, synthetic construct
  source 1..75: mol_type = other DNA
catttgaagcgaatgcgttatcggtcattaacgtggcgacgggggagattattcagtcgattaccaccggtgcac

SEQ ID NO: 392448 - DNA, 75 bp, synthetic construct
  source 1..75: mol_type = other DNA
agagaaagttcacttgatccgcaggcaattattcggcatccccaatatggcgatgtggcttgtatccctgaaccg

SEQ ID NO: 392449 - DNA, 75 bp, synthetic construct
  source 1..75: mol_type = other DNA
gacttgttacggaaggcgggattattgttgcgggtagtcttctactgaccggggctatctggcttgcgcagcagc

SEQ ID NO: 392450 - DNA, 75 bp, synthetic construct
  source 1..75: mol_type = other DNA
ctggattggcgagacgcgactggaaggtgacgaagctacgctgactcgccgtgccgctgaactgggggtacgtgc

SEQ ID NO: 392451 - DNA, 75 bp, synthetic construct
  source 1..75: mol_type = other DNA
cgcagctctggcgataccgcaccgctgatccgaaacaagttcgcttaatctggaaggaacaacattcgggatatg

SEQ ID NO: 392452 - DNA, 75 bp, synthetic construct
  source 1..75: mol_type = other DNA
accgtgaacggttattgcctggctttcggcaggcgcggcaggcgggtgcggaaatcggcgcgggagcgagcggga

SEQ ID NO: 392453 - DNA, 75 bp, synthetic construct
  source 1..75: mol_type = other DNA
aaaatacggtgctgaccaatcggcaaaaaatcagcgccaacggcgtgctgcaatggtccaccatccgccgcctga

SEQ ID NO: 392454 - DNA, 75 bp, synthetic construct
  source 1..75: mol_type = other DNA
gcgagcgaccagatagcggtgatatctggattggtgagacgcggctggaaggcgatgaagccacactgacccgac

SEQ ID NO: 392455 - DNA, 75 bp, synthetic construct
  source 1..75: mol_type = other DNA
gtgccgctgaactgggggttcgtgcggtttatcaggagttaagtctggtggaagggctgacggtggcggaaaacc

SEQ ID NO: 392456 - DNA, 75 bp, synthetic construct
  source 1..75: mol_type = other DNA
ctgatccgcaccagcccgctgacgcaacgtgaatggcaggtactggggctgatctactctggttacagcaatgag

SEQ ID NO: 392457 - DNA, 75 bp, synthetic construct
  source 1..75: mol_type = other DNA
caaaacgcatatccgcaatctgtatcagaaactcggcgtggcccatcgccaggatgcggtacaacacgcccagca

SEQ ID NO: 392458 - DNA, 75 bp, synthetic construct
  source 1..75: mol_type = other DNA
caaaaactcggcgtcgcccaccgtcaggctgccgtgcagcacgcgcaaaaactgctgaagatgatgggatatgga

SEQ ID NO: 392459 - DNA, 75 bp, synthetic construct
  source 1..75: mol_type = other DNA
tggttattgcccaggcggtgcacaataacggcggtattgtgatgatgcaggtgcagaaaatggttaagaaagcca

SEQ ID NO: 392460 - DNA, 75 bp, synthetic construct
  source 1..75: mol_type = other DNA
ctacggaaaaaccacgctcatttctcaatgggcggcaggcaaaaacgatttgggctggtactcgctggatgaggg

SEQ ID NO: 392461 - DNA, 75 bp, synthetic construct
  source 1..75: mol_type = other DNA
tggatggcacaaggctttcccagcgaagctattcatcatgcgctggcggcaggcgatgctttgatgttgcgcgat

SEQ ID NO: 392462 - DNA, 75 bp, synthetic construct
  source 1..75: mol_type = other DNA
tcggtgctatggcgacggcaatctgcggcgcgttgcatggcgttaacgctatcgatcctgcgttaaaggcggagc

SEQ ID NO: 392463 - DNA, 75 bp, synthetic construct
  source 1..75: mol_type = other DNA
gcttcggctttggcggcgaagagagtgcaggcgcttccttcctgcgtttcgacggcacgccgtggtccaccgata

SEQ ID NO: 392464 - DNA, 75 bp, synthetic construct
  source 1..75: mol_type = other DNA
gattacgccgtcccataacccgccggaagatggtggtatcaaatacaacccgccaaatggcggtccggctgatac

SEQ ID NO: 392465 - DNA, 75 bp, synthetic construct
  source 1..75: mol_type = other DNA
ctactgcgaaagcttcctcggtgaagaacatcgcaagcagatcgagaaagaagcggttgagattgttagcgaagt

SEQ ID NO: 392466 - DNA, 75 bp, synthetic construct
  source 1..75: mol_type = other DNA
ggcatcactggcccttgctatgtgggtaaagatactcacgccttgtccgaacctgcattcatttccgtgctggaa

SEQ ID NO: 392467 - DNA, 75 bp, synthetic construct
  source 1..75: mol_type = other DNA
cacaccttgatcctttttggaaattaatgataacaacgggactttgtggaggtctgggtgatgctgccaacttac

SEQ ID NO: 392468 - DNA, 75 bp, synthetic construct
  source 1..75: mol_type = other DNA
ggtaagaacccgcaggaacactataacgaactggcaaaacgctttggtgcgccgagctataaccgtttgcaggca

SEQ ID NO: 392469 - DNA, 75 bp, synthetic construct
  source 1..75: mol_type = other DNA
gcctggaccaaaggagaataacgcggcctgttattttaaccgcgccgaattcaccgacgatacctcgatggcgct

SEQ ID NO: 392470 - DNA, 75 bp, synthetic construct
  source 1..75: mol_type = other DNA
atcgatcctgcgtttaagacggagctggatgcggtaaatcagcttgattttaatcattatgccacggcgctggca

SEQ ID NO: 392471 - DNA, 75 bp, synthetic construct
  source 1..75: mol_type = other DNA
tcctttattgatgatgtggcgctggcgtccagcccgacccataaatccgatctggcgattgcaggcgcggtagtc

SEQ ID NO: 392472 - DNA, 75 bp, synthetic construct
  source 1..75: mol_type = other DNA
atactggaagcgcattggcgagtattacaacctcaacctgaccatcgttaacgatcaggtcgatcaaaccttccg

SEQ ID NO: 392473 - DNA, 75 bp, synthetic construct
  source 1..75: mol_type = other DNA
attctgcttgtgatttatttgtcttatcttcggcttgggaaggttttagcttagttgttatcgaggccatggcat

SEQ ID NO: 392474 - DNA, 75 bp, synthetic construct
  source 1..75: mol_type = other DNA
actgatcgtcattacattgtaccaacttcaaatgccgcagctttagctcgcaaaattattgaagttgatatgtta

SEQ ID NO: 392475 - DNA, 75 bp, synthetic construct
  source 1..75: mol_type = other DNA
ggcgcgtagcgggattgaggtcttatcttcttatcaaccgcaacagcagcttcagtgcctggcaatgttaattca

SEQ ID NO: 392476 - DNA, 75 bp, synthetic construct
  source 1..75: mol_type = other DNA
aagctgacgctggtaaggaaggagtatccgaagctatttgttcactggtatttactacgtgcatcaaatgagtga

SEQ ID NO: 392477 - DNA, 75 bp, synthetic construct
  source 1..75: mol_type = other DNA
aatagtggtctgaataatgtgtcctggctcaaacatgaagccactccagcgggcagtgactgtgtttatgaaacg

SEQ ID NO: 392478 - DNA, 75 bp, synthetic construct
  source 1..75: mol_type = other DNA
atggacagtgattttgtatccgcagacagactgatgcgtgcgctcagtaacggggagtttgaaccgtatctccag

SEQ ID NO: 392479 - DNA, 75 bp, synthetic construct
  source 1..75: mol_type = other DNA
atttaagtcgacaggaaatataccttacctggagattaacaatacctgattttttttggaatgaaagaaggagtg

SEQ ID NO: 392480 - DNA, 75 bp, synthetic construct
  source 1..75: mol_type = other DNA
ttatcctgatatttctcaacttaatacaagttgtcaatataaactcccacaaataaccagctctgctttgtcaga

SEQ ID NO: 392481 - DNA, 75 bp, synthetic construct
  source 1..75: mol_type = other DNA
atggctgaccagaatgttaatccgtacctttccggtgctgatactgcaccgcagcaatcgccatacatggccgca

SEQ ID NO: 392482 - DNA, 75 bp, synthetic construct
  source 1..75: mol_type = other DNA
tgtttatgctgccttgggcgctgaagtttatttgggcgccgtggatcgagcgctggcgacttccgcccggtagcc

SEQ ID NO: 392483 - DNA, 75 bp, synthetic construct
  source 1..75: mol_type = other DNA
aataatatacataataacaacaacagaattataggtaacaataattacctgaattataaagcctataacaacact

SEQ ID NO: 392484 - DNA, 75 bp, synthetic construct
  source 1..75: mol_type = other DNA
aataatacaattgtaaacaatatacataataacaacaacagaattataggtcataataattacctcaattataaa

SEQ ID NO: 392485 - DNA, 75 bp, synthetic construct
  source 1..75: mol_type = other DNA
ttgatacggtggcagaaggtgtggaaacacaggcgcaggtgaactgtctgtgctctctgggagtggattatctgc

SEQ ID NO: 392486 - DNA, 75 bp, synthetic construct
  source 1..75: mol_type = other DNA
gccggctgagcgatgccggtgtgaagctagctctggatgatttcggcactgggtgttctgtgctgtcgtacctga

SEQ ID NO: 392487 - DNA, 75 bp, synthetic construct
  source 1..75: mol_type = other DNA
gcgatgcgggtcgctgccgcggggagtccgcaggatgatctggatggactgctggatatcatccagcccccggac

SEQ ID NO: 392488 - DNA, 75 bp, synthetic construct
  source 1..75: mol_type = other DNA
gtgaaattatcggtattgatatcaacgatgactggaaatcgattctgcgccaactctcccactcacctcacgggc

SEQ ID NO: 392489 - DNA, 75 bp, synthetic construct
  source 1..75: mol_type = other DNA
aaagtgaaattctgtttgcccaagggttcctgcaaaccgcgtgggaaacacaggaaaaagcgttccagctgatca

SEQ ID NO: 392490 - DNA, 75 bp, synthetic construct
  source 1..75: mol_type = other DNA
aggcaaccaacggtcactgtgcgatatgtgagacgatggcgcaaaaacggcaatatgccagcctgacgtcactct

SEQ ID NO: 392491 - DNA, 75 bp, synthetic construct
  source 1..75: mol_type = other DNA
aaagcaggaaaaagatttccagcagtttggcaaagatgtttgtagccgcgttgtgactctggaagatagccgcaa

SEQ ID NO: 392492 - DNA, 75 bp, synthetic construct
  source 1..75: mol_type = other DNA
aattcgcccatttcgatgagaatttcgttgaacgtctgctaaatcatccggaagtgccagaactgatccgcacca

SEQ ID NO: 392493 - DNA, 75 bp, synthetic construct
  source 1..75: mol_type = other DNA
agcggaacggctggcaaaactggcactggaagaactgccgccgggctggttctatagccgcattgtggcaacctc

SEQ ID NO: 392494 - DNA, 75 bp, synthetic construct
  source 1..75: mol_type = other DNA
tggcgtttactcatcaggaagctaagcaattttttgattgccgtctgtcatcgccgattgaagcagcagaaagca

SEQ ID NO: 392495 - DNA, 75 bp, synthetic construct
  source 1..75: mol_type = other DNA
aaaagaaagtcggcctggtcgtcaacgagtatggagacattcagggactggtgacggtcgaagatattctcgaag

SEQ ID NO: 392496 - DNA, 75 bp, synthetic construct
  source 1..75: mol_type = other DNA
ctctcctcacgggcgcatcgtgctgtaccgcgactctctggacgacgccattagtatgctgcgagtacgtgaagc

SEQ ID NO: 392497 - DNA, 75 bp, synthetic construct
  source 1..75: mol_type = other DNA
tcacccgtatgctgatgcgtatgatgggtatcaaaaccgatatcgtagtcagcggctctttaagcaaagaggagt

SEQ ID NO: 392498 - DNA, 75 bp, synthetic construct
  source 1..75: mol_type = other DNA
cgcccagcgcgagcaggcgaaggattatcaggcagaactgcgcagcacgttgccgtggattgatgaagggactaa

SEQ ID NO: 392499 - DNA, 75 bp, synthetic construct
  source 1..75: mol_type = other DNA
gccgcaaaacgacggttcggtgattattgatggcactgccaacgtgcgggaaatcaacaaagcctttaactggca

SEQ ID NO: 392500 - DNA, 75 bp, synthetic construct
  source 1..75: mol_type = other DNA
gtcacgccgcaaaacgacgggtcggtgattatcgatggcaccgccaacgtgcgagaaattaacaaagcctttaac

SEQ ID NO: 392501 - DNA, 75 bp, synthetic construct
  source 1..75: mol_type = other DNA
tatggacggcattctgtcgacccgtacccctgcggcgttaattactgcgcttaatcagcaaggctatcagctggg

SEQ ID NO: 392502 - DNA, 75 bp, synthetic construct
  source 1..75: mol_type = other DNA
tgccaacttctatcgcccgatcaccatgcagcgcgctaacctgccgctttcgtacccgatgacggcgcgacgttt

SEQ ID NO: 392503 - DNA, 75 bp, synthetic construct
  source 1..75: mol_type = other DNA
aagtacccggtgtaaccgatcccgcagaagcgtcccggctgattcgtcggggacatctgacttatactcaggccc

SEQ ID NO: 392504 - DNA, 75 bp, synthetic construct
  source 1..75: mol_type = other DNA
tggacaggttgggttcaactttgcggcgcatgcgcggggattgcctttaacgccggggagtggccgctgctgacg

SEQ ID NO: 392505 - DNA, 75 bp, synthetic construct
  source 1..75: mol_type = other DNA
gccgcgagagctttattccggcgcaatcttgctgctggacgatacgcgctttgatgcggcgctagttctgcgttc

SEQ ID NO: 392506 - DNA, 75 bp, synthetic construct
  source 1..75: mol_type = other DNA
tacggtggtgattatcactgccggtcggggtattccgctgagcgaagaggaagaaacctttgactggtcccacgg

SEQ ID NO: 392507 - DNA, 75 bp, synthetic construct
  source 1..75: mol_type = other DNA
acaacgggccgcgaccaacatgttaatcaaaccactggtggtcagtatcatcaggcaacgccccgtcatggaata

SEQ ID NO: 392508 - DNA, 75 bp, synthetic construct
  source 1..75: mol_type = other DNA
aatgttgcggggacggatctccggtgcgcagttcatcaggaatcttgccgtggcatcttccggtgtggcaggtgg

SEQ ID NO: 392509 - DNA, 75 bp, synthetic construct
  source 1..75: mol_type = other DNA
actgggaccatttggtgcactgacagggcgtgtggttggcggtgttctggggggaatgattgcctccgctgtatc

SEQ ID NO: 392510 - DNA, 75 bp, synthetic construct
  source 1..75: mol_type = other DNA
ttaagtggatgtacatatggagccacgacatattttacttcgggaggagatgcttatctagcattaaaggtacct

SEQ ID NO: 392511 - DNA, 75 bp, synthetic construct
  source 1..75: mol_type = other DNA
aagactgaccagtgccatccgccagacactggaagaacaaccggtgctcaacagtaaatgtaaccggctcattta

SEQ ID NO: 392512 - DNA, 75 bp, synthetic construct
  source 1..75: mol_type = other DNA
cagcaacttcaccggctcagtgttgttcagggtatgctgaagcacattgatttttcgactgccagcccgactgtc

SEQ ID NO: 392513 - DNA, 75 bp, synthetic construct
  source 1..75: mol_type = other DNA
attgatgccacgccgtgggcgttcagtccgtggatggtgatgcaggcgacaaatcgcgaagccagaatacgatta

SEQ ID NO: 392514 - DNA, 75 bp, synthetic construct
  source 1..75: mol_type = other DNA
aattgcaaaaatgctaaagacggtttatttagatataagcaattacaccctaagcacgttgattataaagatgca

SEQ ID NO: 392515 - DNA, 75 bp, synthetic construct
  source 1..75: mol_type = other DNA
ttttcagaaggtcgccgttttgtatcattccatcacgtggatgagcttcgtatctgtgcctcctgcgggctgaca

SEQ ID NO: 392516 - DNA, 75 bp, synthetic construct
  source 1..75: mol_type = other DNA
acggaaacagatgtagcctggatttttactgacgcgcaggcccaggcttttgaggcatggtaccgggatgttcta

SEQ ID NO: 392517 - DNA, 75 bp, synthetic construct
  source 1..75: mol_type = other DNA
tgaactgggtgcagacgactatctgatcaaacctttcgattttaccgaactggttgcacgcgtgagaacgttact

SEQ ID NO: 392518 - DNA, 75 bp, synthetic construct
  source 1..75: mol_type = other DNA
ttgagttgctgctgcaacgcaccggagaagtgttacccaggagtcttatctcgtccctggtctggaacatgaatt

SEQ ID NO: 392519 - DNA, 75 bp, synthetic construct
  source 1..75: mol_type = other DNA
tatttagatataagcaattacatcctaaacacgttgactataaagatgcattcaaaaatgttttgggtaaagagg

SEQ ID NO: 392520 - DNA, 75 bp, synthetic construct
  source 1..75: mol_type = other DNA
gtgacatctctggcactggtagctgtcacaaccggccctgacatgatcaaaatgttgcggggacggatctccggt

SEQ ID NO: 392521 - DNA, 75 bp, synthetic construct
  source 1..75: mol_type = other DNA
cgaatggcattgtggaaaatgaagtgtgtccggtatttgccgcacgcacgaccagtgcgttacagatcaacgatg

SEQ ID NO: 392522 - DNA, 75 bp, synthetic construct
  source 1..75: mol_type = other DNA
gctggaaaagtatgccgcacacacggcagacacccgcttacatctcgcgttctccagttggctgtttaatgccaa

SEQ ID NO: 392523 - DNA, 75 bp, synthetic construct
  source 1..75: mol_type = other DNA
tggcatctagtcatggctgaaggcggtgaaattaattgggagctggatgatggttctcgcatggtattaaaggca

SEQ ID NO: 392524 - DNA, 75 bp, synthetic construct
  source 1..75: mol_type = other DNA
gtgcactgacagggcgtgtggttggcggtgttctggggggaatggttgcctccgctgtatcaggaaaaattgccg

SEQ ID NO: 392525 - DNA, 75 bp, synthetic construct
  source 1..75: mol_type = other DNA
aaaatctgaacgagaatctggcccgtgttatcgatcagaatgctctggagatcattttcgccgccggtatacaac

SEQ ID NO: 392526 - DNA, 75 bp, synthetic construct
  source 1..75: mol_type = other DNA
tggagatctgagggaatttgaactggcagacggaaactggctactggacaatgcctggtatgaaagaaacatggc

SEQ ID NO: 392527 - DNA, 75 bp, synthetic construct
  source 1..75: mol_type = other DNA
tccgcgcattaaacagctggcgcgccgcagcacagtaacgccgggtggagagacctgcacatataacgacatcat

SEQ ID NO: 392528 - DNA, 75 bp, synthetic construct
  source 1..75: mol_type = other DNA
catttcagcacggcagcccgtcggggggttatttctgacaggtttgtagaagcaattttgcagttttggcgtgaa

SEQ ID NO: 392529 - DNA, 75 bp, synthetic construct
  source 1..75: mol_type = other DNA
acaaaccggaaaaccacatctggtttctggagcatgatgcagccggacagggggcggagttactgaagaagggcg

SEQ ID NO: 392530 - DNA, 75 bp, synthetic construct
  source 1..75: mol_type = other DNA
ttcgtaaagggtatttgcacattacccgcgaatggcaggagggcgacacgctgaatctgactttgccaatgccgg

SEQ ID NO: 392531 - DNA, 75 bp, synthetic construct
  source 1..75: mol_type = other DNA
tggtttagctgggccaaccggggtgaaggcgaaatgcggatctgggtgaatgaggaaaagcattgccatccgtag

SEQ ID NO: 392532 - DNA, 75 bp, synthetic construct
  source 1..75: mol_type = other DNA
atcatacacggggaaaatatttgagtcggcaatggcgacgctcgatcatgtccgtcattcactggataaatctgc

SEQ ID NO: 392533 - DNA, 75 bp, synthetic construct
  source 1..75: mol_type = other DNA
atgccccatggtttattaacggtattaatttctctgaccgccttaattattggcaacacgatattcccgccgtaa

SEQ ID NO: 392534 - DNA, 75 bp, synthetic construct
  source 1..75: mol_type = other DNA
cgctgtctaagctgtctccggaaatggtgagcgccagcactctggcaggcgacccaatcaccgcgcgtctgaccg

SEQ ID NO: 392535 - DNA, 75 bp, synthetic construct
  source 1..75: mol_type = other DNA
atactggaagcgcattggcgagtattacaatctcaacctgaccatcgttaacgatcaggtcgatcagactttccg

SEQ ID NO: 392536 - DNA, 75 bp, synthetic construct
  source 1..75: mol_type = other DNA
cgttcatcatctggtgacgttcacctggggcaatgtcagcgcgatagacgaaacgcggcaatggatggtgattaa

SEQ ID NO: 392537 - DNA, 75 bp, synthetic construct
  source 1..75: mol_type = other DNA
atgaccgccgatgatatggtggtgattgaaatagccagcggtaaggtggtggaaggcagcaaaaagccctcttcc

SEQ ID NO: 392538 - DNA, 75 bp, synthetic construct
  source 1..75: mol_type = other DNA
tgctggatgcaaggcgaatttgacttaatgaccagtgactacgcgtcacaccctcaacactttaatcatatggtt

SEQ ID NO: 392539 - DNA, 75 bp, synthetic construct
  source 1..75: mol_type = other DNA
atggctcatcacctgttgtcatttcaattacgcatatatatgaacacgataatatcgcccgattattactatgtt

SEQ ID NO: 392540 - DNA, 75 bp, synthetic construct
  source 1..75: mol_type = other DNA
tcacatttcagatgtgcgggaaaggattccagtctacttcggcaaaatgtaaggaagatttggcgagttttgaac

SEQ ID NO: 392541 - DNA, 75 bp, synthetic construct
  source 1..75: mol_type = other DNA
gccaatacagtattgctgtgggatcaaccggaaatctggggttatcaattggtattatgagcgcccgcattggct

SEQ ID NO: 392542 - DNA, 75 bp, synthetic construct
  source 1..75: mol_type = other DNA
cactcatctggtgtgggcgacgggaggtggaatggtgccggaagaagaaatggaacaatatctggctaaggggca

SEQ ID NO: 392543 - DNA, 75 bp, synthetic construct
  source 1..75: mol_type = other DNA
gcagacagattgaattatcagaaaatggctcaggtggtggatggtgttataaccttgttatacaacagtaaataa

SEQ ID NO: 392544 - DNA, 75 bp, synthetic construct
  source 1..75: mol_type = other DNA
gtggtcggcagaatgcaggatatcaacgccgttcgtcagctaaaagcggcattgttgtcatctcaggatttatct

SEQ ID NO: 392545 - DNA, 75 bp, synthetic construct
  source 1..75: mol_type = other DNA
atgaaaatcagtgaatttctacatctggcgttaccagaggaacaatggctaccgacgatttctggcgttttacgc

SEQ ID NO: 392546 - DNA, 75 bp, synthetic construct
  source 1..75: mol_type = other DNA
ccattttgttatgtgacattgccatccacctaggtatcgaaactgatattgatccacagcttgtaaaatatgctg

SEQ ID NO: 392547 - DNA, 75 bp, synthetic construct
  source 1..75: mol_type = other DNA
tttttgcaatacgctgttttatgagtcattcttacacaagatcaaagtgctgaaaaatggcttctgtcgcagaga

SEQ ID NO: 392548 - DNA, 75 bp, synthetic construct
  source 1..75: mol_type = other DNA
gctggaaaatctgacggcagttattcaggattatccaaatccagcctgtatcagggacgaaactggaaaatttat

SEQ ID NO: 392549 - DNA, 75 bp, synthetic construct
  source 1..75: mol_type = other DNA
ggcacgacctcattggctgaaggtttaccttatgttggcctgaccgaacaggatgttcaggacgcccatgcgcgc

SEQ ID NO: 392550 - DNA, 75 bp, synthetic construct
  source 1..75: mol_type = other DNA
ctggtggcgtcgcattcggacttaaactggcgtttggcgatcatgttcactgcttttttgccgaaccaacgcact

SEQ ID NO: 392551 - DNA, 75 bp, synthetic construct
  source 1..75: mol_type = other DNA
tttaagaaaattgacgctgtaaatcgaagctgggatttatcaaaggaagaactggcatccattctttccacagct

SEQ ID NO: 392552 - DNA, 75 bp, synthetic construct
  source 1..75: mol_type = other DNA
tgcaacgcggcagaaataataccacgttattaagtgccatcacgctggaagccgcattacaacaacgctgccggg

SEQ ID NO: 392553 - DNA, 75 bp, synthetic construct
  source 1..75: mol_type = other DNA
gaggaattttatctcggtctgcaacgcggcagaaataataccacgttattaagtgccataacgctggaagccgca

SEQ ID NO: 392554 - DNA, 75 bp, synthetic construct
  source 1..75: mol_type = other DNA
gcggcagaaataacacaacgttattaagtgccataacgttagaagcggcattgcaacaacgttgtcgggaaaata

SEQ ID NO: 392555 - DNA, 75 bp, synthetic construct
  source 1..75: mol_type = other DNA
tcagcacctgggggaaaatgaaaccctgtttaattattgcggcgataatccgttttatcaggcgttaaataaaga

SEQ ID NO: 392556 - DNA, 75 bp, synthetic construct
  source 1..75: mol_type = other DNA
ttacaacaacgctgccgggaaaatattcatcattttattcacgatattatttatggtgtccctgggaattcaacc

SEQ ID NO: 392557 - DNA, 75 bp, synthetic construct
  source 1..75: mol_type = other DNA
gatggggttagggattggccttacgccatcagccgatgattatctgaccggactggtacttattttatttatttc

SEQ ID NO: 392558 - DNA, 75 bp, synthetic construct
  source 1..75: mol_type = other DNA
tgttcgctggggtgctccacttgcgatcgcccttctgattccggtattcaaaccaattcttaaggaagcagccgg

SEQ ID NO: 392559 - DNA, 75 bp, synthetic construct
  source 1..75: mol_type = other DNA
ggcagctattagcgatgactcaataatcaatgtcagtgccttatgcagaatgctttcaattgatgcaaataatgt

SEQ ID NO: 392560 - DNA, 75 bp, synthetic construct
  source 1..75: mol_type = other DNA
gggattttaaataagttaaacaatgctatagatgagttatcctatttaaggaaacagttttccattaataaaaag

SEQ ID NO: 392561 - DNA, 75 bp, synthetic construct
  source 1..75: mol_type = other DNA
caggcaatagaaaaaattaaacatattggctccagttccggctgcgacatgctgtatggcatggccgatggttgt

SEQ ID NO: 392562 - DNA, 75 bp, synthetic construct
  source 1..75: mol_type = other DNA
attacggttggtcaacatattcatatagataagcgtcgttgccagcgttggctgtctccagtactgcaattgacc

SEQ ID NO: 392563 - DNA, 75 bp, synthetic construct
  source 1..75: mol_type = other DNA
ttgccggagcctggttttttggggcgcttttattcttattatcgcctggttttcaatgttacattcagggctatt

SEQ ID NO: 392564 - DNA, 75 bp, synthetic construct
  source 1..75: mol_type = other DNA
ggtgaggaactggcacaatataatttgtggctggattacctggacgcactggaactggtcgatacttccggtgcg

SEQ ID NO: 392565 - DNA, 75 bp, synthetic construct
  source 1..75: mol_type = other DNA
ttagcagaagaatttttaaggaaacaatgcggctatgttattgataaccagaatggcgtaaggacggtctattgg

SEQ ID NO: 392566 - DNA, 75 bp, synthetic construct
  source 1..75: mol_type = other DNA
atgaattcgacaatctggctggcgcttgctctggttttggtgctggaaggtttaggaccgatgctttacccgcag

SEQ ID NO: 392567 - DNA, 75 bp, synthetic construct
  source 1..75: mol_type = other DNA
ttccgtgcatgatttatctgtcctggccgtctgccatttaccctaatctggtgttgttaccggcggctctgttgt

SEQ ID NO: 392568 - DNA, 75 bp, synthetic construct
  source 1..75: mol_type = other DNA
gatgaatcttctaagattgcacttttccttgatcatgaaacagcaaaaatcgatgacctgatcgagaaacaacaa

SEQ ID NO: 392569 - DNA, 75 bp, synthetic construct
  source 1..75: mol_type = other DNA
catcaaaaagcccaacagcttgaaatatgtaaattatcctcaaatgatgtgattttttcaaaagtcggagatccc

SEQ ID NO: 392570 - DNA, 75 bp, synthetic construct
  source 1..75: mol_type = other DNA
ccaatattcagtttctgctgcacaaccggggcttgcggttgaaagaattactgatttatatattccaatcccacc

SEQ ID NO: 392571 - DNA, 75 bp, synthetic construct
  source 1..75: mol_type = other DNA
ctcctccgccccggccggagaagccacatggtttgctttataatgtgttctggggctggccctgggcactgatcg

SEQ ID NO: 392572 - DNA, 75 bp, synthetic construct
  source 1..75: mol_type = other DNA
gctggagaaaaaagacggcagtaaaatctggatccgttttgcgctatcgaaagtgagcgccgaggggaaagttta

SEQ ID NO: 392573 - DNA, 75 bp, synthetic construct
  source 1..75: mol_type = other DNA
gaagtcattggcaataacattgatatgctgattccgcgggatttgcgtcctgcgcatcctgaatatattcgtcac

SEQ ID NO: 392574 - DNA, 75 bp, synthetic construct
  source 1..75: mol_type = other DNA
ctgctgatatggccggcggccatgcttctggggggagctatcaccgtgaccatggcatccttcaagaagtattta

SEQ ID NO: 392575 - DNA, 75 bp, synthetic construct
  source 1..75: mol_type = other DNA
ctggcccacggcagtatatccgaacctgctgatatggccggcggccatgcttctggggggagctatcaccgtgac

SEQ ID NO: 392576 - DNA, 75 bp, synthetic construct
  source 1..75: mol_type = other DNA
atggctgattcccgtcgtgatgtggaccgtcctgacgccgcacaaccgccacgtcggcacgggctgctgtataac

SEQ ID NO: 392577 - DNA, 75 bp, synthetic construct
  source 1..75: mol_type = other DNA
taacccgaaccataaatcctttatttcaccgggtgctcttattgcgggtggcgtccgttataacaccgatggaaa

SEQ ID NO: 392578 - DNA, 75 bp, synthetic construct
  source 1..75: mol_type = other DNA
ccaggagatgcgcgaacccgcctcactcgaactggtgcaaagccgcctgcaaatcctctttcccaccgccaaaaa

SEQ ID NO: 392579 - DNA, 75 bp, synthetic construct
  source 1..75: mol_type = other DNA
ccaggagatgcgcgaacccgcctccctggaactggtgcaaagccgcctgcaaattctctttcctggtgtcaaaaa

SEQ ID NO: 392580 - DNA, 75 bp, synthetic construct
  source 1..75: mol_type = other DNA
ctgctggggatgatcacccgccagaccaaagccgacattgtggtggtcgggttgattggcgaacgcgggcgcgaa

SEQ ID NO: 392581 - DNA, 75 bp, synthetic construct
  source 1..75: mol_type = other DNA
atgaagattatatttatattattagctatgatttttctttataatccatccgcatttgcgtatgtttgtcctctt

SEQ ID NO: 392582 - DNA, 75 bp, synthetic construct
  source 1..75: mol_type = other DNA
acgccctgcgttcgctggagtcgatcccgctggctcgcgtcgccggacggctggtgcgcctgaacggcattctgc

SEQ ID NO: 392583 - DNA, 75 bp, synthetic construct
  source 1..75: mol_type = other DNA
ttccggccattgagcgatttttgcgccaggagatgcgcgaccccgcctccctcgaactggtgcaaagccgcctgc

SEQ ID NO: 392584 - DNA, 75 bp, synthetic construct
  source 1..75: mol_type = other DNA
caagaccaactgttgcagagcttggtgatgattcaggctggcatttttatagtcagcgaaatacagataattcgg

SEQ ID NO: 392585 - DNA, 75 bp, synthetic construct
  source 1..75: mol_type = other DNA
tgggggttcctgaataccaggtaagccgatggaagaatggtttcttctcgcaggtaagcatgatgctggctgttc

SEQ ID NO: 392586 - DNA, 75 bp, synthetic construct
  source 1..75: mol_type = other DNA
ggaaaacaaacattctgaaagaccgtatgtggtggatgtttttgcgcctgatattgagtgcggttttgagcgtca

SEQ ID NO: 392587 - DNA, 75 bp, synthetic construct
  source 1..75: mol_type = other DNA
tctggcgggcgataacgaacaacagcaacgtctggaacaggcgctgatgaccccggacaccgacgaatactacaa

SEQ ID NO: 392588 - DNA, 75 bp, synthetic construct
  source 1..75: mol_type = other DNA
cagcacgttgctgtcgattaagaccggagcttgtccggaagattgcaaatactgcccgcaaagctcgcgctacaa

SEQ ID NO: 392589 - DNA, 75 bp, synthetic construct
  source 1..75: mol_type = other DNA
ttcgtcttggttcacagcaatatcatggtgtgaacaactggcaaacatggaatttccagtgcccgtcaggtcatg

SEQ ID NO: 392590 - DNA, 75 bp, synthetic construct
  source 1..75: mol_type = other DNA
tttgtggcagtttaacccgaacgataaatcttttatttcaccgggtgctcttgttgcgggtggcatccgttataa

SEQ ID NO: 392591 - DNA, 75 bp, synthetic construct
  source 1..75: mol_type = other DNA
caaagtggtgtggaacgctgtggtctgcgagcaatgtgatacctgcctgaagaggtgtccgcaacatgccacgcc

SEQ ID NO: 392592 - DNA, 75 bp, synthetic construct
  source 1..75: mol_type = other DNA
ccccctctaattatagtaattttgactcgcgctacgcattaaagacggcttgtgtgaccagcgtcagacttgggg

SEQ ID NO: 392593 - DNA, 75 bp, synthetic construct
  source 1..75: mol_type = other DNA
gcgccacgccggaagatgttgagcagttggctggcgcgttacgggagcgcggggtgagccggttaatatttccgg

SEQ ID NO: 392594 - DNA, 75 bp, synthetic construct
  source 1..75: mol_type = other DNA
tgctggtaattccagaccaggtggattatttgcatcacatcgatgagctggcgacgtttatcaagagacttggcg

SEQ ID NO: 392595 - DNA, 75 bp, synthetic construct
  source 1..75: mol_type = other DNA
gtgccacagtgtccgcatcaggcgttgcagattgttgacggcaaagtggtgtggaacgctgtggtctgcgagcag

SEQ ID NO: 392596 - DNA, 75 bp, synthetic construct
  source 1..75: mol_type = other DNA
tgcagattgttgacggcaaagtggtgtggaacgctgtggtctgcgagcagtgtgatacctgcctgaagaggtgtc

SEQ ID NO: 392597 - DNA, 75 bp, synthetic construct
  source 1..75: mol_type = other DNA
gtggattatttgcatcacatcgatgagctggcgacgtttatcaagagacttggcgatgttccggttcgcctgaat

SEQ ID NO: 392598 - DNA, 75 bp, synthetic construct
  source 1..75: mol_type = other DNA
gatacagcccagcaactgggggaattttgattcacgctatgtaaaagatgttcgcctgggtacgcgtgttgttca

SEQ ID NO: 392599 - DNA, 75 bp, synthetic construct
  source 1..75: mol_type = other DNA
agcacatatgtaagagacattcgacttggaagcgcagaatcaatatcagcatggcgaggtcctggttactgggat

SEQ ID NO: 392600 - DNA, 75 bp, synthetic construct
  source 1..75: mol_type = other DNA
tgtgatacctgcctgaagatgtgtccgcaacatgccacgccaatggcgcaatccatgagcgtggatgaggtgctt

SEQ ID NO: 392601 - DNA, 75 bp, synthetic construct
  source 1..75: mol_type = other DNA
tgcagattatcgaaggcaaagtggcgtggagcgcggctgtttgcgagcaatgtgatacctgcctgaagatgtgcc

SEQ ID NO: 392602 - DNA, 75 bp, synthetic construct
  source 1..75: mol_type = other DNA
gaggtgcttagtcatatccgcaaagcggtgttgtttattgaagggataacggtgagcggtggcgaagccacgacc

SEQ ID NO: 392603 - DNA, 75 bp, synthetic construct
  source 1..75: mol_type = other DNA
ttccagcgttgacgctttcggcttcgttgatgaaaacggtgctgcaccggaaagcaaagctgaatttgcgaacgt

SEQ ID NO: 392604 - DNA, 75 bp, synthetic construct
  source 1..75: mol_type = other DNA
gtccggctggtctggttaagcaactggtagacgctagccgcgttaccaagaaagctgctttctcttacaaagact

SEQ ID NO: 392605 - DNA, 75 bp, synthetic construct
  source 1..75: mol_type = other DNA
ccgaatcctatgtagaaatgctgcttccgcagtctgttttgggtcgtctgggtgtgactgttctgtctggtctga

SEQ ID NO: 392606 - DNA, 75 bp, synthetic construct
  source 1..75: mol_type = other DNA
ctacctaccgcgcacagtctgctatcgttccgcgtatctgggtagatctggattacgttgtaacccagccggaag

SEQ ID NO: 392607 - DNA, 75 bp, synthetic construct
  source 1..75: mol_type = other DNA
agaaaatgctcgtggtccggctggtgtgattaaacaactggtagatgctggtcgcgtagagaagaaagctgcttt

SEQ ID NO: 392608 - DNA, 75 bp, synthetic construct
  source 1..75: mol_type = other DNA
tcgtttgtaacgctcgaatcgatgcggataaagtaggccgtgcgaccgttagattctctaagcatggcactttgg

SEQ ID NO: 392609 - DNA, 75 bp, synthetic construct
  source 1..75: mol_type = other DNA
atgcgtaagatcattaaactggcgctggcgggattgcttagcgtctctacttttgcggttgctgcagaatcctcg

SEQ ID NO: 392610 - DNA, 75 bp, synthetic construct
  source 1..75: mol_type = other DNA
gtccggcatggggggtttgtatgtggttttcttcatggaaggacagtggtatgcaaccgggcgttgcatttgtct

SEQ ID NO: 392611 - DNA, 75 bp, synthetic construct
  source 1..75: mol_type = other DNA
caaatccgccaggcacagattaatggtctggaaatggctttcctcagcgctgaggaaaaacgcgcactgcgagaa

SEQ ID NO: 392612 - DNA, 75 bp, synthetic construct
  source 1..75: mol_type = other DNA
gcctcgtatctttgtagatttggactacgttgtagcacagccggaagctctgaaagttctgaaaattggcgaaga

SEQ ID NO: 392613 - DNA, 75 bp, synthetic construct
  source 1..75: mol_type = other DNA
ttttggatgatgaagatcggcagaagacaccaaaaaataaatgggtggcggtaactgcgcagcgaggaagcttgt

SEQ ID NO: 392614 - DNA, 75 bp, synthetic construct
  source 1..75: mol_type = other DNA
attcagggcgtactggcaacctttagtgaggccgatgcgttaacccgcagccagcgcgagcaaagcatcgcttta

SEQ ID NO: 392615 - DNA, 75 bp, synthetic construct
  source 1..75: mol_type = other DNA
agtgcctcgtatctttgtagatttggactacgttgtagcacagccggaagctctgaaagttcttcacatctccgc

SEQ ID NO: 392616 - DNA, 75 bp, synthetic construct
  source 1..75: mol_type = other DNA
aaagtgggtctatgaactgtttccgcgtctgcatgagcgccgtgttcagcgagcgggcactatgtctggcggtga

SEQ ID NO: 392617 - DNA, 75 bp, synthetic construct
  source 1..75: mol_type = other DNA
gcgagcaggggatgactatcttcctcgtcgagcagaacgccaaccaggcgctaaagctggcggatcgcggctacg

SEQ ID NO: 392618 - DNA, 75 bp, synthetic construct
  source 1..75: mol_type = other DNA
tcccttcagcgccgttaccaacttcaccactctggcggattactgcgagcatttcgctgaaacgatcatcgagtg

SEQ ID NO: 392619 - DNA, 75 bp, synthetic construct
  source 1..75: mol_type = other DNA
gtctggtattttgccgccaatctgaacgccccacgctggatatgtactgctgacggcatacaggttatcgacggg

SEQ ID NO: 392620 - DNA, 75 bp, synthetic construct
  source 1..75: mol_type = other DNA
catgtggtgctctccgataccggcgatgcgctgctggcgaatgaagcggtgagaagtgcgtatttaggcgggtaa

SEQ ID NO: 392621 - DNA, 75 bp, synthetic construct
  source 1..75: mol_type = other DNA
aacgtgaccagtttcaggagcgcataaagtgggtgtatgagctgtttccacgtcttcatgagcgtcgtgttcagc

SEQ ID NO: 392622 - DNA, 75 bp, synthetic construct
  source 1..75: mol_type = other DNA
ctctgttgcacgcacggttctgcgcgccgtccgtgactctgtggtctctgttgcccgcgcggtatggaactggat

SEQ ID NO: 392623 - DNA, 75 bp, synthetic construct
  source 1..75: mol_type = other DNA
ctctgttgcacgcacggttctgcgtgccgtccgtgactcagtggtctctgttgcccgcgcagtatggaactggat

SEQ ID NO: 392624 - DNA, 75 bp, synthetic construct
  source 1..75: mol_type = other DNA
ctctgttgcacgcacggttctgcgagccgtccgtgactcagtggtctctgttgcccgcgctgtatggaactggat

SEQ ID NO: 392625 - DNA, 75 bp, synthetic construct
  source 1..75: mol_type = other DNA
atcactctgcgattattgcctggcactgacgcaggttctgaacgggcgctcactgctgccggaaaccgaaaaaac

SEQ ID NO: 392626 - DNA, 75 bp, synthetic construct
  source 1..75: mol_type = other DNA
gtctggtattttgccgccgatctgaacgccccgcactggatacgtaccgctgacggcgtacaggttatcgacggg

SEQ ID NO: 392627 - DNA, 75 bp, synthetic construct
  source 1..75: mol_type = other DNA
ctctgttgcacgcacggttctgcgggccgtccgtgactctgtggtctctgttgcccgcgccgtatggaactggat

SEQ ID NO: 392628 - DNA, 75 bp, synthetic construct
  source 1..75: mol_type = other DNA
ttctgaccaaacttgactggggtgttaaagttctcgcctctcttgatgcctgtcgccgcgtggcatttgaaaaca

SEQ ID NO: 392629 - DNA, 75 bp, synthetic construct
  source 1..75: mol_type = other DNA
tgcttgggttttttccggcctggtggccgcaattggtgcggaaacggcactggcagtgttgcaggcgaaagtgtt

SEQ ID NO: 392630 - DNA, 75 bp, synthetic construct
  source 1..75: mol_type = other DNA
cgggcgcggctgacggcgattaacgataagccgacagaaggtaatgaagatgaggcgcttaaccgcgaactcaat

SEQ ID NO: 392631 - DNA, 75 bp, synthetic construct
  source 1..75: mol_type = other DNA
gctaaaagcgttcctcgcggaacatcagatagtctcggaatcgttttatccggtggtgcgagcgcggctgacggc

SEQ ID NO: 392632 - DNA, 75 bp, synthetic construct
  source 1..75: mol_type = other DNA
aacggtaccaacaccattccgttccaggcgcgttattatgcaatcggcgaggcaaccccaggtgctgctaatgcg

SEQ ID NO: 392633 - DNA, 75 bp, synthetic construct
  source 1..75: mol_type = other DNA
attcagtgagcaaacaaccctgaataacggtactaacaccattccgttccaggcgcgttattatgcaaccggtgc

SEQ ID NO: 392634 - DNA, 75 bp, synthetic construct
  source 1..75: mol_type = other DNA
atgagcgcattttcttttaacaccacttatcagccaacaggcgatcagcagaaagacgcaatcgcacaaatcggg

SEQ ID NO: 392635 - DNA, 75 bp, synthetic construct
  source 1..75: mol_type = other DNA
agagaattgacggcagtcagtggcgacatatttggctggtgggggatattcatggctgtctgacgcaactgcgta

SEQ ID NO: 392636 - DNA, 75 bp, synthetic construct
  source 1..75: mol_type = other DNA
tgccattatgtttctcatatatcgcttcctgttatttgtgcgatttttttgggcagaagattacgtgtaatcagt

SEQ ID NO: 392637 - DNA, 75 bp, synthetic construct
  source 1..75: mol_type = other DNA
attataaactcgttcaagcagaaaccggttatccagtaataggctccggggggcagtttgcatgggcgaatactt

SEQ ID NO: 392638 - DNA, 75 bp, synthetic construct
  source 1..75: mol_type = other DNA
gttcctgctgctttcggcgttgctgaccttgctgctggcggtggcggcggtcgcggtggcgatgaatcattattg

SEQ ID NO: 392639 - DNA, 75 bp, synthetic construct
  source 1..75: mol_type = other DNA
atccgattgtcgccggtaactggccgccaaaagccgatgaagtgtcgatggaagaggggctggcgaaacgcttaa

SEQ ID NO: 392640 - DNA, 75 bp, synthetic construct
  source 1..75: mol_type = other DNA
tatatcaactaaacaaactggaagagcaggacaagccgcgcgctgatgcgattatggcgcttgatgaatctggcg

SEQ ID NO: 392641 - DNA, 75 bp, synthetic construct
  source 1..75: mol_type = other DNA
accaacaccattccgttccaggcgcgttattttgcaaccggtgccgcaacccctggcgcagctaatgcggatgca

SEQ ID NO: 392642 - DNA, 75 bp, synthetic construct
  source 1..75: mol_type = other DNA
ttggcaacgacaaccgcagaacgcctgacgcaggaaacgatggattaccacgcgctgaatgcgatgcttaacctt

SEQ ID NO: 392643 - DNA, 75 bp, synthetic construct
  source 1..75: mol_type = other DNA
aggttcgttgaatattgcccacaccatggattcccccgactttgcccgcacggtagaaacagccgtgcgcggtct

SEQ ID NO: 392644 - DNA, 75 bp, synthetic construct
  source 1..75: mol_type = other DNA
ggcgcaaaggtatcaaaacgctctactacatccgcctgcgtcagatggcgctggaaggtactgaaattgaaggct

SEQ ID NO: 392645 - DNA, 75 bp, synthetic construct
  source 1..75: mol_type = other DNA
agattaatggtctggaaatggctttcctcagcgcagaggaaaaacgcgcactgaaagaaaaagtagcagcgaaat

SEQ ID NO: 392646 - DNA, 75 bp, synthetic construct
  source 1..75: mol_type = other DNA
cgcttcctgcacaatccctggaaacactgattccccacgttcaggtcattgccaacgaacccgatctggtgagct

SEQ ID NO: 392647 - DNA, 75 bp, synthetic construct
  source 1..75: mol_type = other DNA
aaatcttcctcgaaatgggcggctggcgtcagccgctgctgatggtcgataaaattgcagattataaatacggtg

SEQ ID NO: 392648 - DNA, 75 bp, synthetic construct
  source 1..75: mol_type = other DNA
attgacacgaatcataccaacgtactggctctgcaaagttctgctgcgggtagcgcaacaaacgttggtgtgcag

SEQ ID NO: 392649 - DNA, 75 bp, synthetic construct
  source 1..75: mol_type = other DNA
cgctgttgcctttttaggtacggcgattgatgcgactcataccaacgttctggctctgcagagttctgctgcagg

SEQ ID NO: 392650 - DNA, 75 bp, synthetic construct
  source 1..75: mol_type = other DNA
gtttgtttgtcaagatgtatttgtatctcagggaagctatataacttctggtgatcttataatgaatattgaaat

SEQ ID NO: 392651 - DNA, 75 bp, synthetic construct
  source 1..75: mol_type = other DNA
aatgccgacgagaaaatccgcattaaaacactgtcgctgggcgtggtgatcccggatatcactttccatctggca

SEQ ID NO: 392652 - DNA, 75 bp, synthetic construct
  source 1..75: mol_type = other DNA
ggtgcgacatttagtgcacaaacaaccctgaataacggtaccaacaccattccgttccaggcgcgttattatgca

SEQ ID NO: 392653 - DNA, 75 bp, synthetic construct
  source 1..75: mol_type = other DNA
tgcacaaaccaccctgaataacggaaccaacaccattccgttccaggcgcgttattatgccattggtgccgcaac

SEQ ID NO: 392654 - DNA, 75 bp, synthetic construct
  source 1..75: mol_type = other DNA
ttgaatgggttaaacactgtcagtgccacggggtgccgctgacgacatataaatgcccaggatgcggtgaacaga

SEQ ID NO: 392655 - DNA, 75 bp, synthetic construct
  source 1..75: mol_type = other DNA
ggcgacaatgaactgcaaccggaggcggaaaaagccgtactggatactattgtgcggcatcttgaagtagcggcc

SEQ ID NO: 392656 - DNA, 75 bp, synthetic construct
  source 1..75: mol_type = other DNA
gatgaggggcgtccggggtggatcccctcgctggcagcggaagagcgtgacgggcagacactgcaggataccgga

SEQ ID NO: 392657 - DNA, 75 bp, synthetic construct
  source 1..75: mol_type = other DNA
atgagccataaacctgcgcatttattattggtcgatgacgatccgggattgctgaaactgcttggcctgcgcctg

SEQ ID NO: 392658 - DNA, 75 bp, synthetic construct
  source 1..75: mol_type = other DNA
taacaatgtggctctgactgcatttaattgccccaaatgcaaagagcaaattatgacgcaatgctcgaccagaaa

SEQ ID NO: 392659 - DNA, 75 bp, synthetic construct
  source 1..75: mol_type = other DNA
tgtccgtggtgcagcgtggttttctttaagcaggtaaaaggcgcaaaggtaaaagccagcgcagttattcagaat

SEQ ID NO: 392660 - DNA, 75 bp, synthetic construct
  source 1..75: mol_type = other DNA
taaaatcgctacctctgcgtctggcggtcagccgcctgttacgtcagccgtggtcaacgttaagccagctttcgg

SEQ ID NO: 392661 - DNA, 75 bp, synthetic construct
  source 1..75: mol_type = other DNA
aaaactggctgaagaagtgtggttttgttgatattcgcattgcggatgtgagcgttaccaccacagaagagcagc

SEQ ID NO: 392662 - DNA, 75 bp, synthetic construct
  source 1..75: mol_type = other DNA
gttatcacatgtggcgcatgattggcgcaggcgcgcatctggcggtggggattgaccctacgcaactttttctct

SEQ ID NO: 392663 - DNA, 75 bp, synthetic construct
  source 1..75: mol_type = other DNA
caaaaacgtcgctcaggcgcgcggcacgccaggcgttgagtgtctctctccgcaggtgctgaccggcgacaacgg

SEQ ID NO: 392664 - DNA, 75 bp, synthetic construct
  source 1..75: mol_type = other DNA
caaaatacgcggcccgatcataatccgattgtcgccggtaactggccgccaaaagccgatgaagtgtcgatggaa

SEQ ID NO: 392665 - DNA, 75 bp, synthetic construct
  source 1..75: mol_type = other DNA
tgttggcaacgcagcctttacgcgtattacgtaatgatgtggtagcgaacgtctggccgctgaagttttatctgc

SEQ ID NO: 392666 - DNA, 75 bp, synthetic construct
  source 1..75: mol_type = other DNA
tttagtttcctcaccaagcctgtcgacaaagacgcgctatatcaggcaattgacgatgcgctggagcaatccgcg

SEQ ID NO: 392667 - DNA, 75 bp, synthetic construct
  source 1..75: mol_type = other DNA
gcttatattcgcggtgaagtggagttggtgcggattcgtgatgccgaagggcgaattgcggcggaaggcgcgctg

SEQ ID NO: 392668 - DNA, 75 bp, synthetic construct
  source 1..75: mol_type = other DNA
tatgccgcggatcagtattttgttgatccgtgcaagctgttactcaccacgccgggtatcgatgccgaaaccggc

SEQ ID NO: 392669 - DNA, 75 bp, synthetic construct
  source 1..75: mol_type = other DNA
cggactcatcatgagattttatctgattaataatgaatattacgaacagataaaagcacggttacaaacggcgga

SEQ ID NO: 392670 - DNA, 75 bp, synthetic construct
  source 1..75: mol_type = other DNA
ttactggcaacattacgtagtcgttgtcggttacattaccttgcgccgccgccggaacagtacgccgtgacctgg

SEQ ID NO: 392671 - DNA, 75 bp, synthetic construct
  source 1..75: mol_type = other DNA
cttgcgcgtgaagtgacaatgtcacaagaggccataataaccgcattgcgtctgagcgccggttcgcctggcgcg

SEQ ID NO: 392672 - DNA, 75 bp, synthetic construct
  source 1..75: mol_type = other DNA
ggcgaaggatgcgcagaaattcgcagccaaagtctttcatgccgataaaacctattttgtgctgaacggcacatc

SEQ ID NO: 392673 - DNA, 75 bp, synthetic construct
  source 1..75: mol_type = other DNA
ggcgcttactggtaaatctgaaacgccgtgcgacgtccggttacgcaatattgaaattaaggaattaaggaaggg

SEQ ID NO: 392674 - DNA, 75 bp, synthetic construct
  source 1..75: mol_type = other DNA
gtgcgttctccaccgatgcgatgaagcgcctgatgaccgccacctggccgggcaatgtgcgccagttggtgaatg

SEQ ID NO: 392675 - DNA, 75 bp, synthetic construct
  source 1..75: mol_type = other DNA
ccgcgcatggttctattcccgatgccgttgctgcaacacagcagggcgtttttagtttcctcaccaagcctgtcg

SEQ ID NO: 392676 - DNA, 75 bp, synthetic construct
  source 1..75: mol_type = other DNA
gctctggctactggcattaggtgctttattgttgctgttatgcatgccgttaaatgaaaaaagcacaatttttag

SEQ ID NO: 392677 - DNA, 75 bp, synthetic construct
  source 1..75: mol_type = other DNA
ggtattggcccggattaccatatgttgattgaggaaacatcgcagccgggtaatatcaaactcactggcatggtg

SEQ ID NO: 392678 - DNA, 75 bp, synthetic construct
  source 1..75: mol_type = other DNA
atattgcggcaaaaacgctggaagtgtatagcgcggcgatttttttgataccgatttgcatttcatttgataccg

SEQ ID NO: 392679 - DNA, 75 bp, synthetic construct
  source 1..75: mol_type = other DNA
tctctctgatttgaccgggcgcacgatcctcgatgtcggctgcggcagcggttatcacatgtggcgcatgatcgg

SEQ ID NO: 392680 - DNA, 75 bp, synthetic construct
  source 1..75: mol_type = other DNA
gtcgcaaaataaacaagagctgaaagcaacacagaatgaactgggagtatataaattccgactttcgacattaca

SEQ ID NO: 392681 - DNA, 75 bp, synthetic construct
  source 1..75: mol_type = other DNA
atgaatataaagacgcttaacgtcagccttttgtctttttctattattacagcattgtttccattgaacgcgatg

SEQ ID NO: 392682 - DNA, 75 bp, synthetic construct
  source 1..75: mol_type = other DNA
ctgctggtggcgcagcatcagcaactgaaaaccgggctgttctctggcctgttgaaaacgccttctttccgtcgc

SEQ ID NO: 392683 - DNA, 75 bp, synthetic construct
  source 1..75: mol_type = other DNA
tgacccgctgctgctgaaaatcgagaactacttccgccaggttgatgaagaggtgtttgaaaccatgatgaatat

SEQ ID NO: 392684 - DNA, 75 bp, synthetic construct
  source 1..75: mol_type = other DNA
tgggtgagagtattttaggttcaagaccagaaattcgtttctatggtacatacattaatattcttgataacgaat

SEQ ID NO: 392685 - DNA, 75 bp, synthetic construct
  source 1..75: mol_type = other DNA
tccagatgctagactggaagacattaaccactgacgtagccgctggtgtcgggattgaaaattgggcgcttggcg

SEQ ID NO: 392686 - DNA, 75 bp, synthetic construct
  source 1..75: mol_type = other DNA
ttcctgcgcccacattttcagcttgaagggttaacaggatcactgcgtctggtgacaaaactgccgtcggtaaaa

SEQ ID NO: 392687 - DNA, 75 bp, synthetic construct
  source 1..75: mol_type = other DNA
atggtaaacgatactcttctggcgacaggcgatctcactgctgagcaaagcacagcctatcaggacactgaattt

SEQ ID NO: 392688 - DNA, 75 bp, synthetic construct
  source 1..75: mol_type = other DNA
ttcctgcgcccgcattttcagcttgaagggttaacaggatcactgcgtctggtgacaaaactgccgtcagtaaaa

SEQ ID NO: 392689 - DNA, 75 bp, synthetic construct
  source 1..75: mol_type = other DNA
gcccagagcgaagcgctcgaccgcgccgctacctggcttgagcgcattggtttgctggaacatgccaaccgtcag

SEQ ID NO: 392690 - DNA, 75 bp, synthetic construct
  source 1..75: mol_type = other DNA
tttgctggaacacgctaaccgtcaggcgagtaacctggcctacggtgaccagcgtcgcctggagattgcccgctg

SEQ ID NO: 392691 - DNA, 75 bp, synthetic construct
  source 1..75: mol_type = other DNA
cggaaaaaccacggtcttcaactgcctgaccggattctacaaacccaccggcggcactattttactgcgcgatca

SEQ ID NO: 392692 - DNA, 75 bp, synthetic construct
  source 1..75: mol_type = other DNA
atgcaaggcatacagtttcaggaaaattttattcaacggctaccggcagggttaagcgttgaacagataatccct

SEQ ID NO: 392693 - DNA, 75 bp, synthetic construct
  source 1..75: mol_type = other DNA
tcgcggtgcgaaaacgcgtcctcttgaagcgtttattcaactgctcgatgtgcctgactcagcaaaacagagtta

SEQ ID NO: 392694 - DNA, 75 bp, synthetic construct
  source 1..75: mol_type = other DNA
actgggggtagatctgtttattcgcgagaatcagcgtttacgtctctctcctgccgggcataactttttacgcta

SEQ ID NO: 392695 - DNA, 75 bp, synthetic construct
  source 1..75: mol_type = other DNA
actcttcggagggcatcccctggcatgacctgccagcttcgcacagaggttgcagtcagatgaacctacccctcc

SEQ ID NO: 392696 - DNA, 75 bp, synthetic construct
  source 1..75: mol_type = other DNA
gacgcaccgaatggatggtcaccgagtctctggccgattttctcgacccgcatgatccgggtaagacggtggaag

SEQ ID NO: 392697 - DNA, 75 bp, synthetic construct
  source 1..75: mol_type = other DNA
gcagtgcgcattccggccacgctggcggaattcaaccgtcgttatcccaaaattcagttttcactttccaccggc

SEQ ID NO: 392698 - DNA, 75 bp, synthetic construct
  source 1..75: mol_type = other DNA
aattcagttttcactttccaccggcccttccggcactatgctggaaggtgtgctggagggaaaactgaatgcggc

SEQ ID NO: 392699 - DNA, 75 bp, synthetic construct
  source 1..75: mol_type = other DNA
cttcacaggatattccgtggcaaagcctgcctgcgtctcaccggggtgatgcgcagttgtcactgccgtttccgg

SEQ ID NO: 392700 - DNA, 75 bp, synthetic construct
  source 1..75: mol_type = other DNA
acggcaaagtgggcgcagaagtggctccgcgtcgttacttctgtctgcaatgtcacgtgccgcaggccgataccg

SEQ ID NO: 392701 - DNA, 75 bp, synthetic construct
  source 1..75: mol_type = other DNA
attttattcaacgacttccggcagggttaagcgttgaacagatcatccgtcagttagcgcaaccgttggttaccg

SEQ ID NO: 392702 - DNA, 75 bp, synthetic construct
  source 1..75: mol_type = other DNA
actcttcagaagatatcccgtggcatgagctgccagcttcacacaggggaaacaatcagatgagcttgcctttac

SEQ ID NO: 392703 - DNA, 75 bp, synthetic construct
  source 1..75: mol_type = other DNA
aacactggaagctttccataaattcacatcaaaacacacctccggcgttcactcttcagaaggtatcccgtggca

SEQ ID NO: 392704 - DNA, 75 bp, synthetic construct
  source 1..75: mol_type = other DNA
aaaatgcacatgttttatattgattagtttattgtcaaatatagcacatccccattcattgtcatggtatggcat

SEQ ID NO: 392705 - DNA, 75 bp, synthetic construct
  source 1..75: mol_type = other DNA
gtcgctaaaagccgacttctcgctggcaaaaccgctgatcattcacaatgtgttactctcggcactgggcgggtt

SEQ ID NO: 392706 - DNA, 75 bp, synthetic construct
  source 1..75: mol_type = other DNA
atctgcaattctttttctatgcctggggccacgcccgcattccggcgcagtatgactacatcagctggatgctgc

SEQ ID NO: 392707 - DNA, 75 bp, synthetic construct
  source 1..75: mol_type = other DNA
gaacgccgcaaaaccgatgcatgaagccgctgccgcactgggcgtcgatccactgtatgtcgctctgccaagcta

SEQ ID NO: 392708 - DNA, 75 bp, synthetic construct
  source 1..75: mol_type = other DNA
tttcttgccgccaacggatttgttccacactatggcagaacgtgtggctaaagaccccaaaggcacaggtactgg

SEQ ID NO: 392709 - DNA, 75 bp, synthetic construct
  source 1..75: mol_type = other DNA
ctctgtatggctggaatgcttaagggggaatcgcctagtgaatgtagtggggcaaagaaaaaatttttcagcatt

SEQ ID NO: 392710 - DNA, 75 bp, synthetic construct
  source 1..75: mol_type = other DNA
aatggtagccaccagtaagactgagtggggacgggcgttccgcgaccgtctggcggctaatggcaagaaggaaag

SEQ ID NO: 392711 - DNA, 75 bp, synthetic construct
  source 1..75: mol_type = other DNA
gggtgtagcaaacgcaatgcaaacattgtgggctgagatagctctgcgtgagactcgagtcggtcgcctagttcg

SEQ ID NO: 392712 - DNA, 75 bp, synthetic construct
  source 1..75: mol_type = other DNA
attccagaagatatggtggagctgattgaggtgatgcgcgccgatttcgaagagcataaggatgaagtggactgg

SEQ ID NO: 392713 - DNA, 75 bp, synthetic construct
  source 1..75: mol_type = other DNA
tatcactcatccgctggtgggcgatccggtttatggtggccgtccgcgtccgccaaaaggtgcttcggaagcgtt

SEQ ID NO: 392714 - DNA, 75 bp, synthetic construct
  source 1..75: mol_type = other DNA
tcgccgtccggtaacggtgttgagcctcggttgtgtggtgattattgtcgccgccaacatcgtcggcatgggcat

SEQ ID NO: 392715 - DNA, 75 bp, synthetic construct
  source 1..75: mol_type = other DNA
gtgactcgcgccgggcagttgaaagagcgcaagatgggcattaaagccgaagagttcaacctgaaaaaagggctg

SEQ ID NO: 392716 - DNA, 75 bp, synthetic construct
  source 1..75: mol_type = other DNA
tgattgggtaatagttgatgaggctggccgagcacaagctgctgaattgatggtagcgctgcaatcaggcaagcg

SEQ ID NO: 392717 - DNA, 75 bp, synthetic construct
  source 1..75: mol_type = other DNA
cgctgggtaccgactctgcagatgacttcagcaacctgtttgaagatcttgatttaggttcaagcaagcttggca

SEQ ID NO: 392718 - DNA, 75 bp, synthetic construct
  source 1..75: mol_type = other DNA
catcggcattcggcatgatccccaaactggtcgagagcgcaggcaacagcgaaagcgcaggatcgatgaccgcca

SEQ ID NO: 392719 - DNA, 75 bp, synthetic construct
  source 1..75: mol_type = other DNA
ccgcccgccaccaaaggctatccgccatcggcattcggcatgatccccaaactggtcgagagcgcaggcaacagc

SEQ ID NO: 392720 - DNA, 75 bp, synthetic construct
  source 1..75: mol_type = other DNA
ccaaagccgacattgtggtggtcgggttgattggcgaacgcgggcgcgaagtaaaagagtttatcgaccactcgc

SEQ ID NO: 392721 - DNA, 75 bp, synthetic construct
  source 1..75: mol_type = other DNA
agcgctggtggtgacatcggcagcaccgctccccgcatgggcagaagagaagggcggtaaaatcctcaccgcggg

SEQ ID NO: 392722 - DNA, 75 bp, synthetic construct
  source 1..75: mol_type = other DNA
gcaaagtctatcgtcgttgtcgcgcctgccgatgaatcgccgctgatgcgcctgaaagccaccgaactgtgccac

SEQ ID NO: 392723 - DNA, 75 bp, synthetic construct
  source 1..75: mol_type = other DNA
atatcgtattaacccgcaaactggcggaagcggggcactatccggccattgatatcggccagtcgatcagccgct

SEQ ID NO: 392724 - DNA, 75 bp, synthetic construct
  source 1..75: mol_type = other DNA
atgagtttacctgccgggtattaccggattgacccggacatccgtgcactggtggccgcgatgaacgttcacgga

SEQ ID NO: 392725 - DNA, 75 bp, synthetic construct
  source 1..75: mol_type = other DNA
catataaactgtacataaaagggaaaaaagccgatctggtagaagggaatgacagacctgtattaagcaactgct

SEQ ID NO: 392726 - DNA, 75 bp, synthetic construct
  source 1..75: mol_type = other DNA
gtcacttatgccaacaaaatcctgaaagaagacgggattaagtataacgagttgaccactgagcatccggcttat

SEQ ID NO: 392727 - DNA, 75 bp, synthetic construct
  source 1..75: mol_type = other DNA
ccacgacatcctgattggcgaaagctggttaggccgcgtggttaacggcctcggcgaaccgctggatggcaaagg

SEQ ID NO: 392728 - DNA, 75 bp, synthetic construct
  source 1..75: mol_type = other DNA
agcgccaatcacacgctgatcgacgcgcaggccgtaggctttaatcgcgatatcacctacttaatgccgtttaaa

SEQ ID NO: 392729 - DNA, 75 bp, synthetic construct
  source 1..75: mol_type = other DNA
atcaactacgccctgaactgttcgaaggccgtacattgctggtgtggtgcggtgataatcgaacctccgcccaac

SEQ ID NO: 392730 - DNA, 75 bp, synthetic construct
  source 1..75: mol_type = other DNA
tatctccacgctgcgtaagtttgatcgtcaggcgcttcacgcaacgatgctacgtctctatcacccgatttccgg

SEQ ID NO: 392731 - DNA, 75 bp, synthetic construct
  source 1..75: mol_type = other DNA
cagcctgctgtcgtgggaactcaaactggcggcggtatggggtggtcatgaaggttcgctgttgctttgggtgct

SEQ ID NO: 392732 - DNA, 75 bp, synthetic construct
  source 1..75: mol_type = other DNA
atagttactctgatgttgtcgctgttgggcacgttgattgtccgttctggtattctggtttcggtccatgcgttc

SEQ ID NO: 392733 - DNA, 75 bp, synthetic construct
  source 1..75: mol_type = other DNA
atatttccgccagcaatcgaaggccgcgatctcaatccgatgctgcaacatcccggtcttatctttcatccaccg

SEQ ID NO: 392734 - DNA, 75 bp, synthetic construct
  source 1..75: mol_type = other DNA
atgttcgctttgattcaacgcggtcagatatacacggacagagccggataccccgtggtgattactcgcatcact

SEQ ID NO: 392735 - DNA, 75 bp, synthetic construct
  source 1..75: mol_type = other DNA
ggagatactgattttacggacgtcgcggcagtcgtcattaccgctgcggatagtcgcagtggcattcttgcattg

SEQ ID NO: 392736 - DNA, 75 bp, synthetic construct
  source 1..75: mol_type = other DNA
tcatgcgttcgcgctggataacgttcgcgccgtgccgctgttcagcctgtttgcactgattagccttgcgtcttt

SEQ ID NO: 392737 - DNA, 75 bp, synthetic construct
  source 1..75: mol_type = other DNA
cggcgagtttgatggtgcctgcgccagaatttgttggcgctgggcactacctggctggagcgcattaacggcggg

SEQ ID NO: 392738 - DNA, 75 bp, synthetic construct
  source 1..75: mol_type = other DNA
cttgcgcgtgaagtgacaatgtcaccagaggccatactcaccgcattgcgcctgagcgccggttcgcctggtgcg

SEQ ID NO: 392739 - DNA, 75 bp, synthetic construct
  source 1..75: mol_type = other DNA
cggtacgtgaggtcaccgaaaagctgaatgagcacgcacgcttaggtggtgcgaaagttgtctgggtaaccgatg

SEQ ID NO: 392740 - DNA, 75 bp, synthetic construct
  source 1..75: mol_type = other DNA
cggcggtgcgtttttcggggttatcgcgggaaatgttaatcctcgctacgctgttgctgttttgcgcagtgctac

SEQ ID NO: 392741 - DNA, 75 bp, synthetic construct
  source 1..75: mol_type = other DNA
gttcgcgctcctgctgctcgcctttggcgtactgacgtattgttttctcatcagcgatttctcggttatttatgt

SEQ ID NO: 392742 - DNA, 75 bp, synthetic construct
  source 1..75: mol_type = other DNA
agttttacggcaatatcatcaccacccgcacctatcaggaacgtctcgatacgctggaaaaagtgcgagaagctg

SEQ ID NO: 392743 - DNA, 75 bp, synthetic construct
  source 1..75: mol_type = other DNA
ctacttcaatttatctgactgtatctggcagaagggttggatggcattcatatgggaaagacggcaacggcgaag

SEQ ID NO: 392744 - DNA, 75 bp, synthetic construct
  source 1..75: mol_type = other DNA
ctgacgacacaatagaaagagaattgttgcgactaggctttgcgcctgtggctaaagaaccgcatcgttactgga

SEQ ID NO: 392745 - DNA, 75 bp, synthetic construct
  source 1..75: mol_type = other DNA
gagtacagcaaaattctggcgggcactgagcaggaaatgcacctgaaaaaattacgcgcaatgcaacggaggtga

SEQ ID NO: 392746 - DNA, 75 bp, synthetic construct
  source 1..75: mol_type = other DNA
tacccgtgagtacgaagccgtagcgattggtcatatgactgcgggtggcacggtggacgagccaatcagccgcca

SEQ ID NO: 392747 - DNA, 75 bp, synthetic construct
  source 1..75: mol_type = other DNA
aagaaccagcttgcacttgacgccagagttattgcgtttggcggtaaaaagaaaactgaggaagtggatcagtta

SEQ ID NO: 392748 - DNA, 75 bp, synthetic construct
  source 1..75: mol_type = other DNA
ctacttcaatttatctgactgtatctggcagaagggttggatggcattcatatggggaagacggcaacggcaaag

SEQ ID NO: 392749 - DNA, 75 bp, synthetic construct
  source 1..75: mol_type = other DNA
ttcttgcgctaaccttatgatctggcagacaacatgggagagacatcatgtggcaggcaatcagtcgtcttttga

SEQ ID NO: 392750 - DNA, 75 bp, synthetic construct
  source 1..75: mol_type = other DNA
ggagcttgtccggaagattgcaaatattgcccgcaaagctcgcgctacaaaaccgggctggaagccgagcggttg

SEQ ID NO: 392751 - DNA, 75 bp, synthetic construct
  source 1..75: mol_type = other DNA
gatcgcgccggattattgctgcaactggcaaacctgccgacgccgccggaaagcgtaccaatcaacatgctggtg

SEQ ID NO: 392752 - DNA, 75 bp, synthetic construct
  source 1..75: mol_type = other DNA
ctgatgccattctatttcaggaaggagtgtccgttaaactcaggctacctcagtgattactcgcagcactcagtg

SEQ ID NO: 392753 - DNA, 75 bp, synthetic construct
  source 1..75: mol_type = other DNA
gaacggctcgatcaccaggaataccgacaaattctggcagaaacagagcaggaaaatcatctgaagaaattacga

SEQ ID NO: 392754 - DNA, 75 bp, synthetic construct
  source 1..75: mol_type = other DNA
actggtttcggggcttacccaaagtgcaaccggcaaagatcctgaaatcaccatcacgacctgggaggaatggaa

SEQ ID NO: 392755 - DNA, 75 bp, synthetic construct
  source 1..75: mol_type = other DNA
aaaccgggggataatccgttgttactaaaacgactttatatcttaagaacggattcgctggagacgatgtcgcgg

SEQ ID NO: 392756 - DNA, 75 bp, synthetic construct
  source 1..75: mol_type = other DNA
gaccaccaccaccagcctcgtgtttcgtaaaatattcgcgcagttaaatctgcatgcagccgaggtggaaggcga

SEQ ID NO: 392757 - DNA, 75 bp, synthetic construct
  source 1..75: mol_type = other DNA
tggagagcgttgacgaagttcgcattatcactgatggacggattaattttatcgaaccatcgacagggctggaga

SEQ ID NO: 392758 - DNA, 75 bp, synthetic construct
  source 1..75: mol_type = other DNA
tggagagtgttgacgaagttcgtattatcactgatggacggattaattttatcgaaccatcgacagggctggaga

SEQ ID NO: 392759 - DNA, 75 bp, synthetic construct
  source 1..75: mol_type = other DNA
ctcgccgctggacgaaagtcgaagcgctgatcacccgcgctgacggtaagcccaccatcgcccccgaatccgacc

SEQ ID NO: 392760 - DNA, 75 bp, synthetic construct
  source 1..75: mol_type = other DNA
atgatagctaagtcatggagttactatgtctgccaaacatccggtcattgcggtaacaggatccagcggcgcggg

SEQ ID NO: 392761 - DNA, 75 bp, synthetic construct
  source 1..75: mol_type = other DNA
gaccaccaccaccagcctcgcgtttcgcaaaatattcgcgcagttaaatctgcatgcagccgaagtggaaggcga

SEQ ID NO: 392762 - DNA, 75 bp, synthetic construct
  source 1..75: mol_type = other DNA
caatgaccgatgaatttggctggccgcgccgtaacgcctttattcagccgcaggtcgatgcggtgatgctggaag

SEQ ID NO: 392763 - DNA, 75 bp, synthetic construct
  source 1..75: mol_type = other DNA
cgcggtaattggctggggatgcaatccactgtgggggatgagcgacgagcaaatccagcagtggcgcgcgttggg

SEQ ID NO: 392764 - DNA, 75 bp, synthetic construct
  source 1..75: mol_type = other DNA
aagtgctgcctaatccggacaatgttgaattgattcgccagcgtgtctacacccacaacgcgcgactggcgcaac

SEQ ID NO: 392765 - DNA, 75 bp, synthetic construct
  source 1..75: mol_type = other DNA
atgattaagcataaatcagaaacaccaaaagaagttagagattgctggcaaacgccgctttggctttttgatgca

SEQ ID NO: 392766 - DNA, 75 bp, synthetic construct
  source 1..75: mol_type = other DNA
tgatttggcgaccgttcatcagtcctcgacgaatgtttactactgtatccaaagcggcattgatggcgatcgggc

SEQ ID NO: 392767 - DNA, 75 bp, synthetic construct
  source 1..75: mol_type = other DNA
tttgccgctatttctgcgtttggcaactggcgtagcgaagggcgttattaccgcccaatcccggagtggattgcc

SEQ ID NO: 392768 - DNA, 75 bp, synthetic construct
  source 1..75: mol_type = other DNA
gatggcagagtactttgcaactcggattaactaacgagatggcaagaaaatctaaaaggattatcccccctgctg

SEQ ID NO: 392769 - DNA, 75 bp, synthetic construct
  source 1..75: mol_type = other DNA
tccacgaaagaagaaggcttaaaagtctgcaaagaattaagcggatacacaaacatccttcaaccgattaagaaa

SEQ ID NO: 392770 - DNA, 75 bp, synthetic construct
  source 1..75: mol_type = other DNA
aaatatccttcaaccaattaagaaacatttcaaattagtcactgatgatttacaggacggcgacttactggtcac

SEQ ID NO: 392771 - DNA, 75 bp, synthetic construct
  source 1..75: mol_type = other DNA
tgtgctgcttgaccagtacactgccaacggcacttacggccggtattttaactctgatgagccgtccctgcggga

SEQ ID NO: 392772 - DNA, 75 bp, synthetic construct
  source 1..75: mol_type = other DNA
gtatctcgatcgggacaaaaaagcgaaatccccctatgccacactgtttcccggtgtggccaaacaggcccagga

SEQ ID NO: 392773 - DNA, 75 bp, synthetic construct
  source 1..75: mol_type = other DNA
ccaacggtacgctggatgaagtccaccacagcctgctgttgcgcggggttcaggaggcctgggaagaacacaagg

SEQ ID NO: 392774 - DNA, 75 bp, synthetic construct
  source 1..75: mol_type = other DNA
gttttctgctgcgggcggaaccccttatcggtgctaacgaacagattgtgtatgtgctggaagaccttatcaaaa

SEQ ID NO: 392775 - DNA, 75 bp, synthetic construct
  source 1..75: mol_type = other DNA
aggacgtggattccgactacgttcagttaagaggaaattgccatgacaaatcaaatttctgtcgaaaatcttgct

SEQ ID NO: 392776 - DNA, 75 bp, synthetic construct
  source 1..75: mol_type = other DNA
aaggtggcaagggtacgcattgaagccagaaaacgccgcaaatacaggccgcggaaggccagagccactgtatta

SEQ ID NO: 392777 - DNA, 75 bp, synthetic construct
  source 1..75: mol_type = other DNA
ctgcgcgtttccctatgcagcttcctgaattcttcattaaaatgcttacagatgaaggggatttagttcttgatc

SEQ ID NO: 392778 - DNA, 75 bp, synthetic construct
  source 1..75: mol_type = other DNA
ttatggccgggaaagggctgtttaaacagctgaaagaggccggtgtggttcagcgagcagagagctttaatgtgg

SEQ ID NO: 392779 - DNA, 75 bp, synthetic construct
  source 1..75: mol_type = other DNA
acctcctatgccaaatggtttccgtccgtggagaaagaagctaaggaatggggggaactgcgccagcggctgggc

SEQ ID NO: 392780 - DNA, 75 bp, synthetic construct
  source 1..75: mol_type = other DNA
cgaagccgttggtcgttacgtcgacactgtttgggcgctggcgcagggcaatgagctgctggtcgagcagcgtgt

SEQ ID NO: 392781 - DNA, 75 bp, synthetic construct
  source 1..75: mol_type = other DNA
ttgaatttatggtgatgccgggagaaaccgaagagcagctgcgtgagccgcaaaatatgcgcaagctgttaagca

SEQ ID NO: 392782 - DNA, 75 bp, synthetic construct
  source 1..75: mol_type = other DNA
acgggaaattcacttctaacggcgttcaggtggatgaccacggtcacggtggtgttaagtcaggtgacaactgga

SEQ ID NO: 392783 - DNA, 75 bp, synthetic construct
  source 1..75: mol_type = other DNA
ctcgacacggcgttcgttctgccggggatttattccggcgataaccccgcgccgtctgcgtcggcggatgccctg

SEQ ID NO: 392784 - DNA, 75 bp, synthetic construct
  source 1..75: mol_type = other DNA
gatgattctggccgtgggcggtgaactcgataccgcctttgtgctgccgggtatttattccgacgacaaccccgc

SEQ ID NO: 392785 - DNA, 75 bp, synthetic construct
  source 1..75: mol_type = other DNA
tgctcttaaatttaggtttaagggctggagagttgctcaatcttaaaatagatgattttgatctcagagacaaca

SEQ ID NO: 392786 - DNA, 75 bp, synthetic construct
  source 1..75: mol_type = other DNA
tgatgagcaatggcgaacgaggatgtttggttctcgataaagaaacacagttgcctgtttattatcaaaatctct

SEQ ID NO: 392787 - DNA, 75 bp, synthetic construct
  source 1..75: mol_type = other DNA
gaaatcgggacatcacgcatcactcataccgtcatgaacgcactgacgaaagtggatttgcccctatatttccag

SEQ ID NO: 392788 - DNA, 75 bp, synthetic construct
  source 1..75: mol_type = other DNA
cgtgccggacgttcacgcacatggtgggcaccttcggtgggggagcaggtgctgattctgtccgtgggcggcgaa

SEQ ID NO: 392789 - DNA, 75 bp, synthetic construct
  source 1..75: mol_type = other DNA
accctggacacaccggaggtggtctgcaccaacaggctgattaccggcacgctggaagtgcagaagggcgggaag

SEQ ID NO: 392790 - DNA, 75 bp, synthetic construct
  source 1..75: mol_type = other DNA
tcatcaaacgggaaggtactgcatacccacaaacacccaggcgacagcggcggcacaaccgggagtcctctatga

SEQ ID NO: 392791 - DNA, 75 bp, synthetic construct
  source 1..75: mol_type = other DNA
gcggtgaactctcatcaaacggtaaggtactgcatacccataaacacccaggagacagcggcggcacaaccggga

SEQ ID NO: 392792 - DNA, 75 bp, synthetic construct
  source 1..75: mol_type = other DNA
aactcgcgcgcgcactgcgcaacatgatccgcaccggcattatcgtcgaaaccgaccttaatgccggtcgctgcc

SEQ ID NO: 392793 - DNA, 75 bp, synthetic construct
  source 1..75: mol_type = other DNA
atgtcggggaacatcgagcacaccgaagggaaatttacctcaaacggcgtgcaggtcgatgcccacgatcatggt

SEQ ID NO: 392794 - DNA, 75 bp, synthetic construct
  source 1..75: mol_type = other DNA
gcggtgaactctcatcaaacgggaaggtactgcatacccacaaacacccaggcgacagcggcgacacaaccggga

SEQ ID NO: 392795 - DNA, 75 bp, synthetic construct
  source 1..75: mol_type = other DNA
cgccgatgactttaaccgcgttgagcatgggcgatgaacgggcgttgcactggctgcgctatctcactgctcttg

SEQ ID NO: 392796 - DNA, 75 bp, synthetic construct
  source 1..75: mol_type = other DNA
tggctgcgctatcttatggcgttggggtttgagaaggcagtattgctggagacggcggcagatctgcgctttgca

SEQ ID NO: 392797 - DNA, 75 bp, synthetic construct
  source 1..75: mol_type = other DNA
gagcgttttactctcgacgcaccgtttatctcgctcgaacagcgtactgaacatggattacgctgttgtcgggtt

SEQ ID NO: 392798 - DNA, 75 bp, synthetic construct
  source 1..75: mol_type = other DNA
gcgtcctgggtattaacatcggcaaaaataaagatacgccagtggagcagggcaaagatgactatctgatttgta

SEQ ID NO: 392799 - DNA, 75 bp, synthetic construct
  source 1..75: mol_type = other DNA
cagtgcatttcgtgcatcactggacgccgaataccggatacgcagggaggacgcaggcagcgaagcgctggttat

SEQ ID NO: 392800 - DNA, 75 bp, synthetic construct
  source 1..75: mol_type = other DNA
tttggattctggctggattcagctgcgagcgacaaaaatgctctgtgcgctcactggctaactgaggtcgacgac

SEQ ID NO: 392801 - DNA, 75 bp, synthetic construct
  source 1..75: mol_type = other DNA
agtcctcgacggatgtttactaccgtatccaaagcggcattgatggcgattgggcagggcgtcaggagggcagaa

SEQ ID NO: 392802 - DNA, 75 bp, synthetic construct
  source 1..75: mol_type = other DNA
ttgcattgaagatcgaaggctgaatcaacctttagtcaaaactggtgaaagggaaatcccattgtcggacgagtt

SEQ ID NO: 392803 - DNA, 75 bp, synthetic construct
  source 1..75: mol_type = other DNA
ccggcggtgaactctcatcaaacggtaaggtactgcatacccataaacaccccggcgacagcggcggcacaaccg

SEQ ID NO: 392804 - DNA, 75 bp, synthetic construct
  source 1..75: mol_type = other DNA
gcggggaaagcggagattacccgcgaaactgttgccgcggaagcgccagcgatacagtgcctgcaactggcaagg

SEQ ID NO: 392805 - DNA, 75 bp, synthetic construct
  source 1..75: mol_type = other DNA
ctttccagtcttgccggctggatctctcccggaggtaacgacggaaactccgtgaaattacaagtcaactcgctt

SEQ ID NO: 392806 - DNA, 75 bp, synthetic construct
  source 1..75: mol_type = other DNA
gatattgagtttggattctggctggattcggcagcgagcgacaaaaacgctctgtgcgctcactggctaactgag

SEQ ID NO: 392807 - DNA, 75 bp, synthetic construct
  source 1..75: mol_type = other DNA
ctgcggtttatcttactaaaggtggaatgaactttattctggaaactctttggcaaagttataatttatggcctt

SEQ ID NO: 392808 - DNA, 75 bp, synthetic construct
  source 1..75: mol_type = other DNA
tggactttgctgaactgttgctggaagactacaaagcctccctgaaatatctcagcgatcacccgaaactgcagg

SEQ ID NO: 392809 - DNA, 75 bp, synthetic construct
  source 1..75: mol_type = other DNA
gcgctggataaattccaggccgataccggtatcgacatcgacatgcacatcgacgctgccagcggtggcttcctg

SEQ ID NO: 392810 - DNA, 75 bp, synthetic construct
  source 1..75: mol_type = other DNA
ataaaacactctccaggaaacccggggcggttcacttagccgcgtgtccattattgctggataagatcataacga

SEQ ID NO: 392811 - DNA, 75 bp, synthetic construct
  source 1..75: mol_type = other DNA
aatgacttgttgatctatatgcaggacggcacggtgatccgctgcaacggttatttcctgcaagcggcaaatacc

SEQ ID NO: 392812 - DNA, 75 bp, synthetic construct
  source 1..75: mol_type = other DNA
atgttaacgattcaatttctctgtcctttgcctaacggtctacatgctcgtccggcgtgggaacttaaagagcag

SEQ ID NO: 392813 - DNA, 75 bp, synthetic construct
  source 1..75: mol_type = other DNA
aggtaaaacagcagccagaagaagaggcgcttatcctctttacctccggctctgaaggccatccaaaaggcgtgg

SEQ ID NO: 392814 - DNA, 75 bp, synthetic construct
  source 1..75: mol_type = other DNA
ggtggtcaaattggtactttcgccatcaacttctcccgcccggcgggtcaggtaattgcacagtactatgaattc

SEQ ID NO: 392815 - DNA, 75 bp, synthetic construct
  source 1..75: mol_type = other DNA
ctggggccgtatgagttcatctgtaccggtcgcccggacgaaggcatcccggcggtttgcttcaaactgaaagat

SEQ ID NO: 392816 - DNA, 75 bp, synthetic construct
  source 1..75: mol_type = other DNA
ggtcgtgaaggctataccaaagtacagaacgcttcctaccaggtcgctgcctatctggcggatgaaatcgccaaa

SEQ ID NO: 392817 - DNA, 75 bp, synthetic construct
  source 1..75: mol_type = other DNA
gactataaagcctccctgaaatatctcagcgatcacccgaaactgcagggtattgcccagcagaacagctttaaa

SEQ ID NO: 392818 - DNA, 75 bp, synthetic construct
  source 1..75: mol_type = other DNA
actggatcctgctgcccgccatgattctgctgatgattgaatcggtcgccagtttcgcctggtttattcgctggt

SEQ ID NO: 392819 - DNA, 75 bp, synthetic construct
  source 1..75: mol_type = other DNA
atgaaggtagatattgataccagcgataagctgtacgccgacgcatggcttggctttaaaggtacggactggaaa

SEQ ID NO: 392820 - DNA, 75 bp, synthetic construct
  source 1..75: mol_type = other DNA
tcgaccacttcatggactggctggcggtacagtacatcagcgcgctgaatatcattcactacatgcacgacaagt

SEQ ID NO: 392821 - DNA, 75 bp, synthetic construct
  source 1..75: mol_type = other DNA
tattgaaaacgcgactcatgcgccgttagatttcgataccaatattgccaccaccattaccgctcatgatgcggg

SEQ ID NO: 392822 - DNA, 75 bp, synthetic construct
  source 1..75: mol_type = other DNA
gctgtgcgctttaacgcgctgacccgcgaacagcaacaggatgtgatttcacgtacctttacccaggcgctctga

SEQ ID NO: 392823 - DNA, 75 bp, synthetic construct
  source 1..75: mol_type = other DNA
tcgcccgctactgggatgtggagctgcgtgagatccctatgcgccccggtcagttgtttatggacccgaaacgca

SEQ ID NO: 392824 - DNA, 75 bp, synthetic construct
  source 1..75: mol_type = other DNA
ttggcaccaacaccattggttcttccgaggcctgtatgctcggcgggatggcgatgaaatggcgttggcgcaagc

SEQ ID NO: 392825 - DNA, 75 bp, synthetic construct
  source 1..75: mol_type = other DNA
tgccgtttacctatgccaaagatgggatctcgtacaccttctccatcgtacctgcggcgctgggtaaagaagatc

SEQ ID NO: 392826 - DNA, 75 bp, synthetic construct
  source 1..75: mol_type = other DNA
tgactatcacttctaacgtggtgtacggccagaaaaccggtaacacgccagacggtcgtcgtgcgggtacaccgt

SEQ ID NO: 392827 - DNA, 75 bp, synthetic construct
  source 1..75: mol_type = other DNA
acgatggcatgcgggattgctggcttgtcggtggcgacggactccttgtccgcaattaaatatgctcgcgtgaaa

SEQ ID NO: 392828 - DNA, 75 bp, synthetic construct
  source 1..75: mol_type = other DNA
gtgactaccgccgcgtggcgctttacggcatcagttatctggtacgtgaacgcgaactgcaatttgccgatctcc

SEQ ID NO: 392829 - DNA, 75 bp, synthetic construct
  source 1..75: mol_type = other DNA
agcccaatggtgattggtaagcagatgcagttcttcggcgcacgcgctaacctggcgaaaacactgctgtacgca

SEQ ID NO: 392830 - DNA, 75 bp, synthetic construct
  source 1..75: mol_type = other DNA
aacgccgtccctacccagtcgattctgactatcacttctaacgtggtgtacggccagaaaaccggtaacacgccg

SEQ ID NO: 392831 - DNA, 75 bp, synthetic construct
  source 1..75: mol_type = other DNA
tgtcggtggcaacggactccctgtctgccatcaaatatgctcgcgtgaaaccaatccgtgacgaaaacggcctgg

SEQ ID NO: 392832 - DNA, 75 bp, synthetic construct
  source 1..75: mol_type = other DNA
gactacaaagcctccctgaaatatctcagcgaccacccgaaactgcagggtattgcccagcagaacagctttaaa

SEQ ID NO: 392833 - DNA, 75 bp, synthetic construct
  source 1..75: mol_type = other DNA
acctgacaacccggtgtcctcagcggggaaggaataaccccgccatacttaccgccgcgccatttcgcggattgc

SEQ ID NO: 392834 - DNA, 75 bp, synthetic construct
  source 1..75: mol_type = other DNA
ttttaaggaagctcgtcctgcaaggaaaaatgcaaggaacatgtaatttttccctgttagaagaaaaataccgag

SEQ ID NO: 392835 - DNA, 75 bp, synthetic construct
  source 1..75: mol_type = other DNA
tattaagaaaccttgccttgcaaggcagaatgcaaggaacatgcgactttgccgtattagaagaaaaatatcaac

SEQ ID NO: 392836 - DNA, 75 bp, synthetic construct
  source 1..75: mol_type = other DNA
tagaatcaatcgaaattgaaaatatttcaattcccgtaggaacaccatgtgaaatacaagttcgaacacttcttc

SEQ ID NO: 392837 - DNA, 75 bp, synthetic construct
  source 1..75: mol_type = other DNA
aaaacgacaatgtttctttgcagacctttaacgaaaaataaaactttagatggctataattgggaaagtggaata

SEQ ID NO: 392838 - DNA, 75 bp, synthetic construct
  source 1..75: mol_type = other DNA
ttaacgccggatacagagcattctcgttactcagcaaatgaccgctttaccgatttaactgttccgcgtgcgctg

SEQ ID NO: 392839 - DNA, 75 bp, synthetic construct
  source 1..75: mol_type = other DNA
agcagcctggggtaactctgccttcaaggtggttctcaagcaggatgcgtcggaattcaaacagtacaaccagaa

SEQ ID NO: 392840 - DNA, 75 bp, synthetic construct
  source 1..75: mol_type = other DNA
tcaccgtggcgcgttcatcaccataagtcagaacatcaaggactttgatgccgatgatgcctccggcgcagcaaa

SEQ ID NO: 392841 - DNA, 75 bp, synthetic construct
  source 1..75: mol_type = other DNA
ctgtgagaacgtcggcgggacatacctggacggcaagtcactcaaattcaacccgtttgccaatatttccaacat

SEQ ID NO: 392842 - DNA, 66 bp, synthetic construct
  source 1..66: mol_type = other DNA
atgcaatatgcgaaacctgtcactctgaatgttgaagagtgcgaccgtctgttttttctgccttac

SEQ ID NO: 392843 - DNA, 75 bp, synthetic construct
  source 1..75: mol_type = other DNA
gtgttggggcatctttctcgcccgtggattggcaactgggtggcgcgtaataaaaagtggattgcgaaaactgac

SEQ ID NO: 392844 - DNA, 75 bp, synthetic construct
  source 1..75: mol_type = other DNA
gggatgccaaagaccagtggttctcctcctttatgctgcgcatcaacgatacctgcagtttccatcgtctctttg

SEQ ID NO: 392845 - DNA, 75 bp, synthetic construct
  source 1..75: mol_type = other DNA
acattcttaatctgaccgctccatggcaggttaaattccttacctttgatgaaaatgcaggttctgttactgtta

SEQ ID NO: 392846 - DNA, 75 bp, synthetic construct
  source 1..75: mol_type = other DNA
ccctggttgtgttgaatggcgtggcgttattgcctcagtttgcctgtaaacaggggcttgcgaacggggaactgg

SEQ ID NO: 392847 - DNA, 75 bp, synthetic construct
  source 1..75: mol_type = other DNA
ttccagaaccgtaaaatataatggcagtagctatcccttcccgaccaccagcgaaacgccgcgcattgtttataa

SEQ ID NO: 392848 - DNA, 75 bp, synthetic construct
  source 1..75: mol_type = other DNA
gattaaagctggctcattaattgccgtgcttattttgcgacagaccaacaactataacagcgatgatttccagtt

SEQ ID NO: 392849 - DNA, 75 bp, synthetic construct
  source 1..75: mol_type = other DNA
agactacaaagcttccctgaaatatctcagcgatcacccgaaactgcagggtattgcccaacagaacagctttaa

SEQ ID NO: 392850 - DNA, 75 bp, synthetic construct
  source 1..75: mol_type = other DNA
cagaagatagaacagcctggcggagtaacagatcctgccgagttgtatgctctgcaggtccggaccgcaaattat

SEQ ID NO: 392851 - DNA, 75 bp, synthetic construct
  source 1..75: mol_type = other DNA
tttgcggggcgaaaggggatgcccgccattgcgcgatattttatggatgagttaaccacccggcttgccaacggg

SEQ ID NO: 392852 - DNA, 75 bp, synthetic construct
  source 1..75: mol_type = other DNA
cgacaaagaagaatatccgcaatccgctgcaatcgatctgcgttgcgtaaacatggttgccgatctgtggcatgc

SEQ ID NO: 392853 - DNA, 75 bp, synthetic construct
  source 1..75: mol_type = other DNA
caaagtacagaacgcttcctaccaggttgctgcctatctggcggatgaaatcgccaaactggggccgtatgagtt

SEQ ID NO: 392854 - DNA, 75 bp, synthetic construct
  source 1..75: mol_type = other DNA
ttcccggccaggctaaccgtttttatgaaggcgctatttccgaacacctgcaaattggcattcgggcgatcgatt

SEQ ID NO: 392855 - DNA, 75 bp, synthetic construct
  source 1..75: mol_type = other DNA
ttcgagaacggataagccgtggccggtggcgctttatttgacgcctgtgagcagtgcaggcggggtggcgattaa

SEQ ID NO: 392856 - DNA, 75 bp, synthetic construct
  source 1..75: mol_type = other DNA
ctggtgttcaacgttgactatctcggtggtcagattgggactttcgccatcaacttctcccgcccggcgggtcag

SEQ ID NO: 392857 - DNA, 75 bp, synthetic construct
  source 1..75: mol_type = other DNA
tattcctgctgcgacgcttgcagagggatatatcagcgtcgatacgctggttgtcggcgcgggtgactacacctg

SEQ ID NO: 392858 - DNA, 75 bp, synthetic construct
  source 1..75: mol_type = other DNA
cctgcacgcagaaaatacgcacaaggaggtgcgtatcgcgtcaccgtggccggcgcaaaataccattattgccat

SEQ ID NO: 392859 - DNA, 75 bp, synthetic construct
  source 1..75: mol_type = other DNA
aagaaaaatcagaacacagttaccacataaaatcagggttgtggcttcaggacttttacaggtatttaatacaag

SEQ ID NO: 392860 - DNA, 75 bp, synthetic construct
  source 1..75: mol_type = other DNA
catcatgacgtttgccgttaccagcatcaacgcacgcaaaaagggaaactcccatacacaggatctgttatcacc

SEQ ID NO: 392861 - DNA, 75 bp, synthetic construct
  source 1..75: mol_type = other DNA
ttgttctactgaataagatcacccgctatggtttccagattgagcaatataaaacgtgttttgaattatacgaaa

SEQ ID NO: 392862 - DNA, 75 bp, synthetic construct
  source 1..75: mol_type = other DNA
aaaacgagccgggaactgcagagctgatgaaatggtacacacaggcgcaagtaggtgatggcggatatccgcggt

SEQ ID NO: 392863 - DNA, 75 bp, synthetic construct
  source 1..75: mol_type = other DNA
cgcaaagagacgcgtgagttttatcggcagttctttggcctgacgttaagcgatgcgcagatgagcgatgtgctc

SEQ ID NO: 392864 - DNA, 75 bp, synthetic construct
  source 1..75: mol_type = other DNA
tacaaagaaccagcgtgccattgtatgtcacaatgagttttgataaaggcaattgtacgatggtgacgcgtcagc

SEQ ID NO: 392865 - DNA, 75 bp, synthetic construct
  source 1..75: mol_type = other DNA
gttggctgaagcgaagctgcatggcgaagatgtttctctggatgcgctaaaacgtatcttgcgtccgtggttaag

SEQ ID NO: 392866 - DNA, 75 bp, synthetic construct
  source 1..75: mol_type = other DNA
cgttgccggttatttatgtactgaaggtgagcaaaaagtggttggtctggaaatcaatgctaaccacgtccgctc

SEQ ID NO: 392867 - DNA, 75 bp, synthetic construct
  source 1..75: mol_type = other DNA
ctctgaaagctcatttgatgcacatgaacgaaagtaactgcgaagagtacttacctacctgtgaaggttttttct

SEQ ID NO: 392868 - DNA, 75 bp, synthetic construct
  source 1..75: mol_type = other DNA
ttactggcatgacgtgggggagttgaaagagattgtggaagatctgattaagaaccacgactttcacaataatag

SEQ ID NO: 392869 - DNA, 75 bp, synthetic construct
  source 1..75: mol_type = other DNA
gtatttaatacaagcattgacatagagaacctatcaaatgaaattacaaattgctctgtgcgccgcattgttata

SEQ ID NO: 392870 - DNA, 75 bp, synthetic construct
  source 1..75: mol_type = other DNA
atgtctggacgtcggtcggtgtcatttttggtgtcggactggtttatctgaccggctggttttgggtcgatccga

SEQ ID NO: 392871 - DNA, 75 bp, synthetic construct
  source 1..75: mol_type = other DNA
aattccggtttatcaactggctgactatctttctaccgaatgtagcgacatctgggcgctgcaaggtaaatcaac

SEQ ID NO: 392872 - DNA, 75 bp, synthetic construct
  source 1..75: mol_type = other DNA
aaaccggctggaaatttctcgccggatacgccgcacgagagtgaaaagcccgcgccatccacccatgaggtcact

SEQ ID NO: 392873 - DNA, 75 bp, synthetic construct
  source 1..75: mol_type = other DNA
cctttccgaaccggtacgggatcaccttagtcggggatctctatataccgaaggatcgtggcgatcgcaagctgg

SEQ ID NO: 392874 - DNA, 75 bp, synthetic construct
  source 1..75: mol_type = other DNA
atgttatggagcagcaacgatgttacgcagcagggcagtcgccctaaaacaaagttagccattaagggagttaaa

SEQ ID NO: 392875 - DNA, 75 bp, synthetic construct
  source 1..75: mol_type = other DNA
attcgtcttgaaatgtttggttttattttcacgattactgctgtatgcacattcaacaataacttaacatggcca

SEQ ID NO: 392876 - DNA, 75 bp, synthetic construct
  source 1..75: mol_type = other DNA
gtcgatatgttttttgttatttcaggattcctgatgacaaaaataataataacaggacttgagaaaggtgatttc

SEQ ID NO: 392877 - DNA, 75 bp, synthetic construct
  source 1..75: mol_type = other DNA
tgggcgcagtttgtcagtatgcaggatcactacaatctgatttatcgcgaagaagagcgcgagatgctgcctctg

SEQ ID NO: 392878 - DNA, 75 bp, synthetic construct
  source 1..75: mol_type = other DNA
caacgacgtggtaaaagccgggaaagcgcgttatatcggcgcgtcatccatgcacgcttcgcagtttgctcaggc

SEQ ID NO: 392879 - DNA, 75 bp, synthetic construct
  source 1..75: mol_type = other DNA
aagcgatgaaaatgacgcgcagatcgcagagcggttaacgggcgtcagtgaagaactcggtgcaacacgagcaca

SEQ ID NO: 392880 - DNA, 75 bp, synthetic construct
  source 1..75: mol_type = other DNA
gcctggaaaaagcggggctggcaattgaagtaaaacattacgccatagaaaacgtgcctgcggatgcggatatcg

SEQ ID NO: 392881 - DNA, 75 bp, synthetic construct
  source 1..75: mol_type = other DNA
tcaagaaagcgatgaaaatgatgcgcaaatagcggcccgcttagccagcgtaagtgaagagtcaggcgtcacacg

SEQ ID NO: 392882 - DNA, 75 bp, synthetic construct
  source 1..75: mol_type = other DNA
tgatgaactgctaaacgcggtggatatcaccttgaagccggaacagatcgccgagctggaaacgccgtataaacc

SEQ ID NO: 392883 - DNA, 75 bp, synthetic construct
  source 1..75: mol_type = other DNA
tcgaggcgctgaacgccatgggtgacggaaacatggtggggttgctggatattcgttttgaacatattggtgatg

SEQ ID NO: 392884 - DNA, 75 bp, synthetic construct
  source 1..75: mol_type = other DNA
cccgctctgtgctacagatgctcctgctccggaggcattatcagttgcttgtgcggcttcctgccatgtggaatt

SEQ ID NO: 392885 - DNA, 75 bp, synthetic construct
  source 1..75: mol_type = other DNA
gtacggcttcctgccatgtggaattccattacggtaaaatgactctggaaaatccttcaccagagctgctcacgg

SEQ ID NO: 392886 - DNA, 75 bp, synthetic construct
  source 1..75: mol_type = other DNA
gaccgacacgccgcctacattactggtgtgcctgaatcgtggggcgtccgtctggccggtattcaatgaaaatcg

SEQ ID NO: 392887 - DNA, 75 bp, synthetic construct
  source 1..75: mol_type = other DNA
gtgaaacagaagcaatttcacgtatcaagaagatgatcgcggaacttgagcaggccgatgcgaatggcatcacgg

SEQ ID NO: 392888 - DNA, 75 bp, synthetic construct
  source 1..75: mol_type = other DNA
gccgtaaaagcaatacgtgatacagtcggaaacgaagagtttcagcgcttagcgagggccggtattgtggcatcg

SEQ ID NO: 392889 - DNA, 75 bp, synthetic construct
  source 1..75: mol_type = other DNA
gcctgttcaccaaacgccttgaggaaggtcagtttatctggcctgcggtgcgtgacggtaagatatccattaccc

SEQ ID NO: 392890 - DNA, 75 bp, synthetic construct
  source 1..75: mol_type = other DNA
tggctgcgcgcaacctgcacaaggttgacgtacgcgatgcaactggtatcgatccggttagcctgatcgccttcg

SEQ ID NO: 392891 - DNA, 75 bp, synthetic construct
  source 1..75: mol_type = other DNA
aattgggtattgaatttcagtccgatgcgcagcatgtgaccatcagggccgtgcctttacccttacgccaacaaa

SEQ ID NO: 392892 - DNA, 75 bp, synthetic construct
  source 1..75: mol_type = other DNA
atggtcgcatgatgcgcgatcgcctgatcaatcacgcgatccgccaggcctgtgaagacaaactgggggccgatc

SEQ ID NO: 392893 - DNA, 75 bp, synthetic construct
  source 1..75: mol_type = other DNA
ccattacggtaaaatgacactggaaaatccttcaccagagctgctcacggtgttgatccatgaactgatcgggag

SEQ ID NO: 392894 - DNA, 75 bp, synthetic construct
  source 1..75: mol_type = other DNA
tgcgcgttctggttctatcaagagcccgatctggcgttctggtggcgtgacctttgctgctcgtccgcaggacca

SEQ ID NO: 392895 - DNA, 75 bp, synthetic construct
  source 1..75: mol_type = other DNA
tggttccagtggaacttatcgacaccccgcgctgtgaaccgccccgggaatcctggagactaaacttcctgagaa

SEQ ID NO: 392896 - DNA, 75 bp, synthetic construct
  source 1..75: mol_type = other DNA
cggccttcaatgaaatatcctcaaagttgaataagcagttgtctgatttcggtgctgagtctggaagcgcatcag

SEQ ID NO: 392897 - DNA, 75 bp, synthetic construct
  source 1..75: mol_type = other DNA
cagcacttcctactactggatacatccgccgttttcgtatgccggaacttctgggtgtttccatgccaaccattg

SEQ ID NO: 392898 - DNA, 75 bp, synthetic construct
  source 1..75: mol_type = other DNA
attggtatggctgacaataacaaagataaaaccatgtataagagattacatgatgaaaaaatagatgtaatggta

SEQ ID NO: 392899 - DNA, 75 bp, synthetic construct
  source 1..75: mol_type = other DNA
gctttgaataataaaaaactaaaatttgttattggtgatactcgctgttatgaaagtataaatgaagctatgaga

SEQ ID NO: 392900 - DNA, 75 bp, synthetic construct
  source 1..75: mol_type = other DNA
tggttctggctgagagtatcggttccgttgccggttatttatgtaccgaaggcgagcaaaaagtcgttggtctgg

SEQ ID NO: 392901 - DNA, 75 bp, synthetic construct
  source 1..75: mol_type = other DNA
ggcgcgagaagggcgagtccgcggcgtttgcagaccgttacatctcggttcgcgtcatcaggtctggcagatcga

SEQ ID NO: 392902 - DNA, 75 bp, synthetic construct
  source 1..75: mol_type = other DNA
cccggtaaaactcaccaataacgtgaccgtctttgatgcggtagagattaacaactggctggcagagcgtcgggg

SEQ ID NO: 392903 - DNA, 75 bp, synthetic construct
  source 1..75: mol_type = other DNA
cgatcccccctcctgaatgcaatttttcgtatatatatacaaaacagtgcgggttatgcgggttaccgggttatc

SEQ ID NO: 392904 - DNA, 75 bp, synthetic construct
  source 1..75: mol_type = other DNA
cgatcccccctcctgaatgcaatttttcgtatatatatatacaaaacagtgcgggttatgcgggttaccgggtta

SEQ ID NO: 392905 - DNA, 75 bp, synthetic construct
  source 1..75: mol_type = other DNA
aaaacagcagagaatatggcatgggcagaactgcgaagcacgatgccacgcgaaaggatgaaaatgagtaatggg

SEQ ID NO: 392906 - DNA, 75 bp, synthetic construct
  source 1..75: mol_type = other DNA
gcagaagacagccataagttcgtcaacggcgtactcgataaagcagcacctgtgattcgccctaacaaaaagtga

SEQ ID NO: 392907 - DNA, 75 bp, synthetic construct
  source 1..75: mol_type = other DNA
atgatcatcgcaaagcagaaatttatcatggaaaaatctgggataaggttcctgcatctgcctggcggaatgtaa

SEQ ID NO: 392908 - DNA, 75 bp, synthetic construct
  source 1..75: mol_type = other DNA
gaatggccgtcttctagtttgttacttgctgcaactaacttcgctgagttgattgatccagcactatggagacgt

SEQ ID NO: 392909 - DNA, 75 bp, synthetic construct
  source 1..75: mol_type = other DNA
tggaggcctgtagttaccatatggaaaagggcttttcccgcgtttatcagcgttacttgctgaacctgttaaaag

SEQ ID NO: 392910 - DNA, 75 bp, synthetic construct
  source 1..75: mol_type = other DNA
aattgccatctgcaaaccatgctgccgcgtctgtttcgtcgtcaggtgaaattcaccccgtactggcagcggctg

SEQ ID NO: 392911 - DNA, 75 bp, synthetic construct
  source 1..75: mol_type = other DNA
gatcgccaaaccgacgctgattattcacgccaaagacgatccgtttatggatcatcaggtgatcccgaaaccgga

SEQ ID NO: 392912 - DNA, 75 bp, synthetic construct
  source 1..75: mol_type = other DNA
aattacgcacgtaccggagggcaggtgactgcagggaatgtgcaatcgattattgccgtgacttttgtttatcaa

SEQ ID NO: 392913 - DNA, 75 bp, synthetic construct
  source 1..75: mol_type = other DNA
tatgacaaatataatactctggcctgggaattaatttcgcacctgtggtttttactggtattggtggtcatgacg

SEQ ID NO: 392914 - DNA, 75 bp, synthetic construct
  source 1..75: mol_type = other DNA
gtaattgtctccgcgccgtttatgctggaagcctgtagctatcacatggataaaggcttctcccgcgtttatcag

SEQ ID NO: 392915 - DNA, 75 bp, synthetic construct
  source 1..75: mol_type = other DNA
gagcagatccgaatgttcatttcagacactgcttacgatatgccgctttataacaacgagtctgactttcgcagg

SEQ ID NO: 392916 - DNA, 75 bp, synthetic construct
  source 1..75: mol_type = other DNA
taaataactcggatgatgtcgttattgccaggacagaacttcctgccggaagctggctggaatctgaaagtatgg

SEQ ID NO: 392917 - DNA, 75 bp, synthetic construct
  source 1..75: mol_type = other DNA
tcttgagtgtggcggctctgatagctattcaggaatttccgctaatccggctctcgggtacgcagttgatcgcct

SEQ ID NO: 392918 - DNA, 75 bp, synthetic construct
  source 1..75: mol_type = other DNA
taatgatgatcagtattgtggcgtggatcctgcgttttgcgctgtttgcttacggcgacccgactccgttcggta

SEQ ID NO: 392919 - DNA, 75 bp, synthetic construct
  source 1..75: mol_type = other DNA
aacatctctggttcggtgtttgtcgaaaaagaagttagcccggcaattcgcgccagtgcgcaggggatgttcctg

SEQ ID NO: 392920 - DNA, 75 bp, synthetic construct
  source 1..75: mol_type = other DNA
agcctctctggtttcgaactgagccatatgcagctgtatattggcgccgcactctctgccattctggtgctgttt

SEQ ID NO: 392921 - DNA, 75 bp, synthetic construct
  source 1..75: mol_type = other DNA
ttccgggaccgtaaaatatagtggcagtagctatccatttccgaccaccagtgaaacgccgcgggttgtttataa

SEQ ID NO: 392922 - DNA, 75 bp, synthetic construct
  source 1..75: mol_type = other DNA
gcggcacgtttaaatcaaacggtgtgcaggtggatgaccacggccacggcggtgttaaaggcggggatagctgga

SEQ ID NO: 392923 - DNA, 75 bp, synthetic construct
  source 1..75: mol_type = other DNA
gcggcacgtttaaatccaacggcgtgcaggtggatgaccacgaccacggcggcgtgaagcggggcgatgacagaa

SEQ ID NO: 392924 - DNA, 75 bp, synthetic construct
  source 1..75: mol_type = other DNA
caagtgattacctgccacagacaacttggccaacaactcaattaccaccaggatatacttgtgcagaaccctatt

SEQ ID NO: 392925 - DNA, 75 bp, synthetic construct
  source 1..75: mol_type = other DNA
gcgggtcactgtcatctaatgacaaggtgctccacacccataaacaccccggcgacagcggcgggcaaacggggg

SEQ ID NO: 392926 - DNA, 75 bp, synthetic construct
  source 1..75: mol_type = other DNA
ctgttactgccacggtaccggtggtcacggtgaaagcgtcaacccgtgtcaccctggacacaccagaagtggtct

SEQ ID NO: 392927 - DNA, 75 bp, synthetic construct
  source 1..75: mol_type = other DNA
gtaccaacaagctgacgacagcaacgcttgaggtacaaaagggcggcaagatgaaaggcaacatcgaacattccg

SEQ ID NO: 392928 - DNA, 75 bp, synthetic construct
  source 1..75: mol_type = other DNA
atgaacactctcgcaaatatccaggaactcgcgcgcgcactgcgcaacatgatccgcaccggccttgtcgtcgaa

SEQ ID NO: 392929 - DNA, 75 bp, synthetic construct
  source 1..75: mol_type = other DNA
agttagcacgtgccattcgcaacctcatccgctcaggcgtggtgactgaggtcgatactgtgcaggggctgtgcc

SEQ ID NO: 392930 - DNA, 75 bp, synthetic construct
  source 1..75: mol_type = other DNA
gagcaacggttgtgtcgccagcgggtctgggtgggtaatgacacactgatgacgccacgggaacaacattttttc

SEQ ID NO: 392931 - DNA, 75 bp, synthetic construct
  source 1..75: mol_type = other DNA
atgataacgataactgaactggaagacgaaataataaaaaataaagaagccgcaaatgtttttattgaaaaaata

SEQ ID NO: 392932 - DNA, 75 bp, synthetic construct
  source 1..75: mol_type = other DNA
atgaaataataaaaaacaaagaagctgccgccatttttattgaaaaaataaacgataaaaaaaacgaaatccatg

SEQ ID NO: 392933 - DNA, 75 bp, synthetic construct
  source 1..75: mol_type = other DNA
ggccatccggtcaatccgctgctcggtgcgaaggtccttcccggcgaaaccgaccttgccctgcccggcccgctg

SEQ ID NO: 392934 - DNA, 75 bp, synthetic construct
  source 1..75: mol_type = other DNA
gaatttggagtatctagattaaacaaaagaattattatacatctaataaaagatcaactcacagtcacttttagg

SEQ ID NO: 392935 - DNA, 75 bp, synthetic construct
  source 1..75: mol_type = other DNA
atgcgtcaacacaaattagagagcttgtttctggctcttataatcttgctatatattccaacactggaaaggttc

SEQ ID NO: 392936 - DNA, 75 bp, synthetic construct
  source 1..75: mol_type = other DNA
tgcaatatcattctgtggaacaaatgatatctgcgatattgttgattatacacagctcaataatggaaaagcgct

SEQ ID NO: 392937 - DNA, 75 bp, synthetic construct
  source 1..75: mol_type = other DNA
aaaccgcgatgccgaccatgctgcttttcgcatcattaagtggagtcacgacaatgagttatgctgattcaacca

SEQ ID NO: 392938 - DNA, 75 bp, synthetic construct
  source 1..75: mol_type = other DNA
ctgttcggaaatattatttttggtcttgacggaaatgatatattacatagtgccgggggagaaggagtaagtctt

SEQ ID NO: 392939 - DNA, 75 bp, synthetic construct
  source 1..75: mol_type = other DNA
ttttatacacagacctttatggttcattcctctggaatattatccccttttctgtgcttgcactcccgctgggaa

SEQ ID NO: 392940 - DNA, 75 bp, synthetic construct
  source 1..75: mol_type = other DNA
ttttgaaaacgatccggtatttcgtgtgctgggagatggagccgggttctgggaggcagttaaagcaatggggcc

SEQ ID NO: 392941 - DNA, 75 bp, synthetic construct
  source 1..75: mol_type = other DNA
gatctgatcattgccgacgaatcccatcgttctatctacaacgtatacggcgatctgtttaagtattttgatgcc

SEQ ID NO: 392942 - DNA, 75 bp, synthetic construct
  source 1..75: mol_type = other DNA
cagaacgccaggatctacattgccacctatcccggcatgatgaaaatcatggatcattttgatgttggttatttc

SEQ ID NO: 392943 - DNA, 75 bp, synthetic construct
  source 1..75: mol_type = other DNA
caccggcaccggtaaaacccgtgtagcgattgcactgagcaaactgatgatagatgcccgctgggtaaaacgcgt

SEQ ID NO: 392944 - DNA, 75 bp, synthetic construct
  source 1..75: mol_type = other DNA
gacgcggcgatggatacccgcgttaaagcggtagctaccagcgtgatgtatgacatgagccgggcgatgggccat

SEQ ID NO: 392945 - DNA, 75 bp, synthetic construct
  source 1..75: mol_type = other DNA
ggagcgcctgccgccgcatttggcgcaggtgcagcaacagggacaacgaatcaatcagcttcgtgatctaggctg

SEQ ID NO: 392946 - DNA, 75 bp, synthetic construct
  source 1..75: mol_type = other DNA
ttaatcaacttcgtgatttaggctggtggaagcaagccagcctggaagagctggaggatatccgcattcatctgc

SEQ ID NO: 392947 - DNA, 75 bp, synthetic construct
  source 1..75: mol_type = other DNA
gatctctgcgtcttataatattgcagtatatgccaatacaggaaaggttcttggattaggaagttttctggtatc

SEQ ID NO: 392948 - DNA, 75 bp, synthetic construct
  source 1..75: mol_type = other DNA
ataccgtttcaactgccagccccgtcattacagagcctgcaacaaccgtcatttccattgagcccgccaatcctg

SEQ ID NO: 392949 - DNA, 75 bp, synthetic construct
  source 1..75: mol_type = other DNA
tagaagcatatgacaaggagtgccgcaaagagctttcgatcgcgttagcacaggcttatcttcattcgcatatga

SEQ ID NO: 392950 - DNA, 75 bp, synthetic construct
  source 1..75: mol_type = other DNA
gcatgggcgcaggcggggctggcgatcccggcgttaggcaccacgcacgctgactacttctttggtgatatcccg

SEQ ID NO: 392951 - DNA, 75 bp, synthetic construct
  source 1..75: mol_type = other DNA
tgccccatcacatcctcaacatcaaagtattagagccttgcaaaccattatgcgtctcagtttgtctcatctatc

SEQ ID NO: 392952 - DNA, 75 bp, synthetic construct
  source 1..75: mol_type = other DNA
acctatccggcaaacgttgctcaagcagtgcaatggtcgcacgataatccacttaaacaaggcgatgctgctatt

SEQ ID NO: 392953 - DNA, 75 bp, synthetic construct
  source 1..75: mol_type = other DNA
ccaatgtgctggtgcttatttgcagtgccgggctttgtgccgcctcagcagggctatatataaaaagccgcacgc

SEQ ID NO: 392954 - DNA, 75 bp, synthetic construct
  source 1..75: mol_type = other DNA
aaagcggccgatatggtggtggttgatatgagcggcaaggtggtggaaggggagtatcgcccgtcttccgacacc

SEQ ID NO: 392955 - DNA, 75 bp, synthetic construct
  source 1..75: mol_type = other DNA
ccacaactgaatcacatcgacagctatctcatgaataaacacttcatgcgtaagcacggtcctaacgcctattac

SEQ ID NO: 392956 - DNA, 75 bp, synthetic construct
  source 1..75: mol_type = other DNA
aggtgcagggtgagtacgaactgaacaccggcaaagtgattatcgaaacgctgggcaacgccgagccgctgcata

SEQ ID NO: 392957 - DNA, 75 bp, synthetic construct
  source 1..75: mol_type = other DNA
gcgacgcatctcgaactctaccgtcgttacccgtcgcttggcggcattgtccatacccactccactcatgccacc

SEQ ID NO: 392958 - DNA, 75 bp, synthetic construct
  source 1..75: mol_type = other DNA
aaagcagacgatatggtggtggtcgatatgagcggcaaggtggtagaagggaagtatcgcccgtcttctgacacc

SEQ ID NO: 392959 - DNA, 75 bp, synthetic construct
  source 1..75: mol_type = other DNA
agatcacgtccatttgttaattaattatcctcccaaactggcgatatccagtctggtaaacagcctcaaaggcgt

SEQ ID NO: 392960 - DNA, 75 bp, synthetic construct
  source 1..75: mol_type = other DNA
gctcccccgtttgggggcgctcaaatccttgtgagttagccgcgtgctatttgcataactcaatcagggttgcgc

SEQ ID NO: 392961 - DNA, 75 bp, synthetic construct
  source 1..75: mol_type = other DNA
tctgcacaactcattaatagttgcgcaaaacagaccctttttaagaggggcagtccacagcattacggggagtaa

SEQ ID NO: 392962 - DNA, 75 bp, synthetic construct
  source 1..75: mol_type = other DNA
agataacacttctatctggctggttgtatggggtgaaaacactgttcacggcatcttcccgaaaggtcaaaaggc

SEQ ID NO: 392963 - DNA, 75 bp, synthetic construct
  source 1..75: mol_type = other DNA
taacgctggctgactggggtaagcgcgtcgatccaaatgggaaagtcgataagattatcgagcttctcaatcaaa

SEQ ID NO: 392964 - DNA, 75 bp, synthetic construct
  source 1..75: mol_type = other DNA
ggacaccgaaccaccattcgttctggtttaccttcagctacctggcgtttgctgaactatggcgtacagccaagc

SEQ ID NO: 392965 - DNA, 75 bp, synthetic construct
  source 1..75: mol_type = other DNA
cggctggataatggcggaaacggtgaaggatttggcccctcaccatcactctgcaactcaaagacaaatatggtc

SEQ ID NO: 392966 - DNA, 75 bp, synthetic construct
  source 1..75: mol_type = other DNA
acgattgcgttcagtgccacgccactaaacgggcgctggaaaaccggggttttgactttgaaatgattaatgtcg

SEQ ID NO: 392967 - DNA, 75 bp, synthetic construct
  source 1..75: mol_type = other DNA
cagattgatgcgctgccagtcctgctttacaccaaacttcacccaccaatccagaccaatcagttcattacgtat

SEQ ID NO: 392968 - DNA, 75 bp, synthetic construct
  source 1..75: mol_type = other DNA
tggagcaggaactgaccttgctgtggaagcgggagatgattaccggctgctacctgccaacctggtgtcagcttg

SEQ ID NO: 392969 - DNA, 75 bp, synthetic construct
  source 1..75: mol_type = other DNA
actcctgcggaatgctggaaacctatgccgaaatcgataagtctctggctgacctgaacggcaacaccgctgaat

SEQ ID NO: 392970 - DNA, 75 bp, synthetic construct
  source 1..75: mol_type = other DNA
gccaggttatcatggatggcaacaggaattctggctcgcgcattgtggcgatttctgtgcttttatcggctatgt

SEQ ID NO: 392971 - DNA, 75 bp, synthetic construct
  source 1..75: mol_type = other DNA
cgtgaaaagggaatagttgttacagaaatggggggaaccctcggccagtatcgggctgtaaccattatcaagaag

SEQ ID NO: 392972 - DNA, 75 bp, synthetic construct
  source 1..75: mol_type = other DNA
tgcgctgcatgttccagggacggcattttctgcaactgggtgcggaatcactccgtgatggtgagcagataagtg

SEQ ID NO: 392973 - DNA, 75 bp, synthetic construct
  source 1..75: mol_type = other DNA
cggggtttctatctttatggtcagaaagggcgtaaaagcaaaaaacaggtcgatcccgccatttacccgctcatt

SEQ ID NO: 392974 - DNA, 75 bp, synthetic construct
  source 1..75: mol_type = other DNA
tttggaattgggtttccgccgtttctcggtggcccatttcgctatatcgacgctctcggtgcggcagaagtggtt

SEQ ID NO: 392975 - DNA, 75 bp, synthetic construct
  source 1..75: mol_type = other DNA
tcttctggtgtttacgggtattttaacgctgttgaagatgcctgtcggaaaaattttcacataactaattcatat

SEQ ID NO: 392976 - DNA, 75 bp, synthetic construct
  source 1..75: mol_type = other DNA
ccttgcgatcgtttagttgagatgagcgagcgtggggaaagtttttggaaaacaactgcaactgacctgcaataa

SEQ ID NO: 392977 - DNA, 75 bp, synthetic construct
  source 1..75: mol_type = other DNA
cggtgctcggtttgcctgaagtacaacttggattgttacccggttcaggcggcacccagcgtttaccgcgcctga

SEQ ID NO: 392978 - DNA, 75 bp, synthetic construct
  source 1..75: mol_type = other DNA
taaatgtacgtctggacaatattgccgtcatcaccattgacgttcccggcgaaagaatgaataccctgaaggcag

SEQ ID NO: 392979 - DNA, 75 bp, synthetic construct
  source 1..75: mol_type = other DNA
ggtcaggctgcgttaggcgttgtctgcctgggatatgcgatatcgctgtcgaaaaaaaatcaagcaattacgtca

SEQ ID NO: 392980 - DNA, 75 bp, synthetic construct
  source 1..75: mol_type = other DNA
cggcaggcgcaggactctggtctgccgtttttcatggggcataaaaaacaggaaggtgctgcgatgaaggtgatt

SEQ ID NO: 392981 - DNA, 75 bp, synthetic construct
  source 1..75: mol_type = other DNA
atgaaggtaattctggccacaaggaaccgctacctggaatatggcctgcaggcgttactgaaggaacacagtgtg

SEQ ID NO: 392982 - DNA, 75 bp, synthetic construct
  source 1..75: mol_type = other DNA
aagatttatatgccttcagtgtttccacggctaccatcagtgcggttaccgataaagtcattcctgagttaaaac

SEQ ID NO: 392983 - DNA, 75 bp, synthetic construct
  source 1..75: mol_type = other DNA
cggcgaatatccgcaaggtgatctacacaaccaacgcgatagaatcagtccaccgcaagttcaggaaactgacca

SEQ ID NO: 392984 - DNA, 75 bp, synthetic construct
  source 1..75: mol_type = other DNA
ggatgagctggaagcgaaacgggggcagcaatatccggtggtgctccagtcctggcgccgcaagagggaaaatct

SEQ ID NO: 392985 - DNA, 75 bp, synthetic construct
  source 1..75: mol_type = other DNA
ggcggtcgcaccacaggggtggcgtatcgcttaccggaaggggcgctcgagcaggaactgactttgctgtggaag

SEQ ID NO: 392986 - DNA, 75 bp, synthetic construct
  source 1..75: mol_type = other DNA
tggcagtaagaaagtccgcgagatgcggcatgcaacattgaacagtgcgacgcgttttatccactttgtggagaa

SEQ ID NO: 392987 - DNA, 75 bp, synthetic construct
  source 1..75: mol_type = other DNA
catcacgtacaacgcaaggagttacttactatgcggcgtgataccttatttgatattgattatggtcgggcgata

SEQ ID NO: 392988 - DNA, 75 bp, synthetic construct
  source 1..75: mol_type = other DNA
cctacaagagaaagctctcggcggtgaatatccattcacgatagcaacctggaatctgcggttggcaatggagaa

SEQ ID NO: 392989 - DNA, 75 bp, synthetic construct
  source 1..75: mol_type = other DNA
tgtcatcgccgttgactggagtggatatccatctcaggagcatcatgtgctccgcgccagcctgctctgcgatgg

SEQ ID NO: 392990 - DNA, 75 bp, synthetic construct
  source 1..75: mol_type = other DNA
aattgccactggcgcgatgttttcgctgagaccaaagacatcggtcaggccttaaaagactccttccgtggtata

SEQ ID NO: 392991 - DNA, 75 bp, synthetic construct
  source 1..75: mol_type = other DNA
aagacactgctgcaacccgggcagtttgccgccgaacaaaccgtaacgctggtaggcccaaaagggcaactgaaa

SEQ ID NO: 392992 - DNA, 75 bp, synthetic construct
  source 1..75: mol_type = other DNA
tgggaaacggcgatcccttttcttccctggactattgtcccttactggagtctggatcttttatatggattttcg

SEQ ID NO: 392993 - DNA, 75 bp, synthetic construct
  source 1..75: mol_type = other DNA
gttgctggccccgtttttcttcttcacctatggatctctaaatcagttcaccgcggttcaggactttaacagcca

SEQ ID NO: 392994 - DNA, 75 bp, synthetic construct
  source 1..75: mol_type = other DNA
ctgccgcgctggatattgaaagcgagctggcggtgcaaaaagcgatcgataacctggttcacaaccggacggtga

SEQ ID NO: 392995 - DNA, 75 bp, synthetic construct
  source 1..75: mol_type = other DNA
ttatcagaaacctgatcaacgtcgaatcaaaatagcactgccatatgtcgtaggcgcgtgctcgtgcattgtgtt

SEQ ID NO: 392996 - DNA, 75 bp, synthetic construct
  source 1..75: mol_type = other DNA
tggagattgctaaagacggaacagtatctaaagataaacatgccagccggattggtcaggcagtatggagactgg

SEQ ID NO: 392997 - DNA, 75 bp, synthetic construct
  source 1..75: mol_type = other DNA
gtgtcattttcagcacatttattaacataatgggagcttacttaggaagtaaagttaaaggcgaagaccctacag

SEQ ID NO: 392998 - DNA, 75 bp, synthetic construct
  source 1..75: mol_type = other DNA
ccgagcagggcgttaacatcgccgcgcagtatctgcaaacgtctgctcagatgggctacgtagttattgatattg

SEQ ID NO: 392999 - DNA, 75 bp, synthetic construct
  source 1..75: mol_type = other DNA
aaaacgcgttcctgtccggtggttgaagccacacagcaatcgctggcggctctgagctggttgcaacagcaaggt

SEQ ID NO: 393000 - DNA, 75 bp, synthetic construct
  source 1..75: mol_type = other DNA
ttatgcacacgagctggcagagtgggttctgggccaggaaagtgtacttgctccactggtttttgccaccgccag

SEQ ID NO: 393001 - DNA, 75 bp, synthetic construct
  source 1..75: mol_type = other DNA
atgatctgggcattcgtaaaagcatattggaaacaactggttatcgtggtgatgcttgctgctctgttcatcgtc

SEQ ID NO: 393002 - DNA, 75 bp, synthetic construct
  source 1..75: mol_type = other DNA
tgccattgaagaatcactcttatggtcagcagaacaacgggcggcctcgctggcggcgacgctggcttgccgtcc

SEQ ID NO: 393003 - DNA, 75 bp, synthetic construct
  source 1..75: mol_type = other DNA
cattttgctttaaagaaagcaaacttggtgtccgtgtttgcaccggctgtcattccaagattagttatggtgaag

SEQ ID NO: 393004 - DNA, 75 bp, synthetic construct
  source 1..75: mol_type = other DNA
actttgttttatttggaaactctactaatttaaaaaacttctggaaacatgaagtaattcggcggaaacgtatgg

SEQ ID NO: 393005 - DNA, 75 bp, synthetic construct
  source 1..75: mol_type = other DNA
gctggaacaccgggggatggggaccagataatgaagaaaaagcccgtcatcaggaggttcagcaacaacgatttg

SEQ ID NO: 393006 - DNA, 75 bp, synthetic construct
  source 1..75: mol_type = other DNA
gacgcactggcgagcaaacatctggctggtgcggcaatcgatgtattcccaacagaaccagcgaccaacagcgat

SEQ ID NO: 393007 - DNA, 75 bp, synthetic construct
  source 1..75: mol_type = other DNA
gaagacgttgccgaaaaagcgctgcaggcaatgaaagctattccgggtaccattcgcgcccgtctgctgtactaa

SEQ ID NO: 393008 - DNA, 75 bp, synthetic construct
  source 1..75: mol_type = other DNA
ctaataaaatcagtgtattaggccaaggtatcgttaaagaaagcgtatctaaaaaccctaactcttcaagtgcaa

SEQ ID NO: 393009 - DNA, 75 bp, synthetic construct
  source 1..75: mol_type = other DNA
acttgctgcccggtatatcattgataactactacggtggttgtaccgataacctgagtgaacaggaacgtcagca

SEQ ID NO: 393010 - DNA, 75 bp, synthetic construct
  source 1..75: mol_type = other DNA
gctacggtacgggcagtacgccgcagatggtggtacaggccatcacgggcgtgctgggcggactgaatgcaggga

SEQ ID NO: 393011 - DNA, 75 bp, synthetic construct
  source 1..75: mol_type = other DNA
gcagcgcgccagcgcattcagtccgcatcaccagagcagcgccaggtgtttaaggaaaaagtacagcagcgccca

SEQ ID NO: 393012 - DNA, 75 bp, synthetic construct
  source 1..75: mol_type = other DNA
gccgcaggacgtgatggactcggtacagcgattgcggcaactggcgcaacaaaccggctcgctgaagtcatcaac

SEQ ID NO: 393013 - DNA, 75 bp, synthetic construct
  source 1..75: mol_type = other DNA
acgttgcgcaagcagtgcaatggtcgcacgataatccacttaaacaaggcgatgctgctattcaggcggtatctg

SEQ ID NO: 393014 - DNA, 75 bp, synthetic construct
  source 1..75: mol_type = other DNA
catactgccaggctgaataacgagcagcggtcagcggtacgtgaacggttgtctgggcgtggagcaagaagactg

SEQ ID NO: 393015 - DNA, 75 bp, synthetic construct
  source 1..75: mol_type = other DNA
tggaagcgcctgtggaaccgcaatcgacacaacagactgcgcctgacatctccgcagttacgcttcctgcaacgg

SEQ ID NO: 393016 - DNA, 75 bp, synthetic construct
  source 1..75: mol_type = other DNA
gtactgcccgattgaataatgagcaacggtcagcagtacgcgaacgtctctctgagcgcggagcaaggcgactgg

SEQ ID NO: 393017 - DNA, 75 bp, synthetic construct
  source 1..75: mol_type = other DNA
atggataagaagcaagtaacggatttaaggtcggaactactcgattcacgttttggagctaagtcgatttccact

SEQ ID NO: 393018 - DNA, 75 bp, synthetic construct
  source 1..75: mol_type = other DNA
gccgcaggaactggtgttcaacgttgactacctcggtggtcagattgggactttcgccatcaacttctcccgccc

SEQ ID NO: 393019 - DNA, 75 bp, synthetic construct
  source 1..75: mol_type = other DNA
aactggggccgtatgagttcatctgtaccgatctcagcgatcacccgaaactgcagggtattgcccagcagaaca

SEQ ID NO: 393020 - DNA, 75 bp, synthetic construct
  source 1..75: mol_type = other DNA
actggtgttcaacgttgactatcttggcgggcaaatcgggactttcgccatcaacttctctcgccctgccggtca

SEQ ID NO: 393021 - DNA, 75 bp, synthetic construct
  source 1..75: mol_type = other DNA
atggataagaagcaagtaacggatttaaggtcggaactactcgattcacgttttggggctaagtcaatttcgact

SEQ ID NO: 393022 - DNA, 75 bp, synthetic construct
  source 1..75: mol_type = other DNA
atggataagaagcaagtaacggatttaaggtcggaactactcgattcacgttttggtgctaagtccatttctact

SEQ ID NO: 393023 - DNA, 75 bp, synthetic construct
  source 1..75: mol_type = other DNA
actatggcaattatgaagattttcgcgagttcagccgtcgccaaccactgacccagcagcaaaaggatgccgctc

SEQ ID NO: 393024 - DNA, 75 bp, synthetic construct
  source 1..75: mol_type = other DNA
agtcgctcctggaaagatcagaacaggatgcccgctatgcctgttttatctataccgaaaggattatttttgctg

SEQ ID NO: 393025 - DNA, 75 bp, synthetic construct
  source 1..75: mol_type = other DNA
atgtcagaacgaatcactttcaatgtaaccaattctgagactctgcgtgttgtggatgaatacagcaaaaaacag

SEQ ID NO: 393026 - DNA, 75 bp, synthetic construct
  source 1..75: mol_type = other DNA
ccacgtttaaatacaccaccagcagtcttctggatttgatgagctttgacgtaacggaccatatcaatctcatca

SEQ ID NO: 393027 - DNA, 75 bp, synthetic construct
  source 1..75: mol_type = other DNA
gcaaagcgtgaaggacaacaaagggctgaacgaacaggacaagctggcaaaaaccccaccgccattcaggcgcaa

SEQ ID NO: 393028 - DNA, 75 bp, synthetic construct
  source 1..75: mol_type = other DNA
ctggcaaaaaccaccgagattcaggcgcagctggatgacctggaccgcctgaacaacgcgttaagcgcgatgagt

SEQ ID NO: 393029 - DNA, 75 bp, synthetic construct
  source 1..75: mol_type = other DNA
atgccgtgatagtacctgtgtacctgattgaccctgctacggccccgacgttaagaaaaccagacaacatcacag

SEQ ID NO: 393030 - DNA, 75 bp, synthetic construct
  source 1..75: mol_type = other DNA
aggctgaataacgagcaacggtctgcggtacgtgaacggttgtctgagcgtggagcaagaagactggaaagataa

SEQ ID NO: 393031 - DNA, 75 bp, synthetic construct
  source 1..75: mol_type = other DNA
cattacgacaacgaagaaagctgtaccggtaaaaccggctgtcgcgccttccgccatacaatccaataccgtttc

SEQ ID NO: 393032 - DNA, 75 bp, synthetic construct
  source 1..75: mol_type = other DNA
aggctgaataacgagcaacggtcagcagtacgcgaacgtctctctgaacgtggagcaagaagactggaaaggtaa

SEQ ID NO: 393033 - DNA, 75 bp, synthetic construct
  source 1..75: mol_type = other DNA
gtgaaatacgatctgcatggcatccagattgctgcgaatgtctatacccctgctaactacgatcccgccaaaaaa

SEQ ID NO: 393034 - DNA, 75 bp, synthetic construct
  source 1..75: mol_type = other DNA
ggaccaataccgcgtatccgccggtttacctgccgccaccagccggagaaccgtttgttgacagcttcgtgcgcg

SEQ ID NO: 393035 - DNA, 75 bp, synthetic construct
  source 1..75: mol_type = other DNA
tatttaaggaaaaagtacagcagcgcccactgaaccaacagcaacgtgataacgcccgccagcgtatacaatcgg

SEQ ID NO: 393036 - DNA, 75 bp, synthetic construct
  source 1..75: mol_type = other DNA
ctctcatcccagcttggtgatggtaaacaattttcgtgcagcagggatgttgcagcatccacaggacttgttccc

SEQ ID NO: 393037 - DNA, 75 bp, synthetic construct
  source 1..75: mol_type = other DNA
gctctcaaatgaccaaccgccaggtggcacattaccgtcaaattgcaccagcccgtgaagttgatgtggcacgct

SEQ ID NO: 393038 - DNA, 75 bp, synthetic construct
  source 1..75: mol_type = other DNA
ctacattccctctttctgggctaagtaagttgtatcaacaagccaaaatggatggatgtattaaacgaggcaaat

SEQ ID NO: 393039 - DNA, 75 bp, synthetic construct
  source 1..75: mol_type = other DNA
atgcgcgtctcatttcagaattaaaacgtgttggtcctttggcggtatctaagtccactggtatctcgcgggcga

SEQ ID NO: 393040 - DNA, 75 bp, synthetic construct
  source 1..75: mol_type = other DNA
aacaaagattttcctgtgtactacattgacccggataatgagagcgttgaaatctggggagtggttacgcattcc

SEQ ID NO: 393041 - DNA, 75 bp, synthetic construct
  source 1..75: mol_type = other DNA
acggcgatatcgttgtcgccagcgtacagggggagtttacggttaaacggcttctgctgacgcctcgactgacgc

SEQ ID NO: 393042 - DNA, 75 bp, synthetic construct
  source 1..75: mol_type = other DNA
aactgctggccgaatccgggatgcggcatcatccagtaaatcctatgaccgacagctaccttccgcgtctggttg

SEQ ID NO: 393043 - DNA, 75 bp, synthetic construct
  source 1..75: mol_type = other DNA
tattgaagcagtgtttgaaaatctcgaattaaaacaacagatggtggcggaagtggagcaaaattgcgccgctca

SEQ ID NO: 393044 - DNA, 75 bp, synthetic construct
  source 1..75: mol_type = other DNA
ctggcgatgacgtcgcaatcaaaggcattgcgcaatatcttttttgccagtaccgacgtgaagaaagatcccggc

SEQ ID NO: 393045 - DNA, 75 bp, synthetic construct
  source 1..75: mol_type = other DNA
gcgctgttattcaaaatggtaagcaaaaaaacagaacagaaaacccagggcaactacccggcgacggaacgtatt

SEQ ID NO: 393046 - DNA, 75 bp, synthetic construct
  source 1..75: mol_type = other DNA
ttggtggcccgttccgctatatcgatacactcggggcgggggaagtcgtggcgataatgcaacgcctggccacgc

SEQ ID NO: 393047 - DNA, 75 bp, synthetic construct
  source 1..75: mol_type = other DNA
ctattgtcgtgcgtgacaaagctgggttttacgtcaatcgtattctggcgccttacattaacgaagctatccgca

SEQ ID NO: 393048 - DNA, 75 bp, synthetic construct
  source 1..75: mol_type = other DNA
gaattaaaacaaaagatggtggcagaagttgagcaaaattgcgcttctcatactatttttgcgtcgaatacgtca

SEQ ID NO: 393049 - DNA, 75 bp, synthetic construct
  source 1..75: mol_type = other DNA
gccgcgacgtacttcttgcgtgtgtccggcgattccatgcgtgatgcgcgcattcatgatggcgatgtgctggtc

SEQ ID NO: 393050 - DNA, 75 bp, synthetic construct
  source 1..75: mol_type = other DNA
tgaaatctcttggtattcttgaatttatgacacatctttatacccctcaagataggttccacgatgaattggatg

SEQ ID NO: 393051 - DNA, 75 bp, synthetic construct
  source 1..75: mol_type = other DNA
ttttctcgttatatccttgccgatatcaatagcgacctgatcagtctctataacattgtgaagatgcgtactgat

SEQ ID NO: 393052 - DNA, 75 bp, synthetic construct
  source 1..75: mol_type = other DNA
tggtgcgatgctgggcaaaatgctggcagactgcggtggtgcacaacgtatcgctaccacactgattgccaaatt

SEQ ID NO: 393053 - DNA, 75 bp, synthetic construct
  source 1..75: mol_type = other DNA
acacggaatccccgaatacctgagtcgtctgctgatgaaattacattcccattatctttaccttgttgagcaaat

SEQ ID NO: 393054 - DNA, 75 bp, synthetic construct
  source 1..75: mol_type = other DNA
tgctggtattgagtcaattcttgcattatatgggaaacaacataatcctgattattggaatgtattagtttcgat

SEQ ID NO: 393055 - DNA, 75 bp, synthetic construct
  source 1..75: mol_type = other DNA
ctcggttagaaagagaacattagtttgttatcctggagtgttagaaaccttagaagagctcaagtcacggggtgt

SEQ ID NO: 393056 - DNA, 75 bp, synthetic construct
  source 1..75: mol_type = other DNA
ctgtttgaattattgattaacacgccagcggtggggaatttgattcgcgaagggaaaacccaccagttgccacat

SEQ ID NO: 393057 - DNA, 75 bp, synthetic construct
  source 1..75: mol_type = other DNA
tctacacctgtgcagcgcctggcccgcacgatggcgcattcgcggcagaatggaagctgcgccgtttgacgcgcc

SEQ ID NO: 393058 - DNA, 75 bp, synthetic construct
  source 1..75: mol_type = other DNA
tggaagctgcgccgtttgatgcgccggacgtcgaagagctactgcgggagtggctggatgacgatcagcgggcaa

SEQ ID NO: 393059 - DNA, 75 bp, synthetic construct
  source 1..75: mol_type = other DNA
tcctggtcgatgctggaaaccattatctcggtgtgcggtctggtaggctgtctgctgctgaatatggtgatttga

SEQ ID NO: 393060 - DNA, 75 bp, synthetic construct
  source 1..75: mol_type = other DNA
tattgcttgaaaatggtcagcttgattttgccgtatcgctggcggaaaaccagcggttgcgcggcagtgcgttcg

SEQ ID NO: 393061 - DNA, 75 bp, synthetic construct
  source 1..75: mol_type = other DNA
tcgagcggctggtagattcatttccggcacaggaaaaagatcccgtgcgtaatcaactggccggtagtttgcggg

SEQ ID NO: 393062 - DNA, 75 bp, synthetic construct
  source 1..75: mol_type = other DNA
aactgttgctggaagactacaaagcctccctgaaatatctcagcgatcacccgaaactgcagggtattgcccagc

SEQ ID NO: 393063 - DNA, 75 bp, synthetic construct
  source 1..75: mol_type = other DNA
aagaccatcaatcccaccgggattatttcgattggtccgtggcaggatctcgatgaaccacacgggcgggatgtt

SEQ ID NO: 393064 - DNA, 75 bp, synthetic construct
  source 1..75: mol_type = other DNA
gtgcgttttgatccggtgtatgtcacccacttcaaatgtgataagcaccgcatcagcgattacctgaacctgtac

SEQ ID NO: 393065 - DNA, 75 bp, synthetic construct
  source 1..75: mol_type = other DNA
ggcactcggcgctatcattgccgcttcaatgggctccacgctgacagcacgcaaagagaacaaaatagaagaatt

SEQ ID NO: 393066 - DNA, 75 bp, synthetic construct
  source 1..75: mol_type = other DNA
gtgcagaatatcctggtacatataccaataggggcaggcggttatgatctctcatggatcgaagcggtaggcacg

SEQ ID NO: 393067 - DNA, 75 bp, synthetic construct
  source 1..75: mol_type = other DNA
tgttgctatcggcctgatgatggtatttatcaatccggtatttgctttcctgacacgtgttgcagtcacgattat

SEQ ID NO: 393068 - DNA, 75 bp, synthetic construct
  source 1..75: mol_type = other DNA
tcgacgccgccagcggtggcttcctggcaccgttcgttgccccggatatcgtctgggacttccgcctgccgcgtg

SEQ ID NO: 393069 - DNA, 75 bp, synthetic construct
  source 1..75: mol_type = other DNA
aaaactggatcgacaaagaagaatatccgcaatctgcagcaatcgacctgcgttgcgtaaacatggttgccgatc

SEQ ID NO: 393070 - DNA, 75 bp, synthetic construct
  source 1..75: mol_type = other DNA
atggataagaagcaagtaacggatttaaggtcggaactactcgattcacgttttggtgcaaaggccatttctact

SEQ ID NO: 393071 - DNA, 75 bp, synthetic construct
  source 1..75: mol_type = other DNA
ggaaaatggctggacctttgatgacagttttccaggtgcaaccggcgacacgctctatcaacacgagtttctgta

SEQ ID NO: 393072 - DNA, 75 bp, synthetic construct
  source 1..75: mol_type = other DNA
cgccaaactggggccgtatgagtttatctgtacgggtcgcccggacgaaggcatcccggcggtttgcttcaaact

SEQ ID NO: 393073 - DNA, 75 bp, synthetic construct
  source 1..75: mol_type = other DNA
tgcacagtattatgaattcctgcgcctcggtcgtgaaggctataccaaagtacagaacgcttcctaccaggttgc

SEQ ID NO: 393074 - DNA, 75 bp, synthetic construct
  source 1..75: mol_type = other DNA
ggcgctcggcgctatcattgccgcttcaatgggctccacgttgacagcacgcaaagagagcaaaatagaagaaat

SEQ ID NO: 393075 - DNA, 75 bp, synthetic construct
  source 1..75: mol_type = other DNA
gaaaatctggagagtaacctgcaggcagtaaatttacagcttgatgccgaagacaaaaaagcgatcgccacgctg

SEQ ID NO: 393076 - DNA, 75 bp, synthetic construct
  source 1..75: mol_type = other DNA
gtgtggatcactattgcaccgttcgtgacatctgttgaagagtttatgcaggcgctgctggaagccaaaaaacaa

SEQ ID NO: 393077 - DNA, 75 bp, synthetic construct
  source 1..75: mol_type = other DNA
tgcacatcgacgctgccagcggtggcttcctggcaccgttcgtcgccccggatatcgtctgggacttccgcctgc

SEQ ID NO: 393078 - DNA, 75 bp, synthetic construct
  source 1..75: mol_type = other DNA
ccgcttatctggcggatgaaatcgccaaactggggccgtatgagttcatctgtaccggtcgcccggacgaaggca

SEQ ID NO: 393079 - DNA, 75 bp, synthetic construct
  source 1..75: mol_type = other DNA
atcaacttctcccgcccggcgggtcaggtaattgcacagtactatgaattcctgcgcctcggtcgtgaaggctat

SEQ ID NO: 393080 - DNA, 75 bp, synthetic construct
  source 1..75: mol_type = other DNA
gcgaccccggcacaagtaattctggcgtgggcaatgggggaaggctactcagtaataccgtcttccactaaacgt

SEQ ID NO: 393081 - DNA, 75 bp, synthetic construct
  source 1..75: mol_type = other DNA
ccggtcagttgtttatggacccgaaacgcatgattgaacctgcgacgaaaacaccatcggcgtggtgccgacttt

SEQ ID NO: 393082 - DNA, 75 bp, synthetic construct
  source 1..75: mol_type = other DNA
tacagaacgcttcctaccaggttgccgcttatctggcggatgaaatcgccaaactggggccgtatgagttcatct

SEQ ID NO: 393083 - DNA, 75 bp, synthetic construct
  source 1..75: mol_type = other DNA
tcaatggggtctacgctgacagtacgcaaagagggtaatgactccaacttattgatagtgttttatgttcagata

SEQ ID NO: 393084 - DNA, 75 bp, synthetic construct
  source 1..75: mol_type = other DNA
cgttgcgtaaacatggttgccgatctgtggcatgcgcctgcaccgaaaaatggtcaggccgttggcaccaacacc

SEQ ID NO: 393085 - DNA, 75 bp, synthetic construct
  source 1..75: mol_type = other DNA
gatacaccctgtatgacctctctgaacgtctgcgtctgcgcggctggcaggttccggccttcactctcggcggtg

SEQ ID NO: 393086 - DNA, 75 bp, synthetic construct
  source 1..75: mol_type = other DNA
agctgcgtgagatccctatgcgccccggtcagttgtttatggacccgaaacgcatgattgaagcctgtgacgaaa

SEQ ID NO: 393087 - DNA, 75 bp, synthetic construct
  source 1..75: mol_type = other DNA
ggtccgaactactcgattcacgttttggcgcaaagccgatttcgactatcgcagaatcaaaacgatttccgctgc

SEQ ID NO: 393088 - DNA, 75 bp, synthetic construct
  source 1..75: mol_type = other DNA
ggcaacggcgggcaaccgaccggtattcataatctgtggagcaacggcggcttcttcagtaacggctggcttggg

SEQ ID NO: 393089 - DNA, 75 bp, synthetic construct
  source 1..75: mol_type = other DNA
gtgcgattaactccgtgccgatgcgtattctggtgttctacgtcggtacgctgttcgtcattatgtctatctacc

SEQ ID NO: 393090 - DNA, 75 bp, synthetic construct
  source 1..75: mol_type = other DNA
gcattcttaactttgttgtgctgaccgcttcgctgtcggcaattaacagtgacgtatttggcgtaggccgtatgc

SEQ ID NO: 393091 - DNA, 75 bp, synthetic construct
  source 1..75: mol_type = other DNA
ggttcttccgaggcctgtatgcttggcgggatggcgatgaaatggcgttggcgcaagcgtatggaagctgcaggc

SEQ ID NO: 393092 - DNA, 75 bp, synthetic construct
  source 1..75: mol_type = other DNA
aagacactgagcagtgacaaagtggggaaaacggggttcattgagaatgtgtacgctaatcagattgcctttggc

SEQ ID NO: 393093 - DNA, 75 bp, synthetic construct
  source 1..75: mol_type = other DNA
cgaatctctctgtacgttggtttcgcgtggattgttctgctgttgattggctggatgtttaaacgccgccatgac

SEQ ID NO: 393094 - DNA, 75 bp, synthetic construct
  source 1..75: mol_type = other DNA
aaagagccggagaaatctattccacgcgccattaactccgtgccgatgcgtattctggtgttttatgtcggtacg

SEQ ID NO: 393095 - DNA, 75 bp, synthetic construct
  source 1..75: mol_type = other DNA
ccaggtttattattgcttgatgaaccgctcggggcgctggacgccctgactcggctcgagatgcaggatttgatt

SEQ ID NO: 393096 - DNA, 75 bp, synthetic construct
  source 1..75: mol_type = other DNA
cgttgggttaggccttaaaggccagtggcgcgatgccgcgcgtcgggcgttggctgcggtaggactggagaatcg

SEQ ID NO: 393097 - DNA, 75 bp, synthetic construct
  source 1..75: mol_type = other DNA
gtatttggcgtaggccgtatgctccacggtatggcagagcagggcagcgcgccgaaaattttcagcaaaacctcg

SEQ ID NO: 393098 - DNA, 75 bp, synthetic construct
  source 1..75: mol_type = other DNA
gagcgtgttgttggcctatattatcggtggtgtcgcggcgtatatcattatgcgcgcgctgggggaaatgtcggt

SEQ ID NO: 393099 - DNA, 75 bp, synthetic construct
  source 1..75: mol_type = other DNA
tcgcgtcgtggtattccgtgggttacggtgctggtgatgactaccgcgctgctgtttgctgtgtatctgaactac

SEQ ID NO: 393100 - DNA, 75 bp, synthetic construct
  source 1..75: mol_type = other DNA
acctggccactttctgccagacctgggacgacgagaaagtccataaattgatggatttctcgataaagaaaaact

SEQ ID NO: 393101 - DNA, 75 bp, synthetic construct
  source 1..75: mol_type = other DNA
gcacagtactatgaattcctgcgcctcggtcgtgaaggctatacaaaagtacagaacgcctcccaacgcacgttc

SEQ ID NO: 393102 - DNA, 75 bp, synthetic construct
  source 1..75: mol_type = other DNA
gcacagtactatgaattcctgcgcctcggtcgtgaaggctatacaaaagtacagaacgcttcctaccgcacgttc

SEQ ID NO: 393103 - DNA, 75 bp, synthetic construct
  source 1..75: mol_type = other DNA
gcacagtactatgaattcctgcgcctcggtcgtgaaggctatacaaaagtacagaacgcatccgaccgcacgttc

SEQ ID NO: 393104 - DNA, 75 bp, synthetic construct
  source 1..75: mol_type = other DNA
gctccgaactactcgattcacgttttggcgcgaagccgatttcgactatcgcagaatcaaaacggtttccgctgc

SEQ ID NO: 393105 - DNA, 75 bp, synthetic construct
  source 1..75: mol_type = other DNA
gttccgaactactcgattcacgttttggcgctaagccgatttcgactatcgcagaatcaaaacgctttccgctgc

SEQ ID NO: 393106 - DNA, 75 bp, synthetic construct
  source 1..75: mol_type = other DNA
gcacagtactatgaattcctgcgcctcggtcgtgaaggctatacaaaagtacagaacgcgtccaaccgcacgttc

SEQ ID NO: 393107 - DNA, 75 bp, synthetic construct
  source 1..75: mol_type = other DNA
acctggccactttctgccagacctgggacgacgagaacgtccataaattgatggatttatcgataaagaaaaact

SEQ ID NO: 393108 - DNA, 75 bp, synthetic construct
  source 1..75: mol_type = other DNA
acctggccactttctgccagacctgggacgacgagaatgtccataaattgatggatttctctataaagaaaaact

SEQ ID NO: 393109 - DNA, 75 bp, synthetic construct
  source 1..75: mol_type = other DNA
acctggccactttctgccagacctgggacgacgagaaagtccataaattgatggatttgtccataaagaaaaact

SEQ ID NO: 393110 - DNA, 75 bp, synthetic construct
  source 1..75: mol_type = other DNA
acctggccactttctgccagacctgggacgacgagaaggtccataaattgatggatttctcaataaagaaaaact

SEQ ID NO: 393111 - DNA, 75 bp, synthetic construct
  source 1..75: mol_type = other DNA
acctggccactttctgccagacctgggacgacgagaaggtccataaattgatggatttatccataaagaaaaact

SEQ ID NO: 393112 - DNA, 75 bp, synthetic construct
  source 1..75: mol_type = other DNA
acctggccactttctgccagacctgggacgacgagaacgtccataaattgatggatttgtcaataaagaaaaact

SEQ ID NO: 393113 - DNA, 75 bp, synthetic construct
  source 1..75: mol_type = other DNA
tgcgaacgacccgattaacatcctcgaacgtcttgagatggagggggtgcaggccaggatgattgccgacccgca

SEQ ID NO: 393114 - DNA, 75 bp, synthetic construct
  source 1..75: mol_type = other DNA
tccgtccatatgagttcaccggacgaggcgatcgtattggctgggttaagggcattgatgataactggcacctga

SEQ ID NO: 393115 - DNA, 75 bp, synthetic construct
  source 1..75: mol_type = other DNA
gtaacaggctgcccgaacggttgtggtcgcgcgatgctggcggaagtgggcctggtgggtaaagcaccgggtcgc

SEQ ID NO: 393116 - DNA, 75 bp, synthetic construct
  source 1..75: mol_type = other DNA
cggcgatcgtatcggctgggtaaaagggatcgacgacaaatggcacctgacgctgtttatcgaaaatggccgaat

SEQ ID NO: 393117 - DNA, 75 bp, synthetic construct
  source 1..75: mol_type = other DNA
atgcctgttaccaccttaagtatcccaagtatatctcaattatctcctgcaggagtgcagtctttgcaggatgca

SEQ ID NO: 393118 - DNA, 75 bp, synthetic construct
  source 1..75: mol_type = other DNA
ggatgtttctggccggacgcggtgcttttccgctttttgccctggtgtgggggttgaatctgtcccgtcatgcgc

SEQ ID NO: 393119 - DNA, 75 bp, synthetic construct
  source 1..75: mol_type = other DNA
atttcactgatgaaaccaggctcactgctgattaacgcttcgcgcggcacagtggtggaaatcccggcattatgt

SEQ ID NO: 393120 - DNA, 75 bp, synthetic construct
  source 1..75: mol_type = other DNA
acaaactgccgctgggcaacgccactcaggtacagcatctttctgacctgctgaatatgagcgatgtggtgagtc

SEQ ID NO: 393121 - DNA, 75 bp, synthetic construct
  source 1..75: mol_type = other DNA
ggcggattttgtcgctaaacgtcttgctccggcattaccggctaacgacggtaagcaaacccccatgcgcgggca

SEQ ID NO: 393122 - DNA, 75 bp, synthetic construct
  source 1..75: mol_type = other DNA
cgcccgcacggcgagcgagtttggttatctgccgctggagcataccctggcggtggcggaagccgtcgtgacgac

SEQ ID NO: 393123 - DNA, 75 bp, synthetic construct
  source 1..75: mol_type = other DNA
tgatagggcgctgggcgaaagagtgcgaagcgggtgaaggcttcggcgactttacggtgcgtgcgggcatcattc

SEQ ID NO: 393124 - DNA, 75 bp, synthetic construct
  source 1..75: mol_type = other DNA
cttcagcacttaaatcgatggttgaatttgctatcagccagaaagcggtagttcgcaaaccatctcatggtatgg

SEQ ID NO: 393125 - DNA, 75 bp, synthetic construct
  source 1..75: mol_type = other DNA
agttcttgattacatcagaaaagccgctcaactggatgcctcagatctgcatatcacaccaggacgcgacaacac

SEQ ID NO: 393126 - DNA, 75 bp, synthetic construct
  source 1..75: mol_type = other DNA
tcgaccgtcgttggaattatcagaaacctgatcaacgtcgaatcaaaatagcactgccatatgtcgtaggcgcgg

SEQ ID NO: 393127 - DNA, 75 bp, synthetic construct
  source 1..75: mol_type = other DNA
gattagctatattcgagccagacgcccgcagattgtgctgacagacgagcacaaagcgatgctgagattatggga

SEQ ID NO: 393128 - DNA, 75 bp, synthetic construct
  source 1..75: mol_type = other DNA
tggcctgcgcgcccacggtcgcccggtgcgtcagccgggtaaaaccttcgccaccatggatcacaacgtctctac

SEQ ID NO: 393129 - DNA, 75 bp, synthetic construct
  source 1..75: mol_type = other DNA
acccgcacgggttacggctggggaaacagcgtgcaggtcggcggcagctatctgggaatgatgtgcggcggcggg

SEQ ID NO: 393130 - DNA, 75 bp, synthetic construct
  source 1..75: mol_type = other DNA
acctggcctggcgcgtcatctggcgccagcttatctccagcgttggcagtcaggccaggatgctgcgacgcagta

SEQ ID NO: 393131 - DNA, 75 bp, synthetic construct
  source 1..75: mol_type = other DNA
tctttagcgcgcatgaggtgtccacctgcaaaataagtgggtgcttaagttacaggatcctggattcgggaccag

SEQ ID NO: 393132 - DNA, 75 bp, synthetic construct
  source 1..75: mol_type = other DNA
acacgctggagcgcgtgggggttgagacgtttaaagcggaagtggagcgtcgcgcggggatcaaatttgaaccga

SEQ ID NO: 393133 - DNA, 75 bp, synthetic construct
  source 1..75: mol_type = other DNA
aagatttctgagcatctgttgcctcgtacccgcgcgtatgcggagatctggctcgaccacgaaaaagtcgccact

SEQ ID NO: 393134 - DNA, 75 bp, synthetic construct
  source 1..75: mol_type = other DNA
tgatatgtccgcactgccgtcgcccctggcatgaggtggccaccgaccgcacggatgatgaacggcgcctggtgg

SEQ ID NO: 393135 - DNA, 75 bp, synthetic construct
  source 1..75: mol_type = other DNA
cagcgcaggcggcaccgggcatgtggtggagttttgcggcgaagcaatccgtgatttaagcatggaaggtcggat

SEQ ID NO: 393136 - DNA, 75 bp, synthetic construct
  source 1..75: mol_type = other DNA
aaccacggtagtgatcccgccacagaacgatatcgatctgcatgccaacgacatgaacttcgtggcaatcgccga

SEQ ID NO: 393137 - DNA, 75 bp, synthetic construct
  source 1..75: mol_type = other DNA
gagcggcctgatgaatgtcgtcactccgcagcgtgaaaactcaatggcttgcgtgtcgttcccaacgtgtccgtt

SEQ ID NO: 393138 - DNA, 75 bp, synthetic construct
  source 1..75: mol_type = other DNA
gggggggggaggataacgagtttgggtatcgattatatagagaaggatgttatttccgctctgtagatggtgcaa

SEQ ID NO: 393139 - DNA, 75 bp, synthetic construct
  source 1..75: mol_type = other DNA
atgagcaaaatccgatttgtaactccgccataccgacttgtaactctaacatccgacattaacaatattaaagaa

SEQ ID NO: 393140 - DNA, 75 bp, synthetic construct
  source 1..75: mol_type = other DNA
ttttggatattcatttcagtatgatgccgcagcagtaggaaaatcatcatttttcgacgaagcggcaggaagaaa

SEQ ID NO: 393141 - DNA, 75 bp, synthetic construct
  source 1..75: mol_type = other DNA
acgataaaggagacaacaatgaagacaaaaattctccaccattccaacttgtaaaactaacatccaacatcaaca

SEQ ID NO: 393142 - DNA, 75 bp, synthetic construct
  source 1..75: mol_type = other DNA
tatctttttcagaattaaaatattatggggttggagtatactttagagatttaattgcaaaaaatattaatgaaa

SEQ ID NO: 393143 - DNA, 75 bp, synthetic construct
  source 1..75: mol_type = other DNA
tcaggaaggtttacgccttggagagcttttcggctattacggtcacggtcgccgacagctgaccggcaaactgga

SEQ ID NO: 393144 - DNA, 75 bp, synthetic construct
  source 1..75: mol_type = other DNA
gcggatgccgcaatgttatcgcgcatgatggtgccggaaatggaacagaaaggttattcccgtggctttgcggcg

SEQ ID NO: 393145 - DNA, 75 bp, synthetic construct
  source 1..75: mol_type = other DNA
gaaggcttcaacggtatggtgattaaatctctgcgtggtaaaggtaagtctatcgaaatcaacaagctgaaccgt

SEQ ID NO: 393146 - DNA, 75 bp, synthetic construct
  source 1..75: mol_type = other DNA
gtcgtcgcggcttcgaaatggactttgctgaactgttgctggaagactacaaagcctccctgaaatatctcagcg

SEQ ID NO: 393147 - DNA, 75 bp, synthetic construct
  source 1..75: mol_type = other DNA
agatggtgaagatccgggatacaccctgtatgacctctctgaacgtctgcgtctgcgcggctggcaggttccggc

SEQ ID NO: 393148 - DNA, 75 bp, synthetic construct
  source 1..75: mol_type = other DNA
cggacgcacgatatttatctcttcgatgagcgaactattaaaaaatatggcactcaacggatatggtattgcctg

SEQ ID NO: 393149 - DNA, 75 bp, synthetic construct
  source 1..75: mol_type = other DNA
gtacctggtttgctatgcgcagtcgttctgatgtttaccgtctacctggtcgcccgcaaaactaacgctaaaccc

SEQ ID NO: 393150 - DNA, 75 bp, synthetic construct
  source 1..75: mol_type = other DNA
caacagcttgaatgcaatctgaatgagttagggggggataattcattcaatttgcctaatattaagattgcagct

SEQ ID NO: 393151 - DNA, 75 bp, synthetic construct
  source 1..75: mol_type = other DNA
gatatatcactgatgaagataagtgggactactatgaaaattgttgtgcacttatcttactagggaaatatgaag

SEQ ID NO: 393152 - DNA, 75 bp, synthetic construct
  source 1..75: mol_type = other DNA
ttcgtcatctggtttggtaaagatttgatggttaaggtgatgagcttcctggtgtttccgtttatcgcctgtctg

SEQ ID NO: 393153 - DNA, 75 bp, synthetic construct
  source 1..75: mol_type = other DNA
catacccgattgcgttttattgccaccgggcgctggcgcgtctgtgtctctctggctctaacccttccggcaaca

SEQ ID NO: 393154 - DNA, 75 bp, synthetic construct
  source 1..75: mol_type = other DNA
cataccccattgcatttttctgccaccgggcgctggcgcgtctgtgcctctctggttctaacccttccggcaaca

SEQ ID NO: 393155 - DNA, 75 bp, synthetic construct
  source 1..75: mol_type = other DNA
gggtcgaagcaaatataaaattatgccaaaccgcactcaatctttctgaagaagttgataagttaaatcgtaaag

SEQ ID NO: 393156 - DNA, 75 bp, synthetic construct
  source 1..75: mol_type = other DNA
ttaacaccgacggaagtcattgaattgaacacgcaagttattaaagctgatcgtatgcgacatccggaatggttc

SEQ ID NO: 393157 - DNA, 75 bp, synthetic construct
  source 1..75: mol_type = other DNA
catgatcttcatcatgggttcaacctgggttgttgcctacgccaacccgaacatcctggatctgattgaagccat

SEQ ID NO: 393158 - DNA, 75 bp, synthetic construct
  source 1..75: mol_type = other DNA
catttgctgatgccgcgcctggcacaggtaaaacagcagccggaagaagaggcgctgatcctctttacctccggt

SEQ ID NO: 393159 - DNA, 75 bp, synthetic construct
  source 1..75: mol_type = other DNA
aagggcgagcgtgttcttatcacgcccaatcacgtctcatttattgatggcatattgctggcgctgtttttaccc

SEQ ID NO: 393160 - DNA, 75 bp, synthetic construct
  source 1..75: mol_type = other DNA
atcgcaaattgcttacgaaaacgctgtttgttggacgcatccttgaaaaatacagtgttgaaggcgaacgcatcg

SEQ ID NO: 393161 - DNA, 75 bp, synthetic construct
  source 1..75: mol_type = other DNA
aacctggtgatgcaaaaatcgttgccacactttttcgaatctctgatcaaagttggcgcacgcaacttgcctgtc

SEQ ID NO: 393162 - DNA, 75 bp, synthetic construct
  source 1..75: mol_type = other DNA
gaagacggtggtcgcctgcaactgaaagggccgaacattatgaacggctacctgcgggtagagaagccgggcgtg

SEQ ID NO: 393163 - DNA, 75 bp, synthetic construct
  source 1..75: mol_type = other DNA
gtgattttccctgaaggacgaatcacgacaaccggctcgctgatgaaaatctacgatggcgcgggttttgtcgct

SEQ ID NO: 393164 - DNA, 75 bp, synthetic construct
  source 1..75: mol_type = other DNA
tggcttcagtttcccggccattacccgccagatagccaacatttattgtgcctggctgcgtggcgaacctacgcc

SEQ ID NO: 393165 - DNA, 75 bp, synthetic construct
  source 1..75: mol_type = other DNA
ggctatccggtctggaacacggggctgcgcattcttgatgcgatgatgcatccagtaccgccggatgttgcggga

SEQ ID NO: 393166 - DNA, 75 bp, synthetic construct
  source 1..75: mol_type = other DNA
aggccgttacccacgcctgtgtgattaaccaggcggctgccaccggtggtgatgcgcgtcaattggtgggctatc

SEQ ID NO: 393167 - DNA, 75 bp, synthetic construct
  source 1..75: mol_type = other DNA
ccgcgttaataaaagctgacagatgcatcatttcgaaaattgcatcatattctggttttgcagtaacggcctttt

SEQ ID NO: 393168 - DNA, 75 bp, synthetic construct
  source 1..75: mol_type = other DNA
cccattctatgtctgttatggtggatatttattaaatcctggtgtttcagattctgatattagcagaaaaataaa

SEQ ID NO: 393169 - DNA, 75 bp, synthetic construct
  source 1..75: mol_type = other DNA
caataagaaaatcggaagggctaactcaagcaaaattcagtgaaatcagtggaatagcattagggacgctaaaga

SEQ ID NO: 393170 - DNA, 75 bp, synthetic construct
  source 1..75: mol_type = other DNA
aacggatgtatcgtaccggagacgttgcccgctggctggataacggcgcggtggagtacctcgggcgcagtgacg

SEQ ID NO: 393171 - DNA, 75 bp, synthetic construct
  source 1..75: mol_type = other DNA
atgcgtcgactgggctcggcggcgctgacggctaccggacccgtgctcaacgttttaccgttgggtattcacatt

SEQ ID NO: 393172 - DNA, 75 bp, synthetic construct
  source 1..75: mol_type = other DNA
caactgtcgccaaactggcaacgattattgatggtgaagaagacagctcccggcgcatgggattcgaaaccattc

SEQ ID NO: 393173 - DNA, 75 bp, synthetic construct
  source 1..75: mol_type = other DNA
aacgttatcaccatttgctggttgatggcttcagtttcccggcgattacccgccaaattgccaacatttactgca

SEQ ID NO: 393174 - DNA, 75 bp, synthetic construct
  source 1..75: mol_type = other DNA
tgcgcattctcgatgcgatgatgcatccggtgccgccgggtgtggcgggagatctctatctcaccggtattcaac

SEQ ID NO: 393175 - DNA, 75 bp, synthetic construct
  source 1..75: mol_type = other DNA
ttgctcgtcaggtgacgccggggcaggtgatggtcgcgtcaaccgtcgccaaactggcaacgattattgatggtg

SEQ ID NO: 393176 - DNA, 75 bp, synthetic construct
  source 1..75: mol_type = other DNA
aaagctgatgaatgcatcatttcaaaaattgcttcgtattctggttttgccgtaacagcctttttgagaattaaa

SEQ ID NO: 393177 - DNA, 75 bp, synthetic construct
  source 1..75: mol_type = other DNA
ggtgcatgactttatctatcagggtgtgctgagcgtgctacaacagcaactggaaacgccgctgccgctggatga

SEQ ID NO: 393178 - DNA, 75 bp, synthetic construct
  source 1..75: mol_type = other DNA
cagcgtgattaatgatgaagcgctgaatcgtattatcgccgtaggccaccagcatcatctgaacgttgtcggctg

SEQ ID NO: 393179 - DNA, 75 bp, synthetic construct
  source 1..75: mol_type = other DNA
aaccgcttacgcctctgaagcacaaaaaacgtccaaagatatgccctctcgtctggcacaatccatccgcgttgc

SEQ ID NO: 393180 - DNA, 75 bp, synthetic construct
  source 1..75: mol_type = other DNA
tctacacagaatgcgcaactgagtgccggtacgctttccgcccggactgccgggcagttcagcagtaatggcggt

SEQ ID NO: 393181 - DNA, 75 bp, synthetic construct
  source 1..75: mol_type = other DNA
cttacgctggcatcgaatggtcaaagctttggtcgggtgctgactatcgtccattccgactgtgcgctgctggag

SEQ ID NO: 393182 - DNA, 75 bp, synthetic construct
  source 1..75: mol_type = other DNA
taatgtaaaaactggagccatgtcttttattatggaggaggttccggataactgtacctacgttaccaggaaaga

SEQ ID NO: 393183 - DNA, 75 bp, synthetic construct
  source 1..75: mol_type = other DNA
tctgacagcagagaaatttatattgttattggtgataatgtcaatatcggtgcccatacgtgtattatcgaactt

SEQ ID NO: 393184 - DNA, 75 bp, synthetic construct
  source 1..75: mol_type = other DNA
ccacgatgaaaaccggtgcgacggatggtgggcgctacaacgtgatgggcggcgggcgtccggttgtcgcgctgt

SEQ ID NO: 393185 - DNA, 75 bp, synthetic construct
  source 1..75: mol_type = other DNA
gatataaaaatcacattagatgaaataaaatacacaacagatctaattgaacagtataaaataccaaccccaaac

SEQ ID NO: 393186 - DNA, 75 bp, synthetic construct
  source 1..75: mol_type = other DNA
aaaggggtgatattctgattactaaatcgttaacttgttttggtaatacgccggaaaaaatacaggaggttttat

SEQ ID NO: 393187 - DNA, 75 bp, synthetic construct
  source 1..75: mol_type = other DNA
atgaaaaataacagggatcacagttcttggcgtggttgccttcagtcgcgtcaggggcatatctccctgaatcac

SEQ ID NO: 393188 - DNA, 75 bp, synthetic construct
  source 1..75: mol_type = other DNA
gcgctgacgttcgaactgccagaaattatcgacctgcgaaccaacattgatccgcacggtactgcgcgggcatta

SEQ ID NO: 393189 - DNA, 75 bp, synthetic construct
  source 1..75: mol_type = other DNA
tatgccgacagcttcgcactggacccggtcgtggaaaaagaagagtggtgccgcattaccggtcgtaagaattaa

SEQ ID NO: 393190 - DNA, 75 bp, synthetic construct
  source 1..75: mol_type = other DNA
gcccgtgagggcaggttatacgcaccccgtcagggtggcaatatacctgacagtgtcggacaaaaaacagttcag

SEQ ID NO: 393191 - DNA, 75 bp, synthetic construct
  source 1..75: mol_type = other DNA
tcagacggcacgggatattctgggtgaaataaaaaatgatccgggaatgcgccactatcacagccatatcagtca

SEQ ID NO: 393192 - DNA, 75 bp, synthetic construct
  source 1..75: mol_type = other DNA
tggcgctcaccatcgccactggctttgtggtggatgacgccatcgtggtgctggaaaacattgcccgtcatctgg

SEQ ID NO: 393193 - DNA, 75 bp, synthetic construct
  source 1..75: mol_type = other DNA
aaagtggtgatggccctgacgtatcacatcaccaaacgcgccccagcgaagctcttcaagcgccacataacaacg

SEQ ID NO: 393194 - DNA, 75 bp, synthetic construct
  source 1..75: mol_type = other DNA
tcctgccgctgctgttgatgggcggattgccgggccgactgttacgcgagtttgccgtgacgctttctgtcgcca

SEQ ID NO: 393195 - DNA, 75 bp, synthetic construct
  source 1..75: mol_type = other DNA
gttcggattccgtaccgcctgaaaaatcagtaacttatcactcggttcggaaaccgaacaattacgtacgtaata

SEQ ID NO: 393196 - DNA, 75 bp, synthetic construct
  source 1..75: mol_type = other DNA
gcacgcatgatgcccgggccggggatatccgggatgtggcacagccgtgtgcggaggtgctggttcgcctgggaa

SEQ ID NO: 393197 - DNA, 75 bp, synthetic construct
  source 1..75: mol_type = other DNA
tggggttatcgattcgtgcctggcagcggttattgaaagttgcacgaaccattgctgatattgatcagtctgaca

SEQ ID NO: 393198 - DNA, 75 bp, synthetic construct
  source 1..75: mol_type = other DNA
aacgtacagaacccatttcagcagaacgtctgagcggcattgtggcaggactacgggcctccctgcgtaaccatt

SEQ ID NO: 393199 - DNA, 75 bp, synthetic construct
  source 1..75: mol_type = other DNA
ttgcggtgctgaagcgtgcccgggagggaaatttttatccgccgaaacaaaaacagcgcgtcgctgtatcagcca

SEQ ID NO: 393200 - DNA, 75 bp, synthetic construct
  source 1..75: mol_type = other DNA
aacgtgaacgtcgtcgcaggaaagtggcgtcacctgaaacggtgagcaacattgtcgcagaattccgtgccagcc

SEQ ID NO: 393201 - DNA, 75 bp, synthetic construct
  source 1..75: mol_type = other DNA
catccgctgacgattctctccaccctgccctcggcgggcgtggagcgctgttggcgctggagctgttcaatgccc

SEQ ID NO: 393202 - DNA, 75 bp, synthetic construct
  source 1..75: mol_type = other DNA
gccgccagaaacgcaaaactggcaggaaaaagaagctaatggtctggacccggaagtgctggcggagattaaccg

SEQ ID NO: 393203 - DNA, 75 bp, synthetic construct
  source 1..75: mol_type = other DNA
gatgcgcgtcagctggtgggctatctggtgtcgcaatcaggtctgccgttggataccagcgcattgcaggcgcaa

SEQ ID NO: 393204 - DNA, 75 bp, synthetic construct
  source 1..75: mol_type = other DNA
gcgtacggttcaggaaggcgtgaatcccgaacgtgtctgggcgccgtggattgcagagttggatatttatcctca

SEQ ID NO: 393205 - DNA, 75 bp, synthetic construct
  source 1..75: mol_type = other DNA
cttcgcgaaacattgccgccgcatatggtgccggtcgttctgctgcaactgccgcagttgccgcttagcgccaac

SEQ ID NO: 393206 - DNA, 75 bp, synthetic construct
  source 1..75: mol_type = other DNA
gtaaagcgacgctatttgttgccgaacgcacgcttcaggaaggtatgagtcctgaacaggcctgggcaccgtgga

SEQ ID NO: 393207 - DNA, 75 bp, synthetic construct
  source 1..75: mol_type = other DNA
gcgttgacgttcgaacagccagaaattatcgacctgcgtgccaacattaatccacacggaactgcgcaggcatta

SEQ ID NO: 393208 - DNA, 75 bp, synthetic construct
  source 1..75: mol_type = other DNA
gaagaaaaacgccatcatgatggtcgattttgcgcttgaagcccaacgccacgctaatctgacgccgcaggaggc

SEQ ID NO: 393209 - DNA, 75 bp, synthetic construct
  source 1..75: mol_type = other DNA
gctggtattgtcgggcggtgacggctcggagctgcgccaacccctggggatcaccattgtcggcggtctggtaat

SEQ ID NO: 393210 - DNA, 75 bp, synthetic construct
  source 1..75: mol_type = other DNA
ttcttcccggagcaggacaccggcgtactgatgggcgggatacaggccgatcagagtatttcgtttcaggcgatg

SEQ ID NO: 393211 - DNA, 75 bp, synthetic construct
  source 1..75: mol_type = other DNA
cgccctcatggccccatgcagacggcggcaaacctggatgaagtctgcgaagcgcatctggcaacgttacttgaa

SEQ ID NO: 393212 - DNA, 75 bp, synthetic construct
  source 1..75: mol_type = other DNA
caatgaaactggcggcacagcttagccgacagtttgcccgtcaggtgacgccggggcaggtgatggtggcgtcaa

SEQ ID NO: 393213 - DNA, 75 bp, synthetic construct
  source 1..75: mol_type = other DNA
tgaaccggaagcgcaccgtgacccgctcgctatgcagcaattctttgccgaatatggcgtaacgaccacgcactt

SEQ ID NO: 393214 - DNA, 75 bp, synthetic construct
  source 1..75: mol_type = other DNA
caaagaaaccggagaactgactgaagatggcgagccggtatgtgttaaggaagacggatattttgtaaacgtgcg

SEQ ID NO: 393215 - DNA, 75 bp, synthetic construct
  source 1..75: mol_type = other DNA
atgccgattcaaatcactgcccgccgcgatggctttcgccgtctcggcatcgcccacagcgcgaatactgtcacc

SEQ ID NO: 393216 - DNA, 75 bp, synthetic construct
  source 1..75: mol_type = other DNA
catcattaatgatacgcaaatatcgtcattattcgatgaatacgcggttgttgttgaacatcaacttcgtggctg

SEQ ID NO: 393217 - DNA, 75 bp, synthetic construct
  source 1..75: mol_type = other DNA
ttattacccgactggtacgctttccacacagcgttcttgcggaagtacgtcatcccgtgatgagcagttttgtca

SEQ ID NO: 393218 - DNA, 75 bp, synthetic construct
  source 1..75: mol_type = other DNA
gcagttttgtgagtttgtttccggcaacgacgatgctggtggcgattggttttgttccgtggtttcgcccactgg

SEQ ID NO: 393219 - DNA, 75 bp, synthetic construct
  source 1..75: mol_type = other DNA
tggttaagccttgaaccggtgatccttcaacgactgcgcagctcgggagaattacccacggcgctgcggacatcg

SEQ ID NO: 393220 - DNA, 75 bp, synthetic construct
  source 1..75: mol_type = other DNA
aaatggcctcataacaatgaatcaataaatctttcatgggcagatttgcttataaaacatgggtttgatgttaat

SEQ ID NO: 393221 - DNA, 75 bp, synthetic construct
  source 1..75: mol_type = other DNA
tgtaattaattgccctgtggttgctgagaagttattgagccatggtgctataccatcatatggcggatatatggg

SEQ ID NO: 393222 - DNA, 75 bp, synthetic construct
  source 1..75: mol_type = other DNA
aaactggacgcgctttataacaaactggaagtggtacagcagtaccggaataccggaggtcagagtcatggttga

SEQ ID NO: 393223 - DNA, 75 bp, synthetic construct
  source 1..75: mol_type = other DNA
gtgcgcatcattaatgatgtgaaaacaccgtcaatattcgatgaatacgtggttgctgttgagcatcaacttcgt

SEQ ID NO: 393224 - DNA, 75 bp, synthetic construct
  source 1..75: mol_type = other DNA
gcagatgccgccaaagctatggatgttggcctttctacaatgacaagatgggtcaaacaactgcgtgatgagcgt

SEQ ID NO: 393225 - DNA, 75 bp, synthetic construct
  source 1..75: mol_type = other DNA
gcgggttggcgtagtggcccacgagaagcaatcatcagtcgaattgaagtaagtcttaagtcagtattgacgctt

SEQ ID NO: 393226 - DNA, 75 bp, synthetic construct
  source 1..75: mol_type = other DNA
tctgccgacagttgcgaacaactttattagcgcaatggcctgcggcgcactgggttataccgatgcgggtctggt

SEQ ID NO: 393227 - DNA, 75 bp, synthetic construct
  source 1..75: mol_type = other DNA
gtgataacagatgtctggaaatataggggcaaatccactggcggtctggactatctggttcatcagacagaaaag

SEQ ID NO: 393228 - DNA, 75 bp, synthetic construct
  source 1..75: mol_type = other DNA
gacagggccgacttttcggcctttatggagagtactggctattatgatgacgagtcgatgcaggatgatattctt

SEQ ID NO: 393229 - DNA, 75 bp, synthetic construct
  source 1..75: mol_type = other DNA
gacagggccgacttttcggcctttatggacagtagtggctattatgatgacgagtcgatgcaggatgatattctt

SEQ ID NO: 393230 - DNA, 75 bp, synthetic construct
  source 1..75: mol_type = other DNA
cgggattcttcggtcttggcggtgggatcaacagtgaaaacgacgacaccattctcgtggtgctgatcacgccca

SEQ ID NO: 393231 - DNA, 75 bp, synthetic construct
  source 1..75: mol_type = other DNA
tctggtctgttcattctgccgacctacccgacgctggttgctgcggtacagatggatgacacgggtacaacccgt

SEQ ID NO: 393232 - DNA, 75 bp, synthetic construct
  source 1..75: mol_type = other DNA
tctggtgatgtccttcctggtcactatgctgttcaactccaaactctctgacgatccgatttatcgcaagcgtct

SEQ ID NO: 393233 - DNA, 75 bp, synthetic construct
  source 1..75: mol_type = other DNA
gacgaagatcgcgctgggtcaccatcgtgacgatatcctgcaaacgttgttcttaaatatgttctacggcggcaa

SEQ ID NO: 393234 - DNA, 75 bp, synthetic construct
  source 1..75: mol_type = other DNA
ccgtctcatttgtgcgataccactcttttcgatttcaaaggcattacccacggttccgaagtggttaacggcggt

SEQ ID NO: 393235 - DNA, 75 bp, synthetic construct
  source 1..75: mol_type = other DNA
atgcagagcgataaagtgcgcgccgttttaatgaaagcagagggtattgtgttggggacgatagggatgggattt

SEQ ID NO: 393236 - DNA, 75 bp, synthetic construct
  source 1..75: mol_type = other DNA
gacagggccgacttttcggcctttatggatagaactggctattatgatgacgagtcgatgcaggatgatattctt

SEQ ID NO: 393237 - DNA, 75 bp, synthetic construct
  source 1..75: mol_type = other DNA
gacagggccgacttttcggcctttatggaaaggattggctattatgatgacgagtcgatgcaggatgatattctt

SEQ ID NO: 393238 - DNA, 75 bp, synthetic construct
  source 1..75: mol_type = other DNA
atgaaagatttaacactcaaatttgcagacagggccgacttttcggcctttatggagagcattggctattatgat

SEQ ID NO: 393239 - DNA, 75 bp, synthetic construct
  source 1..75: mol_type = other DNA
agtttaaacgcgaatccgctcaactggtggttgaccagaaatacaccgtggcagatgccgccaaagctatggatg

SEQ ID NO: 393240 - DNA, 75 bp, synthetic construct
  source 1..75: mol_type = other DNA
attaagtttacgtattggtatcaccagcggaatcggattatttatcgccttaatgggattaaaaaatactggcgt

SEQ ID NO: 393241 - DNA, 75 bp, synthetic construct
  source 1..75: mol_type = other DNA
tatccacggaggtcctgaggggcttgagttaagctttggacttgggattgattattacgatgcgagagatattcc

SEQ ID NO: 393242 - DNA, 75 bp, synthetic construct
  source 1..75: mol_type = other DNA
ctacggcaaaaatattccgcttgaggaaacggtagtttcaccacaagccgttttcgacgcgccacaactcaccac

SEQ ID NO: 393243 - DNA, 75 bp, synthetic construct
  source 1..75: mol_type = other DNA
tattgaaagtacttctggtgtggcagttggtggtcgaacggggctgactgcggtcgtggtcggcattatgtttct

SEQ ID NO: 393244 - DNA, 75 bp, synthetic construct
  source 1..75: mol_type = other DNA
acacttgaactcgccggtatcattttctcctttatgctgattaacctatttgattcatcaggaacattaattggt

SEQ ID NO: 393245 - DNA, 75 bp, synthetic construct
  source 1..75: mol_type = other DNA
gttttttattataaccgtgttgtcatcacgtcattttcatgccgcggtgctggtttctattgtggtgacgtcttg

SEQ ID NO: 393246 - DNA, 75 bp, synthetic construct
  source 1..75: mol_type = other DNA
gccaaacttctatgccgactggaacaagcgacaggggaacagaaacattataatgcactaattgggttgcttttt

SEQ ID NO: 393247 - DNA, 75 bp, synthetic construct
  source 1..75: mol_type = other DNA
accaaacttctttgtcgactggagcaagcgacaggggaagaggaacagaaacactacaattcactaattgggttg

SEQ ID NO: 393248 - DNA, 75 bp, synthetic construct
  source 1..75: mol_type = other DNA
gcggaaattcagtattgctacgtgaatggtcgcatgatgcgcgatcgcctgatcaatcatgcgatccgccaggcc

SEQ ID NO: 393249 - DNA, 75 bp, synthetic construct
  source 1..75: mol_type = other DNA
cagtggatcgcccatggtgaaaagggcaaatacgttgttcgccgcgttgaaggcggactgagtgttgaacaacag

SEQ ID NO: 393250 - DNA, 75 bp, synthetic construct
  source 1..75: mol_type = other DNA
ttatcccggacggaaaattaatttcgttttttggcgttaatgtctggcaatctggttcatatctagtttacttca

SEQ ID NO: 393251 - DNA, 75 bp, synthetic construct
  source 1..75: mol_type = other DNA
acgacggcacggaccgaagtgatcgccggttttaccaccttcctgacgatggtttacatcgtttttgttaacccg

SEQ ID NO: 393252 - DNA, 75 bp, synthetic construct
  source 1..75: mol_type = other DNA
ccgccggagcgttaatctttgttggcgtgctgatgacctcaagcctggcgcgcgttaactgggatgattttaccg

SEQ ID NO: 393253 - DNA, 75 bp, synthetic construct
  source 1..75: mol_type = other DNA
tggataccctgcaaaataacggcgtgggctgcattgcctttactcctctggctcagggattgctgaccggaaaat

SEQ ID NO: 393254 - DNA, 75 bp, synthetic construct
  source 1..75: mol_type = other DNA
gttcgtggtctgacgccgaaaatgctcaccgaagccaacctcaacagcctgcggttattgaatgaaatggcacag

SEQ ID NO: 393255 - DNA, 75 bp, synthetic construct
  source 1..75: mol_type = other DNA
attgctgaccggaaaatatctcaacggcattccgcaagattcacggatgcatcgtgaagggaataaagttcgtgg

SEQ ID NO: 393256 - DNA, 75 bp, synthetic construct
  source 1..75: mol_type = other DNA
agtttaaacgcgaatccgctcaactggtcgttgaccagacatacacagtggcagatgccgccaaagctatggatg

SEQ ID NO: 393257 - DNA, 75 bp, synthetic construct
  source 1..75: mol_type = other DNA
agtttaaacgcgaatccgctcaactggtagttgaccagagatacaccgtggcagatgccgccaaagctatggatg

SEQ ID NO: 393258 - DNA, 75 bp, synthetic construct
  source 1..75: mol_type = other DNA
gaagattatcttcgtgggcaagcagtattagaagcaaagctggatgccttatatagcaaaatcgagctgttacaa

SEQ ID NO: 393259 - DNA, 75 bp, synthetic construct
  source 1..75: mol_type = other DNA
atgtctgcggtgttagaactatctgatacagatgcgatagaatatggaatggtgaaatttatcgcagatagcatt

SEQ ID NO: 393260 - DNA, 75 bp, synthetic construct
  source 1..75: mol_type = other DNA
taattttgggataaatattaatggccttttttctgtcggtaccggtgtttttgatcttgcgggaaagtatctcaa

SEQ ID NO: 393261 - DNA, 75 bp, synthetic construct
  source 1..75: mol_type = other DNA
aatttgatgcctccagacagatcccaacagcatcagagaatcgtccacgaaatatcgcatttaactttatcgtga

SEQ ID NO: 393262 - DNA, 75 bp, synthetic construct
  source 1..75: mol_type = other DNA
aaagcgtttgatttgggcattacgcactttgatttagccaacaattacgggccgcctccaggaagcgcagaagag

SEQ ID NO: 393263 - DNA, 75 bp, synthetic construct
  source 1..75: mol_type = other DNA
tgataagaattttgaaatggaagacatttcattgtgtagacgttcaatattagaaatttgtgagttatcagatac

SEQ ID NO: 393264 - DNA, 75 bp, synthetic construct
  source 1..75: mol_type = other DNA
ggatgttggcctttccacaatgacaagatgggtcaaacaactgcgtgatgagcgtcagggcaaaacaccaaaagc

SEQ ID NO: 393265 - DNA, 75 bp, synthetic construct
  source 1..75: mol_type = other DNA
gtggatgacggtcatgtcggcggacatgacgggccaccggtgtataaggcattactgctgaatgcggcagatgca

SEQ ID NO: 393266 - DNA, 75 bp, synthetic construct
  source 1..75: mol_type = other DNA
atgacgggccaccggtgtataaggcattactgctgaatgcggcagacgcatggcgggaggtgatggtgttacagc

SEQ ID NO: 393267 - DNA, 75 bp, synthetic construct
  source 1..75: mol_type = other DNA
gaatgaacctttacgggcatggaatgcggcagagtttgcggcaatgtcggattttattacggaacactactggac

SEQ ID NO: 393268 - DNA, 75 bp, synthetic construct
  source 1..75: mol_type = other DNA
ggcgtggcgacgctggtttcgctgattgccatcggcgcaatcggtgcctggtcgcaggccatggttaccctggcg

SEQ ID NO: 393269 - DNA, 75 bp, synthetic construct
  source 1..75: mol_type = other DNA
gtggatgacggacgggctggcggacatgcgtctgcggtgtataaggtattgttactgagtgcagaagacgcatgg

SEQ ID NO: 393270 - DNA, 75 bp, synthetic construct
  source 1..75: mol_type = other DNA
acctggcctgctggaaagtggaccgtttcagcacagaggcgcagctgacagtggatgatgtgcgtgcaggcggac

SEQ ID NO: 393271 - DNA, 75 bp, synthetic construct
  source 1..75: mol_type = other DNA
ccagctggaaaaatatctggagccgatccccaaagcggactgggagcaggtgaaagcgtattactacgccatgta

SEQ ID NO: 393272 - DNA, 75 bp, synthetic construct
  source 1..75: mol_type = other DNA
gaaaattgagggtgaatggcgcgcgttgctggtgactgaagatatggcggggttcatcagcattgctgactggta

SEQ ID NO: 393273 - DNA, 75 bp, synthetic construct
  source 1..75: mol_type = other DNA
gcaatgacagcgttttcactattgggcgaatctatgatgttcacatcgtttatggcaatggtattagtgatgttg

SEQ ID NO: 393274 - DNA, 75 bp, synthetic construct
  source 1..75: mol_type = other DNA
tgcagaggaatatgccgcaatgggcgaatgaacctttacgggcatggaatgcggcagagtttgcggcaatgtcgg

SEQ ID NO: 393275 - DNA, 75 bp, synthetic construct
  source 1..75: mol_type = other DNA
cctggatagacgcagccattcgcgagcaggcgcgtggagtgacgacggtcatgctgataccacaatccctcgata

SEQ ID NO: 393276 - DNA, 75 bp, synthetic construct
  source 1..75: mol_type = other DNA
agttcaatcattggtgggctacagaaggtggctgggttgaggagccgaattaccgccgcaacggtatgagcgggg

SEQ ID NO: 393277 - DNA, 75 bp, synthetic construct
  source 1..75: mol_type = other DNA
cgggcgtggtggtgacgatcatctttgcgctgccgccgattatccgtctgacgattctgggaattaaccaggttc

SEQ ID NO: 393278 - DNA, 75 bp, synthetic construct
  source 1..75: mol_type = other DNA
attcgttcatcgcagtgtgtggtgagcagttagacgcaaacggccagaacctgatccgggtaatggctgaaaatg

SEQ ID NO: 393279 - DNA, 75 bp, synthetic construct
  source 1..75: mol_type = other DNA
aaccaagtgccttcatcgtgtatatccgacagtgcacgtagatttgcaacgttaatggtaatggaaaatcgcaga

SEQ ID NO: 393280 - DNA, 75 bp, synthetic construct
  source 1..75: mol_type = other DNA
cacttaataaaaagaaatttcagtttcaggttcctgttcctatcttaaacgaatacaaggaaaaaaaagagttac

SEQ ID NO: 393281 - DNA, 75 bp, synthetic construct
  source 1..75: mol_type = other DNA
agctacgatcttagcgctaaatggctgaaaagagtggtggcatattttgccgaacatcgcggtgacgcgatagaa

SEQ ID NO: 393282 - DNA, 75 bp, synthetic construct
  source 1..75: mol_type = other DNA
aaaaatctggccatagctcatattcgacgctgcaatactttgttgcataaatcaaaaacagtacccggaaacaac

SEQ ID NO: 393283 - DNA, 75 bp, synthetic construct
  source 1..75: mol_type = other DNA
gtcgtcttaacgcgctcccggatgttctggagcagtttattcacctgcgtgctgtgagtgaggctaccgctgagg

SEQ ID NO: 393284 - DNA, 75 bp, synthetic construct
  source 1..75: mol_type = other DNA
aaatcaaatcgtcgtaatcgtagaccagcatctgatgaactggacatgctcattgaaggtcttcaacaacgatct

SEQ ID NO: 393285 - DNA, 75 bp, synthetic construct
  source 1..75: mol_type = other DNA
agtaaagataaacttccagaactatggcgtttcttttctgatgtggttggtccagagcattgggggcttaacgaa

SEQ ID NO: 393286 - DNA, 75 bp, synthetic construct
  source 1..75: mol_type = other DNA
actattctggggattaaccaggttccggcggatctgattgaagcctcgcgctcattcggtgccagcccgcgccag

SEQ ID NO: 393287 - DNA, 75 bp, synthetic construct
  source 1..75: mol_type = other DNA
atgatcggctcgtttattctccaacgactgggtactcgccgacagtcgatgtatggatttgctgttgtgacctta

SEQ ID NO: 393288 - DNA, 75 bp, synthetic construct
  source 1..75: mol_type = other DNA
ggggtgtcttcacttatgtctaaagttggcgatgtggctggcaaagtgggttcaaacatcgtaaaagcggtcact

SEQ ID NO: 393289 - DNA, 75 bp, synthetic construct
  source 1..75: mol_type = other DNA
cagcaatggcactgcaaactgcagttgatgtaatgggcgataaggccccgcaggcgttaaagacagcagcgcaag

SEQ ID NO: 393290 - DNA, 75 bp, synthetic construct
  source 1..75: mol_type = other DNA
attgagaaggtctatacggttacacacctgaaacgcgccggtacgctatcggaggaagagctaacactctggctc

SEQ ID NO: 393291 - DNA, 75 bp, synthetic construct
  source 1..75: mol_type = other DNA
ttccggcaagctgaacattcagattggcacgtccggcggttttgacaactttatccgggtgaataccggctctct

SEQ ID NO: 393292 - DNA, 75 bp, synthetic construct
  source 1..75: mol_type = other DNA
ctgattaagcgcgaggttaatacggaggtatcagcggctgacggggatattattctgctgggtggcctggctgaa

SEQ ID NO: 393293 - DNA, 75 bp, synthetic construct
  source 1..75: mol_type = other DNA
gatgacgttaccgcgcccgaaagcgattgttgtggtttcggctcactggtttacccggggaacaggagttactgc

SEQ ID NO: 393294 - DNA, 75 bp, synthetic construct
  source 1..75: mol_type = other DNA
cacagccaaccagtgctggacatccttcctggatgcgggcggtctgcgcgatatcgaggttgaggctgtcaccaa

SEQ ID NO: 393295 - DNA, 75 bp, synthetic construct
  source 1..75: mol_type = other DNA
gcgggtacggcatcggactttatgaaccgtaccggggatgtgctggtttattatggccggaagtcagagattaag

SEQ ID NO: 393296 - DNA, 75 bp, synthetic construct
  source 1..75: mol_type = other DNA
cgcaaatccggactgacaatattgaccttgtgattaagcagcagctttccagctttgcgaagacggatacgggcg

SEQ ID NO: 393297 - DNA, 75 bp, synthetic construct
  source 1..75: mol_type = other DNA
gccagtcgaaaccgtagcatggaaagacgctgttgagtgggttctcgaagaggcttgccaggctgtaaatacagg

SEQ ID NO: 393298 - DNA, 75 bp, synthetic construct
  source 1..75: mol_type = other DNA
tggtgactggaaatatgtaccgacaaaagaggattgcaacgacaggccgagctatgagattcaggtcttattcac

SEQ ID NO: 393299 - DNA, 75 bp, synthetic construct
  source 1..75: mol_type = other DNA
ttgtggtgaccaggaagattacgccgaatatttctgcgacgcattgggcaccatccgcgacatcattgaaccgcg

SEQ ID NO: 393300 - DNA, 75 bp, synthetic construct
  source 1..75: mol_type = other DNA
tggcatttcgaaatgggacgtaaactggcggcgctgcgcgatgaagggataatgttagttgccagtggcaacgtg

SEQ ID NO: 393301 - DNA, 75 bp, synthetic construct
  source 1..75: mol_type = other DNA
tggatcaccggctttggctcagcgattggttgagctgttagcgccagtgcctgtcacactggataaagaagcctg

SEQ ID NO: 393302 - DNA, 75 bp, synthetic construct
  source 1..75: mol_type = other DNA
atgattctgtcagcaaaagaagagttagctaatgaatcgcatccgattgatggcctgtccggtgaatatgcagag

SEQ ID NO: 393303 - DNA, 75 bp, synthetic construct
  source 1..75: mol_type = other DNA
ccgggcgtgaaggaatacaactgcgataagccgccgatagcagcctcccggctggcacattacaacggaggggcg

SEQ ID NO: 393304 - DNA, 75 bp, synthetic construct
  source 1..75: mol_type = other DNA
aaacgataagcctattcgcgccaaagcacgtgtccgcggtcgctggtggagcgtaagtgaagacgctggtgctgt

SEQ ID NO: 393305 - DNA, 75 bp, synthetic construct
  source 1..75: mol_type = other DNA
gaagccagagctgaagaagctgcgaacgatgattatatcattgtggttaatgataagccgattcgcgctaaagcc

SEQ ID NO: 393306 - DNA, 75 bp, synthetic construct
  source 1..75: mol_type = other DNA
gtcagattcaaatggcctttacctatggcgggatgattggtcaaaaaattagcgcatctggaagtgacgagatag

SEQ ID NO: 393307 - DNA, 75 bp, synthetic construct
  source 1..75: mol_type = other DNA
tgattttcacctcgctaatacttactggctgccagtcccctcagggaaagtttactcctgagcaagtcgccgcta

SEQ ID NO: 393308 - DNA, 75 bp, synthetic construct
  source 1..75: mol_type = other DNA
gcttcctgaaagacgcgatgcgttcatcgataggaattaaaaccccggaaagattaaaaaaacaccaaaaaatgg

SEQ ID NO: 393309 - DNA, 75 bp, synthetic construct
  source 1..75: mol_type = other DNA
taaagtcaccgttaatctgaatgcccgctggctggatcgccgcttgataaaagagttcctggcagagcagggcta

SEQ ID NO: 393310 - DNA, 75 bp, synthetic construct
  source 1..75: mol_type = other DNA
actttacacgcccggaacaagttgtaacccaccttttcagtgacgtggcacttaatccaatcacactggacgatt

SEQ ID NO: 393311 - DNA, 75 bp, synthetic construct
  source 1..75: mol_type = other DNA
caatgagtcgatgaaaaccgcgctatctcgtcgctttgatagtcgcatcaattgggatttgctcggcgtaactac

SEQ ID NO: 393312 - DNA, 75 bp, synthetic construct
  source 1..75: mol_type = other DNA
gtgaagcttccagcttaggcgaactgattgaaattgttagtcggttgcataaattacgtgctgttgcgacctttg

SEQ ID NO: 393313 - DNA, 75 bp, synthetic construct
  source 1..75: mol_type = other DNA
taaaaatcccggatatcgtcgaaaacaccttgcagatcccaatgactccagagcagcaagcagcttatgaagagc

SEQ ID NO: 393314 - DNA, 75 bp, synthetic construct
  source 1..75: mol_type = other DNA
taaaaatccctgatattgtcgagaataccttgcagatcccgatgacaggagagcaagaggccatttacgaagaac

SEQ ID NO: 393315 - DNA, 75 bp, synthetic construct
  source 1..75: mol_type = other DNA
tcagaaaatttccggtgaggtggaagagaagcaggggctggtgggcttccagaacctggatggtctgcgtggtat

SEQ ID NO: 393316 - DNA, 75 bp, synthetic construct
  source 1..75: mol_type = other DNA
cagaaaaccgagaatgataaaaagcacacttgccccgtctgtggaaaagtaggttcctctgatgaagaaattgag

SEQ ID NO: 393317 - DNA, 75 bp, synthetic construct
  source 1..75: mol_type = other DNA
cggggcgatgattattggtaacccgaaacatgtgctgaaagagattgcccatcaaattaaaggcgtgatcagtaa

SEQ ID NO: 393318 - DNA, 75 bp, synthetic construct
  source 1..75: mol_type = other DNA
cacgatggctgaggcgattacctaccgccagaaattcaacgaacgtgaggtgatgcttctgtggccggattttat

SEQ ID NO: 393319 - DNA, 75 bp, synthetic construct
  source 1..75: mol_type = other DNA
gatctggaaatcattgatgccttactgacgtcgatgaacaagatcacggctgccgatgatgccaaactacagcat

SEQ ID NO: 393320 - DNA, 75 bp, synthetic construct
  source 1..75: mol_type = other DNA
accagttagaaaacctagatgcggacgacgacctgccctgcatcggtgacagcgagatcggtggcaaggtcaaaa

SEQ ID NO: 393321 - DNA, 75 bp, synthetic construct
  source 1..75: mol_type = other DNA
aatggacgagtcgacgtttacggcgacctacctcagtctgtttaaccagatctggcaagaccccgagaagctgga

SEQ ID NO: 393322 - DNA, 75 bp, synthetic construct
  source 1..75: mol_type = other DNA
gttcccgctgaacaagcccacactgctgacccgcgtcaatgacgtgctgggaaaatgcgggacaacggggacgct

SEQ ID NO: 393323 - DNA, 75 bp, synthetic construct
  source 1..75: mol_type = other DNA
aacatccctggcttcatcgacgccatacaggttatcttcagcggtcatactgccagcggcggtgatatgaacacg

SEQ ID NO: 393324 - DNA, 75 bp, synthetic construct
  source 1..75: mol_type = other DNA
gttaccgccacatgaaattgcggtcaacatccctggttttatcgacgccatacaggttattttcagcgggcatac

SEQ ID NO: 393325 - DNA, 75 bp, synthetic construct
  source 1..75: mol_type = other DNA
atgttgattccagcgttatcggtatcgtggcaacggcggaatgatgcggacgcgaagctgttcccgctgaacaag

SEQ ID NO: 393326 - DNA, 75 bp, synthetic construct
  source 1..75: mol_type = other DNA
ttatcgtgcgcttaaggccatcgcagaccaggtgagcacaaaagtgatcgtcgttcgcgtggctgaacacaaaga

SEQ ID NO: 393327 - DNA, 75 bp, synthetic construct
  source 1..75: mol_type = other DNA
ggggcttgatgtactgaatatcgccgccgattatgctgatttcgtgacagaggttattttaagaaaaacgacgga

SEQ ID NO: 393328 - DNA, 75 bp, synthetic construct
  source 1..75: mol_type = other DNA
gcttatcttttatatctgcctgtattattgctcttttttcataacttacgccctctgcctccaaccagtaatagc

SEQ ID NO: 393329 - DNA, 75 bp, synthetic construct
  source 1..75: mol_type = other DNA
cattatcagggaaaccataaccgctgcacgccagaacagacattacgttatctcactggagatcccattaccacc

SEQ ID NO: 393330 - DNA, 75 bp, synthetic construct
  source 1..75: mol_type = other DNA
atgtcactgtcaattgttcatacccgcgcagccctgggagtaaatgcgcccccgatcactgttgaggtacatatc

SEQ ID NO: 393331 - DNA, 75 bp, synthetic construct
  source 1..75: mol_type = other DNA
aggcggagtacatcacagcgcgacgtccggcaggtcagaaaaagaaacgtgatgcggagcatggcgaatgtggaa

SEQ ID NO: 393332 - DNA, 75 bp, synthetic construct
  source 1..75: mol_type = other DNA
cgaagctgaagtggggttaattaacggtgaagggtgtctgatagctgatcatctacaaactgtctgtgcgtttct

SEQ ID NO: 393333 - DNA, 75 bp, synthetic construct
  source 1..75: mol_type = other DNA
atttaagcggcagaataaactgaacgcctggctggataatccggaaatacgccaattctgcaagcttgagagcga

SEQ ID NO: 393334 - DNA, 75 bp, synthetic construct
  source 1..75: mol_type = other DNA
cagtctgacattattacacgtcagcatttgcaggaggctgttagctatcgtgctatcgaccgcttgctcatccat

SEQ ID NO: 393335 - DNA, 75 bp, synthetic construct
  source 1..75: mol_type = other DNA
ccaccgccgcgccaccataagaaagctcctcatgatcatcacggcggtcatggtccaggcaaacatcaccgctaa

SEQ ID NO: 393336 - DNA, 75 bp, synthetic construct
  source 1..75: mol_type = other DNA
cctggagtcgcacgaacagttattttcagaataccgaatacgcggccagaaattaccccgacgccgcggagctgg

SEQ ID NO: 393337 - DNA, 75 bp, synthetic construct
  source 1..75: mol_type = other DNA
ctgggtatcgatacctggtggtatgacgttaacaaagcgacgaaactgccgtcagccagacaacagggagagtag

SEQ ID NO: 393338 - DNA, 75 bp, synthetic construct
  source 1..75: mol_type = other DNA
ttgaattgcatatcactgcgctgggtaaggcgttattagcctggaaaacgcgggaagagctggattattttttag

SEQ ID NO: 393339 - DNA, 75 bp, synthetic construct
  source 1..75: mol_type = other DNA
gagtgcggcttcttaattaaaaacaaaaacggccattattcgctgggaataaaaaactacgaactgggttgccag

SEQ ID NO: 393340 - DNA, 75 bp, synthetic construct
  source 1..75: mol_type = other DNA
gccttcggggatgggccatagacaacgaagaatcaacctatggtgcggtatgtttaagtatgccggtattcaata

SEQ ID NO: 393341 - DNA, 75 bp, synthetic construct
  source 1..75: mol_type = other DNA
aaacaagaattttccggcgttcctgatgatgcggctgatgcgctttcgtcaatatctgaaattatgcgggtggct

SEQ ID NO: 393342 - DNA, 75 bp, synthetic construct
  source 1..75: mol_type = other DNA
atttttgatctctgccaacggatgattgataacgctggcgtcccgatgaagctttataaaacgctggatcgccgc

SEQ ID NO: 393343 - DNA, 75 bp, synthetic construct
  source 1..75: mol_type = other DNA
gatgctggcgattgaaatgggtgagtattacaaaggcggcgcgcgtgcgcaggtggtacagaaagtcgagaagca

SEQ ID NO: 393344 - DNA, 75 bp, synthetic construct
  source 1..75: mol_type = other DNA
gcgtcagggcagttaaaagcgtctggcgtaaaaaacattttcgatctgccgtttagcgaaggcttaattcgggca

SEQ ID NO: 393345 - DNA, 75 bp, synthetic construct
  source 1..75: mol_type = other DNA
atgctgaactcaccagtgaagaacaaaaagataacgaactggtttctcgagtaatcgagaatccagaggttttaa

SEQ ID NO: 393346 - DNA, 75 bp, synthetic construct
  source 1..75: mol_type = other DNA
ccaacgcaatcctgatcatcatgctcagcgttgcaactctgaccaccgttatctgtaaagtcgataccgacaaca

SEQ ID NO: 393347 - DNA, 75 bp, synthetic construct
  source 1..75: mol_type = other DNA
tcatggccatattgataatattccggctgactgggcagttgaaatgacctgtacgctggggcgcaatggtgcgac

SEQ ID NO: 393348 - DNA, 75 bp, synthetic construct
  source 1..75: mol_type = other DNA
ttgataacgctggcgtcccgatgaagctttataaaacgctggatcgccgcgaagcattgaaagatgctgatttcg

SEQ ID NO: 393349 - DNA, 75 bp, synthetic construct
  source 1..75: mol_type = other DNA
gcatccggcaatgtgcgcgtttctggcgcagcagactgaacggcgtaatcaacgggcgcagttgatcgccgaaag

SEQ ID NO: 393350 - DNA, 75 bp, synthetic construct
  source 1..75: mol_type = other DNA
agcgggcgcagctaattgccgaaagacttgaaaaagcgcaaatacctggggcgctggaaggcgcgcaacgactgg

SEQ ID NO: 393351 - DNA, 75 bp, synthetic construct
  source 1..75: mol_type = other DNA
ctattggtggcgggagtagttataccccggaactgctggaagggtttattaagcgttatcacgaattgccagtga

SEQ ID NO: 393352 - DNA, 75 bp, synthetic construct
  source 1..75: mol_type = other DNA
tttatcgtcataccggatttaaacgctttatcggcgtgtgtaatattccgatcggcatgaagatgtttattcgcg

SEQ ID NO: 393353 - DNA, 75 bp, synthetic construct
  source 1..75: mol_type = other DNA
gtttagcgaaggcttaattcgggcactgaacctgttgccgtgttcctatttgctttattacttcaagcaaaaaga

SEQ ID NO: 393354 - DNA, 75 bp, synthetic construct
  source 1..75: mol_type = other DNA
caggggccggttcctccgccatcaatgctgaaagagtatgagcaattgattcctgggcttgcaaatcgactcgtt

SEQ ID NO: 393355 - DNA, 75 bp, synthetic construct
  source 1..75: mol_type = other DNA
gtgctggtatgacgtggtggataacagcaccacggaacttcgtcagggacgcgtgcgtatccgctacaagtacac

SEQ ID NO: 393356 - DNA, 75 bp, synthetic construct
  source 1..75: mol_type = other DNA
cgcacaccggaaacgaacgcctacatctttgaggtgtataaccacgccagcagcggcagcgtgaggtcatccagc

SEQ ID NO: 393357 - DNA, 75 bp, synthetic construct
  source 1..75: mol_type = other DNA
ggaaacatcatgggggttctgattgctggagaactccatttttgttatttaagaacttacaccgtgaatttggtt

SEQ ID NO: 393358 - DNA, 75 bp, synthetic construct
  source 1..75: mol_type = other DNA
aaacatgaattttccggcgtatctgatgatgcgggtgatgcgctttcgtcaatatccaaactgattagagcatct

SEQ ID NO: 393359 - DNA, 75 bp, synthetic construct
  source 1..75: mol_type = other DNA
cgcaagcagacgtgagttttagtgccgacgccagcgatttgctgatgatcgcagcgcgtaaacaggatccggata

SEQ ID NO: 393360 - DNA, 75 bp, synthetic construct
  source 1..75: mol_type = other DNA
atgcgtgcggccttcgtgcgtacattgaccatgagcagggctggcacaaatcactgtccaacgttccggttaaaa

SEQ ID NO: 393361 - DNA, 75 bp, synthetic construct
  source 1..75: mol_type = other DNA
gaaccttcttctgcccccgccccgacggcagtgacggaagaacaacacgttcaggccgctgaggcccgccgtaat

SEQ ID NO: 393362 - DNA, 75 bp, synthetic construct
  source 1..75: mol_type = other DNA
ggagcataacgctgaccagatacttacagctattgattcctgcctgcgccttgaatacctgatggaacgccgctt

SEQ ID NO: 393363 - DNA, 75 bp, synthetic construct
  source 1..75: mol_type = other DNA
atgagccagtggaaagacatctgcaaaatcgatgacatcctgcctgaaaccggcgtctgcgcgctgttaggtgac

SEQ ID NO: 393364 - DNA, 75 bp, synthetic construct
  source 1..75: mol_type = other DNA
cgccgtttcctgctgcagtcgttgtttttaaaagagaacaacgtgggcatgaaattacgcagatggtttgctgtg

SEQ ID NO: 393365 - DNA, 75 bp, synthetic construct
  source 1..75: mol_type = other DNA
tcactttagatggtgctgcaactgagtatgacgcattgctaccacggttcaccgatgatataagccgtcagtcat

SEQ ID NO: 393366 - DNA, 75 bp, synthetic construct
  source 1..75: mol_type = other DNA
ggattagcgaaaaggtcttcgttaacccgccatacagcggcactaaaacattcctcataaaagcgtctgaggcag

SEQ ID NO: 393367 - DNA, 75 bp, synthetic construct
  source 1..75: mol_type = other DNA
tttcctcggcagtttcagcatgatcaatggtgatcagcttgtgcagattggacgcggtattgcgcaggggtcagc

SEQ ID NO: 393368 - DNA, 75 bp, synthetic construct
  source 1..75: mol_type = other DNA
aagatcctgaagggttcgctgaaaaattcagtggaaaccttttttatatgtcatttatggacatcgataaaggtt

SEQ ID NO: 393369 - DNA, 75 bp, synthetic construct
  source 1..75: mol_type = other DNA
ggccctgcttcaatgcttggcactcttaatggactgttgcctgattttggttcatcaatgacaaagtcgccggaa

SEQ ID NO: 393370 - DNA, 75 bp, synthetic construct
  source 1..75: mol_type = other DNA
acggacaacataccggcgaaaaacctcggaccttctcttgcaacatgggattacctgccgccgccggagaatatg

SEQ ID NO: 393371 - DNA, 75 bp, synthetic construct
  source 1..75: mol_type = other DNA
tggatgcaatgcaggagtctgccacccgtcagcgtgaacaggatactattcggaagtttactgaagggaataaat

SEQ ID NO: 393372 - DNA, 75 bp, synthetic construct
  source 1..75: mol_type = other DNA
cgatcattgccaacattcaggataagctcgcagcactgaacaaatttgccaaagacagctgtaacgcaacctatg

SEQ ID NO: 393373 - DNA, 75 bp, synthetic construct
  source 1..75: mol_type = other DNA
ttacgccgcagcaccggtccgtctgggaggcgcaaaagtgccgcacctgatgccgggggactcactgaacctgca

SEQ ID NO: 393374 - DNA, 75 bp, synthetic construct
  source 1..75: mol_type = other DNA
gtgcaggatatcagcctgagcgacgatcttcgtaagattgaagtcaaggtcagcatcaagtccgatatgaaagat

SEQ ID NO: 393375 - DNA, 75 bp, synthetic construct
  source 1..75: mol_type = other DNA
tccgtggcggcattgctttcgcgactccgcccggcacgccgctggcgccgaaagcccaggaaggcaaacacttcc

SEQ ID NO: 393376 - DNA, 75 bp, synthetic construct
  source 1..75: mol_type = other DNA
gacgggatacccggcaaaaactggcactgattgcccggaaactgacgggagcgggttttagcccggataaattcg

SEQ ID NO: 393377 - DNA, 75 bp, synthetic construct
  source 1..75: mol_type = other DNA
tagcagcttgtgaacgtttagaggtaaagcacggcttaaccattaccaaaggcttacaggggcaaaaatcagagg

SEQ ID NO: 393378 - DNA, 75 bp, synthetic construct
  source 1..75: mol_type = other DNA
tgaggtaatgttttcggaagcgtatctgccgtatgcatggcccgaagtgaatcgtcacacaacggctgaagatat

SEQ ID NO: 393379 - DNA, 75 bp, synthetic construct
  source 1..75: mol_type = other DNA
ccggacagggttaataaaaacaacacgccctcattctctgaaatgaatgaacatgaaagggccattgttgctcat

SEQ ID NO: 393380 - DNA, 75 bp, synthetic construct
  source 1..75: mol_type = other DNA
aaatttatctcagtattgatgcaacaccaaatactgcctatcccagcgcaattgatttaggcaacgccgatgttg

SEQ ID NO: 393381 - DNA, 75 bp, synthetic construct
  source 1..75: mol_type = other DNA
gtcttggggacagacaaattataagtatgtagacagaaatacaagtaatgactttgctgttactcggctaaataa

SEQ ID NO: 393382 - DNA, 75 bp, synthetic construct
  source 1..75: mol_type = other DNA
gagtgatcacgcctgaacaccagatgtcagaggctgagaaaacattcgcgattaagccgaaaaccatttttcatt

SEQ ID NO: 393383 - DNA, 75 bp, synthetic construct
  source 1..75: mol_type = other DNA
agtgtcagcgaacaaactcgacagcagctgatggctctggcgaacgccccgttcaatgaggcccttaccatcccc

SEQ ID NO: 393384 - DNA, 75 bp, synthetic construct
  source 1..75: mol_type = other DNA
gcataaaaaaaagctgaacaaaagtgagacaaacacagcatcctcatccttcagtgaactgaatgccggagacaa

SEQ ID NO: 393385 - DNA, 75 bp, synthetic construct
  source 1..75: mol_type = other DNA
tacctgctgcaaccgggcaaaactggcagatactggtttccggttttggtcaggttgaacgtattacactcagta

SEQ ID NO: 393386 - DNA, 75 bp, synthetic construct
  source 1..75: mol_type = other DNA
cagagtcagtttaatccggcctccattgtggcttatccctggcgtggtgaatacattgcctgttacacgaaaccg

SEQ ID NO: 393387 - DNA, 75 bp, synthetic construct
  source 1..75: mol_type = other DNA
tatcgctctgcatcaggtggaggggaggcggattttttacttgtggctgaactggatgcatccgtgctcagttac

SEQ ID NO: 393388 - DNA, 75 bp, synthetic construct
  source 1..75: mol_type = other DNA
agccacgcaagcaccttaaaatcaccatcatacactaaatcagtaagttggcagcattacccaacccgggtatat

SEQ ID NO: 393389 - DNA, 75 bp, synthetic construct
  source 1..75: mol_type = other DNA
actgaaaataagattggtaaaatattaacgtcaacctgggatttgggaataaaatactcggcatattgtgaatgc

SEQ ID NO: 393390 - DNA, 75 bp, synthetic construct
  source 1..75: mol_type = other DNA
gtattgccgccgggtttgccggtaatgaagtgatgttttcggaagcgtatctgccgtatgcatggccggaagtga

SEQ ID NO: 393391 - DNA, 75 bp, synthetic construct
  source 1..75: mol_type = other DNA
attacgtaatccgaaattatccctcagcgatgccaatattagcgcccttctgaccggaaaaacgttcgaactggt

SEQ ID NO: 393392 - DNA, 75 bp, synthetic construct
  source 1..75: mol_type = other DNA
atttttctcaaatgatttgtgaaagtgtatctatcattacagatatttatctttctcagaatgttattgagcgta

SEQ ID NO: 393393 - DNA, 75 bp, synthetic construct
  source 1..75: mol_type = other DNA
gcattgtttgtaaatggttttggattcggtgattaccatataaatcgaataattttaggagcgttgttaaatcca

SEQ ID NO: 393394 - DNA, 75 bp, synthetic construct
  source 1..75: mol_type = other DNA
acattatcatgcgtatctctataaattacatggctcacttacgtggtatcaaaatgatagcttgactgttaacga

SEQ ID NO: 393395 - DNA, 75 bp, synthetic construct
  source 1..75: mol_type = other DNA
tttagacgagatataaataaaccaacatttcatgcttttttatctgtgccacagaatgaaaaattaacagatgaa

SEQ ID NO: 393396 - DNA, 75 bp, synthetic construct
  source 1..75: mol_type = other DNA
atatgatcgacttattgtattagcatgtcaagtggataactatttttcttataatagttgtaccaattatccatc

SEQ ID NO: 393397 - DNA, 75 bp, synthetic construct
  source 1..75: mol_type = other DNA
tttctcgaggcagaagaagagattgtaagaaaaaatgctctattaggaacacatcgtggcgtaatggactttgtt

SEQ ID NO: 393398 - DNA, 75 bp, synthetic construct
  source 1..75: mol_type = other DNA
catgggtccgtctccggaaccgaacatgaccattctgtggtctgaaaaactgccgctgaacttcaagaaattcgc

SEQ ID NO: 393399 - DNA, 75 bp, synthetic construct
  source 1..75: mol_type = other DNA
tgacgttatccgcaccatggcgtgtggtatcgctggtctgtccgttgctgctgactccctgtctgcaatcaaata

SEQ ID NO: 393400 - DNA, 75 bp, synthetic construct
  source 1..75: mol_type = other DNA
gaaggcgaatacccgcagtttggtaacaatgatccgcgtgtagatgacctggctgttgacctggtagaacgtttc

SEQ ID NO: 393401 - DNA, 75 bp, synthetic construct
  source 1..75: mol_type = other DNA
cagtataagccgggttcatttggtcaaagctcagtacaagaccttttgaagaatcgttctgtaattggttacttc

SEQ ID NO: 393402 - DNA, 75 bp, synthetic construct
  source 1..75: mol_type = other DNA
ctttggcctgacgggtggtgtggtgaaaaccggcacctttaatcagtttatccgtggagggatcgccttcgctac

SEQ ID NO: 393403 - DNA, 75 bp, synthetic construct
  source 1..75: mol_type = other DNA
cggtacgcgcttctcggtggtcacaccgcaaatttcagccgcgggcgttgagcatctagatactatcctccagcc

SEQ ID NO: 393404 - DNA, 75 bp, synthetic construct
  source 1..75: mol_type = other DNA
attagcttcgataacctcagcggtgccagcgccagtcagcgtaaaggcgacaagcgtattctgtatgcttccgaa

SEQ ID NO: 393405 - DNA, 75 bp, synthetic construct
  source 1..75: mol_type = other DNA
gtttctcggtgccagcgcctcagaatggatcaatggcgggatacgtattctgccgggcgataaaggtgagatgaa

SEQ ID NO: 393406 - DNA, 75 bp, synthetic construct
  source 1..75: mol_type = other DNA
catagccagcgtggcgtaataataaaactggaactgccgagcggtgctggattaaccgccgactctacaccgtta

SEQ ID NO: 393407 - DNA, 75 bp, synthetic construct
  source 1..75: mol_type = other DNA
ggcaggtgtctccgggctggacgccctcgtcggtggtaactatatcggcatgatgccgggtaaaggtaaagagca

SEQ ID NO: 393408 - DNA, 75 bp, synthetic construct
  source 1..75: mol_type = other DNA
gcattttgataatgcaaagggcgcatgaggaatcattacgtaaggctgagcgtatacaagctgcatgggatgcaa

SEQ ID NO: 393409 - DNA, 75 bp, synthetic construct
  source 1..75: mol_type = other DNA
cagctacggttagagggtaagtctatctgggagattgtcagaactcttaatgctgaaggtcaccggtcgatgaac

SEQ ID NO: 393410 - DNA, 75 bp, synthetic construct
  source 1..75: mol_type = other DNA
gtgctaaaggactttcacgtaagcaaaccgatggtacattgcttgccctgctatctcgtcttgaccgatttgata

SEQ ID NO: 393411 - DNA, 75 bp, synthetic construct
  source 1..75: mol_type = other DNA
ggttttcatctgagaagcaatcccgaggtgattcattacgccgacaatctaagatggttacagattggcttaagg

SEQ ID NO: 393412 - DNA, 75 bp, synthetic construct
  source 1..75: mol_type = other DNA
gttacagaggctatacagtcgctttctgaagtcactgagagggggttgatagatgttgatgaggttatcatatag

SEQ ID NO: 393413 - DNA, 75 bp, synthetic construct
  source 1..75: mol_type = other DNA
gcgatacgacgaataccatagatatgttgaggctacaccgtgaacacatctcaagcaatatagaaaagctggtac

SEQ ID NO: 393414 - DNA, 75 bp, synthetic construct
  source 1..75: mol_type = other DNA
aaaataccaaaattgtattcaatggaaccggtgtccggaatacggcaaggacgcttaaaaacggtattaacaccg

SEQ ID NO: 393415 - DNA, 75 bp, synthetic construct
  source 1..75: mol_type = other DNA
gtcgtcgcttgcagccggtggtccgggggcgcataacgtcacagtaagtggtagcgcggtgccgccgcagttgct

SEQ ID NO: 393416 - DNA, 75 bp, synthetic construct
  source 1..75: mol_type = other DNA
acgattttgattttatgaagcctcgttcgctgcttaaaagtaccgtggccagtccgcgtgataccggtcatgctg

SEQ ID NO: 393417 - DNA, 75 bp, synthetic construct
  source 1..75: mol_type = other DNA
accgcgggaagttgcttggcagtttacccactgtgggcgagattcataaagaaatcgcagtatcggaagaaaccg

SEQ ID NO: 393418 - DNA, 75 bp, synthetic construct
  source 1..75: mol_type = other DNA
ttacagttcagacagatgatatctctctcgccggaggggataaaacgattcagacagtacagaatttacgccttg

SEQ ID NO: 393419 - DNA, 75 bp, synthetic construct
  source 1..75: mol_type = other DNA
ccctggccagtggaaaaacggctggtggaaaattatccgactcgcgcctggcaggtgcagtacggtgaaacagat

SEQ ID NO: 393420 - DNA, 75 bp, synthetic construct
  source 1..75: mol_type = other DNA
tgctggcggatgccatcagcgcccataaggcgtgcccggactcaccgctggtcagttactaccaggcagggctga

SEQ ID NO: 393421 - DNA, 75 bp, synthetic construct
  source 1..75: mol_type = other DNA
aaactacccgtcacgcacctggcaggtgcagtacggtgaaaccgactttgatttcatccagcgcctgatgcagga

SEQ ID NO: 393422 - DNA, 75 bp, synthetic construct
  source 1..75: mol_type = other DNA
atcgtggggcgcacctataaccaggacaccatgccgccgtgggggctgccgggcatggcgtcgcagagtgggata

SEQ ID NO: 393423 - DNA, 75 bp, synthetic construct
  source 1..75: mol_type = other DNA
cagtatcgaactggacggtggcgaaaaacggtatatcagcgggctggtgacggctgcgagggtggtcggccatga

SEQ ID NO: 393424 - DNA, 75 bp, synthetic construct
  source 1..75: mol_type = other DNA
gcggcggacctgtttggtgcattgccggaaccgtcaggtctggttaaagccgcagtagctgctgcgcaagccgca

SEQ ID NO: 393425 - DNA, 75 bp, synthetic construct
  source 1..75: mol_type = other DNA
gcgtgggagaagatcgcaatgccaccatcacaaaaaatgatggtctttccgtcaaactagctcaaaccatcaatg

SEQ ID NO: 393426 - DNA, 75 bp, synthetic construct
  source 1..75: mol_type = other DNA
gaaatcgcagtatcggaagaaaccgtaacatggatctctctgcaacgagatattatagcgaatattttgctggga

SEQ ID NO: 393427 - DNA, 75 bp, synthetic construct
  source 1..75: mol_type = other DNA
atgaaagaatttcacggtgaaaaacgatacaaagattacctgttaaagcgttacagcatttctcgtgagggtcac

SEQ ID NO: 393428 - DNA, 75 bp, synthetic construct
  source 1..75: mol_type = other DNA
ctttgaggtttgcagtgctgtatcattatgatatctgggattcagtccaccagctacgattaaaagacggtgacc

SEQ ID NO: 393429 - DNA, 75 bp, synthetic construct
  source 1..75: mol_type = other DNA
atgaaagaatatcacggtgaaaagagatacaaagattacctgttaaagcgttacagcatttctcgtgaaggtcat

SEQ ID NO: 393430 - DNA, 75 bp, synthetic construct
  source 1..75: mol_type = other DNA
gcggaaattcagtattgctacgtgaacggtcgcatgatgcgcgatcgcctgatcaatcacgcgatccgccaggcc

SEQ ID NO: 393431 - DNA, 75 bp, synthetic construct
  source 1..75: mol_type = other DNA
tgaaccccaacctgcaccgcgtgccattccggaaaaccgcgtggcggcggggcgcaatcactttgctgaaccggc

SEQ ID NO: 393432 - DNA, 75 bp, synthetic construct
  source 1..75: mol_type = other DNA
cgctcacttcacgcaccgcagaacagcaggaagcctggcaggcctatgccgaagggcgcgatatggacgtgacgg

SEQ ID NO: 393433 - DNA, 75 bp, synthetic construct
  source 1..75: mol_type = other DNA
tttgttgaaaaacctgaccaagataaagctgagagtttttttaagtctgatgattatttatggaatagtgggatg

SEQ ID NO: 393434 - DNA, 75 bp, synthetic construct
  source 1..75: mol_type = other DNA
tactgaatcacaaacgcatcgtcaacttgcgtctggtttacattgtcctgttggatttaaaaacagcactgatgg

SEQ ID NO: 393435 - DNA, 75 bp, synthetic construct
  source 1..75: mol_type = other DNA
aataccaggatatgtagctggcattatggtggaaagctttttacaagatggtaaacaatccgatagttttccgct

SEQ ID NO: 393436 - DNA, 75 bp, synthetic construct
  source 1..75: mol_type = other DNA
atgagagaatataacggtgaaaaacgatacaaagattatctattaaggcgctacagcatttctcgtgaaggtcat

SEQ ID NO: 393437 - DNA, 75 bp, synthetic construct
  source 1..75: mol_type = other DNA
agttgggcctgacgtttacgtatatggcgactgacaatatcggtgttgaattactggcagcgacgcctttccgcc

SEQ ID NO: 393438 - DNA, 75 bp, synthetic construct
  source 1..75: mol_type = other DNA
ccagctataaatttaatggaacccccgtgaaagacgcggtacgactggatccttgggtgtttatgttctctgccg

SEQ ID NO: 393439 - DNA, 75 bp, synthetic construct
  source 1..75: mol_type = other DNA
ccacaccattacggccagtgagaggctgcgtactggaaagtgggtgatggacgattttgattttatgaagcctcg

SEQ ID NO: 393440 - DNA, 75 bp, synthetic construct
  source 1..75: mol_type = other DNA
ggtgctgttcagaaacggagagctgaatggcggtgcatttagtgctacagccagcatgagcatgatttataactg

SEQ ID NO: 393441 - DNA, 75 bp, synthetic construct
  source 1..75: mol_type = other DNA
tgctgctggtggagcagggctttcggccatcgcaggcggcaggcgtaatgtttgctctgcaaattggcgcggcca

SEQ ID NO: 393442 - DNA, 75 bp, synthetic construct
  source 1..75: mol_type = other DNA
cagtgtggggtatggctctgcctgagccggaatttacacctgcagagcttgccgcattccgggattactggatgg

SEQ ID NO: 393443 - DNA, 75 bp, synthetic construct
  source 1..75: mol_type = other DNA
acaaatggtgatctttttgacagtgtgcaaatgacaggtattaaacttgaaactgataccagtatgttacctgac

SEQ ID NO: 393444 - DNA, 75 bp, synthetic construct
  source 1..75: mol_type = other DNA
tcttgatatcgttgatgcaacacaagatgttattccttcgaaaggtgccgtcattggtgtcaattttaaagcacg

SEQ ID NO: 393445 - DNA, 75 bp, synthetic construct
  source 1..75: mol_type = other DNA
aacgggcaagaacacagttttattcaggccagttcaacggttccaattctacagcgagaaggcgcattaaaatat

SEQ ID NO: 393446 - DNA, 75 bp, synthetic construct
  source 1..75: mol_type = other DNA
aaacgaaggtgaattgccagccgtgccaattgagccggttcatatttacgggcggagtaacgacaatgaaaatac

SEQ ID NO: 393447 - DNA, 75 bp, synthetic construct
  source 1..75: mol_type = other DNA
aaaacaagcgcaactgatccgcgattttcaaccagatatgatcatggttacgccatcttattgccttaacctgat

SEQ ID NO: 393448 - DNA, 75 bp, synthetic construct
  source 1..75: mol_type = other DNA
agccttatttgttcagtggggtatcaccgtccacaatttctggttccaaaatcccttccatgcaggcatgcctga

SEQ ID NO: 393449 - DNA, 75 bp, synthetic construct
  source 1..75: mol_type = other DNA
ggacttgtgacagacggttttattttacgtgaagatgaatttgtcacatcattgcaggttctgaaagaggcagag

SEQ ID NO: 393450 - DNA, 75 bp, synthetic construct
  source 1..75: mol_type = other DNA
ttaattctcaggataagaaaactaatgcaaaattaattctggatggtagtgtcaacacaaaaaatgatgttgaag

SEQ ID NO: 393451 - DNA, 75 bp, synthetic construct
  source 1..75: mol_type = other DNA
atacatatgcatttgcagcattattagcagggagcatgtgtatggcaattataggtgttgctataagaatggctt

SEQ ID NO: 393452 - DNA, 75 bp, synthetic construct
  source 1..75: mol_type = other DNA
cctgtttttggtgttgcaaccgcgatatatggcttgccctatggaataacgatttatggcggcatacttggtgcc

SEQ ID NO: 393453 - DNA, 75 bp, synthetic construct
  source 1..75: mol_type = other DNA
atgttttatgacaaacgaagtggaagtaatacgcgcaggcgggctatcagtcgccctgttcgtctgacggcagaa

SEQ ID NO: 393454 - DNA, 75 bp, synthetic construct
  source 1..75: mol_type = other DNA
agggagtatgcggaggtgctgatagctattacggagtatcaccgggccctgttatccaggcttatggcagattag

SEQ ID NO: 393455 - DNA, 75 bp, synthetic construct
  source 1..75: mol_type = other DNA
atcgacggcaagcgtgtcggggacagagagtatgcggaggtgctgatcgctattacggagtatcaccgtgccctg

SEQ ID NO: 393456 - DNA, 75 bp, synthetic construct
  source 1..75: mol_type = other DNA
gcattgatatgaatccagatggcggcacagccatgactgcgaatgatattgccccgttaccttccccggacgttt

SEQ ID NO: 393457 - DNA, 75 bp, synthetic construct
  source 1..75: mol_type = other DNA
gctgccggtggaccgggggcgcataacgtcacagtaagtggtagtgcggtgccgccgcagctgcttttgtttgca

SEQ ID NO: 393458 - DNA, 75 bp, synthetic construct
  source 1..75: mol_type = other DNA
gcaggccccgcaggaaaggatggtaccgccggagcggaaggtaaggcaggtccggcagggccacgaggtgaaagg

SEQ ID NO: 393459 - DNA, 75 bp, synthetic construct
  source 1..75: mol_type = other DNA
tatggcatattctcgtttcaggctatcaaacatatgacaacaatcgatggtgggtttcttgtaattaaggatacc

SEQ ID NO: 393460 - DNA, 75 bp, synthetic construct
  source 1..75: mol_type = other DNA
cgtcagtggaattacagtgcgcaaggtgcggttgttgctcatgctcatggagtaacattggggcaatcagtgcag

SEQ ID NO: 393461 - DNA, 75 bp, synthetic construct
  source 1..75: mol_type = other DNA
taatggttatcaacaggattattggggaatgcatggggccgaacgcagtataggaatggggtacagtacgacctg

SEQ ID NO: 393462 - DNA, 75 bp, synthetic construct
  source 1..75: mol_type = other DNA
ctgtacatagctgattacctggctgacaccatgcatttgtcagcagaggagcatggtgcgtatttgttgctgatg

SEQ ID NO: 393463 - DNA, 75 bp, synthetic construct
  source 1..75: mol_type = other DNA
atttggttgagaatcattattccggctggattgtcgttgaagctgagcaggacccgaatatatataatcctttgg

SEQ ID NO: 393464 - DNA, 75 bp, synthetic construct
  source 1..75: mol_type = other DNA
ccgaactgaggttgatattactgaactaggttataaatataatatgcataatgttgcagcctgtattggacttgc

SEQ ID NO: 393465 - DNA, 75 bp, synthetic construct
  source 1..75: mol_type = other DNA
ggtgaccaggtcgcgaagaatctgcaagcgaataactttgaacagctgggctatcaggccgagtccgccacctag

SEQ ID NO: 393466 - DNA, 75 bp, synthetic construct
  source 1..75: mol_type = other DNA
taccgctgggcctctgaactgctgaaacaggtgattgctgccaatccgggagaccaggtggcgaaaaacctacag

SEQ ID NO: 393467 - DNA, 75 bp, synthetic construct
  source 1..75: mol_type = other DNA
gtatataacttttacctcggctactacgacggtaacccagcaaacctgaatccgtatggccaggtcgatatgggt

SEQ ID NO: 393468 - DNA, 75 bp, synthetic construct
  source 1..75: mol_type = other DNA
atgaataactctcggttattccgtttgagcaggattgttattgcgttaactgctgccagcggcatgatggtaaat

SEQ ID NO: 393469 - DNA, 75 bp, synthetic construct
  source 1..75: mol_type = other DNA
cttctatcttggctattacgacggtaacccggctaacctgcatccgtatggtcaggtggagatgggtaaacgtta

SEQ ID NO: 393470 - DNA, 75 bp, synthetic construct
  source 1..75: mol_type = other DNA
accactatggtggcgtgaaaggcattatctctgaagccgatgttaaatccggcaaagttcaggtgattgcccctg

SEQ ID NO: 393471 - DNA, 75 bp, synthetic construct
  source 1..75: mol_type = other DNA
tcacaaagtacgatggccaatagatatgctcgcgatacatttcctgctgattgggttgttatatgctcaatggaa

SEQ ID NO: 393472 - DNA, 75 bp, synthetic construct
  source 1..75: mol_type = other DNA
attcaatgcgctcttgaaacaggaacttcattactctggctcacaaacggcaatggccctaaatttatcgataat

SEQ ID NO: 393473 - DNA, 75 bp, synthetic construct
  source 1..75: mol_type = other DNA
ctcagttttattaaatgatgaacgtttagcccatactaaatctgatgacctggatagaactaactcaatagtcca

SEQ ID NO: 393474 - DNA, 75 bp, synthetic construct
  source 1..75: mol_type = other DNA
tcagccacggcaccaccggttccccggacaccattcgcgggatgtcggtcgaaatgctgttcgactttatgtccg

SEQ ID NO: 393475 - DNA, 75 bp, synthetic construct
  source 1..75: mol_type = other DNA
cgaaaacgtactggcgggtaatattatgagccgccgtgcactttactcctacggcctgctgctggcgcataaccc

SEQ ID NO: 393476 - DNA, 75 bp, synthetic construct
  source 1..75: mol_type = other DNA
aaacgttacgtgcaagctctgggcggttctgcccgcgttattaacctggcgaaagaagcgaacaagcaaggtgat

SEQ ID NO: 393477 - DNA, 75 bp, synthetic construct
  source 1..75: mol_type = other DNA
gaaaggcattattgttatcgacccactggtgacgccgcctgccgcaaaagccgcacttgacctttacttccagca

SEQ ID NO: 393478 - DNA, 75 bp, synthetic construct
  source 1..75: mol_type = other DNA
gattaccgagcttggtgactatccagacaacgtgaccaccatcaagccactgacaccttatgacagatggagtgg

SEQ ID NO: 393479 - DNA, 75 bp, synthetic construct
  source 1..75: mol_type = other DNA
gataacgtgaccacgattgcaccatcaaccccatatgaccgctggaacggtagcgcatgggtgacggatgaggat

SEQ ID NO: 393480 - DNA, 75 bp, synthetic construct
  source 1..75: mol_type = other DNA
agctggatttgtttcattttcaggacaatgcgccaggcgcggttttctggcatcccagggggtggacaatctttc

SEQ ID NO: 393481 - DNA, 75 bp, synthetic construct
  source 1..75: mol_type = other DNA
cagatttatcaccaccagattgtgtttccacagagaatagtcggctaacctctgttatatcgttgcttatttcat

SEQ ID NO: 393482 - DNA, 75 bp, synthetic construct
  source 1..75: mol_type = other DNA
ggccagcctgattgcgtggatgaaatacattcaggcactgaacgcggtcgacatttccacggcaccggatatcga

SEQ ID NO: 393483 - DNA, 75 bp, synthetic construct
  source 1..75: mol_type = other DNA
tagcgaatgggttacggatgagaccgcacagaaaagcggtcaggtactggaggcgaagcagcaaaaatccgcatt

SEQ ID NO: 393484 - DNA, 75 bp, synthetic construct
  source 1..75: mol_type = other DNA
gtttgccgttcagggcgagcatctgattattgtggcgaccgaagacaacttactgaaaggcgcggcggcacaagc

SEQ ID NO: 393485 - DNA, 75 bp, synthetic construct
  source 1..75: mol_type = other DNA
aagctgccacctgcgcttgccaataactgggccagccgcggctattacggttctgttagccacaacgcccgtgca

SEQ ID NO: 393486 - DNA, 75 bp, synthetic construct
  source 1..75: mol_type = other DNA
accgtaaaccccagcctgtggcgtcagtcgcagatcaacggtatttctggcctgttcaaagtcaccgataaaatg

SEQ ID NO: 393487 - DNA, 75 bp, synthetic construct
  source 1..75: mol_type = other DNA
ccgaggatggctcgacaaaacgcccggtgatgttgcacagggcgctcttcggctcccttgagcggttcaccggta

SEQ ID NO: 393488 - DNA, 75 bp, synthetic construct
  source 1..75: mol_type = other DNA
catttggcactgataccgagaagggaagcattacaaataatgcagaaaaaagtcacaacaattgtgacagcaagc

SEQ ID NO: 393489 - DNA, 75 bp, synthetic construct
  source 1..75: mol_type = other DNA
gtgtttctcgccaccgcccatgaagtcagccacgatttagcgccgcaatttcttgaagcaggctgtgtggtgttc

SEQ ID NO: 393490 - DNA, 75 bp, synthetic construct
  source 1..75: mol_type = other DNA
acaaccaaagttcgataatgaaaacaccattgattattctcggggtggcaaggaagcaatagagcgaattgttag

SEQ ID NO: 393491 - DNA, 75 bp, synthetic construct
  source 1..75: mol_type = other DNA
gtgccggatttatcgggatggaaatctacgaattccatcacctgattgttaacggcatgggtccggatcgcagcg

SEQ ID NO: 393492 - DNA, 75 bp, synthetic construct
  source 1..75: mol_type = other DNA
atgttccgggcattgataacattaaatacccgctgaaactgggccaggggccggggctgatgctgtttgacaagc

SEQ ID NO: 393493 - DNA, 75 bp, synthetic construct
  source 1..75: mol_type = other DNA
ccgtcgcgcctcatgcgttaacggaaaagcaaaagcaacaaccgctgtcatttgatgagatgttcattgatattg

SEQ ID NO: 393494 - DNA, 75 bp, synthetic construct
  source 1..75: mol_type = other DNA
gttttctcatcaaaagcacataaccggcatgtgactggcgtaacaataaataatgaagagacattgtcattaggg

SEQ ID NO: 393495 - DNA, 75 bp, synthetic construct
  source 1..75: mol_type = other DNA
atgtctgttattcgtagattagctgcggttttacgtcaaagtgactctggtatcagcgcctttcttgtgaccgcc

SEQ ID NO: 393496 - DNA, 75 bp, synthetic construct
  source 1..75: mol_type = other DNA
accatttagtcgtcagaaattatcaggaattgattgatgaagtggctattcagctaagaggtaagaatcatgtat

SEQ ID NO: 393497 - DNA, 75 bp, synthetic construct
  source 1..75: mol_type = other DNA
gaaagaaaaacagcagaatattgacgccacctggcagacgctctcctccatgactcaggaacaggcgaatacgct

SEQ ID NO: 393498 - DNA, 75 bp, synthetic construct
  source 1..75: mol_type = other DNA
agaatttacagggttaggtgaaaggttttacaaactttttatggggggaggaagcttttcacttcccgatattac

SEQ ID NO: 393499 - DNA, 75 bp, synthetic construct
  source 1..75: mol_type = other DNA
tcggtgatgtggctgatcgtacgatgtctgcacgcgaaaaagtccgcgttggtgctgctgctgcagttgcattca

SEQ ID NO: 393500 - DNA, 75 bp, synthetic construct
  source 1..75: mol_type = other DNA
atgtttgtgcgcagcagtctggagagtaataaaaagctttatccctggtcgcagtttattgtcgatagcaatggc

SEQ ID NO: 393501 - DNA, 75 bp, synthetic construct
  source 1..75: mol_type = other DNA
tggtcgcagtttattgtcgatagcaatggcgtcgcgcgcggtgcctggcagctggatgaagaaagttccgctgta

SEQ ID NO: 393502 - DNA, 75 bp, synthetic construct
  source 1..75: mol_type = other DNA
tcccgacatgatgaaagccgggatcgccgactggcagaaacgttatccgaacaacccgggcgcgaaaattctgcc

SEQ ID NO: 393503 - DNA, 75 bp, synthetic construct
  source 1..75: mol_type = other DNA
gttacggatatattgcgcgactaccaaacctttatcggcaaactttatcagcgcgtagcgcctgctgctttagcg

SEQ ID NO: 393504 - DNA, 75 bp, synthetic construct
  source 1..75: mol_type = other DNA
ccggatgcggcgtgaacgccttatccggcctacgaatggcacgagaatttgtaggcctgataagcgtagcgcatc

SEQ ID NO: 393505 - DNA, 75 bp, synthetic construct
  source 1..75: mol_type = other DNA
gggcttacggttataagactcgccaagccttagctgatcacttaggtatttcaaaaagcacattagccacaagat

SEQ ID NO: 393506 - DNA, 75 bp, synthetic construct
  source 1..75: mol_type = other DNA
gcatgttgaaacacactccgaagatggttcttatcatgacgttcactataaacaaccaaagttcgataatgaaaa

SEQ ID NO: 393507 - DNA, 75 bp, synthetic construct
  source 1..75: mol_type = other DNA
aaaagttataaatggtatgttgtttgatacaaattatctcccttttgataaaaccatgttacccagcaaggtgaa

SEQ ID NO: 393508 - DNA, 75 bp, synthetic construct
  source 1..75: mol_type = other DNA
aagccacgatagagaggattgttaatgcttacgggtttaaaacccgccaagccttagccgaccaccttggtattt

SEQ ID NO: 393509 - DNA, 75 bp, synthetic construct
  source 1..75: mol_type = other DNA
gtaggcctgataagcgtagcgcatcaggcatttgtcaccattgccggatgcggcgtggacgccttatccggccta

SEQ ID NO: 393510 - DNA, 75 bp, synthetic construct
  source 1..75: mol_type = other DNA
aaaccgttcatgcaatcctacctggtggtctttatcggctaccttacgatgtacctgattcgcaagaactttaac

SEQ ID NO: 393511 - DNA, 75 bp, synthetic construct
  source 1..75: mol_type = other DNA
atcaagtcgatgtattgacaattaagttaagagaattagctcactcaaaaaaaccaaatcatcttcaagggttta

SEQ ID NO: 393512 - DNA, 75 bp, synthetic construct
  source 1..75: mol_type = other DNA
tttgttcagatcaatgtcatctactaaatgatccagataatggaacatttgttcctgaagtcggaatcctgtggg

SEQ ID NO: 393513 - DNA, 75 bp, synthetic construct
  source 1..75: mol_type = other DNA
ctatatccactttgataaatctttaataccacacaaccttataaatccgcaggttgtgatcgatagcgaaaatgt

SEQ ID NO: 393514 - DNA, 75 bp, synthetic construct
  source 1..75: mol_type = other DNA
gccatgtggacgaaaaaaagaaatccttaatcatgcagaatcgcggagggcaagcagtcatcgagcggatattag

SEQ ID NO: 393515 - DNA, 75 bp, synthetic construct
  source 1..75: mol_type = other DNA
gtgaagaggataaagagacagaatctaccgatatgaccaagtggcagatctttgttgagtatgtgctgaaaaaca

SEQ ID NO: 393516 - DNA, 75 bp, synthetic construct
  source 1..75: mol_type = other DNA
aataacactttgattgcttatattagcctcgacatcatcaaagattatctccgttttctgaataaagatctctcg

SEQ ID NO: 393517 - DNA, 75 bp, synthetic construct
  source 1..75: mol_type = other DNA
gtatagttttattaactgaaaaagatgtctggctaagagtgaatgggaaagagcctataagtttaaaagctaacc

SEQ ID NO: 393518 - DNA, 75 bp, synthetic construct
  source 1..75: mol_type = other DNA
gcagcgcaacatagcacagagcctgctgaaacagagtcggaaaaagaacgaacacgtgcattattattcactgtg

SEQ ID NO: 393519 - DNA, 75 bp, synthetic construct
  source 1..75: mol_type = other DNA
cgcgcgctggtggcttgtattgcgctggggctgattatcgccacactcggtgtctatcagcacgccagcaaccag

SEQ ID NO: 393520 - DNA, 75 bp, synthetic construct
  source 1..75: mol_type = other DNA
cgaaatccgggttacgcagctgacacccgatttcgccgcgccggtgttgatatcgataaaaatggagccgcagtg

SEQ ID NO: 393521 - DNA, 75 bp, synthetic construct
  source 1..75: mol_type = other DNA
ttatgctgcattctgttgaaaagcattttgccgagcaggatgtcagcgatctgcaacaaatcagcaccacactga

SEQ ID NO: 393522 - DNA, 75 bp, synthetic construct
  source 1..75: mol_type = other DNA
ggtctcttcagtgatcatccttggtacggctttttggatgttctggcgaacctggagcggtgagaaaaactggct

SEQ ID NO: 393523 - DNA, 75 bp, synthetic construct
  source 1..75: mol_type = other DNA
ccaagtataaatctggtgttactaccgtgaaagactcggtacgactggatccgtgggtgtttatgttctctgccg

SEQ ID NO: 393524 - DNA, 75 bp, synthetic construct
  source 1..75: mol_type = other DNA
agcagttacagcatgggcgttttccgtcatgctgggaacccctgtaggtattctgggttttgcaattattatggc

SEQ ID NO: 393525 - DNA, 75 bp, synthetic construct
  source 1..75: mol_type = other DNA
aaactctcagatttatccataacaggttcaattcttctggaatataataaattatatgcgaagcctacaattgct

SEQ ID NO: 393526 - DNA, 75 bp, synthetic construct
  source 1..75: mol_type = other DNA
gcatcattaccggataaatgaacgggggggggcgcaccggaagcctggcagtcagtggtgcactgctgtcctccc

SEQ ID NO: 393527 - DNA, 75 bp, synthetic construct
  source 1..75: mol_type = other DNA
gataatccgcttattaatattctggagaagttctccagttggtatgacacgaatcatgtgacgctgggcggtgtc

SEQ ID NO: 393528 - DNA, 75 bp, synthetic construct
  source 1..75: mol_type = other DNA
caaagcaagatgaccggctggctgggggagatggcctcgtactataccgctgcgccggttcgtctcggcggcgcg

SEQ ID NO: 393529 - DNA, 75 bp, synthetic construct
  source 1..75: mol_type = other DNA
tggtcggtacgctgctgtggggctggctctctgacctggcgaacggtcgccgtggcctggtggcctgcatcgcgc

SEQ ID NO: 393530 - DNA, 75 bp, synthetic construct
  source 1..75: mol_type = other DNA
ctgcagactgcgcaggattcagacaatggattttcggcgcttgaacaggcgctgctgcggtatatcgccgccggt

SEQ ID NO: 393531 - DNA, 75 bp, synthetic construct
  source 1..75: mol_type = other DNA
cgataacaccagaacaaatcgaaatacgtaagctgaggaaaaagctacaacgcatggtgatgctgccaacttact

SEQ ID NO: 393532 - DNA, 75 bp, synthetic construct
  source 1..75: mol_type = other DNA
tttacgccaggtaatggccttgaacgaacaaggcgtaaacgtcctgtcaaacgaatacgccaacctcgcgaaaca

SEQ ID NO: 393533 - DNA, 75 bp, synthetic construct
  source 1..75: mol_type = other DNA
gtcagccgcagccgctgcgatggtcgaacgccatttaacactgaagctacgcgaagctaaatcagcgatgagtga

SEQ ID NO: 393534 - DNA, 75 bp, synthetic construct
  source 1..75: mol_type = other DNA
gtcagccatgcgcgtagcagccatcgagcaacaacaggcgagcgaatacagtaagaacattcagggattgatgag

SEQ ID NO: 393535 - DNA, 75 bp, synthetic construct
  source 1..75: mol_type = other DNA
cgtgttaatgacctcaagtctggcgcgcgttaactgggatgattttaccgaatcggtgcccgcatttattactac

SEQ ID NO: 393536 - DNA, 75 bp, synthetic construct
  source 1..75: mol_type = other DNA
cttaatagatagtaacggtaaattccccaatatgaataaggcgctgtatgttgatagcgtcagttcggtggcggg

SEQ ID NO: 393537 - DNA, 75 bp, synthetic construct
  source 1..75: mol_type = other DNA
ccgcaaattctcggtgcggcgcaaatggatccgaaagtggtgtttgtcaccacctgtctgattgccggtatcggc

SEQ ID NO: 393538 - DNA, 75 bp, synthetic construct
  source 1..75: mol_type = other DNA
agcaggttcgccgcccggaggaacaaaatacgatattaaaaaaggctactgcactcttgatgtccgactcgctga

SEQ ID NO: 393539 - DNA, 75 bp, synthetic construct
  source 1..75: mol_type = other DNA
caactggttgttgaccagacatacacggtggcagatgccgccaaagctatggatgttggcctttccacaatgaca

SEQ ID NO: 393540 - DNA, 75 bp, synthetic construct
  source 1..75: mol_type = other DNA
caactggttgttgaccagaactacacggtggcagatgccgccaaagctatggatgttggcctttccacaatgaca

SEQ ID NO: 393541 - DNA, 75 bp, synthetic construct
  source 1..75: mol_type = other DNA
gcgggtgtggcgctgttcggcgcaaattacctgttcgacggtcatgtgatcggcatgtttattttcccgtcgatt

SEQ ID NO: 393542 - DNA, 75 bp, synthetic construct
  source 1..75: mol_type = other DNA
tggacgccgcgtcgtaagcgcgggacgtttctcggtttctggaacatttcccacaacctcggcggtgcgggcgct

SEQ ID NO: 393543 - DNA, 75 bp, synthetic construct
  source 1..75: mol_type = other DNA
ggggatgatcggcctgggtttctccatcacttatggcgtgggtaaaacgctggtttcctactacgccgacggcaa

SEQ ID NO: 393544 - DNA, 75 bp, synthetic construct
  source 1..75: mol_type = other DNA
tgtccgccgcgtggtcacacttccttcaaaagccagattcagctttcaggaagcgagaacagcctggggaaatgc

SEQ ID NO: 393545 - DNA, 75 bp, synthetic construct
  source 1..75: mol_type = other DNA
attcccgcctatgcacaagcattaacggcgggtacacagatcatttcagctattcgcgggatagctttcggtggc

SEQ ID NO: 393546 - DNA, 75 bp, synthetic construct
  source 1..75: mol_type = other DNA
ttcgcggtgtaaatgtcttcccgtcacaactggaagaagagattgtcaaattcgaacatttatcgccgcattacc

SEQ ID NO: 393547 - DNA, 75 bp, synthetic construct
  source 1..75: mol_type = other DNA
gatagtccaaaaattgctgaattggctacgcagtttggagctgatgtgccttacctgcgttgtgctgagttgtct

SEQ ID NO: 393548 - DNA, 75 bp, synthetic construct
  source 1..75: mol_type = other DNA
ggcggcgattcatctggcaaatgcggtgggcggtaacctgttcctcggctttatttcagccgttgcttttgccac

SEQ ID NO: 393549 - DNA, 75 bp, synthetic construct
  source 1..75: mol_type = other DNA
aaaaaccggattgcgctctatagcatttattgaaagtgagattgatgaatggatttacaaaatcatttctgattc

SEQ ID NO: 393550 - DNA, 75 bp, synthetic construct
  source 1..75: mol_type = other DNA
gggcgacggtttcggatctgggaccgctgttgctggcgcgactgttgaatctcaacgatgtgcaatctggcgtgc

SEQ ID NO: 393551 - DNA, 75 bp, synthetic construct
  source 1..75: mol_type = other DNA
cgataattcagcggaaggcgcgcgcgagcgtgaactgttccgtgcgcaatttatccgttcccagaccggctttgg

SEQ ID NO: 393552 - DNA, 75 bp, synthetic construct
  source 1..75: mol_type = other DNA
tcttaccgtctgaaacaagggccgattcgtattctttcggcctgtggttctctggtggtggtggcgctttacctt

SEQ ID NO: 393553 - DNA, 75 bp, synthetic construct
  source 1..75: mol_type = other DNA
gagcgtgaactgttccgtgcacagtttatccgctcccagaccggctttggcgttgagcaaggccgcgcacattaa

SEQ ID NO: 393554 - DNA, 75 bp, synthetic construct
  source 1..75: mol_type = other DNA
tatcaatatcctcagcgccgagaagctttatcagatgccgaaactgtacgccgccagcctgctgtggatgctttc

SEQ ID NO: 393555 - DNA, 75 bp, synthetic construct
  source 1..75: mol_type = other DNA
acggggttgactccccggtattctggctggcggtgctgatgtggtgtgtgttctttattgtgatgaggatcacgg

SEQ ID NO: 393556 - DNA, 75 bp, synthetic construct
  source 1..75: mol_type = other DNA
ggaaaaaaaaccgtcctgcccgccgtcatcgtcactgtcacgggaaagaatcgcgtgtaccggaaaaagaaaatc

SEQ ID NO: 393557 - DNA, 75 bp, synthetic construct
  source 1..75: mol_type = other DNA
tcgcgttcaacacgctttgcgtgcttttacgcctaaagatcagaaagcagtgaaggcagcggcgcaaaccatgcg

SEQ ID NO: 393558 - DNA, 75 bp, synthetic construct
  source 1..75: mol_type = other DNA
ctgctcgcaaggcttaaaaatatcggcgtcaatgactggcaaccgcatgccaatccggtggtggtgtgggatatc

SEQ ID NO: 393559 - DNA, 75 bp, synthetic construct
  source 1..75: mol_type = other DNA
acaattgccggaagcgggcgatctggagaagccaaaactggtgtttttcttcgacgaagcacatctgctgtttaa

SEQ ID NO: 393560 - DNA, 75 bp, synthetic construct
  source 1..75: mol_type = other DNA
gcctgtggttctctggtggtcgtggcgctttaccttatcgcccagatggtaggcgcaggtaaactgatcgaactg

SEQ ID NO: 393561 - DNA, 75 bp, synthetic construct
  source 1..75: mol_type = other DNA
gcatgagcggctgactaataaatcgctgggtttgtctggtgcatcgcgcaatggtacgcggcaggcaattacgcc

SEQ ID NO: 393562 - DNA, 75 bp, synthetic construct
  source 1..75: mol_type = other DNA
ttcggcaccaaaggcggacggccccgtgaaacggtgattcttgattctatagctgtcaaaaaagcgctggataat

SEQ ID NO: 393563 - DNA, 75 bp, synthetic construct
  source 1..75: mol_type = other DNA
aggcgctggcaaaacactgtggcggtagccataaaacggtgaatgatcgtatccacattgtgcagcgtttcgatc

SEQ ID NO: 393564 - DNA, 75 bp, synthetic construct
  source 1..75: mol_type = other DNA
ctggggctggctggcgtatcccgcaatggtacgcggaaagccatcacgccggaatattatcaacagatggcagag

SEQ ID NO: 393565 - DNA, 75 bp, synthetic construct
  source 1..75: mol_type = other DNA
agcggctggcgcagcaggctggtggcagccataaaaccgttcacgaccgtattaagctggcgcagcggttttgtg

SEQ ID NO: 393566 - DNA, 75 bp, synthetic construct
  source 1..75: mol_type = other DNA
atgggtatgctggaaagagagatgaaaaacctggcgcggcaggctggcggggcgcacaagactgtccatgaccgt

SEQ ID NO: 393567 - DNA, 75 bp, synthetic construct
  source 1..75: mol_type = other DNA
atctatcgcatttattgaaagtgaaatcgatgcgtggattgatgaaaagattttttattcacgtaatcaagcagc

SEQ ID NO: 393568 - DNA, 75 bp, synthetic construct
  source 1..75: mol_type = other DNA
cagtgcctttgttgaaagtgagattgatgaatggattgaacaactgatctattcatcacgtaatacagctgcatg

SEQ ID NO: 393569 - DNA, 75 bp, synthetic construct
  source 1..75: mol_type = other DNA
ggggctaggactgatgtttggtacggcgggcttgccgcatattctgatgcgcttctttacggtcagcgatgcccg

SEQ ID NO: 393570 - DNA, 75 bp, synthetic construct
  source 1..75: mol_type = other DNA
tgaccggctgttcgacaagccggatcttaaaagcgcgatggaatactggcacaatcaggcggcgcgtattggttt

SEQ ID NO: 393571 - DNA, 75 bp, synthetic construct
  source 1..75: mol_type = other DNA
gcggcaaaagcgatgaatgtaaatgtagaaaactgcattctggttgatgactcagttgccggtgcgcagagcctg

SEQ ID NO: 393572 - DNA, 75 bp, synthetic construct
  source 1..75: mol_type = other DNA
gcttctgttttaagtttccggcgaccatttcgcatcaggcagcattacggcattgcgatgatttagtgactgaat

SEQ ID NO: 393573 - DNA, 75 bp, synthetic construct
  source 1..75: mol_type = other DNA
ttacgaccagtacacgacgaatatgacccgcagccatgaatatgcggaaatggcctcccgtactgaaagcatgag

SEQ ID NO: 393574 - DNA, 75 bp, synthetic construct
  source 1..75: mol_type = other DNA
ggcgaaaacgagattgccggagcgctgtggctggtggatgagggtggattatctcaagaactcagtcaggcggta

SEQ ID NO: 393575 - DNA, 75 bp, synthetic construct
  source 1..75: mol_type = other DNA
gcaaaagcggcaacggatgtactggcacaatttgcgggcgagaagtttcgctttattgcaccggatgccttgtta

SEQ ID NO: 393576 - DNA, 75 bp, synthetic construct
  source 1..75: mol_type = other DNA
aaattttgcgcccgcttcccgcatttgcagcattttgaattgcaacagccgatccgttgggcacagggatgcccg

SEQ ID NO: 393577 - DNA, 75 bp, synthetic construct
  source 1..75: mol_type = other DNA
tatctttcggtaagttttggttacaccggggagttatggcgtttctggcaacgctgcggttttgtgctggtgcga

SEQ ID NO: 393578 - DNA, 75 bp, synthetic construct
  source 1..75: mol_type = other DNA
gtaatctggtggcccagtcgctggcggcgcacggcagcaatccactggcggcgacattgcgcggaaggcgggtca

SEQ ID NO: 393579 - DNA, 75 bp, synthetic construct
  source 1..75: mol_type = other DNA
aaaggtttatcagttactgtcaggcgcgcactaccgaacgtcgccgctggatttacgccggatgatggatgcacc

SEQ ID NO: 393580 - DNA, 75 bp, synthetic construct
  source 1..75: mol_type = other DNA
tggttaaagcaggcgggaattggtttttccgctgcacctggctgtaatgcgattgcggtggtggaatatgttttc

SEQ ID NO: 393581 - DNA, 75 bp, synthetic construct
  source 1..75: mol_type = other DNA
atccgtaaacgccgggttgaaacagaagcagagacaaaagctcagaatgaggaatggcggcagatgttccatgaa

SEQ ID NO: 393582 - DNA, 75 bp, synthetic construct
  source 1..75: mol_type = other DNA
ttttgctgcaaaccctgcgcctgaaacgcctcacgaactacaaaatcatcgctgcatcaataacgtaacgtggat

SEQ ID NO: 393583 - DNA, 75 bp, synthetic construct
  source 1..75: mol_type = other DNA
gaagggagatgataaacctgaaaacatcctgaaaatcgtcaaagaatggcggcgttcgcgcaaggattgcctttg

SEQ ID NO: 393584 - DNA, 75 bp, synthetic construct
  source 1..75: mol_type = other DNA
tttctgcggcacctggctgtaatgcgattgcggtagtggaatacgttttctcgtcattgctgatgcttgccgaac

SEQ ID NO: 393585 - DNA, 75 bp, synthetic construct
  source 1..75: mol_type = other DNA
atttgtgatgacgccagtgcggcatcattgctgtgtaaactgggttttaacgccgttcatcatccggcacgttaa

SEQ ID NO: 393586 - DNA, 75 bp, synthetic construct
  source 1..75: mol_type = other DNA
cgaagaagccgcgcaggcgctattcgcacttgatgatgtccgcactgaacgcctgcgcaatcgcataacacaatg

SEQ ID NO: 393587 - DNA, 75 bp, synthetic construct
  source 1..75: mol_type = other DNA
ggcagccaggatattattgcagactatcaggggcatcaggccattattgagcaaagaacacaggacagtaatatc

SEQ ID NO: 393588 - DNA, 75 bp, synthetic construct
  source 1..75: mol_type = other DNA
cagaacgtcgtcgggcaatggcctggtcttttgttcaggaacaggtacagcctggtgttgataacgcctggcgtg

SEQ ID NO: 393589 - DNA, 75 bp, synthetic construct
  source 1..75: mol_type = other DNA
aatgaagaaaagtcggttcaggaaagaatgcccggggctgacagtccacaggaactgatgaaaagggcaaaggag

SEQ ID NO: 393590 - DNA, 75 bp, synthetic construct
  source 1..75: mol_type = other DNA
caaagtcagtgaatccggcagccatactgacaataatgccgattcccgcgtggaccagttgtctgcagccctgaa

SEQ ID NO: 393591 - DNA, 75 bp, synthetic construct
  source 1..75: mol_type = other DNA
cgtactgaaagcatgagtgggcagatgagtgaagacctgtcgcaacagtttgcacagtatgtgatgaaacgcgca

SEQ ID NO: 393592 - DNA, 75 bp, synthetic construct
  source 1..75: mol_type = other DNA
ataatatggtcacagaatatcggggcaatatcggagatactcagaacagcatccgcggcgaggaaaatattgtaa

SEQ ID NO: 393593 - DNA, 75 bp, synthetic construct
  source 1..75: mol_type = other DNA
ttatcagatcttattaggcattatatcgcccgcttatctggccgcgtatgcattaagtgacaaaattattagggg

SEQ ID NO: 393594 - DNA, 75 bp, synthetic construct
  source 1..75: mol_type = other DNA
gctgccctgtaccactggttcaggaaataccacaggacacacgccgcacctgaccagaccaccacaggaggtacc

SEQ ID NO: 393595 - DNA, 75 bp, synthetic construct
  source 1..75: mol_type = other DNA
gtaaggcattgctggcccgccaacgcgaagaagccgtgcaggcgctattggcacttgatgatgttcgcactgaac

SEQ ID NO: 393596 - DNA, 75 bp, synthetic construct
  source 1..75: mol_type = other DNA
caggggcatcaggccattattgatcaaagaacacaggacagtaatatccgtaatgatgtaaaacatcaggttgat

SEQ ID NO: 393597 - DNA, 75 bp, synthetic construct
  source 1..75: mol_type = other DNA
gggtggcagccaggatattattgctgatcatcaggggcatcaggccattattgagcaaagaacgcaggacagtaa

SEQ ID NO: 393598 - DNA, 75 bp, synthetic construct
  source 1..75: mol_type = other DNA
actccgatctggcttccactgccgggtatctttccatgatgatcccgccattatcctggatgatggtcaggggac

SEQ ID NO: 393599 - DNA, 75 bp, synthetic construct
  source 1..75: mol_type = other DNA
ccatatccacagccgtgagattgccgatcatatgggcgtgtatctgggagacgggcaatttatcgaatcgccacg

SEQ ID NO: 393600 - DNA, 75 bp, synthetic construct
  source 1..75: mol_type = other DNA
caccggggaaaccattcgggtaagtcggttagctgaacctttctggcaggatcactttttaggtgcgcggcggat

SEQ ID NO: 393601 - DNA, 75 bp, synthetic construct
  source 1..75: mol_type = other DNA
ttactgaggatgacaggcagcttttgctctcatatattccattcatcgacagtcttggtcagttcttgggtgagt

SEQ ID NO: 393602 - DNA, 75 bp, synthetic construct
  source 1..75: mol_type = other DNA
gatgagctggcggcattactcactgcccgccatgacaatgtgttgccggtggtgctggattcagccctgaaaaaa

SEQ ID NO: 393603 - DNA, 75 bp, synthetic construct
  source 1..75: mol_type = other DNA
gaaacgctgttttaccgccagacccgaaatttccgtctggttgtgaaggaaaatgatatgccctgctggctggac

SEQ ID NO: 393604 - DNA, 75 bp, synthetic construct
  source 1..75: mol_type = other DNA
gcggcctgataaaggcttcgactgtagcgggttggttttttatgcctacaacaagatccttgaggctaagctccc

SEQ ID NO: 393605 - DNA, 75 bp, synthetic construct
  source 1..75: mol_type = other DNA
atgttcaagcgtcgttatgtaacattgcttcccctttttgtgttgcttgccgcctgtagcagcaagcctaagcca

SEQ ID NO: 393606 - DNA, 75 bp, synthetic construct
  source 1..75: mol_type = other DNA
gtatggcgtaccgccggaaattatcgtcgggattatcggcgttgaaacccgctgggggcgcgtgatggggaaaac

SEQ ID NO: 393607 - DNA, 75 bp, synthetic construct
  source 1..75: mol_type = other DNA
atgtcagacacatcacataaagaaagtaaatggcaccctcatctggatatgagttttctgggatgcgtgctggca

SEQ ID NO: 393608 - DNA, 75 bp, synthetic construct
  source 1..75: mol_type = other DNA
tggctgcgttatcgcaaaaaatttattacgccggacaacgtgcagaacggtgtggttttctggaatcagtatgaa

SEQ ID NO: 393609 - DNA, 75 bp, synthetic construct
  source 1..75: mol_type = other DNA
ctacactatcacccgttacaatcacagcacccattacgcaatggccgtctggcagttaggacaagccgtggcact

SEQ ID NO: 393610 - DNA, 75 bp, synthetic construct
  source 1..75: mol_type = other DNA
atggcttcaaaaccaagtacagcatttcgcagcttgccgcggcaggtttaacgccacagcagccgctgggcaacc

SEQ ID NO: 393611 - DNA, 75 bp, synthetic construct
  source 1..75: mol_type = other DNA
atggtaattctattaataaccgtagtaaccataatgcaggaaaatccaactatgcatatttgaatttacagagtg

SEQ ID NO: 393612 - DNA, 75 bp, synthetic construct
  source 1..75: mol_type = other DNA
gcgctacgccagcacaaccgggagcagataaaacagcatccagaatggtttcctgcgccgctcaaggcgagcgac

SEQ ID NO: 393613 - DNA, 75 bp, synthetic construct
  source 1..75: mol_type = other DNA
ctgtaccaggcacatctgaaaaaacaggccagctatattgtggaaggcaatgccgaaagcagacgggcgctgcgc

SEQ ID NO: 393614 - DNA, 75 bp, synthetic construct
  source 1..75: mol_type = other DNA
taagccggttagccgaacctttctggcaggaccattttttaggcgcgcgcaggattttgacggaagagatgattt

SEQ ID NO: 393615 - DNA, 75 bp, synthetic construct
  source 1..75: mol_type = other DNA
ggccccagatgtacactgatcgttttcattgatgatgccaccagtgcgttgatggcgttgcgttttgtgcctgct

SEQ ID NO: 393616 - DNA, 75 bp, synthetic construct
  source 1..75: mol_type = other DNA
accggggaaaccattcgggtaagtcagttagctgaacctttctggcaggatcactttttaggcgcgcggcggatt

SEQ ID NO: 393617 - DNA, 75 bp, synthetic construct
  source 1..75: mol_type = other DNA
gcaacgattgtggcgaataacgacctgcgccggggagatttgctgtttttccatatccacagtcgtgagatagcc

SEQ ID NO: 393618 - DNA, 75 bp, synthetic construct
  source 1..75: mol_type = other DNA
ggacaatcggttaaatccgtctacagcaaatccttctaccagacgggaaccaatatccaggtcgcaggatatcgc

SEQ ID NO: 393619 - DNA, 75 bp, synthetic construct
  source 1..75: mol_type = other DNA
atatacgcgttatgcacttgccatgggggaatatcgtagtggaaataacctgcaaagcacccccaagttcgtaca

SEQ ID NO: 393620 - DNA, 75 bp, synthetic construct
  source 1..75: mol_type = other DNA
cagacattatatgttccttattcgtctgttccggttctccaacgtgctggatatacgcgttatgcacttgccatg

SEQ ID NO: 393621 - DNA, 75 bp, synthetic construct
  source 1..75: mol_type = other DNA
tcactctccgttccgcaaatatatgtcggcagaatggctcgcggctatgtttctcctgatctgtgggaagaagga

SEQ ID NO: 393622 - DNA, 75 bp, synthetic construct
  source 1..75: mol_type = other DNA
gcaccagtggttacagttctcttaattatcgtggagcttacggtaatacgaatgtcggttacagtcggagtggtg

SEQ ID NO: 393623 - DNA, 75 bp, synthetic construct
  source 1..75: mol_type = other DNA
attacggtacgacatttttcagtgccagtcgccaaagttactggaacacgtcacgcagcgaccagcaaatatcat

SEQ ID NO: 393624 - DNA, 75 bp, synthetic construct
  source 1..75: mol_type = other DNA
tttgctatagaagtttattttgaagaacacatttttattccccacggtggaggagcaagttttggattgatagca

SEQ ID NO: 393625 - DNA, 75 bp, synthetic construct
  source 1..75: mol_type = other DNA
cttttccctgtactgattgtgcttgcggtggtgagttccctgtcctgggccattattaaagggtatgtctatact

SEQ ID NO: 393626 - DNA, 75 bp, synthetic construct
  source 1..75: mol_type = other DNA
ttgccggtggtgcgtggtttcaggatacgctcaatggcgtggcatcgtttctcgacagccgtgcgggcgatgcgc

SEQ ID NO: 393627 - DNA, 75 bp, synthetic construct
  source 1..75: mol_type = other DNA
gcgcccgccagtatgatcacccgggtcggcgccggcatggcgcagttgtacgatactatttttgcccgccctgat

SEQ ID NO: 393628 - DNA, 75 bp, synthetic construct
  source 1..75: mol_type = other DNA
atggttttaattcctgaactggcagccttaacgctggcactttcggtttatacctctgcatttatcgccgagatt

SEQ ID NO: 393629 - DNA, 75 bp, synthetic construct
  source 1..75: mol_type = other DNA
aaataatgtgatctcatccggagaatcttccggaaaggaatacagggacttgcagagtgagcatgagcagggtaa

SEQ ID NO: 393630 - DNA, 75 bp, synthetic construct
  source 1..75: mol_type = other DNA
agggttcagtgctcaggagcttaaagattttcgcgatgcaatggatgtggtggcctccagccgtgtcactgacag

SEQ ID NO: 393631 - DNA, 75 bp, synthetic construct
  source 1..75: mol_type = other DNA
aggctggacgcaggcaggtggtggagcatccgcgcctgaccaataaggcgctgggggtgtcgggcgcttcacgca

SEQ ID NO: 393632 - DNA, 75 bp, synthetic construct
  source 1..75: mol_type = other DNA
gagtgagcggatatcgaataaatcgctggggctggctggcgtatcccgcaatggtacgcggaaagccatcacacc

SEQ ID NO: 393633 - DNA, 75 bp, synthetic construct
  source 1..75: mol_type = other DNA
gattcagcgaaaaagaggcgctggcaatggtggcgatggacctggggcatggcgacgggcgcggtcgctgggtga

SEQ ID NO: 393634 - DNA, 75 bp, synthetic construct
  source 1..75: mol_type = other DNA
tcaggtggataatgttcctgcaggcctggctgcgcccgccagtatgattacccggatcggtgccggtatggcaca

SEQ ID NO: 393635 - DNA, 75 bp, synthetic construct
  source 1..75: mol_type = other DNA
gcagccagccctgaggtgcgtgcagaacgagacaggatggtccaggaatttgtggaagatcgcatgaaaccacaa

SEQ ID NO: 393636 - DNA, 75 bp, synthetic construct
  source 1..75: mol_type = other DNA
tctggatactggcgcagtcaggaaggctctggaaaaggccttactggtcgcggatcgacacaatggcaggctgat

SEQ ID NO: 393637 - DNA, 75 bp, synthetic construct
  source 1..75: mol_type = other DNA
acacctgaccttttaacttttatcaagaggctggaagaagcagaagtaggctggacggcgaatgtcgcaagcaca

SEQ ID NO: 393638 - DNA, 75 bp, synthetic construct
  source 1..75: mol_type = other DNA
atgtttcctacggtatcgataagtaattttttgtatggtgctggcgtttcaatttcttccgttttgattaataat

SEQ ID NO: 393639 - DNA, 75 bp, synthetic construct
  source 1..75: mol_type = other DNA
agccagcagaaagagttatccgtgaggctgagtgccggcagctaaccggtatttgtcgaaccactcgatacatga

SEQ ID NO: 393640 - DNA, 75 bp, synthetic construct
  source 1..75: mol_type = other DNA
cgtaaatattgtcatgaactatatccgtaatctggatagtgaaacgggggcaatggtgcgcctgctggaagatgg

SEQ ID NO: 393641 - DNA, 75 bp, synthetic construct
  source 1..75: mol_type = other DNA
agataaaacagcatccagaatggtttcctgcgccgctcaaggcgagtgacagacgctggcaggcgctggcggaga

SEQ ID NO: 393642 - DNA, 75 bp, synthetic construct
  source 1..75: mol_type = other DNA
aaccctccggggttaccttaatgatcatggcgtaccgctcgctctctactctgatagacacagtatattcagggt

SEQ ID NO: 393643 - DNA, 75 bp, synthetic construct
  source 1..75: mol_type = other DNA
cgaccagctacccaacacgctatcaggagatagccgcaaaacttgagcaggagcttcgtcaacactaccgctgcg

SEQ ID NO: 393644 - DNA, 75 bp, synthetic construct
  source 1..75: mol_type = other DNA
gcggcggatccgaaaagaaaacgttgatgccggtgaacgtgcaaaacaggcgctggcgttcgaacgcactgattt

SEQ ID NO: 393645 - DNA, 75 bp, synthetic construct
  source 1..75: mol_type = other DNA
gacagcgaatgtcgcaagcacaggcaaaatgaacggcttctcattctcctaccgcgatatagctttcaaagcttc

SEQ ID NO: 393646 - DNA, 75 bp, synthetic construct
  source 1..75: mol_type = other DNA
gatgacactaaacagcttcggcccgatgttcagaaaccagtttggcacaactcgctacgattgcctgacggagaa

SEQ ID NO: 393647 - DNA, 75 bp, synthetic construct
  source 1..75: mol_type = other DNA
aaaaagattttactgcaatgccggatattgatcgtgtcattcgtgaaaaagaatgcgtggcacttactacgctgg

SEQ ID NO: 393648 - DNA, 75 bp, synthetic construct
  source 1..75: mol_type = other DNA
accggttaaaagagaaacgtaaagctgtggtgatgacccaaaacgcaacgcctgtcagtgaggatgaaatggtga

SEQ ID NO: 393649 - DNA, 75 bp, synthetic construct
  source 1..75: mol_type = other DNA
tgtaaatattgtcatgaactatatccgtaacctggatagtgaaacaggggcaatggtgcgcctgctggaagatgg

SEQ ID NO: 393650 - DNA, 75 bp, synthetic construct
  source 1..75: mol_type = other DNA
cgcgcatatcacgttcagaaaaccagaactggttgacagactgaatgatattatcgcaaaacactatcctgacat

SEQ ID NO: 393651 - DNA, 75 bp, synthetic construct
  source 1..75: mol_type = other DNA
tctgagcacatttgaacaactgcaccagaagaaagatgaggtgtttgaccggggcgtgatcaacgtcttcatagg

SEQ ID NO: 393652 - DNA, 75 bp, synthetic construct
  source 1..75: mol_type = other DNA
tctgagcacatttgaacaactgcaccagaacaacgatgaggtgtttgaacggggcgtgatcaacgtcttcatagg

SEQ ID NO: 393653 - DNA, 75 bp, synthetic construct
  source 1..75: mol_type = other DNA
gattactggctgcgacaaacggcgacttttatagaacaggcaaaagttctacaagaaccccctttacaattaaca

SEQ ID NO: 393654 - DNA, 75 bp, synthetic construct
  source 1..75: mol_type = other DNA
accattcaacaaggcggcgacaaagatccgattaccattgatatcagcgcggctaactcgtcgttaagcgggatc

SEQ ID NO: 393655 - DNA, 75 bp, synthetic construct
  source 1..75: mol_type = other DNA
aaagactgggtgaatgcctataactcgctaatagataccttcagcagcctgaccaaatacaccgccgtagatgcg

SEQ ID NO: 393656 - DNA, 75 bp, synthetic construct
  source 1..75: mol_type = other DNA
gtgatcaacgtcttcagagggctgagctggaattacaaaaccaactccccctgtaaatttggcagtaaaattatc

SEQ ID NO: 393657 - DNA, 75 bp, synthetic construct
  source 1..75: mol_type = other DNA
ttcagaaagccagaactggttgacagactgaatgatattatcgcaaaacactatcctgatatgctggcagtatag

SEQ ID NO: 393658 - DNA, 75 bp, synthetic construct
  source 1..75: mol_type = other DNA
atgtctgcaatcacactctcccatccggaagtggtcaacgggcatacggacgttatctgctcaacctcagtcagc

SEQ ID NO: 393659 - DNA, 75 bp, synthetic construct
  source 1..75: mol_type = other DNA
tctgagcacatttgaacaactgcaccagaaaaaggatgaggtgtttgaccggggcgtgatcaacgtcttcatagg

SEQ ID NO: 393660 - DNA, 75 bp, synthetic construct
  source 1..75: mol_type = other DNA
ctctgtttggcggcaccttcgatccggtgcactatggtcatcttaaacccgtggaaacgctggcgaatctgattg

SEQ ID NO: 393661 - DNA, 75 bp, synthetic construct
  source 1..75: mol_type = other DNA
tccgcgaacgtctggaaaaaggcgaaccgtgtgaagatctgttgcctgaatcagtgctgacttatatcaaccagc

SEQ ID NO: 393662 - DNA, 75 bp, synthetic construct
  source 1..75: mol_type = other DNA
cgttttgtcgtcaaattttaccgccctgaacgctggacagccgatcaaatcctcgaagaacatcaatttgcattg

SEQ ID NO: 393663 - DNA, 75 bp, synthetic construct
  source 1..75: mol_type = other DNA
tctggtcgtggttctggtgggcgtgcgctggtggctgaaacggcgcgggaagaaaaagccggatcatcaggcgta

SEQ ID NO: 393664 - DNA, 75 bp, synthetic construct
  source 1..75: mol_type = other DNA
gctggtggtactttctgtggcgcttggcggcatgattggcgaccaggtgctttatctgtgcgggcggcggtttgg

SEQ ID NO: 393665 - DNA, 75 bp, synthetic construct
  source 1..75: mol_type = other DNA
atggatctcaatacactcatctcacaatatggttatgccgcgctggttatcggtagcctggcggaaggtgaaacc

SEQ ID NO: 393666 - DNA, 75 bp, synthetic construct
  source 1..75: mol_type = other DNA
agcacacctgctgtttaacgatgctccgcaggtgctgctggataagattgagcaagtgatacgacttatccgctc

SEQ ID NO: 393667 - DNA, 75 bp, synthetic construct
  source 1..75: mol_type = other DNA
tgagctggaattacaaaaccaattgcccctgcaaatttggcagtaaaattatcgtcaacaatctggtgagatggg

SEQ ID NO: 393668 - DNA, 75 bp, synthetic construct
  source 1..75: mol_type = other DNA
gggcactgatttttaccagcatcggctatgcaggaggacaggtaattgcgccatggttgcacagtctcgaccagc

SEQ ID NO: 393669 - DNA, 75 bp, synthetic construct
  source 1..75: mol_type = other DNA
tcggcagcggtgaaaacggctgcattctgcactacaccgaaaacgagagtgaactgcgcgacggtgacctggtgt

SEQ ID NO: 393670 - DNA, 75 bp, synthetic construct
  source 1..75: mol_type = other DNA
cggaagcggtgctggtgctgattaaaagcgatgacactcataaccacagcgttctgtttaaccgcgttcgcgacc

SEQ ID NO: 393671 - DNA, 75 bp, synthetic construct
  source 1..75: mol_type = other DNA
agacactacacccggataccatcatggatgctctgtttgagcaagggatccgggtggattccggtcttaccccgc

SEQ ID NO: 393672 - DNA, 75 bp, synthetic construct
  source 1..75: mol_type = other DNA
gcccgacgctgattggtgccagccagctgccgccgaaaatctttctgccgctgaatattctcggcgcatttgcct

SEQ ID NO: 393673 - DNA, 75 bp, synthetic construct
  source 1..75: mol_type = other DNA
tcccatggtccatgaaatgcgtctgttcaaatcgccagaagagattgccgttcttcgtcgagcgggcgaaattac

SEQ ID NO: 393674 - DNA, 75 bp, synthetic construct
  source 1..75: mol_type = other DNA
cgaaaacctcaccgccagcgtggtgaaaaagccggaagaaatcgaagcgttgatggcagctgcgagaaagcaatg

SEQ ID NO: 393675 - DNA, 75 bp, synthetic construct
  source 1..75: mol_type = other DNA
cccctgtaaatttggcaataaaattatcgtcaacaatctggtgaggtgggaccagtggggattgcatcttatcac

SEQ ID NO: 393676 - DNA, 75 bp, synthetic construct
  source 1..75: mol_type = other DNA
aaatctggcgtgacctgatgcaacgttccaggatgctttccttaatggatgcgcaggcccgtgatacatggtacc

SEQ ID NO: 393677 - DNA, 75 bp, synthetic construct
  source 1..75: mol_type = other DNA
ctgacaaaaagcattggtggtaaaagcgcccgggactgggcgatgaaacaggattttcgctgcggatgctggctc

SEQ ID NO: 393678 - DNA, 75 bp, synthetic construct
  source 1..75: mol_type = other DNA
tgttgccgtgaatcgtgtacatcctgaaactggttatattaactggctttcctggagccaggaaaaactcagccg

SEQ ID NO: 393679 - DNA, 75 bp, synthetic construct
  source 1..75: mol_type = other DNA
aatcattatcaacaatctggtgagatgggaccggtggggatgtcatcttatcaccggacaacagactgaccgact

SEQ ID NO: 393680 - DNA, 75 bp, synthetic construct
  source 1..75: mol_type = other DNA
ggaaaaacctgaaacggcaatgaaagccatcacacgcaatctcgatcgcgaaatctggcgtgacctgatgcaacg

SEQ ID NO: 393681 - DNA, 75 bp, synthetic construct
  source 1..75: mol_type = other DNA
gcgcatgaaagcccgcgttctgagcagctttttgactgtgtgcgtcacactctgaaatcccttgagttgtcaaaa

SEQ ID NO: 393682 - DNA, 75 bp, synthetic construct
  source 1..75: mol_type = other DNA
tactatggatcagcgtttcggggccggaatttttataggaccaacaaaagttagctctgactgcccgacagagtc

SEQ ID NO: 393683 - DNA, 75 bp, synthetic construct
  source 1..75: mol_type = other DNA
tgtggtacttttgctttccttcttcgcattcgctctccggtgagttgcactggcagtggttcccgctcggcagtg

SEQ ID NO: 393684 - DNA, 75 bp, synthetic construct
  source 1..75: mol_type = other DNA
gcgttcgtttatttatggcagcgttatttgcctgctggtggcgctggttccggcctcacgcgactgttttgcagt

SEQ ID NO: 393685 - DNA, 75 bp, synthetic construct
  source 1..75: mol_type = other DNA
gttcagaaaatcggaactggttgaccgactgaatgatattattgcagaacactatcctgacatgctgtcagtata

SEQ ID NO: 393686 - DNA, 75 bp, synthetic construct
  source 1..75: mol_type = other DNA
cctcttatataacgagtacagccaagctagatagcaataaaggcttgccaccttatacaggcccgacaaaggtga

SEQ ID NO: 393687 - DNA, 75 bp, synthetic construct
  source 1..75: mol_type = other DNA
atcgtcaacaatctggtgaggtgggaccggtggggatttcatctgaacagcgggcaacaggccgatcgacttgcc

SEQ ID NO: 393688 - DNA, 75 bp, synthetic construct
  source 1..75: mol_type = other DNA
acaaccgggaaaacatcactattcgtctggatggtcacatccagtccgttcagggtaaagagcgctatgaaaacg

SEQ ID NO: 393689 - DNA, 75 bp, synthetic construct
  source 1..75: mol_type = other DNA
ccgggatgctgtcattaatggatgcgcagacccgtgatacatggtaccgatcactggagtacgataattttccgg

SEQ ID NO: 393690 - DNA, 75 bp, synthetic construct
  source 1..75: mol_type = other DNA
tcagcagcaaacccatccccgattgcagggaaaacatcactattcatctggatgaccacattcagtctgttcagg

SEQ ID NO: 393691 - DNA, 75 bp, synthetic construct
  source 1..75: mol_type = other DNA
cggaagtggtcaacgggcatacggacgttatcggctcaaccagtatccaccacattctggctgtgcgaaagacta

SEQ ID NO: 393692 - DNA, 75 bp, synthetic construct
  source 1..75: mol_type = other DNA
atgaggtgtttgagcgaggggtgatcaacgtcttcaggggactgagctggaattacaaaaccaattcaccctgca

SEQ ID NO: 393693 - DNA, 75 bp, synthetic construct
  source 1..75: mol_type = other DNA
cggaagtgctcaatggacatacggacgttatctgctcaaccagtatccgccacattctggctgtacgaaagagtg

SEQ ID NO: 393694 - DNA, 75 bp, synthetic construct
  source 1..75: mol_type = other DNA
tgaactggaattacaaaaccaattccccctgtaaatttggcagtaaaattatcgtcaacaacctggtgagatggg

SEQ ID NO: 393695 - DNA, 75 bp, synthetic construct
  source 1..75: mol_type = other DNA
atcagatactttaagaagggctccgcgcatatcacgttcagaaaaccagaactggttgatcggctaaatgacatc

SEQ ID NO: 393696 - DNA, 75 bp, synthetic construct
  source 1..75: mol_type = other DNA
cgggacgcgaactcgccgagcaaaatgcattagcgcaaatccctgatctcataacacacgtatttaatcattatc

SEQ ID NO: 393697 - DNA, 75 bp, synthetic construct
  source 1..75: mol_type = other DNA
agtagtcaaattaccgggattgtcggcgataatggacaactttatctctcaggattgcctttagaaggtgttatt

SEQ ID NO: 393698 - DNA, 75 bp, synthetic construct
  source 1..75: mol_type = other DNA
gcaaagcgagctatgaagatgagatgttcaacatcagatactttaagaagggctccgcacacatcacgttcagga

SEQ ID NO: 393699 - DNA, 75 bp, synthetic construct
  source 1..75: mol_type = other DNA
gtccggaagtggtcaacgggcatacggacgttatctgctccacctcagtcagccacatcctggctgtacgaaaga

SEQ ID NO: 393700 - DNA, 75 bp, synthetic construct
  source 1..75: mol_type = other DNA
atcgtcaacaatctggtgagatgggaccgctggggatttcatctgaacagcgggcaacaggcagatcgacttgcc

SEQ ID NO: 393701 - DNA, 75 bp, synthetic construct
  source 1..75: mol_type = other DNA
tgagcacatttgaacaactgcaccagaataacgatgatgtgtttgaccggggagtgatcaacgtcttcacagggc

SEQ ID NO: 393702 - DNA, 75 bp, synthetic construct
  source 1..75: mol_type = other DNA
tgagcacatttgaacaactgcaccagaataaggataaggtgtttgagcggggggtgatcaacgtcttcagagggt

SEQ ID NO: 393703 - DNA, 75 bp, synthetic construct
  source 1..75: mol_type = other DNA
gagatgctcagttagccctaaaacgagagattgttttagaatcattggctttgttgcaaggctatgaactagcct

SEQ ID NO: 393704 - DNA, 75 bp, synthetic construct
  source 1..75: mol_type = other DNA
tgagcacatttgaacaactgcaccagaataacgatgaggtgtttgaccggggtgtgatcaacgtcttcacagggc

SEQ ID NO: 393705 - DNA, 75 bp, synthetic construct
  source 1..75: mol_type = other DNA
tgagcacatttgaacaactgcaccagaataacgatgacgtgtttgaccggggtgtgatcaacgtcttcagagggc

SEQ ID NO: 393706 - DNA, 75 bp, synthetic construct
  source 1..75: mol_type = other DNA
tgagcacatttgaacaactgcaccagaataacgatgacgtgtttgaccggggagtgatcaacgtcttcatagggc

SEQ ID NO: 393707 - DNA, 75 bp, synthetic construct
  source 1..75: mol_type = other DNA
gaataaggatgaggtgtttgagcgaggggtgatcaacgtcttcaggggactgagctggaattacaaaaccaattg

SEQ ID NO: 393708 - DNA, 75 bp, synthetic construct
  source 1..75: mol_type = other DNA
ccgcactggactgggcgatgaaacaggattttcgctgcggttgctggctgatggaaaaacctgaaacggcaatga

SEQ ID NO: 393709 - DNA, 75 bp, synthetic construct
  source 1..75: mol_type = other DNA
ctgacggaaagcatcggaggtaaaactgccccggactgggccatgaaacaggattttcgctgcggttcctggctg

SEQ ID NO: 393710 - DNA, 75 bp, synthetic construct
  source 1..75: mol_type = other DNA
ctgctctggactgggccatgaaacaggattttcgctgcggctgctggctgactgagaaaccggaaaccgcaatga

SEQ ID NO: 393711 - DNA, 75 bp, synthetic construct
  source 1..75: mol_type = other DNA
aaagccatcacccgcaatctcgatcgcgaaatctggcgtgacctgatgcaacattccgggatgctgtcattaatg

SEQ ID NO: 393712 - DNA, 75 bp, synthetic construct
  source 1..75: mol_type = other DNA
ccggcaactggcagaaatctcagcaatgacagacagtattggcggtaaaaccgcactggactgggcgatgaaaca

SEQ ID NO: 393713 - DNA, 75 bp, synthetic construct
  source 1..75: mol_type = other DNA
gcgaggggtgatcaacgtcttcagagggctgaactggaattacaaaaccaattgcccctgtaaatttggcagtaa

SEQ ID NO: 393714 - DNA, 75 bp, synthetic construct
  source 1..75: mol_type = other DNA
ttgagcgaggggtgatcaacgtcttcaggggactgaactggaattacaaaaccaattgcccctgcaaatttggca

SEQ ID NO: 393715 - DNA, 75 bp, synthetic construct
  source 1..75: mol_type = other DNA
ccgtactggactgggccatgaaacagaattttcgctgcggctgctggctgatggagaaacctgaaacggcaatga

SEQ ID NO: 393716 - DNA, 75 bp, synthetic construct
  source 1..75: mol_type = other DNA
tgctgaacgtctgcaagatatccctccctcgcaaattcgcgttgtcgctacggcgacattacgccttgccgtcaa

SEQ ID NO: 393717 - DNA, 75 bp, synthetic construct
  source 1..75: mol_type = other DNA
gtgaatgtcatgaggctcattggttaaaaataagaaacttgttggataatctcctccagaaacattccagaataa

SEQ ID NO: 393718 - DNA, 75 bp, synthetic construct
  source 1..75: mol_type = other DNA
tgagctgggattacaaaaccaactcaccctgtaaatttggcagtaaaattatcgtcaacaatctggtgaggtggg

SEQ ID NO: 393719 - DNA, 75 bp, synthetic construct
  source 1..75: mol_type = other DNA
gccctgcaaatttggcagtaaaattatcattaacaacctggtaaggtgggaccggtgggcacttcatcttatcat

SEQ ID NO: 393720 - DNA, 75 bp, synthetic construct
  source 1..75: mol_type = other DNA
gggatttcatcttatcaccggacaacaggctgaccgactcgccgatctggaaagaatgttgcacctgttcagcgg

SEQ ID NO: 393721 - DNA, 75 bp, synthetic construct
  source 1..75: mol_type = other DNA
cgggcaacaggcagatcgactcgccgacctggaaagaatgctacacctgttcagcggcaaaccgatccccgacag

SEQ ID NO: 393722 - DNA, 75 bp, synthetic construct
  source 1..75: mol_type = other DNA
gatctggaaagaatgttgcacctgttcagcggtaaaccgatccccgacaaccgggaaaacataaccattcatctg

SEQ ID NO: 393723 - DNA, 75 bp, synthetic construct
  source 1..75: mol_type = other DNA
cgccattcattgcggtcggctggaggaactggagattgacgggctgacgctggaacgtgcgttagtgttcccgag

SEQ ID NO: 393724 - DNA, 75 bp, synthetic construct
  source 1..75: mol_type = other DNA
gtggctggaagcatccagacgctgacgcgaattaaacgcaaagtgcgtctggctgctggcctgaacagcgaaaat

SEQ ID NO: 393725 - DNA, 75 bp, synthetic construct
  source 1..75: mol_type = other DNA
cagccattgatctcggttcgaatagttttcatatgctggttgtgcgcgaggtggctggaagcatccagacgctga

SEQ ID NO: 393726 - DNA, 75 bp, synthetic construct
  source 1..75: mol_type = other DNA
gtggtcaacggacatacggacgttatcggctcaaccagtatccgccacattctggctgtacgacagagtacattg

SEQ ID NO: 393727 - DNA, 75 bp, synthetic construct
  source 1..75: mol_type = other DNA
atcctcccgcgaaagggaaagaggtggcggtggatgacggtattctcggtggattgaaagatattttgttcggca

SEQ ID NO: 393728 - DNA, 75 bp, synthetic construct
  source 1..75: mol_type = other DNA
tcgcgttcaacacgctttgcgggcttttacgccaaaagatcagaaagcagtgaaggcagcggcgcaaaccatgcg

SEQ ID NO: 393729 - DNA, 75 bp, synthetic construct
  source 1..75: mol_type = other DNA
tgaacaattgccggaagcgggcgatctggagaagccaaaactggtgtttttcttcgacgaagcacatctgctgtt

SEQ ID NO: 393730 - DNA, 75 bp, synthetic construct
  source 1..75: mol_type = other DNA
tgtttatcattaaatactttaagaagggatctgcacacatcactttcaaaaggctggaactgattgacagaatta

SEQ ID NO: 393731 - DNA, 75 bp, synthetic construct
  source 1..75: mol_type = other DNA
caacagtctggaaaaggatgacattcctgccgtcagcgaagagaatattctcagcacgtttgagcaactgcatct

SEQ ID NO: 393732 - DNA, 75 bp, synthetic construct
  source 1..75: mol_type = other DNA
tgaaaggtgatctgaccggcatcgcgcaggcaggaacggcatcggaaaaactgctcgctcggttgaaaaatatcg

SEQ ID NO: 393733 - DNA, 75 bp, synthetic construct
  source 1..75: mol_type = other DNA
ggatgcgcaccgatgctaacggtaaaggcgttatcaatatcctcagcgccgagaagctttatcagatgccgaaac

SEQ ID NO: 393734 - DNA, 75 bp, synthetic construct
  source 1..75: mol_type = other DNA
caggccagtaccgagcagcaaaataatcccccgcgaaagggaaagaggtggcggtggatgacggcattcttggtg

SEQ ID NO: 393735 - DNA, 75 bp, synthetic construct
  source 1..75: mol_type = other DNA
aaaagcgccgctcgccaggtgacgaatcagattgtacgcgggatgttggggagtttgctggggggggagaagaag

SEQ ID NO: 393736 - DNA, 75 bp, synthetic construct
  source 1..75: mol_type = other DNA
atgagcgaacccctgttaattgcccgcacgccggacacagaactgtttttattgccgggaatggctaaccgtcac

SEQ ID NO: 393737 - DNA, 75 bp, synthetic construct
  source 1..75: mol_type = other DNA
ggccaatccggcgtttgataccgaaaaggcaatccaggaactggggacgggcgaagcgttgatctcgtttctcga

SEQ ID NO: 393738 - DNA, 75 bp, synthetic construct
  source 1..75: mol_type = other DNA
agtacatcggcgataacgccaaatcattccagaatcagtacggtaatatcagtagcgcatcggttggtgccatcc

SEQ ID NO: 393739 - DNA, 75 bp, synthetic construct
  source 1..75: mol_type = other DNA
ccagaagcaattgatggttgggttaaacactatggtgtgaacgccaggcagctagccaaactacttgatgcccgt

SEQ ID NO: 393740 - DNA, 75 bp, synthetic construct
  source 1..75: mol_type = other DNA
atggagaaacctgatacagcaatgaaagctatcatccgcaaccttgaccgtgaaatctggcgtgacctgatgcaa

SEQ ID NO: 393741 - DNA, 75 bp, synthetic construct
  source 1..75: mol_type = other DNA
tctggatgatcacattcagtctgttcagggtatagagagctatgaagatgagatgttcagcatcagatactttag

SEQ ID NO: 393742 - DNA, 75 bp, synthetic construct
  source 1..75: mol_type = other DNA
tcggacacattctggctgtacgaaagaccacactgatgcaaatcgacacacttatccggcaactgacagaaatct

SEQ ID NO: 393743 - DNA, 75 bp, synthetic construct
  source 1..75: mol_type = other DNA
cgcgcacatcacgttcagaaaaccggaactggttgatcggctaaatgacatcattgcgaagcattatccggggca

SEQ ID NO: 393744 - DNA, 75 bp, synthetic construct
  source 1..75: mol_type = other DNA
acaaccgggaaaacatcaccattcatctggatgaccatatccaatctgttcagggaaaagaggactatgaagatg

SEQ ID NO: 393745 - DNA, 75 bp, synthetic construct
  source 1..75: mol_type = other DNA
gaacaaagatgaagtgtttgaacggggagtgatcaacgtcttcaaagggctgagctgggattacaaaaccaactc

SEQ ID NO: 393746 - DNA, 75 bp, synthetic construct
  source 1..75: mol_type = other DNA
gctggctcatggagaaacctgaaacggcaatgaaagccatcacccggaaccttgaccgcgaaatctggcgtgacc

SEQ ID NO: 393747 - DNA, 75 bp, synthetic construct
  source 1..75: mol_type = other DNA
atcgtcaacaatctggtgaggtgggacagatggggatttcatctgaacaacggcccacaggccgatcgacttgcc

SEQ ID NO: 393748 - DNA, 75 bp, synthetic construct
  source 1..75: mol_type = other DNA
cgaaatctggcgtgatctgatgcaacgttcagggatgctgtcattaatggatgcacaagcccgtgatacatggta

SEQ ID NO: 393749 - DNA, 75 bp, synthetic construct
  source 1..75: mol_type = other DNA
atcgtcaacaatctggtgagatgggaccggtggggatttcatcttatcaccgggcaacaggccgatcgacttgcc

SEQ ID NO: 393750 - DNA, 75 bp, synthetic construct
  source 1..75: mol_type = other DNA
gacctggaaagaatgctacatctgttcagcggcaaaccgatccccaacaaccgggaaaacatcacgattcgtctg

SEQ ID NO: 393751 - DNA, 75 bp, synthetic construct
  source 1..75: mol_type = other DNA
cggaagttgtcaacgggcatacggacgttatctgctcaaccagtatccgccacattctggctgtacgaaagagtg

SEQ ID NO: 393752 - DNA, 75 bp, synthetic construct
  source 1..75: mol_type = other DNA
tgagcatgatgcattgtcaattgctaatgatactaaatatggtctgggggcaggaatctggacacgagatcaaaa

SEQ ID NO: 393753 - DNA, 75 bp, synthetic construct
  source 1..75: mol_type = other DNA
ctgaaacgtgcagccgaaaatatgattccatcaactatagaattaggtgggaaatcaccaaatatatatttctct

SEQ ID NO: 393754 - DNA, 75 bp, synthetic construct
  source 1..75: mol_type = other DNA
ccaaaaatgtagctgaaccattaaaagaaatatgtattgaaaactttattggtgccacaatatcctgtgttatac

SEQ ID NO: 393755 - DNA, 75 bp, synthetic construct
  source 1..75: mol_type = other DNA
attcccgcgcacctcataaaacgggtgccgggattctcaccccgctggagataaaggcgatacacgacgcgccag

SEQ ID NO: 393756 - DNA, 75 bp, synthetic construct
  source 1..75: mol_type = other DNA
ctttggcctcggctttcgcgaatacgcctcggtgatggtgccggtggatatcgccgcgattgttgccacgctggt

SEQ ID NO: 393757 - DNA, 75 bp, synthetic construct
  source 1..75: mol_type = other DNA
ggagcgtctgctggatggcttctatacccttagcgatcaaaccatgtatgacatgcttggctggctggcgcagga

SEQ ID NO: 393758 - DNA, 75 bp, synthetic construct
  source 1..75: mol_type = other DNA
ctgcttgcattaggtttcagtaaaggtactactctggcatttgtcatggctgccgggtttattgccgatacagcc

SEQ ID NO: 393759 - DNA, 75 bp, synthetic construct
  source 1..75: mol_type = other DNA
tggctgcaatctgggaccgaaaattacaccgattggtagcctggcaacgctgctctggctgcatgtcctttcaca

SEQ ID NO: 393760 - DNA, 75 bp, synthetic construct
  source 1..75: mol_type = other DNA
tcttctcgctggggatgtatctggtggtctatggcctgcgtaatgcagggctaacagaatatctctccagtgtgc

SEQ ID NO: 393761 - DNA, 75 bp, synthetic construct
  source 1..75: mol_type = other DNA
acaattccttctcttaaatcgttatttctttcattgttgagtattatttctccgctaatgataataaaaattaga

SEQ ID NO: 393762 - DNA, 75 bp, synthetic construct
  source 1..75: mol_type = other DNA
gacaagcgtatcgcctttgtgacggggcatccggaatacgacgcacatacgctggcgcaggaatatttccgcgat

SEQ ID NO: 393763 - DNA, 75 bp, synthetic construct
  source 1..75: mol_type = other DNA
gaaaatcagtttctgcgcctgctttcaaactcgcccttacaggtcgatattcagctgttgcgcatcgattcccgt

SEQ ID NO: 393764 - DNA, 75 bp, synthetic construct
  source 1..75: mol_type = other DNA
tattgcctttggcgcgtcagaccatcaaatcatccacgtaaccgcctggacggaacgcgaagcgcgtagccgttg

SEQ ID NO: 393765 - DNA, 75 bp, synthetic construct
  source 1..75: mol_type = other DNA
tgctgttcaagcgtggcttcctgaccaaaaaagggcgctatatccactccaccgacgccggaaaagcgctattcc

SEQ ID NO: 393766 - DNA, 75 bp, synthetic construct
  source 1..75: mol_type = other DNA
ctcctgtcaggcagttcagaggaattgtggcaccggggaacggagacgtgaaaaaaagggtcaaaaaaactgcgc

SEQ ID NO: 393767 - DNA, 75 bp, synthetic construct
  source 1..75: mol_type = other DNA
ggtagcaaagagcgcgatgaagaaaacgacggtacgccgctgcctgtagtagcgaagggcgatgagctgctgtgc

SEQ ID NO: 393768 - DNA, 75 bp, synthetic construct
  source 1..75: mol_type = other DNA
atgagaaggccaaaaaactggagcagtcctgcagatgcaaagccggttgcggcatcactgccgcgcctggctgaa

SEQ ID NO: 393769 - DNA, 75 bp, synthetic construct
  source 1..75: mol_type = other DNA
acagcgtatcgcgtggggatgggcggttttggttctctgcgccaggttcgtgagggggcggagtataaatacatc

SEQ ID NO: 393770 - DNA, 75 bp, synthetic construct
  source 1..75: mol_type = other DNA
aataaaaagacttcaccccgtaagcgagcagcgaaaaaaagcccgccagcagcagaggcgggcagtggagtgata

SEQ ID NO: 393771 - DNA, 75 bp, synthetic construct
  source 1..75: mol_type = other DNA
gggaagtgaaaacggtcgttccggtcagttcagttgcaccggtaacacctccccgcccgctaagaacgggtgagc

SEQ ID NO: 393772 - DNA, 75 bp, synthetic construct
  source 1..75: mol_type = other DNA
gaggacttgaaaccgccatagtctgtgcgcttcaggcagaaggttttgagcttgccgtggttaaccccagacaag

SEQ ID NO: 393773 - DNA, 75 bp, synthetic construct
  source 1..75: mol_type = other DNA
agacggctgcattatggatagcgccttatattgataatcaggatgtttatcatcagccatccagtgtgttttttg

SEQ ID NO: 393774 - DNA, 75 bp, synthetic construct
  source 1..75: mol_type = other DNA
ggcgatggctttatcgagtgcggtaatggtcaggtggtgacctggtgtatcggtcacctgcttgagcaggcgcag

SEQ ID NO: 393775 - DNA, 75 bp, synthetic construct
  source 1..75: mol_type = other DNA
tgtcgatattgttgaaggtcgttttgatgccgggatacgcctgggtgaaattgtggataaagatatggttgcagt

SEQ ID NO: 393776 - DNA, 75 bp, synthetic construct
  source 1..75: mol_type = other DNA
cagtcctcagaagcaaagccggttgcggcatcactgccgcgcctggctgaagggaacttccggacaaccacggtg

SEQ ID NO: 393777 - DNA, 75 bp, synthetic construct
  source 1..75: mol_type = other DNA
ggttggcgcgttgtcgattgacggtagtagcgcacagggcgtggtgaagcaggcgatgatttacgccaacgtcat

SEQ ID NO: 393778 - DNA, 75 bp, synthetic construct
  source 1..75: mol_type = other DNA
aagattcgcgcgcgtgggttcccgtccgaagcggggagtctggcgatttcatctatcaccgcgacgatgggcttg

SEQ ID NO: 393779 - DNA, 75 bp, synthetic construct
  source 1..75: mol_type = other DNA
ttattgaactcctccagccagcctggcaaaaagagccggatcttaacctgctgcaatttttgcaaaaattggcga

SEQ ID NO: 393780 - DNA, 75 bp, synthetic construct
  source 1..75: mol_type = other DNA
gccgcggtgagctcgctggagagcgtgaccgcctcatttggctcaaaggtcgaggtgtggcttgccccgaggtca

SEQ ID NO: 393781 - DNA, 75 bp, synthetic construct
  source 1..75: mol_type = other DNA
catgatcaccacatttacgtcttgatgggcgtatcgggcagcggcaaatctgcggtcgccagtgaagtggcgcat

SEQ ID NO: 393782 - DNA, 75 bp, synthetic construct
  source 1..75: mol_type = other DNA
aatggggcagcaacttggcgctgttcacagcctatcggttgatcaatgtccgtttgagcgcaggctgtcgcgaat

SEQ ID NO: 393783 - DNA, 75 bp, synthetic construct
  source 1..75: mol_type = other DNA
gcctgatgctgcagaagttgccggatatgcttatcctgatgctgctgttctttcccgccgccagtcggcggttct

SEQ ID NO: 393784 - DNA, 75 bp, synthetic construct
  source 1..75: mol_type = other DNA
ggtgcagcaggcactctccccgcagccatcactgatattttaaatcagacagatgcgctaattgttgttgttcgc

SEQ ID NO: 393785 - DNA, 75 bp, synthetic construct
  source 1..75: mol_type = other DNA
ctcgcacgctcgaatacgacgacggcacaaaagagatcaacacagtcgatatttcagttatcgggattgttggta

SEQ ID NO: 393786 - DNA, 75 bp, synthetic construct
  source 1..75: mol_type = other DNA
gcggcgatcattctggcaccggcacagtattcggcctcccgccgacaaatttatctggcggaactgatgatgcat

SEQ ID NO: 393787 - DNA, 75 bp, synthetic construct
  source 1..75: mol_type = other DNA
ttttggctcgtgtcgaacgagagctaccggtgcggctcgaccaagagcgcaccgatatggttgtttgccatggtg

SEQ ID NO: 393788 - DNA, 75 bp, synthetic construct
  source 1..75: mol_type = other DNA
tgtcgatattgttgacggtcgttttgatgccgggatacgcctgggtgaaattgttgataatgatatggttgcagt

SEQ ID NO: 393789 - DNA, 75 bp, synthetic construct
  source 1..75: mol_type = other DNA
cagagcgcgccttcgctgtcctattcaatgtattggggatcgaagccccgaccgcgaacgccttgccttctatct

SEQ ID NO: 393790 - DNA, 75 bp, synthetic construct
  source 1..75: mol_type = other DNA
atacacggatttgcatttaagattgaaaccatactggagaatgaccggctctctggtaaatcaaaagaatacctg

SEQ ID NO: 393791 - DNA, 75 bp, synthetic construct
  source 1..75: mol_type = other DNA
tattgttccgcaaggtaattacttcctgatgggcggctcgccggtagataacaacgctaagctgttccgcgccgg

SEQ ID NO: 393792 - DNA, 75 bp, synthetic construct
  source 1..75: mol_type = other DNA
ccctcccgcctcctgacaccgatcgatgtgaataaaaacaacatcaaagacacggtagttaaagacggattccac

SEQ ID NO: 393793 - DNA, 75 bp, synthetic construct
  source 1..75: mol_type = other DNA
ccatcccgcctgctgacaccaatcgatgttaataaaaacaacatcaaagatacggtaattaaagacggattccac

SEQ ID NO: 393794 - DNA, 75 bp, synthetic construct
  source 1..75: mol_type = other DNA
tgtttgctgttgcgaaaaaagggcatgccattaacaccggtaaggtgctgcgtggtgcgccctggcaaatcgtta

SEQ ID NO: 393795 - DNA, 75 bp, synthetic construct
  source 1..75: mol_type = other DNA
ccagaaaaatataacgatcacctggggttattacttccgcacgggcattatcatgtctctgcccgtgctgtttgt

SEQ ID NO: 393796 - DNA, 75 bp, synthetic construct
  source 1..75: mol_type = other DNA
gtttatcaggcaaagtggcaatttccggccaggatgcggatctcgcgggcataaaacgtattgctgccggtacgc

SEQ ID NO: 393797 - DNA, 75 bp, synthetic construct
  source 1..75: mol_type = other DNA
ggtctacggtctgcgcaacgctgggctaaccgaatacctttcaggtgtgctgaacgtactggcggataaaggact

SEQ ID NO: 393798 - DNA, 75 bp, synthetic construct
  source 1..75: mol_type = other DNA
gattaaagatcctgcgacgttcaaaactggctgggttgttttactgcttctgctggtgggatttttcgtcctgga

SEQ ID NO: 393799 - DNA, 75 bp, synthetic construct
  source 1..75: mol_type = other DNA
ggtactgccttccggtattcagctcattattccggtcatttccgtcaataaaaccttatcggagatcccaccatg

SEQ ID NO: 393800 - DNA, 75 bp, synthetic construct
  source 1..75: mol_type = other DNA
ctctcctgaaagcaccggcaaaggcgattaaagatctggcaaccttcagaaccggctggatagttttaattcttc

SEQ ID NO: 393801 - DNA, 75 bp, synthetic construct
  source 1..75: mol_type = other DNA
ctgacggattatctctctgacgtgctgaacgtactggcagataaaggactgtgggccgcgacgctggggacagga

SEQ ID NO: 393802 - DNA, 75 bp, synthetic construct
  source 1..75: mol_type = other DNA
gattggcgcattgtcgatcgatggcagcaccgcatcgggtgtcatcaaagaagcaatgatttatgccaatgtcat

SEQ ID NO: 393803 - DNA, 75 bp, synthetic construct
  source 1..75: mol_type = other DNA
gtttttccgtacaaaccgcgctgaatggtgattccgttgcagaaactacaacagcatttctggcgcgtcagcagg

SEQ ID NO: 393804 - DNA, 75 bp, synthetic construct
  source 1..75: mol_type = other DNA
tttgcaatatctgaaagagatgattgaattagctaaaaaaataaaagaaaaagaaaaagaaaaagaaaatatttg

SEQ ID NO: 393805 - DNA, 75 bp, synthetic construct
  source 1..75: mol_type = other DNA
tagcacttaaaaatgtagcaaatcatttgcaatatctgaaagagatgattgaattagctaaaaaaataaaagaaa

SEQ ID NO: 393806 - DNA, 75 bp, synthetic construct
  source 1..75: mol_type = other DNA
gtttttccgtacaaaccgcgctgaatggtgattccgtcgcagaaaccacagcggcgtttctggcgcgtcagcagg

SEQ ID NO: 393807 - DNA, 75 bp, synthetic construct
  source 1..75: mol_type = other DNA
attgcacaggcgctggactggatgccggtgcagccagatgccatatccggcatatggactgccgaactggacagg

SEQ ID NO: 393808 - DNA, 75 bp, synthetic construct
  source 1..75: mol_type = other DNA
atgcccgtccgacttaataccattcccgacgcagaaccctatcccgcaccgccagcccacattaaatggttgtca

SEQ ID NO: 393809 - DNA, 75 bp, synthetic construct
  source 1..75: mol_type = other DNA
gtgaattgtcccgcatcgcattggcaattcaggtcatcacggcgcgtaaaatggaaaccccggcactgatttttg

SEQ ID NO: 393810 - DNA, 75 bp, synthetic construct
  source 1..75: mol_type = other DNA
attgcggcagtgggcgcgctaattttgtttgtaatcgctaaacgcggccatgctatcaatacgggtaaagtgcta

SEQ ID NO: 393811 - DNA, 75 bp, synthetic construct
  source 1..75: mol_type = other DNA
tccgggcgatattcctgtggtgtggaatattgtctggaatgcgactactgcatttattgccgttattatcatcag

SEQ ID NO: 393812 - DNA, 75 bp, synthetic construct
  source 1..75: mol_type = other DNA
ggttaaatataaagatacaaagagttaaatcaaggataaatgatttctttggagaaaaaactgctgttttatcaa

SEQ ID NO: 393813 - DNA, 75 bp, synthetic construct
  source 1..75: mol_type = other DNA
tctcgaccctaaccgcttgtttgaacttgaacagcgtatctcaaagcagatttcgctggcacgtaaacaccacgt

SEQ ID NO: 393814 - DNA, 75 bp, synthetic construct
  source 1..75: mol_type = other DNA
gccgcaagtcgcaggatgcggtcatcaacactattttgtctgcaaagaaaccgatggtgcgatgacagaaactca

SEQ ID NO: 393815 - DNA, 75 bp, synthetic construct
  source 1..75: mol_type = other DNA
gattgccactatcgccagcggcaatgtgcatataataagccatcccggaaacccgaacgtagtcaacccccaata

SEQ ID NO: 393816 - DNA, 75 bp, synthetic construct
  source 1..75: mol_type = other DNA
taaaaaatgatgatggtatggagttttataccttaagaaaaaaagggattattcctgttaaggatgtattaagtg

SEQ ID NO: 393817 - DNA, 75 bp, synthetic construct
  source 1..75: mol_type = other DNA
gtgaaagcttcacacaaaacacctttatcctttcttaaaccgagcgatacgttatacatcgttgctcatggcaac

SEQ ID NO: 393818 - DNA, 75 bp, synthetic construct
  source 1..75: mol_type = other DNA
cctcgctggatgaattgccgcagtttatcaatgtgctgaccggggggatgtcgattgtcggtccacgtccgcacg

SEQ ID NO: 393819 - DNA, 75 bp, synthetic construct
  source 1..75: mol_type = other DNA
gcaactggaaggttacgtgaagaataagatcaatctccctgcgcgagcggtggtgattacctttgatgatggcct

SEQ ID NO: 393820 - DNA, 75 bp, synthetic construct
  source 1..75: mol_type = other DNA
catgaaccagtttttgcaccacatgataaagccactaacacgcaagcgatgatcgcgactattgccagtggtaat

SEQ ID NO: 393821 - DNA, 75 bp, synthetic construct
  source 1..75: mol_type = other DNA
catcagttattggatctggttcagcaactgggccaacgttgaatcccgtagcattagccactctattaatacaca

SEQ ID NO: 393822 - DNA, 75 bp, synthetic construct
  source 1..75: mol_type = other DNA
cccgatgtgatctttccccatgatccactatcacagaatgctctatcattggcgcttaaactgaaacgtggataa

SEQ ID NO: 393823 - DNA, 75 bp, synthetic construct
  source 1..75: mol_type = other DNA
aggccgttccagtgggcgctttaagccacgggtcgtggtcgccatcgccctggacgatcagcagcgcgtcaccga

SEQ ID NO: 393824 - DNA, 75 bp, synthetic construct
  source 1..75: mol_type = other DNA
catcaggtggcgctggaaatcaataattcctcttttttacactcacgtaagggaagtgaagacaattgtcgtgcg

SEQ ID NO: 393825 - DNA, 75 bp, synthetic construct
  source 1..75: mol_type = other DNA
gaatttgaagagtgtcttaaaatcctcgacgcggtagattttccgccagagcgcattttgaatgtttctccgcgc

SEQ ID NO: 393826 - DNA, 75 bp, synthetic construct
  source 1..75: mol_type = other DNA
acggagaggctcgctccatgctattgcttaatcttatcaataaagaaattaagcacagcgtaaagaacaccgagt

SEQ ID NO: 393827 - DNA, 75 bp, synthetic construct
  source 1..75: mol_type = other DNA
gacgcccaggcgattgccggaacctggtcaaccttttctgaaagcggcgaagcgtttcagatgaatatggtgtac

SEQ ID NO: 393828 - DNA, 75 bp, synthetic construct
  source 1..75: mol_type = other DNA
gcttcggtaatggtgccggtggatatcgccgcgatactggccacgctggtgatgttgcatctctatttccgcaaa

SEQ ID NO: 393829 - DNA, 75 bp, synthetic construct
  source 1..75: mol_type = other DNA
ttcaggccttgaaaaagaaaatttcactatccttaaattcacacacaagactctctcttacagatatatcgttaa

SEQ ID NO: 393830 - DNA, 75 bp, synthetic construct
  source 1..75: mol_type = other DNA
cccgtatcgccaccgccagtttcatggcctacgcgctgggacagatcctcgacgtgcacgtttttaaccgcctgc

SEQ ID NO: 393831 - DNA, 75 bp, synthetic construct
  source 1..75: mol_type = other DNA
atgatgaagcgcaattcatcattatgttaaccctgaacaaacacgccgcgggcgatcaacatatgcgcattttct

SEQ ID NO: 393832 - DNA, 75 bp, synthetic construct
  source 1..75: mol_type = other DNA
atggcgctggtgacgctggtggtgttccagatgatcggcgggatcaccgatttctaccgttcatggcgcggcgtg

SEQ ID NO: 393833 - DNA, 75 bp, synthetic construct
  source 1..75: mol_type = other DNA
tccgttttcattagatgttattgaggaaataaaaaaagatgaaaatggggttgacataactatatttatccctaa

SEQ ID NO: 393834 - DNA, 75 bp, synthetic construct
  source 1..75: mol_type = other DNA
cccatttccattagaagttatggaggaaataaaaaagaacgacgatgagtttgatataagcatacttatacccaa

SEQ ID NO: 393835 - DNA, 75 bp, synthetic construct
  source 1..75: mol_type = other DNA
agggaacttccggacaatgccggtgcagaccatcaccgcgaccactccgtccggcagcagacctgcggtgacggc

SEQ ID NO: 393836 - DNA, 75 bp, synthetic construct
  source 1..75: mol_type = other DNA
ctctgctggggacgttattactttccggctgcgccggaacgaactccgactttgagtgtgatgccaccacatccg

SEQ ID NO: 393837 - DNA, 75 bp, synthetic construct
  source 1..75: mol_type = other DNA
gggaagtgaaaacgattgttccggtcagttcagttgtgccggtaacacccccacgtccgctaagaacgggtgaac

SEQ ID NO: 393838 - DNA, 75 bp, synthetic construct
  source 1..75: mol_type = other DNA
cgaagaattccgtaatgcgctggttaacgccgcctctgccgacgctatcgccagcctgctgcaacatgaactgga

SEQ ID NO: 393839 - DNA, 75 bp, synthetic construct
  source 1..75: mol_type = other DNA
atgaaacagatttctttatttattcctctgctggggaccttattactttccggctgtgccggaacaaactctgat

SEQ ID NO: 393840 - DNA, 75 bp, synthetic construct
  source 1..75: mol_type = other DNA
caatgagaaggccaaaaagctggagcagcctgcagatgcaaagccggctgcggcatcactgccgcgcctggctga

SEQ ID NO: 393841 - DNA, 75 bp, synthetic construct
  source 1..75: mol_type = other DNA
atggcgctggtgacgctggtcgttttccagatgattggcgggattaccgatttctaccgctcctggcgcggcgtg

SEQ ID NO: 393842 - DNA, 75 bp, synthetic construct
  source 1..75: mol_type = other DNA
atatgactcttactaaaggcaagggagttgtggggtatgaagatgctattgttaatgaagaaatggtggaaaaat

SEQ ID NO: 393843 - DNA, 75 bp, synthetic construct
  source 1..75: mol_type = other DNA
accgccgccattcgttatatgcagcgcacccaacatattcatcgcattatggccaactatatgccgcacaataaa

SEQ ID NO: 393844 - DNA, 75 bp, synthetic construct
  source 1..75: mol_type = other DNA
gcgcttttttgccacgctgaagatgtgcggtgttcaaccagaaaaatgtgttccgctggccgatcatcagtcttt

SEQ ID NO: 393845 - DNA, 75 bp, synthetic construct
  source 1..75: mol_type = other DNA
tattacttccgtacagggattatcatgaccctgcctgtgctgtttgtgacactcgtcgcgctggcgcttcgtctc

SEQ ID NO: 393846 - DNA, 75 bp, synthetic construct
  source 1..75: mol_type = other DNA
gaagaatatgacgattacctggggatattacttccgcacagggattctcatgaccctgccggtactgtttgtaac

SEQ ID NO: 393847 - DNA, 75 bp, synthetic construct
  source 1..75: mol_type = other DNA
gcgattaatacgggtaaagtcctgcgcggtgccccctggcagattgtcatcttctcgctcggcatgtatctggtg

SEQ ID NO: 393848 - DNA, 75 bp, synthetic construct
  source 1..75: mol_type = other DNA
ttctggcgcactatcccgatgtacagattatcgtgactgatgacggtttacagcattatcgtctggcgcgtgatg

SEQ ID NO: 393849 - DNA, 75 bp, synthetic construct
  source 1..75: mol_type = other DNA
ggtattcgcgtgggggtcgtatcgcggggatatggtggtaaggctgaatcttatccgctgttattgtcggcagat

SEQ ID NO: 393850 - DNA, 75 bp, synthetic construct
  source 1..75: mol_type = other DNA
aaagcgggaaaaattcacaacgtctacattgcgatgcagatgaaagaggagtcccgcattaagaaactgatgcgc

SEQ ID NO: 393851 - DNA, 75 bp, synthetic construct
  source 1..75: mol_type = other DNA
ttgcccgcggggccaatgcgtgagcgagcggggcgcttaaaatcggttgatgcggtaatcgtcaacggcggtgta

SEQ ID NO: 393852 - DNA, 75 bp, synthetic construct
  source 1..75: mol_type = other DNA
gaaccatgcggatgtcagcgcgttggtaagcgccgggcaaacgctggtaatgactgaaaaagatgcggtgaaatg

SEQ ID NO: 393853 - DNA, 75 bp, synthetic construct
  source 1..75: mol_type = other DNA
tttgcttactggtgcccgttgtgatgttacacaacttaaacatgtggtagcgatggcgggtattggtcacccgcc

SEQ ID NO: 393854 - DNA, 75 bp, synthetic construct
  source 1..75: mol_type = other DNA
tggaaatggaggcgggggagagagaggactactttgacatggaactctcgttttgctttcaagaaatgctcatca

SEQ ID NO: 393855 - DNA, 75 bp, synthetic construct
  source 1..75: mol_type = other DNA
ttatccgtggatgggatgacggacgaaaggttgataccgggcgtgcgctactttcatttcaggaagggactatcg

SEQ ID NO: 393856 - DNA, 75 bp, synthetic construct
  source 1..75: mol_type = other DNA
tgcacccggaacagcttgacgcaccggccccgtcgtccgagatggccagcctgcatcccaatcacgtctgggaga

SEQ ID NO: 393857 - DNA, 75 bp, synthetic construct
  source 1..75: mol_type = other DNA
tccactattgatgtggtcgttttcatggcgaaaaggaagattcgcgaaatctactattcgccagaatataagtat

SEQ ID NO: 393858 - DNA, 75 bp, synthetic construct
  source 1..75: mol_type = other DNA
gtaaacacgctggtatcgagaccattgacctggtggtgaatgataaggtccagaacaatttggacgagactgctg

SEQ ID NO: 393859 - DNA, 75 bp, synthetic construct
  source 1..75: mol_type = other DNA
tgtccgaacttgctaaagccgccaaaggcaagaaaggcaaagaggttcttaccgtacctgttgacgacgttgtat

SEQ ID NO: 393860 - DNA, 75 bp, synthetic construct
  source 1..75: mol_type = other DNA
tgtcgatattgttgagggtcgttttgatgccgggatacgcctgggtgaaattgtcgataaggatatggttgcagt

SEQ ID NO: 393861 - DNA, 75 bp, synthetic construct
  source 1..75: mol_type = other DNA
gtgactgataaacgcaaaaaacgcgcggatgccggccgcagcgccctgacccgcgacgaagccgcgctgatatct

SEQ ID NO: 393862 - DNA, 75 bp, synthetic construct
  source 1..75: mol_type = other DNA
gcactggatgaagtcatggccacgctgaccacgccggcgcgcagcagcgttatcagcattgttaacggcaactga

SEQ ID NO: 393863 - DNA, 75 bp, synthetic construct
  source 1..75: mol_type = other DNA
cgggccgcgcactgaacaacgtcccatgactcatgtggaggctgcgaaagccctgcgcgataagttcagcgccga

SEQ ID NO: 393864 - DNA, 75 bp, synthetic construct
  source 1..75: mol_type = other DNA
cggacgtgaagggttgtcgccacgggttatctatggcaagggtatggaaaatttcagcctgtcatggacggcgcc

SEQ ID NO: 393865 - DNA, 75 bp, synthetic construct
  source 1..75: mol_type = other DNA
ttgttgaaacagcccgcgcggcacgtaatgcagggcatggtaaacgcggtgcaatatacgacgctgcctgtgctg

SEQ ID NO: 393866 - DNA, 75 bp, synthetic construct
  source 1..75: mol_type = other DNA
ttttcataaacgttggtttgggagaagcggcaaaacggaatgtgggcaacggggaaaaccaaatccctgatatgt

SEQ ID NO: 393867 - DNA, 75 bp, synthetic construct
  source 1..75: mol_type = other DNA
gttctcagcgaaagaacattggctctggtgttattgggttattttactcggctcacttaccgttattcagggcat

SEQ ID NO: 393868 - DNA, 75 bp, synthetic construct
  source 1..75: mol_type = other DNA
atgagcgagaactcgattcgtttgacccaatacagccacggcgctggttgcggctgtaaaatttccccaaaagtg

SEQ ID NO: 393869 - DNA, 75 bp, synthetic construct
  source 1..75: mol_type = other DNA
tgaacatcgcaggcgcgtcctttgccaacatcgaaggcgtaaaagcgatgaccgacgttacgggttttggtctgc

SEQ ID NO: 393870 - DNA, 75 bp, synthetic construct
  source 1..75: mol_type = other DNA
atgagaattacattcagcatcccttttcctaaagaagtggactgcgccatgcttacccattctggtgatggtggt

SEQ ID NO: 393871 - DNA, 75 bp, synthetic construct
  source 1..75: mol_type = other DNA
caggggaaaatcagataccggacatgacctcttttgccagtggtgatggatggatgaaattacccaacgggaaaa

SEQ ID NO: 393872 - DNA, 75 bp, synthetic construct
  source 1..75: mol_type = other DNA
acctgatatgggtagcttcacgctttctgtttcaggtactggatatcaaaaattaccatctggttttattcttca

SEQ ID NO: 393873 - DNA, 75 bp, synthetic construct
  source 1..75: mol_type = other DNA
caatggtaggtctgtctcttgtcggttgtgttaataacgacaccctgtcaggggatgtttataccgcttctgaag

SEQ ID NO: 393874 - DNA, 75 bp, synthetic construct
  source 1..75: mol_type = other DNA
atccgacatttaccggagaaccaaaagcgccgacgcctgccgcaggaaataacaccacgcggattgcgaccactg

SEQ ID NO: 393875 - DNA, 75 bp, synthetic construct
  source 1..75: mol_type = other DNA
ctgtaagtataagcggcccggtggcgatgaatggaatgactgataatgcttatgccattacaggttctaataagt

SEQ ID NO: 393876 - DNA, 75 bp, synthetic construct
  source 1..75: mol_type = other DNA
tgggccatttaagcgaaatgtgccagggcgcaggcgtgcaggcgcgcattgactatgaagcaatcccgaaactgc

SEQ ID NO: 393877 - DNA, 75 bp, synthetic construct
  source 1..75: mol_type = other DNA
aacactcgtttctctccgggccaacgtgtcgtactggccagcaatggcagtcaggtgaccgtttccccgcgctaa

SEQ ID NO: 393878 - DNA, 75 bp, synthetic construct
  source 1..75: mol_type = other DNA
gtggtacagaaacaaggcaacactcgtttctctccgggccaacgtgtcgtactggccagcaatgggcagtcaggt

SEQ ID NO: 393879 - DNA, 75 bp, synthetic construct
  source 1..75: mol_type = other DNA
agacaacgccgcagatgcagctgccgcacgcaaggcgaaggcgctgccgttcggcgggcggcttgacccctataa

SEQ ID NO: 393880 - DNA, 75 bp, synthetic construct
  source 1..75: mol_type = other DNA
ttgaaaaatattgattttgctaaaggtcctgttgattctctccatcatgattattacttatggcgagggaagaac

SEQ ID NO: 393881 - DNA, 75 bp, synthetic construct
  source 1..75: mol_type = other DNA
tcggcggaatgcttggtccggtaattggtgtcatgatggcgcattattttgtggtgatgcgtgggaaaattaatc

SEQ ID NO: 393882 - DNA, 75 bp, synthetic construct
  source 1..75: mol_type = other DNA
caagcagcgataagagaacttcgtgaggaaaccggaattatacgccaggatatcggcacttctgttgcagagcgt

SEQ ID NO: 393883 - DNA, 75 bp, synthetic construct
  source 1..75: mol_type = other DNA
acgcactggtacaaatcgagcaaagcagcggcaattcgttagtgcaggatatcggatcggcgttagccaacaaac

SEQ ID NO: 393884 - DNA, 75 bp, synthetic construct
  source 1..75: mol_type = other DNA
tcaccaaagttcacccggcgtaccgtactttgctggagaaacgtcaggcgctggaagacgaaaaagccaaactta

SEQ ID NO: 393885 - DNA, 75 bp, synthetic construct
  source 1..75: mol_type = other DNA
ctccggtcagacggtttaaaggaattgtggtaccaaggaacggagacgagaaaaataaagacgtgaaaaaaaggg

SEQ ID NO: 393886 - DNA, 75 bp, synthetic construct
  source 1..75: mol_type = other DNA
ttgccagtctggtggttctgccttcagaaaacgaatcttttggtatggtgctggcagaagcatcggcattttctg

SEQ ID NO: 393887 - DNA, 75 bp, synthetic construct
  source 1..75: mol_type = other DNA
tcttcagtcaagtcgcctcaggattgttcgtacgggaggtgttttccctgaagatcgtgaaagtctacagtggct

SEQ ID NO: 393888 - DNA, 75 bp, synthetic construct
  source 1..75: mol_type = other DNA
cgggtagagcgtgccaatcagacactgcaggacaggctggtcaaagaaatgcggcttcagggtatcagtgatatt

SEQ ID NO: 393889 - DNA, 75 bp, synthetic construct
  source 1..75: mol_type = other DNA
ggcgtcttctgttcacagcgaacaggttaaaaaagaaaaaaaacgtaaaaagatggcgaatacagcaagccaaaa

SEQ ID NO: 393890 - DNA, 75 bp, synthetic construct
  source 1..75: mol_type = other DNA
aaaaaaccttaactcagggctttaatgatgcctctaataaaaaactgaagctttctgaaaaagaaatcagtgatg

SEQ ID NO: 393891 - DNA, 75 bp, synthetic construct
  source 1..75: mol_type = other DNA
tttctttatgattaatgcaaatacagtagatctcgaccgctcagggtggagtagcaatgaaaaggaagtcattcg

SEQ ID NO: 393892 - DNA, 75 bp, synthetic construct
  source 1..75: mol_type = other DNA
ctgattatccttggggcgattattcttggcctgatgctctctatcgtgggggtgctgctgcgctcgttgtttaat

SEQ ID NO: 393893 - DNA, 75 bp, synthetic construct
  source 1..75: mol_type = other DNA
tgcaccgcataccgaagtggccagtctgcaacccaatcatgtctggcagattgacgcctcactctgcacgcttta

SEQ ID NO: 393894 - DNA, 75 bp, synthetic construct
  source 1..75: mol_type = other DNA
tgaagcctggaaaatgttccgtatgcgacgtgactggatggttcagtcattttgccaaccgatctatgaggaatg

SEQ ID NO: 393895 - DNA, 75 bp, synthetic construct
  source 1..75: mol_type = other DNA
agataaattgcgtgagcgttctcgtgatctcttcatgggaaacccgctatctgttggcgcaataaaaactatcag

SEQ ID NO: 393896 - DNA, 75 bp, synthetic construct
  source 1..75: mol_type = other DNA
ccttccgttgaggtatgtcgtgaactggctgtggcggcaccagaactccgcaaagtcacgccaaaacttcgtgtc

SEQ ID NO: 393897 - DNA, 75 bp, synthetic construct
  source 1..75: mol_type = other DNA
gaaacatgctggtactgaagcagcaactgaaagaggcccgtattccacaggcggtggtggcgagagctgtcgatg

SEQ ID NO: 393898 - DNA, 75 bp, synthetic construct
  source 1..75: mol_type = other DNA
taccgccagttaacggcacagtatccggacggcgtaccggaagcagcactggatgaagtcatggccacgctgacc

SEQ ID NO: 393899 - DNA, 75 bp, synthetic construct
  source 1..75: mol_type = other DNA
atgagcgagcagcgcgtggtggtgatggggctgggcaacctgctatgggccgatgaaggtttcggcgtgcgggtg

SEQ ID NO: 393900 - DNA, 75 bp, synthetic construct
  source 1..75: mol_type = other DNA
tccgaagtattagcgctggcagatatccgcggacatctgccaacacatattgtcctcgtcgggttacaaccggca

SEQ ID NO: 393901 - DNA, 75 bp, synthetic construct
  source 1..75: mol_type = other DNA
tgagcgaactggcacgggcgcaactgcccgccgcggaacaagcggcgctggcgcaactggctgagtggggagttg

SEQ ID NO: 393902 - DNA, 75 bp, synthetic construct
  source 1..75: mol_type = other DNA
cgtgatgggcgcggagtctggcgagaatctttgctcagtgctgataaacgccatgcaggagcgcggcggcgcgga

SEQ ID NO: 393903 - DNA, 75 bp, synthetic construct
  source 1..75: mol_type = other DNA
cgctgctggtctccagttctctgctattttatatcggtatggcgttcgcctattttgtggtttttccgttggcgt

SEQ ID NO: 393904 - DNA, 75 bp, synthetic construct
  source 1..75: mol_type = other DNA
gcggtgatcgtgatattcctgtgtctggtctattttgccaatgacatctatcacctggtctctgcgccgttgatc

SEQ ID NO: 393905 - DNA, 75 bp, synthetic construct
  source 1..75: mol_type = other DNA
tggcgggctgtgaaaagagtgatgagaccgtgtctctgtatcaaaacgctgatgattgttcagccgcaaacccag

SEQ ID NO: 393906 - DNA, 75 bp, synthetic construct
  source 1..75: mol_type = other DNA
accatgagcgtaccaaagacggcaatggcgccgaaaccggcgaccactaccactgttacccgcggcggctttggt

SEQ ID NO: 393907 - DNA, 75 bp, synthetic construct
  source 1..75: mol_type = other DNA
tgattataatagcccaatacgtgtaatcaaagaatgtatcgaaaatgatatttcttcaacacctacgacaggata

SEQ ID NO: 393908 - DNA, 75 bp, synthetic construct
  source 1..75: mol_type = other DNA
ggctgctgagaagttgaatgagtttcagctctggcttaaaccccggctggaaaagaaacgtgcccagcatcacca

SEQ ID NO: 393909 - DNA, 75 bp, synthetic construct
  source 1..75: mol_type = other DNA
gtgagttgtcccgcatcgcattggcaatccaggtcattaccgcgcgtaaaatggaaaccccggcactgatttttg

SEQ ID NO: 393910 - DNA, 75 bp, synthetic construct
  source 1..75: mol_type = other DNA
atgcgcctgttgtggcgcattcttcatccttttcgcttcaatttcgaccagccatcctctattctgatgggtatt

SEQ ID NO: 393911 - DNA, 75 bp, synthetic construct
  source 1..75: mol_type = other DNA
tgtttaccaactggctcaactattacgtctaccagatcacgccatatgatctacggcacatgaatccaacgctgg

SEQ ID NO: 393912 - DNA, 75 bp, synthetic construct
  source 1..75: mol_type = other DNA
tacaccagtggcgctctctgccaacgatccggctaatgtgtggggaaatcttctgccctggcctgcacatccggc

SEQ ID NO: 393913 - DNA, 75 bp, synthetic construct
  source 1..75: mol_type = other DNA
gatcgctaaaacaaaagtgcaatttgcggcaatatagttattccatgaccgtacaggtaatgactccaacttatt

SEQ ID NO: 393914 - DNA, 75 bp, synthetic construct
  source 1..75: mol_type = other DNA
cattttgtagcacaggaccacttcggtcttgatgtaactgatatcaaaaacaagacttatagcaaatatagattt

SEQ ID NO: 393915 - DNA, 75 bp, synthetic construct
  source 1..75: mol_type = other DNA
tattaatgttgcttttagtgcctcaagttccggaacaaaaatatcacaacgtgaatgcactgatattttatttgc

SEQ ID NO: 393916 - DNA, 75 bp, synthetic construct
  source 1..75: mol_type = other DNA
gataagcgcattgcctttgtgacgggccatcccgaatatgatgcgcaaacgctggcgcaggaatatttccgcgat

SEQ ID NO: 393917 - DNA, 75 bp, synthetic construct
  source 1..75: mol_type = other DNA
ccttccggcattccgtacccagctccaggcattgctggaaaatgaagagtcccgcgagcagttgctcaaagaaat

SEQ ID NO: 393918 - DNA, 75 bp, synthetic construct
  source 1..75: mol_type = other DNA
cgggcggtctgggtactgcaaccgtcagcattaagtccggtgagcatgttctcatcgataacagcgaagctgttt

SEQ ID NO: 393919 - DNA, 75 bp, synthetic construct
  source 1..75: mol_type = other DNA
atcaactcactgcaactggtttcaacgggcggtctgggtactgcaaccgtcagcattaagtccggtgagcatgtt

SEQ ID NO: 393920 - DNA, 75 bp, synthetic construct
  source 1..75: mol_type = other DNA
ttcccaaaaatgcagcggggagcaagagcgacggaacaccggtacaggcttattcttcattaatcggtaactgcc

SEQ ID NO: 393921 - DNA, 75 bp, synthetic construct
  source 1..75: mol_type = other DNA
cgtcagcgttaaatctggcaagcatgagctcattggtgacagtggtgcagtaactgccagctttgctaaatatgt

SEQ ID NO: 393922 - DNA, 75 bp, synthetic construct
  source 1..75: mol_type = other DNA
cagcattaagtccggtgagcatgttctcatcgataacagcgaagctgtttctgcaaaatttgccagatatgtgcc

SEQ ID NO: 393923 - DNA, 75 bp, synthetic construct
  source 1..75: mol_type = other DNA
cactgagtgaacgggtctatacgggtacgcacggtaatgagtcggtggcagaaggcgtatttacggtgaatgctg

SEQ ID NO: 393924 - DNA, 75 bp, synthetic construct
  source 1..75: mol_type = other DNA
ggttgggaaaatatcatagagggttgcgttaagcattttgctgaacatactgcatataatttttctgatattgac

SEQ ID NO: 393925 - DNA, 75 bp, synthetic construct
  source 1..75: mol_type = other DNA
cacgtggtcttgtagccgcaatccaggccgtagatgccgcctgcaaagcagccggggtgacctgtattggttatc

SEQ ID NO: 393926 - DNA, 75 bp, synthetic construct
  source 1..75: mol_type = other DNA
ttagatgaacgtcaggctgtttccattaacaaacacaattttggtgcggtgatggctgaagcaaacattggcctc

SEQ ID NO: 393927 - DNA, 75 bp, synthetic construct
  source 1..75: mol_type = other DNA
atgcatatttcaatattagcagagatacctgaggagtttaaagtgaacatatatatcgggtggcttttcaaatta

SEQ ID NO: 393928 - DNA, 75 bp, synthetic construct
  source 1..75: mol_type = other DNA
ccaagggacttggcggcacagcaactgtcagcgttaaatctggcgaacatgaactcattggtgacagtggtgcag

SEQ ID NO: 393929 - DNA, 75 bp, synthetic construct
  source 1..75: mol_type = other DNA
tacgcacggtaatgagtcggtggcagaaggtgtgtttacagtgaacgctgcggaagcggacagtgttattcatct

SEQ ID NO: 393930 - DNA, 75 bp, synthetic construct
  source 1..75: mol_type = other DNA
gcgctacgtaacagattgaagtacgataataacgatcgcccttttgttgacgtctttatgctgagtcatccggat

SEQ ID NO: 393931 - DNA, 75 bp, synthetic construct
  source 1..75: mol_type = other DNA
cttgtgccggttataaccaggacccggtgaaatttatttccagagcaggcgtacccggtatcggtgcttcatttt

SEQ ID NO: 393932 - DNA, 75 bp, synthetic construct
  source 1..75: mol_type = other DNA
atgaaaacaggagaaacggcgaagcatcaccagatttttgatggttataaaaaggttggtttgggagaagcggct

SEQ ID NO: 393933 - DNA, 75 bp, synthetic construct
  source 1..75: mol_type = other DNA
tcggcgcaccaggcattgcacaggatgtagtaacccatttcccgattgcatttccaaacagatgtctgcgtgttt

SEQ ID NO: 393934 - DNA, 75 bp, synthetic construct
  source 1..75: mol_type = other DNA
tattacgcttattgctttttccgccatcagcatggtgtgtggattcatttattcaaagtacattgttttcaagga

SEQ ID NO: 393935 - DNA, 75 bp, synthetic construct
  source 1..75: mol_type = other DNA
atgttaaagctatttgcaaagtacacctcgattggtgtgctaaacacacttatacactgggtggtttttggtatt

SEQ ID NO: 393936 - DNA, 75 bp, synthetic construct
  source 1..75: mol_type = other DNA
ggattggcgctcgacattaacgatatgacgcaggttttaaaagcaattcaaaaactgacactgagccgtataaac

SEQ ID NO: 393937 - DNA, 75 bp, synthetic construct
  source 1..75: mol_type = other DNA
cctcttttgccagtggtaatggatggatgaaattacccaacgggaaaatcctgcaatatggtcgtggtgcggtta

SEQ ID NO: 393938 - DNA, 75 bp, synthetic construct
  source 1..75: mol_type = other DNA
aaatcggatggcacggtgaaaacggctctcgaaaaccttggtttgggagaagcggctaaaaggaatgtagggaca

SEQ ID NO: 393939 - DNA, 75 bp, synthetic construct
  source 1..75: mol_type = other DNA
atctggatgatgactactttgacatgttgcaggaagagctttgcagcgtggtggaggcatccggtgccagcctgg

SEQ ID NO: 393940 - DNA, 75 bp, synthetic construct
  source 1..75: mol_type = other DNA
gttgaggcatccggtgccagtcttgagaaggcgcggcacgaccagctgcttaccgcgcttcgtgcgctgctgtta

SEQ ID NO: 393941 - DNA, 75 bp, synthetic construct
  source 1..75: mol_type = other DNA
ataacgttcacgtttcaatgatcgtggatgaccaggtcactaataccggtttttatgtccgctgccagatgtacg

SEQ ID NO: 393942 - DNA, 75 bp, synthetic construct
  source 1..75: mol_type = other DNA
cgcaagaatccgtttggcgatatcaaatctgatggcacggtgaaaacggctctcgaaaaccttggtttgggagaa

SEQ ID NO: 393943 - DNA, 75 bp, synthetic construct
  source 1..75: mol_type = other DNA
aagcatcgactacaacgatgcgctacatgttatatgtcgggttcatgggaacactgagtgcaactgttggatggg

SEQ ID NO: 393944 - DNA, 75 bp, synthetic construct
  source 1..75: mol_type = other DNA
cgcaccataaaactaaaaatatcaagctgatggccattgttcaccgtctacagcagattatggtaaacgaaaatc

SEQ ID NO: 393945 - DNA, 75 bp, synthetic construct
  source 1..75: mol_type = other DNA
atgagtcaaccaagatgcaccttggtcagtaatctcatgcgagataccacatataacaccaaaagtgtcaggttg

SEQ ID NO: 393946 - DNA, 75 bp, synthetic construct
  source 1..75: mol_type = other DNA
tgccgaaatagtccgggataattacgggcggcttaactatatcggtcagtccagagttgcgccaccaccacgcag

SEQ ID NO: 393947 - DNA, 75 bp, synthetic construct
  source 1..75: mol_type = other DNA
gtttatcgacccggttgccatgtcgcaaattacgcgcattgaaatccccggtgtgaccggcgtattaaccggcat

SEQ ID NO: 393948 - DNA, 75 bp, synthetic construct
  source 1..75: mol_type = other DNA
cgtccgggataatcaccgcaaatacagcgatatcagcaatccaaaaattgaggtgtttcggccaccaaatatggc

SEQ ID NO: 393949 - DNA, 75 bp, synthetic construct
  source 1..75: mol_type = other DNA
cgcagcataagaacaacagcataaaactgatgggtattgtgcatcgactgcaacaaataatggtcaatgagaatc

SEQ ID NO: 393950 - DNA, 75 bp, synthetic construct
  source 1..75: mol_type = other DNA
ccagcccggcagcactgctcatcggctggggtattactggcgctggcattttattgctggcctttgccatgctga

SEQ ID NO: 393951 - DNA, 75 bp, synthetic construct
  source 1..75: mol_type = other DNA
aaaccgggggataatcccttgttgctaaaacggctttatatcttaagaacggattcgctggagacgatgtcgcgg

SEQ ID NO: 393952 - DNA, 75 bp, synthetic construct
  source 1..75: mol_type = other DNA
tcggtgtgctggattatgaagggattaacagcactacatttcgtcttctgaagttaaataaaaattttgaattgt

SEQ ID NO: 393953 - DNA, 75 bp, synthetic construct
  source 1..75: mol_type = other DNA
tgccgaaatagtcagggataattacggcaagctggatagcatcagcaggtcgaaacaatacgcaccaccaccacg

SEQ ID NO: 393954 - DNA, 75 bp, synthetic construct
  source 1..75: mol_type = other DNA
taattttaatggcctgggaatcagcattcatgatatctcagctcaaaaaatatctcttttaaattttcaaaaata

SEQ ID NO: 393955 - DNA, 75 bp, synthetic construct
  source 1..75: mol_type = other DNA
atcaaagaatgtatcgaaaatgatatttcttcaacacctacgataggataccggcctcttctcctacaaaagatt

SEQ ID NO: 393956 - DNA, 75 bp, synthetic construct
  source 1..75: mol_type = other DNA
gcatgatgacctcccagcagcgcctcctttctgatatctctcacgaactgcgcacgccactgacgcgcctgcaac

SEQ ID NO: 393957 - DNA, 75 bp, synthetic construct
  source 1..75: mol_type = other DNA
aagccaaccagttgtggagcgaagtgctggataacgcagcgttcgaagcggagcagatgggcaagtcgtttaccg

SEQ ID NO: 393958 - DNA, 75 bp, synthetic construct
  source 1..75: mol_type = other DNA
gataaagacggtatcaccattacggtggatgacgatggtcctggcgttagcccggaagatcgcgaacagattttc

SEQ ID NO: 393959 - DNA, 75 bp, synthetic construct
  source 1..75: mol_type = other DNA
catgccgagtaatgttgggggatttggtgatgttgaaaaagccagccgcgtctttgtccgcaacgaactgatgcc

SEQ ID NO: 393960 - DNA, 75 bp, synthetic construct
  source 1..75: mol_type = other DNA
cagatcaccgcaaaggatgagttcatgaatgttaaggcggcatcccgtgatgatgtgctggctgcgcaccgcgtt

SEQ ID NO: 393961 - DNA, 75 bp, synthetic construct
  source 1..75: mol_type = other DNA
cgtgatgatgtgctggctgcgcaccgcgttccaccgcaactgatgggggcgatgccgggcgaaaaaagtgcgttt

SEQ ID NO: 393962 - DNA, 75 bp, synthetic construct
  source 1..75: mol_type = other DNA
gaccgctggtatgagccgccggtgagctttgacggactggcgcggacctatcgcgctgccgtgcatcacagttca

SEQ ID NO: 393963 - DNA, 75 bp, synthetic construct
  source 1..75: mol_type = other DNA
ggtgattttgtcgagcgccatccttcggtaaaaatgctggcgctttctttcctgattctggtgggcttcaccttg

SEQ ID NO: 393964 - DNA, 75 bp, synthetic construct
  source 1..75: mol_type = other DNA
taccgaaaggttacatctacttcgcaatgttcttctccattgcagtagaaagcctcaacctgattcgcaataaaa

SEQ ID NO: 393965 - DNA, 75 bp, synthetic construct
  source 1..75: mol_type = other DNA
gctcaggggaacttacgtcagcacccggaactggaagcggggccacaagaatttcttgccgcaggtgccagtttt

SEQ ID NO: 393966 - DNA, 75 bp, synthetic construct
  source 1..75: mol_type = other DNA
ctttggtgaagttatttcgctggagcctgcactggcaaaatacacccgacgcgggcttgaccttgaaacatactg

SEQ ID NO: 393967 - DNA, 75 bp, synthetic construct
  source 1..75: mol_type = other DNA
aatgccgggcgaaaaaagtgcgtttggtgatgtggagaaggccgcgcgggtttacgcaattaacgagctgatgcc

SEQ ID NO: 393968 - DNA, 75 bp, synthetic construct
  source 1..75: mol_type = other DNA
caaactggaacacagagaaaaacaaacccagaggtcaaaaagtagctgcgtatttagctgagaaagggtttcata

SEQ ID NO: 393969 - DNA, 75 bp, synthetic construct
  source 1..75: mol_type = other DNA
atgccaacaataaccactgcacaaattaaaagcacactacagtctgcaaagcaatccgctgcaaataaattgcac

SEQ ID NO: 393970 - DNA, 75 bp, synthetic construct
  source 1..75: mol_type = other DNA
tacagatgccagagcagcgcgaaaaactcgacgggttgtatgaatgtattctctgcgcatgttgttcaacctctt

SEQ ID NO: 393971 - DNA, 75 bp, synthetic construct
  source 1..75: mol_type = other DNA
acacagtggtatagaacgtcttggaaaagatttggttaacaatccaagagttaagcaactgcttgcttataaata

SEQ ID NO: 393972 - DNA, 75 bp, synthetic construct
  source 1..75: mol_type = other DNA
ggtaataagttacagaatttacctaaccttgataatatcggtgcagggttagatactgtatcgggtattttatct

SEQ ID NO: 393973 - DNA, 75 bp, synthetic construct
  source 1..75: mol_type = other DNA
gcaacgtggcggcggtcgtggacagggcggtggtcgcggtcaacagcaaccacgccgtgcggaaagtggtacgaa

SEQ ID NO: 393974 - DNA, 75 bp, synthetic construct
  source 1..75: mol_type = other DNA
ctctatggcggtgatggcaacgataagttaattgggggagcaggtaataattacctgaacggcggagatggagat

SEQ ID NO: 393975 - DNA, 75 bp, synthetic construct
  source 1..75: mol_type = other DNA
tattcacccgaaagcattttagataaaataaatgtaaaaaaagaaaaggaaaagaaattgagtgttttgttcact

SEQ ID NO: 393976 - DNA, 75 bp, synthetic construct
  source 1..75: mol_type = other DNA
ataatgataagcgggtcgataattgtggaagaaattacaatgctggttggagtggatgctacgaatcatattcgg

SEQ ID NO: 393977 - DNA, 75 bp, synthetic construct
  source 1..75: mol_type = other DNA
atagcctggtgctctcccttgatgacgataacagggaagttatcgtcatggggaaaggtattggcttcaacagca

SEQ ID NO: 393978 - DNA, 75 bp, synthetic construct
  source 1..75: mol_type = other DNA
ccccggaatatttttttagtaaaaaatataaaggtgtcagtaaaagatggcaattgacatcttcttcgtcctata

SEQ ID NO: 393979 - DNA, 75 bp, synthetic construct
  source 1..75: mol_type = other DNA
ctggtatacgtacgcctgtaaccagaaatttatcgttcttacagggcggtgctataattgataatgataaatatt

SEQ ID NO: 393980 - DNA, 75 bp, synthetic construct
  source 1..75: mol_type = other DNA
aaggcgcatcgccgggcgacttcccgcgcgaggactatgaaacaaactgggaaggacgctttacgcttgccgacc

SEQ ID NO: 393981 - DNA, 75 bp, synthetic construct
  source 1..75: mol_type = other DNA
ctctggtggtggcaaagctccccacagcacaacgtgctcatgcgcgccgtctggggttggcgggagccatggtta

SEQ ID NO: 393982 - DNA, 75 bp, synthetic construct
  source 1..75: mol_type = other DNA
agcgtccgggggctgcacttcaactggttggcaaagtaaatgatatttatgcgcctgaactggaaattgaagtaa

SEQ ID NO: 393983 - DNA, 75 bp, synthetic construct
  source 1..75: mol_type = other DNA
aaagaagcactgattgacgtattaaaacgtccgggtgcagcactgcaactggtcagtaaggttaatgatatttac

SEQ ID NO: 393984 - DNA, 75 bp, synthetic construct
  source 1..75: mol_type = other DNA
gcacaatttcgcgggcaacaggtcaatagcgatctgggtgaaggctttgtaattcataaaatgattctggtaatg

SEQ ID NO: 393985 - DNA, 75 bp, synthetic construct
  source 1..75: mol_type = other DNA
tgccgcgaaccggggcgaaacggccgtgatttccctgcgtgctgacaatgcggatctcgctattgcacgcatcac

SEQ ID NO: 393986 - DNA, 75 bp, synthetic construct
  source 1..75: mol_type = other DNA
agcacacctgagcacataaaatgcagtgagttcaatcggctgttggtcccatttatcggtgaattactggcaggg

SEQ ID NO: 393987 - DNA, 75 bp, synthetic construct
  source 1..75: mol_type = other DNA
ccactgttcctccgagcgaacaactggaacaaatggcgtcgattgtctctgcgacacggtatctgaaaatgagat

SEQ ID NO: 393988 - DNA, 75 bp, synthetic construct
  source 1..75: mol_type = other DNA
tcactgtggaaaacggtaatgctgacggtgttgttctggagtccggtggtcgcctggatgtactggagggccatt

SEQ ID NO: 393989 - DNA, 75 bp, synthetic construct
  source 1..75: mol_type = other DNA
gcaaaaggcgacgccccggtaacgttccataaactgaccaccaataacctcaccggccagggcggcaccatcaat

SEQ ID NO: 393990 - DNA, 75 bp, synthetic construct
  source 1..75: mol_type = other DNA
aactcagtaaaggcgccagtatggtactgaatggtgatgtggtcagtaccggcgatattgttaacgcaggggaga

SEQ ID NO: 393991 - DNA, 75 bp, synthetic construct
  source 1..75: mol_type = other DNA
tttacagctcaatgatatgatttccgccctggaagacatcattaaaaatcaaattccttctgatgttgaaatcat

SEQ ID NO: 393992 - DNA, 75 bp, synthetic construct
  source 1..75: mol_type = other DNA
gaaaatctctggaggaaatcaaagattttctggatctgacagatgagcagttgctgcaggccctggattacgtcc

SEQ ID NO: 393993 - DNA, 75 bp, synthetic construct
  source 1..75: mol_type = other DNA
gatgttgctgaactttttgaagcaatatccacacactatcccagccataagggggtgattatgacgatagcggaa

SEQ ID NO: 393994 - DNA, 75 bp, synthetic construct
  source 1..75: mol_type = other DNA
ttgacaaataaaaatagaaacgtgagaacacatgacgggatcgtaacactagacgaatacctaaaaaggaaattc

SEQ ID NO: 393995 - DNA, 75 bp, synthetic construct
  source 1..75: mol_type = other DNA
ttcagcttcggtgatcccgttcctgttctggaccgccgcgaattactggactatgtggaatgcgtacagatggac

SEQ ID NO: 393996 - DNA, 75 bp, synthetic construct
  source 1..75: mol_type = other DNA
tccagcagataaccgcaaaggatgaattcctgaacatcaaggggagcgcccgcgacgatatccttgctgcccatc

SEQ ID NO: 393997 - DNA, 75 bp, synthetic construct
  source 1..75: mol_type = other DNA
ctcctgcttcgcccggcactggcaaaatatacacgcaggggaagtggcctggatacctactggtatctcaacgac

SEQ ID NO: 393998 - DNA, 75 bp, synthetic construct
  source 1..75: mol_type = other DNA
acggggtacaactgatgcccttcagccagatatcagcaaaggatgagtttttaaatattaaatcagcgacacgcg

SEQ ID NO: 393999 - DNA, 75 bp, synthetic construct
  source 1..75: mol_type = other DNA
gacaatatgtattgcgccgataacggcagatattacgaaacaccggtggactggtacgggcttgcgcgctcattc

SEQ ID NO: 394000 - DNA, 75 bp, synthetic construct
  source 1..75: mol_type = other DNA
gtgttccaccgcaactgatgggggcgatgccgggcgaaaaaagtgcgtttggtgatgtggagaaggccgcgcggg

SEQ ID NO: 394001 - DNA, 75 bp, synthetic construct
  source 1..75: mol_type = other DNA
cctaactctgaagatttatctgttaagcataaagactggcagcaactagtgcataaatactgtcacgaacggtgc

SEQ ID NO: 394002 - DNA, 75 bp, synthetic construct
  source 1..75: mol_type = other DNA
tgcttgaggatatcgactggtcccgtcagaccatcactttgcgagaaactaaaaacggtaagcttcgctgtgtgc

SEQ ID NO: 394003 - DNA, 75 bp, synthetic construct
  source 1..75: mol_type = other DNA
tcttggtgctagcatttatttctctggcttaagtgaaggagcaagttttataaccacctacgttggacataacgc

SEQ ID NO: 394004 - DNA, 75 bp, synthetic construct
  source 1..75: mol_type = other DNA
atggagagaagggctgtggctctggaaaggcaattaaatggaggtgtcgattttttaagtagtgttaataactat

SEQ ID NO: 394005 - DNA, 75 bp, synthetic construct
  source 1..75: mol_type = other DNA
aataaagtctcttattgaaaaatacagcagtgagttggcgaaagtatcaggagcaaaggagatttatgaagaatt

SEQ ID NO: 394006 - DNA, 75 bp, synthetic construct
  source 1..75: mol_type = other DNA
gaagtgcaacgttatctaaagagcggataactgaggaagcacaaagattcttggaaatggtttatggggaagagt

SEQ ID NO: 394007 - DNA, 75 bp, synthetic construct
  source 1..75: mol_type = other DNA
aacgccgggactgaatcaaccgcgcattacccagcgtgtggaacaggtgctggctgatgcatttcacgcacaggc

SEQ ID NO: 394008 - DNA, 75 bp, synthetic construct
  source 1..75: mol_type = other DNA
atgaaggtggcgcgaatcggctgtgaatgcggcgcgaatgtctcgacattctcctgcttcaagctatttgggcca

SEQ ID NO: 394009 - DNA, 75 bp, synthetic construct
  source 1..75: mol_type = other DNA
aacattgtgcgattcgcattaacccgaatcgcagcggtgaagagacggtgctgcggattttgcgtgagagtattg

SEQ ID NO: 394010 - DNA, 75 bp, synthetic construct
  source 1..75: mol_type = other DNA
attcaataattattttagaagggtgattgatgattatatggaagggaaagcaaacaatgtcacattacaaaacaa

SEQ ID NO: 394011 - DNA, 75 bp, synthetic construct
  source 1..75: mol_type = other DNA
attactcaacgtgtagagcaggtgttggctgatgcgtttcatgcgcaagcggcagcgctggtacaaggtgccggc

SEQ ID NO: 394012 - DNA, 75 bp, synthetic construct
  source 1..75: mol_type = other DNA
gcgcagtcgaaagtgttgattgtggagtttcatcagccaattgccgccagggtgctggaagaagcgcagaaacgc

SEQ ID NO: 394013 - DNA, 75 bp, synthetic construct
  source 1..75: mol_type = other DNA
cgacaccggaagccgattcagcgtatgcgctgaaagccgattcgggcgctgtgcagcaggtgatgaccgcaaggc

SEQ ID NO: 394014 - DNA, 75 bp, synthetic construct
  source 1..75: mol_type = other DNA
tcggcctgatttttgccgggttactgatgctggcggtgatccttaactgctttacgggcgttatggcttctacct

SEQ ID NO: 394015 - DNA, 75 bp, synthetic construct
  source 1..75: mol_type = other DNA
gcagcctgaagccgattccgccattcagcgggaagccgatcgggtagtcccggaaaacaccgggcagtctgtggg

SEQ ID NO: 394016 - DNA, 75 bp, synthetic construct
  source 1..75: mol_type = other DNA
gcagtttgcgctggtggatagcatttgtcgccatttccccggcagcgagtttcttactggcggtgatttaggctt

SEQ ID NO: 394017 - DNA, 75 bp, synthetic construct
  source 1..75: mol_type = other DNA
ctggctgctcccggtaagcggcacgaacaaccagcgttgtgtgaatcatatttctgaaccggataccgaaattcc

SEQ ID NO: 394018 - DNA, 75 bp, synthetic construct
  source 1..75: mol_type = other DNA
actatggtccatggcgtaaaaaacgccacgaaccaggcaggggatgttcagaccgtcaatcttggtcagccagca

SEQ ID NO: 394019 - DNA, 75 bp, synthetic construct
  source 1..75: mol_type = other DNA
caggcaatggcggatagccaggtgcggggcgtactgctggacattgacagtccgggcgggcaggccgccggcgcg

SEQ ID NO: 394020 - DNA, 75 bp, synthetic construct
  source 1..75: mol_type = other DNA
gaagcttgacgctcgctataataagagtgatttgatttctcgaatccataaaatatcagaaaatcgtcacagaat

SEQ ID NO: 394021 - DNA, 75 bp, synthetic construct
  source 1..75: mol_type = other DNA
atgggagccgcagcagtcaacgcagtgctggggattgttagaattctcggtgcatactttttttacaggggtatt

SEQ ID NO: 394022 - DNA, 75 bp, synthetic construct
  source 1..75: mol_type = other DNA
tgcctgcccgggaatgactgtggagagcgcccgggctgtgctggctgcgggatcaggtaaggcagaaccggtctc

SEQ ID NO: 394023 - DNA, 75 bp, synthetic construct
  source 1..75: mol_type = other DNA
aaacccgaagaaatccgctttcagtgcctggaaggccagattacgcgagggggtgccaccagaggccatgctgga

SEQ ID NO: 394024 - DNA, 75 bp, synthetic construct
  source 1..75: mol_type = other DNA
tcgagcacgcagaacctgcaccgtttatcgctgacagccagccggatgtgcggatctcagcgatcagcgccgcgt

SEQ ID NO: 394025 - DNA, 75 bp, synthetic construct
  source 1..75: mol_type = other DNA
atgccgcgcataccatccatccgctggcggggcagggagtgaatcttggttatcgtgatgtcgatgccctgattg

SEQ ID NO: 394026 - DNA, 75 bp, synthetic construct
  source 1..75: mol_type = other DNA
gatcagtgcggcttcggtatcattgcttaaaggtttaggcgtctgggacgcggtacaggctatgcgttgccatcc

SEQ ID NO: 394027 - DNA, 75 bp, synthetic construct
  source 1..75: mol_type = other DNA
cggatctcggcgattagtgcggcttcggtatcattgcttaaagggttaggggtctgggatgcagtacaggctatg

SEQ ID NO: 394028 - DNA, 75 bp, synthetic construct
  source 1..75: mol_type = other DNA
tgtggtgtttgacgccgctgaacttaagctaccgctgcttggctatatggtggaaaacaccgtcctgcaacaggc

SEQ ID NO: 394029 - DNA, 75 bp, synthetic construct
  source 1..75: mol_type = other DNA
tcccggcgacagcacctggcagcaatttaccccggacggaccgcgtgcgtttctgccgttgtttgataactgggc

SEQ ID NO: 394030 - DNA, 75 bp, synthetic construct
  source 1..75: mol_type = other DNA
tggtcgtgaaattaaatctgataacatacctcataaaaataatgattggtcaggttatataaaagctagttctat

SEQ ID NO: 394031 - DNA, 75 bp, synthetic construct
  source 1..75: mol_type = other DNA
gctgttacggggataatttcaggtatccttgaggcttcaaaacaggcaatgtttgaacatgtcgccagtaaaatg

SEQ ID NO: 394032 - DNA, 75 bp, synthetic construct
  source 1..75: mol_type = other DNA
atggtgataaaggtaatgatacgctgaggggcggaaacggggatgaccagctctatggcggtgatggcaatgata

SEQ ID NO: 394033 - DNA, 75 bp, synthetic construct
  source 1..75: mol_type = other DNA
ggaggaatggtcggcggcgcactggcgctgggactggctcagcacggattttcggtaacggttatcgaacatgcc

SEQ ID NO: 394034 - DNA, 75 bp, synthetic construct
  source 1..75: mol_type = other DNA
caggttatataaaagctagttctatagcatcagaaaaaaatatggttaatatcaccagtgttgccaatgatatta

SEQ ID NO: 394035 - DNA, 75 bp, synthetic construct
  source 1..75: mol_type = other DNA
ttgcagtatgtgcaaccagggcttgcgctggtgggcgatgccgcgcacaccattcatccgttggcggggcagggg

SEQ ID NO: 394036 - DNA, 75 bp, synthetic construct
  source 1..75: mol_type = other DNA
ccaacgccattaacagtctgggaatgctaacaccgcttcaatatttttgcgtttttaacgccaacaccggggaag

SEQ ID NO: 394037 - DNA, 75 bp, synthetic construct
  source 1..75: mol_type = other DNA
actgccgtaaaacatggcagctacagttcacttacaccgcctctcaacccggtacacaccagaaaatcattgata

SEQ ID NO: 394038 - DNA, 75 bp, synthetic construct
  source 1..75: mol_type = other DNA
ctcgtggatcaaagcgccacgctggcgcggtaacgcgatggaagtggggccgctggcgcgcacgttaatcgctta

SEQ ID NO: 394039 - DNA, 75 bp, synthetic construct
  source 1..75: mol_type = other DNA
ctaggcgcatgtgcattttccgctgtaagcgcagaacacccggcagcgaaacacaagaccttgtgcttaggtagc

SEQ ID NO: 394040 - DNA, 75 bp, synthetic construct
  source 1..75: mol_type = other DNA
ctgggcgtatgcgccttttccgctctaggtgcaaaacaaccgccaacaaaacaaaatgccttatgttcaggtaac

SEQ ID NO: 394041 - DNA, 75 bp, synthetic construct
  source 1..75: mol_type = other DNA
accacaaccccgtcagagagtgcaagcaggtaatggacaagaaagcgacgtttcgccatgtgtggcaggaaagtg

SEQ ID NO: 394042 - DNA, 75 bp, synthetic construct
  source 1..75: mol_type = other DNA
atgggctttgctcactatcttgaagctctcgacttccagcgcgaaattgtcaaaatccacgcggtcttcggcggt

SEQ ID NO: 394043 - DNA, 75 bp, synthetic construct
  source 1..75: mol_type = other DNA
cgcattttgtgccgcgcgcacgaagcgcagtgggccgcaggtaagttgcagtatttcttcgacaagctgatgacc

SEQ ID NO: 394044 - DNA, 75 bp, synthetic construct
  source 1..75: mol_type = other DNA
aagcgatcctcaacgttgaagttatccgcaaaaatatggacgagcctcgggaattttggacgtacgattgccgga

SEQ ID NO: 394045 - DNA, 75 bp, synthetic construct
  source 1..75: mol_type = other DNA
gccctggcgtttcgtaccacggaagaaagtctccgtcggtgagctggcgggctggtggctttattatctacgagg

SEQ ID NO: 394046 - DNA, 75 bp, synthetic construct
  source 1..75: mol_type = other DNA
caacagatgcgaaaacggctatccgtgaaatgaaagcgaagctgcgacaacagatcggcgatgtacaacaggtct

SEQ ID NO: 394047 - DNA, 75 bp, synthetic construct
  source 1..75: mol_type = other DNA
gcaggcaggcttattttcgatgagcgccaagaaagcgtttcttgaacatccggagctcgattacaacctacagtt

SEQ ID NO: 394048 - DNA, 75 bp, synthetic construct
  source 1..75: mol_type = other DNA
cgaagccattctgtatcccggcgtggataattttgtgaaatatttccggctgcaaaattactggactcagcaggc

SEQ ID NO: 394049 - DNA, 75 bp, synthetic construct
  source 1..75: mol_type = other DNA
ttccggaaggggaggtctttttaattgggcaaacggaccactcatgggactcacgtttttgggggccggttaagt

SEQ ID NO: 394050 - DNA, 75 bp, synthetic construct
  source 1..75: mol_type = other DNA
acatgcgagcgcttttacgttgctcagaagagtatcactggagataagagtgaacgtcttacgcgaaaactctct

SEQ ID NO: 394051 - DNA, 75 bp, synthetic construct
  source 1..75: mol_type = other DNA
tagcactgctattcctgaagatgcaacggggcaacggtgtatcgaagggttgaatttagcagaaatggatttaac

SEQ ID NO: 394052 - DNA, 75 bp, synthetic construct
  source 1..75: mol_type = other DNA
gttggcgatctaaaaataatatttaatcgacaagatgataatgaaagcgtattaactgttaaacacaaagatata

SEQ ID NO: 394053 - DNA, 75 bp, synthetic construct
  source 1..75: mol_type = other DNA
gatcgtgccatgctcgattatcttgatatcaatcattttgatgatgtttataaaggccctggcgacagttttttc

SEQ ID NO: 394054 - DNA, 75 bp, synthetic construct
  source 1..75: mol_type = other DNA
atatacaacgcaaagagcattcaatgagttatatattaattcagattgggtatgcaaatctagtcaggattatga

SEQ ID NO: 394055 - DNA, 75 bp, synthetic construct
  source 1..75: mol_type = other DNA
gtatggaagtcaatattggaaaaatgccttgacttcgttcgagagagtaaaagttatataccatctgataaagaa

SEQ ID NO: 394056 - DNA, 75 bp, synthetic construct
  source 1..75: mol_type = other DNA
ttaatccactgttgccggattcccggactgaccaggggcaggcgcagcgcctcggcgtgaaatatttcccggcca

SEQ ID NO: 394057 - DNA, 75 bp, synthetic construct
  source 1..75: mol_type = other DNA
ccgaccaacaaaccaaacctggtgtgcggtccggtacaaatctgctggcataaattcgcccgctactgggatgtg

SEQ ID NO: 394058 - DNA, 75 bp, synthetic construct
  source 1..75: mol_type = other DNA
gctggcgctgcaaaaactcaatgtcttgaaccgccccgggtttcctggagagtgttttatctgtgaactcaggct

SEQ ID NO: 394059 - DNA, 75 bp, synthetic construct
  source 1..75: mol_type = other DNA
ttgtcgccatttatgggcaaaccttccccgccatgctcgactatccggaagtggtcgtgcgcttaacgctgtggt

SEQ ID NO: 394060 - DNA, 75 bp, synthetic construct
  source 1..75: mol_type = other DNA
acctggccactttctgccagacctgggacgacgagaatgtccataaattgatggatttttcgatcaaaaaaaact

SEQ ID NO: 394061 - DNA, 75 bp, synthetic construct
  source 1..75: mol_type = other DNA
acctggccactttctgccagacctgggacgacgagaaagtccataaattgatggatttctcgatgaaaaaaaact

SEQ ID NO: 394062 - DNA, 75 bp, synthetic construct
  source 1..75: mol_type = other DNA
aaaccaacggataaaccaaacctggtgtgcggtccggtacaaatctgctggcataaattcgcccgctactgggat

SEQ ID NO: 394063 - DNA, 75 bp, synthetic construct
  source 1..75: mol_type = other DNA
aaattcccggtacgcctgccgccgcagccaccgccattgacggatatgagctgacgaagcagggaaaagcagggc

SEQ ID NO: 394064 - DNA, 75 bp, synthetic construct
  source 1..75: mol_type = other DNA
ttcatgcaaaaaggggggtatccggcgtcacccgtagtgctggcattgattatggggccaatggcggaaagtaat

SEQ ID NO: 394065 - DNA, 75 bp, synthetic construct
  source 1..75: mol_type = other DNA
agacggcaacaaagcgggcgctgtatgaagccattctgtatcccggcgtggataattttgtgaaatatttccggc

SEQ ID NO: 394066 - DNA, 75 bp, synthetic construct
  source 1..75: mol_type = other DNA
gccagttatcctgtcctcaagcgttaccagatgcggcgcatggcggataacttcattatgcaaagcggtatggat

SEQ ID NO: 394067 - DNA, 75 bp, synthetic construct
  source 1..75: mol_type = other DNA
ttcctttagtggcggaacgctcagcattatcgtgctgatgtttctctctccggtacttgccagttgggcgctgaa

SEQ ID NO: 394068 - DNA, 75 bp, synthetic construct
  source 1..75: mol_type = other DNA
atgtttgaaagtgaacttttaactcagggtttttcgacattactcaataatcctcaggcgctgctgtttgccact

SEQ ID NO: 394069 - DNA, 75 bp, synthetic construct
  source 1..75: mol_type = other DNA
aagataaagatataagtcatcactgcaatgttaaaaccgagcaactgcagcagtttattaaaataatggaacaaa

SEQ ID NO: 394070 - DNA, 75 bp, synthetic construct
  source 1..75: mol_type = other DNA
tgagagagcatctctgaacaatgatgatatcgagaaaccagccaataacagtaccgagaaacaggccaataacag

SEQ ID NO: 394071 - DNA, 75 bp, synthetic construct
  source 1..75: mol_type = other DNA
atcgagaaacaagccaatgacagtatcgagaaacaagccagtgacagtatcgagaaacaagccaatgacagtacc

SEQ ID NO: 394072 - DNA, 75 bp, synthetic construct
  source 1..75: mol_type = other DNA
atgggctccacatttaacatatacggcgatattcttccaacactcgacatgtattcgggactaaaaccttgccat

SEQ ID NO: 394073 - DNA, 75 bp, synthetic construct
  source 1..75: mol_type = other DNA
tcaatgccaaagtgaataatgtttctcttaagaatgcatatctttacaatgataatatcaataaaaaagccaatg

SEQ ID NO: 394074 - DNA, 75 bp, synthetic construct
  source 1..75: mol_type = other DNA
aatcaattaaccatacgggataacaataacgagactgaaactttctcgttcacaaacctacaatgggaaaatgtg

SEQ ID NO: 394075 - DNA, 75 bp, synthetic construct
  source 1..75: mol_type = other DNA
ctctatctctgatgcaggaattacaatgaccttcacgataggtgatgttgtcatcaatactattagcactgctat

SEQ ID NO: 394076 - DNA, 75 bp, synthetic construct
  source 1..75: mol_type = other DNA
ttctcacgttatcaataaagatcgcttcgtcagtgaagcgattaccgccaaagttgaagcggcgattaaagaact

SEQ ID NO: 394077 - DNA, 75 bp, synthetic construct
  source 1..75: mol_type = other DNA
ttcgccagctcgcgctgtttaaagagatgcagggcgtgaaaagcaataaaggactgaatgagcaggacaagctgg

SEQ ID NO: 394078 - DNA, 75 bp, synthetic construct
  source 1..75: mol_type = other DNA
tcaggcgcaactggatgacctggaccgcctgaacaacgcgttaagcgcgatgagttcggtgagtaaagcggtgca

SEQ ID NO: 394079 - DNA, 75 bp, synthetic construct
  source 1..75: mol_type = other DNA
attaattagtgtagctcgtttttcagagcaaaaagatcatgaaactttatttcacgcactcaagttaatttctac

SEQ ID NO: 394080 - DNA, 75 bp, synthetic construct
  source 1..75: mol_type = other DNA
caacaattttttataaacttcttcagaataaactatactttgataagttaaataataaaacaatagtggtaatta

SEQ ID NO: 394081 - DNA, 75 bp, synthetic construct
  source 1..75: mol_type = other DNA
gaactggtgcgtggcgttgaacgcagctgcgcggttatagtctcgtcctttgcaataccgaaggcgatgaacagc

SEQ ID NO: 394082 - DNA, 75 bp, synthetic construct
  source 1..75: mol_type = other DNA
atggactcaacatttaacatataccaggatattctcccagcattcaacatgtattcgggactaaaaccttgccat

SEQ ID NO: 394083 - DNA, 75 bp, synthetic construct
  source 1..75: mol_type = other DNA
aacaggttggtttaacgagctgctttgtgctgagctggatcactttctggatgaagttaaagccggaaacatgcc

SEQ ID NO: 394084 - DNA, 75 bp, synthetic construct
  source 1..75: mol_type = other DNA
ctgcatatgtttcccacatcttaaatttaataaaatccaaggagtcaagggcatatgcttatgaaaatgctcatg

SEQ ID NO: 394085 - DNA, 75 bp, synthetic construct
  source 1..75: mol_type = other DNA
ggtagacaaaagcagtggttatgtagatgtagtaaaaccatctgatggtacggagaaaccagaggttgttgagga

SEQ ID NO: 394086 - DNA, 75 bp, synthetic construct
  source 1..75: mol_type = other DNA
acacggataaaatgattcgctacatctccgacctcctgattaaaggaaacggattcggtgacatccataactcaa

SEQ ID NO: 394087 - DNA, 75 bp, synthetic construct
  source 1..75: mol_type = other DNA
ttgatgaccccgcgaaagattacaaaaccgcatcgtctccaacttaccaggaagcggtgatggactggtatgaca

SEQ ID NO: 394088 - DNA, 75 bp, synthetic construct
  source 1..75: mol_type = other DNA
gaagataaacggcatcgtcatcatcctgacacgctggcatcaaaacgatctcgccggacagttattaaaactagc

SEQ ID NO: 394089 - DNA, 75 bp, synthetic construct
  source 1..75: mol_type = other DNA
taccggtgattactggtatgacgtggatgacgtaaaagcgtgggtcggcaatacgctgaggacgtttgattttga

SEQ ID NO: 394090 - DNA, 75 bp, synthetic construct
  source 1..75: mol_type = other DNA
taacgcccggggcaatgtccgggaagcgattgcagcccttcaggctgccgggcgttttgaggaaaacgaagagct

SEQ ID NO: 394091 - DNA, 75 bp, synthetic construct
  source 1..75: mol_type = other DNA
tgcatcggaagcggattctctttatgaagagaatgagcgtttgcagacggagattgatcagctcaatcgcactgg

SEQ ID NO: 394092 - DNA, 75 bp, synthetic construct
  source 1..75: mol_type = other DNA
aaaaggaaactgaacaggaacgtctcttgcattatggtgacggcaaattatcaggtaagagtgatgaaattggga

SEQ ID NO: 394093 - DNA, 75 bp, synthetic construct
  source 1..75: mol_type = other DNA
ttgcatcggaagcggattctctttatgaagagaatgagcgtttgcagacggagattgatcagctcaatcgcacag

SEQ ID NO: 394094 - DNA, 75 bp, synthetic construct
  source 1..75: mol_type = other DNA
catgctttccctgtaacccgcagttcactggctgcattattgcgcgacctcagtatgctgacaccggggaactgc

SEQ ID NO: 394095 - DNA, 75 bp, synthetic construct
  source 1..75: mol_type = other DNA
cccgcgcatttctgggcgccagcgatgctgaatttacccgcattctggaagcgcagttgcgcagcctgcattacg

SEQ ID NO: 394096 - DNA, 75 bp, synthetic construct
  source 1..75: mol_type = other DNA
tggccatcaggattgacggcaacgggaaaagtgtccgccttttctttaaaaaagggaattacaacaccggctctc

SEQ ID NO: 394097 - DNA, 75 bp, synthetic construct
  source 1..75: mol_type = other DNA
gctgcagacggcaacaaagcgggcgctgtacgaagccattctgtatcccggcgtggataattttgtgaaatattt

SEQ ID NO: 394098 - DNA, 75 bp, synthetic construct
  source 1..75: mol_type = other DNA
atgaacgatgaaatgaaaggtaaaagcggcaaggtcaaagtgatgtatgtccgcagtgatgatgattctgataaa

SEQ ID NO: 394099 - DNA, 75 bp, synthetic construct
  source 1..75: mol_type = other DNA
agatctcggcaaagcgtaccacggacagaagatgattcctgcccgatgcgtacatgcgcacatgcttttacttga

SEQ ID NO: 394100 - DNA, 75 bp, synthetic construct
  source 1..75: mol_type = other DNA
tcgccaaaagtacacgattcaatttcagcattaagcttttcaaatatgaaatcacaattacgattgatgatggta

SEQ ID NO: 394101 - DNA, 75 bp, synthetic construct
  source 1..75: mol_type = other DNA
ccctgttcacgccgccaatctgaacgaggggcagatcgcggcaattcaggagcacagggcggcgcgtcagcaaga

SEQ ID NO: 394102 - DNA, 75 bp, synthetic construct
  source 1..75: mol_type = other DNA
atgatggtattgaacgcgatccgcagcaattttttaaacgcgccaacagcaaatcaccggagcggggaggcgcaa

SEQ ID NO: 394103 - DNA, 75 bp, synthetic construct
  source 1..75: mol_type = other DNA
tcgtgttgctgttatgaatgctgatcaggtttgtgcaattctggcacggagaaacgcggaacgggagaagctaga

SEQ ID NO: 394104 - DNA, 75 bp, synthetic construct
  source 1..75: mol_type = other DNA
aggatgcgcagaagcgtaatctcggtatggttggtatctggtcaatcgcgcgcgacctgccgggcggcactaacc

SEQ ID NO: 394105 - DNA, 75 bp, synthetic construct
  source 1..75: mol_type = other DNA
ggtaaggctcagagctatagcaacgaagagctgaataatgcgccgcagtttaatccagaaacgctttatgccagc

SEQ ID NO: 394106 - DNA, 75 bp, synthetic construct
  source 1..75: mol_type = other DNA
ttataacgatgcacattataaaacttctgtcgatcaagacgcatggggctttgtcccgggcggcgataacccgtg

SEQ ID NO: 394107 - DNA, 75 bp, synthetic construct
  source 1..75: mol_type = other DNA
tccagcgagcagggtaaaccgctgttcaaaaccagtctgccagcgaaaatggtactggtgctgggtcaggaatat

SEQ ID NO: 394108 - DNA, 75 bp, synthetic construct
  source 1..75: mol_type = other DNA
ccggattaacccctgcaggtggtgttcagccgcccaacccgattatggcgggtctgatgaccaccgtcattgcat

SEQ ID NO: 394109 - DNA, 75 bp, synthetic construct
  source 1..75: mol_type = other DNA
cggcggaagcaaaagcgaagtagccattacaaagcctatctacgggtgggcttgataatggcttataccctacac

SEQ ID NO: 394110 - DNA, 75 bp, synthetic construct
  source 1..75: mol_type = other DNA
atgagtgatcgtgtcattgaatgcgcctccagagcggggcgcgacttctcagcgttcatgaaaggcgagaagggc

SEQ ID NO: 394111 - DNA, 75 bp, synthetic construct
  source 1..75: mol_type = other DNA
atggctcgtaaatggttgaacttgtttgccggggcggcattctctttcgctgttgctggcaatgtactggcagat

SEQ ID NO: 394112 - DNA, 75 bp, synthetic construct
  source 1..75: mol_type = other DNA
aaagcattttatgattatttgaaagggccgcaggctgcggaaatctttaaacgttacggatttacaaccaagtaa

SEQ ID NO: 394113 - DNA, 75 bp, synthetic construct
  source 1..75: mol_type = other DNA
ttaattaccggcggtctgacagaactggctttcgccgggttaacccctgccggcggcgttcaaccgcccaacccg

SEQ ID NO: 394114 - DNA, 75 bp, synthetic construct
  source 1..75: mol_type = other DNA
tattgatgcaatgcagagaattataaaaaaatatccagatattttctctgttgaaactaaaaaagtgttttcttg

SEQ ID NO: 394115 - DNA, 75 bp, synthetic construct
  source 1..75: mol_type = other DNA
aacgttgccgggctgaatatctctgttgcaacaggcgttttgcttggtgaatggtggcgtcagaataaagcctga

SEQ ID NO: 394116 - DNA, 75 bp, synthetic construct
  source 1..75: mol_type = other DNA
ggcactgttccagagccgtccggaagcgattgttcgcgcctggtttatccagagtgtaacgccgcgttttaaaga

SEQ ID NO: 394117 - DNA, 75 bp, synthetic construct
  source 1..75: mol_type = other DNA
cttcatgtgcgcgacatggcaatgaatcaggcaaaaattattgcttctaatgacagtatcatcagcgcagtgaaa

SEQ ID NO: 394118 - DNA, 75 bp, synthetic construct
  source 1..75: mol_type = other DNA
agtttgcatttttccaaagactggcatttccgctgcgtatctttttgctgattctggtgttctcaatatttgtca

SEQ ID NO: 394119 - DNA, 75 bp, synthetic construct
  source 1..75: mol_type = other DNA
ttggaacgcggccagaagctattaaaatgattcctgttgttcaggaattgaaaaaggaaaaagactttattgtga

SEQ ID NO: 394120 - DNA, 75 bp, synthetic construct
  source 1..75: mol_type = other DNA
agacgatcagattggtcagtacagcattatcgctgaacgctatggccgccagacatcggagttcccggacaagct

SEQ ID NO: 394121 - DNA, 75 bp, synthetic construct
  source 1..75: mol_type = other DNA
tccgctcagaactactcgattcacgttttggtgccaagacgatttcgactatcgctgactcaaaacgatttccgc

SEQ ID NO: 394122 - DNA, 75 bp, synthetic construct
  source 1..75: mol_type = other DNA
tccgctcagaactactcgattcacgttttggtgccaagaccatttccactatcgctgactcaaaacgatttccgc

SEQ ID NO: 394123 - DNA, 75 bp, synthetic construct
  source 1..75: mol_type = other DNA
tccgctcagaactactcgattcacgttttggtgccaagacaatttcaactatcgctgactcaaaacgatttccgc

SEQ ID NO: 394124 - DNA, 75 bp, synthetic construct
  source 1..75: mol_type = other DNA
tccgctcagaactactcgattcacgttttggtgccaaggcgatttcaactatcgctgactcaaaacgatttccgc

SEQ ID NO: 394125 - DNA, 75 bp, synthetic construct
  source 1..75: mol_type = other DNA
tccgctcagaactactcgattcacgttttggtgccaagcccatttcaactatcgctgactcaaaacgatttccgc

SEQ ID NO: 394126 - DNA, 75 bp, synthetic construct
  source 1..75: mol_type = other DNA
tccgctcagaactactcgattcacgttttggtgccaagtcgatttctactatcgctgactcaaaacgatttccgc

SEQ ID NO: 394127 - DNA, 75 bp, synthetic construct
  source 1..75: mol_type = other DNA
gatcggaactactcgattcacgttttggtgctaaggccatttcgactatcgcagaatcaaaacgctttccgctgc

SEQ ID NO: 394128 - DNA, 75 bp, synthetic construct
  source 1..75: mol_type = other DNA
acctggccactttctgccagacctgggacgacgagaaggtccataaattgatggatttgtcgataaaaaaaaact

SEQ ID NO: 394129 - DNA, 75 bp, synthetic construct
  source 1..75: mol_type = other DNA
acctggccactttctgccagacctgggacgacgagaacgtccataaattgatggatttatcgatgaaaaaaaact

SEQ ID NO: 394130 - DNA, 75 bp, synthetic construct
  source 1..75: mol_type = other DNA
gttcatctgcaccggtcgcccggatgaaggtattccggcggtctgcttcaggctgaaagacggagaagatccggg

SEQ ID NO: 394131 - DNA, 75 bp, synthetic construct
  source 1..75: mol_type = other DNA
gctctgaactactcgattcacgttttggtgcaaaggccatttcgactatcgcagaatcaaaacgctttccgctgc

SEQ ID NO: 394132 - DNA, 75 bp, synthetic construct
  source 1..75: mol_type = other DNA
gttccgaactactcgattcacgttttggtgccaaggccatttcgactatcgcagaatcaaaacgctttccgctgc

SEQ ID NO: 394133 - DNA, 75 bp, synthetic construct
  source 1..75: mol_type = other DNA
atggataagaagcaagtaacggatttaaggtcggaactactcgattcacgttttggcgcaaagtcgatttctact

SEQ ID NO: 394134 - DNA, 75 bp, synthetic construct
  source 1..75: mol_type = other DNA
accaagagggggaacgtgttcgtgatgatagcattaacatcctgactgtcgttgccagtgaaaattatgaagcct

SEQ ID NO: 394135 - DNA, 75 bp, synthetic construct
  source 1..75: mol_type = other DNA
ttgatgttgcagagcagccattgccagatattcttggtgttctacaggaaaaaaccggactgacaagacgcagtt

SEQ ID NO: 394136 - DNA, 75 bp, synthetic construct
  source 1..75: mol_type = other DNA
gctatcaaggaaggcgtttataaaacactacaaatcactgaagaacatttcaaaagcctgtatgcgggagttcca

SEQ ID NO: 394137 - DNA, 75 bp, synthetic construct
  source 1..75: mol_type = other DNA
ccttcacctgggcgcaccgcatcagcaatcgggcggtggattttctgcaacagccgcgcgcaccgaggaaccctt

SEQ ID NO: 394138 - DNA, 75 bp, synthetic construct
  source 1..75: mol_type = other DNA
tggcatctcgacggtcatgactatttcggcactggcgagtgtccgccggagtgggatgctgattactggttcgat

SEQ ID NO: 394139 - DNA, 75 bp, synthetic construct
  source 1..75: mol_type = other DNA
cattggtcttggtaatgaagaagatgcgaaaattacttgtggtaatgctcattttatctcactcaaagatcagat

SEQ ID NO: 394140 - DNA, 75 bp, synthetic construct
  source 1..75: mol_type = other DNA
atatcagggttgagcatcaggaaagcctgcatcctcataatgccgttgcccgtattcactggaaaggaagtaaaa

SEQ ID NO: 394141 - DNA, 75 bp, synthetic construct
  source 1..75: mol_type = other DNA
atggataagaagcaagtaacggatttaaggtcggaactactcgattcacgttttggcgcgaagtctatttccact

SEQ ID NO: 394142 - DNA, 75 bp, synthetic construct
  source 1..75: mol_type = other DNA
atggataagaagcaagtaacggatttaaggtcggaactactcgattcacgttttggcgccaagtctatttcgact

SEQ ID NO: 394143 - DNA, 75 bp, synthetic construct
  source 1..75: mol_type = other DNA
ggcatatgattagacgtacaatccgtgaacatctggataaagagcttcgccttaatcctcagcaaatcaaggttc

SEQ ID NO: 394144 - DNA, 75 bp, synthetic construct
  source 1..75: mol_type = other DNA
aagcagccggtaccagtagggaggaagcagtacaaattgctgctgttgcactgcaaatcatcgaatattatgatc

SEQ ID NO: 394145 - DNA, 75 bp, synthetic construct
  source 1..75: mol_type = other DNA
aaacctccttacactagcaaaatttcgtgggcagcaggctggatgtaaattaagtgaagcgtttgttatacataa

SEQ ID NO: 394146 - DNA, 75 bp, synthetic construct
  source 1..75: mol_type = other DNA
tgaaagaggccgtaagccatatccctgctccgcgtgacggtcgtgattacgatccggaagtactgaagctggcgg

SEQ ID NO: 394147 - DNA, 75 bp, synthetic construct
  source 1..75: mol_type = other DNA
gcgtaccagcgccatcttcgcagctaccgtaaggccgacggtaacacgctggcggtgggcgggcagcttagccgc

SEQ ID NO: 394148 - DNA, 75 bp, synthetic construct
  source 1..75: mol_type = other DNA
tgcgcaaccgggcgatcctcgaggtgttatggagtaccgggatcaggcgtatggaggtggctaacctgatgctgt

SEQ ID NO: 394149 - DNA, 75 bp, synthetic construct
  source 1..75: mol_type = other DNA
tcctttcatgcggtgttttcatgcatttcgctgatatcccaggatatcgccaaaatgcgactgcgcctgatgcag

SEQ ID NO: 394150 - DNA, 75 bp, synthetic construct
  source 1..75: mol_type = other DNA
tcctttcacgcggtgttttcatgcatttcgctgatatcccaggatatcgccaaaatgcggcttcgcctgatgcag

SEQ ID NO: 394151 - DNA, 75 bp, synthetic construct
  source 1..75: mol_type = other DNA
tgataaacccggagaagctcattcatcaggctggaccctggctgccaaacggggacgggatgctggaggcggaaa

SEQ ID NO: 394152 - DNA, 75 bp, synthetic construct
  source 1..75: mol_type = other DNA
tggcggcaggccgtccggggtgattgagatccccggcagtattacggaagaaaatgcgaaaaaactgaagagcaa

SEQ ID NO: 394153 - DNA, 75 bp, synthetic construct
  source 1..75: mol_type = other DNA
cgcgtgatggtcgtgattacgatccggaagtactgaagcaggcggttctggaggcggtgaatgcccttccggctc

SEQ ID NO: 394154 - DNA, 75 bp, synthetic construct
  source 1..75: mol_type = other DNA
ctgtttcaggccgtggctgagccctttgccggtgcctggcagcagggcgtgaaagcggatccggaaaccgtcctc

SEQ ID NO: 394155 - DNA, 75 bp, synthetic construct
  source 1..75: mol_type = other DNA
atggcttacagcgaaaaagttatcgaccattacgagaatccgcgtaacgtgggttccttcgacaacaacgacgag

SEQ ID NO: 394156 - DNA, 75 bp, synthetic construct
  source 1..75: mol_type = other DNA
gcagacgcggcgtgagcgtaaccatgcagagatggagcgggcgctggtcagcaggaaacgcagccggagacgctg

SEQ ID NO: 394157 - DNA, 75 bp, synthetic construct
  source 1..75: mol_type = other DNA
atgtcgtggttgttcccccatcgcaggaacaaccaccgtttgatttaaatcacatgggtgctggcagtgataagt

SEQ ID NO: 394158 - DNA, 75 bp, synthetic construct
  source 1..75: mol_type = other DNA
ggaacaatcaccatttgattttaaccacatgagcacaggcagtgataaatcggatgcgcttggcgtgccctatta

SEQ ID NO: 394159 - DNA, 75 bp, synthetic construct
  source 1..75: mol_type = other DNA
aatgttacggcgtttcgctgaaaggcaaaaacgactgtaaagccggcgccggcacaacctgtgcaggcaccgcga

SEQ ID NO: 394160 - DNA, 75 bp, synthetic construct
  source 1..75: mol_type = other DNA
gaaactggtaccggcgggcacctgcgtgaagatgaaatccccgggttcccctaccggctatggccagcttgaggc

SEQ ID NO: 394161 - DNA, 75 bp, synthetic construct
  source 1..75: mol_type = other DNA
atgtttaggttgaaccctttcgtacgggtcgggctgtgtttgtccgctatttcttgtgcatggcctgtgttagcg

SEQ ID NO: 394162 - DNA, 75 bp, synthetic construct
  source 1..75: mol_type = other DNA
ccaactcactcactgaacaactggcgaagcatatggccattgatctacgcatccgtatgctggtgagtcttggtg

SEQ ID NO: 394163 - DNA, 75 bp, synthetic construct
  source 1..75: mol_type = other DNA
tggttattgatcttcgcatccgtatgttggtgagtctgggtgttgtattaatcctgaatctcatttttctgatgg

SEQ ID NO: 394164 - DNA, 75 bp, synthetic construct
  source 1..75: mol_type = other DNA
accaaaaaagtgattagcgaagccgtcgccgcggcggggggaaattgcaatgaatcacagcgaaacaattaccat

SEQ ID NO: 394165 - DNA, 75 bp, synthetic construct
  source 1..75: mol_type = other DNA
tttctgctgctgaccgtattacgaccgttcgcgcggcgattgccgatggtgcaaaaccatcagatttgaatcgtc

SEQ ID NO: 394166 - DNA, 75 bp, synthetic construct
  source 1..75: mol_type = other DNA
gtggtgcgtagcacacagttgacgctgcaatcgacagggggagtgattgagagaacgctttatacctacctgatg

SEQ ID NO: 394167 - DNA, 75 bp, synthetic construct
  source 1..75: mol_type = other DNA
tacgtgctaaggcagaaaaagcaacgtgtggcgagtggtcgctcgaatatggagatggccgatttgatggtgatg

SEQ ID NO: 394168 - DNA, 75 bp, synthetic construct
  source 1..75: mol_type = other DNA
gcagccaatcccgctaccgtcttggcgctgctggatgagctggaaagaaaccagcaatacatcaaacgccgcgac

SEQ ID NO: 394169 - DNA, 75 bp, synthetic construct
  source 1..75: mol_type = other DNA
aaagcacacgctggtagcgcacactttaaatatgctatgcgtgacgcaatggatatttcaaccattggttgcgcc

SEQ ID NO: 394170 - DNA, 75 bp, synthetic construct
  source 1..75: mol_type = other DNA
ttcccagtgtctgcagacgctgattgagtccattgagctgttactggatgaggcgctggaaacgggggaaaacga

SEQ ID NO: 394171 - DNA, 75 bp, synthetic construct
  source 1..75: mol_type = other DNA
ggtaacgcgatttgtcagtctgcaaataccgaaggccagaacattcacggtaagtgtgcaacgtctgcgattgcc

SEQ ID NO: 394172 - DNA, 75 bp, synthetic construct
  source 1..75: mol_type = other DNA
ggctttggctgatgcgtctgtatagccgtaaacgacccggcaaacatccgatgctgtttgctggatataaaacgc

SEQ ID NO: 394173 - DNA, 75 bp, synthetic construct
  source 1..75: mol_type = other DNA
aagaggaagctgccgatctgtttatggccaaaatggccatactcagtcttttgcacactgagtatggccaaaatg

SEQ ID NO: 394174 - DNA, 75 bp, synthetic construct
  source 1..75: mol_type = other DNA
ctcagtatggcaatccaggctcctgctctgttaagccggacaatggtggtgctgtgactccggttgatccggcac

SEQ ID NO: 394175 - DNA, 75 bp, synthetic construct
  source 1..75: mol_type = other DNA
ctgccgggcggcactaacctgtctccggaattccacggcctgactaaagaacaggcaccgaagtacgcatttagc

SEQ ID NO: 394176 - DNA, 75 bp, synthetic construct
  source 1..75: mol_type = other DNA
tgatgccagcaacccatggcgttatgttcgtgccgctacggcaacggaaatctcagaaaccagtaatccacagtc

SEQ ID NO: 394177 - DNA, 75 bp, synthetic construct
  source 1..75: mol_type = other DNA
aaattgtcagcctggcgcttgtgttggtgctaatcactatttttggtgtcggctatgtgattcatttactcttac

SEQ ID NO: 394178 - DNA, 75 bp, synthetic construct
  source 1..75: mol_type = other DNA
accagggggcttacgcgccgaatactttgcgcgatctccggttagtgtttcactcctgggcgagatggtgtcacg

SEQ ID NO: 394179 - DNA, 75 bp, synthetic construct
  source 1..75: mol_type = other DNA
atcctgacgcagtgctgttcccgccgatacaccgtagcaataaggccaggatcacgacaacgccccttactgcac

SEQ ID NO: 394180 - DNA, 75 bp, synthetic construct
  source 1..75: mol_type = other DNA
gccttcaatccagatcgtgttgatgttgctgctgccgtttattgtttatctggtggcggagcattttggtttatc

SEQ ID NO: 394181 - DNA, 75 bp, synthetic construct
  source 1..75: mol_type = other DNA
tcgtcggtaaaggacgaatcaacaaaagcattcaggaagtgcttgaaggcgaagcattaatgaatgatgcctccg

SEQ ID NO: 394182 - DNA, 75 bp, synthetic construct
  source 1..75: mol_type = other DNA
gaatttaatcctgaacttttcctgttattgtttattccaccgttgttgtttgctgaaagttcaaaaatacaacct

SEQ ID NO: 394183 - DNA, 75 bp, synthetic construct
  source 1..75: mol_type = other DNA
cgctcagtacagcaaaatcaaagctctgcgtgaggctggcggcgatgtgatgctgtctatcggtggtgctaacaa

SEQ ID NO: 394184 - DNA, 75 bp, synthetic construct
  source 1..75: mol_type = other DNA
gatgaaagtggaaaggcgctaagtgagactgaacttttcgcggcgaaaacaatgctcagaggattattaacaaaa

SEQ ID NO: 394185 - DNA, 75 bp, synthetic construct
  source 1..75: mol_type = other DNA
aaggtggtgattctctcttcctgcagcagcagaacttcagcctggcagcgctggccaggcgcgatgcatcagaag

SEQ ID NO: 394186 - DNA, 75 bp, synthetic construct
  source 1..75: mol_type = other DNA
gttatgttacggacacagtaaaaccgttaatgaagcgattagctatattcgagccagacgcccgcagattgtgct

SEQ ID NO: 394187 - DNA, 75 bp, synthetic construct
  source 1..75: mol_type = other DNA
tctctgtcgtcgtcccaatgcacagcagaatcgtatccagttttttgaactgtggctgaacgccaaactgcgtca

SEQ ID NO: 394188 - DNA, 75 bp, synthetic construct
  source 1..75: mol_type = other DNA
atcaaaaatcctttccccggggcacgtatgccacacaccagggcggactctggcgggcgtatgaaaaaacgcacg

SEQ ID NO: 394189 - DNA, 75 bp, synthetic construct
  source 1..75: mol_type = other DNA
tgacagtttatatcagctttattttactgattgcctttgcgcctggctggctgggcactccgctgaatccgaaca

SEQ ID NO: 394190 - DNA, 75 bp, synthetic construct
  source 1..75: mol_type = other DNA
cgagcattgatttcattatcattgttatatgaaaaagtaaaggagtatgaactggctttggattgttcatataag

SEQ ID NO: 394191 - DNA, 75 bp, synthetic construct
  source 1..75: mol_type = other DNA
gcatcaccggatattctcggtgttaaccatgccgccagcctggcctctgtgggggctctacttcttatgccgtca

SEQ ID NO: 394192 - DNA, 75 bp, synthetic construct
  source 1..75: mol_type = other DNA
cgattgctatacacggatgaagatgatgataaggcgattcgtcaaggatatcatataagagatgctgatcggcct

SEQ ID NO: 394193 - DNA, 75 bp, synthetic construct
  source 1..75: mol_type = other DNA
ggtggttccggaagagggggagctccgacaggccgtggcgatgttggaaacattacgcgaagagcaaggcagcgt

SEQ ID NO: 394194 - DNA, 75 bp, synthetic construct
  source 1..75: mol_type = other DNA
atgtcatgggatgagatacgaaaatctgataaacacgggcttgggacggaaaaaattgccagaaacgcgataaaa

SEQ ID NO: 394195 - DNA, 75 bp, synthetic construct
  source 1..75: mol_type = other DNA
gaaatactttccaaccacaatggtttttccaaggtatcgaaaaattaaaaatcatagccctttctaatgttatat

SEQ ID NO: 394196 - DNA, 75 bp, synthetic construct
  source 1..75: mol_type = other DNA
catgactaacgaggattatcgcaaagcagctttcgctctgatgatgcaggaacaagcgccaacgctgtcgatgcc

SEQ ID NO: 394197 - DNA, 75 bp, synthetic construct
  source 1..75: mol_type = other DNA
ccgatgcggcaagcggtcagctggatctcaataacccgctgattaagcacgatctggaaaacccgaccgcgccga

SEQ ID NO: 394198 - DNA, 75 bp, synthetic construct
  source 1..75: mol_type = other DNA
tacaaaatgttgagcgcaagtcagcagaggctgaaaaaagcttagcgtttctgaaagataatctgccaaatatca

SEQ ID NO: 394199 - DNA, 75 bp, synthetic construct
  source 1..75: mol_type = other DNA
tatcgttcaccacaaaaatcaccgggcgtggtcaacagtggctgacaagaaagctgctagataacggaatgctta

SEQ ID NO: 394200 - DNA, 75 bp, synthetic construct
  source 1..75: mol_type = other DNA
ccatcaaaatgacaagcattgaaatcgctgagttggtgggaagccgtcatgacaaggtgaaacaatccattgaac

SEQ ID NO: 394201 - DNA, 75 bp, synthetic construct
  source 1..75: mol_type = other DNA
cggcggtagctggcgtcacctggcgctcggcgtggctggctggatgcgctacacccagggtgtggatgagcaggg

SEQ ID NO: 394202 - DNA, 75 bp, synthetic construct
  source 1..75: mol_type = other DNA
attttgaccagtctgaatcacggtgcattttttggcctggggtcagttgtggccgcaagcgttgtgccaaaacat

SEQ ID NO: 394203 - DNA, 75 bp, synthetic construct
  source 1..75: mol_type = other DNA
ccacaggtgctgtctgcattgctgacgacggtgctgggcgctggcgcaatgttcaccctctacacctatatttct

SEQ ID NO: 394204 - DNA, 75 bp, synthetic construct
  source 1..75: mol_type = other DNA
cggaatgttaatcagcgcctatgcggttggcgtgatggttggcgcgccattgatgacgcttctgctttctcatcg

SEQ ID NO: 394205 - DNA, 75 bp, synthetic construct
  source 1..75: mol_type = other DNA
gttgaagcaaaacttatctgtgagtgaacgaggcaagcaaaccggtattttggaactcagttttaccggtgaaaa

SEQ ID NO: 394206 - DNA, 75 bp, synthetic construct
  source 1..75: mol_type = other DNA
aaaatgacagctatgagaaaatactgacgccgacagagtggaactgctgtgggttaagctggaaggaaagccgct

SEQ ID NO: 394207 - DNA, 75 bp, synthetic construct
  source 1..75: mol_type = other DNA
aatttattgaacaactgaaaggcatctcggttgaggatgatgttgaattcaatttttttgaattgggcggttccg

SEQ ID NO: 394208 - DNA, 75 bp, synthetic construct
  source 1..75: mol_type = other DNA
agcattattgtcgtcgcccagttgtcgccagagttcaccgctcgccttgttgaccgctggcgagagcttgaaggg

SEQ ID NO: 394209 - DNA, 75 bp, synthetic construct
  source 1..75: mol_type = other DNA
aatcgatattggtcgcctggtcggcaccgtcattgaagcgcgctggtgggtaattggcatcaccgccgtattcgc

SEQ ID NO: 394210 - DNA, 75 bp, synthetic construct
  source 1..75: mol_type = other DNA
attaaatactttaagaagggctctgcgcacatcacgttcaggaagccagaactggttgacagactgaatgatatt

SEQ ID NO: 394211 - DNA, 75 bp, synthetic construct
  source 1..75: mol_type = other DNA
tattgcagcttatgaaagtagaactttttctgaatcatttgtgaaagttttttcagcattgtttgataattcatc

SEQ ID NO: 394212 - DNA, 75 bp, synthetic construct
  source 1..75: mol_type = other DNA
tcgctcaggcgttctgcggtcatcgtcgcgctattatggaagggccgggcggcctgtggtggggaaccatcctga

SEQ ID NO: 394213 - DNA, 75 bp, synthetic construct
  source 1..75: mol_type = other DNA
ttcaaaaggctggagctgattgacagaattaacgatataatagccaggcactttccttctgtgctctcagcctga

SEQ ID NO: 394214 - DNA, 75 bp, synthetic construct
  source 1..75: mol_type = other DNA
gccgaactggtgaactgggcgagtaaaaactatgacctggtgttgattgatacgccgccgattctggcagtgacc

SEQ ID NO: 394215 - DNA, 75 bp, synthetic construct
  source 1..75: mol_type = other DNA
gaagacagcgaaacgctgattcaaaccattgagtcagtacgcaacgtagagggcgtgctggcggtgtcgctggtt

SEQ ID NO: 394216 - DNA, 75 bp, synthetic construct
  source 1..75: mol_type = other DNA
taaagccgccatcgccaccagcgatagcgtactgaccatccaacaaggcggcggtaaagatccggtcacgattga

SEQ ID NO: 394217 - DNA, 75 bp, synthetic construct
  source 1..75: mol_type = other DNA
atacgggcaacgataacgctatgaaacttagcgtcagcggcgacagcgccctggaaagttttatgggttacaacg

SEQ ID NO: 394218 - DNA, 75 bp, synthetic construct
  source 1..75: mol_type = other DNA
tttcatatccgcgtgacgccggacacaccggaaatacggactgccatcaccgcggagttgcgttcgttcctgctg

SEQ ID NO: 394219 - DNA, 75 bp, synthetic construct
  source 1..75: mol_type = other DNA
ccgctggcgagagcttgaagaagctgcggttaatatccccaaaacgctaccagaagcgttgcgccttgctgctga

SEQ ID NO: 394220 - DNA, 75 bp, synthetic construct
  source 1..75: mol_type = other DNA
tgcgtaaagtggagttaccgctggcagcgccagtgattctggctggcgtgcggacttcagtgattatcaatattg

SEQ ID NO: 394221 - DNA, 75 bp, synthetic construct
  source 1..75: mol_type = other DNA
ggcggctggggccaactttataaccggagtcgttgaatgggacatgagcatgtttaacgacacgccggattataa

SEQ ID NO: 394222 - DNA, 75 bp, synthetic construct
  source 1..75: mol_type = other DNA
ggaatgacgttgtttactgtgatccgccttatctgactgataccgccaatttcaccgcttaccatgaacgtggct

SEQ ID NO: 394223 - DNA, 75 bp, synthetic construct
  source 1..75: mol_type = other DNA
ctgtttccgggccgcgctgctgggtgggatttgatccttcgcgtggcgtggatagttcagccgtatacggagtgc

SEQ ID NO: 394224 - DNA, 75 bp, synthetic construct
  source 1..75: mol_type = other DNA
tggcttcactgaagatgaccagtatcgcctggcatctgtgcttgaacatcggtcatcagaaggacatccggtcat

SEQ ID NO: 394225 - DNA, 75 bp, synthetic construct
  source 1..75: mol_type = other DNA
tttcgcacatggatcaggggaggctggcgcgtaagttgcgccgtctggccagaaaaggtgtgccggttgtggcct

SEQ ID NO: 394226 - DNA, 75 bp, synthetic construct
  source 1..75: mol_type = other DNA
aacgttcattactgcccactattcagaaacgctcgatttggttcggggcgggagtgacgttgtttactgtgatcc

SEQ ID NO: 394227 - DNA, 75 bp, synthetic construct
  source 1..75: mol_type = other DNA
ggcgcgtaaactgcgccgtctggcggaacgtgggattcccgttgtcgcgtcaaacagcgatctggaaatggtgca

SEQ ID NO: 394228 - DNA, 75 bp, synthetic construct
  source 1..75: mol_type = other DNA
aaatcggtcaaaaatggacgggcactgttacggtcgataccaccattcaggaacatcgcgatcgtggtgacacgt

SEQ ID NO: 394229 - DNA, 75 bp, synthetic construct
  source 1..75: mol_type = other DNA
cgataacttccgaaagcaatacggtcgacggtaaatacacgttgccgctgacggcgattaatcagtttctcacgg

SEQ ID NO: 394230 - DNA, 75 bp, synthetic construct
  source 1..75: mol_type = other DNA
ggcctggcaggtgactaaagacgtcaaactgcgcgcaggcgtgctgaaccttggcgacaaggatctcagtcgtga

SEQ ID NO: 394231 - DNA, 75 bp, synthetic construct
  source 1..75: mol_type = other DNA
accggtatttagctactacaacgttaacaaagcacgtattcagggcgtggaaaccgaactgaaaattccgttcaa

SEQ ID NO: 394232 - DNA, 75 bp, synthetic construct
  source 1..75: mol_type = other DNA
gtctataacgccaccgataccgtaacggtgaaaggcggctgggcgacggcttttaaagcaccttctttactgcaa

SEQ ID NO: 394233 - DNA, 75 bp, synthetic construct
  source 1..75: mol_type = other DNA
atcagcgtcattacccaggaagacttgcagcgtaaaccggtacagaacctgaaagatgtcctcaaagaagtgcca

SEQ ID NO: 394234 - DNA, 75 bp, synthetic construct
  source 1..75: mol_type = other DNA
gggtgggcagcaaagcccgccttatgcctatgctgcgtccgcaccttccagaaggtaaacgcctggttgaaccgt

SEQ ID NO: 394235 - DNA, 75 bp, synthetic construct
  source 1..75: mol_type = other DNA
ggctattggtgcatacagcggtatgcggatcaatgaaatatgtaccctacgtgaaagcagtattaaaactatcga

SEQ ID NO: 394236 - DNA, 75 bp, synthetic construct
  source 1..75: mol_type = other DNA
aaacttactcaaaaaatgcagcttccccagtagaaatgaggaagtatgtagaattaattaatcatattggtgtag

SEQ ID NO: 394237 - DNA, 75 bp, synthetic construct
  source 1..75: mol_type = other DNA
ctggccacgttttcccacttcgcgctcaggcaggtggtgtactgacgcgtggcggtcatactgaagcaactattg

SEQ ID NO: 394238 - DNA, 75 bp, synthetic construct
  source 1..75: mol_type = other DNA
ggtaatgaggttagcaatacaataaccgtatttaccgaactgcttcataatatgcagccagtgcagcgcccgaaa

SEQ ID NO: 394239 - DNA, 75 bp, synthetic construct
  source 1..75: mol_type = other DNA
aggcgggcctgaatcagtctgacgatccggctgaaatcgccaaatacctgaaagcgaactccgtggataccgtga

SEQ ID NO: 394240 - DNA, 75 bp, synthetic construct
  source 1..75: mol_type = other DNA
ggcagggcttcttttctttggcggcctggtttttgctattgcgtgcggggggatgtcttcgttcttcgaatggct

SEQ ID NO: 394241 - DNA, 75 bp, synthetic construct
  source 1..75: mol_type = other DNA
atttactggtgctgctgaagtcgcgtttcaccttaccgggcgttatccgggaacaaaaggctatcctgctgatgg

SEQ ID NO: 394242 - DNA, 75 bp, synthetic construct
  source 1..75: mol_type = other DNA
cctgaagaatcccagcaagtcgcagaaagtggtcaacatgaccatctatgacgctgagcactacaccgacgagca

SEQ ID NO: 394243 - DNA, 75 bp, synthetic construct
  source 1..75: mol_type = other DNA
gcgtgtgtcctggacgggaaaacagctgtttgccgagcgattccctgactcgtcgcgcctgctgctggaagactg

SEQ ID NO: 394244 - DNA, 75 bp, synthetic construct
  source 1..75: mol_type = other DNA
caccggttttaccgtgaccattgaagcggctgaaggtgtgactaccggtgtttctgccgctgatcgtattacgac

SEQ ID NO: 394245 - DNA, 75 bp, synthetic construct
  source 1..75: mol_type = other DNA
accgttgagcagatggcgctgaccatccgccacggtagcggtattgtgtgcctgtgcattaccgaggatcgccgt

SEQ ID NO: 394246 - DNA, 75 bp, synthetic construct
  source 1..75: mol_type = other DNA
tctggattggcggcgagacaaacgagactgtaaccaaaacgactcaacgcatcctgtgcggtcgtatcgaagaga

SEQ ID NO: 394247 - DNA, 75 bp, synthetic construct
  source 1..75: mol_type = other DNA
ccgaaaaaagattggtaccgagttacggcgttatttgtcttgtatgggaggtactattgcaaggctagagtcaag

SEQ ID NO: 394248 - DNA, 75 bp, synthetic construct
  source 1..75: mol_type = other DNA
atagtatgtatcaagcgaatcagggagtgggagcagacactcatgtgatgcgagtttcgaggagacttggtttca

SEQ ID NO: 394249 - DNA, 75 bp, synthetic construct
  source 1..75: mol_type = other DNA
acaaagcagatagtctcgaaaaacgcctttccgttcgcccggcgcatttagcgcgtttgcaattactgcatgatg

SEQ ID NO: 394250 - DNA, 75 bp, synthetic construct
  source 1..75: mol_type = other DNA
attgtggtcaccccgccggtacagcgtcttgaaccgggggctaaaagcatggtccgtctggccagcactccggat

SEQ ID NO: 394251 - DNA, 75 bp, synthetic construct
  source 1..75: mol_type = other DNA
cgtgttctgaatgagtttattcctcagcttaaacaaatgggcattgagcctgagctgtttaattctctgttgccg

SEQ ID NO: 394252 - DNA, 75 bp, synthetic construct
  source 1..75: mol_type = other DNA
atggaagcattcaattttggtccaacgctgacgccccagacgctggaacgttttctcgtacactgctcaaacaat

SEQ ID NO: 394253 - DNA, 75 bp, synthetic construct
  source 1..75: mol_type = other DNA
taaagaagggctggctattcatgtcattgcccaaaagatggaattaagcaatcgtgctgtatccggcattgtata

SEQ ID NO: 394254 - DNA, 75 bp, synthetic construct
  source 1..75: mol_type = other DNA
agccagtgtcgggaaaatgaccgtcgaggaaatggcgaaaaaactgaacgttgccccaaccgccctacaggcaca

SEQ ID NO: 394255 - DNA, 75 bp, synthetic construct
  source 1..75: mol_type = other DNA
ggaaaaggccgacgctgcctttttcagtaccacgctgatggcagacggcctgcgctacgagaatatcccggaagg

SEQ ID NO: 394256 - DNA, 75 bp, synthetic construct
  source 1..75: mol_type = other DNA
tcacgcgctactggcaggattcacgcaacgcgctgagagcgtcggttgattcactgaaaaatgagacagatgcct

SEQ ID NO: 394257 - DNA, 75 bp, synthetic construct
  source 1..75: mol_type = other DNA
acgccaagcccgtcctgagcgctatggggccatcagatgcaggaaagtctacgctgttaaactatattttgggca

SEQ ID NO: 394258 - DNA, 75 bp, synthetic construct
  source 1..75: mol_type = other DNA
aatttaggtgcctatattttagttggcaaagcggctggcgtgctgacttccctagggattaccagttcggtcacg

SEQ ID NO: 394259 - DNA, 75 bp, synthetic construct
  source 1..75: mol_type = other DNA
caggaacatacagcacaccatatttgagttacatcaatgactacggtgggcgtccggtactgcaattctcctgtg

SEQ ID NO: 394260 - DNA, 75 bp, synthetic construct
  source 1..75: mol_type = other DNA
actgccgttatctggtggtcaattgaatggtgcactgggtatcggaacatccagtgctcttggcggtaattcgat

SEQ ID NO: 394261 - DNA, 75 bp, synthetic construct
  source 1..75: mol_type = other DNA
tggcagcgttatacaactgccggaacaggtacaacccttaaaggtcgcacgtttgagcgcgtttttaccggcagc

SEQ ID NO: 394262 - DNA, 75 bp, synthetic construct
  source 1..75: mol_type = other DNA
aagagtcggtcatcagtcagagagtcgttattacgacggggatttgaatgatgtgacttcaccaggtatttacag

SEQ ID NO: 394263 - DNA, 75 bp, synthetic construct
  source 1..75: mol_type = other DNA
aaacagacattcagtgctggcctttctggtgaactgtccggcaatgcggcgacagcaacaaagctgaaaacggca

SEQ ID NO: 394264 - DNA, 75 bp, synthetic construct
  source 1..75: mol_type = other DNA
gacggcaatgtttacatgcgtaaactcgccaataagtggaatggcactgatggtccgtggggcgtatggcgtcac

SEQ ID NO: 394265 - DNA, 75 bp, synthetic construct
  source 1..75: mol_type = other DNA
tcgtggagcgaatggcgggaagtctacacctcgtattcacttcccctgaatctgggtatcggcggtgctgtggca

SEQ ID NO: 394266 - DNA, 75 bp, synthetic construct
  source 1..75: mol_type = other DNA
ttacatgatatggttgttcatgtcgataccagctccatgcaaccgttcgactcaacctgtcggtttacatatgtg

SEQ ID NO: 394267 - DNA, 75 bp, synthetic construct
  source 1..75: mol_type = other DNA
cattaaaaatgcgtggtttatcagctactttaccccaattgaaaccaggttgtcttgccaaggataaatggacaa

SEQ ID NO: 394268 - DNA, 75 bp, synthetic construct
  source 1..75: mol_type = other DNA
catatggagagttccagttggtattatttctgacatggatgcttttgattttatagagactatagctgaatcatc

SEQ ID NO: 394269 - DNA, 75 bp, synthetic construct
  source 1..75: mol_type = other DNA
actcaatcagctacccgccctttgagtacgactatagacctgaatacgcttggagccgccgagcatcttggttta

SEQ ID NO: 394270 - DNA, 75 bp, synthetic construct
  source 1..75: mol_type = other DNA
gataaccgttcggcttgataatatgaccaacattcccgacggtatggactggggcgtcattgatggcaacctgat

SEQ ID NO: 394271 - DNA, 75 bp, synthetic construct
  source 1..75: mol_type = other DNA
atgcacacactgtggccctgggtgcgcacggacacaccatcacggtaaatgctacgggtaataccgaaaacaccg

SEQ ID NO: 394272 - DNA, 75 bp, synthetic construct
  source 1..75: mol_type = other DNA
aacttccgcctgccgggacaggtgttcctgaccggcaggagtatgaaggatgcggaagaatacggggaagacgcc

SEQ ID NO: 394273 - DNA, 75 bp, synthetic construct
  source 1..75: mol_type = other DNA
acaatgtgctgttggcgcaaatcgaaagcaaaggcctcactgttgaaacgcattgtcgcagtggcttttgtggca

SEQ ID NO: 394274 - DNA, 75 bp, synthetic construct
  source 1..75: mol_type = other DNA
ggattcgacggacagaaaaacgcagagaacaacgctcgttatatcgcagctttcaaccctgaagtagtgcaggcg

SEQ ID NO: 394275 - DNA, 75 bp, synthetic construct
  source 1..75: mol_type = other DNA
ttatagttcagtacacaacatccggcgaatatgagggatattattatgtcgataatggaggtcgtggcgttgtca

SEQ ID NO: 394276 - DNA, 75 bp, synthetic construct
  source 1..75: mol_type = other DNA
cccggactacgatacggtgctggctgctcagtctggtgcggaatatatgtatccacagggatttgtggtgacagg

SEQ ID NO: 394277 - DNA, 75 bp, synthetic construct
  source 1..75: mol_type = other DNA
gtttctgaattcatttctctgatttctcccaaaaatgcccctcataaggttgtgttacctgattttactggtctg

SEQ ID NO: 394278 - DNA, 75 bp, synthetic construct
  source 1..75: mol_type = other DNA
ccacgatatccgtcgcgtgttaacaaaactaccagcgaaacgccagaacctgctgttctccgccactttctctga

SEQ ID NO: 394279 - DNA, 75 bp, synthetic construct
  source 1..75: mol_type = other DNA
aactgttgtcgcacatgattgggaaagggaactggcagcaggtgctggtgtttactcgtaccaaacacggcgcta

SEQ ID NO: 394280 - DNA, 75 bp, synthetic construct
  source 1..75: mol_type = other DNA
tagtgcatctcttgagcaaaccagccagcaaatacttcttaatgcagattcaatgcgcgttgccctggatgaagg

SEQ ID NO: 394281 - DNA, 75 bp, synthetic construct
  source 1..75: mol_type = other DNA
gaaatcagctagcgcgaagcccgcagaaaaaacatctcgtcgtcttggcgatgccaaaccggcaggcgaacaaca

SEQ ID NO: 394282 - DNA, 75 bp, synthetic construct
  source 1..75: mol_type = other DNA
gaatgcagtgaagctggatcaggttgaaatcctcgtcctcgatgaagctgaccgcatgctcgacatgggctttat

SEQ ID NO: 394283 - DNA, 75 bp, synthetic construct
  source 1..75: mol_type = other DNA
gttgatgtgctggtggcaacgccgggacgtctgctggacctggaacatcagaatgcagtgaagctggatcaggtt

SEQ ID NO: 394284 - DNA, 75 bp, synthetic construct
  source 1..75: mol_type = other DNA
ttcaaaagaaccgccatttatactggcgaggatgccgcagcgaccggatcatcaacaagaaattgttgctgaatt

SEQ ID NO: 394285 - DNA, 75 bp, synthetic construct
  source 1..75: mol_type = other DNA
aaacttccgcctgccgggacaggtgttcctgaccggaaaaagtatgaaggatacggaagaatacggggaagacgc

SEQ ID NO: 394286 - DNA, 75 bp, synthetic construct
  source 1..75: mol_type = other DNA
cacagaatgatgcctctctccccctgctggcgcagtacctgcgcgatgacgggcgcatcaaccagtttatcgccg

SEQ ID NO: 394287 - DNA, 75 bp, synthetic construct
  source 1..75: mol_type = other DNA
tgaaaaacttccgcctgccgggacaggtgtttctgaccggaaaaagtatgaaggatgtggaagagtatggggaag

SEQ ID NO: 394288 - DNA, 75 bp, synthetic construct
  source 1..75: mol_type = other DNA
tggctgcgcaccatgttgatagcctgtacctgcgtgctggtgatatggggggccggaatggcgacctctttcttc

SEQ ID NO: 394289 - DNA, 75 bp, synthetic construct
  source 1..75: mol_type = other DNA
gcggactgataaacggcggtaagcgactcggttttcaggctccactctatttgtggcaggtctgtgacgacggtg

SEQ ID NO: 394290 - DNA, 75 bp, synthetic construct
  source 1..75: mol_type = other DNA
aacggcaaggagaaaacgccgcagcaatcccgtgaaggcgacgtgcctgtcgggccgctggataaaaccttcgcg

SEQ ID NO: 394291 - DNA, 75 bp, synthetic construct
  source 1..75: mol_type = other DNA
actatcaacctcagcaaaatggcgtggcagctcagcgaaaaagacagcgaagggaacgtgatccggaaggtgacg

SEQ ID NO: 394292 - DNA, 75 bp, synthetic construct
  source 1..75: mol_type = other DNA
ttcacgcagcgcgtattcagccacctttatcagctcgatctggggctggagagggaagcaggcccccctgcttat

SEQ ID NO: 394293 - DNA, 75 bp, synthetic construct
  source 1..75: mol_type = other DNA
ccggagcgggagaaattactcgatgcgattgtgccgctcctggtcagcaccgttgaccgggctacccatatcgac

SEQ ID NO: 394294 - DNA, 75 bp, synthetic construct
  source 1..75: mol_type = other DNA
gctgaccttctggatggcgaacctgccggaacacccgcagtggaaaacctcgccgccaccggaactgaccggcgc

SEQ ID NO: 394295 - DNA, 75 bp, synthetic construct
  source 1..75: mol_type = other DNA
cctgcgcggcctgatgttcagcccgccgcttgccgccgtaccggaggccgcacctcatgcgtggctgccgtcgcc

SEQ ID NO: 394296 - DNA, 75 bp, synthetic construct
  source 1..75: mol_type = other DNA
ctgtgacaacggtgattatcagaccggacgccccctgcaaagcgtcggctgcctgctgccggaacgctgtacccc

SEQ ID NO: 394297 - DNA, 75 bp, synthetic construct
  source 1..75: mol_type = other DNA
gagcgtcaactggctgactggcagacgctggaatcgctgttacccctctggtttgcacaacaggcaaaccacctc

SEQ ID NO: 394298 - DNA, 75 bp, synthetic construct
  source 1..75: mol_type = other DNA
tacctgaaagcgaactcggtggataccgtgatggggccgctgacctgggatgagaaaggcgatctgaaaggcttt

SEQ ID NO: 394299 - DNA, 75 bp, synthetic construct
  source 1..75: mol_type = other DNA
tgagaaaggtgatctgaaaggctttgagttcggtgtgtttgactggcacgccaacggcacggcgactgatgcgaa

SEQ ID NO: 394300 - DNA, 75 bp, synthetic construct
  source 1..75: mol_type = other DNA
gtagcggcggagaaaaagagattatcgcttcttacgtgttaacagcttcactaagctacgcactttgtcccgcgg

SEQ ID NO: 394301 - DNA, 75 bp, synthetic construct
  source 1..75: mol_type = other DNA
taaagtcactaacgtgctggatacagaactcacatcagcccgtgccgcggaacgtaaggcccagcaaactgcaca

SEQ ID NO: 394302 - DNA, 75 bp, synthetic construct
  source 1..75: mol_type = other DNA
atccgtttgatcagtcttctcagccgcagcaacagccgcaacagcaacctgctcagcaagagcagaaagacagcg

SEQ ID NO: 394303 - DNA, 75 bp, synthetic construct
  source 1..75: mol_type = other DNA
gtggttcggaaccgcagtttgcgggttataaccgtgcgatgcaggcgcgtcgttcgattggttcactggcaaaac

SEQ ID NO: 394304 - DNA, 75 bp, synthetic construct
  source 1..75: mol_type = other DNA
gtcgtcgaccgctttagtggtgaagttcgtgcgatggttggtggttctgagccgcagtttgcaggttacaaccgt

SEQ ID NO: 394305 - DNA, 75 bp, synthetic construct
  source 1..75: mol_type = other DNA
agttggagatccactccccgcgcggtgttcgcttcgtcccgattaacggctttcataccgggccgggcaaggttt

SEQ ID NO: 394306 - DNA, 75 bp, synthetic construct
  source 1..75: mol_type = other DNA
cgcctttcattttccgccacagccgaaagaacacgcgggcagcgcgcattttaaatatgccatgcgcgacgcaat

SEQ ID NO: 394307 - DNA, 75 bp, synthetic construct
  source 1..75: mol_type = other DNA
cgcgctgcgaatcggctccgcgacgacatttactcagctcattgaagatccgttaacccagcgtcatcttccggc

SEQ ID NO: 394308 - DNA, 75 bp, synthetic construct
  source 1..75: mol_type = other DNA
attctgagcgtactgccggaatggccttccaaccgagttggcgaactcctgccatggaacgtagtactcaccaat

SEQ ID NO: 394309 - DNA, 75 bp, synthetic construct
  source 1..75: mol_type = other DNA
cttccggtgaccgggttcaggtggtggccgcactgatggccatcgagagagagttgcgcagcttacggcaggtgg

SEQ ID NO: 394310 - DNA, 75 bp, synthetic construct
  source 1..75: mol_type = other DNA
gcgccttatgcgacctttggaacacgtgaactttctgaacatgttgcgctggctctcaaaaatcgggtgatgctg

SEQ ID NO: 394311 - DNA, 75 bp, synthetic construct
  source 1..75: mol_type = other DNA
aggtggtggccgcacttatggccatcgagagagagttgcgcagcttacggcaggtggtcagggaacagggagtgc

SEQ ID NO: 394312 - DNA, 75 bp, synthetic construct
  source 1..75: mol_type = other DNA
atcgtggccgccctgatggcaatcgacgcgggactggagcggctgcggcatgcggtgctggaaacagggggggat

SEQ ID NO: 394313 - DNA, 75 bp, synthetic construct
  source 1..75: mol_type = other DNA
gacagggtgcagattgtggcggcgctgatggccatcgatgccggacttgagcggctgcggcacgccgttcttgag

SEQ ID NO: 394314 - DNA, 75 bp, synthetic construct
  source 1..75: mol_type = other DNA
ggcggaaccgtcaatgcagccaccgctgtatggtgggccggacaatccgtggaggccagatcctgcctgcgcaac

SEQ ID NO: 394315 - DNA, 75 bp, synthetic construct
  source 1..75: mol_type = other DNA
tttttcgacccgttcaccggaaagctgggcaagcagtttgagaaattcatcgacccggtggattcagaacgcaac

SEQ ID NO: 394316 - DNA, 75 bp, synthetic construct
  source 1..75: mol_type = other DNA
cagcagccttacaagacgagcgtaccttagaaaaactagaactagagcgtcgctattggcagcaaaagcaaattc

SEQ ID NO: 394317 - DNA, 75 bp, synthetic construct
  source 1..75: mol_type = other DNA
cagtggtcttccggtgatcgggttcaggtggtggccgcactgatggccatcggggatgagctgcgccggctgcgt

SEQ ID NO: 394318 - DNA, 75 bp, synthetic construct
  source 1..75: mol_type = other DNA
cagtggtcttccggtgatcgggttcaggtgttggctgcgctgatggccatcggggaggagctgcgtcggctgcgt

SEQ ID NO: 394319 - DNA, 75 bp, synthetic construct
  source 1..75: mol_type = other DNA
gctactggaacgagcgctgtatgcgcccgcttatcgccatggctgaatcaactggatggaaaatgccaggcagat

SEQ ID NO: 394320 - DNA, 75 bp, synthetic construct
  source 1..75: mol_type = other DNA
gccgaatggccaggtctggtcaccgcagaacgatgaccgtcgttatagcgaaagcggcagagtgatgctggtgga

SEQ ID NO: 394321 - DNA, 75 bp, synthetic construct
  source 1..75: mol_type = other DNA
atgaagattctgtatctgacgcctgtggcactggctctctttctgagtggttgtgcaggaatgaagagtgaattt

SEQ ID NO: 394322 - DNA, 75 bp, synthetic construct
  source 1..75: mol_type = other DNA
ccttttgccgtaaagacacctgcaggagcaccggattcagtggcttcaccggtatcatcccggacatcaggaaac

SEQ ID NO: 394323 - DNA, 75 bp, synthetic construct
  source 1..75: mol_type = other DNA
aaatcacatcagtaacagtggagaactgtaataacttgctcagtctggaaggattaccgggaaacatacaaagac

SEQ ID NO: 394324 - DNA, 75 bp, synthetic construct
  source 1..75: mol_type = other DNA
caaccgttcaatccggttcgccaggctatgggacaatatcaggggcagataaatctggtctttaccccatcattg

SEQ ID NO: 394325 - DNA, 75 bp, synthetic construct
  source 1..75: mol_type = other DNA
gggatttgtttgccttaaaaaatgttacaaagccggatgcgcatcccctttattacaccgtatctgccggtactc

SEQ ID NO: 394326 - DNA, 75 bp, synthetic construct
  source 1..75: mol_type = other DNA
cgttctgaagcaataaaacaaatatctcttccccgccttgccgcttccggttcgcaaccattaaccagaactgtc

SEQ ID NO: 394327 - DNA, 75 bp, synthetic construct
  source 1..75: mol_type = other DNA
tccgttatttaacatagcccagtgtgatgacctgccggcgcatttttacgaaaaccggcgactacccggagagga

SEQ ID NO: 394328 - DNA, 75 bp, synthetic construct
  source 1..75: mol_type = other DNA
gtgcggaacttggcatttatggcgacttgcaacatgagagctatatcgcgtcgtggctgcaaacgctgaaggaag

SEQ ID NO: 394329 - DNA, 75 bp, synthetic construct
  source 1..75: mol_type = other DNA
acaatcgtgctgtatttcgtgcagctcgctttgcccgggaagcgtttgaatacctggtgttgcgtgagcaagcgc

SEQ ID NO: 394330 - DNA, 75 bp, synthetic construct
  source 1..75: mol_type = other DNA
gtctaggggatattgtgtatgggctttcggaacccagaggaaaagttgttaatacaataaaactggttaatgatt

SEQ ID NO: 394331 - DNA, 75 bp, synthetic construct
  source 1..75: mol_type = other DNA
ctggatctaccgtttgaagaaaggcgaacgcttaccacggggccgttactttgtaggcaaaaaaccaggtcgccc

SEQ ID NO: 394332 - DNA, 75 bp, synthetic construct
  source 1..75: mol_type = other DNA
aggcatcacctcatcgtccctgaagtttggtgacccgctgtacagttttgaggagctggttgcggaaatgggcag

SEQ ID NO: 394333 - DNA, 75 bp, synthetic construct
  source 1..75: mol_type = other DNA
tacatcgtggggggttttggggcagggttctaatgtgttgctcaggtttactaatatcaaaacccgagccattca

SEQ ID NO: 394334 - DNA, 75 bp, synthetic construct
  source 1..75: mol_type = other DNA
tacattgaacgtataccttttactccgggtgtaaagaaagaattcttgagcagtattgagaacatcaattttagt

SEQ ID NO: 394335 - DNA, 75 bp, synthetic construct
  source 1..75: mol_type = other DNA
cggaaccgcgcgtcattgtgcgtttctggattatttcgctgatgctggtcctgattggtctggcaacgctgaagg

SEQ ID NO: 394336 - DNA, 75 bp, synthetic construct
  source 1..75: mol_type = other DNA
ggatatttcaacaattggctgcgccgcacattgccgactggataacggcaatttcagcgaattacgcctggcatt

SEQ ID NO: 394337 - DNA, 75 bp, synthetic construct
  source 1..75: mol_type = other DNA
aggtgtcgaaaatgacccgtcctggcgaatttaccgtgcaggccaacagcattgagatgatccgccgtccgtttg

SEQ ID NO: 394338 - DNA, 75 bp, synthetic construct
  source 1..75: mol_type = other DNA
caaaacatttgcgacactttataaatacattgaacgtataccttttacaccggacgtaaaaaaagaattcttgag

SEQ ID NO: 394339 - DNA, 75 bp, synthetic construct
  source 1..75: mol_type = other DNA
ctcaactcaactttaataatctgctgaatcaggcaggatataatctttcagaaattgttgttaaacgctacagcg

SEQ ID NO: 394340 - DNA, 75 bp, synthetic construct
  source 1..75: mol_type = other DNA
ccgtcattaactgtgaaaaattacaaatcacagacatgccatcgacagtaaaaaatctacatattgaattaactg

SEQ ID NO: 394341 - DNA, 75 bp, synthetic construct
  source 1..75: mol_type = other DNA
ggagaaagaggcccgtcgtttgcatctgcagggcatgacggttccggattatacggtgaaggtgagaaagtggtt

SEQ ID NO: 394342 - DNA, 75 bp, synthetic construct
  source 1..75: mol_type = other DNA
gcattcagaccccgtctttgtggatacctgtttatttgatgggaccgggagtggcgagtatagccgatacgaact

SEQ ID NO: 394343 - DNA, 75 bp, synthetic construct
  source 1..75: mol_type = other DNA
gacaggtggtgtcatttaaacgtgatgtctaccgtagggtaatgaaagagttcgcgagtgttgtgatggcgctgc

SEQ ID NO: 394344 - DNA, 75 bp, synthetic construct
  source 1..75: mol_type = other DNA
agtcgaatgaggcctaacagatataatacagataataccatccgcaaacttctgaatgattatagccgaggttat

SEQ ID NO: 394345 - DNA, 75 bp, synthetic construct
  source 1..75: mol_type = other DNA
attcatgcggagcagaaaaccacgtggaacatcggtgttgaagggatgcctgatgggctggatcttgatttataa

SEQ ID NO: 394346 - DNA, 75 bp, synthetic construct
  source 1..75: mol_type = other DNA
accattgggggaatagtaatgccgatcgatataacgttttgcaattccaggacactagcggaactcactttacca

SEQ ID NO: 394347 - DNA, 75 bp, synthetic construct
  source 1..75: mol_type = other DNA
tatgaaagataatgacaaaaattattgcgatggcattttaaataccgcgttgtacttggaaaggcgtaatgatgg

SEQ ID NO: 394348 - DNA, 75 bp, synthetic construct
  source 1..75: mol_type = other DNA
tggcgacctgacagttaatgcctcggtgaccaacagcgttggtaatactggcagcggttcgcgagatattactat

SEQ ID NO: 394349 - DNA, 75 bp, synthetic construct
  source 1..75: mol_type = other DNA
aaatccttgcagccgaagttttccaaactcaacccgctaccgggcattaaacggatgttctcggcacagactggc

SEQ ID NO: 394350 - DNA, 75 bp, synthetic construct
  source 1..75: mol_type = other DNA
taaaaaatttcaaagcttataaagaacagagttttgattttagtaatttaactgtattttgcggtaataattctg

SEQ ID NO: 394351 - DNA, 75 bp, synthetic construct
  source 1..75: mol_type = other DNA
ggactggttgcgcgaagtgatcgtgaagctcaatgactggccgtcgaaccgtgtgcatgaactgctgccctggaa

SEQ ID NO: 394352 - DNA, 75 bp, synthetic construct
  source 1..75: mol_type = other DNA
gtcggggcagtgctgctacgtaaattgctgccgtggtataaccccttgcaaaatctggctgactggctgcgtctg

SEQ ID NO: 394353 - DNA, 75 bp, synthetic construct
  source 1..75: mol_type = other DNA
cggcggcggatgtcacggcgctgggcagcggcccgcaaactgttaccgccacggttaccgatgcggcaggcaaca

SEQ ID NO: 394354 - DNA, 75 bp, synthetic construct
  source 1..75: mol_type = other DNA
atgccgccgaagcgggtactgcgctgaccatcagcggcaccagcacggcagaagccgggcagacggtgaccgtga

SEQ ID NO: 394355 - DNA, 75 bp, synthetic construct
  source 1..75: mol_type = other DNA
tgcctgacggcgcagcaaacgtccaggccagcgtcagcaacgtcgcaggtaacagcgcccaggcaacgcatgctt

SEQ ID NO: 394356 - DNA, 75 bp, synthetic construct
  source 1..75: mol_type = other DNA
tcagttacatcgaagtgctggatgcagaacgttccctcttcgctacccagcaaaccattctcgatcttacctatt

SEQ ID NO: 394357 - DNA, 75 bp, synthetic construct
  source 1..75: mol_type = other DNA
actaaacagtaaaacctacaccaccatgctggacgcttccggcaactggagcgtcggcgttccggcggctgacgt

SEQ ID NO: 394358 - DNA, 75 bp, synthetic construct
  source 1..75: mol_type = other DNA
caccgttgaagccaacggcagctggacggtgaatgtgccgcctgccgatcttgcttcgctgccggacggcgcggg

SEQ ID NO: 394359 - DNA, 75 bp, synthetic construct
  source 1..75: mol_type = other DNA
acttttcattccaatatttggaagcggagagatttggtccaagagataatattccattatcacagcacaattatc

SEQ ID NO: 394360 - DNA, 75 bp, synthetic construct
  source 1..75: mol_type = other DNA
atgcgtgacaagcgttttgtcacctatgtcctgacgctggcgggttactacatgctggctgtacaagtgatgctg

SEQ ID NO: 394361 - DNA, 75 bp, synthetic construct
  source 1..75: mol_type = other DNA
tatgaattattttttcaatcatggagttattctgaaagttcatagaggtgcttttaatttaaaaaagatcgcctc

SEQ ID NO: 394362 - DNA, 75 bp, synthetic construct
  source 1..75: mol_type = other DNA
attgtctttttttgtacttttgtttttttataataaaagtgatgctattaattatgtatttttgatttctgtgtg

SEQ ID NO: 394363 - DNA, 75 bp, synthetic construct
  source 1..75: mol_type = other DNA
cactaccttgccccggcaagagcgcagccgcgcgccgttcagcccctgagcaccagctatcagcgggagaacccc

SEQ ID NO: 394364 - DNA, 75 bp, synthetic construct
  source 1..75: mol_type = other DNA
cggcggcggatgtcaccgcgctgggcagcggcccgcaaattgttaccgccacggtgaccgatgcggcaggcaaca

SEQ ID NO: 394365 - DNA, 75 bp, synthetic construct
  source 1..75: mol_type = other DNA
accactaccactacgacagccagcaccgcctggtgttccacacgcggatacagcatggcgagccactggtcgaga

SEQ ID NO: 394366 - DNA, 75 bp, synthetic construct
  source 1..75: mol_type = other DNA
ccgtttataccggcgaatgcgggcattctgctggttccgtgctgtcgtggtggttcagcgttcaccaccggagcc

SEQ ID NO: 394367 - DNA, 75 bp, synthetic construct
  source 1..75: mol_type = other DNA
atttattgcatgagctggttatcgtatccggattcatttttgacgctgagaatgcctgggtatcgatatcattag

SEQ ID NO: 394368 - DNA, 75 bp, synthetic construct
  source 1..75: mol_type = other DNA
agttatgagatggctcttcgactatctaaagttataggccgctctgcagagtcgtgggttaatatgcaggctcag

SEQ ID NO: 394369 - DNA, 75 bp, synthetic construct
  source 1..75: mol_type = other DNA
tttattggaccatgggttatacaaattctttatggaaatgattatagtgcggcctatcccgtagctgtaatcttg

SEQ ID NO: 394370 - DNA, 75 bp, synthetic construct
  source 1..75: mol_type = other DNA
tccaaagcaccgaactctccggttgcaggtcgcgctaccgtgttcatcttcccggatctgaacaccggtaacacc

SEQ ID NO: 394371 - DNA, 75 bp, synthetic construct
  source 1..75: mol_type = other DNA
cctaaatatgccattgtgctggcgtatccttatgaggaccgcaaattaaaaattcgggatacggcttatgaaaaa

SEQ ID NO: 394372 - DNA, 75 bp, synthetic construct
  source 1..75: mol_type = other DNA
gtcaatggcaaaaattaattcttacgcatggctttctgatatcaaaaaaaatttctctgcaatgcatccgttgca

SEQ ID NO: 394373 - DNA, 75 bp, synthetic construct
  source 1..75: mol_type = other DNA
ataaaacgcttgatattgcaaaatcgtttaaagacgaccgaataaaaatagtttcagagaaagatcgtggaattt

SEQ ID NO: 394374 - DNA, 75 bp, synthetic construct
  source 1..75: mol_type = other DNA
ctactaaaaccgcttccgtgtctctggttgttgataacaccaaaccgctgaccatgtcttctcgtcagatcgctg

SEQ ID NO: 394375 - DNA, 75 bp, synthetic construct
  source 1..75: mol_type = other DNA
attggatcgaactggcattagatgaaaaacgcaaaaataaaaaactgattgagctacacattcgcaaatccgtag

SEQ ID NO: 394376 - DNA, 75 bp, synthetic construct
  source 1..75: mol_type = other DNA
cgcactggacccgacggttatttatacgttctcaccgacgagtccagtggggaattacttaaagttagcccacgc

SEQ ID NO: 394377 - DNA, 75 bp, synthetic construct
  source 1..75: mol_type = other DNA
gcagatgttaattcagcaggctgttgctcggttaacagagcagggtagcgcggtccggatcgtggatattgccgc

SEQ ID NO: 394378 - DNA, 75 bp, synthetic construct
  source 1..75: mol_type = other DNA
aacggcagtttctgaccagtgataatacagagctgttttatcgccactggccagcacaagaagccagttcaacgc

SEQ ID NO: 394379 - DNA, 75 bp, synthetic construct
  source 1..75: mol_type = other DNA
gagatgcgtgacagagggattgagcggcagatgacggaaggtgagttaaaacgacttgcagaacggcaactgacg

SEQ ID NO: 394380 - DNA, 75 bp, synthetic construct
  source 1..75: mol_type = other DNA
taaacaggccagtgacgatgcgcgctttgccgatgtgcatgaagcggtgacggcggtctctgagcaggtgcaaac

SEQ ID NO: 394381 - DNA, 75 bp, synthetic construct
  source 1..75: mol_type = other DNA
ctggcggcccccaaacgcccgtcggggccaacgccaattgagttgctgaaacaggaatatgaacgccggaaagcg

SEQ ID NO: 394382 - DNA, 75 bp, synthetic construct
  source 1..75: mol_type = other DNA
aaagtagacttaaaaatgtcaatcatgacttcgaaccagacagtttcatatcaaaattagacaatatgagtttct

SEQ ID NO: 394383 - DNA, 75 bp, synthetic construct
  source 1..75: mol_type = other DNA
aaagcagattaaaaaatattaaatataattttaatccagatgattatgtttataagttagaaaaaatgagttttt

SEQ ID NO: 394384 - DNA, 75 bp, synthetic construct
  source 1..75: mol_type = other DNA
aataagccttgcgttctttttttggatgagtttgatgctattgctcgctctagagaagatagcaatgaacacaat

SEQ ID NO: 394385 - DNA, 75 bp, synthetic construct
  source 1..75: mol_type = other DNA
atcagcgagtgggattttaccgaaatgctctggaccgtgccgaaagaacacagcaaaacgaaggtggcaatattc

SEQ ID NO: 394386 - DNA, 75 bp, synthetic construct
  source 1..75: mol_type = other DNA
aagggaaaccgtttcgggtcagagttgatgggcaactgacgtttaatttgctgccagaaagaattgatgccgcat

SEQ ID NO: 394387 - DNA, 75 bp, synthetic construct
  source 1..75: mol_type = other DNA
gggataagttatcccatgcaattaaaaatgccctgtctggcgttgtgtgttccctactcttcgttttaccagtcc

SEQ ID NO: 394388 - DNA, 75 bp, synthetic construct
  source 1..75: mol_type = other DNA
gatcgctacctgatgaaaaaactataaattatggggtagaaatagaaacaccaattggcaaaagaattcgcttat

SEQ ID NO: 394389 - DNA, 75 bp, synthetic construct
  source 1..75: mol_type = other DNA
gtcaatggcaaaaattaattcttacgcatggctttctgatatcaaaaaaatttctctgcaatgcatccgttgcag

SEQ ID NO: 394390 - DNA, 75 bp, synthetic construct
  source 1..75: mol_type = other DNA
atgattgtttatggctgtgcattcgatttcttcaatatttctggttcggtatttgtcgaacaggaagttgattcc

SEQ ID NO: 394391 - DNA, 75 bp, synthetic construct
  source 1..75: mol_type = other DNA
cagcgtttccgcccggacgttgtggtgctgaataccggctatgcggttaacgatctttacggaccaatcatcatg

SEQ ID NO: 394392 - DNA, 75 bp, synthetic construct
  source 1..75: mol_type = other DNA
tgagtctgaaggggatatcacttataacatttatacacatgcttcggttcctgatgtacaggttctgattgatga

SEQ ID NO: 394393 - DNA, 75 bp, synthetic construct
  source 1..75: mol_type = other DNA
gcgcatccccgctggtatatcccggtgaccgatgctgctgatttgtgttatctgctgctgtggctggcagagtta

SEQ ID NO: 394394 - DNA, 75 bp, synthetic construct
  source 1..75: mol_type = other DNA
gattaatccggtgcctggggcgccagcagatctcgggacaattgatgcagatgcgattgtctggttaccccatgc

SEQ ID NO: 394395 - DNA, 75 bp, synthetic construct
  source 1..75: mol_type = other DNA
cactatcaataagttggagtcattacctctctggagaaggatatatctctgatcaatatgatttagcgcaacacc

SEQ ID NO: 394396 - DNA, 75 bp, synthetic construct
  source 1..75: mol_type = other DNA
aactccgctacacgacagtgtacaaccgatctaaagatcgcccccctgcgcaaggccaaagcgtctttttttgaa

SEQ ID NO: 394397 - DNA, 75 bp, synthetic construct
  source 1..75: mol_type = other DNA
acggcaagccggatgcagaggaagcagcagaggcggtgaatgcagcgacagccaaggtagcagaagcggaagcga

SEQ ID NO: 394398 - DNA, 75 bp, synthetic construct
  source 1..75: mol_type = other DNA
atgtcagattggtcgctttctcaactatttgcatcgttacatgaagacattcagcttcgactgggaactgcacgt

SEQ ID NO: 394399 - DNA, 75 bp, synthetic construct
  source 1..75: mol_type = other DNA
aagggagcgaagacggtcacggtgtggtgttcccggctgaactggtgcggctgctggacagactggaggaagaaa

SEQ ID NO: 394400 - DNA, 75 bp, synthetic construct
  source 1..75: mol_type = other DNA
ggcgacccgatggtattcattccgctcaaagatgcccaggaggcccagttcctcaaggacaacgatgccatctgg

SEQ ID NO: 394401 - DNA, 75 bp, synthetic construct
  source 1..75: mol_type = other DNA
cgtgtcttgtattggtgatagtgtgttgttggtcatgttactgccctgtaaagcaatgcgccgtagtacctcaca

SEQ ID NO: 394402 - DNA, 75 bp, synthetic construct
  source 1..75: mol_type = other DNA
gccccaactctttaagccagttggctaggcttatgccgtcgctctgtgcttctttatcgaattgctcttttagct

SEQ ID NO: 394403 - DNA, 75 bp, synthetic construct
  source 1..75: mol_type = other DNA
ggacccgttgccatgtttaacccctcatgtttttggtgtaagacaatatacacgaaaaaaaaatattttgaaggg

SEQ ID NO: 394404 - DNA, 75 bp, synthetic construct
  source 1..75: mol_type = other DNA
tcaccggccagcgatattgttccggtaatgggacaggcaccatggtgtcgctcagtcacgctgaacaagttggag

SEQ ID NO: 394405 - DNA, 75 bp, synthetic construct
  source 1..75: mol_type = other DNA
gttgctatcgacgatgatggcaaacaacagaacattattaaaaccatcccgaaaaaaggttacctgtgcaataaa

SEQ ID NO: 394406 - DNA, 75 bp, synthetic construct
  source 1..75: mol_type = other DNA
atgactggttttattgcttctggcaacactattttatgtccagcatccaacaaaggaatttcactggaagtagca

SEQ ID NO: 394407 - DNA, 75 bp, synthetic construct
  source 1..75: mol_type = other DNA
ctcgtgatctgcgttctagctagcctcgtcgccattcgcatagcactcaaggtcgatccggccgaagccattgga

SEQ ID NO: 394408 - DNA, 75 bp, synthetic construct
  source 1..75: mol_type = other DNA
cctggctcgctagttaccagtgattttatcgaaaccataagagcaatcgaatacacaactgaacaggctcgcgca

SEQ ID NO: 394409 - DNA, 75 bp, synthetic construct
  source 1..75: mol_type = other DNA
gattgggctatcgaaccggaagacttcgaacaacttcacattgacggaaaagtaattgtcagttggcctatgaca

SEQ ID NO: 394410 - DNA, 75 bp, synthetic construct
  source 1..75: mol_type = other DNA
gattttgcattctttggacccgttgccatgtttaacccctcatgtttttggtgtaagacaatatacacgaaaaaa

SEQ ID NO: 394411 - DNA, 75 bp, synthetic construct
  source 1..75: mol_type = other DNA
taataaatacatatcacggcgatatttataactgcacaacaaataccgataatgttaaaacgccagacacaccga

SEQ ID NO: 394412 - DNA, 75 bp, synthetic construct
  source 1..75: mol_type = other DNA
gtcgccagcaggcgactccccgtggtgtgggggtaatgtgtgactactttgtcgggaaagcggagaacgccacgc

SEQ ID NO: 394413 - DNA, 75 bp, synthetic construct
  source 1..75: mol_type = other DNA
ttacggtgacactgaacgggcaaaattacaccgccacgaccgatgcttccggcaactggagcaccacggtgccag

SEQ ID NO: 394414 - DNA, 75 bp, synthetic construct
  source 1..75: mol_type = other DNA
ggtagctggacggtgaatgtgccgcctgccgatctcgctgcgctaccggacggcgcgggcaacgtgcaggcgagc

SEQ ID NO: 394415 - DNA, 75 bp, synthetic construct
  source 1..75: mol_type = other DNA
ccagcattactcatccggtcacggtcgatctcgcggccgtggcgattaccattacaccctttccactgacgatgt

SEQ ID NO: 394416 - DNA, 75 bp, synthetic construct
  source 1..75: mol_type = other DNA
tgcaggttcatgctcaggcctctgccgtttcgcgttacgtccgtgaaggaaatgacctgctgatctatatgcagg

SEQ ID NO: 394417 - DNA, 75 bp, synthetic construct
  source 1..75: mol_type = other DNA
aagtgcgaaggtgggggaggatgtcaaatgaagaatatggaaaatggtggatagatgttgaatacatttcatggg

SEQ ID NO: 394418 - DNA, 75 bp, synthetic construct
  source 1..75: mol_type = other DNA
tgcagagtcgcccggatggcaggaccatgctggtgaacaccacgccatacatttttgcgattggcagcctgctgg

SEQ ID NO: 394419 - DNA, 75 bp, synthetic construct
  source 1..75: mol_type = other DNA
tgcgcacatgcaaatctccaggcccgaaatgacattcagcgggtaagtgtccggtggcctgatcatgatgatttc

SEQ ID NO: 394420 - DNA, 75 bp, synthetic construct
  source 1..75: mol_type = other DNA
gaagcatatttttcattatatgttgatggcaattacaagcgcattttgccttccactatctcttattctgataag

SEQ ID NO: 394421 - DNA, 75 bp, synthetic construct
  source 1..75: mol_type = other DNA
ttatccaaaagcttggattgtctggagtattttttgcatacatagttaattatttattttattttctatttatac

SEQ ID NO: 394422 - DNA, 75 bp, synthetic construct
  source 1..75: mol_type = other DNA
atgactagccgccgcattgcctatgcttatttcgatcctgtatgggataaaagcatacacagtacagcacagtta

SEQ ID NO: 394423 - DNA, 75 bp, synthetic construct
  source 1..75: mol_type = other DNA
tattctctggtaacagctctgctgatagttttttcctaagattttcaataatatcagggcttaatgttgactaca

SEQ ID NO: 394424 - DNA, 75 bp, synthetic construct
  source 1..75: mol_type = other DNA
agcggcatcgcagacaatgcaggccttgatgcgcataagctctgcaaccggcgggtcgctgcaggacaccgcaaa

SEQ ID NO: 394425 - DNA, 75 bp, synthetic construct
  source 1..75: mol_type = other DNA
cgcaggaaaccgttaaccaaaaactggatgagttgcggcagaaggccgagctgtcagcggggagtgttggcgagt

SEQ ID NO: 394426 - DNA, 75 bp, synthetic construct
  source 1..75: mol_type = other DNA
ttggtaagcagtacggctacgatgagagtactgtacgacaatggcgtgataaaggtatgccagttggtaaagatg

SEQ ID NO: 394427 - DNA, 75 bp, synthetic construct
  source 1..75: mol_type = other DNA
ggccatgctaagggccgagcaatccctcggcagcgccgccacccagtcccagattaaagaggcaagggaatacgc

SEQ ID NO: 394428 - DNA, 75 bp, synthetic construct
  source 1..75: mol_type = other DNA
tgcttctgtcgcatctcagaccatgcaaagtctgatgaatataagctcaacaacaggaggatctctccaggatac

SEQ ID NO: 394429 - DNA, 75 bp, synthetic construct
  source 1..75: mol_type = other DNA
gaggagttcaactccatccttgagcaaatgcctgaactggcgcggcagatcgccgccgggatgggcgtaagtatc

SEQ ID NO: 394430 - DNA, 75 bp, synthetic construct
  source 1..75: mol_type = other DNA
gcactgtaccgttacattatggacaatttccccgacgccaaaatcgtgacatatgaagacccggtggaatatatc

SEQ ID NO: 394431 - DNA, 75 bp, synthetic construct
  source 1..75: mol_type = other DNA
tgccacggccccgacgcttgccattaacaccatcgccaccgacgatattcttaacgccgctgaggcgggaaatcc

SEQ ID NO: 394432 - DNA, 75 bp, synthetic construct
  source 1..75: mol_type = other DNA
tagacggcgtaaaaacctcgctggcgcgcgcccaaaccaccgccagcaccgacccacagtcgcgctacttcttcg

SEQ ID NO: 394433 - DNA, 75 bp, synthetic construct
  source 1..75: mol_type = other DNA
aacggaatatctattccaggtcaaaacagcagtgcgtgcaataccatcaaaaacttatcttgaattatttgcaca

SEQ ID NO: 394434 - DNA, 75 bp, synthetic construct
  source 1..75: mol_type = other DNA
taaactcaaaaattatcttaataaagaaaatgaaaacagcatttctggtgctgaaattgagctatcactggaaaa

SEQ ID NO: 394435 - DNA, 75 bp, synthetic construct
  source 1..75: mol_type = other DNA
cgtcaaaggcgttattattaattgccgaacaaaataccgagtgcattattggtagcgccttttgtctgatcatcc

SEQ ID NO: 394436 - DNA, 75 bp, synthetic construct
  source 1..75: mol_type = other DNA
aaaaacaagagccttctgtttttagattgattgctcgaagcgtacgaaattatttggttgcattatatcataaaa

SEQ ID NO: 394437 - DNA, 75 bp, synthetic construct
  source 1..75: mol_type = other DNA
cagttacacggtgacggcgaacgtcaccgacagcgcgggcaacagcaattccgccagccataacgtggaggtgaa

SEQ ID NO: 394438 - DNA, 75 bp, synthetic construct
  source 1..75: mol_type = other DNA
acatcaaagtaactctaatctgtcaaataatattcttaatattaaatcctttgataaaatgcagtctgaaaatat

SEQ ID NO: 394439 - DNA, 75 bp, synthetic construct
  source 1..75: mol_type = other DNA
gcagagatggagaaaatgaacaacaatagatattgtaatctgtatgatgttgaatacttacttagtaaagatggt

SEQ ID NO: 394440 - DNA, 75 bp, synthetic construct
  source 1..75: mol_type = other DNA
aggctgtgatgattcccatggatgttgggtggaatgacatgggaagctggggagcgttatgggatattaatcaaa

SEQ ID NO: 394441 - DNA, 75 bp, synthetic construct
  source 1..75: mol_type = other DNA
gcggtgttggttctcgcctttggcctatgtcaagggcttgttatccgaaacaatttctttcttttagtcaaaaaa

SEQ ID NO: 394442 - DNA, 75 bp, synthetic construct
  source 1..75: mol_type = other DNA
gttcaatcagcctcacgccatgttctggctgggattcgacgtcgatcgcgccggtgccgccatcgactggagcga

SEQ ID NO: 394443 - DNA, 75 bp, synthetic construct
  source 1..75: mol_type = other DNA
atggccgttaaattaaaaccagatgtttttgttaatactaatccttttttagaagcaatgaataaggagagggtt

SEQ ID NO: 394444 - DNA, 75 bp, synthetic construct
  source 1..75: mol_type = other DNA
agaggtttgcaaaagatacgaccgagtaatcgttttagaggatgatttaataacctcaagatattttttaaaata

SEQ ID NO: 394445 - DNA, 75 bp, synthetic construct
  source 1..75: mol_type = other DNA
aaagataaagaaaatgtagaaaaagtcagggcttatattagaactataagtggatttaagtcagttaatataatt

SEQ ID NO: 394446 - DNA, 75 bp, synthetic construct
  source 1..75: mol_type = other DNA
acaaaaagttcatcctctttcttcagacgaacgtctcttactttctattattattaattctaattttaacttcag

SEQ ID NO: 394447 - DNA, 75 bp, synthetic construct
  source 1..75: mol_type = other DNA
gcaatgtgcaatattcagtggcttttataatttattctttattcaaacatattttttacttttcattgttactct

SEQ ID NO: 394448 - DNA, 75 bp, synthetic construct
  source 1..75: mol_type = other DNA
tttaaccctttccggcagcacttccggcgtggaagcggggcaaaccgtcaccgtcacctttggcggcaaaaccta

SEQ ID NO: 394449 - DNA, 75 bp, synthetic construct
  source 1..75: mol_type = other DNA
atgaacgataactacccctacattgccaaatataaaatggactggtttttacatagtctgatcaatagccatctg

SEQ ID NO: 394450 - DNA, 75 bp, synthetic construct
  source 1..75: mol_type = other DNA
cctgggaagatcgccgttgaattcccacggcccccttttacatcattaccggggatgtgctgcagtactgcgcac

SEQ ID NO: 394451 - DNA, 75 bp, synthetic construct
  source 1..75: mol_type = other DNA
cttacctgataatacccgccgctggcagttgtcaggcgggaacgaaaaagaacttacttatcttcatgatatgtc

SEQ ID NO: 394452 - DNA, 75 bp, synthetic construct
  source 1..75: mol_type = other DNA
gctataaaagggaatcaggggcggcttcagggaaagatcatcagaagttcactttttgtactaaataattcgcat

SEQ ID NO: 394453 - DNA, 75 bp, synthetic construct
  source 1..75: mol_type = other DNA
ccggttcgcttcaacactctggcgcaatatgcagacattacttcagtttataaaattgccagaatgtctccagca

SEQ ID NO: 394454 - DNA, 75 bp, synthetic construct
  source 1..75: mol_type = other DNA
tcagctaccttgcaaaacaggaacagaagcataacacgcaaatatatgggagtaatgaagtaccgccacccagtg

SEQ ID NO: 394455 - DNA, 75 bp, synthetic construct
  source 1..75: mol_type = other DNA
caatagtaaacaaatgcattcatgtagatccaaatgaaagatatcaatccgtactagacgtactaaacgatctct

SEQ ID NO: 394456 - DNA, 75 bp, synthetic construct
  source 1..75: mol_type = other DNA
atgaatgcagatgacaaaaacagaaatcaaagaacagaaaaaaccattaagcaaaaaatagcatcagcgcagatg

SEQ ID NO: 394457 - DNA, 75 bp, synthetic construct
  source 1..75: mol_type = other DNA
aggcgtatttcacttctggaattccaacttgggttattggctgaatatgcactttttttttctgtgccatgtgtt

SEQ ID NO: 394458 - DNA, 75 bp, synthetic construct
  source 1..75: mol_type = other DNA
gaggattatgtcagcgaaagcggattttttggctcgatgatgcatgtcgggattattgagttgcgacgctgccag

SEQ ID NO: 394459 - DNA, 75 bp, synthetic construct
  source 1..75: mol_type = other DNA
agcaaggtaaagcagttattacagattcggatggatgaactggcgaaactggtcggtcagtcatcggtgcaaaaa

SEQ ID NO: 394460 - DNA, 75 bp, synthetic construct
  source 1..75: mol_type = other DNA
taacagccgcaattaacagcaatgcggatgatattgtcgacactgttgccagaaggccaattcagaaattgattg

SEQ ID NO: 394461 - DNA, 75 bp, synthetic construct
  source 1..75: mol_type = other DNA
taatggttttttcacaacgagctgaatcactggggttatactcgaataatcgcttgcttatcaatataattgccg

SEQ ID NO: 394462 - DNA, 75 bp, synthetic construct
  source 1..75: mol_type = other DNA
atgcagttatccaactcagattaaatgcggtaaaagcaagtattcaaagcgtcaatccaaacgagtttataacac

SEQ ID NO: 394463 - DNA, 75 bp, synthetic construct
  source 1..75: mol_type = other DNA
agacgttcatatatgatcttttaagaagaactgatgccgagaagttcatggatagctttggaaatgtatttgaaa

SEQ ID NO: 394464 - DNA, 75 bp, synthetic construct
  source 1..75: mol_type = other DNA
atccaagacatttgaaaagcctttgttagaatactattcatcttcaccgtacttagaaaatcctttaatcaaaaa

SEQ ID NO: 394465 - DNA, 75 bp, synthetic construct
  source 1..75: mol_type = other DNA
ctggcatgggtttatgacgatcgttcagtgattacccccggatatcaggaccgaaaaaatatggaagattacctt

SEQ ID NO: 394466 - DNA, 75 bp, synthetic construct
  source 1..75: mol_type = other DNA
atgactgtaaccattcaggccagcgatgccggcgcgtcaggaaaccttccggaaggtgaaagcctgaccttactg

SEQ ID NO: 394467 - DNA, 75 bp, synthetic construct
  source 1..75: mol_type = other DNA
ccacgtttgctacggggccggcggtatttaaagggaatacaccgctgccggaagatatggagatgcaaaccgcta

SEQ ID NO: 394468 - DNA, 75 bp, synthetic construct
  source 1..75: mol_type = other DNA
taggactttttggtgccttttctttcgatatcacgcaggccaatacgacacttgcagatggcacccgtcacagtg

SEQ ID NO: 394469 - DNA, 75 bp, synthetic construct
  source 1..75: mol_type = other DNA
cttgttgggctttattcacggtttattgttctgggacggcgatattttgctggcttacgggctggtgggcttaat

SEQ ID NO: 394470 - DNA, 75 bp, synthetic construct
  source 1..75: mol_type = other DNA
gcatttcttgaactcatcggccaggtgaaattcctcacgctttttgcgctactgtttggtgcgggcctgcaaatg

SEQ ID NO: 394471 - DNA, 75 bp, synthetic construct
  source 1..75: mol_type = other DNA
aactttaagtatcatccccattggtcttgaaaagaaaaacggagtgcatttttttccaagaaataatttatacca

SEQ ID NO: 394472 - DNA, 75 bp, synthetic construct
  source 1..75: mol_type = other DNA
atgctaagaattaaacattttgacgctaacgaaaaactacagattttatatgcaaagcaactctgcgagcgtttt

SEQ ID NO: 394473 - DNA, 75 bp, synthetic construct
  source 1..75: mol_type = other DNA
cagggcttctaaactatagttttaatggtaattctattaataatcgtagtaaccataatgcaggaaaatcaaact

SEQ ID NO: 394474 - DNA, 75 bp, synthetic construct
  source 1..75: mol_type = other DNA
gaagattggatttaaaaatgatgccgatggtgacactgattcatacatgtggtttgagacaggcgacaacggcaa

SEQ ID NO: 394475 - DNA, 75 bp, synthetic construct
  source 1..75: mol_type = other DNA
gaaagtggtgggttactgttaacaaaagaaattggtgggggatataaagattatgctccatggtttggtcgaggt

SEQ ID NO: 394476 - DNA, 75 bp, synthetic construct
  source 1..75: mol_type = other DNA
atccgaaaaaggagtggcgctgggaccggagccgtggcatatgcatccgattgcgtttttgaattctataaagaa

SEQ ID NO: 394477 - DNA, 75 bp, synthetic construct
  source 1..75: mol_type = other DNA
ccggtttatctgacctggcaaactgatgcaccgttatttgataagaaggaacagggtatggttgcgggagagcga

SEQ ID NO: 394478 - DNA, 75 bp, synthetic construct
  source 1..75: mol_type = other DNA
gtttatgtgatcgacaacaaagagccgacttccgtcgaaaaaggttccacgaattacacactgctggccagctcg

SEQ ID NO: 394479 - DNA, 75 bp, synthetic construct
  source 1..75: mol_type = other DNA
taaatggagtcgggggaaactgtgataatcctttatggagtgatgttgaaattaaagtattggctttaagaaatg

SEQ ID NO: 394480 - DNA, 75 bp, synthetic construct
  source 1..75: mol_type = other DNA
ccggtttatctgacctggcaaaccgatgcaccgttatttgataagggggaacagggtatggttgcgggaaatcgg

SEQ ID NO: 394481 - DNA, 75 bp, synthetic construct
  source 1..75: mol_type = other DNA
tacctttgaagcgggaacatttagcggcagcgaagggacgctgaatacctggtacgtccagccacaggtgcaaat

SEQ ID NO: 394482 - DNA, 75 bp, synthetic construct
  source 1..75: mol_type = other DNA
ctatatgaaccgtcgcgaggcggggagtatcgcttttggtctgagcattggttttgtggcctcggtggggattct

SEQ ID NO: 394483 - DNA, 75 bp, synthetic construct
  source 1..75: mol_type = other DNA
taccagtttggctggaagcaaagtctgatcgccgccgtggtggtactgatgacccgtgtggtagtcgtgcgctat

SEQ ID NO: 394484 - DNA, 75 bp, synthetic construct
  source 1..75: mol_type = other DNA
ctcagaaatatgactaaggaacaggcagaaatcatttattataatcattattgggaacccaaaggattctgtaag

SEQ ID NO: 394485 - DNA, 75 bp, synthetic construct
  source 1..75: mol_type = other DNA
atcctttgtgctggtgaaacattatattcagccggctgataacgcagaaagtggactgacgttttttacgctgta

SEQ ID NO: 394486 - DNA, 75 bp, synthetic construct
  source 1..75: mol_type = other DNA
tcactgcattctcaagggtcggcaagcagtatgtggatgcgtcatgtcggagggcacgaacgttcaagggccggt

SEQ ID NO: 394487 - DNA, 75 bp, synthetic construct
  source 1..75: mol_type = other DNA
gccatgaagaacgcgaatttttgaaacgcctcacaatgatcgagaaagacctacacacgcagttagccagtatcg

SEQ ID NO: 394488 - DNA, 75 bp, synthetic construct
  source 1..75: mol_type = other DNA
ggatgatatttcgtacaccgcaaaagatgcgattaaatggatctccaccaccacaaaagccagtgacaggtcgtt

SEQ ID NO: 394489 - DNA, 75 bp, synthetic construct
  source 1..75: mol_type = other DNA
ctctgcactcaccacagactgatctgatgaatattgctgaacaccttcgcacactggcggatgagctaacacgca

SEQ ID NO: 394490 - DNA, 75 bp, synthetic construct
  source 1..75: mol_type = other DNA
tgattattatgacttcctgctacgggtcgcttacctggcaaagaacaacaccaaacatttaagtgacggttaccg

SEQ ID NO: 394491 - DNA, 75 bp, synthetic construct
  source 1..75: mol_type = other DNA
ggttcaaatacatacttcatgttgacaaactccggtgacaacatggggacttataacggattaaggccattatgg

SEQ ID NO: 394492 - DNA, 75 bp, synthetic construct
  source 1..75: mol_type = other DNA
aaaccgttatcaccgatacgggtgccaaaaaattagctcaggcagccgcgccagatggtaagcctgttcgcctga

SEQ ID NO: 394493 - DNA, 75 bp, synthetic construct
  source 1..75: mol_type = other DNA
gcgcccttgatgccgtaacgttgatgaccactggcaccaacttcctcaacgaacatattattgaaaaaagcgcgc

SEQ ID NO: 394494 - DNA, 75 bp, synthetic construct
  source 1..75: mol_type = other DNA
gcctgcccgcaaacctgaaatcgacacaatggcagatccttgccggaccgattttgatcctgttgatcttgtcga

SEQ ID NO: 394495 - DNA, 75 bp, synthetic construct
  source 1..75: mol_type = other DNA
atggacatgctcgaaagcggttttcatcaagtatttaatgtcccactttttacacatgacattgaccgttccgaa

SEQ ID NO: 394496 - DNA, 75 bp, synthetic construct
  source 1..75: mol_type = other DNA
gaacaataaatgagatgaattcatatacacctcatatgaaagtaaatagaatatcagaacattccaagaaattac

SEQ ID NO: 394497 - DNA, 75 bp, synthetic construct
  source 1..75: mol_type = other DNA
gttgcttacatggcaaaagagtacagtaaagattttcatgacggttatcgaaattttggcacaagccagcttata

SEQ ID NO: 394498 - DNA, 75 bp, synthetic construct
  source 1..75: mol_type = other DNA
cctatctggccaaagactacagtaaagacttccatgacggttatcgcaactttggcacaagccagctaatacagc

SEQ ID NO: 394499 - DNA, 75 bp, synthetic construct
  source 1..75: mol_type = other DNA
tatctgggccagggaacgggttaccggggaacatcctcactaccatctggttctgctgtttgacagagaggccta

SEQ ID NO: 394500 - DNA, 75 bp, synthetic construct
  source 1..75: mol_type = other DNA
gttaatggcctgaaaaagggcctttccggagccacgcgtgaagtggctcgtctgacacgccagcaggacgtactg

SEQ ID NO: 394501 - DNA, 75 bp, synthetic construct
  source 1..75: mol_type = other DNA
ctggcagacagggtgacgaaaaatctggagggtattaattttggtcagcgttcccgtatgactgatggtgatgca

SEQ ID NO: 394502 - DNA, 75 bp, synthetic construct
  source 1..75: mol_type = other DNA
gtggaagtaaaacccacatatcagatacgggcagaatttaacatcacccagaaacccggcgaggatgccggacaa

SEQ ID NO: 394503 - DNA, 75 bp, synthetic construct
  source 1..75: mol_type = other DNA
gctcaatggggtgacggattttctgcttgggcaccggggctgccggaaaacgaggtgaacaggcacatctgtacc

SEQ ID NO: 394504 - DNA, 75 bp, synthetic construct
  source 1..75: mol_type = other DNA
gacagggtgacgaaaaatctgggtgatattgattttggccagcgggccagcatgaccgacagttatgcattctgg

SEQ ID NO: 394505 - DNA, 75 bp, synthetic construct
  source 1..75: mol_type = other DNA
gagctagattgtttgttaacgagagtatctgcgtcatcgaaccagtttagaaactctaatggttacttacctgag

SEQ ID NO: 394506 - DNA, 75 bp, synthetic construct
  source 1..75: mol_type = other DNA
tcagacactttcaggatcatacgcaatttgcccgcaattgttgggcgcggttgttgggcaaggttcagcgtctat

SEQ ID NO: 394507 - DNA, 75 bp, synthetic construct
  source 1..75: mol_type = other DNA
atttccggtttcgataaagaatatactcatataaatggggcaggaaagaaccaatctatttccctttatgaagaa

SEQ ID NO: 394508 - DNA, 75 bp, synthetic construct
  source 1..75: mol_type = other DNA
ggcaaggccgcccgacgcactggcacacagtggagcgctggcaacatcttgatgaattaattcatgcagacatta

SEQ ID NO: 394509 - DNA, 75 bp, synthetic construct
  source 1..75: mol_type = other DNA
aagcgaatatccggatcggcggcacgatagatccgtcctggaaaaaatcggttgatggtctgaagaagggattat

SEQ ID NO: 394510 - DNA, 75 bp, synthetic construct
  source 1..75: mol_type = other DNA
gtgtgaatccaccatccgccgcatcactggagcctgaagatgatattttcagggtggtttattctccggtaagct

SEQ ID NO: 394511 - DNA, 75 bp, synthetic construct
  source 1..75: mol_type = other DNA
cggctggtggcgtatataatcctactggctatataaaccacggtaacgccataaccgccatcaaaaccgatgcct

SEQ ID NO: 394512 - DNA, 75 bp, synthetic construct
  source 1..75: mol_type = other DNA
cagtgtggtgttcccgccggtgctggtgcagatgctcgaccggctggaaagtgaaatcctggctgaccgggtgag

SEQ ID NO: 394513 - DNA, 75 bp, synthetic construct
  source 1..75: mol_type = other DNA
aaagctggctggaggaaaacctgccgtcagcatttgcacagcatccgtggcgcagctcgcttggctctatcggtg

SEQ ID NO: 394514 - DNA, 75 bp, synthetic construct
  source 1..75: mol_type = other DNA
tgtttattattataaaacgaacaccgctgccgccaccgtgggcgagttaagctccaacgtaacgtataccatttc

SEQ ID NO: 394515 - DNA, 75 bp, synthetic construct
  source 1..75: mol_type = other DNA
tgttcttgcaagacgtcaggggtggtttgatgcactgaatgagcatggactggaagatacatggttgcggctggt

SEQ ID NO: 394516 - DNA, 75 bp, synthetic construct
  source 1..75: mol_type = other DNA
tcggtaccgaatacctgcaattctgttcccgcgcacaacaaaacccactggccgggaagaaagaccagccgggcg

SEQ ID NO: 394517 - DNA, 75 bp, synthetic construct
  source 1..75: mol_type = other DNA
tattgtcctgaaagtacggcaggacagccgggttatcaacaaagcggtgttcctgactctgggtattaaccttga

SEQ ID NO: 394518 - DNA, 75 bp, synthetic construct
  source 1..75: mol_type = other DNA
atggccgacagcagcagcgatcagattgctatgttgaaccagaaattatcggactttgccccatccatgccccac

SEQ ID NO: 394519 - DNA, 75 bp, synthetic construct
  source 1..75: mol_type = other DNA
atggaaaatcttgctctgacgacgttaatgctgccttttatcggcgcactggtcgtttcgttttcgccacaacgt

SEQ ID NO: 394520 - DNA, 75 bp, synthetic construct
  source 1..75: mol_type = other DNA
gttgcttacttctgtaacgtccttccacggacggaagagtgcacgacagattcatggtctcagtttgaacggaat

SEQ ID NO: 394521 - DNA, 75 bp, synthetic construct
  source 1..75: mol_type = other DNA
taatggagcatactcatgggaattgcaacgcctgcgtggtcgtgtagccgcttaccttggatttgatgccataga

SEQ ID NO: 394522 - DNA, 75 bp, synthetic construct
  source 1..75: mol_type = other DNA
tcaataatgcatcaccggaatcactgcagatagtctgggagccggtgttttactctggtaatacagttcattctc

SEQ ID NO: 394523 - DNA, 75 bp, synthetic construct
  source 1..75: mol_type = other DNA
tagaaatcaataatagatacaacattgtgatattcacaacgactgcattttttgcatcttatctacttgcgactc

SEQ ID NO: 394524 - DNA, 75 bp, synthetic construct
  source 1..75: mol_type = other DNA
ttattgatagcgtccagtgtattcaggcttactacgcttcgtacattatttataatggggtttatttctatattt

SEQ ID NO: 394525 - DNA, 75 bp, synthetic construct
  source 1..75: mol_type = other DNA
tatattaacgcccaacgctattgctctagccaatgaaaaaatccaggcaattgttgatgataaatgtaaagggat

SEQ ID NO: 394526 - DNA, 75 bp, synthetic construct
  source 1..75: mol_type = other DNA
ttctgcttctggatgggctttgctcaggggctgacgctggactacctgcgccgggctatccgtcaggcgctgccg

SEQ ID NO: 394527 - DNA, 75 bp, synthetic construct
  source 1..75: mol_type = other DNA
tccctgttattcgtgaaggtaaccatctgcgtggtgccagcgcggttatcgataaagactgggccagcgcccgtt

SEQ ID NO: 394528 - DNA, 75 bp, synthetic construct
  source 1..75: mol_type = other DNA
tgccggaaatctgcgaggctccacacttttcctgccaaccccggcttcatactcaaatagttgggatgcgttcat

SEQ ID NO: 394529 - DNA, 75 bp, synthetic construct
  source 1..75: mol_type = other DNA
gtgttggcaggcaacggtgccacgactgccccgacggtcaccacgcagccggacggcacggtggagatcagtgtc

SEQ ID NO: 394530 - DNA, 75 bp, synthetic construct
  source 1..75: mol_type = other DNA
gtggaaaaggtcaaaatacgtcagcaagaaacggaaatcctggtggcaccagtagttttggcacatatctctcgg

SEQ ID NO: 394531 - DNA, 75 bp, synthetic construct
  source 1..75: mol_type = other DNA
cggctcccgttccgtgaacgttcaaaagcggcctggccggttgagctgccggtcagggtggcggtgtgctcttca

SEQ ID NO: 394532 - DNA, 75 bp, synthetic construct
  source 1..75: mol_type = other DNA
tcttaaaacctatctcgctaaaaaacggcgtctgggataaatcgttggaattaagcgatctgcagagacttaaac

SEQ ID NO: 394533 - DNA, 75 bp, synthetic construct
  source 1..75: mol_type = other DNA
tgaagcgcgggtcgttatcgtcaatgatgaaggctttgagaccttccacgttattcacgcgatacataaagatga

SEQ ID NO: 394534 - DNA, 75 bp, synthetic construct
  source 1..75: mol_type = other DNA
ttgtcagcatagccgccgccgctgacgcagccggacacggtgaaaaagaggcggtataccgggcggcgtgtgaag

SEQ ID NO: 394535 - DNA, 75 bp, synthetic construct
  source 1..75: mol_type = other DNA
aagctaggatgttgatggaaggtgaactgcatgctggttttgttcgtatgccggtaacagaattattggcctctc

SEQ ID NO: 394536 - DNA, 75 bp, synthetic construct
  source 1..75: mol_type = other DNA
gaacaaaaattgctaacaaatgatagaactgatttaataaatgaaaaacttaatgagctagccaagaccgatgaa

SEQ ID NO: 394537 - DNA, 75 bp, synthetic construct
  source 1..75: mol_type = other DNA
ttgattttattagatctaggaaaaacaatatagtattggacgatataaaggatgatttcaaaaaaaatgatggta

SEQ ID NO: 394538 - DNA, 75 bp, synthetic construct
  source 1..75: mol_type = other DNA
ttggcgggcaacagcgcaacggttgctccgacggtcaccacgcagcaggacggcacggtggagatcagtgtcacc

SEQ ID NO: 394539 - DNA, 75 bp, synthetic construct
  source 1..75: mol_type = other DNA
ttgttgctggatgaaatagacgtcctgtcaaaatcagaatggacactggcggatgaactggtcaaggcccaaaaa

SEQ ID NO: 394540 - DNA, 75 bp, synthetic construct
  source 1..75: mol_type = other DNA
tcagcaggcagaccgtatcgaatgcctggaaaagaaaaacgacgatctgggcaaagctattagggccgcacttcc

SEQ ID NO: 394541 - DNA, 75 bp, synthetic construct
  source 1..75: mol_type = other DNA
taaaaaataatgccagttatcaacttaataacgcattacctaacaaagaaaccatctccagcaatttttgtgaac

SEQ ID NO: 394542 - DNA, 75 bp, synthetic construct
  source 1..75: mol_type = other DNA
ataattactcccatttcaacgggtcctttctggaacctgaaacaccgagggtctggggacgcgcaaaaacgcgct

SEQ ID NO: 394543 - DNA, 75 bp, synthetic construct
  source 1..75: mol_type = other DNA
atcatgaagaaagtgcaactttggcgaaagttgcttctaaaacaaaatatggctatatgaaaagctcatattacg

SEQ ID NO: 394544 - DNA, 75 bp, synthetic construct
  source 1..75: mol_type = other DNA
gatattaagagcgctggcaataaatgaatttttatttaacgccggggaggtgaattacgatattagccgtctttc

SEQ ID NO: 394545 - DNA, 75 bp, synthetic construct
  source 1..75: mol_type = other DNA
aggcaatatcggccagcttaaaagtgatattcagttcttgtgcgcgcaggcgtgggcgtcgggaatgaccgagcg

SEQ ID NO: 394546 - DNA, 75 bp, synthetic construct
  source 1..75: mol_type = other DNA
acggtgttcttgtggaagaggattaccttggtgaggcagggtgtttcagcgagccggtgtttacagtgccgtcgg

SEQ ID NO: 394547 - DNA, 75 bp, synthetic construct
  source 1..75: mol_type = other DNA
agtatcattagctatttcactaatgaaggcgttcatgcaggagatgagttaacaaaagcggcgcgtgattctcaa

SEQ ID NO: 394548 - DNA, 75 bp, synthetic construct
  source 1..75: mol_type = other DNA
cacggcgatccaggtgccaatgaaacacgttggcagtgagtctgaggtaaacgcagtgcgcgacttcctcctggc

SEQ ID NO: 394549 - DNA, 75 bp, synthetic construct
  source 1..75: mol_type = other DNA
aggtggccgagaacggcatcaactccacggcgatccaggtgccaatgaaacacgttggcagtgagtctgaggtaa

SEQ ID NO: 394550 - DNA, 75 bp, synthetic construct
  source 1..75: mol_type = other DNA
atcgtgatgcacctggcggcagaaagtcatgtggaccgttccattgatggcccggcggcctttatccagaccaac

SEQ ID NO: 394551 - DNA, 75 bp, synthetic construct
  source 1..75: mol_type = other DNA
gccggccgcctttatccagaccaacgtgataggtaccttcacactgctggaggcggcccgtcattactggtccgg

SEQ ID NO: 394552 - DNA, 75 bp, synthetic construct
  source 1..75: mol_type = other DNA
atgaagattcttgtcaccggtggtgcaggctttatcggctctgctgtagttcgtcatatcattgaaaatacccgg

SEQ ID NO: 394553 - DNA, 75 bp, synthetic construct
  source 1..75: mol_type = other DNA
gcgatctgggctgggtaccacaggagacgttcgagagcgggattgagaaaaccgtgcactggtacctgaacaacc

SEQ ID NO: 394554 - DNA, 75 bp, synthetic construct
  source 1..75: mol_type = other DNA
cgctattctttctcgcgtacggatattaccgatgcccagggcgttgctcagcagttcagtgaattccggcctgat

SEQ ID NO: 394555 - DNA, 75 bp, synthetic construct
  source 1..75: mol_type = other DNA
tcacggatgccgctgccgtggcggcccagtttagcgagttccgcccagatatcgtgatgcacctggcggcagaaa

SEQ ID NO: 394556 - DNA, 75 bp, synthetic construct
  source 1..75: mol_type = other DNA
cgtctgtatagcggtgtggaaagcaatgatgaaacagtcgctgcaacgccaaaagcagtgaaaatagcgatggat

SEQ ID NO: 394557 - DNA, 75 bp, synthetic construct
  source 1..75: mol_type = other DNA
gtggtgttagtgcgacgaacggcaccagtggcgggaatagcgtattcgcatcgttaattgctcctggtggcgcag

SEQ ID NO: 394558 - DNA, 75 bp, synthetic construct
  source 1..75: mol_type = other DNA
aataacgggcggcggtggcggagggggcggctgcaaggctacatccaataatgaaacgtttttcggtgctggcgg

SEQ ID NO: 394559 - DNA, 75 bp, synthetic construct
  source 1..75: mol_type = other DNA
tatgtggatgacaaaatatcagagcacgaacagtcacgacgtcacccggacgcctcgctgaccgcaaagggtttt

SEQ ID NO: 394560 - DNA, 75 bp, synthetic construct
  source 1..75: mol_type = other DNA
aaaacctacaccaccacggtacagaccggcggtagctggagctacaccctcggcagcgccgatgtcacttcgctg

SEQ ID NO: 394561 - DNA, 75 bp, synthetic construct
  source 1..75: mol_type = other DNA
ggctatatccaataatgaaacgtttttcggtgctggcggcggggcaggtgggacagtaatcaccacgctgatcct

SEQ ID NO: 394562 - DNA, 75 bp, synthetic construct
  source 1..75: mol_type = other DNA
aaggctgggacggaagtcactgtcgttctcaaaatcggcggagctgcatgacaaggtcatcgggcattatctgaa

SEQ ID NO: 394563 - DNA, 75 bp, synthetic construct
  source 1..75: mol_type = other DNA
gttgccgccattcgccgcctgtgcgacgagcacggtattgtgatgattgccgatgaagtgcaaagcggctttgcg

SEQ ID NO: 394564 - DNA, 75 bp, synthetic construct
  source 1..75: mol_type = other DNA
gtgaaaatcgcccgcgcccataccggacgccctggcgtgattgcgtttagcggcggcttccacggtcgtacgtat

SEQ ID NO: 394565 - DNA, 75 bp, synthetic construct
  source 1..75: mol_type = other DNA
aatgacgatggcgaaaagcctcgcgggcgggatgccgctttcgggcgtggtcggtaacgcgaatattatggacgc

SEQ ID NO: 394566 - DNA, 75 bp, synthetic construct
  source 1..75: mol_type = other DNA
ttttggtgaggttgtgactgttggtcagcgggttattgttttttctctcaaacctgatcaacatttgagaatttg

SEQ ID NO: 394567 - DNA, 75 bp, synthetic construct
  source 1..75: mol_type = other DNA
ggcatctggtgaacgttgacatgctgaaaggacaattcctgctactcgacgggaataaggctacaggtattgatg

SEQ ID NO: 394568 - DNA, 75 bp, synthetic construct
  source 1..75: mol_type = other DNA
cggaaagtcgccttgtgaatgggtacgcctcacagatcattaacgcgattcaggatgatgaatccatgccgggcc

SEQ ID NO: 394569 - DNA, 75 bp, synthetic construct
  source 1..75: mol_type = other DNA
tatctgaactagtttccgcacaggccgtgatggaccgacaggctgtacttgatacgaccgctgcactgaatgaat

SEQ ID NO: 394570 - DNA, 75 bp, synthetic construct
  source 1..75: mol_type = other DNA
taacgtgctgaattccaccttcgggaacaaccggtacggtcggtacagcaaagggacggttggcgggagttcttc

SEQ ID NO: 394571 - DNA, 75 bp, synthetic construct
  source 1..75: mol_type = other DNA
agtaccctggcgagaatcaaaagtgagatccgcggcgtgagccaggggattaagaccataaagggaaccgtgacg

SEQ ID NO: 394572 - DNA, 75 bp, synthetic construct
  source 1..75: mol_type = other DNA
gttcaccaggtttcaggatttccggttctttagctataggcggtcccggaggcagttcagtgctgggtgctggcg

SEQ ID NO: 394573 - DNA, 75 bp, synthetic construct
  source 1..75: mol_type = other DNA
agcggttataaagaaaaatatatctcacatggtgccagagatttaactacactaggctattcctcttgttcagca

SEQ ID NO: 394574 - DNA, 75 bp, synthetic construct
  source 1..75: mol_type = other DNA
ggtgggaacaaattgaaataggcgacattgctgatgtcatctctggtgggacaccaaaatcgggagtcgctgaaa

SEQ ID NO: 394575 - DNA, 75 bp, synthetic construct
  source 1..75: mol_type = other DNA
ggagacggcggaatgtgatgtactcagtttgaatgggcatgcgaaaattaccttcattgagtgcaagggttataa

SEQ ID NO: 394576 - DNA, 75 bp, synthetic construct
  source 1..75: mol_type = other DNA
aagctgtaatccagttgagcagacattaataaaatatattaaaattgagagttttgaggatactcttaacaatat

SEQ ID NO: 394577 - DNA, 75 bp, synthetic construct
  source 1..75: mol_type = other DNA
aatacattacagacaagcaggaaaacctaaaatgcgtaaatctgtatggattggtccaaagcttgacgcaagtac

SEQ ID NO: 394578 - DNA, 75 bp, synthetic construct
  source 1..75: mol_type = other DNA
agctgaagaaggcggtgaaactcgcgtcttaaagctacgccaaatagagccggagtttttggaacgtatgtttgc

SEQ ID NO: 394579 - DNA, 75 bp, synthetic construct
  source 1..75: mol_type = other DNA
cgattgcgacaagatcggttatgaagaattgaataaatatgctaaccgatttgatttgtatgcaaaagaaaacac

SEQ ID NO: 394580 - DNA, 75 bp, synthetic construct
  source 1..75: mol_type = other DNA
cgcaagaaggttactgcttcctagtatttggcaaggatcacaatataatgctaccataggtggcacaaatttatt

SEQ ID NO: 394581 - DNA, 75 bp, synthetic construct
  source 1..75: mol_type = other DNA
gcttttttgcagttttggttgaccctgatacatttgaagttaaaggagtcgaaccaccacctgttcctttagaaa

SEQ ID NO: 394582 - DNA, 75 bp, synthetic construct
  source 1..75: mol_type = other DNA
atgacaatggaaaataaaaaacctcatgcccttggggtttttttgctaattaattctgttctaacagaaggttat

SEQ ID NO: 394583 - DNA, 75 bp, synthetic construct
  source 1..75: mol_type = other DNA
aacgctttaaggtttaaagtcggaagtcgtcattatattattaatttcccctttgaatctgacggtaaaaaaaat

SEQ ID NO: 394584 - DNA, 75 bp, synthetic construct
  source 1..75: mol_type = other DNA
ccgcgtgatacctggcgcaagaccaacattcagatcctcggcctgcccgggagcggcaagagcgtgatggccacc

SEQ ID NO: 394585 - DNA, 75 bp, synthetic construct
  source 1..75: mol_type = other DNA
aagacgactacctacttaactatatgctggatgtcgaaagtcgtggctcactgctctcaactgacgactttaaaa

SEQ ID NO: 394586 - DNA, 75 bp, synthetic construct
  source 1..75: mol_type = other DNA
aactacacaactaaaaataccgccgactattttatccataaaaacctcggtaagttcctgcgtggcgaactggat

SEQ ID NO: 394587 - DNA, 75 bp, synthetic construct
  source 1..75: mol_type = other DNA
tattgtcttggatgaattaataaaagcgtgctcaaaaatctcatcagagattagaaaaaatgaagtagatgttca

SEQ ID NO: 394588 - DNA, 75 bp, synthetic construct
  source 1..75: mol_type = other DNA
agaagaagtttgttgtttcaagtaattactatattactatggacaaaataagttcagagttttacagtgaaataa

SEQ ID NO: 394589 - DNA, 75 bp, synthetic construct
  source 1..75: mol_type = other DNA
gccactgctgaacgctggcgtcgcgggtttgaacagtgtggcgagcttttgtcagaaaatatgatcaatggcaga

SEQ ID NO: 394590 - DNA, 75 bp, synthetic construct
  source 1..75: mol_type = other DNA
cccggcgaatcacttaaagtttttgtggaagagttgaagaaaaagcatggcagtaacgccgatttttatttcgat

SEQ ID NO: 394591 - DNA, 75 bp, synthetic construct
  source 1..75: mol_type = other DNA
gaggaatacaatgaaaaattatcagttcctccagtaattgatgatatcccttcattacaaaaaaatactattgtt

SEQ ID NO: 394592 - DNA, 75 bp, synthetic construct
  source 1..75: mol_type = other DNA
aagtacctaagactcataaagaacgacagatagagttaattattgaagaaagaccaactgaaaagcaaattgacg

SEQ ID NO: 394593 - DNA, 75 bp, synthetic construct
  source 1..75: mol_type = other DNA
agttcaataaatttgctgcaattcgtttccctcactcaaactcagacacttatctttttagtcgctatattagag

SEQ ID NO: 394594 - DNA, 75 bp, synthetic construct
  source 1..75: mol_type = other DNA
caacaccggcagcagcaatcacaccattactgtcgatctcagcgccccggcgatgggtattaataatcgattccc

SEQ ID NO: 394595 - DNA, 75 bp, synthetic construct
  source 1..75: mol_type = other DNA
caatgaattaatgcctgttattgcagactggcttgaacatcaggcacctacttcactacgagtgaactggttatg

SEQ ID NO: 394596 - DNA, 75 bp, synthetic construct
  source 1..75: mol_type = other DNA
cgatgcggtggtgatttctgattttatcgctcagcggttgcctgacgacgtgacgagtaaagtgaaagagctgca

SEQ ID NO: 394597 - DNA, 75 bp, synthetic construct
  source 1..75: mol_type = other DNA
cgtttcactgccggacgaaaaacaagcatcaccggtcgagcgatttctggagaaacacccggatgcgcatacctg

SEQ ID NO: 394598 - DNA, 75 bp, synthetic construct
  source 1..75: mol_type = other DNA
caactatatgccgaaatgatacgtattggtaatgatgggcgtatatacagtaatgagggcttttctaatctcaat

SEQ ID NO: 394599 - DNA, 75 bp, synthetic construct
  source 1..75: mol_type = other DNA
agcggctgcggttgcaggggtagtagtgaccgagcgagaggacttcgacgaacttgtcagaactccatttgtggc

SEQ ID NO: 394600 - DNA, 75 bp, synthetic construct
  source 1..75: mol_type = other DNA
tttccaataaatataattcaagggctggttctgatgaactcttgtttctggccagtgcatttacacagcttggcg

SEQ ID NO: 394601 - DNA, 75 bp, synthetic construct
  source 1..75: mol_type = other DNA
ccaagcatttataaagatgttcgcagtatttttatgcgtgctaaggaaacatactgtagagaatggggtttcgat

SEQ ID NO: 394602 - DNA, 75 bp, synthetic construct
  source 1..75: mol_type = other DNA
tcggaactctcacttttaaaatgcaagcaatgtctgtattacgatacagacaggacgaaaaaaatcactacctca

SEQ ID NO: 394603 - DNA, 75 bp, synthetic construct
  source 1..75: mol_type = other DNA
tgatactaggcctgttccccatccatgttttcgcatggagtaatcctggcgaggctttttctggtgatttgaaaa

SEQ ID NO: 394604 - DNA, 75 bp, synthetic construct
  source 1..75: mol_type = other DNA
ggctctgctgatcattgctggctggggcggccttgtccgattcctgatggatgtgaagcagggcaaagcgaaatg

SEQ ID NO: 394605 - DNA, 75 bp, synthetic construct
  source 1..75: mol_type = other DNA
gccgcaaagacgaatttccggaagtcggagtcagccatagtagtgatgaagcgggtaatgaccgtggagcgaagg

SEQ ID NO: 394606 - DNA, 75 bp, synthetic construct
  source 1..75: mol_type = other DNA
ggatgttatattttggcaagtttggcgcgttggcagttggtttttttcttatgcctgcgtatagttattaccttg

SEQ ID NO: 394607 - DNA, 75 bp, synthetic construct
  source 1..75: mol_type = other DNA
ttagaaaaagacataccgatacttggcattcatagcggcccggctggtttcataggggacaagggtattgcccca

SEQ ID NO: 394608 - DNA, 75 bp, synthetic construct
  source 1..75: mol_type = other DNA
cgaggttactatgcatccggccttgccaagggtatccccatggaactagttcttgatcagactataacgtctgct

SEQ ID NO: 394609 - DNA, 75 bp, synthetic construct
  source 1..75: mol_type = other DNA
ccgcgccctgctcgctggcgcatctggtcagttacgtaatcaggcaaccaccgcaggtaatctgctccagcgcac

SEQ ID NO: 394610 - DNA, 75 bp, synthetic construct
  source 1..75: mol_type = other DNA
caaatagtgccaaacagtggcgagttgtcgttaacaggccaagaaatatcgaactggcatgtttcgttgcctgtt

SEQ ID NO: 394611 - DNA, 75 bp, synthetic construct
  source 1..75: mol_type = other DNA
aggccgagaaggattagctcctcgtgttacatatggatctggagaaaaaggcttttctttgaaatggaccgatca

SEQ ID NO: 394612 - DNA, 75 bp, synthetic construct
  source 1..75: mol_type = other DNA
gcccgctgtatgatgaactgaagcactatgtgctgatgccgggtaaagtgcatgccgatgacacgccggtaaatg

SEQ ID NO: 394613 - DNA, 75 bp, synthetic construct
  source 1..75: mol_type = other DNA
agtgttaaatgcaattgccaactcaacatcaggtgccattgttggtggcgctggaggaggcattgcaggcgctgc

SEQ ID NO: 394614 - DNA, 75 bp, synthetic construct
  source 1..75: mol_type = other DNA
gaaaaaccccatcaaaaacaaatgttttagttgaacatgctcacatctacctagatgcagtcattaactccttaa

SEQ ID NO: 394615 - DNA, 75 bp, synthetic construct
  source 1..75: mol_type = other DNA
gacttgctgctcatggacaaagtgcaatgaccgtagctcagtggttacagaatcgtccagaggtggagaaagttt

SEQ ID NO: 394616 - DNA, 75 bp, synthetic construct
  source 1..75: mol_type = other DNA
gggcattatggtggcaaacgagaacgcatggaaaaagataggcgctctccctgaggcaatgggtcagattagtag

SEQ ID NO: 394617 - DNA, 75 bp, synthetic construct
  source 1..75: mol_type = other DNA
atggagtcattcatactatcctcagttcaaaaaccctagagctattagggaaatcatcatttattttttatttaa

SEQ ID NO: 394618 - DNA, 75 bp, synthetic construct
  source 1..75: mol_type = other DNA
aatttcactattacctctgctaatagctatatattatagcaacaacataaataatagtctacgttattcgttata

SEQ ID NO: 394619 - DNA, 75 bp, synthetic construct
  source 1..75: mol_type = other DNA
ggaccactctatttaatagcgctccttgttataataaccatagtctcaatcatactttataaattagttgaggag

SEQ ID NO: 394620 - DNA, 75 bp, synthetic construct
  source 1..75: mol_type = other DNA
gtgaaatacagtcgaaattccactcagcacttgatgaacttggtgctgaggctggatctgcatcagaaaaaagtg

SEQ ID NO: 394621 - DNA, 75 bp, synthetic construct
  source 1..75: mol_type = other DNA
caaagccacttcgatatgttgaacagacagggcgatctatgccagccattagcactcttgagaatggccttcatc

SEQ ID NO: 394622 - DNA, 75 bp, synthetic construct
  source 1..75: mol_type = other DNA
gttctttcaggtgtcgggcgcgttattgcgccaagggtttcacaggctcttggtggtgcagcactgaattctgct

SEQ ID NO: 394623 - DNA, 75 bp, synthetic construct
  source 1..75: mol_type = other DNA
ggtgctcttgaaattttacaaaaaatgatgtctgaatgtaaatatcatgaaggcaatgcttttgtcattatggga

SEQ ID NO: 394624 - DNA, 75 bp, synthetic construct
  source 1..75: mol_type = other DNA
tgctgacccaaatcgccattgggttgtgctttaccctgctgtacttcgtggttttccgcacactgattctgcagt

SEQ ID NO: 394625 - DNA, 75 bp, synthetic construct
  source 1..75: mol_type = other DNA
aaaggatcgatagcgaaattatccgcaaccagaagcggtcgttacgctattgaaaaggctgttcaagaggcaaca

SEQ ID NO: 394626 - DNA, 75 bp, synthetic construct
  source 1..75: mol_type = other DNA
ggcggcgcgaccggaacggtcgctgcaggcctggtttttcagacatcggaccgtagcggcagcccgaaaccgcgc

SEQ ID NO: 394627 - DNA, 75 bp, synthetic construct
  source 1..75: mol_type = other DNA
tcacgaccttgctgcaacgccacccaatgctgcatatcgcctttcgccccgacgggcagcaggtctggctaccgc

SEQ ID NO: 394628 - DNA, 75 bp, synthetic construct
  source 1..75: mol_type = other DNA
cagggaacgcccgcctggaaacgtctgttaaatctcaccggcggctatctcaattaccataacacttactccacc

SEQ ID NO: 394629 - DNA, 75 bp, synthetic construct
  source 1..75: mol_type = other DNA
gagtcacatctgaataaagaactgactgcgaagtacccgttacaactcagtggattccataccaaaggccatact

SEQ ID NO: 394630 - DNA, 75 bp, synthetic construct
  source 1..75: mol_type = other DNA
aatatattgcaattcagtttacattttcaataatttcaactgctttaacaatagttttagtgctcaagtggcatg

SEQ ID NO: 394631 - DNA, 75 bp, synthetic construct
  source 1..75: mol_type = other DNA
attgcatttaaatgattcttttcagactcaattaatatcaacgtctcggcctggaacagaaatatgcactactgc

SEQ ID NO: 394632 - DNA, 75 bp, synthetic construct
  source 1..75: mol_type = other DNA
tgctgcaccagcagaagatcaatcaaccactgagagacgacgcgcgcgcttactggctggcgaaagcatcgacgc

SEQ ID NO: 394633 - DNA, 75 bp, synthetic construct
  source 1..75: mol_type = other DNA
caaccggacaaaatttttatgggacggaatgcggctggcgcaggagagcaggccggagggaacaggcagcctgta

SEQ ID NO: 394634 - DNA, 75 bp, synthetic construct
  source 1..75: mol_type = other DNA
ggccaacaactcaattaccaccaggatatacttgtgcagaaccctatttattcccagacattaataaacccgatg

SEQ ID NO: 394635 - DNA, 75 bp, synthetic construct
  source 1..75: mol_type = other DNA
cgcagatggtggtgcgcgaagatggtcgttactgcggtttgtctctggcggctgcgtggaggccgctgccgcttt

SEQ ID NO: 394636 - DNA, 75 bp, synthetic construct
  source 1..75: mol_type = other DNA
caaacgctcaaaactttaccgccacatcttacacgtatggtgctacaggagtacagtttgccagtcattttagcc

SEQ ID NO: 394637 - DNA, 75 bp, synthetic construct
  source 1..75: mol_type = other DNA
agccctgaccggattaaatatccgatgaaacgcgttggtaaacgcggagaagggaaatttaaacgcatttcatgg

SEQ ID NO: 394638 - DNA, 75 bp, synthetic construct
  source 1..75: mol_type = other DNA
caattcttttattttcattaatgttattatccacaaagtatttatctattatcaatattaaaaaaaatgagtgtt

SEQ ID NO: 394639 - DNA, 75 bp, synthetic construct
  source 1..75: mol_type = other DNA
ttttagcggcgaggctgacacccttgcgccgacactgctcaaactaactgacacaggcggaagcggtggtatggc

SEQ ID NO: 394640 - DNA, 75 bp, synthetic construct
  source 1..75: mol_type = other DNA
tcttgatcagactataacgtctgctaccccagttccgtggaaagcttctctgccaattgttatctcctacatgta

SEQ ID NO: 394641 - DNA, 75 bp, synthetic construct
  source 1..75: mol_type = other DNA
cgccaacggtgaccatcaacaccattgccagtgataacatcatcaacgccagcgaagcggcggcgggcgtgacgg

SEQ ID NO: 394642 - DNA, 75 bp, synthetic construct
  source 1..75: mol_type = other DNA
atgcgcaatctcaccatcacgcggattaatgtcagccaggccaactacggtattttacgccagggattccataat

SEQ ID NO: 394643 - DNA, 75 bp, synthetic construct
  source 1..75: mol_type = other DNA
ctgctgtcgctggcgaacgtgagggcggtgaatgagaaagggcaggcggcggtggatattgatcgggtcgatcag

SEQ ID NO: 394644 - DNA, 75 bp, synthetic construct
  source 1..75: mol_type = other DNA
atgagcgtaaaaataaaaaaattaagtatagagaacctcttcgatgaatataatgttgaatgggttttggacgat

SEQ ID NO: 394645 - DNA, 75 bp, synthetic construct
  source 1..75: mol_type = other DNA
gatgcaggaatcctcagttggaccagcattgagcatgaacttcgacatgcgcaaagacgttcgcggcgtctttat

SEQ ID NO: 394646 - DNA, 75 bp, synthetic construct
  source 1..75: mol_type = other DNA
gttggccaggccgttaaaggcgcactgcagcctgcaattgagatggatcgcgcactgggcgaagtaaaatcactg

SEQ ID NO: 394647 - DNA, 75 bp, synthetic construct
  source 1..75: mol_type = other DNA
accggactggaaaacaacatccgcaggctcagtcaggtacatggtatggataaggccattgccatggcgaaggcc

SEQ ID NO: 394648 - DNA, 75 bp, synthetic construct
  source 1..75: mol_type = other DNA
caattcggacaggtcagtaatgccggtgctgctttcggacgcattgttgccatggcgattaactggatcctttca

SEQ ID NO: 394649 - DNA, 75 bp, synthetic construct
  source 1..75: mol_type = other DNA
ggaccatttaacgcctttggattgcaataacgatatatcccttataaacagattaaaagaaatgttaatgagaat

SEQ ID NO: 394650 - DNA, 75 bp, synthetic construct
  source 1..75: mol_type = other DNA
aaattatgaaactcatcaggaataaatttggtgacctgtcaaaagtggcagactctgatttactgaaaaaagcct

SEQ ID NO: 394651 - DNA, 75 bp, synthetic construct
  source 1..75: mol_type = other DNA
aatcattcagcaatgcatggggctggattatcggaaaactcaatatgttaccgggcgttaacattgaattaccgg

SEQ ID NO: 394652 - DNA, 75 bp, synthetic construct
  source 1..75: mol_type = other DNA
aataagaggacgccaatccaccttgacctccaatgggtattaattgataacctaactgcagtttgcgtgacacca

SEQ ID NO: 394653 - DNA, 75 bp, synthetic construct
  source 1..75: mol_type = other DNA
aacgggttatagctaccgcgctaactattcaaaacgttttgaatctaccggtagccagctcactttcgctggtta

SEQ ID NO: 394654 - DNA, 75 bp, synthetic construct
  source 1..75: mol_type = other DNA
aaagcaacacggctttgagcgggcattaaaagtcatgttggagaaaaagaaactccggcagattatgaaaaagtg

SEQ ID NO: 394655 - DNA, 75 bp, synthetic construct
  source 1..75: mol_type = other DNA
tgattttaaagtttgggttggcataatttccgttctgacagacagtgatcatccgatcaccaaagaaggaaaaat

SEQ ID NO: 394656 - DNA, 75 bp, synthetic construct
  source 1..75: mol_type = other DNA
gctattggctacgccaaacttgatacccgcaagggctaccaaatcataggggttattcgcctggcagatggtagt

SEQ ID NO: 394657 - DNA, 75 bp, synthetic construct
  source 1..75: mol_type = other DNA
cggttggatttgcccctatatttccagacacctgttatcacttaacccattactggcctgctgccgcagatattc

SEQ ID NO: 394658 - DNA, 75 bp, synthetic construct
  source 1..75: mol_type = other DNA
atgcaaacattaccccctccctcccgcccaatattcgcgaagcggtggaaaaagttaaggcagcaaaagctgtct

SEQ ID NO: 394659 - DNA, 75 bp, synthetic construct
  source 1..75: mol_type = other DNA
attgatagttttagtacgcgcgatctccttgtccctatcaaagtagttgaggctacagggcgtcttgaagtggct

SEQ ID NO: 394660 - DNA, 75 bp, synthetic construct
  source 1..75: mol_type = other DNA
actgcggattgtcgcctggatgtatccacctcatggcaggcgctgtcagataaagacccttcgcaggctgaccca

SEQ ID NO: 394661 - DNA, 75 bp, synthetic construct
  source 1..75: mol_type = other DNA
cggtggtttctgctctgttcagcgccggcgctatggctgctccagctgctaatgatgcaagcaccgcaactttaa

SEQ ID NO: 394662 - DNA, 75 bp, synthetic construct
  source 1..75: mol_type = other DNA
aagcgcgcagtgcctgataatcaattttgctcatgttcactgccgtacaggcagcttagaaatgtacggcagtct

SEQ ID NO: 394663 - DNA, 75 bp, synthetic construct
  source 1..75: mol_type = other DNA
aatcgactgctgatatttctatccctgctgcgacacaacaggcgcttgaaaaagtgaatgctgccaaatcagcct

SEQ ID NO: 394664 - DNA, 75 bp, synthetic construct
  source 1..75: mol_type = other DNA
ccaacggcatcagagatcggggcgttaccgtcaggtggaacagcagtatcatcagttaatctggcttcaaaaggt

SEQ ID NO: 394665 - DNA, 75 bp, synthetic construct
  source 1..75: mol_type = other DNA
cgcctcggcttcggaaatcgcccgcgtgctggaaagcctgacgaaaaacagcggcgagaaccagcctgcggacgc

SEQ ID NO: 394666 - DNA, 75 bp, synthetic construct
  source 1..75: mol_type = other DNA
agaagacgggtagcaacaagattggttgaagaagcaaaaaatcggcaggtaataatcctcacgcatgatatcgct

SEQ ID NO: 394667 - DNA, 75 bp, synthetic construct
  source 1..75: mol_type = other DNA
tattgatgatcaactgttgattgacgtcgcgccggaatttagccaacagctgctgcgcgacgacatggatgcaac

SEQ ID NO: 394668 - DNA, 75 bp, synthetic construct
  source 1..75: mol_type = other DNA
taaaattgcaataatagaaaatgctattatgaaacatcgattaggcgacgcacgtggtaattttttaggatttac

SEQ ID NO: 394669 - DNA, 75 bp, synthetic construct
  source 1..75: mol_type = other DNA
aattacgatccctccaacgtgattatgctcaccggacgcgcctccgttgtggagcgcctgacagaagtgatccag

SEQ ID NO: 394670 - DNA, 75 bp, synthetic construct
  source 1..75: mol_type = other DNA
gcggcgagaaccagcctgcggacgctgaaatcacagattgtcgccgacgaacgcaccaacagtgtgattgtcagt

SEQ ID NO: 394671 - DNA, 75 bp, synthetic construct
  source 1..75: mol_type = other DNA
ttgccggactggaagagcgccgtgttgtgttaattcgtcagcaggcagcagagcagaataaagcgtatcagtcac

SEQ ID NO: 394672 - DNA, 75 bp, synthetic construct
  source 1..75: mol_type = other DNA
tctgagtgcttacagtaacactattgtggatacaccgacgtattttgcttttgcgaaaggtgccgggttgatggg

SEQ ID NO: 394673 - DNA, 75 bp, synthetic construct
  source 1..75: mol_type = other DNA
cgagtttaatcgccttctcgggctcggtaatgaattacttcagcagcgacaggggatggtgaatgtaccgttacg

SEQ ID NO: 394674 - DNA, 75 bp, synthetic construct
  source 1..75: mol_type = other DNA
tatctgttgagcaggaaaggcttgcccagatgcaggagaaatctgcgtctatccaacaggttcttgaaggtcttg

SEQ ID NO: 394675 - DNA, 75 bp, synthetic construct
  source 1..75: mol_type = other DNA
gagttctgttatcactcaattcagccaggctctggcgcagggcgttcttcgcggtgaagaattcaacgccgttaa

SEQ ID NO: 394676 - DNA, 75 bp, synthetic construct
  source 1..75: mol_type = other DNA
atggcaacattacgtgagttaataatcaaaatttccgctaactcgcagtcattccagtcggaaatttcccgcgcc

SEQ ID NO: 394677 - DNA, 75 bp, synthetic construct
  source 1..75: mol_type = other DNA
gccaccgcaatgatattttactggtcgagcaaattgaccgcctgacccgtctgagtaacagtgactggattacgc

SEQ ID NO: 394678 - DNA, 75 bp, synthetic construct
  source 1..75: mol_type = other DNA
tcatcccctgttttaataacgaaaaaactatagaaagatgcgttctttccgcattaaaacaaacccatagaaata

SEQ ID NO: 394679 - DNA, 75 bp, synthetic construct
  source 1..75: mol_type = other DNA
atgagagctattcttttacgaccagaggtaaaggccttgctacgcatcaagtctgactcgaccctaacggagatg

SEQ ID NO: 394680 - DNA, 75 bp, synthetic construct
  source 1..75: mol_type = other DNA
agcgtgcagaagtacgtatttttgccggtaatgatccggcccataccgccacaggcagcagcgggatttcctcgg

SEQ ID NO: 394681 - DNA, 75 bp, synthetic construct
  source 1..75: mol_type = other DNA
aaagctgccgaggagatcgggcaactcgtcgccgttgcgcgtgaagaactccagcggcgcaaagccaaagaacag

SEQ ID NO: 394682 - DNA, 75 bp, synthetic construct
  source 1..75: mol_type = other DNA
ccagcaacagcagggatagatgatttgggtgaaattttagctaagatgaaacagagaacatcgagaggaataaga

SEQ ID NO: 394683 - DNA, 75 bp, synthetic construct
  source 1..75: mol_type = other DNA
aaaaataatttcatttaacatgatgttgtttaagaattatttccagactccagccgtcattatgaaaagagatat

SEQ ID NO: 394684 - DNA, 75 bp, synthetic construct
  source 1..75: mol_type = other DNA
tattattgatgtgcgtggtcaaatagttaccccaaatcaagaacgtactataattaaaggtatagtcgagagatc

SEQ ID NO: 394685 - DNA, 75 bp, synthetic construct
  source 1..75: mol_type = other DNA
tcaaaacatgaacaaatagaaagatcaataaccccaccgcttaaaaattataatgagcggttacacaatactaat

SEQ ID NO: 394686 - DNA, 75 bp, synthetic construct
  source 1..75: mol_type = other DNA
tctgataaacaggccactgaagccacggtgccgccgtttaccgccctgccgggtatctgctgctctaccgcccat

SEQ ID NO: 394687 - DNA, 75 bp, synthetic construct
  source 1..75: mol_type = other DNA
ccaccgaatcgctgctctggcctgattcggtggatgcggtgaaacaagcaaacgcatttgtgggcagtgcgatca

SEQ ID NO: 394688 - DNA, 75 bp, synthetic construct
  source 1..75: mol_type = other DNA
atgtaagagatgtactccttgaaattgttgaacgtactgactcaataaaagaccaggatattgaaataaaaaaat

SEQ ID NO: 394689 - DNA, 75 bp, synthetic construct
  source 1..75: mol_type = other DNA
tttatcctataaatactaatatgggaagattcatcacctctgctgaagaggcattaattgaaatattaaacacta

SEQ ID NO: 394690 - DNA, 75 bp, synthetic construct
  source 1..75: mol_type = other DNA
aaaccgtcaccgtcacctttggcggtaaaacctacaccgccaccgtagcgggcgatggtagctggacaaccaccg

SEQ ID NO: 394691 - DNA, 75 bp, synthetic construct
  source 1..75: mol_type = other DNA
aggcagccgttatgatctggtggatcgcaacaacaacatcgttctggaataccgcaaaaaagaactggttcgcct

SEQ ID NO: 394692 - DNA, 75 bp, synthetic construct
  source 1..75: mol_type = other DNA
ttaacgccagcgaagctgatacgggcgtgacggtgagcggcagcaccaccgctgaagcggggcagattgttacgg

SEQ ID NO: 394693 - DNA, 75 bp, synthetic construct
  source 1..75: mol_type = other DNA
cagaattaaaactcagtattactgcgttacctgactggctgaattcaccacatctgcctgcgctgctggctgacg

SEQ ID NO: 394694 - DNA, 75 bp, synthetic construct
  source 1..75: mol_type = other DNA
ctgcatccaaaccacatccggcttttttacaaaaaaataccgttgaagcgaaggaaatcattgaagcgtgtatgc

SEQ ID NO: 394695 - DNA, 75 bp, synthetic construct
  source 1..75: mol_type = other DNA
aaggccgaacgcgtggtgttcgaacgcaaagagccaccgcagaccccggccgagccggagcagccggatgccgcg

SEQ ID NO: 394696 - DNA, 75 bp, synthetic construct
  source 1..75: mol_type = other DNA
agtcagcatcgacaacgtgaaaccaggagtcactacagactggaaagaaaccgcagatggcgtctataaggcgac

SEQ ID NO: 394697 - DNA, 75 bp, synthetic construct
  source 1..75: mol_type = other DNA
agcagcagcgggctggcggcgggcgcggcgctgacggtggtgattaacacggtcacttacgctgcgacggtatta

SEQ ID NO: 394698 - DNA, 75 bp, synthetic construct
  source 1..75: mol_type = other DNA
tcgtgaacgccgcccatggctgaattcgccctatattgcagccacaaagcgtggagaatatctctctgtctttga

SEQ ID NO: 394699 - DNA, 75 bp, synthetic construct
  source 1..75: mol_type = other DNA
ggaaaggctgctcaagaaccaggagtaagggggcgagaactatcttatgatgaagttgttttctctaattcattt

SEQ ID NO: 394700 - DNA, 75 bp, synthetic construct
  source 1..75: mol_type = other DNA
cagttgcgtgctggtgaaagcagtgcgctgggatgggcgcgatgcaccccaaatttacaaggagagtttaatgtt

SEQ ID NO: 394701 - DNA, 75 bp, synthetic construct
  source 1..75: mol_type = other DNA
accatcaacatcattgcgggcgatgacattattaacgcgaccgaacacgggcaggcgctggtgatttccggctcc

SEQ ID NO: 394702 - DNA, 75 bp, synthetic construct
  source 1..75: mol_type = other DNA
tctggcacggtatggtcgccattaccctgcccccccagaatctgcggacattcaaccagctggtcagggatgtgc

SEQ ID NO: 394703 - DNA, 75 bp, synthetic construct
  source 1..75: mol_type = other DNA
ctggggtcgttggaaagtatccttcaattgattttcagtacgagatataagttgagtgattattcagacttaagg

SEQ ID NO: 394704 - DNA, 75 bp, synthetic construct
  source 1..75: mol_type = other DNA
atcaattcttatggcatgatattgattttgaagatgatgctgcaaaacaggaagaataccttgaatctgcattgc

SEQ ID NO: 394705 - DNA, 75 bp, synthetic construct
  source 1..75: mol_type = other DNA
cacaagatgcttggcgtagcgtccacctatggattcgtgagctgattaatgacattcaaacctcatggaacaatg

SEQ ID NO: 394706 - DNA, 75 bp, synthetic construct
  source 1..75: mol_type = other DNA
attccagaaagtagaaccaaatggtgatcagccaatgaataaatctggtttaccaagtcagtgtagagtacatgc

SEQ ID NO: 394707 - DNA, 75 bp, synthetic construct
  source 1..75: mol_type = other DNA
atagtaatggagtgtatggagatgaagttttttctccggctgacaaggaattatctaaaaataaagctatttcga

SEQ ID NO: 394708 - DNA, 75 bp, synthetic construct
  source 1..75: mol_type = other DNA
agccgctatctctacgacccgctgggccgccggacggggaaacgggtgtggcgtcgcgagcgtgacctgacggga

SEQ ID NO: 394709 - DNA, 75 bp, synthetic construct
  source 1..75: mol_type = other DNA
ggcaaccggagcgagacacagtacgatgcgtggggaaaggcggtcagcaccacgcagggcgggctgacgcgcagt

SEQ ID NO: 394710 - DNA, 75 bp, synthetic construct
  source 1..75: mol_type = other DNA
tctcaaatacacaaatgggcaaatgaatacaatggtcgagtgccgacgggagaacgggttcgtcaaatttatatt

SEQ ID NO: 394711 - DNA, 75 bp, synthetic construct
  source 1..75: mol_type = other DNA
tagcaactataacaacaaaagttttagcacattatatttatcaagcaatatcagaccttgaaaaagaagattaca

SEQ ID NO: 394712 - DNA, 75 bp, synthetic construct
  source 1..75: mol_type = other DNA
gcccagacatttaccctaatccgaccgacggcttacctgtcgagtgtcaggctaacacacaaccagagacggggg

SEQ ID NO: 394713 - DNA, 75 bp, synthetic construct
  source 1..75: mol_type = other DNA
atgcaaaaaagtactcaaataaaaatcctgtcgataatgagccaatcagaattagggcgtcgtcttggtaaaact

SEQ ID NO: 394714 - DNA, 75 bp, synthetic construct
  source 1..75: mol_type = other DNA
taactttactccatgtttagaagcactacgcatccacctagatgattgtaaaatacgcatagcccgcctggcata

SEQ ID NO: 394715 - DNA, 75 bp, synthetic construct
  source 1..75: mol_type = other DNA
tttgaaaactaaaagtccgaattataatccaggagctgcaaatgatactcatataccattgcctacaggaactat

SEQ ID NO: 394716 - DNA, 75 bp, synthetic construct
  source 1..75: mol_type = other DNA
agtctgattatctactaggtgttcatgatctttatcgggttggggctcttcgatacaaacgtgaagacgctggag

SEQ ID NO: 394717 - DNA, 75 bp, synthetic construct
  source 1..75: mol_type = other DNA
ttatcgatctacctgaatactggtgttgcccggtttgccagacaacaaaagagggggttcttaaactggactcaa

SEQ ID NO: 394718 - DNA, 75 bp, synthetic construct
  source 1..75: mol_type = other DNA
cgggcgggctggctgtcgggattgtgttggcgcggctgctggcgttcctgctgcttgacggtcattttgcggctg

SEQ ID NO: 394719 - DNA, 75 bp, synthetic construct
  source 1..75: mol_type = other DNA
atcgagagctggggagaaaccgtcctgcgtccggacctctacgcaaacgcagattattacctgctgcagccggct

SEQ ID NO: 394720 - DNA, 75 bp, synthetic construct
  source 1..75: mol_type = other DNA
gcttggcgagttattaagtttccttgctttagatgatttttctaaaacttggtatcgagcccgtatttatgcaga

SEQ ID NO: 394721 - DNA, 75 bp, synthetic construct
  source 1..75: mol_type = other DNA
gatgctaactctgcatccgtagtttcaggcgcgttaggcataccaattgcatctctaacagctggacagaaaaat

SEQ ID NO: 394722 - DNA, 75 bp, synthetic construct
  source 1..75: mol_type = other DNA
ccgaatgatgatcgagcgttttaagtcggggctaatcttgctcaataactatcttcctgacggtagagggattaa

SEQ ID NO: 394723 - DNA, 75 bp, synthetic construct
  source 1..75: mol_type = other DNA
cctgtgagtccgacaaattctcagctaactttactccatgtttagaagcactacgcatccacctagatgattgta

SEQ ID NO: 394724 - DNA, 75 bp, synthetic construct
  source 1..75: mol_type = other DNA
tggaagaggaaaaccgccgtctcaaaaagatgtacgccgaagagcggctcaaagccgagatcatccaggaagcca

SEQ ID NO: 394725 - DNA, 75 bp, synthetic construct
  source 1..75: mol_type = other DNA
gccagatcatgtccatcctgaagcaagccgaggccggaacgccagtggctgaactgtgtcgcgagcatggcatga

SEQ ID NO: 394726 - DNA, 75 bp, synthetic construct
  source 1..75: mol_type = other DNA
ggattcgttctgggtaaaaaacatcatgagtccggcaaaactccgggaaaaatgggatgaactggttatccgcct

SEQ ID NO: 394727 - DNA, 75 bp, synthetic construct
  source 1..75: mol_type = other DNA
ggatgctggcttgttatggctcccttaaagagcctgaggcatggactccaccaccagaatctgtgcggtatctta

SEQ ID NO: 394728 - DNA, 75 bp, synthetic construct
  source 1..75: mol_type = other DNA
cgcaaaattaaaatagccgctgcacactctctttccctcgggctgttaccgtccattatcagccagatgccgccg

SEQ ID NO: 394729 - DNA, 75 bp, synthetic construct
  source 1..75: mol_type = other DNA
cgtagtgtcagtacaacaatggaatacgtggagctcaggatggacattgtgggaaaaacactggaagaagaactg

SEQ ID NO: 394730 - DNA, 75 bp, synthetic construct
  source 1..75: mol_type = other DNA
gattatctcaggagtgtggttttcaggtgtctccacatcgcttcagacatacactggcgagcatactgatgagta

SEQ ID NO: 394731 - DNA, 75 bp, synthetic construct
  source 1..75: mol_type = other DNA
agatcgtagccacacaaaaaacgctcgccgcgactggagatacgcaaaataccgcgcattatcaggaaatgatta

SEQ ID NO: 394732 - DNA, 75 bp, synthetic construct
  source 1..75: mol_type = other DNA
aatgccgggatccacacagtaattaaagctggagtttctgcggatacgcaatctgatttcggtgcgggtgtcggt

SEQ ID NO: 394733 - DNA, 75 bp, synthetic construct
  source 1..75: mol_type = other DNA
caaaaacgagtagcggataacagccaacaaattaatacgctcaataaccatttcagctcactgaaaaacgaagtt

SEQ ID NO: 394734 - DNA, 75 bp, synthetic construct
  source 1..75: mol_type = other DNA
gactttgttctaattaaaccaggttgtaaacataaagttcaaaatttaactccagagccaattttaattattgaa

SEQ ID NO: 394735 - DNA, 75 bp, synthetic construct
  source 1..75: mol_type = other DNA
atgatctgtcacaattgaataagcttgttacttttggagtagtaccgacttacccagagactggatatggatata

SEQ ID NO: 394736 - DNA, 75 bp, synthetic construct
  source 1..75: mol_type = other DNA
ggtaagcagtgcagtggtgctctgtttccgcacgcagatttttgtcacccgtagcgatgtggtgctggtgtccgg

SEQ ID NO: 394737 - DNA, 75 bp, synthetic construct
  source 1..75: mol_type = other DNA
gcgctgggtctgtataccgatacgcgaacggtcagtgaggtttgtaaggagggagagagcagggaagaagagacg

SEQ ID NO: 394738 - DNA, 75 bp, synthetic construct
  source 1..75: mol_type = other DNA
cactcatcagggttgaaaccgccaccggtgagctggcgaaaacgcagcgccgcagcctggcggatgcgcttcagc

SEQ ID NO: 394739 - DNA, 75 bp, synthetic construct
  source 1..75: mol_type = other DNA
cggccccggctggaaaatgcctgcggatatccgcttacacctgcgcgataacacactgatactcagtgataacgg

SEQ ID NO: 394740 - DNA, 75 bp, synthetic construct
  source 1..75: mol_type = other DNA
aagtctgagacaagattccgcacaaacgcagcaacagttaaccaacacgcaaaaacgggtcgcagataacagcca

SEQ ID NO: 394741 - DNA, 75 bp, synthetic construct
  source 1..75: mol_type = other DNA
tttggcgcagtggagtagcaacgcgcaggatcgctggcatcttggcgtgatggcaggctacgccaatcagcatta

SEQ ID NO: 394742 - DNA, 75 bp, synthetic construct
  source 1..75: mol_type = other DNA
gctctgtttggctcgcgcagcggtttgttcgaagacttcctcggcagcgacttcttccgcatcggtgacgatgca

SEQ ID NO: 394743 - DNA, 75 bp, synthetic construct
  source 1..75: mol_type = other DNA
aatgacgaggagctagaaggagagctggcgggcgcaacgatcgccactcgcgataattcgtttgtagcgttcacc

SEQ ID NO: 394744 - DNA, 75 bp, synthetic construct
  source 1..75: mol_type = other DNA
cggctgaaacccttacggtgcgaagcactttaccagaggtaaacaaatccggtgctgacgcccctgatttgtccc

SEQ ID NO: 394745 - DNA, 75 bp, synthetic construct
  source 1..75: mol_type = other DNA
tatgccactaagcgaatggcccgaatgtactacgaatccggcgcaatgctggcaaaaatctgtgctgaccttcaa

SEQ ID NO: 394746 - DNA, 75 bp, synthetic construct
  source 1..75: mol_type = other DNA
ggctggatagtaactccgcacgagattgatagcagttcttatcccaacccaaccgacggcttacctgtcgagtgt

SEQ ID NO: 394747 - DNA, 75 bp, synthetic construct
  source 1..75: mol_type = other DNA
accgctacatcaccgcgcgctttttgcctgacaaggccatcgacctgcttgaccaggcggccgcacgcgtgaagc

SEQ ID NO: 394748 - DNA, 75 bp, synthetic construct
  source 1..75: mol_type = other DNA
caagggcagaaaatgaatgcgctgacaaccgatgtggcagtacaacagcaaaatgaaaggactcaatacgataaa

SEQ ID NO: 394749 - DNA, 75 bp, synthetic construct
  source 1..75: mol_type = other DNA
tcgaggagcgcgtgcagaaggtgctcaaggaagtgaccgagcaccagggcgagatgattctcttcatcgatgagg

SEQ ID NO: 394750 - DNA, 75 bp, synthetic construct
  source 1..75: mol_type = other DNA
ttggttgccactcccgtccctgatgaacaacgtatcagcttctggccgcagcattttggcctcattccacagtgg

SEQ ID NO: 394751 - DNA, 75 bp, synthetic construct
  source 1..75: mol_type = other DNA
atgaaaatcatcacccgtggcgaagccatgcgtattcaccaacagcatcctgcatcccgttctttaccggcaaat

SEQ ID NO: 394752 - DNA, 75 bp, synthetic construct
  source 1..75: mol_type = other DNA
cgttgcaggggcggtatatcactcaggacccgatagggctggagggggggatggagtctgtatgcgtacccgctg

SEQ ID NO: 394753 - DNA, 75 bp, synthetic construct
  source 1..75: mol_type = other DNA
gtgaacgggacctgacgggctggatgtcgctggtcacggaaaccggaagtgacctggtacggctgggacggcgac

SEQ ID NO: 394754 - DNA, 75 bp, synthetic construct
  source 1..75: mol_type = other DNA
tgatggagaaacctggatactgttcaatgccataaacggtaaccgcgctgaaatgagcccggaagctgccggtat

SEQ ID NO: 394755 - DNA, 75 bp, synthetic construct
  source 1..75: mol_type = other DNA
ttggttgccactcccgtccctgatgaacatcggatcagcttctggccgcagcattttggcctcattccacagtgg

SEQ ID NO: 394756 - DNA, 75 bp, synthetic construct
  source 1..75: mol_type = other DNA
gcacactgaacctgatggatgcacatcatcgttcgatactgtgggtatcaatgtcggtaattttggtagcggtat

SEQ ID NO: 394757 - DNA, 75 bp, synthetic construct
  source 1..75: mol_type = other DNA
cgttctgaaaaactgcgtcgtgaagttgaactggctgaggctctgctgggacagcgatcgttacagtgggcggga

SEQ ID NO: 394758 - DNA, 75 bp, synthetic construct
  source 1..75: mol_type = other DNA
gatgtgcacgcaagagcaccgagcgacatcaccacggaagccctgcagcgtataggtgaactgtatgccatcgag

SEQ ID NO: 394759 - DNA, 75 bp, synthetic construct
  source 1..75: mol_type = other DNA
catctgccccgcgaaataaaccgcctggagcctgaagaaagctgttgcccggagtgtggcggtgagctggattat

SEQ ID NO: 394760 - DNA, 75 bp, synthetic construct
  source 1..75: mol_type = other DNA
actcaccagacaggcagggaaaacatccggtacaacaccttcgtcccttccggggtatcctgcaggcagatgcgt

SEQ ID NO: 394761 - DNA, 75 bp, synthetic construct
  source 1..75: mol_type = other DNA
ggatgagcaatatgacccggtactgccatcccccctgcgccagtcttcagcccgtaagccgttaccggcctcact

SEQ ID NO: 394762 - DNA, 75 bp, synthetic construct
  source 1..75: mol_type = other DNA
ctgaatgatgccctgtaccgttatgtgatgaatacccgcaagcttcacactgacgacacaccggtaaaggtactg

SEQ ID NO: 394763 - DNA, 75 bp, synthetic construct
  source 1..75: mol_type = other DNA
ggagtgtggcagtgagctgaattatctgggggaagtcagtgctgagcagctggaactggtgagcagcgccctgaa

SEQ ID NO: 394764 - DNA, 75 bp, synthetic construct
  source 1..75: mol_type = other DNA
gtatctggaatctgtacacgctgaacaacggcggggcatttatggctcccgaaccggatgacgatgatgacgaaa

SEQ ID NO: 394765 - DNA, 75 bp, synthetic construct
  source 1..75: mol_type = other DNA
gtatctggaatctgtacactctgaacaacggcggggcatttatggcacccgaaccggatgacgatgatgacgaaa

SEQ ID NO: 394766 - DNA, 75 bp, synthetic construct
  source 1..75: mol_type = other DNA
ccattcggcccctgggatacgctggctcgtacacagacgaagattatgctcaacggcgaacaactggatgccgac

SEQ ID NO: 394767 - DNA, 75 bp, synthetic construct
  source 1..75: mol_type = other DNA
ttgtacgcagctatgccggagcggggcttctggcccatgttgtcaccgggaaatatgcagaccatctgccgttat

SEQ ID NO: 394768 - DNA, 75 bp, synthetic construct
  source 1..75: mol_type = other DNA
gatacaggaagcacaggagcgaatcagcgcacttcaggaagaaatggcggaaacgctgggtgagcaatatgaccc

SEQ ID NO: 394769 - DNA, 75 bp, synthetic construct
  source 1..75: mol_type = other DNA
attttggcctcattccacgagtgggtcaccctggagccccgtgtcttcggctggatggaccgtctgtgcgaagac

SEQ ID NO: 394770 - DNA, 75 bp, synthetic construct
  source 1..75: mol_type = other DNA
tgacggttcattattaccgtctgcgggactacgccctgcagcatccggaatgcaacgccattatgcgcatcattg

SEQ ID NO: 394771 - DNA, 75 bp, synthetic construct
  source 1..75: mol_type = other DNA
acaggtgtttgaatccgccgggccgctcattttatttgataaccacatccccagcgaacgggaagcgcatcaggt

SEQ ID NO: 394772 - DNA, 75 bp, synthetic construct
  source 1..75: mol_type = other DNA
gtatctggaatctgtacacactgaacaacggcggggcatttatggcccccgaaccggatgacgatgatgtcgaaa

SEQ ID NO: 394773 - DNA, 75 bp, synthetic construct
  source 1..75: mol_type = other DNA
gagaaaaatccacgatgtgcatgcaagagtgcccaccgacatcaccacggaagccctgcagcgtatcggtgaact

SEQ ID NO: 394774 - DNA, 75 bp, synthetic construct
  source 1..75: mol_type = other DNA
gtgtactgcagtaatggctgggtggaaatcgacaacaacatcgcagagaacgccttacggggagtggccgtaggc

SEQ ID NO: 394775 - DNA, 75 bp, synthetic construct
  source 1..75: mol_type = other DNA
ctggttgccactctcgttcctcatgaacagcgcatcagcttctggccgcaacattttggcctcattccacagtgg

SEQ ID NO: 394776 - DNA, 75 bp, synthetic construct
  source 1..75: mol_type = other DNA
tcagcggttacgatcggctgttcagtgcagaacgtgaaggtggtgcactgacagaagttgcgtgctgggcccatg

SEQ ID NO: 394777 - DNA, 75 bp, synthetic construct
  source 1..75: mol_type = other DNA
aaagaccaacaactgagtctggttgaagagacgaaggccttcctgcgttctgcgctggcacgtgccgaagaaaag

SEQ ID NO: 394778 - DNA, 75 bp, synthetic construct
  source 1..75: mol_type = other DNA
tgccggcagagcagcggcttgctgaacgtcagcgaaaaacgaaaccgctgttgaaatccctggaaagctggttgc

SEQ ID NO: 394779 - DNA, 75 bp, synthetic construct
  source 1..75: mol_type = other DNA
atcggaggaaatgcctccggtaaagggatagttaatatttcaacggatagtctctggaatttaaagacatcatct

SEQ ID NO: 394780 - DNA, 75 bp, synthetic construct
  source 1..75: mol_type = other DNA
tgacgacacaccggtaaaagtgctgacaccgggcagaaaaaaggcaaaaacaggacacatctggacgtatgtccg

SEQ ID NO: 394781 - DNA, 75 bp, synthetic construct
  source 1..75: mol_type = other DNA
aggtactggcaccgggtcagaaaaaggcgaaaacagggcgtatctggacgtatgtccgggatgatcgcaatgtgg

SEQ ID NO: 394782 - DNA, 75 bp, synthetic construct
  source 1..75: mol_type = other DNA
cacggcgcaaaatccacgatgtatatatcagtaccaaaagcgcgacggcggaagaagcactgaaactaatcggtg

SEQ ID NO: 394783 - DNA, 75 bp, synthetic construct
  source 1..75: mol_type = other DNA
gagcctccggcggtctggttcgcctactcaccggatcatcaggggaaacatccggagcagcaccttcgtcccttc

SEQ ID NO: 394784 - DNA, 75 bp, synthetic construct
  source 1..75: mol_type = other DNA
gcgttccggtatatcaggaagcactgggttgcgttgtgcaacttctgtgatgacggtctggcggaggcggacaat

SEQ ID NO: 394785 - DNA, 75 bp, synthetic construct
  source 1..75: mol_type = other DNA
tgcatcccgtctttttccgttctgtaccggtaagtaccgctggcacggcggtgctgaggcgtataccggtcgtga

SEQ ID NO: 394786 - DNA, 75 bp, synthetic construct
  source 1..75: mol_type = other DNA
aggcggacaataacacagcagaaagagcgcttcgtgccgtctgtctcgggaaaaagaattcttatgacctttgtc

SEQ ID NO: 394787 - DNA, 75 bp, synthetic construct
  source 1..75: mol_type = other DNA
caggcagtccggcacccaaaagtgctgccgctgctggcgtcactggaggggtggctgcgggagaaacagaaaacc

SEQ ID NO: 394788 - DNA, 75 bp, synthetic construct
  source 1..75: mol_type = other DNA
agggagtgaccagtcccgacttgttgccaccctcatccctgatgaacagcgcatcagcttctggccgcaacattt

SEQ ID NO: 394789 - DNA, 75 bp, synthetic construct
  source 1..75: mol_type = other DNA
ctgctctttcttcagccacagcaccagggagtgaccagtcccgacttgttgccaccctcatccctgatgaacagc

SEQ ID NO: 394790 - DNA, 75 bp, synthetic construct
  source 1..75: mol_type = other DNA
gttgcaaaactgcagcgcatgcagttcggtaaaagctcagaaaaacttcgcgcaaaaaccgaacgacagatacag

SEQ ID NO: 394791 - DNA, 75 bp, synthetic construct
  source 1..75: mol_type = other DNA
aaatgagcccggaagccgccggcattgctgcctgtctgatgacgtacagtcatcatgcctgtcgcacggagtgtt

SEQ ID NO: 394792 - DNA, 75 bp, synthetic construct
  source 1..75: mol_type = other DNA
ctgagagctcagatcaactttccagggcaacagatcgcgtacccggtttgccggccagtcctggatatgctcaat

SEQ ID NO: 394793 - DNA, 75 bp, synthetic construct
  source 1..75: mol_type = other DNA
tatctggaatctgtacactctgaacaacggcggggcatttatggcccccgaaccggatgacgatgatgacgaaac

SEQ ID NO: 394794 - DNA, 75 bp, synthetic construct
  source 1..75: mol_type = other DNA
cacggaagccctgcagcgtatcggtgaactgtatgtcatcgaggcagaagtccggggatgttcagcagaacagca

SEQ ID NO: 394795 - DNA, 75 bp, synthetic construct
  source 1..75: mol_type = other DNA
aaatacctcattcgtatcactgagctggaaaggctgctctctgagcaggctgaagccctccgtcagagagatctg

SEQ ID NO: 394796 - DNA, 75 bp, synthetic construct
  source 1..75: mol_type = other DNA
tgatgaacacccgcaaggttcacactgacgacataccagtaaaagtgctggcgccgggcagaaaaaaggcaaaaa

SEQ ID NO: 394797 - DNA, 75 bp, synthetic construct
  source 1..75: mol_type = other DNA
ttgtgcaacttctgtgatgatggcctggctgaggtagataataatgcagcagaaagagcgcttcgtgcagtctgt

SEQ ID NO: 394798 - DNA, 75 bp, synthetic construct
  source 1..75: mol_type = other DNA
ttatcggcacttgccttctgaacgacattgatccggaagcgtatctgcgccatattctgagcctactgccggaat

SEQ ID NO: 394799 - DNA, 75 bp, synthetic construct
  source 1..75: mol_type = other DNA
ggtcgtgaagtgcaggatattcccggtgtgctggccgtgtttgctgaacgccgtaaggacagttttggcccgtat

SEQ ID NO: 394800 - DNA, 75 bp, synthetic construct
  source 1..75: mol_type = other DNA
gactgggcgaagcgttcagctatgtactgaatcagtgggacgccctctgttattacagtgatgacggtctggcgg

SEQ ID NO: 394801 - DNA, 75 bp, synthetic construct
  source 1..75: mol_type = other DNA
tccagactgggcgaagcgttctgctatgtactgaatcagtgggacgccctctgttattacagtgatgacggtctg

SEQ ID NO: 394802 - DNA, 75 bp, synthetic construct
  source 1..75: mol_type = other DNA
tcgttgaagcaccggcgccgtcctgcccgatagagcgtggtgtcgtgggccccggattacttgcccgcgtgttaa

SEQ ID NO: 394803 - DNA, 75 bp, synthetic construct
  source 1..75: mol_type = other DNA
gttgcgtcagacccgcacccgtaagccgttccctgaatcactaccccgtgacgaaaagcgactgttgcccgcggc

SEQ ID NO: 394804 - DNA, 75 bp, synthetic construct
  source 1..75: mol_type = other DNA
gcccgccagggtgtcgaactgagccgtgccttactctccaactgggttgatgcgtgctgccagttaatgacgccg

SEQ ID NO: 394805 - DNA, 75 bp, synthetic construct
  source 1..75: mol_type = other DNA
atcatggaggcgagcgcggagctctgctgtacggactaatcgggagctgtcggttgaacggtatcgatccagaag

SEQ ID NO: 394806 - DNA, 75 bp, synthetic construct
  source 1..75: mol_type = other DNA
tatctgcgccatatcctgagcgtactgccggaatggccttccaaccgagttgatgaactcttgccatggaacgta

SEQ ID NO: 394807 - DNA, 75 bp, synthetic construct
  source 1..75: mol_type = other DNA
agtcgcgccatcgtcgtccgttaccggcacaccttccccgtgaaatacaccgtctggagtctgaagaaagctgtt

SEQ ID NO: 394808 - DNA, 75 bp, synthetic construct
  source 1..75: mol_type = other DNA
tcggtacccgttctgaaaaactgcgtcgtgaagttgaacaggctgaggccctgctgaaacaacgcgaacaggaca

SEQ ID NO: 394809 - DNA, 75 bp, synthetic construct
  source 1..75: mol_type = other DNA
gtatctgcgccatattctgagcgtactgccggaatggccttccaaccgagttgatgaactcctgccatggaacgt

SEQ ID NO: 394810 - DNA, 75 bp, synthetic construct
  source 1..75: mol_type = other DNA
gccatattctgagcgtactgccggaatggccctccaaccgtgttgacgaactcctgccatggaacgtagtactca

SEQ ID NO: 394811 - DNA, 75 bp, synthetic construct
  source 1..75: mol_type = other DNA
ccgtaacgccggttcacagatgcccccggcggtctggttcgcgtacagtccggaccggaaaggtatccatccaca

SEQ ID NO: 394812 - DNA, 75 bp, synthetic construct
  source 1..75: mol_type = other DNA
gcactgaaacgtataccggtcgtgaagtgcaggatattcccggtgtgctggccgtgtttgcagaacgccgtaagg

SEQ ID NO: 394813 - DNA, 75 bp, synthetic construct
  source 1..75: mol_type = other DNA
tggtctgctttaacccgtcacaaccacatcacacctgttttcacttttatcttctgtcttcagaggtatcccact

SEQ ID NO: 394814 - DNA, 75 bp, synthetic construct
  source 1..75: mol_type = other DNA
gttttcacttttatcttctgtcttcagaggtatcccattatgaaaattatcacccgtggtgaagccatgcgtatt

SEQ ID NO: 394815 - DNA, 75 bp, synthetic construct
  source 1..75: mol_type = other DNA
acagttttggtccgtatgtccggctgatgcgtattttcatgaaaggagatcactcaataacttccatcgagatcg

SEQ ID NO: 394816 - DNA, 75 bp, synthetic construct
  source 1..75: mol_type = other DNA
gccgtctgaacaatgtggagccagaaaagtggctgcgctacgtcattgaacatatccaggactggccggcaaacc

SEQ ID NO: 394817 - DNA, 75 bp, synthetic construct
  source 1..75: mol_type = other DNA
gggatggcctgaacgtgtactgcagtaatggctgggtggaaatcgacaacaacatcgcagagaacgccttacggg

SEQ ID NO: 394818 - DNA, 75 bp, synthetic construct
  source 1..75: mol_type = other DNA
aacaccttcgtcccttccggggtatccggcaggcggatgcgttcagcggttacgatcggctgttcagtgcagaac

SEQ ID NO: 394819 - DNA, 75 bp, synthetic construct
  source 1..75: mol_type = other DNA
cggtggtatctggaatctgtacaccctgaacaacggcggggcatttatggcacccgaccggatgacgatgatgac

SEQ ID NO: 394820 - DNA, 75 bp, synthetic construct
  source 1..75: mol_type = other DNA
tacaccctgaacaacggcggggcatttatggcaccgaacctgatgacgatgatgacgaaacatgggtactgttca

SEQ ID NO: 394821 - DNA, 75 bp, synthetic construct
  source 1..75: mol_type = other DNA
tatctgcgccatatcctgagcgtactgccggaatggccttccaaccgagttgacgaactcctgccatggaacgta

SEQ ID NO: 394822 - DNA, 75 bp, synthetic construct
  source 1..75: mol_type = other DNA
ttcatgaaaatacgcaacaccacctcttcggcctgtgcaccggagactgacctgcaacaactggttgccaccctc

SEQ ID NO: 394823 - DNA, 75 bp, synthetic construct
  source 1..75: mol_type = other DNA
atgacaaccttttcgcatagctccaccacaccttctgtttccgtgactgcggcatcagggaataaccagtctcaa

SEQ ID NO: 394824 - DNA, 75 bp, synthetic construct
  source 1..75: mol_type = other DNA
ccgcgcactattaccgtcttcgcgattatgcccttaaccatcctgaatgcagcgccatcatgcatatcaccgact

SEQ ID NO: 394825 - DNA, 75 bp, synthetic construct
  source 1..75: mol_type = other DNA
ctttgcgaatgattcttgcggccttagatccgataaatcatcaaatttcgatgtctggtaacagcgaaactcctg

SEQ ID NO: 394826 - DNA, 75 bp, synthetic construct
  source 1..75: mol_type = other DNA
gccagcgccgtcccgcccgatagagcgcggcatcgcgggccccggattacttgcccgcgtgttaacgggaaaata

SEQ ID NO: 394827 - DNA, 75 bp, synthetic construct
  source 1..75: mol_type = other DNA
ctggacaggcttttttctacttttttataccgaatatccaagtggtcacgaggcgaaagctcgctcgaatttgct

SEQ ID NO: 394828 - DNA, 75 bp, synthetic construct
  source 1..75: mol_type = other DNA
ccgcttcggcctgtgcaccggagactggcctgcaacaactggttgccaccattatccctgatgaacagcgcatca

SEQ ID NO: 394829 - DNA, 75 bp, synthetic construct
  source 1..75: mol_type = other DNA
atgcagtcactgtatgactggatacagcaacagatgaaaacactgtcgcgtcactcagatacggcaaaagcgttc

SEQ ID NO: 394830 - DNA, 75 bp, synthetic construct
  source 1..75: mol_type = other DNA
gttcaatgccatgaacggcaaccgcgctgaaatgagcccggaagccgctggcattgctgcctgtctgatgacgta

SEQ ID NO: 394831 - DNA, 75 bp, synthetic construct
  source 1..75: mol_type = other DNA
ctggacgtatgtccgggatgatcgcaatgcgggttcgtcatctcctccggcggtctggttcgcgtactcaccgaa

SEQ ID NO: 394832 - DNA, 75 bp, synthetic construct
  source 1..75: mol_type = other DNA
tactcctggcatagcgatggtcgctatattatttacgctggcaagatagtgcaaaatcctgcgggtgcaccgccg

SEQ ID NO: 394833 - DNA, 75 bp, synthetic construct
  source 1..75: mol_type = other DNA
cactgacgacacaccagtaaaagtgctggcaccgggcagaaaaaaggcaaaaacaggacgcatctggacgtatgt

SEQ ID NO: 394834 - DNA, 75 bp, synthetic construct
  source 1..75: mol_type = other DNA
gcagaataacggaagccgcgtgtatggctcatgcccggagaaaaatccacgatgtgcatgcaagagcgcccacct

SEQ ID NO: 394835 - DNA, 75 bp, synthetic construct
  source 1..75: mol_type = other DNA
ggtaaccgcgctgaaatgagcccggaagctgccggtattgccgcctgtctgatggcgtacagccatcatgcctgc

SEQ ID NO: 394836 - DNA, 75 bp, synthetic construct
  source 1..75: mol_type = other DNA
cacgatgttcacgtccgtaccccgtcagccctgacggaggaggcgctgaaacggatcggcgagctgtatgccatc

SEQ ID NO: 394837 - DNA, 75 bp, synthetic construct
  source 1..75: mol_type = other DNA
tacacatgatgcacgaaatgccgggcgcagccgctttcagcttgatgccccgataatcgctgggcgctcattttt

SEQ ID NO: 394838 - DNA, 75 bp, synthetic construct
  source 1..75: mol_type = other DNA
aaatgagcccggaagccgccggtattgctgcctgtctgatgacgtacagccatcatgcctgtcgtacgagaatta

SEQ ID NO: 394839 - DNA, 75 bp, synthetic construct
  source 1..75: mol_type = other DNA
ccccgtgtcttcggctggatggaccgtctgtgcgaaaactactgcggtggtatctggaatctgtacaccctgaac

SEQ ID NO: 394840 - DNA, 75 bp, synthetic construct
  source 1..75: mol_type = other DNA
ccatgcgtattcaccaacaacatccgacatcccgtctttttccgttctgtaccggtaagtaccgctggcacggca

SEQ ID NO: 394841 - DNA, 75 bp, synthetic construct
  source 1..75: mol_type = other DNA
tgcagaacgtgaaggtagtgcgctgacagaagttgcgtgctgggctcatgcccggagaaaaaatccacgatgtat

SEQ ID NO: 394842 - DNA, 75 bp, synthetic construct
  source 1..75: mol_type = other DNA
cctcttcggcctgtgcaccggagactggcctgcaacaactggttgctactcccgtccctgatgaacaacgtatca

SEQ ID NO: 394843 - DNA, 75 bp, synthetic construct
  source 1..75: mol_type = other DNA
acagagaattatgccatgacggttcattattaccagctgcgggattatgccctgcagcatccggaatgcagcgcc

SEQ ID NO: 394844 - DNA, 75 bp, synthetic construct
  source 1..75: mol_type = other DNA
ttggcagcgatcacggcggcgagcgtggagcactgttgtacgggctgatcggcacctgccgtctgaacggtatcg

SEQ ID NO: 394845 - DNA, 75 bp, synthetic construct
  source 1..75: mol_type = other DNA
atgactgataatattctacgatttgcaactgctccagttattgtcccgaatcgtattacagcgacgctgattgct

SEQ ID NO: 394846 - DNA, 75 bp, synthetic construct
  source 1..75: mol_type = other DNA
aaatgagcccggaagccgccggcattgcagcctgtctgatgacatacagccatcacgcctgtcgtacggagtgtt

SEQ ID NO: 394847 - DNA, 75 bp, synthetic construct
  source 1..75: mol_type = other DNA
ctgatgaacagcgcatcagcttctggccgcagcattttggcctcattccacagtgggtgaccctggagccccgtg

SEQ ID NO: 394848 - DNA, 75 bp, synthetic construct
  source 1..75: mol_type = other DNA
tctcctccggcggtctggttcgcgtactcatcgaaccggcaggggaaacacccggagcaacacctccgccccttc

SEQ ID NO: 394849 - DNA, 75 bp, synthetic construct
  source 1..75: mol_type = other DNA
tgcagtctgtctcggaaagaaaaactttatgttcttcggcagcgatcacggcggcgagcgtggagcactgttgta

SEQ ID NO: 394850 - DNA, 75 bp, synthetic construct
  source 1..75: mol_type = other DNA
atcagtgggacgccctctgttattacagtgatgatggtttggcagaagcggacaataacacagctcaaaaaagat

SEQ ID NO: 394851 - DNA, 75 bp, synthetic construct
  source 1..75: mol_type = other DNA
gagagcgacatcgtgccgggagagcagaccgccaccagcatgctgaagcagcgcacaaaaaatattgcgctactg

SEQ ID NO: 394852 - DNA, 75 bp, synthetic construct
  source 1..75: mol_type = other DNA
aaagcgacatcataccaggagaaaagaccgccaccagcatactgaaacagcgcacaaaaaatcttgtgctgccga

SEQ ID NO: 394853 - DNA, 75 bp, synthetic construct
  source 1..75: mol_type = other DNA
tacgtcgttctctggggttgcgtgcggaaaaaatccgctcggtgtaccgcgaaagcgacatcataccgggagagc

SEQ ID NO: 394854 - DNA, 75 bp, synthetic construct
  source 1..75: mol_type = other DNA
gctggcggcgctggtgcactttctgactggctgttgcgtcatgtcaaatcctgccagtggcctcatggcgactat

SEQ ID NO: 394855 - DNA, 75 bp, synthetic construct
  source 1..75: mol_type = other DNA
gcgcacaaaaaatattgtgctaccgcctcacgcccaccagcaacagaactcaccacaggaaaagacggtggtcag

SEQ ID NO: 394856 - DNA, 75 bp, synthetic construct
  source 1..75: mol_type = other DNA
tcattggtcatggactgggagggatgggaacaaaggctgatgatttgtttgttattccgctgtgccgtaaatgcc

SEQ ID NO: 394857 - DNA, 75 bp, synthetic construct
  source 1..75: mol_type = other DNA
ctgccagtggcctcatggtgactatcatcacagtgaaatcgtcatacatcgttacgggaccggcgcgatggtgtt

SEQ ID NO: 394858 - DNA, 75 bp, synthetic construct
  source 1..75: mol_type = other DNA
gggaattatctctcgctgaattatcctggtgggcggtctgcaatcaggtggtggacgcactacctgaggctgtat

SEQ ID NO: 394859 - DNA, 75 bp, synthetic construct
  source 1..75: mol_type = other DNA
gatgccttaccggaaagtgcagcccgtaaggcactgagattaccgaagcctgttgtgccatctgtcacccgggaa

SEQ ID NO: 394860 - DNA, 75 bp, synthetic construct
  source 1..75: mol_type = other DNA
agacagccaccagcatactgaagcagcgcacaaaaaatattgcgctgccacctcacgtccaccagcaacaaaatc

SEQ ID NO: 394861 - DNA, 75 bp, synthetic construct
  source 1..75: mol_type = other DNA
cgcgaccagacatccgaatcacttgagcaacttgctcaacaaaacctgtcagcatggatgattgacgtcatccgc

SEQ ID NO: 394862 - DNA, 75 bp, synthetic construct
  source 1..75: mol_type = other DNA
gtgctggcactgcgacaaccacctgcgggagcagacatctgattcactggagcaacttgctcaacagaatctggt

SEQ ID NO: 394863 - DNA, 75 bp, synthetic construct
  source 1..75: mol_type = other DNA
gaaagcgacatcataccgggagagcagacagccaccagcatactgaagcagcgcacaaaaaatcttgcgctactg

SEQ ID NO: 394864 - DNA, 75 bp, synthetic construct
  source 1..75: mol_type = other DNA
gattgagggagccacgttcgggctggataacgttgacccggccatttttattgatgctgaagtggataccttcga

SEQ ID NO: 394865 - DNA, 75 bp, synthetic construct
  source 1..75: mol_type = other DNA
cgggagagcagaccgccaccagcatactgaaacagcgcacaaaaaatcttgcgccgctgcctcacgcccaccagc

SEQ ID NO: 394866 - DNA, 75 bp, synthetic construct
  source 1..75: mol_type = other DNA
tggcatttgaagagaagtatggctcccagctggagttgatatttcgttttatcgatcgtgcgctggcaattggtg

SEQ ID NO: 394867 - DNA, 75 bp, synthetic construct
  source 1..75: mol_type = other DNA
ctgtcattgaatcaataaaaatcaagcacaatattgtggggaaatgtattgggtggttgtctccactccatgcta

SEQ ID NO: 394868 - DNA, 75 bp, synthetic construct
  source 1..75: mol_type = other DNA
gtggaaagccagctgatgatccgcatcatctgattggtcacggccagggtggtatggggacaaaatcgcatgacc

SEQ ID NO: 394869 - DNA, 75 bp, synthetic construct
  source 1..75: mol_type = other DNA
tcacctgattggtcatggtcagggggggaatgggaacaaaggcccacgatattttcacgctaccgttgtgccggg

SEQ ID NO: 394870 - DNA, 75 bp, synthetic construct
  source 1..75: mol_type = other DNA
gcgggcgctgccatctggagcggttcctactgttcgccagccgctggcggaagataaatcactgctgccattttt

SEQ ID NO: 394871 - DNA, 75 bp, synthetic construct
  source 1..75: mol_type = other DNA
cgctggggttgcgtgcggaaaaaatccgctcaatgtaccgtgaaagcgacatcgtgccgggagagcagaccgcca

SEQ ID NO: 394872 - DNA, 75 bp, synthetic construct
  source 1..75: mol_type = other DNA
ggaaaaaatccgctcaatgtaccgtgaaagcgacatcgtgccgggagagcagaccgccaccagcatactgaagca

SEQ ID NO: 394873 - DNA, 75 bp, synthetic construct
  source 1..75: mol_type = other DNA
tgggtacaaaagcgcatgatctctttgtgttgcctttgtgcagaaagcatcacgacgagctgcatgcggataccg

SEQ ID NO: 394874 - DNA, 75 bp, synthetic construct
  source 1..75: mol_type = other DNA
caccagcatactgaagcagcgcacaaaaaatcttgcgccgctgcctcacgcccaccagcaaaacccgccacagga

SEQ ID NO: 394875 - DNA, 75 bp, synthetic construct
  source 1..75: mol_type = other DNA
cacgcgctgggtaaagacacagccgtgtgcgtgttgtggtaagccagctgacgatccgcatcacctgattggtta

SEQ ID NO: 394876 - DNA, 75 bp, synthetic construct
  source 1..75: mol_type = other DNA
tcatgcggatccgctggcgttcgaagaaaagcatggttcccaggttgatttaattttcgttttcttgatcacgcc

SEQ ID NO: 394877 - DNA, 75 bp, synthetic construct
  source 1..75: mol_type = other DNA
aaaaagtacggctctcagattgagttaattttcgttttcttgatcacgcctttgcgactggcgtgctcgggtaaa

SEQ ID NO: 394878 - DNA, 75 bp, synthetic construct
  source 1..75: mol_type = other DNA
gcgcacaaaaaatattgcgctaccacctcacgcccaccagcaacagaacccaccacaggaaaagacggtggtaaa

SEQ ID NO: 394879 - DNA, 75 bp, synthetic construct
  source 1..75: mol_type = other DNA
cattgccgttgatccggagtctccggaatctttcatgaagcgacctaaacgtcgccgttgggtaaatgagaaata

SEQ ID NO: 394880 - DNA, 75 bp, synthetic construct
  source 1..75: mol_type = other DNA
caatggcaacggataactgtgcccgctgggtgttgtccgtagtccgtcgtgatctcggttttgatgacagtcacg

SEQ ID NO: 394881 - DNA, 75 bp, synthetic construct
  source 1..75: mol_type = other DNA
acatcgtaccgggagaacagacagccaccagcatactgaagcagcgcacaaaaaatattgcgctgccacctcacg

SEQ ID NO: 394882 - DNA, 75 bp, synthetic construct
  source 1..75: mol_type = other DNA
gtgcggatattacttcgacctgttctggtaccggaactcgggcttgtggtccttaggccgggccgtgaatccatg

SEQ ID NO: 394883 - DNA, 75 bp, synthetic construct
  source 1..75: mol_type = other DNA
ctaaacgtcgccgctgggtaaatgagaaatacacacgctgggtaaagacacagccgtgtgcgtgttgtggtaagc

SEQ ID NO: 394884 - DNA, 75 bp, synthetic construct
  source 1..75: mol_type = other DNA
caatgctctagtcaggatttacataagtctctcataagttcttattcagtcttgcagcccaagcgggctgcttat

SEQ ID NO: 394885 - DNA, 75 bp, synthetic construct
  source 1..75: mol_type = other DNA
gaatacttcatggagcgcgttcgttactaccgcgagcagagcctgacgctgccgaaagcatccgattcgcgttat

SEQ ID NO: 394886 - DNA, 75 bp, synthetic construct
  source 1..75: mol_type = other DNA
tggtaccggaactcggtctggtggtccttaaacctggtcgcgaatcactgccggtttttcattgtggtagggtgc

SEQ ID NO: 394887 - DNA, 75 bp, synthetic construct
  source 1..75: mol_type = other DNA
ttgatgctgaagtggataccttcgaccgcctgctggatgactacatcgttttccgcgtttcttttgaacaggata

SEQ ID NO: 394888 - DNA, 75 bp, synthetic construct
  source 1..75: mol_type = other DNA
ccagtggcctcattccgactggcacagcgagaacatgaccacaatgcgacacgctccgggtgcaatccgtctgtg

SEQ ID NO: 394889 - DNA, 75 bp, synthetic construct
  source 1..75: mol_type = other DNA
agaccgccaccagcatactgaagcagcgcacaaaaaatattgcgctaccgcctcacacccaccagcaaaacccac

SEQ ID NO: 394890 - DNA, 75 bp, synthetic construct
  source 1..75: mol_type = other DNA
ggaaaaaatcctctctgtgtatcgcgagagcgacatcgtaccgggagaacagacagccaccagcatactgaagca

SEQ ID NO: 394891 - DNA, 75 bp, synthetic construct
  source 1..75: mol_type = other DNA
cattgccgttgatcctgagtctccggaatctttcatgaaacgacctaaacgtcgccgctgggtaaatgagaaata

SEQ ID NO: 394892 - DNA, 75 bp, synthetic construct
  source 1..75: mol_type = other DNA
gtcgttcctgccgttcgccagccgctggcggaagataaatcattactgccatttttcagcgatgagcgggtgatt

SEQ ID NO: 394893 - DNA, 75 bp, synthetic construct
  source 1..75: mol_type = other DNA
gctggtggtgctggtgcattgtctgactggttgttgcgccatgttaaatcctgccagtggccacacggcgattat

SEQ ID NO: 394894 - DNA, 75 bp, synthetic construct
  source 1..75: mol_type = other DNA
ctctggctgaattatcctggtgggcagtctgcaatcaggtggcggatgcactcccagagtcagtattacgtcgtt

SEQ ID NO: 394895 - DNA, 75 bp, synthetic construct
  source 1..75: mol_type = other DNA
tgccggggtaaaagagttcgaagaaaaacacggcagccaactgttgttgctgattcgttttttaatgcacgcgag

SEQ ID NO: 394896 - DNA, 75 bp, synthetic construct
  source 1..75: mol_type = other DNA
cacgcgctgggttaagacacatccgtgtgcatgttgtggtaagccagccgacgatccccatcacctgattggtca

SEQ ID NO: 394897 - DNA, 75 bp, synthetic construct
  source 1..75: mol_type = other DNA
aagacaaatcgttactgccatttttcagcgatgagcgggtgatccgtgctgtaggtggtgctggcgcactgtctg

SEQ ID NO: 394898 - DNA, 75 bp, synthetic construct
  source 1..75: mol_type = other DNA
cacaggaagagacggtggtcagcattgccgttgatcctgagtctccggaatctttcatgaaacgacctaaacgtc

SEQ ID NO: 394899 - DNA, 75 bp, synthetic construct
  source 1..75: mol_type = other DNA
gccgttcgccagccgctggcggaggataaatcattactgccatttttcagcaatgagcgtgtgattcgtgctgct

SEQ ID NO: 394900 - DNA, 75 bp, synthetic construct
  source 1..75: mol_type = other DNA
tggtaccggaactcggactggttatcgttaagccaggccgtgaatccatgcaggtattccataacggcagagtac

SEQ ID NO: 394901 - DNA, 75 bp, synthetic construct
  source 1..75: mol_type = other DNA
gcccacgatatttttacgttgccgctgtgccgggaacatcacaacgaacttcatgcagatccgcaggcgttcgaa

SEQ ID NO: 394902 - DNA, 75 bp, synthetic construct
  source 1..75: mol_type = other DNA
tgccgcctgtctgatgacgtacagtcatcatgcctgtcgtacggagtgttatgccatgacggtccattattatcg

SEQ ID NO: 394903 - DNA, 75 bp, synthetic construct
  source 1..75: mol_type = other DNA
tgcctgtcgtacggagtgttatgccatgacggtccattattaccggctgcgggattacgccctgcagcatccgga

SEQ ID NO: 394904 - DNA, 75 bp, synthetic construct
  source 1..75: mol_type = other DNA
tgatgacgaaacatgggtactgttcaatgccatgaacggtaaccgcgctgaaatgagtccggaagctgccggcat

SEQ ID NO: 394905 - DNA, 75 bp, synthetic construct
  source 1..75: mol_type = other DNA
tggaccgtctgtgcgaagactactgcggaggaatctggaatctgtacaccctgaacaacgggggtgcatttatgg

SEQ ID NO: 394906 - DNA, 75 bp, synthetic construct
  source 1..75: mol_type = other DNA
tggaccgtctgtgcgaagactactgcggaggaatctggaatctgtacaccctgaacaacggtggagcatttatgg

SEQ ID NO: 394907 - DNA, 75 bp, synthetic construct
  source 1..75: mol_type = other DNA
atgaaaattatcacccgtggtgaagccatgcgcattcaccgtcagcatccggcatcccgtctttttccattctgc

SEQ ID NO: 394908 - DNA, 75 bp, synthetic construct
  source 1..75: mol_type = other DNA
cgcgctgaaatgagcccggaagctgccggcattgccgcctgtctgatgacgtacagccatcatgcctgtcgtacg

SEQ ID NO: 394909 - DNA, 75 bp, synthetic construct
  source 1..75: mol_type = other DNA
cggtcgtgaagtgcaggatattcccggtgtgctggccgtgtttgctgaacgccgtaaggacagttttggtccgta

SEQ ID NO: 394910 - DNA, 75 bp, synthetic construct
  source 1..75: mol_type = other DNA
tacgaatccggcagaataacggaagtcgcgtgtatggctcatgcccggagaaaaatccacgatgtgcatgcaaga

SEQ ID NO: 394911 - DNA, 75 bp, synthetic construct
  source 1..75: mol_type = other DNA
gggctggaagaggtcagcgaaggagaagtgctgatcggcgatgaggtgatgaatgatgtggtgcccgcccgccgt

SEQ ID NO: 394912 - DNA, 75 bp, synthetic construct
  source 1..75: mol_type = other DNA
ttttcttcatagtgttaaagcaatgaatctaaagttcgaccttattttagtcagtgctgtatggatgcatctttc

SEQ ID NO: 394913 - DNA, 75 bp, synthetic construct
  source 1..75: mol_type = other DNA
gtgaccctggagccccgtatcttcggctggatggaccgtctgtgtgaagactactgcgggggtatctggaatctg

SEQ ID NO: 394914 - DNA, 75 bp, synthetic construct
  source 1..75: mol_type = other DNA
tggaccgtctgtgcgaagactactgcggaggtatctggaatctgtacaccctgaacaacggaggcgcatttatgg

SEQ ID NO: 394915 - DNA, 75 bp, synthetic construct
  source 1..75: mol_type = other DNA
tccccgtgaaacccggattatccggccggaagaggaatgctgcccggcctgtggtggtgacctcagtcctctggg

SEQ ID NO: 394916 - DNA, 75 bp, synthetic construct
  source 1..75: mol_type = other DNA
atgaaaaccatttcacataattccaccacatcttctgtttccgtaaccgctgcatcagggaatgaccagtctcat

SEQ ID NO: 394917 - DNA, 75 bp, synthetic construct
  source 1..75: mol_type = other DNA
ctggttgccacttccgtccctgatgaacaacgtatcagcttctggccgcagcattttggcctcattccacagtgg

SEQ ID NO: 394918 - DNA, 75 bp, synthetic construct
  source 1..75: mol_type = other DNA
gtctttaatcatactaataacagtgatgccggctaccaggtcgatatgctgattacaggtgacgataaagacgga

SEQ ID NO: 394919 - DNA, 75 bp, synthetic construct
  source 1..75: mol_type = other DNA
ccatcttccctgcgccagtcttcagcccgtaaaccgttaccagccttacttccccatgaaacccgggtcatccga

SEQ ID NO: 394920 - DNA, 75 bp, synthetic construct
  source 1..75: mol_type = other DNA
cccctatatttccagacatctgttatcacttaacccattacaagcccactgccgcagatattcccgtggcgagcg

SEQ ID NO: 394921 - DNA, 75 bp, synthetic construct
  source 1..75: mol_type = other DNA
gcatcagcttctggccgcagcagtttggcctcattccacagtgggtgaccctggatccccgtgtcttcggctgga

SEQ ID NO: 394922 - DNA, 75 bp, synthetic construct
  source 1..75: mol_type = other DNA
gcatcagcttctggccgcagcagtttggcctcattccacagtgggttaccctggaaccccgtgtcttcggctgga

SEQ ID NO: 394923 - DNA, 75 bp, synthetic construct
  source 1..75: mol_type = other DNA
gggtgaccctggagccccgtatcttcggctggatggaccgtctgtgtgaagactactgcggtggtatctggaatc

SEQ ID NO: 394924 - DNA, 75 bp, synthetic construct
  source 1..75: mol_type = other DNA
ccgtctgtacgcgtgaatgaatggttcagcgcgtatgcgatggcgggtgtggcttacagccgtgtgtcgactttc

SEQ ID NO: 394925 - DNA, 75 bp, synthetic construct
  source 1..75: mol_type = other DNA
tgatacatggaaaaaaacagttaaacgtttttacgatacgctggtggtgcagtttgatattgaagaagcatgggc

SEQ ID NO: 394926 - DNA, 75 bp, synthetic construct
  source 1..75: mol_type = other DNA
cgggggtatctggaatctgtacactctgaacaacggcggggcatttatggcccccgaaccggatgacgatgatga

SEQ ID NO: 394927 - DNA, 75 bp, synthetic construct
  source 1..75: mol_type = other DNA
acaactgataatcaaaagtgctgttaaagaggtcgttttaaatactgctaaacgtcgctgtaaagtgacttttca

SEQ ID NO: 394928 - DNA, 75 bp, synthetic construct
  source 1..75: mol_type = other DNA
gtctgctgtttggcctgctgacgtatctgactaacctgtatttcaaaatcagagaggaccgtcgtaaggtggcgc

SEQ ID NO: 394929 - DNA, 75 bp, synthetic construct
  source 1..75: mol_type = other DNA
gctgtttggcctgctgacgtatctgactaacctgtatttcaaaatcagggaggaccgccgtaagacggcgcaggg

SEQ ID NO: 394930 - DNA, 75 bp, synthetic construct
  source 1..75: mol_type = other DNA
tggcgataggtgtgctgggaagtctgctgtttggcctgctgacgtatctgacaaatctttatttcaagattaaag

SEQ ID NO: 394931 - DNA, 75 bp, synthetic construct
  source 1..75: mol_type = other DNA
ggggagtctgctgtttggcctgctgacgtatctgactaacctttatttcaagattaaagaagaccggcgtaaggc

SEQ ID NO: 394932 - DNA, 75 bp, synthetic construct
  source 1..75: mol_type = other DNA
atggaaaaaatcacaacgggtgtgtcatacaccacgtcagcggtggggacgggatactggttactgcagctgctg

SEQ ID NO: 394933 - DNA, 75 bp, synthetic construct
  source 1..75: mol_type = other DNA
cggtgtgctggggagtctgctgtttggcctgctgacgtatctgactaacctgtatttcaaaatcagagaggaccg

SEQ ID NO: 394934 - DNA, 75 bp, synthetic construct
  source 1..75: mol_type = other DNA
cacagtgggctgcaatcggtgtgctgggtagtctggtatttggcctgctgacgtacctgacaaacctttatttca

SEQ ID NO: 394935 - DNA, 75 bp, synthetic construct
  source 1..75: mol_type = other DNA
atgaaatccatggacaagttaactactggggtcgcctatggcacatcggcaggtaatgctggtttttgggcatta

SEQ ID NO: 394936 - DNA, 75 bp, synthetic construct
  source 1..75: mol_type = other DNA
taatggctatgattttattgccagaatggatgctgatgatattgttattaacgggcgttttaaaaagcaattaga

SEQ ID NO: 394937 - DNA, 75 bp, synthetic construct
  source 1..75: mol_type = other DNA
gctgtttggtctgctgacgtacctgacgaacctgtatttcaaaattaaagaagaccggcgtaaggcggcgcgggg

SEQ ID NO: 394938 - DNA, 75 bp, synthetic construct
  source 1..75: mol_type = other DNA
gctgtttggcctgctgacgtatctgactaacctgtatttcaaaatcagagaggaccgtcgtaaggctgcgcgggg

SEQ ID NO: 394939 - DNA, 75 bp, synthetic construct
  source 1..75: mol_type = other DNA
agtggacggcgataggcgtgctggggagcctgctgtttggtctgctgacatacctgacgaacctgtatttcaaaa

SEQ ID NO: 394940 - DNA, 75 bp, synthetic construct
  source 1..75: mol_type = other DNA
caggtgcttcctatattacgtccgggggcagtggcgtcttctggttactgcaattactcgataaagtcagcccaa

SEQ ID NO: 394941 - DNA, 75 bp, synthetic construct
  source 1..75: mol_type = other DNA
ccatgcgtattcaccaacagtatcctgcatcccgtctttttccgttctgcaccgggaagtaccgctggcacggca

SEQ ID NO: 394942 - DNA, 75 bp, synthetic construct
  source 1..75: mol_type = other DNA
tagatgtagtcaccctgtccgatggtgaacattacacacgagaaagtttaaaagacccgttatccctgattaaaa

SEQ ID NO: 394943 - DNA, 75 bp, synthetic construct
  source 1..75: mol_type = other DNA
cagttgctggacaaagtctccccgtctcagtgggcggcaataggcgtgctggggagtctgctgtttgggctgctg

SEQ ID NO: 394944 - DNA, 75 bp, synthetic construct
  source 1..75: mol_type = other DNA
agtgccaaacgtgaaggtggtgcacagacagaagttgcgtgctgggtccatgcccggcgaaaaatacacgatgta

SEQ ID NO: 394945 - DNA, 75 bp, synthetic construct
  source 1..75: mol_type = other DNA
atgtgactgcatcattgaagcaccagcgccgtcccgcccgatagagcgtggtatcgcgggccccggattacttgc

SEQ ID NO: 394946 - DNA, 75 bp, synthetic construct
  source 1..75: mol_type = other DNA
agttgttgcccggaatgtggcggcgagctggattatctgggggaagtcagtactgagcaactggaactggtgagc

SEQ ID NO: 394947 - DNA, 75 bp, synthetic construct
  source 1..75: mol_type = other DNA
atggaaaaaatcacaacaggtgtgtcatacaccacgtcagcggtggggacggaatactggttactgcagctgctg

SEQ ID NO: 394948 - DNA, 75 bp, synthetic construct
  source 1..75: mol_type = other DNA
tggcaataggtgtgctggggagtctgctgtttggcctgctgacgtatctgacaaatctttatttcaagattaaag

SEQ ID NO: 394949 - DNA, 75 bp, synthetic construct
  source 1..75: mol_type = other DNA
caggtgtgtcatacaccacgtcagtggtggggacgggatactggctactgcagttgctggacaaagtctccccat

SEQ ID NO: 394950 - DNA, 60 bp, synthetic construct
  source 1..60: mol_type = other DNA
atgtaccagatggaaaaaatcacaacaggtgtgtcatacaccacgtcagcggtggggacg

SEQ ID NO: 394951 - DNA, 75 bp, synthetic construct
  source 1..75: mol_type = other DNA
ggggagtctgctgtttggtctgctgacatatctgactaacctgtatttcaaaattaaagaagaccggcgtaaggc

SEQ ID NO: 394952 - DNA, 75 bp, synthetic construct
  source 1..75: mol_type = other DNA
gtatttggcctgctgacgtacctgacaaacctttatttcaagattaaagaagataagcgcaaggctgcgagaggt

SEQ ID NO: 394953 - DNA, 75 bp, synthetic construct
  source 1..75: mol_type = other DNA
cgctgtatgaatcacgcctgaagagaaagctgcacgttatcagcaagcgttacactcagcgcattgagcgacata

SEQ ID NO: 394954 - DNA, 75 bp, synthetic construct
  source 1..75: mol_type = other DNA
gatggctggccgctgtatgaatcacgcctgaagggaaagctgaacgttatcagcaagtgttacactcagcgcatt

SEQ ID NO: 394955 - DNA, 75 bp, synthetic construct
  source 1..75: mol_type = other DNA
attgtctgcgctgaaatggacgaacagtggggctacgtcggtgctaaatcacgtcagcgctggctgttttacgcg

SEQ ID NO: 394956 - DNA, 75 bp, synthetic construct
  source 1..75: mol_type = other DNA
agcgatatacgcagcgaattgagcggcataacctgaatctgaggcagcacctggcacggaagtcgctgtcgttct

SEQ ID NO: 394957 - DNA, 75 bp, synthetic construct
  source 1..75: mol_type = other DNA
gaggacagttgttgcgcacgttttcggtgaacgcactctggccacactggcgcgtcttctgagcctgctgtcggc

SEQ ID NO: 394958 - DNA, 75 bp, synthetic construct
  source 1..75: mol_type = other DNA
acttttgctgctgatgtatacatcgtggatttttctccgggcatgagcccagcacgcaacttctgtcagcgcact

SEQ ID NO: 394959 - DNA, 75 bp, synthetic construct
  source 1..75: mol_type = other DNA
gtggtatggatgacggatggctggccgttgtatgaatcacgcctgaagggaaagctgcacgttatcagcaagcgt

SEQ ID NO: 394960 - DNA, 75 bp, synthetic construct
  source 1..75: mol_type = other DNA
tgaagggaaagctacacgtaatcagcaagcgttacactcagcgcattgagcgacataacctgaatctgagacaac

SEQ ID NO: 394961 - DNA, 75 bp, synthetic construct
  source 1..75: mol_type = other DNA
aatcacgcctgaagggaaagctacacgttatcagcaagcgttacactcagcgcattgagcgacataatctgaatc

SEQ ID NO: 394962 - DNA, 75 bp, synthetic construct
  source 1..75: mol_type = other DNA
gatggctggccgctgtatgaatcatgcctgaagggaaagctgcacgttatcagcaagcgttacactcagcgcatt

SEQ ID NO: 394963 - DNA, 75 bp, synthetic construct
  source 1..75: mol_type = other DNA
gtgccgcacgtcttcggtgaacgcactctggccacactggagcgtcttctgagcctgctgtcggcctttgaggtc

SEQ ID NO: 394964 - DNA, 75 bp, synthetic construct
  source 1..75: mol_type = other DNA
gtggcgcacgtattcggtgaacgcactctggccacactggagcgtcttctgagcctgctgtcggactttgaggtc

SEQ ID NO: 394965 - DNA, 75 bp, synthetic construct
  source 1..75: mol_type = other DNA
gtggcacacatcttcggtgaacgcactctggccacactggagcgtcttctgagcctgctgtcggcctttgaggtc

SEQ ID NO: 394966 - DNA, 75 bp, synthetic construct
  source 1..75: mol_type = other DNA
agcaagcgttacactcagcgcattgagcgacataatctgagacaacatctggcacggctgggacggaagtcgctg

SEQ ID NO: 394967 - DNA, 75 bp, synthetic construct
  source 1..75: mol_type = other DNA
aaagggaacatcgctggctgaggtttcccgcagggccgggttggtgtcttccacgctggcaaatgcgctgacccg

SEQ ID NO: 394968 - DNA, 75 bp, synthetic construct
  source 1..75: mol_type = other DNA
tggaacatattgtatttagaactatagctcatttaaaggggttaataccaaaaaacggaataatggattatcatc

SEQ ID NO: 394969 - DNA, 75 bp, synthetic construct
  source 1..75: mol_type = other DNA
gtgattgtctgcgctgaaatggacgaacattggggctacgtcggtgctaaatcacgtcagcgctggctgttttac

SEQ ID NO: 394970 - DNA, 75 bp, synthetic construct
  source 1..75: mol_type = other DNA
caatgaaatcgcaaaaaaaagggttcaagaaatttctgctattatgaacgataaatttaattcttggggaagata

SEQ ID NO: 394971 - DNA, 75 bp, synthetic construct
  source 1..75: mol_type = other DNA
tgcattatgctcgaaccgggaacgagagtttcccacgcggcggtgcatctggccgccacggtgggaacactgctg

SEQ ID NO: 394972 - DNA, 75 bp, synthetic construct
  source 1..75: mol_type = other DNA
cagtggagtctggcgaaaaaagtgctggtgggtctggtgatgggtgtggtttttggcctcgccctgcataccatt

SEQ ID NO: 394973 - DNA, 75 bp, synthetic construct
  source 1..75: mol_type = other DNA
tgttgacccgggattttatgctggtttcttgcctaagcctggcggtgggatgaaactgttaatcacctcagtgga

SEQ ID NO: 394974 - DNA, 75 bp, synthetic construct
  source 1..75: mol_type = other DNA
aatggatgtcagcgatggacttgtatgttatgtcttcttcatgggaaggtatgcctttagttatatgtgaggcta

SEQ ID NO: 394975 - DNA, 75 bp, synthetic construct
  source 1..75: mol_type = other DNA
caatttcaacaaatgttagccaagaagccgttgaaagctttgttcagaagggggctgtcaaaagaggcagaatga

SEQ ID NO: 394976 - DNA, 75 bp, synthetic construct
  source 1..75: mol_type = other DNA
gatttctttgccagcgaacgtattgaccaggtctatctggcggcggcgaaagtgggcggcattgttgccaacaac

SEQ ID NO: 394977 - DNA, 75 bp, synthetic construct
  source 1..75: mol_type = other DNA
aatattagatatcgccgccttatactattatcgttcactggtaaatatatataacgatagaattgaggatgcaat

SEQ ID NO: 394978 - DNA, 75 bp, synthetic construct
  source 1..75: mol_type = other DNA
aagcactattgctttattcccatttacaacgtctcacagccaccaggatccattaacacttaaccaagagcttat

SEQ ID NO: 394979 - DNA, 75 bp, synthetic construct
  source 1..75: mol_type = other DNA
aagcgtggctacgtgaccgttaatctcggttctgattttgatgccagcactatcaaaaaaggcgatctccactga

SEQ ID NO: 394980 - DNA, 75 bp, synthetic construct
  source 1..75: mol_type = other DNA
ggaaagcaagcggcagacgctacgctcactgctctagcggcactagctacagcagcagataaactcccttatttc

SEQ ID NO: 394981 - DNA, 75 bp, synthetic construct
  source 1..75: mol_type = other DNA
ccgctgctgggggcggagggggtgcccggcgggacggaccctgcgctgcccggcccgccgcccgtcattctctcc

SEQ ID NO: 394982 - DNA, 75 bp, synthetic construct
  source 1..75: mol_type = other DNA
atggatttagaaattaagttttcatatcatttttctgatggaataatacttacagaagatggtattcttacaaaa

SEQ ID NO: 394983 - DNA, 75 bp, synthetic construct
  source 1..75: mol_type = other DNA
aagctcaaattaagaaacatcaaagatgttgatgcgtgtgagcgcctgattgataaactggctgctgtggtaata

SEQ ID NO: 394984 - DNA, 75 bp, synthetic construct
  source 1..75: mol_type = other DNA
tttggtgacgcagagttatatagattcaagttaaaggataaaaagatattacataccgaaattcagattaaaaat

SEQ ID NO: 394985 - DNA, 75 bp, synthetic construct
  source 1..75: mol_type = other DNA
tatgtgtgggcacggcactatcgggcttgttgcctcactggcctggttgggtcgtattaaaccgggcgttcatcg

SEQ ID NO: 394986 - DNA, 75 bp, synthetic construct
  source 1..75: mol_type = other DNA
gaaaccggctgccggacccggaactgcacccggacagcaccctcacggcgtggccggataaccgcatcgcggaag

SEQ ID NO: 394987 - DNA, 75 bp, synthetic construct
  source 1..75: mol_type = other DNA
gccgctccgaagtgactcaggaagccgatttttacggctcaatggacggggcaagtaagtttgttcgcggcgatg

SEQ ID NO: 394988 - DNA, 75 bp, synthetic construct
  source 1..75: mol_type = other DNA
ttgttttgattttaattgcagcttttaataaagccacatatggtcatatcaacagtcacaataaatattttgata

SEQ ID NO: 394989 - DNA, 75 bp, synthetic construct
  source 1..75: mol_type = other DNA
taataataactcaaggcacataaacaaaatgatggataaaaatgatggtggctttagatatgcaatacaatatct

SEQ ID NO: 394990 - DNA, 75 bp, synthetic construct
  source 1..75: mol_type = other DNA
cttatattccatcgtacagagtacctgtctttaatgctttaagtcataatatggatgtggtatttttctccgatt

SEQ ID NO: 394991 - DNA, 75 bp, synthetic construct
  source 1..75: mol_type = other DNA
gacgggaaaacgggtatggcggcgggagcgtgacctgacggggtggatgtcgctgtcgcgtaaaccggaggagac

SEQ ID NO: 394992 - DNA, 75 bp, synthetic construct
  source 1..75: mol_type = other DNA
attcggcgtgctaattaatacaggatatctcccacatcaaataacaagatatattaatcaggatgagatgatggg

SEQ ID NO: 394993 - DNA, 75 bp, synthetic construct
  source 1..75: mol_type = other DNA
ggtgcgcatcagcggcccgcaggagtgccgggagtaccgttacagcggcacgggaaggctgacgggcgtccacac

SEQ ID NO: 394994 - DNA, 75 bp, synthetic construct
  source 1..75: mol_type = other DNA
cttaataaggtatcaaccagttccgcccaggcattattaagacaagaccatgctgacagaaagttctttattggt

SEQ ID NO: 394995 - DNA, 75 bp, synthetic construct
  source 1..75: mol_type = other DNA
attgtgctgcgccgaataaagaaaccggcaatggtactaattcaggtgattggatattcggtgaagatggcattt

SEQ ID NO: 394996 - DNA, 75 bp, synthetic construct
  source 1..75: mol_type = other DNA
tgataaaaaaatacaatactcagttactaataaatgaatgctattgtctgttagctgaatgccatatgtctctgg

SEQ ID NO: 394997 - DNA, 75 bp, synthetic construct
  source 1..75: mol_type = other DNA
aagctgaaaaaggtgaagtgccaagtttgatgctctcaacagcacgccaagtggcgagtgcatggcttagagcac

SEQ ID NO: 394998 - DNA, 75 bp, synthetic construct
  source 1..75: mol_type = other DNA
ggatcctcggtgcactgttttactactctccggaacgaccagaggtgaaagcacttttcgattgtctgcccactc

SEQ ID NO: 394999 - DNA, 75 bp, synthetic construct
  source 1..75: mol_type = other DNA
gtcattaccaattttcgtacccatttaccgtttatcccttgtacatattcccccggtttggcccgagctacgagc

SEQ ID NO: 395000 - DNA, 75 bp, synthetic construct
  source 1..75: mol_type = other DNA
ataaaaagcagtaaagtcaataatacatcttggaatgtaaaatataataaacattttaatagcataggcgctttc

SEQ ID NO: 395001 - DNA, 75 bp, synthetic construct
  source 1..75: mol_type = other DNA
atgattttactgtctatgggggagccgaactttcatccaaatacaattctataaacatggggttgggtaagatta

SEQ ID NO: 395002 - DNA, 75 bp, synthetic construct
  source 1..75: mol_type = other DNA
agtgccttattctctaccggcaatagcagttaggaatggatatagatactatgaaattgctgcaggtaattacca

SEQ ID NO: 395003 - DNA, 75 bp, synthetic construct
  source 1..75: mol_type = other DNA
taaaaaactcagccgagtcggtaacctcgcgcatacaaccgggcagtgatgtgattgtctgcgctgaaatggacg

SEQ ID NO: 395004 - DNA, 75 bp, synthetic construct
  source 1..75: mol_type = other DNA
aatggacgaacattggggctacgtcggtgctaaatcacgtcagcgctggctgctttacgcgtatgacaggatacg

SEQ ID NO: 395005 - DNA, 75 bp, synthetic construct
  source 1..75: mol_type = other DNA
agccgaaagattggctatagcctgaatgatactcccacccctgctggggtctattttgctaaaacagccataatt

SEQ ID NO: 395006 - DNA, 75 bp, synthetic construct
  source 1..75: mol_type = other DNA
aaatttaaagaaagcgatattgttaactttttgcagtataatggtttcgaacacagcataaaaatattgaaatca

SEQ ID NO: 395007 - DNA, 75 bp, synthetic construct
  source 1..75: mol_type = other DNA
acgaaattgagtgcttagctgaaaggatattatcaagatattcattcataaaaaaatactatatgaatgaaatca

SEQ ID NO: 395008 - DNA, 75 bp, synthetic construct
  source 1..75: mol_type = other DNA
acgacacatcctatattgaaaaagcttatgatactctcgtagatatgaagggaacgaaaaacgcctttggtttag

SEQ ID NO: 395009 - DNA, 75 bp, synthetic construct
  source 1..75: mol_type = other DNA
gccctggtggcgctcggccagcgccccgactatcagttaatttcccgccacgtcgtcaatatcgacgccctgttt

SEQ ID NO: 395010 - DNA, 75 bp, synthetic construct
  source 1..75: mol_type = other DNA
ggtaacttcaacaacctgattatgctgcgggtacgcgaaaccgccaccgccgaactgctgacgaagcaactgcca

SEQ ID NO: 395011 - DNA, 75 bp, synthetic construct
  source 1..75: mol_type = other DNA
aagttccttcgtgatcagggaatgacgtttgattcctgtataaatgaaccggaagatcagtttggcctgatgctg

SEQ ID NO: 395012 - DNA, 75 bp, synthetic construct
  source 1..75: mol_type = other DNA
gttgtttcttcaatcacgtcaaaaataattgctgaccagcaagctagtactgctttgaaaacaaatataatgaag

SEQ ID NO: 395013 - DNA, 75 bp, synthetic construct
  source 1..75: mol_type = other DNA
tggcggtactgctctggggcgcacctggtccgctatccggggtggtgcaggtaaagttctggggcgcgttgctgc

SEQ ID NO: 395014 - DNA, 75 bp, synthetic construct
  source 1..75: mol_type = other DNA
cagcagaaaaaacggcgtttctcggcgatcggtttagaagttatataagagcgggtatctatcaaaaaaagagca

SEQ ID NO: 395015 - DNA, 75 bp, synthetic construct
  source 1..75: mol_type = other DNA
cctgtgtttttgttgatgacgtctatctcgaaccactgccaccggtgccgggacaacctcattatacttattgtt

SEQ ID NO: 395016 - DNA, 75 bp, synthetic construct
  source 1..75: mol_type = other DNA
aatatggcaattagcgctgggcaaagtggctcttttgaattgaaagatatggctaagtggcttcctaagcagctt

SEQ ID NO: 395017 - DNA, 75 bp, synthetic construct
  source 1..75: mol_type = other DNA
aatggtggagatggattcgatggttcgccaggctgttcgtgctggcggcggaacaaaagaatcagcagctgatac

SEQ ID NO: 395018 - DNA, 75 bp, synthetic construct
  source 1..75: mol_type = other DNA
cctcaggttccccgccagttgcgacagtcgcgccatcgtcgtccgttaccggcacaccttccccgtgaaatacac

SEQ ID NO: 395019 - DNA, 75 bp, synthetic construct
  source 1..75: mol_type = other DNA
ttcccggtgtgctggctgtgtttgcagaacgccgtaaagacagttttggcccgtatgtccggctgatgagcgtca

SEQ ID NO: 395020 - DNA, 75 bp, synthetic construct
  source 1..75: mol_type = other DNA
gaacaactggaactggtgagcagcgccctgaaagtgatccgcacagaacgggtaaaaaagcctgtacaaatgtga

SEQ ID NO: 395021 - DNA, 75 bp, synthetic construct
  source 1..75: mol_type = other DNA
gcttctggccgcagcattttggcctcattccacagtgggtgaccctggaaccccgtgtcttcggctggatggacc

SEQ ID NO: 395022 - DNA, 75 bp, synthetic construct
  source 1..75: mol_type = other DNA
atgccatgacggtccattattaccggctgcgggattatgccctgcagcatccggaatgcagcgccattatgcgca

SEQ ID NO: 395023 - DNA, 75 bp, synthetic construct
  source 1..75: mol_type = other DNA
tctggcgacaagaaaagccagagctgcgccactgatgcagtcactgtatgactggatacagactcagatgaaaac

SEQ ID NO: 395024 - DNA, 75 bp, synthetic construct
  source 1..75: mol_type = other DNA
gtacaccctgaacaacggcggggtcagtttatggcacccgaaccggatgacgatgatgacgaaacatgggtactg

SEQ ID NO: 395025 - DNA, 75 bp, synthetic construct
  source 1..75: mol_type = other DNA
tgaaaacactgtcgcgtcactcggatacggcaaaagcgttcgcatacctgctgaaacagtgggaggccctgaacg

SEQ ID NO: 395026 - DNA, 75 bp, synthetic construct
  source 1..75: mol_type = other DNA
tgacgtgctgcgccagtatgtgctgatgcccggtaaagtccatgcggatgatatccccgttccggtccaggagcc

SEQ ID NO: 395027 - DNA, 75 bp, synthetic construct
  source 1..75: mol_type = other DNA
ccacaccttctgtttccgtgaccactgcatcagggaataatccgcctcagatggttgccaccctcgtccctgatg

SEQ ID NO: 395028 - DNA, 75 bp, synthetic construct
  source 1..75: mol_type = other DNA
tgcgaagactactgcggtggtatctggaatctgtacaccctgaacaacggcggggcatttatggcacccgaaccg

SEQ ID NO: 395029 - DNA, 75 bp, synthetic construct
  source 1..75: mol_type = other DNA
actgctggagccgctgtatgacgtcctgcgccagtatgtactgatgcccggtaaagttcatgcggatgatatccc

SEQ ID NO: 395030 - DNA, 75 bp, synthetic construct
  source 1..75: mol_type = other DNA
cattccacagtgggtaaccctggatccccgtgtcttcggctggatggaccgtctttgcgaaaactactgcggtgg

SEQ ID NO: 395031 - DNA, 75 bp, synthetic construct
  source 1..75: mol_type = other DNA
caactgagtctggttgaagagacggaagccttcctgcgctctgcactgacacgtgccgaagaaaagatcgaagaa

SEQ ID NO: 395032 - DNA, 75 bp, synthetic construct
  source 1..75: mol_type = other DNA
tggctgcgttacgtcattgagcatatccaggattggccggcaaaccgggtacgcgatctgttgccctggaaagtt

SEQ ID NO: 395033 - DNA, 75 bp, synthetic construct
  source 1..75: mol_type = other DNA
tacggggagtggccgtaggccggaaaaactggctgttcgcgggttccgacagcggtggcgaacatgcggcggtgt

SEQ ID NO: 395034 - DNA, 75 bp, synthetic construct
  source 1..75: mol_type = other DNA
ggtatcgccggaccgtggctgctggcccgcgtgctgacctcgaagtatgcagagcacaccccgctgtatcgccag

SEQ ID NO: 395035 - DNA, 75 bp, synthetic construct
  source 1..75: mol_type = other DNA
gcacggatacatataccggcagtgaagtgcaggatattcccggtgtgctggctgtgtttgctgaacgtcgtaagg

SEQ ID NO: 395036 - DNA, 75 bp, synthetic construct
  source 1..75: mol_type = other DNA
cattccacagtgggtgaccctggacccccgtgtcttcggctggatggaccgtctatgcgaaaactactgcggtgg

SEQ ID NO: 395037 - DNA, 75 bp, synthetic construct
  source 1..75: mol_type = other DNA
cattccacagtgggtcaccctggagccccgtgtcttcggctggatggaccgtctatgcgaaaactactgcggtgg

SEQ ID NO: 395038 - DNA, 75 bp, synthetic construct
  source 1..75: mol_type = other DNA
cattccacagtgggttaccctggatccccgtgtcttcggctggatggaccgtctgtgcgaaaactactgcggtgg

SEQ ID NO: 395039 - DNA, 75 bp, synthetic construct
  source 1..75: mol_type = other DNA
catgcctgtcgtacggagaattatgccatgacggtccattattaccggttgcgggattacgccctgcagcatccg

SEQ ID NO: 395040 - DNA, 75 bp, synthetic construct
  source 1..75: mol_type = other DNA
atgacaaccttttcgcatagctccaccacaccttctgtttccgtaactactgcaccagggaataaccagccccaa

SEQ ID NO: 395041 - DNA, 75 bp, synthetic construct
  source 1..75: mol_type = other DNA
gctggcacggcagtgctgaagcgtataccggtcgtgaagtgcaggatattcccggtgtgctggccgtgtttgctg

SEQ ID NO: 395042 - DNA, 75 bp, synthetic construct
  source 1..75: mol_type = other DNA
aaagtggctgcgctacgtcattgaacatatccaggactggccgacaaaccgggtacgcgatctgttgccctggaa

SEQ ID NO: 395043 - DNA, 75 bp, synthetic construct
  source 1..75: mol_type = other DNA
tgacgacacaccagtaaaagtgctggcaccgggcagaaaaaagcaaaaacaggacgcatctggacgtatgtccgg

SEQ ID NO: 395044 - DNA, 75 bp, synthetic construct
  source 1..75: mol_type = other DNA
agtgcagaacgtgaaggtggtgcactgacagaagttgcgtgctgggcccatgcccggcgaaaaatccacgatgta

SEQ ID NO: 395045 - DNA, 75 bp, synthetic construct
  source 1..75: mol_type = other DNA
aacggtggcgcatttatggcacccgaaccggatgaagatgatggaaaaacctgggtactgttcaatgccatgaac

SEQ ID NO: 395046 - DNA, 75 bp, synthetic construct
  source 1..75: mol_type = other DNA
gtgggatggcctgaacgtgtaccgcagtaatggccaggtggaaatcgacaacaacattgcagagaacgccttacg

SEQ ID NO: 395047 - DNA, 75 bp, synthetic construct
  source 1..75: mol_type = other DNA
gtggtggcgaactcagttctctgggatgtgatgtgtcagagcaactggagcttatcagcagcacctttaaggtta

SEQ ID NO: 395048 - DNA, 75 bp, synthetic construct
  source 1..75: mol_type = other DNA
tgacgacacaccagtaaaagtgctggcaccgggcagaaaagacgaaaacagggcgcatctggacgtatgtccgga

SEQ ID NO: 395049 - DNA, 75 bp, synthetic construct
  source 1..75: mol_type = other DNA
cggcaggggaaacacccggagcaacacctccgccccttccggggtatcctgcaggcggatgcgttcacaggttac

SEQ ID NO: 395050 - DNA, 75 bp, synthetic construct
  source 1..75: mol_type = other DNA
agttgatctgagctctggtaatgactccaacttattgatagtgttttatgttcagataatgcccgatgactttgt

SEQ ID NO: 395051 - DNA, 75 bp, synthetic construct
  source 1..75: mol_type = other DNA
ggtaaccgcgctgaaatgagcccggaagcagccggcattgccgcctgtctgatggcgtacagccatcacgcctgt

SEQ ID NO: 395052 - DNA, 75 bp, synthetic construct
  source 1..75: mol_type = other DNA
gcagaagaagccctgaagcgaatcagtgaactgtacgccatcgaggatgaaatacggggattaccagagtcagag

SEQ ID NO: 395053 - DNA, 75 bp, synthetic construct
  source 1..75: mol_type = other DNA
tgcggagatgagcggagaggctgccggtatagcagtctgcctgatggcttacagccaccacgtctgccgcaccga

SEQ ID NO: 395054 - DNA, 75 bp, synthetic construct
  source 1..75: mol_type = other DNA
gtgttaacgggaaaatactgcgaacaactgccactgtatcgtcagagtgaaatctttgcccgacagggtgtcgaa

SEQ ID NO: 395055 - DNA, 75 bp, synthetic construct
  source 1..75: mol_type = other DNA
cggctgtgttccgattaccaaggtggtatctggcgcttttcgacactcagcaaccgcggcgcttttatggctccc

SEQ ID NO: 395056 - DNA, 75 bp, synthetic construct
  source 1..75: mol_type = other DNA
agagcataccccgctgtatcgccagtcagaaatatacggccggcaaggtgtggagctgagccgttcactgctgtc

SEQ ID NO: 395057 - DNA, 75 bp, synthetic construct
  source 1..75: mol_type = other DNA
acggtaaccgcgctgaaatgagcccggaagccgccggcattgccgcctgtctgatgacgtacagtcatcacgcct

SEQ ID NO: 395058 - DNA, 75 bp, synthetic construct
  source 1..75: mol_type = other DNA
ggcccatgcccggagaaaaatccacgatgtgcatgcaagagtgccaaccgatatcaccacggaagccctgcagcg

SEQ ID NO: 395059 - DNA, 75 bp, synthetic construct
  source 1..75: mol_type = other DNA
agccatcatgcctgtcgtacggagaattatgccatgacggtccattattaccggttgcgggattacgccctgcag

SEQ ID NO: 395060 - DNA, 75 bp, synthetic construct
  source 1..75: mol_type = other DNA
ctgaaatgagcccggaagctgccggcattgccgcctgtctgatgacgtacagccatcatgcctgtcgtacggaga

SEQ ID NO: 395061 - DNA, 75 bp, synthetic construct
  source 1..75: mol_type = other DNA
atgggtactgttcaatgtcatgaacggtaaccgcgctgaaatgagcccggaagccgccggcattgctgcctgtct

SEQ ID NO: 395062 - DNA, 75 bp, synthetic construct
  source 1..75: mol_type = other DNA
cctccgggtagttgcactggggcggcgtaactacatgttcttcggctctgatggtggaggcgagagtgcggtagt

SEQ ID NO: 395063 - DNA, 75 bp, synthetic construct
  source 1..75: mol_type = other DNA
atcatgcctgtcgtacggagtgttatgccatgacggtccattattaccggttgcgggattacgccctgcagcatc

SEQ ID NO: 395064 - DNA, 75 bp, synthetic construct
  source 1..75: mol_type = other DNA
gtccattattatcggttgcgggattacgccctgcagcatccggaatgcaacgccattatgcgcatcatcgactga

SEQ ID NO: 395065 - DNA, 75 bp, synthetic construct
  source 1..75: mol_type = other DNA
gtgttgtactcgctgatcggcacatgccgtctgaacaatgtggagccagaaaaatggctgcgttacgtcattgag

SEQ ID NO: 395066 - DNA, 75 bp, synthetic construct
  source 1..75: mol_type = other DNA
gatgtgcatgcaagagcgtccaccgatatcaccacggaagccctgcagcgtatcggtgaactgtatgccattgag

SEQ ID NO: 395067 - DNA, 75 bp, synthetic construct
  source 1..75: mol_type = other DNA
tcgaaacacaacgtccgaaactggcctgttgccggtgcgaccatatcgtgcaggcaccggtgccttcaaaaccca

SEQ ID NO: 395068 - DNA, 75 bp, synthetic construct
  source 1..75: mol_type = other DNA
agcaacagcgctggctgtggtatgcatgggagcctcgtctcaaacgtattgttgcccatgcttttggtcgtcgaa

SEQ ID NO: 395069 - DNA, 75 bp, synthetic construct
  source 1..75: mol_type = other DNA
agtgtggtgttcccgccggtgctggtgcagatgctcgaccggctggaaagtgaaatccttactgaccgggtgagc

SEQ ID NO: 395070 - DNA, 75 bp, synthetic construct
  source 1..75: mol_type = other DNA
ctaatcgggagctgtcggttgaacggtatcgatccagaagcgtatctgcgccatatcctgagcgtactgccggaa

SEQ ID NO: 395071 - DNA, 75 bp, synthetic construct
  source 1..75: mol_type = other DNA
cggagagccgcaaaggacttatagctgctgtccggcgtgttgccgagcgatggttgaaagctttaacgcaggaca

SEQ ID NO: 395072 - DNA, 75 bp, synthetic construct
  source 1..75: mol_type = other DNA
tccattattaccggctgcgggattacgccctgcagcatccggaatgcagcgccattacccgacctaatatgcggt

SEQ ID NO: 395073 - DNA, 75 bp, synthetic construct
  source 1..75: mol_type = other DNA
tgacggttcattattaccggctgcgggattatgccctgcagcatccggaatgcagcgccattatgcgcatcatcg

SEQ ID NO: 395074 - DNA, 75 bp, synthetic construct
  source 1..75: mol_type = other DNA
cgagtgtgacgcgatgactgagcactattatcgcttacgagacttcgcgttgaaccatccagagtgcagcgcaat

SEQ ID NO: 395075 - DNA, 75 bp, synthetic construct
  source 1..75: mol_type = other DNA
tgtatcgtcagagtgaaatctttgcccgccagggcgtcgaactgagccgtgcattactctccaactgggttgacg

SEQ ID NO: 395076 - DNA, 75 bp, synthetic construct
  source 1..75: mol_type = other DNA
gatgacggtctggcggaggcggataataatgctgcggaagagcgcttcgtgcagtctgtctcggaaagaaaaact

SEQ ID NO: 395077 - DNA, 75 bp, synthetic construct
  source 1..75: mol_type = other DNA
agtgcaagatattcccggtgtgctggccgtgtttgctgaacgccgtaaggacagttttggcccgtatgtccgact

SEQ ID NO: 395078 - DNA, 75 bp, synthetic construct
  source 1..75: mol_type = other DNA
caaatttacccaacatgcagcgcgtagtggggatgccagatttacatcccggacgcggctatccgattggcgcag

SEQ ID NO: 395079 - DNA, 75 bp, synthetic construct
  source 1..75: mol_type = other DNA
agcaagcgatatacgcagcgaattgagcggcataacctgaatctgaggcagcacctggggcactgttgcaaatag

SEQ ID NO: 395080 - DNA, 75 bp, synthetic construct
  source 1..75: mol_type = other DNA
cacctggcacggctgggacggaagttgcgtattttcatgaaaggagatcactcaataacttccatcgagatcggg

SEQ ID NO: 395081 - DNA, 75 bp, synthetic construct
  source 1..75: mol_type = other DNA
gtgataccgccaaacttaccaatgtttcagatcgtacagtaattcgcgttgctaagaagttggcaggtgagcgtt

SEQ ID NO: 395082 - DNA, 75 bp, synthetic construct
  source 1..75: mol_type = other DNA
gcaactgctggttcatagcggctcgaggggggtgcccctattaagttgtcaagcatgttatgacgcctgcggggt

SEQ ID NO: 395083 - DNA, 75 bp, synthetic construct
  source 1..75: mol_type = other DNA
cgggttaaaaacaggcagagcatccgtgataccgcaaggttgtgtggcgtttcagaacgaacggttatacgcatt

SEQ ID NO: 395084 - DNA, 75 bp, synthetic construct
  source 1..75: mol_type = other DNA
acgctgggtcgctggaccggtgctgttgctgagctgctggagccgctgtatgacatcctgcgccagtatgtgctg

SEQ ID NO: 395085 - DNA, 75 bp, synthetic construct
  source 1..75: mol_type = other DNA
tttcctcagttatagatatgcctgccggacaggggacactgacactgacattcaccgtatcttcatcaggagcga

SEQ ID NO: 395086 - DNA, 75 bp, synthetic construct
  source 1..75: mol_type = other DNA
aggtccagtccgtcaccgacggcgtgaaggtgaaagtgagccgtgttcctgacggcgttgccggatacagcgtgt

SEQ ID NO: 395087 - DNA, 75 bp, synthetic construct
  source 1..75: mol_type = other DNA
gtggctgattaaaacggaactgctggagacgcagaccgtggatttcagcgtgggtgctgaagggcttcgccatgt

SEQ ID NO: 395088 - DNA, 75 bp, synthetic construct
  source 1..75: mol_type = other DNA
ataactggacgccaacgagcagtatcagtgaccttcttgttgtcgtgatgaagaaatccacagctggtatcagta

SEQ ID NO: 395089 - DNA, 75 bp, synthetic construct
  source 1..75: mol_type = other DNA
agcggctggtcagcacggcccggacgacggaaaccacataccgcttcaggcaactggcgctggggcgttacacgc

SEQ ID NO: 395090 - DNA, 75 bp, synthetic construct
  source 1..75: mol_type = other DNA
cccgggactcccgtgcaccggaacggtggccatcagggaccattaccgtcagggtttatgacgatcagccgtttg

SEQ ID NO: 395091 - DNA, 75 bp, synthetic construct
  source 1..75: mol_type = other DNA
acgtcattgaacatatccaggactggccggaaaaccgggtacgcgatctgttgccctggaaagttgatctgagct

SEQ ID NO: 395092 - DNA, 75 bp, synthetic construct
  source 1..75: mol_type = other DNA
catcagcagcaaaagtacgacggcagaagaagctctgaagcgaatcagtgaactgtacgccatcgaggatgaaat

SEQ ID NO: 395093 - DNA, 75 bp, synthetic construct
  source 1..75: mol_type = other DNA
gggctcatgcgcggcgcaaaatccacgatgtatatatcagtaccaaaagcgcgacggtggaagaagcactgaaac

SEQ ID NO: 395094 - DNA, 75 bp, synthetic construct
  source 1..75: mol_type = other DNA
caggcaccagtaccttcaaaacccattgcacgcagttatgccggagcgggacttctggcccatgttgtcaccggg

SEQ ID NO: 395095 - DNA, 75 bp, synthetic construct
  source 1..75: mol_type = other DNA
cagcggtggtgaacatgcggcggtgttgtactcgctgatcggcacatgccgtctgaacaatgtggagccagaaaa

SEQ ID NO: 395096 - DNA, 75 bp, synthetic construct
  source 1..75: mol_type = other DNA
actgcagtaatggctgggtggaaatcgacaacaacatcacagagaacgccttacggggagtggccgtaggccgga

SEQ ID NO: 395097 - DNA, 75 bp, synthetic construct
  source 1..75: mol_type = other DNA
gccacccgcaccctgacgctggaccgtgaggttaccctgccggagaccggtgccgccacggtgaacctgattaac

SEQ ID NO: 395098 - DNA, 75 bp, synthetic construct
  source 1..75: mol_type = other DNA
ggggaatatcaggtgctggcgcgctgggacacgccgaaggtggtgaagggggtgagctttatgcttcgcctgacc

SEQ ID NO: 395099 - DNA, 75 bp, synthetic construct
  source 1..75: mol_type = other DNA
gagcagtgccctgaaagtgatccgcacagaacgggtaaaaaaagcctgtacaaaatgtgactgtattgttgaagc

SEQ ID NO: 395100 - DNA, 75 bp, synthetic construct
  source 1..75: mol_type = other DNA
gaaaaatccacgatgtatacatcagcagcaaaagtgcgacggcagaagaagccctgaagcgaatcagtgaactgt

SEQ ID NO: 395101 - DNA, 75 bp, synthetic construct
  source 1..75: mol_type = other DNA
tggaggagacggaagaaggaaaactgagcgagtttcttgtcgccgccaaccgtatcgcgtttattgaccaggcaa

SEQ ID NO: 395102 - DNA, 75 bp, synthetic construct
  source 1..75: mol_type = other DNA
ggttgttcaggataatcttgttggtgttgctcatgctgatattccggacggggatgtgggcattctgcatacggt

SEQ ID NO: 395103 - DNA, 75 bp, synthetic construct
  source 1..75: mol_type = other DNA
accacggggatttttgcattacccaaagaagctgaagaactgacacagggaaaacgggtatatctcaggtctgat

SEQ ID NO: 395104 - DNA, 75 bp, synthetic construct
  source 1..75: mol_type = other DNA
gcagtaggtattattcccggtgctggagatgttgcgagcaagacgattaaagctgcggagacggcgttgaagaag

SEQ ID NO: 395105 - DNA, 75 bp, synthetic construct
  source 1..75: mol_type = other DNA
tgttgctggtggctatctcgggctttcggagcacgcgattgccgacattctctctctttatccggacagcccgaa

SEQ ID NO: 395106 - DNA, 75 bp, synthetic construct
  source 1..75: mol_type = other DNA
cactggtgaccgcattgccggtggtgattatgtatgcgctttcggaacgttttattaagagtggtttgaccgccg

SEQ ID NO: 395107 - DNA, 75 bp, synthetic construct
  source 1..75: mol_type = other DNA
gagactgcaaaacagagactgttaaaggcaaaggaacgagatattaatcttatgaaagcaaggctatctaagttg

SEQ ID NO: 395108 - DNA, 75 bp, synthetic construct
  source 1..75: mol_type = other DNA
gagattccaagagttgaaattgatttttcgatgaatgaggaatgtgagcttgatttgaaactaaagctgcaacgc

SEQ ID NO: 395109 - DNA, 75 bp, synthetic construct
  source 1..75: mol_type = other DNA
taaatcacaagctgagcttgaagaaattgccaaagagaaactgatgaaagcaagagaaaatgagattaatttgct

SEQ ID NO: 395110 - DNA, 75 bp, synthetic construct
  source 1..75: mol_type = other DNA
acaaaacagacaataatcagggcagcagtaatcagagtcagagcagtaatcagagtcagagcaggaggaaaaaga

SEQ ID NO: 395111 - DNA, 75 bp, synthetic construct
  source 1..75: mol_type = other DNA
ttgcccccggcgacaggggcttacacgggtgtatggcaccggatacaacaacgggcaggcacccgccgcaacgac

SEQ ID NO: 395112 - DNA, 75 bp, synthetic construct
  source 1..75: mol_type = other DNA
gcccgctctccgagacggtcatcattaacgcggtgaataactacaagctgcgcaaaatgccgtttgttacgaccc

SEQ ID NO: 395113 - DNA, 75 bp, synthetic construct
  source 1..75: mol_type = other DNA
atcagcaacacttcccatgggaagtagatacaatcagatgaatcagcctaaaaacccatcttatcagcctgtcag

SEQ ID NO: 395114 - DNA, 75 bp, synthetic construct
  source 1..75: mol_type = other DNA
agagggggcatttctagatgttatgtcttattatcttacaagaccattattaacaccttataatttcacatataa

SEQ ID NO: 395115 - DNA, 75 bp, synthetic construct
  source 1..75: mol_type = other DNA
tggtgtaacgaaaattatagtggaagccgttggcggaggtggtgccagtggtaatttgtcggcaactgcatctgg

SEQ ID NO: 395116 - DNA, 75 bp, synthetic construct
  source 1..75: mol_type = other DNA
tgaaagcaggccgtccgcagattggattatggctggggctgagcagcagcaacagcgcggagttactggccggac

SEQ ID NO: 395117 - DNA, 75 bp, synthetic construct
  source 1..75: mol_type = other DNA
caggtggcgcaaagccgcacccaggcggagaaacagttcttaacgttgttcccggagcagaagcggatagtgaat

SEQ ID NO: 395118 - DNA, 75 bp, synthetic construct
  source 1..75: mol_type = other DNA
atgattctgccgatattgctgattctggttgcgctggcagtggaacggggcgtgacgttatggagcgtcagcgaa

SEQ ID NO: 395119 - DNA, 75 bp, synthetic construct
  source 1..75: mol_type = other DNA
atgagtccactctggtatcagaaatggctacgtctcaatgaagtcaggcgacagatgctgaatgaacattacgat

SEQ ID NO: 395120 - DNA, 75 bp, synthetic construct
  source 1..75: mol_type = other DNA
ccagacaacgaacgtattgttggttttaatttatctgtaccatttaatatttttactaagcgccgctatacacgt

SEQ ID NO: 395121 - DNA, 75 bp, synthetic construct
  source 1..75: mol_type = other DNA
ctatgatggtaatcggcgtagcgatccggtgattgtaaattatcataacctgcgatttaatcgtaaaggtcgtat

SEQ ID NO: 395122 - DNA, 75 bp, synthetic construct
  source 1..75: mol_type = other DNA
gagtttattggctcacaagatattgtttttgaaacgtcaacagaaaaaaccggagataaatctggtggtctgatg

SEQ ID NO: 395123 - DNA, 75 bp, synthetic construct
  source 1..75: mol_type = other DNA
gtcgggaacgctggatgactggaaaacgatggtagctgagctggttcatggctggcctcaggtctttgcattatc

SEQ ID NO: 395124 - DNA, 75 bp, synthetic construct
  source 1..75: mol_type = other DNA
aatgggtatacgggcagcgccacggcaaactggcaggccgcttacggtacgctgggggtcgggtataactacgac

SEQ ID NO: 395125 - DNA, 75 bp, synthetic construct
  source 1..75: mol_type = other DNA
acccgggaaaatgcgctcgaccgcgcttatgcctcctttaacgccaaccgtaacagcaacgggcaaaatagctgg

SEQ ID NO: 395126 - DNA, 75 bp, synthetic construct
  source 1..75: mol_type = other DNA
ctcaagaagcaatgagaagtgtttacgagaaaattcagtccaaacttgaagacgaaattgacgaaatggctattt

SEQ ID NO: 395127 - DNA, 75 bp, synthetic construct
  source 1..75: mol_type = other DNA
cgccagaccgcacagacatggggcgcggaacgttacctgaaggatgactggcacgagctgcaactttgcgaggaa

SEQ ID NO: 395128 - DNA, 75 bp, synthetic construct
  source 1..75: mol_type = other DNA
aaaaaacgatgattatcaactacctgtatataccgcaagcctctttcgtcacaacgttggtcactcaatggcaat

SEQ ID NO: 395129 - DNA, 75 bp, synthetic construct
  source 1..75: mol_type = other DNA
gatacattacgggactgcattattattggcatagtttattacattggggccagacctgtacagatcggtaaactt

SEQ ID NO: 395130 - DNA, 75 bp, synthetic construct
  source 1..75: mol_type = other DNA
tgggtggaggtggtgaaccgaaaggcgagctacgtggccacagcgatgaccggcatgcgccgtctccgctccctg

SEQ ID NO: 395131 - DNA, 75 bp, synthetic construct
  source 1..75: mol_type = other DNA
tgcgccactgtctgggggaagactttgcgcgttcgggtgacctgaccgtactggccccggtgacggtgaacgatg

SEQ ID NO: 395132 - DNA, 75 bp, synthetic construct
  source 1..75: mol_type = other DNA
atggtatcaaacttgatggacgtgggaacggcaactacctggctgaacaggctgctgaacgttatggcgatgagg

SEQ ID NO: 395133 - DNA, 75 bp, synthetic construct
  source 1..75: mol_type = other DNA
cctaccatttgtgattttaactctgaactttacaaactttttttttgcagggtgtctctactctttatttttcca

SEQ ID NO: 395134 - DNA, 75 bp, synthetic construct
  source 1..75: mol_type = other DNA
ccccgcagaacagtcagctgatttttatcgaccagcaaccccagatggctttcggggtgcagtccattgaccgcc

SEQ ID NO: 395135 - DNA, 75 bp, synthetic construct
  source 1..75: mol_type = other DNA
ctcaaatatcaacttcgttataagtccacaaaggcgggagcaacgggcggtaatgcgacggcggttctctatttt

SEQ ID NO: 395136 - DNA, 75 bp, synthetic construct
  source 1..75: mol_type = other DNA
tcattaccatctcggtggatgtaattatgaagaagacatttgcccctttgcacagggtcgtggatgttacggttg

SEQ ID NO: 395137 - DNA, 75 bp, synthetic construct
  source 1..75: mol_type = other DNA
ttttagcggcgaggctgacacccttgcgccgacactgctcaaactaactgacactggcggaagcggtggtatggc

SEQ ID NO: 395138 - DNA, 75 bp, synthetic construct
  source 1..75: mol_type = other DNA
taccgccacggcgctgacgcttcgtgatgccagactggcactgacagaggatctgaatacacggggagttcagct

SEQ ID NO: 395139 - DNA, 75 bp, synthetic construct
  source 1..75: mol_type = other DNA
cttaattttgtttgatgactttttagaagccataacttgcctaaaccatctccagtccttcatcatttttttcaa

SEQ ID NO: 395140 - DNA, 75 bp, synthetic construct
  source 1..75: mol_type = other DNA
cgatgatagttgcattcctgacggttatcttaggtatggctatcttgatgggctatttgactcaaatgctatttt

SEQ ID NO: 395141 - DNA, 75 bp, synthetic construct
  source 1..75: mol_type = other DNA
tgctggtgtagagaagttagggccgtggataacaaagtctgagataaataaaatgactgatcagactgactttgt

SEQ ID NO: 395142 - DNA, 75 bp, synthetic construct
  source 1..75: mol_type = other DNA
tcggtatctggtgacaaagaccaggtgaacatgcatcaggaaaacacaatgccttccacgccggatatcggtttc

SEQ ID NO: 395143 - DNA, 75 bp, synthetic construct
  source 1..75: mol_type = other DNA
tgtcctgaaaagcgacggcaacagcaactggaacctgaccaatgatgtcaaacccaacccggaccccaacccaaa

SEQ ID NO: 395144 - DNA, 75 bp, synthetic construct
  source 1..75: mol_type = other DNA
aatgccgtgtttgtcagttcgccggactggaaggatgagaaaaaatcgaccgttctgcgccttaatccgcaaact

SEQ ID NO: 395145 - DNA, 75 bp, synthetic construct
  source 1..75: mol_type = other DNA
tatccctctggcatcagttctgatgacgaaaggcatgggtctgggggcattaatggcattaatcatcggcagtgc

SEQ ID NO: 395146 - DNA, 75 bp, synthetic construct
  source 1..75: mol_type = other DNA
aagaggggctagagcgtgcgaagaaggaaggtaagaagttaggtcgcccggttgctacagagacgcgtaagcgcg

SEQ ID NO: 395147 - DNA, 75 bp, synthetic construct
  source 1..75: mol_type = other DNA
cacaaaggcatcacattacttagattggatgtttttgatgacagaacaagcgaatgtctttctgaagagatggta

SEQ ID NO: 395148 - DNA, 75 bp, synthetic construct
  source 1..75: mol_type = other DNA
cacattacctttataaatcaaatacagcagaagatatgttagtaaaaaaaacaagaaaacatgagccattaaaaa

SEQ ID NO: 395149 - DNA, 75 bp, synthetic construct
  source 1..75: mol_type = other DNA
gtccgcggtggcacagaacacggcagccgcgaagaagtcagccagcgatgccggcacatctgcccgtgaggcggc

SEQ ID NO: 395150 - DNA, 75 bp, synthetic construct
  source 1..75: mol_type = other DNA
cacgaagaatggcaagcgtcgcgtggttcccgtttctgacgatgttgtccggttggtgaaaaatcgcaatgaggg

SEQ ID NO: 395151 - DNA, 75 bp, synthetic construct
  source 1..75: mol_type = other DNA
caatcagcccatttcttttaggtgatgcttctgatgtggataatgatcttttgaaaaatgtaattgttcaacaaa

SEQ ID NO: 395152 - DNA, 75 bp, synthetic construct
  source 1..75: mol_type = other DNA
aggtaacgagacattcaaggggactctcgatccagccgctgcaatgtatgatttctgcatgaagtacgaccgcga

SEQ ID NO: 395153 - DNA, 75 bp, synthetic construct
  source 1..75: mol_type = other DNA
tcgctaaaatggcgaatgtatcaaccaggacgctgagacgctggctgaaaaaaccatctaccggaataccattgc

SEQ ID NO: 395154 - DNA, 75 bp, synthetic construct
  source 1..75: mol_type = other DNA
gtgcagcttcctcggcaacggcggcaggaaattccgccacggcggcaaaaacgtccgagacgaaagccaggtcat

SEQ ID NO: 395155 - DNA, 75 bp, synthetic construct
  source 1..75: mol_type = other DNA
aaaccctcatcgtgcaatatcaacttttttagcgctaagcaagaaaattggccgtaataaaataatatggcgcta

SEQ ID NO: 395156 - DNA, 75 bp, synthetic construct
  source 1..75: mol_type = other DNA
ggagcgctggccgtcgcgcccgttcgtgtccctgatgaccctcaagcaacagggtaaacccggacggccaccgaa

SEQ ID NO: 395157 - DNA, 75 bp, synthetic construct
  source 1..75: mol_type = other DNA
cgaacgctggccgtctcgtcctttcgtgtcgctgatgacgctcaagcaacagggcagaccgggacgcccgccaaa

SEQ ID NO: 395158 - DNA, 75 bp, synthetic construct
  source 1..75: mol_type = other DNA
gtatagttaatgttcttttaggtttcatttttagaaccgttattattaggttcgttttgttttttggacttcttt

SEQ ID NO: 395159 - DNA, 75 bp, synthetic construct
  source 1..75: mol_type = other DNA
agcgccggatgcgtggtggtcgcgccgccggtcattgagggcggcaagtttcgggtaattgaaaagcaccagtgg

SEQ ID NO: 395160 - DNA, 75 bp, synthetic construct
  source 1..75: mol_type = other DNA
cgcgacggctgggatgaatccgccccgctggagcgggtgacggcggtgaccgaggcgcgtctgatccagctcacg

SEQ ID NO: 395161 - DNA, 75 bp, synthetic construct
  source 1..75: mol_type = other DNA
gtttgtttataaagacgtaagagtcagggaaaatctgggggttcctgacacagcaaaaaacaggcgcgttgcagg

SEQ ID NO: 395162 - DNA, 75 bp, synthetic construct
  source 1..75: mol_type = other DNA
gtgcagcttcctcggcaacggcggcagcaaattccgcaacggcggcaaaaacgtccgagacgaacgccaggtcat

SEQ ID NO: 395163 - DNA, 75 bp, synthetic construct
  source 1..75: mol_type = other DNA
aaaaagatgcccgcatggtggcagcgcaacagatttcgcgtctggaatcagccatgtgtcagcgtcgccgctgga

SEQ ID NO: 395164 - DNA, 75 bp, synthetic construct
  source 1..75: mol_type = other DNA
attcagcagaaaaattctgccggttcaatttactcagatgccctattattgctggtaaagatccttatgggggat

SEQ ID NO: 395165 - DNA, 75 bp, synthetic construct
  source 1..75: mol_type = other DNA
cggtattcatgaaaataaaatgattgagcattatgtcattgcaacgtctaatgatgttgttgatgtcctgtctgt

SEQ ID NO: 395166 - DNA, 75 bp, synthetic construct
  source 1..75: mol_type = other DNA
ttttcgagcaggacaattacgaagctttattaaagatctgggataaacctcggtgggcaagtcatatccttgtca

SEQ ID NO: 395167 - DNA, 75 bp, synthetic construct
  source 1..75: mol_type = other DNA
gccacgaatgcttcagaggcggctacctcagcccgcgatgcggaggcctcaaaagacgcggcaaaatcatcagaa

SEQ ID NO: 395168 - DNA, 75 bp, synthetic construct
  source 1..75: mol_type = other DNA
gccacgaatgcttcagaggcggccacctcagcccgtgatgcggaggcctcaaaagacgcggcaaaatcatcagaa

SEQ ID NO: 395169 - DNA, 75 bp, synthetic construct
  source 1..75: mol_type = other DNA
gagcattatgtcattgccacgtcaaatgatgttattgatgttttatcaacagtttctccgcaaatacagtatgac

SEQ ID NO: 395170 - DNA, 75 bp, synthetic construct
  source 1..75: mol_type = other DNA
tggtgggaagccggaaaaaacaaccgcatccgcaacctgctgaagtcacgccagatcggcgcgaccttttacttt

SEQ ID NO: 395171 - DNA, 75 bp, synthetic construct
  source 1..75: mol_type = other DNA
gccacgaaagcttcagaggcggcaacctcagcccgagatgcggaggcctcaaaagacgcggcaaaatcatcagaa

SEQ ID NO: 395172 - DNA, 75 bp, synthetic construct
  source 1..75: mol_type = other DNA
cctgcaggaagtggaagggcatcttgcatttgacgttcttgaaatacctcacagtattttaacacaagtatatga

SEQ ID NO: 395173 - DNA, 75 bp, synthetic construct
  source 1..75: mol_type = other DNA
tataacactgggcaactcttcgggttagatggtataaaagcagataatccaataaaagcaaagcaagggagttca

SEQ ID NO: 395174 - DNA, 75 bp, synthetic construct
  source 1..75: mol_type = other DNA
aatgactaagacatttggatcaacaatagctgacgtgataggtaaaaatcatgaggcggcaggggatagacaagg

SEQ ID NO: 395175 - DNA, 75 bp, synthetic construct
  source 1..75: mol_type = other DNA
gagtcggggctgtactataaccgtcaccggtactacgatccgttgcaggggcggtatatcaccccggacccgatt

SEQ ID NO: 395176 - DNA, 75 bp, synthetic construct
  source 1..75: mol_type = other DNA
gagggccggcaacaggctgaagggggttaacccgacgccgttttacatcaacctgtccacgctgacggtgggggg

SEQ ID NO: 395177 - DNA, 75 bp, synthetic construct
  source 1..75: mol_type = other DNA
tggcatgtcgaccgagctgattgaaggacacatcagcgcaatgcgccgccgtctcgacagcaaccgttttccagg

SEQ ID NO: 395178 - DNA, 75 bp, synthetic construct
  source 1..75: mol_type = other DNA
agatcgcaatgctgaatcagaagctggcagattttgccccattgatgccccatagccacgagaacagtacgggag

SEQ ID NO: 395179 - DNA, 75 bp, synthetic construct
  source 1..75: mol_type = other DNA
cgtcgtcaggagtgtctgccagcgtatcatgcgagggaacggagaccgggacctgggcggtgccggtaaatacgg

SEQ ID NO: 395180 - DNA, 75 bp, synthetic construct
  source 1..75: mol_type = other DNA
ccggttcagttttccggccccgcgggatttgttatcccacaggggtttattgtttctgatgggacctatacctat

SEQ ID NO: 395181 - DNA, 75 bp, synthetic construct
  source 1..75: mol_type = other DNA
tggcctgataactacgtgatcccgttcgtgacgccattgctgcagcgggtcactgtgacgtatcagtgggggacc

SEQ ID NO: 395182 - DNA, 75 bp, synthetic construct
  source 1..75: mol_type = other DNA
gaaagattaaagtacgcagaggatatctataaacgctatttgcggatagcagcagagagcaagcagaataatcga

SEQ ID NO: 395183 - DNA, 75 bp, synthetic construct
  source 1..75: mol_type = other DNA
tggttatggatccaaacggcaatgtcttaaagcctaacgataccaacagcagtgttaacttaaacctcggtccga

SEQ ID NO: 395184 - DNA, 75 bp, synthetic construct
  source 1..75: mol_type = other DNA
ccttgataacgtgcaggcgcgcctggtttctgtcattcaggacggggataagtggatagtcatgtgcgccggcgg

SEQ ID NO: 395185 - DNA, 75 bp, synthetic construct
  source 1..75: mol_type = other DNA
atgggctgtattttcatcggcgtgttcctgatgcctggcgcagtcagacgttttggtaagaagaaggtctatatc

SEQ ID NO: 395186 - DNA, 75 bp, synthetic construct
  source 1..75: mol_type = other DNA
atttagttgaaaccattgtaattatccataaaccaattaacggcagtacactgatccagacaaagtcgaatgatg

SEQ ID NO: 395187 - DNA, 75 bp, synthetic construct
  source 1..75: mol_type = other DNA
tcggttacatctgatgcagatgacggcggcggctatgtcgaaaccatcatcaccaacagcgatttcactatcagt

SEQ ID NO: 395188 - DNA, 75 bp, synthetic construct
  source 1..75: mol_type = other DNA
attggtcttacggtggataagtcaccggttgctcatcctaagttaaacgtgattattcctttgaaactgctacgt

SEQ ID NO: 395189 - DNA, 75 bp, synthetic construct
  source 1..75: mol_type = other DNA
gcggtcagtttacgcttacgctggttgctgcacgggcaggagtcaattctggtgccagatttcaacaccaaatgt

SEQ ID NO: 395190 - DNA, 75 bp, synthetic construct
  source 1..75: mol_type = other DNA
caaaaattaaaagctcaaagcttttttattttcagtttattgctgacgttaattttattttgcatcaccacatta

SEQ ID NO: 395191 - DNA, 75 bp, synthetic construct
  source 1..75: mol_type = other DNA
cttgagggaggggtggtggcccgaccgttaatgaaaccgtttcgtgaaggattatatgcatcctcagcgtatctc

SEQ ID NO: 395192 - DNA, 75 bp, synthetic construct
  source 1..75: mol_type = other DNA
tctggatgcacttcagtcgagccgtttgcgaattgtccgtaccgggggggggtttcctgaggaccgtgagagtct

SEQ ID NO: 395193 - DNA, 75 bp, synthetic construct
  source 1..75: mol_type = other DNA
tgcaagtgcattaactcaggcgacaagccaaattctgctatctgataacgttaatggagtatctgatattggctc

SEQ ID NO: 395194 - DNA, 75 bp, synthetic construct
  source 1..75: mol_type = other DNA
tatcatcttttaaatgatgaacattatgataatgtttattctcaattaatgccattgtttgaacgggtgatactt

SEQ ID NO: 395195 - DNA, 75 bp, synthetic construct
  source 1..75: mol_type = other DNA
ttgagctagtatcccgaaaactgtgcgttcggtgcctgaaaaacggcttcagtactgtacatcccttattgactg

SEQ ID NO: 395196 - DNA, 75 bp, synthetic construct
  source 1..75: mol_type = other DNA
tcctcgcgataaagtaaccgttattgttcaatgcaaagcccatacggacctaacacatttaaatgttggtttgcg

SEQ ID NO: 395197 - DNA, 75 bp, synthetic construct
  source 1..75: mol_type = other DNA
atcttaataatgagcataaggaaattataattagtaaggttcaagagcagctaaatactaaaaaagaagttcctc

SEQ ID NO: 395198 - DNA, 75 bp, synthetic construct
  source 1..75: mol_type = other DNA
ctgaaccgcaggttaccgtcagtgttccggtagacagtaataactactggttgatcagacatgagataaatgaag

SEQ ID NO: 395199 - DNA, 75 bp, synthetic construct
  source 1..75: mol_type = other DNA
ctggtcagcgattcacccgcagccgttgaattagcgccaggtgtgcgtactacgctgtttatcccggtgcgagca

SEQ ID NO: 395200 - DNA, 75 bp, synthetic construct
  source 1..75: mol_type = other DNA
gatattctgattgtagatgaagccctcgcagtaggggatgcactattccagaaaagatgctttgagcgcatggat

SEQ ID NO: 395201 - DNA, 75 bp, synthetic construct
  source 1..75: mol_type = other DNA
atgaacgctttgacgagattttggcgtttgcggatatcggtgagtttatcgatcagccgactaaaacttattcaa

SEQ ID NO: 395202 - DNA, 75 bp, synthetic construct
  source 1..75: mol_type = other DNA
tgcgctggaactggccagcggaaagctggaactggtattggcacgcgacgccaaacttgctttggcgccggtcga

SEQ ID NO: 395203 - DNA, 75 bp, synthetic construct
  source 1..75: mol_type = other DNA
taaagaaagcggtcaagttgtctcgggagttgttgggtgatggcgaggtgcaaaaggcccggcccatcgttgcca

SEQ ID NO: 395204 - DNA, 75 bp, synthetic construct
  source 1..75: mol_type = other DNA
ctggcccaatcggcggcaggttctagcccaggtgctgcagcaccctctgccgcatccaaggcggcacagccacaa

SEQ ID NO: 395205 - DNA, 75 bp, synthetic construct
  source 1..75: mol_type = other DNA
gctgtgataacggagaaaaactgcgagtcacgttcgcgctggactgctgtgaccgtgaggcactgcactgggcgg

SEQ ID NO: 395206 - DNA, 75 bp, synthetic construct
  source 1..75: mol_type = other DNA
atgaagaacagcgaaaatgagcttgctgagcaacttatagaacaaaccggcgataacaccctgacgttaatggat

SEQ ID NO: 395207 - DNA, 75 bp, synthetic construct
  source 1..75: mol_type = other DNA
tccacggagaacactttatcagccgggaaataatgcgggcaacagtgtttaattatatcgaatgtgattacaatc

SEQ ID NO: 395208 - DNA, 75 bp, synthetic construct
  source 1..75: mol_type = other DNA
cgtatcaggtaccgcaaccgatggtggaatcaatgtatgttccccaatggcgggcgaccggcgcggctgaagatc

SEQ ID NO: 395209 - DNA, 75 bp, synthetic construct
  source 1..75: mol_type = other DNA
tgttaccgggaatggcggaaaagtaagtcagaaaggtgacctttttgttagtgatgccggacgtggtattgatat

SEQ ID NO: 395210 - DNA, 75 bp, synthetic construct
  source 1..75: mol_type = other DNA
ccctttatatcgccagtcagaaatatacgcgcgacagggcgtggagctgagccgtaataccatggtgcgctgggt

SEQ ID NO: 395211 - DNA, 75 bp, synthetic construct
  source 1..75: mol_type = other DNA
gctgaatctggatgcttaccactggaaagaggacggcatcagcgataaaggcgtgatgctgaacttcaagaaaac

SEQ ID NO: 395212 - DNA, 75 bp, synthetic construct
  source 1..75: mol_type = other DNA
gatttggtcgcttttaaaagatttatgcgaattcgttcttcccttatgattttacaaagtattgaggatgattta

SEQ ID NO: 395213 - DNA, 75 bp, synthetic construct
  source 1..75: mol_type = other DNA
attagcgagtgttcagataatgacatatccaatgtcaaagaaaatgacactttatcttctataagcgtagtcaat

SEQ ID NO: 395214 - DNA, 75 bp, synthetic construct
  source 1..75: mol_type = other DNA
agcggggatattaatgtaactcagcaacgtgacagtaatggggtttttgtaggaggaaccggcgttgatatgtcc

SEQ ID NO: 395215 - DNA, 75 bp, synthetic construct
  source 1..75: mol_type = other DNA
ggccgtttcattaacgctggtgaaattgatgtagcggcgaaatctctggcggtcagtgccgataacgctggcgag

SEQ ID NO: 395216 - DNA, 75 bp, synthetic construct
  source 1..75: mol_type = other DNA
ttgatttaggacgaggttataactttgctaacgctggcgttattaatgttcagggcgataatgcagtgggcatca

SEQ ID NO: 395217 - DNA, 75 bp, synthetic construct
  source 1..75: mol_type = other DNA
cggtttccttctttaatgaaggcgaatttaatggttcaattaccggagacagctaccaacagaatgtggtgaata

SEQ ID NO: 395218 - DNA, 75 bp, synthetic construct
  source 1..75: mol_type = other DNA
caacagatgcaggaagtatcggtgcgctcgtaaacagtaacaacagtcagttcaataacaaaggcacaattaata

SEQ ID NO: 395219 - DNA, 75 bp, synthetic construct
  source 1..75: mol_type = other DNA
atctcaacggttacgtggtgggaacgagtgccgatggcagcgccggtaaactcaaggtcaataatgccagcatga

SEQ ID NO: 395220 - DNA, 75 bp, synthetic construct
  source 1..75: mol_type = other DNA
attacattaaccacctatgagctcaatgttattggtgataatgccgttggaatgaatattgctggtgataataat

SEQ ID NO: 395221 - DNA, 75 bp, synthetic construct
  source 1..75: mol_type = other DNA
tggcgacagccctgggtcaactgggccgagatccgttgatcttcctgcatccgccagaggcgggatgcgaagaat

SEQ ID NO: 395222 - DNA, 75 bp, synthetic construct
  source 1..75: mol_type = other DNA
agtaaaacgacccaactcattgatatttggcaacaacttaaacagctttatccgccagaaactattccctacgcc

SEQ ID NO: 395223 - DNA, 75 bp, synthetic construct
  source 1..75: mol_type = other DNA
atgaacataaccaagatggctgaagatgtatggataacagaaagtaaaacgacccaactcattgatatttggcaa

SEQ ID NO: 395224 - DNA, 75 bp, synthetic construct
  source 1..75: mol_type = other DNA
atatctaataatgtcgtggctattatttgtgcactcctctttttatatagtattgttgcgtattttaagtttaaa

SEQ ID NO: 395225 - DNA, 75 bp, synthetic construct
  source 1..75: mol_type = other DNA
tcggtattcagggcattgataccccaatcaacctgttagccagcgttcaaccagaccacttgtccgagttttcac

SEQ ID NO: 395226 - DNA, 75 bp, synthetic construct
  source 1..75: mol_type = other DNA
gagcggttttccgagcacaccacaattttgaaaaatatggtgagaaaatcaggtttgttcccgtatctcaaaaag

SEQ ID NO: 395227 - DNA, 75 bp, synthetic construct
  source 1..75: mol_type = other DNA
cgttgaccttgtgcgtaaaaacgggcgtatgacaatgccacaactggcatcggcaacatatgcttcacatgattc

SEQ ID NO: 395228 - DNA, 75 bp, synthetic construct
  source 1..75: mol_type = other DNA
gactacagccgcgccaggcggtcatagctggtacatataccccatctacgactggaaagtcgccgatatctggac

SEQ ID NO: 395229 - DNA, 75 bp, synthetic construct
  source 1..75: mol_type = other DNA
tgcaacccactgtataacctaatgtatcaggcaggcgttcctctgcgtcatatgcgaatttgcgaaccttttggc

SEQ ID NO: 395230 - DNA, 75 bp, synthetic construct
  source 1..75: mol_type = other DNA
gcttaaaatcgcttatcaggaatccggcgaatggcccgatgatggaatcgaaattgacgacactgttgccgccga

SEQ ID NO: 395231 - DNA, 75 bp, synthetic construct
  source 1..75: mol_type = other DNA
gtggctggattatctggacgcactggaactggtcgatacttccggtgcgccagatattgaatggtctacgcctcc

SEQ ID NO: 395232 - DNA, 75 bp, synthetic construct
  source 1..75: mol_type = other DNA
acttctgtctgtatgttgtcggtgctcgccgcagaccggtgaccgggcgaagcccgcgaaccggcgaggaagcgc

SEQ ID NO: 395233 - DNA, 75 bp, synthetic construct
  source 1..75: mol_type = other DNA
gtggctggattatctggacgcactggagctggttgatccctccagtgctccagatattgaatggcctacgcctcc

SEQ ID NO: 395234 - DNA, 75 bp, synthetic construct
  source 1..75: mol_type = other DNA
aagaggctgtattgatattcggcaaaacagttcaaagttaattattggaagcgggacgaccaccgctggtgtgca

SEQ ID NO: 395235 - DNA, 75 bp, synthetic construct
  source 1..75: mol_type = other DNA
ttaaatgatagtatggggcagtatgtcgtttcccagttagtcaaaaaaatgttgaaacaacggattcaagttgaa

SEQ ID NO: 395236 - DNA, 75 bp, synthetic construct
  source 1..75: mol_type = other DNA
cctggcgttctggtaaagcaaaaggcgcaaccggtcgtccggtagcgttgctggcacagttcctgttaaaccgcg

SEQ ID NO: 395237 - DNA, 75 bp, synthetic construct
  source 1..75: mol_type = other DNA
tcggagttaagactaactcttgtagataaaaacatctcgaatataaataataaaggcacttcaacttatgaacaa

SEQ ID NO: 395238 - DNA, 75 bp, synthetic construct
  source 1..75: mol_type = other DNA
ctggtgttgcgttgatagtaaacgctgttctctgccgcattctgacacgacgctatgacaaagtaacaatgaaac

SEQ ID NO: 395239 - DNA, 75 bp, synthetic construct
  source 1..75: mol_type = other DNA
gcgctattcgtgcattaggtaaagacgagcacgttttgttcgatttaaaatatgtgcttgataaaaaaagtatcg

SEQ ID NO: 395240 - DNA, 75 bp, synthetic construct
  source 1..75: mol_type = other DNA
tggttatagtggtcacagccgtggcgtgtgggtggaaggaacggcaggtgtggcactttttgagcgcaagctggg

SEQ ID NO: 395241 - DNA, 75 bp, synthetic construct
  source 1..75: mol_type = other DNA
tcagtgagcgggctgacaggctggcaaagagcatcatcagaggtctgtgggtggaagatgaaggccgatttcgac

SEQ ID NO: 395242 - DNA, 75 bp, synthetic construct
  source 1..75: mol_type = other DNA
aattgacttacgaccagaatctttgcgcagattcgaagaactggcagacaaggtgcaggaaaatgcagatacggc

SEQ ID NO: 395243 - DNA, 75 bp, synthetic construct
  source 1..75: mol_type = other DNA
gtgcgacaggtaatgcaacggctcaaaacgcagtcatgagtttcagttctatgtaccataactctaaccagggta

SEQ ID NO: 395244 - DNA, 75 bp, synthetic construct
  source 1..75: mol_type = other DNA
tgggcaatgcggcatgggtttactatgcccttgcgttctatctggagaaatacccggacggagcacaggtaaata

SEQ ID NO: 395245 - DNA, 75 bp, synthetic construct
  source 1..75: mol_type = other DNA
ggttcagcgacatgaagctgtggaaagatacgtttcaggtttgtgtgcacttgttgatgaaaacggcggggtgaa

SEQ ID NO: 395246 - DNA, 75 bp, synthetic construct
  source 1..75: mol_type = other DNA
acattagttcagggatacttatatgcaaaaccaatgaaagcgacagagttttatcaatggtatgtaaacagataa

SEQ ID NO: 395247 - DNA, 75 bp, synthetic construct
  source 1..75: mol_type = other DNA
gatgatgagaatgatgattcattttctcttcgctttactgaagggcctgcaattattagtggtgtaaataataat

SEQ ID NO: 395248 - DNA, 75 bp, synthetic construct
  source 1..75: mol_type = other DNA
ccctatatcattagcaatgtgctttatattttgccgttatctattattctttcttttgttctctatttcttatgg

SEQ ID NO: 395249 - DNA, 75 bp, synthetic construct
  source 1..75: mol_type = other DNA
gaggttctgggcgaggggggttacagcaatacagatctgatcacctattcagaacgtgacgccagagcaatacag

SEQ ID NO: 395250 - DNA, 75 bp, synthetic construct
  source 1..75: mol_type = other DNA
gtgaatggtaaggcgctttcagctgatataacactgacgccgaaagatattggtacgcttaactcaacaacaatg

SEQ ID NO: 395251 - DNA, 75 bp, synthetic construct
  source 1..75: mol_type = other DNA
ggcatgaaggctcatattggagtcgatgctgaaagcggccttactcatacgctggtgaccaccgccgctaatgaa

SEQ ID NO: 395252 - DNA, 75 bp, synthetic construct
  source 1..75: mol_type = other DNA
gggggcgctggcaggggccgtgctggggggcgatagtgaccatcgcagaaggttgcctgattatggccgcctgtg

SEQ ID NO: 395253 - DNA, 75 bp, synthetic construct
  source 1..75: mol_type = other DNA
atgaacaaaaggcaatggattatttcgaaaacataccgaaaattaatggttctcaaaatggggggagggctgcgg

SEQ ID NO: 395254 - DNA, 75 bp, synthetic construct
  source 1..75: mol_type = other DNA
aaaggctacagaattattgtttgatggtaataataaattgcatgaaaatgtgaaaatatttatccaaagagttga

SEQ ID NO: 395255 - DNA, 75 bp, synthetic construct
  source 1..75: mol_type = other DNA
acggagcattgaccccctatgttcgaacaacgggtcttatagaaaataatttccaaatatgttcttcagttagcg

SEQ ID NO: 395256 - DNA, 75 bp, synthetic construct
  source 1..75: mol_type = other DNA
ctcgaaaaatgtccctggcagaagaaattaaaaaaggaatgtcatctggagaattttcagtgcattatcaaccag

SEQ ID NO: 395257 - DNA, 75 bp, synthetic construct
  source 1..75: mol_type = other DNA
ggggctaatggacagtttatatcgagccctgacttcaccactaaaggtaaaggcgtgttcgacgttacaacaaat

SEQ ID NO: 395258 - DNA, 75 bp, synthetic construct
  source 1..75: mol_type = other DNA
ctgtcactaaaagtaaaattgaaaattttgcaataaaagatggtgcacaaaaattattacagataaatcgtgaga

SEQ ID NO: 395259 - DNA, 75 bp, synthetic construct
  source 1..75: mol_type = other DNA
gtaacaaatgcaatccttgtttatcactacctcggtaacagaagtccatcaggacaatggctcaaatttgcgggt

SEQ ID NO: 395260 - DNA, 75 bp, synthetic construct
  source 1..75: mol_type = other DNA
ataccagttatgacggcacaaaacgccgtaacccgaataacgctggtcgacctgaagtcccgtcagtaccagtgt

SEQ ID NO: 395261 - DNA, 75 bp, synthetic construct
  source 1..75: mol_type = other DNA
ccaccgggccgattgcgcgcacgaataccagttatgacggcacaaaacgccgtaacccgaataacgtggttgatc

SEQ ID NO: 395262 - DNA, 75 bp, synthetic construct
  source 1..75: mol_type = other DNA
tagatacttgtcacgatgttgctgggggacagcgaagtttgattgcactattatctaacgtaaataataagttca

SEQ ID NO: 395263 - DNA, 75 bp, synthetic construct
  source 1..75: mol_type = other DNA
atgccattgaccatatgaccatgatgcctttgacattaggtgttggcgcagcgatatcgctgcaaggtagtattg

SEQ ID NO: 395264 - DNA, 75 bp, synthetic construct
  source 1..75: mol_type = other DNA
gatcccgggggtgaatgcggcaggcaatcaggatacaacgggtaacgcagccagtgccacgaaattgcagactgc

SEQ ID NO: 395265 - DNA, 75 bp, synthetic construct
  source 1..75: mol_type = other DNA
tgtttcttgcgatttttccaaaaattttgatggcgcatccatttaaacatgaaggtttggtgatgagtgtatttg

SEQ ID NO: 395266 - DNA, 75 bp, synthetic construct
  source 1..75: mol_type = other DNA
aacagtttgcgaccgattacaattaataataccagcggtgttgtgtccattggtaatggactaaatgttactggt

SEQ ID NO: 395267 - DNA, 75 bp, synthetic construct
  source 1..75: mol_type = other DNA
ctatctggttccgtgattgaggtgtttagtaataaggcaacaagcaattacactattcgtgttacaacgacaaca

SEQ ID NO: 395268 - DNA, 75 bp, synthetic construct
  source 1..75: mol_type = other DNA
gaaagcaccgaatttacaaaaagaattaacgtgatcggcgtgaccgaccagaaaggcgaaaaaatcctcctggat

SEQ ID NO: 395269 - DNA, 75 bp, synthetic construct
  source 1..75: mol_type = other DNA
aatagcaaagacaatatctctgattttgatgtgaattatacgcacgggtatgtattcccggaagttaaagaaacg

SEQ ID NO: 395270 - DNA, 75 bp, synthetic construct
  source 1..75: mol_type = other DNA
tggtaaaggataatgatacgttatcttctttaagcgttgttaattcttctggctcgatgtttgaacatcgtgatt

SEQ ID NO: 395271 - DNA, 75 bp, synthetic construct
  source 1..75: mol_type = other DNA
cacagggcgaagagacccggctggcgtacacccctcaggggctgctgtcggggatattccgccaggatgaacggc

SEQ ID NO: 395272 - DNA, 75 bp, synthetic construct
  source 1..75: mol_type = other DNA
aaagcgttattcggtccggcaatgatggcactgctcgcggcgttaattgtcctgctttgcgcatttgtcgttcag

SEQ ID NO: 395273 - DNA, 75 bp, synthetic construct
  source 1..75: mol_type = other DNA
agctatcgcctgtcatgcggattttacgcctgccagtcgctggtgctggtgtctattttcgccaccctctcgtgc

SEQ ID NO: 395274 - DNA, 75 bp, synthetic construct
  source 1..75: mol_type = other DNA
caaatttttggttactgcctgatggaaaacggctcccatctggtgctggcgcttcttgcctggcgagcaccggaa

SEQ ID NO: 395275 - DNA, 75 bp, synthetic construct
  source 1..75: mol_type = other DNA
aaccccatccgaaggcccgcccgacgggagacaaggaaggggccatcatgaacatgagtgaggtgcgcaatgcat

SEQ ID NO: 395276 - DNA, 75 bp, synthetic construct
  source 1..75: mol_type = other DNA
atgaaacagtatggcttttatgttgactcctcgcgctgctcaggttgtaaaacctgccaggtcagttgcaaggat

SEQ ID NO: 395277 - DNA, 75 bp, synthetic construct
  source 1..75: mol_type = other DNA
ggtgctcttgtaaggggtatgtacatggacattctgcaggagggactaatccttcattagtagaagcaatgcatt

SEQ ID NO: 395278 - DNA, 75 bp, synthetic construct
  source 1..75: mol_type = other DNA
tgtttatcccagtgagcatacataatgagcctgcgctgatttgtctgttaaccgcagaatgtcagaagaaaaagg

SEQ ID NO: 395279 - DNA, 75 bp, synthetic construct
  source 1..75: mol_type = other DNA
cgaagaacatgaactcacgcaggcagccaggcaacgagttgcagatttccgtcgccacgtctgggtcaggcgcat

SEQ ID NO: 395280 - DNA, 75 bp, synthetic construct
  source 1..75: mol_type = other DNA
ctggatgtatggcgctgatgaatgagcgggaacaaaaccgccttatccgtggacttataaggcagcgtgacgcat

SEQ ID NO: 395281 - DNA, 75 bp, synthetic construct
  source 1..75: mol_type = other DNA
tgaacacatttataaattattacataaaaatagcgaatattgataaaatccccgccaacgatgtgttgacggggc

SEQ ID NO: 395282 - DNA, 75 bp, synthetic construct
  source 1..75: mol_type = other DNA
tcgacgtgcagagtctgactgaagattacgatattggcttccgcctgaaagaaaaaggtatgacggaaatttttg

SEQ ID NO: 395283 - DNA, 75 bp, synthetic construct
  source 1..75: mol_type = other DNA
caaagtaaacaatataaggaaacatacttgttttgccacatgggggactacattgaatgcggcatggcaacaagt

SEQ ID NO: 395284 - DNA, 75 bp, synthetic construct
  source 1..75: mol_type = other DNA
aaccgcatccgctggcgcgacctacgggcgacaaagaaggggcgatcatgaacattcgggaggtgcgccatgcat

SEQ ID NO: 395285 - DNA, 75 bp, synthetic construct
  source 1..75: mol_type = other DNA
cagtaaccggggttttgcctgtgaacagggctggaatgcagccggtcagcctgtcagtcagcgcgccggattttt

SEQ ID NO: 395286 - DNA, 75 bp, synthetic construct
  source 1..75: mol_type = other DNA
gactatggtgacggctgcaccaccgtgacggacggcaagggcattcaccgttattactatgatcctgacggcaat

SEQ ID NO: 395287 - DNA, 75 bp, synthetic construct
  source 1..75: mol_type = other DNA
gacggctaccgcccggaaacagagcggttccggtgggacagccgggaccagctgaccgggtattgcagcgcacag

SEQ ID NO: 395288 - DNA, 75 bp, synthetic construct
  source 1..75: mol_type = other DNA
atatcatcagccagggagccacgctgagatttgccttcgacggtgacagtgatacggcggttaacccgtatcacg

SEQ ID NO: 395289 - DNA, 75 bp, synthetic construct
  source 1..75: mol_type = other DNA
ctttggaaacttcaaacctaataattcaacagctcgagttgaagtgattgatcaatccgttttagaacctttttg

SEQ ID NO: 395290 - DNA, 75 bp, synthetic construct
  source 1..75: mol_type = other DNA
ggaataccggctggaccggaacggccaggtcacggcggtgacagcctcaggcaccgggctgggctatggcgaagg

SEQ ID NO: 395291 - DNA, 75 bp, synthetic construct
  source 1..75: mol_type = other DNA
atcagccgtaccgtctgccagggcagcagcatgatgaggaatcagggctgtactataaccgtcaccggtactacg

SEQ ID NO: 395292 - DNA, 75 bp, synthetic construct
  source 1..75: mol_type = other DNA
ggcacggcgtggtatttccggctgaactggtgcggctgctggacagactggaggaagaaatccgggcagaccgcg

SEQ ID NO: 395293 - DNA, 75 bp, synthetic construct
  source 1..75: mol_type = other DNA
tgttcgtatcacattacttcgatttccaaatcatgaacaaatcttgtatgaactattgactgcactacgtccata

SEQ ID NO: 395294 - DNA, 75 bp, synthetic construct
  source 1..75: mol_type = other DNA
cagataatagatcggttccgtagcctcaaagcaggattatcgaggctgggtgagcatatacctcatcaaggtgat

SEQ ID NO: 395295 - DNA, 75 bp, synthetic construct
  source 1..75: mol_type = other DNA
gtgggacagccgggaccagctgaccgggtattgcagcgcacagggtgagcagtgggaataccgccacgacgccag

SEQ ID NO: 395296 - DNA, 75 bp, synthetic construct
  source 1..75: mol_type = other DNA
aagcttgggaaaaatatgatggaagctatgggattagctcgttctacaacatggaaaggatatagagcacatcat

SEQ ID NO: 395297 - DNA, 75 bp, synthetic construct
  source 1..75: mol_type = other DNA
ttcgttcctgaagccgaaggttactatgcccaccgccgcccagttcgctggctactgacccttgatgaaccactg

SEQ ID NO: 395298 - DNA, 75 bp, synthetic construct
  source 1..75: mol_type = other DNA
aaggcaacgaaagacgcaattaatttcacaacagagttcctgaaatcagtttcagaaaaatatggtgcaaagctg

SEQ ID NO: 395299 - DNA, 75 bp, synthetic construct
  source 1..75: mol_type = other DNA
gcacagactgtggcaggcagcggggtattacgtctgaacggtgcgatgccggaacactggcaggtgtcattgccg

SEQ ID NO: 395300 - DNA, 75 bp, synthetic construct
  source 1..75: mol_type = other DNA
aggctgaacgcgtggagaaagatgccgaaggcaatatcaccaccatcttctgtacttatgacgccgacaccttaa

SEQ ID NO: 395301 - DNA, 75 bp, synthetic construct
  source 1..75: mol_type = other DNA
gtgcacgtccgcatcccgtcagcactgacggaagaagccctggagcagatcggtcagttgtacgccatagaggcg

SEQ ID NO: 395302 - DNA, 75 bp, synthetic construct
  source 1..75: mol_type = other DNA
gataaagctgagcttggtggtgcaggtgctggaacaccggggggatggggaccggataatgaagaaaaagcccgt

SEQ ID NO: 395303 - DNA, 75 bp, synthetic construct
  source 1..75: mol_type = other DNA
tatatccgtagagatatcggagcatttatactcgggcaaatataaatttgcaaaaaatgcgaagataatgttttt

SEQ ID NO: 395304 - DNA, 75 bp, synthetic construct
  source 1..75: mol_type = other DNA
aagcatgtaattttcgggcagatataacaccgctttataccgccaagccagtgccggtaactccggatggttgga

SEQ ID NO: 395305 - DNA, 75 bp, synthetic construct
  source 1..75: mol_type = other DNA
ctttaccctcaacggcaaagcccgcatcactaccagcggcagcgcgggctaccaactggaaatttttgagcgtcg

SEQ ID NO: 395306 - DNA, 75 bp, synthetic construct
  source 1..75: mol_type = other DNA
ctgatattcgccacgggcgaagccgggtgtggtaaaacctggatcagtgcggcaaaagcggcagaagccctgata

SEQ ID NO: 395307 - DNA, 75 bp, synthetic construct
  source 1..75: mol_type = other DNA
ttgatatcaaggcttgtggtttttacagactgaagaaaaacgcagaagaattagagcataaattcggaacacttg

SEQ ID NO: 395308 - DNA, 75 bp, synthetic construct
  source 1..75: mol_type = other DNA
tgatcgtctataggggcgaagcactcaagcacctaatacccggacagttcgttttcttccaacgtgaaaaagaat

SEQ ID NO: 395309 - DNA, 75 bp, synthetic construct
  source 1..75: mol_type = other DNA
ctgtcgcatttggggctggagccttatctcaatatggagatgcgtttaggtgaggggagtggcgcagctctggcg

SEQ ID NO: 395310 - DNA, 75 bp, synthetic construct
  source 1..75: mol_type = other DNA
ggcaaggttttaagggatgcctctttaaaaaaagtggcgacttttgatggcaaggttttaagggatgcctcttta

SEQ ID NO: 395311 - DNA, 75 bp, synthetic construct
  source 1..75: mol_type = other DNA
tatggggcattacgataatggtgagcacggctctaacgcaccgggcgatgtggagatggcacgcgcgctgcctgc

SEQ ID NO: 395312 - DNA, 75 bp, synthetic construct
  source 1..75: mol_type = other DNA
agttagtggtgacgttggggttactttatcttgcgcaagggataccgatggggatagcaatggatgcgttgccta

SEQ ID NO: 395313 - DNA, 75 bp, synthetic construct
  source 1..75: mol_type = other DNA
cgtctgcgtaatgcttacgtcattaaggctgaacgcgtggagaaagatgccgaaggcaatatcaccaccatcttc

SEQ ID NO: 395314 - DNA, 75 bp, synthetic construct
  source 1..75: mol_type = other DNA
ttacaaccttgtatcactccgctctgaaacataaaagaatacgcgttatctttcagaaccctgatgatcgtgagt

SEQ ID NO: 395315 - DNA, 75 bp, synthetic construct
  source 1..75: mol_type = other DNA
gcgacttttgatggcaaggttttaagggatgcctctttaaaaaaagtagcaacctttgacggtcagaatttaaga

SEQ ID NO: 395316 - DNA, 75 bp, synthetic construct
  source 1..75: mol_type = other DNA
acatcaggtggggcgcaccgtcgggagagacatctttctgacccagcaggtggcgctaattggttttgaggatat

SEQ ID NO: 395317 - DNA, 75 bp, synthetic construct
  source 1..75: mol_type = other DNA
cgatgattaccccggagaacggcaacaccacgccgctgtttgtggcgcaggggaaccagctgttcatgaacgacg

SEQ ID NO: 395318 - DNA, 75 bp, synthetic construct
  source 1..75: mol_type = other DNA
gctgcaggggcgatatatcactcaggatccgattgggctgaaagggggatggaatttttatcagtatccgttgaa

SEQ ID NO: 395319 - DNA, 75 bp, synthetic construct
  source 1..75: mol_type = other DNA
tggcataccacccgacgttcctcatatcacccgcaaccatacggcgttatggcgctgtattaaccaacgcatcag

SEQ ID NO: 395320 - DNA, 75 bp, synthetic construct
  source 1..75: mol_type = other DNA
agcggtttttttaataacgatctcgacgaaatcctccagcaactcggggtaaaaaccgtaatcgttaccgggttg

SEQ ID NO: 395321 - DNA, 75 bp, synthetic construct
  source 1..75: mol_type = other DNA
cataaccccgcgctgccagacgtggcgctgctgcgcaaaccttttacccgcgcgcagttggcgcaggcgctgggg

SEQ ID NO: 395322 - DNA, 75 bp, synthetic construct
  source 1..75: mol_type = other DNA
cgcgaagttttggataacgccaaattccgcgataatccgtcgccattaaccgtggtgctgggtaaagatatcgcc

SEQ ID NO: 395323 - DNA, 75 bp, synthetic construct
  source 1..75: mol_type = other DNA
attagggccgcagtcggcgaaaattttttgtgagtttcaccggagtatcgtgaacagatgcgccgatgagattcg

SEQ ID NO: 395324 - DNA, 75 bp, synthetic construct
  source 1..75: mol_type = other DNA
cgttattacaccagaaattgaacaaaaaatgttacagcacacgccgatcagacgtctgggccaaccgcaagatat

SEQ ID NO: 395325 - DNA, 75 bp, synthetic construct
  source 1..75: mol_type = other DNA
gttaccggggttgtagttaacaaaaaaaccaatataccaaaggagtatataaagtctatccgtgcaggactttat

SEQ ID NO: 395326 - DNA, 75 bp, synthetic construct
  source 1..75: mol_type = other DNA
atacgctggccttgcgggcgacgcgcctgtccgccctcgatgcctggcgcacgggcatagcgttggggcacggcg

SEQ ID NO: 395327 - DNA, 75 bp, synthetic construct
  source 1..75: mol_type = other DNA
cgatgtgttgtcgggcgtgttcttcgtgaccatcggcctgcaactggacgcagcacagattctttcggcaccgct

SEQ ID NO: 395328 - DNA, 75 bp, synthetic construct
  source 1..75: mol_type = other DNA
tttggacttacaccctgattaccgctctgacgcccggaccgaacaacattctcgcccttagctcagccacaacgc

SEQ ID NO: 395329 - DNA, 75 bp, synthetic construct
  source 1..75: mol_type = other DNA
aaatcatgcgctgcactggtacgaaaaagcggcgcgtttaggggcgaccgaagcgcagcaccagactgcggcaat

SEQ ID NO: 395330 - DNA, 75 bp, synthetic construct
  source 1..75: mol_type = other DNA
ctgtggatgttgcccgcgatcaggttctcattcagtcgctgatgtttgaaaccagcttgtctgatggcgttgatt

SEQ ID NO: 395331 - DNA, 75 bp, synthetic construct
  source 1..75: mol_type = other DNA
taattgaagctccaaatagagggcttaaagatatccaaaaaacaatttctcattttctggagagaaactatacac

SEQ ID NO: 395332 - DNA, 75 bp, synthetic construct
  source 1..75: mol_type = other DNA
agcatgaaggtatgcccgccgctgtggcgcacagggctgcgccagaacttccgtatcttccagaatgaggacatc

SEQ ID NO: 395333 - DNA, 75 bp, synthetic construct
  source 1..75: mol_type = other DNA
gagaatcagcggttacggctttctcccgccgggcataatttttacgctatagccaacaaattctcgcgctggtgg

SEQ ID NO: 395334 - DNA, 75 bp, synthetic construct
  source 1..75: mol_type = other DNA
cgtgctcgtctccttgtgcgtggtggtggccgccgccgccgctgcgcacgcggtcggcgtatctgccgccctggg

SEQ ID NO: 395335 - DNA, 75 bp, synthetic construct
  source 1..75: mol_type = other DNA
tctttgatagctaagcgcctgccattcagccttttcagctctgatagaaagagaggaagccatgacctgccacac

SEQ ID NO: 395336 - DNA, 75 bp, synthetic construct
  source 1..75: mol_type = other DNA
atatgactggaggagtgactatttattatgatcctgaaacaggtgattcaatgacttttgatagtagcaatagaa

SEQ ID NO: 395337 - DNA, 75 bp, synthetic construct
  source 1..75: mol_type = other DNA
tattacctgaaaccctgtactcgccggaggcggagcagagcgtgctgggcgggctgatgctggataatgatcgct

SEQ ID NO: 395338 - DNA, 75 bp, synthetic construct
  source 1..75: mol_type = other DNA
ttatcctgctggtgtgcggctgcaagcagcaggaattactgaaccatcttgatcaacaacaagctaatgatgtcc

SEQ ID NO: 395339 - DNA, 75 bp, synthetic construct
  source 1..75: mol_type = other DNA
aaacacttcctcagccccggctgtatctggtggaggagcgcgctgaagaacagacagaagccgcacctttaccgg

SEQ ID NO: 395340 - DNA, 75 bp, synthetic construct
  source 1..75: mol_type = other DNA
taagtaaagtagctattatatcagtatctttattatttcttagcgcgtgttctacaaataatattgagaatatgc

SEQ ID NO: 395341 - DNA, 75 bp, synthetic construct
  source 1..75: mol_type = other DNA
tcatgagcgctgggatgctccagcaaaacgcaccatcacctattacggaccggacgaacgtccgcaggttgcagc

SEQ ID NO: 395342 - DNA, 75 bp, synthetic construct
  source 1..75: mol_type = other DNA
tctatggaaacgacattcgtgctggatgcactgaagcaggcgttgtgggcccgtcgtccatctggcaccatccat

SEQ ID NO: 395343 - DNA, 75 bp, synthetic construct
  source 1..75: mol_type = other DNA
acgtcctgagcagctgtgggtggctgattttacttacgtcagtacatggcagggcttcgtctatgtggcgttcat

SEQ ID NO: 395344 - DNA, 75 bp, synthetic construct
  source 1..75: mol_type = other DNA
cggtgctggatgccagcggcaactggagcgtcggcgttccggcaagcgttgtctcggcactggcgaacggcacgg

SEQ ID NO: 395345 - DNA, 75 bp, synthetic construct
  source 1..75: mol_type = other DNA
gcgacggaacacgcacaggcgcagattatcagcggctccgccacgggtgcggcaaccggtagcaccgtgacggtg

SEQ ID NO: 395346 - DNA, 75 bp, synthetic construct
  source 1..75: mol_type = other DNA
ttaacgtctcggtaaccaacgccgttggcaacaccggtagcggcacgcgcgatatcaccatcgatgccagtctac

SEQ ID NO: 395347 - DNA, 75 bp, synthetic construct
  source 1..75: mol_type = other DNA
atgccattcattaccaaaaatgccgcgcaaatacgcactgacattctgcgggatatcaaaaatctcctgcagttg

SEQ ID NO: 395348 - DNA, 75 bp, synthetic construct
  source 1..75: mol_type = other DNA
cagattcatggttttgaaagcatttaccctaaagcgaattgatgatattgcaggcgcgctggaaattgttaaaaa

SEQ ID NO: 395349 - DNA, 75 bp, synthetic construct
  source 1..75: mol_type = other DNA
atcccgaaacgactggagcatctgcggggtgctctggaagttgtgttcataacaaaacgcccccgaccatcaagg

SEQ ID NO: 395350 - DNA, 75 bp, synthetic construct
  source 1..75: mol_type = other DNA
tcagcaacgcataatctgacggtggatctcgttgcgccggtcgttaccatcaacacggtagcgggcgatgacatc

SEQ ID NO: 395351 - DNA, 75 bp, synthetic construct
  source 1..75: mol_type = other DNA
ataatgcaatatttgctaaattctttatatcactttcggctaaccttaaaatgttaggatatgaggttacaataa

SEQ ID NO: 395352 - DNA, 75 bp, synthetic construct
  source 1..75: mol_type = other DNA
tagcaagtcaggatgcatagatatcgctacagccaatacaatactaggggttgaactactaaaaaaattacattc

SEQ ID NO: 395353 - DNA, 75 bp, synthetic construct
  source 1..75: mol_type = other DNA
tcactgcggtggcggtcagcatcaacgccattactgccgatgacgtgattaacgctgccgaaaaaggcgcggcgt

SEQ ID NO: 395354 - DNA, 75 bp, synthetic construct
  source 1..75: mol_type = other DNA
gcggcactcggtagcggtgcgcagaccatcaccgccagcgtcagcgatcgggcaggtaatagcgacgacgccagc

SEQ ID NO: 395355 - DNA, 75 bp, synthetic construct
  source 1..75: mol_type = other DNA
gccacggaggcgggaagcccgctcaccatcagcggcaccagcaccgccgaaaccgggcagacggtcaccgtcacc

SEQ ID NO: 395356 - DNA, 75 bp, synthetic construct
  source 1..75: mol_type = other DNA
acactgaccacaacacctgatgggtttgacagcacagtgacagtaggcctgatgactggcggaacagatgaggaa

SEQ ID NO: 395357 - DNA, 75 bp, synthetic construct
  source 1..75: mol_type = other DNA
gtacgggctgatcggcacctgccgtctgaacggtatcgatccggaagcgtatctgcgccatattctgagcgtact

SEQ ID NO: 395358 - DNA, 75 bp, synthetic construct
  source 1..75: mol_type = other DNA
cttcagcggcaacgccatgccacagtccgcgtttgaggcaatgacagatgccgcctttaatcttggatgcagaaa

SEQ ID NO: 395359 - DNA, 75 bp, synthetic construct
  source 1..75: mol_type = other DNA
gagacttatatcctcaaccgtccacatttggtgataaggtatcttctgtttctaagaactggtctactttacttg

SEQ ID NO: 395360 - DNA, 75 bp, synthetic construct
  source 1..75: mol_type = other DNA
atcgctcggcaccaacccgatgctgtacgaaatgctctacgacatggcgtgggaaaaatcgcccatatcctcgac

SEQ ID NO: 395361 - DNA, 75 bp, synthetic construct
  source 1..75: mol_type = other DNA
tcctgaaaaccagattcaggtttatgtggagaacgaagacggctctcacgttcctgtatcgcagccaatcatcat

SEQ ID NO: 395362 - DNA, 75 bp, synthetic construct
  source 1..75: mol_type = other DNA
cggtagcaggtcttgggatgcatatgttgcctgccactaaggcgattcccaaagagatgctaccgatcgtcgaca

SEQ ID NO: 395363 - DNA, 75 bp, synthetic construct
  source 1..75: mol_type = other DNA
acggggtggagcacttcacagcggtgtaggcctgataagacggccgaccgagcgtcgcggattcgaggcaaccgg

SEQ ID NO: 395364 - DNA, 75 bp, synthetic construct
  source 1..75: mol_type = other DNA
ggtacacgtcgcgcaatcatcagtcgcgggcgaaaaaacgccaaaacggtggaaaccgccatgctgatgctgctc

SEQ ID NO: 395365 - DNA, 75 bp, synthetic construct
  source 1..75: mol_type = other DNA
ctggggatgagttatttcagaagataaaatctatagaaagtccgaacaaagaaacgcctttcatatttattagtg

SEQ ID NO: 395366 - DNA, 75 bp, synthetic construct
  source 1..75: mol_type = other DNA
actgagtctgaaggggatatcacttataacatttatacacatgcttcggttcctgatgtacaggttctgattgat

SEQ ID NO: 395367 - DNA, 75 bp, synthetic construct
  source 1..75: mol_type = other DNA
tgccggggatgtggcgtatgctgataagacgcgccagcgtcttatcaggcaaaccggctcgggcgttagatgtcg

SEQ ID NO: 395368 - DNA, 75 bp, synthetic construct
  source 1..75: mol_type = other DNA
tctggagagaaactcttatttaatggcaatttatttagaactgatgatgtcaataagtcatatgcaatacttaac

SEQ ID NO: 395369 - DNA, 75 bp, synthetic construct
  source 1..75: mol_type = other DNA
aagcaggaccaaggatataagaatcattatttatcagatgaaatgttagccggaaagaaagaactttacgacttc

SEQ ID NO: 395370 - DNA, 75 bp, synthetic construct
  source 1..75: mol_type = other DNA
tggatttcgcctgtttctgaagaacagacaaataaagtggcaggatgaacctgagtggcgtatcaccgcactggc

SEQ ID NO: 395371 - DNA, 75 bp, synthetic construct
  source 1..75: mol_type = other DNA
aagaatcattatttatcagatgaaatgttagccggaaagaaagatgcgtattccgctctattcgatcacggattg

SEQ ID NO: 395372 - DNA, 75 bp, synthetic construct
  source 1..75: mol_type = other DNA
tgttgtcacaatccacagccgaagagatgtgtgacgttctgggtatcaatggaaatagtggaaactcagcagcag

SEQ ID NO: 395373 - DNA, 75 bp, synthetic construct
  source 1..75: mol_type = other DNA
ctactactatagggcactagtccactttcataatgaaaaaattgaagaggcaaggatttgtatagacaaatcact

SEQ ID NO: 395374 - DNA, 75 bp, synthetic construct
  source 1..75: mol_type = other DNA
ttatcagatgaaatgttagccggaaagaaagaactttacgacttcacccctgaaagcatttacagggccatgact

SEQ ID NO: 395375 - DNA, 75 bp, synthetic construct
  source 1..75: mol_type = other DNA
tgctgtggggcaaccgcattcgcgccttgccggggccggaatatcatgagttcgatcgcgcctcgcaggatgcat

SEQ ID NO: 395376 - DNA, 75 bp, synthetic construct
  source 1..75: mol_type = other DNA
tgaactgattgacttaacgcctgggctatttcaacgacggatgctctactggcaccgctttgctcctgaaagccg

SEQ ID NO: 395377 - DNA, 75 bp, synthetic construct
  source 1..75: mol_type = other DNA
tcgtcggcccggctaactacttttcacatccaggaagtttcaatcacctgaacgattttttcactgatgaacaac

SEQ ID NO: 395378 - DNA, 75 bp, synthetic construct
  source 1..75: mol_type = other DNA
tgacggctagcggacccgtgctcaacgttttaccgttgggtattcacattgcggcgcaagaaacgctgccggaac

SEQ ID NO: 395379 - DNA, 75 bp, synthetic construct
  source 1..75: mol_type = other DNA
catggctgcgtggcgaaccaacgcctgcttcgccatttacgcctttcgctgatgtagtggaagagtaccagcaat

SEQ ID NO: 395380 - DNA, 75 bp, synthetic construct
  source 1..75: mol_type = other DNA
ggtctttcatcaactgatacaggtggcagataaccgctggtactggtatcagcgttatcaccatttactggtcga

SEQ ID NO: 395381 - DNA, 75 bp, synthetic construct
  source 1..75: mol_type = other DNA
ttaatgaatttgatgtagaaaggcaaagacttgaagaagagagtaaagctttaaagaacgtatctattcatcaaa

SEQ ID NO: 395382 - DNA, 75 bp, synthetic construct
  source 1..75: mol_type = other DNA
gtagggcggagtacaatcctgcggctgatctctccagcgctctcgaagtacaccaatccaatcatttcccattcc

SEQ ID NO: 395383 - DNA, 75 bp, synthetic construct
  source 1..75: mol_type = other DNA
cgaaacgtatccgcgtgccaactcgtcgtgaactggcgtcttacggtattaagctgccctcacagcgtgcggcgg

SEQ ID NO: 395384 - DNA, 75 bp, synthetic construct
  source 1..75: mol_type = other DNA
gccgcaacagccggttgcgccacagcagcaatatcagcagccgcaacagccggttgcgccgcagccgcagtatca

SEQ ID NO: 395385 - DNA, 75 bp, synthetic construct
  source 1..75: mol_type = other DNA
acagcgattagcaaattaacagtacgggcagataaccttctgtattttaataccggagggaatatcgcgctgtct

SEQ ID NO: 395386 - DNA, 75 bp, synthetic construct
  source 1..75: mol_type = other DNA
tatgcgcagagtgcttgagctggaaaggtcagacactgtggtgccacagaataatatttatgaccgcagcgaagg

SEQ ID NO: 395387 - DNA, 75 bp, synthetic construct
  source 1..75: mol_type = other DNA
aatcattaatgggttattcatatttttgtgatttactcacaatgtatcagggaaatataacttaccgggagatgt

SEQ ID NO: 395388 - DNA, 75 bp, synthetic construct
  source 1..75: mol_type = other DNA
gtgctgattatgatcgccttcttgctgatggggcgcgaaagcggcagcctcgattttgccagtttccgcacgctt

SEQ ID NO: 395389 - DNA, 75 bp, synthetic construct
  source 1..75: mol_type = other DNA
gttgccctgctggtgatggacaacgctttttggttcatcgtgctgtttgaaatgatgtcgctgtcttcctggttt

SEQ ID NO: 395390 - DNA, 75 bp, synthetic construct
  source 1..75: mol_type = other DNA
cgcgcggcgtggatgtctcggcgcgtaatgatatctaccaactgttgcgcagcatcgccgcacaaaatgtggctg

SEQ ID NO: 395391 - DNA, 75 bp, synthetic construct
  source 1..75: mol_type = other DNA
agtcgttactgatatgaaagatgccgccaacgcgctgcgctggtgtgttaacgagatggagcgtcggtataaact

SEQ ID NO: 395392 - DNA, 75 bp, synthetic construct
  source 1..75: mol_type = other DNA
gcgtgatgcagccgctgcgtgtggtcttttctgcgctatttcgtctacgacaacagctcgaccctacgctgaggc

SEQ ID NO: 395393 - DNA, 75 bp, synthetic construct
  source 1..75: mol_type = other DNA
tgttcctcgccattcttggtgtgattggctttctcaccggtgtttactcgattggctacatgcgtcatgaagtgg

SEQ ID NO: 395394 - DNA, 75 bp, synthetic construct
  source 1..75: mol_type = other DNA
tgaaacaaacgttaatcgtcagttttgtcggcgactcgagtaccgcgcaggttgatctgcagaagtcgaaaaatg

SEQ ID NO: 395395 - DNA, 75 bp, synthetic construct
  source 1..75: mol_type = other DNA
atatggcatcccgagcggactccatgattgaaacagaccagaataattacgtcgcgggtaagccgataggcgtaa

SEQ ID NO: 395396 - DNA, 75 bp, synthetic construct
  source 1..75: mol_type = other DNA
aaacagggagagaacgacacccgaattggtatggagctgacgctgcaacccggtcaatcactgcaaaaacagctc

SEQ ID NO: 395397 - DNA, 75 bp, synthetic construct
  source 1..75: mol_type = other DNA
cacgctgcgggtgaaggtcaccgatgcgttcggtaatgcgcttgccggacagacggtcagcgtgttggcaggcaa

SEQ ID NO: 395398 - DNA, 75 bp, synthetic construct
  source 1..75: mol_type = other DNA
gctgatgttagcacggcgcaggtcgcggagctggtggtgacgcaggacggctcagtggcagacggttcgacggcg

SEQ ID NO: 395399 - DNA, 75 bp, synthetic construct
  source 1..75: mol_type = other DNA
cggccattcactgcaaaaacagctcgatccggctgaagttgcagcacgacgcagccttgtgggcagtcgctatga

SEQ ID NO: 395400 - DNA, 75 bp, synthetic construct
  source 1..75: mol_type = other DNA
atatgcataccgttcaggtgacggtaaatgatgaacacggaaatatcgtcaagcaaagtgcggtctcatttaaag

SEQ ID NO: 395401 - DNA, 75 bp, synthetic construct
  source 1..75: mol_type = other DNA
gtcagggcgatgagatagatgtaccactcatcaacagtaacagccctgaagcgcgcactctgaaagcaatgcaga

SEQ ID NO: 395402 - DNA, 75 bp, synthetic construct
  source 1..75: mol_type = other DNA
cagtcttatcaaggccgagatcaatggcagtagtcagtctgtggaagtgagctttatcactggcgatatctcgca

SEQ ID NO: 395403 - DNA, 75 bp, synthetic construct
  source 1..75: mol_type = other DNA
gtcgcgggtaagccgatagtcgttaaagtgaccctgagagatgataacggcaacggggttaccggacgaaaagaa

SEQ ID NO: 395404 - DNA, 75 bp, synthetic construct
  source 1..75: mol_type = other DNA
gggatggcttcgctgctggcgggtagcggtgtggtcgaggggagcggtacagataaaaatgaaacgggtaactgg

SEQ ID NO: 395405 - DNA, 75 bp, synthetic construct
  source 1..75: mol_type = other DNA
taagcttgactatttcttctgctcaggctgagacatttcccgccaagctaacctgtaatacgggtgaacaaatta

SEQ ID NO: 395406 - DNA, 75 bp, synthetic construct
  source 1..75: mol_type = other DNA
gtgaaatcctggctgaccggggtgagtgaggaaagccgccgctggctggcatcgtgcggcctgaccgtggagcag

SEQ ID NO: 395407 - DNA, 75 bp, synthetic construct
  source 1..75: mol_type = other DNA
catcagctgcagcagcttatccggctgccggggcagcagtatgatgaggagtccggcctgtattacaaccgccac

SEQ ID NO: 395408 - DNA, 75 bp, synthetic construct
  source 1..75: mol_type = other DNA
ttgatgaaccggaaggggctgaaaacttccgcgaatcaatgagtctggccatcgcgcaatgtatagaacgctatg

SEQ ID NO: 395409 - DNA, 75 bp, synthetic construct
  source 1..75: mol_type = other DNA
agatcttcgatatattccttttgtcgatctcaaagaccgccctattgttggcaccgatgaactcccgcctccgga

SEQ ID NO: 395410 - DNA, 75 bp, synthetic construct
  source 1..75: mol_type = other DNA
tgccaggacgatccgcaagactgctacggtctgacgatagggagtattgatcagtatcagaatcaggctgagcta

SEQ ID NO: 395411 - DNA, 75 bp, synthetic construct
  source 1..75: mol_type = other DNA
ggggatcagtacagtcaccgcaaccatcaacagcagcagtcagagccgggatgtgacatttatcgccgatgccag

SEQ ID NO: 395412 - DNA, 75 bp, synthetic construct
  source 1..75: mol_type = other DNA
gctgacctccaccatcaagacggacgatgtgtcatacaccgcgggtggcaagataaaagtgtcagttacccttat

SEQ ID NO: 395413 - DNA, 75 bp, synthetic construct
  source 1..75: mol_type = other DNA
cgggtgagggtgacggatgcgttcgggaacacgctagccgggcagacggtcagcgtgttggcggacaacggcgca

SEQ ID NO: 395414 - DNA, 75 bp, synthetic construct
  source 1..75: mol_type = other DNA
ggtaatacgcgcatcaccggcaccagcgtgctgtggggagaggtttacgcaacggataatgtctggtacgataat

SEQ ID NO: 395415 - DNA, 75 bp, synthetic construct
  source 1..75: mol_type = other DNA
gcatcaacaacagcagccagagccggaacgtgacgtttgtcgccgatgtcaggacggcgaagatcgctgatctgg

SEQ ID NO: 395416 - DNA, 75 bp, synthetic construct
  source 1..75: mol_type = other DNA
acggcgaagatcgctgatctggtggtcattaaggatggttcagaggcggacggttcgacggcgaacacgctgcgg

SEQ ID NO: 395417 - DNA, 75 bp, synthetic construct
  source 1..75: mol_type = other DNA
gatgaaaaatcaatggcaacgctgacctattctgcccgcgatgccaacaatcatccgattcccggaatgacatta

SEQ ID NO: 395418 - DNA, 75 bp, synthetic construct
  source 1..75: mol_type = other DNA
gggcgtctcttacttctggcagttggtgatcaaaggggcggtgatcatcattgcggtgctgatcgacaaataccg

SEQ ID NO: 395419 - DNA, 75 bp, synthetic construct
  source 1..75: mol_type = other DNA
cctatacggcgctgcgcggggcggcgtatctgctggcggacggcaccacggttatcaactccaacattaatttcg

SEQ ID NO: 395420 - DNA, 75 bp, synthetic construct
  source 1..75: mol_type = other DNA
ttgatgaggctcgtcgcgcccgtattcgtctgaatcactccgcaacgcacctgatgcacgctgcgctgcgccagg

SEQ ID NO: 395421 - DNA, 75 bp, synthetic construct
  source 1..75: mol_type = other DNA
gcggacgctgacgtaccggcgtgacggacggtgccgggcgggagttccgtctggtgctgaccacgcaggcgcagc

SEQ ID NO: 395422 - DNA, 75 bp, synthetic construct
  source 1..75: mol_type = other DNA
gcgacgtgatgaactcaatgttgtcctggctttttccggtttttatatccgtgaggatggtaaggtcgcgagcgc

SEQ ID NO: 395423 - DNA, 75 bp, synthetic construct
  source 1..75: mol_type = other DNA
cgcagctttggcagcatggcaggcagtaatgccgcatataaactgaccagcacatacacccccgcaggccagtta

SEQ ID NO: 395424 - DNA, 75 bp, synthetic construct
  source 1..75: mol_type = other DNA
gaacggcgagcgggagaaagcgcagcgccgcagcctggcggagaagctgcagcaggaagggagcgaggacgggca

SEQ ID NO: 395425 - DNA, 75 bp, synthetic construct
  source 1..75: mol_type = other DNA
gtaccgatgagggctggttgtatctcgcagtagtcatcgacctgtggtcacgcgccgttattggctggtcgatgt

SEQ ID NO: 395426 - DNA, 75 bp, synthetic construct
  source 1..75: mol_type = other DNA
ttcatttataatgactttaagttatattccattcctctaagtatgcttatagcaaacatatttttgttgattgca

SEQ ID NO: 395427 - DNA, 75 bp, synthetic construct
  source 1..75: mol_type = other DNA
gtgttcttgcatttagtataatactggtgccaatacaaattgctattgaagcaacacaaaatcaaattgcaatat

SEQ ID NO: 395428 - DNA, 75 bp, synthetic construct
  source 1..75: mol_type = other DNA
atcacgcaccggacggtgaacggcgacccggcagagcagtggcagtatgatgagcacgggtggttaaccaccctc

SEQ ID NO: 395429 - DNA, 75 bp, synthetic construct
  source 1..75: mol_type = other DNA
gtacacgtatacggaagccggtgaactgctggcggtatatgatcgcagcaatacgcaggtgcgcgctttcacgta

SEQ ID NO: 395430 - DNA, 75 bp, synthetic construct
  source 1..75: mol_type = other DNA
gttcgggagaataaaatttttaaatactggttaatgaaaaaggtttttattttaattgccttgactctatttcta

SEQ ID NO: 395431 - DNA, 75 bp, synthetic construct
  source 1..75: mol_type = other DNA
tatcacgccgcgctgaaactggcgggctggagcgagaataaatggtcggacacgtatatcatccgtgccagtgag

SEQ ID NO: 395432 - DNA, 75 bp, synthetic construct
  source 1..75: mol_type = other DNA
gctgcggcagcacaaggtgtgataaacgctgcaacccaacaaccagttcctgcacaaatcgccattgcaaatgcc

SEQ ID NO: 395433 - DNA, 75 bp, synthetic construct
  source 1..75: mol_type = other DNA
gtcctcgaatatcgcaagaaagagctggtgcggctgacgctgaccgatccgttgaaaggcaagccgggtgaggtt

SEQ ID NO: 395434 - DNA, 75 bp, synthetic construct
  source 1..75: mol_type = other DNA
cgatctctgcccacgtcatttagtcggtcacgaactggcaccccatttattagtacgtgcggttaactaccaaca

SEQ ID NO: 395435 - DNA, 75 bp, synthetic construct
  source 1..75: mol_type = other DNA
ggttaacctcggtgaaagacgcacagggccgtgaaacgcggtatgaatacaacgccgcaggcgacctgactgccg

SEQ ID NO: 395436 - DNA, 75 bp, synthetic construct
  source 1..75: mol_type = other DNA
atgtaccggaagctgttgtattcctttcttgccctgccggtgatatcagttgccggcactgccgtttataccgac

SEQ ID NO: 395437 - DNA, 75 bp, synthetic construct
  source 1..75: mol_type = other DNA
cattaactatgatgcctcaaagccaggagcgccagcacttagttttgatacgtatctgcaggacaatgttaaata

SEQ ID NO: 395438 - DNA, 75 bp, synthetic construct
  source 1..75: mol_type = other DNA
gacggtggcgcagatgcaaagccagatggacccggtatacacgccggcgcgaaaaattcacctgtaccactgcga

SEQ ID NO: 395439 - DNA, 75 bp, synthetic construct
  source 1..75: mol_type = other DNA
gtccagcccggtggctttgatgagctggtgcagatctatgaggccggaggcgatgggatagagccactaaattgc

SEQ ID NO: 395440 - DNA, 75 bp, synthetic construct
  source 1..75: mol_type = other DNA
acggctgggacggcgaccggctgaccacgatacagaacgacaggagccgcatccagacgatttatcagccgggga

SEQ ID NO: 395441 - DNA, 75 bp, synthetic construct
  source 1..75: mol_type = other DNA
taacggcgggagtaaacccggtggtaatggcggtaacagcggcaatcatagcgggagctctggtggcggacagtc

SEQ ID NO: 395442 - DNA, 75 bp, synthetic construct
  source 1..75: mol_type = other DNA
aacggcggcgtgggggattattgccctgatgtggcttaccgtccgggtgatgaagcgcctgcaacagcttgaaaa

SEQ ID NO: 395443 - DNA, 75 bp, synthetic construct
  source 1..75: mol_type = other DNA
agcaaaagtcttacctatatatgataacttagttaactacagatcgggagactttaaaagtagtcttgggctcac

SEQ ID NO: 395444 - DNA, 75 bp, synthetic construct
  source 1..75: mol_type = other DNA
aatcagttattactaacgtaatgaaagcaaaagtcttacctatatatgataacttagttaactacagatcgggag

SEQ ID NO: 395445 - DNA, 75 bp, synthetic construct
  source 1..75: mol_type = other DNA
atgagcgcacccaccggtaccattacgacagtcagcaccggctggtgcactacacgcggacacaatatgcagagc

SEQ ID NO: 395446 - DNA, 75 bp, synthetic construct
  source 1..75: mol_type = other DNA
gggctgctgacgtcggagctggagcaggcgaaaaacggcgacctgatgattgtcatcaacggcaaagcgggcgca

SEQ ID NO: 395447 - DNA, 75 bp, synthetic construct
  source 1..75: mol_type = other DNA
ttgaagaactgttcaacaccaaagcgcaaagcggctcgcacgaggcgcgttacgccactatttattgccagcgcc

SEQ ID NO: 395448 - DNA, 75 bp, synthetic construct
  source 1..75: mol_type = other DNA
aacctcgcaagggaactaaagattacggccatgattatcatccagccccgaaaactgaagacataaaggggctag

SEQ ID NO: 395449 - DNA, 75 bp, synthetic construct
  source 1..75: mol_type = other DNA
tggccgaagccgagcaacagaaaacaaatcttctgaacgccgcaaattcaaaaatcagcctgtggcaaacggaac

SEQ ID NO: 395450 - DNA, 75 bp, synthetic construct
  source 1..75: mol_type = other DNA
aaaccttctccggtgctggcggcggcgcgggcgcgaccattatcgtatgggttgacctgtctgctgccagttctt

SEQ ID NO: 395451 - DNA, 75 bp, synthetic construct
  source 1..75: mol_type = other DNA
ataaccctgacattttccccggagaaggtgatgtgaagcgggtggcggattatatccgcagtcatgatgatccgg

SEQ ID NO: 395452 - DNA, 75 bp, synthetic construct
  source 1..75: mol_type = other DNA
gagaagacggaccgcatcccggaaggggtgatacggatgcacgacgagcggacccaccactaccactacgacagc

SEQ ID NO: 395453 - DNA, 75 bp, synthetic construct
  source 1..75: mol_type = other DNA
gcctacagttccgctgaggcgctgagctaccgcctgttaggcgatgctggctgggagtcaataacgctttatgac

SEQ ID NO: 395454 - DNA, 75 bp, synthetic construct
  source 1..75: mol_type = other DNA
gcgccaaaggcaaagccggtaaatccacggatttatatatcaccgaagacagccgaactgaaacaggctattacc

SEQ ID NO: 395455 - DNA, 75 bp, synthetic construct
  source 1..75: mol_type = other DNA
aaatgcgcccggcggacatattcaccacgatcttagccacgtcttcgacttacaccgtaatttaattgcaaccgg

SEQ ID NO: 395456 - DNA, 75 bp, synthetic construct
  source 1..75: mol_type = other DNA
gtagaagttgactggatgggcaacgccgtggtgccttatctcacaccatatcgtgaaaccattgtggaattgcgt

SEQ ID NO: 395457 - DNA, 75 bp, synthetic construct
  source 1..75: mol_type = other DNA
acggtaactatcagtccggcatcaccgtgcttaagcaggccaaagcctttatggacgtgccgcctccgcaggggg

SEQ ID NO: 395458 - DNA, 75 bp, synthetic construct
  source 1..75: mol_type = other DNA
atttaacatgtgttgtcgctgtaatgtttgtgttcgcagcgataacatccaacggtttgaatgaaagaggcctga

SEQ ID NO: 395459 - DNA, 75 bp, synthetic construct
  source 1..75: mol_type = other DNA
actcaacgcacgtagccggggtcgatctgatgaacggcatcggcggcagcggtgattttgaacgcaacgcgtatc

SEQ ID NO: 395460 - DNA, 75 bp, synthetic construct
  source 1..75: mol_type = other DNA
gcaatagcgtgtcgatcttccatgcaatggatcgcgtcggtacccgctatgtgcaaatcgatccgaaaaagattg

SEQ ID NO: 395461 - DNA, 75 bp, synthetic construct
  source 1..75: mol_type = other DNA
tcgtaacctacagccaaaatgaaaaaattaaagagatggctactgcttatcttgaactcttgacagccaataccg

SEQ ID NO: 395462 - DNA, 75 bp, synthetic construct
  source 1..75: mol_type = other DNA
gcacaaactacaccggcaccgtacagacggacggcagctggagcgtcagcgtaccgtcagccgacttaagcaccc

SEQ ID NO: 395463 - DNA, 75 bp, synthetic construct
  source 1..75: mol_type = other DNA
tcggttccggcggcagatatggcggctctgcgtgatggcgatgccagcgcacaggccagcgtcagcaatgttaac

SEQ ID NO: 395464 - DNA, 75 bp, synthetic construct
  source 1..75: mol_type = other DNA
gaatgggacgtttgtctgggggcagaacaccaccaataccttcttgagcggggcgggcagtggcgctatgagcag

SEQ ID NO: 395465 - DNA, 75 bp, synthetic construct
  source 1..75: mol_type = other DNA
agtggcccgaaccagaagtgggcgggagacatcacgtacttacgtacagatgaaggctggctgtatctggcagtg

SEQ ID NO: 395466 - DNA, 75 bp, synthetic construct
  source 1..75: mol_type = other DNA
aaatgccgatgcagcgcgtaaatacggtgaatcgctgttggcagccgaaatacccaaagaggaaaaactagaagt

SEQ ID NO: 395467 - DNA, 75 bp, synthetic construct
  source 1..75: mol_type = other DNA
gtggtcaatatcatcgaacacgctcaggcgcaggttcaccggcagcagctccggctttgccgcaggcacggcgtt

SEQ ID NO: 395468 - DNA, 75 bp, synthetic construct
  source 1..75: mol_type = other DNA
gcggcggcggggagcaccgtcaccgttgaactgggcggtaaaacctacagcgccaccgtgcagccagatttaagc

SEQ ID NO: 395469 - DNA, 75 bp, synthetic construct
  source 1..75: mol_type = other DNA
ataatcgctggaaggacagcagttcacagctgaatacgcaaagtaaccgttatgttgtgcaactgggtggcagca

SEQ ID NO: 395470 - DNA, 75 bp, synthetic construct
  source 1..75: mol_type = other DNA
aaatcttcataatacaaacagatagttatcatcgcggagatatgtcattattaagaaatgatacatcagtactgg

SEQ ID NO: 395471 - DNA, 75 bp, synthetic construct
  source 1..75: mol_type = other DNA
ccggattaagcgacggcagctacaccatcagcgcgtcagtcaccgatcaggccggaaaccccggtagcgccagcc

SEQ ID NO: 395472 - DNA, 75 bp, synthetic construct
  source 1..75: mol_type = other DNA
cctttggcggcaaaacctataccgccacggttgccgccaatggtacctgggcgctgaacgtgcctgcggcggatc

SEQ ID NO: 395473 - DNA, 75 bp, synthetic construct
  source 1..75: mol_type = other DNA
tggtgattaacaaccaaacttacgccgccacggtgttggcgaatggtacctggagcgtcggcgtaccggcggcgg

SEQ ID NO: 395474 - DNA, 75 bp, synthetic construct
  source 1..75: mol_type = other DNA
ttccactgacgatgtcattaacgccgctgaaaaaggctctgatttgcagctttccggcaccacctccggcgtgga

SEQ ID NO: 395475 - DNA, 75 bp, synthetic construct
  source 1..75: mol_type = other DNA
tcgtagaatatagttccaatgaaaaaataaaagggatggccagcacctggcttgaattgttagacatgcataaaa

SEQ ID NO: 395476 - DNA, 75 bp, synthetic construct
  source 1..75: mol_type = other DNA
gccgctttatgaatcacgcctgaagggagaactgcacgttatcagcaagcgatatacgcagcgcattgagcggca

SEQ ID NO: 395477 - DNA, 75 bp, synthetic construct
  source 1..75: mol_type = other DNA
acatcaaatagttatcaaagattttgattttatagatgaagcagacctggcaactcataaacaaattattggcag

SEQ ID NO: 395478 - DNA, 75 bp, synthetic construct
  source 1..75: mol_type = other DNA
ccgtttttcataaggaaaagaccataatgaatattggcgaacagattaaaagttttgaaaacaagcgtgcagcgc

SEQ ID NO: 395479 - DNA, 75 bp, synthetic construct
  source 1..75: mol_type = other DNA
accgacagaaaaaaaatcaatagagagcaagctagttcttccaatcgaatatagaatgaaaattctaaatagtga

SEQ ID NO: 395480 - DNA, 75 bp, synthetic construct
  source 1..75: mol_type = other DNA
agcaacagcgctggctgtggtatgcatgggagcctcgtttcaaacgtattgttgcccatgcttttggtcgtcgaa

SEQ ID NO: 395481 - DNA, 75 bp, synthetic construct
  source 1..75: mol_type = other DNA
gggcaaaattacaccaccactgccgatgcatccggtaactggagcgtgaccgttccggcgtccgccgtaagcgcg

SEQ ID NO: 395482 - DNA, 75 bp, synthetic construct
  source 1..75: mol_type = other DNA
cggcggatattcaggccatcggcaatggcgacctgacagttaacgcttcggtgaccaacggcgttggcaataccg

SEQ ID NO: 395483 - DNA, 75 bp, synthetic construct
  source 1..75: mol_type = other DNA
agcgataaagcgggtaacccggcgtccgctaaccacgggctggcggtggatctcaccgtgccggtgctgaccatc

SEQ ID NO: 395484 - DNA, 75 bp, synthetic construct
  source 1..75: mol_type = other DNA
tttcattccgccagggtttgcatttgaaagattatatcaggaatttgcattgcccttgccagcgcatgtgcagca

SEQ ID NO: 395485 - DNA, 75 bp, synthetic construct
  source 1..75: mol_type = other DNA
tggagatgggtaactggagcaatgcagaaatggtttcccgctatatccgtaacattgacgcaggtaagaaagcga

SEQ ID NO: 395486 - DNA, 75 bp, synthetic construct
  source 1..75: mol_type = other DNA
tggggatatgatggtaaacgtcacatcggagttcaatgcaagaatacgacaggcgagctgggtttggctgttgtt

SEQ ID NO: 395487 - DNA, 75 bp, synthetic construct
  source 1..75: mol_type = other DNA
agacgctgaaagaagccacggccaaagaagatgtcaaaattactggcaatgcggaaaaactcaacgagctgttag

SEQ ID NO: 395488 - DNA, 75 bp, synthetic construct
  source 1..75: mol_type = other DNA
tgttctcataaccaacaaaaaaaaaatatcctttaccaatgttatcttctagctccaactgcatttattaataga

SEQ ID NO: 395489 - DNA, 75 bp, synthetic construct
  source 1..75: mol_type = other DNA
gagatagtgagaaagggtatggaaggcaacgtgctgatgtgcggaaagcttgttcctctggcaccggtctggcgg

SEQ ID NO: 395490 - DNA, 75 bp, synthetic construct
  source 1..75: mol_type = other DNA
gactgtacgaaggaataataatagagctaagatgaatgttgagttcgactcatggatttgcaccagatgttgttg

SEQ ID NO: 395491 - DNA, 75 bp, synthetic construct
  source 1..75: mol_type = other DNA
taaaaacagttatatctcacgatctgtcaatgatgagtttagtttaacagatgatgaaatcaattcttttaaaga

SEQ ID NO: 395492 - DNA, 75 bp, synthetic construct
  source 1..75: mol_type = other DNA
gatcaggtcaaaagctatatgtccgggcgcggcggcagtatccgtattgcggccttacgggtcaggaatatccag

SEQ ID NO: 395493 - DNA, 75 bp, synthetic construct
  source 1..75: mol_type = other DNA
ttggttatattatagcatgtacagtatttagttctctattaactatagaaacaggcattggtggatttgagtttt

SEQ ID NO: 395494 - DNA, 75 bp, synthetic construct
  source 1..75: mol_type = other DNA
ctggtcatatgacggtaaaaaattcatcaagccttccttaaaaccagatgtagttactcctcaagatgagttagt

SEQ ID NO: 395495 - DNA, 75 bp, synthetic construct
  source 1..75: mol_type = other DNA
atggtcgccgaccgagagttccgtagcgatctctattaccgcctgaacgtattcccgattcacctgccgccacta

SEQ ID NO: 395496 - DNA, 75 bp, synthetic construct
  source 1..75: mol_type = other DNA
tattacggttcggtaagtcatgacgtgaaagcaacttacgtgctttatctcggctggtttgatggtaaccccgcg

SEQ ID NO: 395497 - DNA, 75 bp, synthetic construct
  source 1..75: mol_type = other DNA
taagacacctcagcaggtcgcgaaagaacgcgttgaagcagaaaacgaacgctacaggaaagaaaattgtgaggg

SEQ ID NO: 395498 - DNA, 75 bp, synthetic construct
  source 1..75: mol_type = other DNA
atgaataaaatcagactttatatttctccgctatttctcggctttgttattgtgccgttgttagtatggccgacg

SEQ ID NO: 395499 - DNA, 75 bp, synthetic construct
  source 1..75: mol_type = other DNA
gcattgctggctggtcttttcgccggtctatttctggttaattctctcgaatttcattctttatatttctccaga

SEQ ID NO: 395500 - DNA, 75 bp, synthetic construct
  source 1..75: mol_type = other DNA
acagattgatcaaatcatcgacgctgaactgtttgcactggcaggcctggatgcgcagcatctgcaactgctggt

SEQ ID NO: 395501 - DNA, 75 bp, synthetic construct
  source 1..75: mol_type = other DNA
ctggcgctgtgcggtcagccagacgcacgggaaagtgagcgtgtggaagccgactggcagcgtctctgcgacctc

SEQ ID NO: 395502 - DNA, 75 bp, synthetic construct
  source 1..75: mol_type = other DNA
acgggtgtattttagtgataaaaacaagaaggctagggaaggtgcgaataagcaggtcatttcttcccaagctga

SEQ ID NO: 395503 - DNA, 75 bp, synthetic construct
  source 1..75: mol_type = other DNA
ccagagaatgacgttcaggcgctcgttaatgaagaagtgcgggatatggctactgttgatgaggttattgaacat

SEQ ID NO: 395504 - DNA, 75 bp, synthetic construct
  source 1..75: mol_type = other DNA
acgatttaatggaattactgcgttacgacactatgtttacatgccaccgtcaggatgtgttcaatactttggcaa

SEQ ID NO: 395505 - DNA, 75 bp, synthetic construct
  source 1..75: mol_type = other DNA
gggtgctctggccggagcttcggccccggaactggcgcacctgctgaaatcaacagaaaaagatccggcagtaaa

SEQ ID NO: 395506 - DNA, 75 bp, synthetic construct
  source 1..75: mol_type = other DNA
tcccgacgaacatacagtgaggtttacccttagccagccattcgcaccgttcctctacacgctggcgaatgacgg

SEQ ID NO: 395507 - DNA, 75 bp, synthetic construct
  source 1..75: mol_type = other DNA
gcgatcctccctctcctactgttcccggttggttcgctcatcctccgtacggatacccccttccgtgatgaggtc

SEQ ID NO: 395508 - DNA, 75 bp, synthetic construct
  source 1..75: mol_type = other DNA
gggtgcagctccgggtcgggcaggcggttacctgccgggtctgtggcatacgggatatcaatgcccaggttacat

SEQ ID NO: 395509 - DNA, 75 bp, synthetic construct
  source 1..75: mol_type = other DNA
cgaccggtatgtagtgatgatgacgggatgctcattgatgctgtcattcgtcactatctgaagaatgtggatgaa

SEQ ID NO: 395510 - DNA, 75 bp, synthetic construct
  source 1..75: mol_type = other DNA
gcctgctgccgcagatattcccgtggcgagcgataacccagtgcactatgcggatgccattcgttataatgctcg

SEQ ID NO: 395511 - DNA, 75 bp, synthetic construct
  source 1..75: mol_type = other DNA
ttgcgccaagcataattttaaacaaaataaaccaattaacgggataatgaattatatttattatttttatttaaa

SEQ ID NO: 395512 - DNA, 75 bp, synthetic construct
  source 1..75: mol_type = other DNA
tatacttatcgctggaatccgacaataggcccgcagtggacgcgtcacgcaagaaaagatgaagtggacaggctt

SEQ ID NO: 395513 - DNA, 75 bp, synthetic construct
  source 1..75: mol_type = other DNA
tgcccagtgaatctaactgttgatgatgtcacttttaaaaggtacccacaccttttaataaaagcagctcaacgt

SEQ ID NO: 395514 - DNA, 75 bp, synthetic construct
  source 1..75: mol_type = other DNA
accacaccgctgaccccggcagatatgacgcgctgggctgaaattaaaaagaatctgcgcttcaggatgcggcag

SEQ ID NO: 395515 - DNA, 75 bp, synthetic construct
  source 1..75: mol_type = other DNA
gcgagcgataacccagtgcactatgcggatgccattcgttataatgctcgaacgcctctgcaaggttctttgctg

SEQ ID NO: 395516 - DNA, 75 bp, synthetic construct
  source 1..75: mol_type = other DNA
ccggcaaatgcggtcattcctgacagtgctgcaggttcatcgaagctaaacagcccgtccgtgctgacggggaac

SEQ ID NO: 395517 - DNA, 75 bp, synthetic construct
  source 1..75: mol_type = other DNA
ccgctgatgaaccgtattgccgacgtggggacaaaatttgcccgctggctggatatgttcccgaatattgcccgc

SEQ ID NO: 395518 - DNA, 75 bp, synthetic construct
  source 1..75: mol_type = other DNA
aagcggatagctccagagtgattgttgatgagaaaatcgcttcaataattgatgaattatattcgtctttgggag

SEQ ID NO: 395519 - DNA, 75 bp, synthetic construct
  source 1..75: mol_type = other DNA
caagggattgtaggcaccagcatcggcctcggggcatcaccgcgtgattgtcctgatatttccggcaacccatca

SEQ ID NO: 395520 - DNA, 75 bp, synthetic construct
  source 1..75: mol_type = other DNA
aaaaagcgcggcagctaccagtgccagtgccgcgaaaacgtcagaaacgaatgcggcagcgtcacaaaaatctgc

SEQ ID NO: 395521 - DNA, 75 bp, synthetic construct
  source 1..75: mol_type = other DNA
ggatttgataaatgcacacaacggattgatgagtggggtatttttacggtttcgatggcggtgcgtcgtgataac

SEQ ID NO: 395522 - DNA, 75 bp, synthetic construct
  source 1..75: mol_type = other DNA
accgcagtctggatgtgctggaaggatatctggtcgatggcacgctcaaaaccgatacggtcaatctggcgacta

SEQ ID NO: 395523 - DNA, 75 bp, synthetic construct
  source 1..75: mol_type = other DNA
cgcattattgcggagctggttattcctccagaaacgggcggattctggatccgggaaattggtgtgtttgatgag

SEQ ID NO: 395524 - DNA, 75 bp, synthetic construct
  source 1..75: mol_type = other DNA
cagctggcagtgcgacggcggcagcacagagcaaaagtacggcggaatccgcggcaacgcgcgccgagacagcgg

SEQ ID NO: 395525 - DNA, 75 bp, synthetic construct
  source 1..75: mol_type = other DNA
cgtttctggaataacgagatcgatcataatgaagaggcggttctgggggagattctgcaggaactgagccgccgg

SEQ ID NO: 395526 - DNA, 75 bp, synthetic construct
  source 1..75: mol_type = other DNA
ggaaaagtgcttgctgataatgtcaaaactgagcaggtaagaattttcatggataaacgagggcttgggcaaatc

SEQ ID NO: 395527 - DNA, 75 bp, synthetic construct
  source 1..75: mol_type = other DNA
atcaatgccaaatggaatggtaaagaatttcacctaaatacaaaaggtaaaatgaattctaaagcacaggaatac

SEQ ID NO: 395528 - DNA, 75 bp, synthetic construct
  source 1..75: mol_type = other DNA
atgggaagcattaaaagcattaccgcaaagatgatcagtacgattcttaatgatgattttcatgtaggtatgttg

SEQ ID NO: 395529 - DNA, 75 bp, synthetic construct
  source 1..75: mol_type = other DNA
atttttctgatcgcccgcgcatgggatgcagttcacgatcctctttttgctagcattatggatattattaacagt

SEQ ID NO: 395530 - DNA, 75 bp, synthetic construct
  source 1..75: mol_type = other DNA
ctagacgtctcggtacgcttggtgatgtgggtggttggatatcaacaggtgacaatactgtttattctacttggt

SEQ ID NO: 395531 - DNA, 75 bp, synthetic construct
  source 1..75: mol_type = other DNA
atatgaatgatgccaccttggtgtcggtaattggcacaattacattaatcagcgcactggcatgcttgtgtacac

SEQ ID NO: 395532 - DNA, 75 bp, synthetic construct
  source 1..75: mol_type = other DNA
cgagattgattgtaatgaggaggcggtgctggagattattctgcaggaactgaaccgcctgtcacccccaccccc

SEQ ID NO: 395533 - DNA, 75 bp, synthetic construct
  source 1..75: mol_type = other DNA
cgcttttctaccaccgaaaccacagaacctgatcgtacattgcagttatctgccgaactgaaccgccccggaaat

SEQ ID NO: 395534 - DNA, 75 bp, synthetic construct
  source 1..75: mol_type = other DNA
tgtcatcggtgatgaccaatgactccgctcagcgtgtccgtgttgtcacggcggcgatgctcggggtaaacgtcg

SEQ ID NO: 395535 - DNA, 75 bp, synthetic construct
  source 1..75: mol_type = other DNA
ttatgaggcccgtctttcacatcgttttgatggtacttatctcagtggctcttactggcgtcaggattactggat

SEQ ID NO: 395536 - DNA, 75 bp, synthetic construct
  source 1..75: mol_type = other DNA
atttgattttgataatatcatccgttatatattgagacttaaagataaaaaaggaaactatctttcgggtggaga

SEQ ID NO: 395537 - DNA, 75 bp, synthetic construct
  source 1..75: mol_type = other DNA
gggaatggaaaagagtgcagcttttcaactaacggtttagagcaaaatacaaacaaagttcaggaggtgatttgt

SEQ ID NO: 395538 - DNA, 75 bp, synthetic construct
  source 1..75: mol_type = other DNA
ttaccgcaaattcggcttcgaaaatgtcctgcgttacatcctgcgagtgaaggatgcacaaggcaactatctgac

SEQ ID NO: 395539 - DNA, 75 bp, synthetic construct
  source 1..75: mol_type = other DNA
gcagggtgacttgttactgggtaaatcccagacacgtaccgaactgttttctgactttaatttctacggggcggc

SEQ ID NO: 395540 - DNA, 75 bp, synthetic construct
  source 1..75: mol_type = other DNA
gatctggtggtgaccgttgaggatgaaagtggtaacaaaaccgagcaggtctatccggtcaccacgctgccgacg

SEQ ID NO: 395541 - DNA, 75 bp, synthetic construct
  source 1..75: mol_type = other DNA
gcggtattgcccgtggggccacgccggaaagcagcggcagctatggcttcgtccgtctggagggtgacctgctca

SEQ ID NO: 395542 - DNA, 75 bp, synthetic construct
  source 1..75: mol_type = other DNA
acaggcaggattatcagctggggttttaatggttcaatctgacttaaaaggtggtagtctgcatgcatctcgctc

SEQ ID NO: 395543 - DNA, 75 bp, synthetic construct
  source 1..75: mol_type = other DNA
gatctgttggtgactgttgaggatgaaagtggtaacaaaaccgaacaggtctatccggtaactacattgcccaca

SEQ ID NO: 395544 - DNA, 75 bp, synthetic construct
  source 1..75: mol_type = other DNA
tgcacgggaattttttgaaaaataatctggcgaaaaataagcatggcaagaccaccgaaagcccccgcctacctg

SEQ ID NO: 395545 - DNA, 75 bp, synthetic construct
  source 1..75: mol_type = other DNA
aaatatctggaaacgaaatttgctaatcacaatatattctttaggatgctgtgggagttgttctatcttccattc

SEQ ID NO: 395546 - DNA, 75 bp, synthetic construct
  source 1..75: mol_type = other DNA
acaatggtgttctgctgatgaacatgctggctgagccgaaagctgtcagcgtgaatactggggacggaaaacagt

SEQ ID NO: 395547 - DNA, 75 bp, synthetic construct
  source 1..75: mol_type = other DNA
gcgagttactcttaaagagtttggatggttccatttcatcaatatcgggtttaaaaaactcaggaaattcttttt

SEQ ID NO: 395548 - DNA, 75 bp, synthetic construct
  source 1..75: mol_type = other DNA
cgttatttcactaccggtatggtcgacaaagaaaactccaaaatagataaagtcgcttttacattttccgctgcc

SEQ ID NO: 395549 - DNA, 75 bp, synthetic construct
  source 1..75: mol_type = other DNA
aaagaaacatcatattctggagtggctgtggcgactattatcaaatcgctgtctgaaaaaactgctgcgttagaa

SEQ ID NO: 395550 - DNA, 75 bp, synthetic construct
  source 1..75: mol_type = other DNA
ggggtttattaaacaccgtcgctgtgaagtggtaagcgtatcgccattactacgtcagttactgcttgaagcggt

SEQ ID NO: 395551 - DNA, 75 bp, synthetic construct
  source 1..75: mol_type = other DNA
aaaatttatcccagagagaataaaaaactcgcaatggatattattagtacaggaggggtattaatttcggaatat

SEQ ID NO: 395552 - DNA, 75 bp, synthetic construct
  source 1..75: mol_type = other DNA
acaccttacgtgtggtagcgctggcaccggaaaagaaggggcattgcaggccatccgccatcttaaacagcaaaa

SEQ ID NO: 395553 - DNA, 75 bp, synthetic construct
  source 1..75: mol_type = other DNA
cccgggcgtatttactgagtaaaacagacgctgccattaacttgggccgctgggtgttatccagtaacatgaaca

SEQ ID NO: 395554 - DNA, 75 bp, synthetic construct
  source 1..75: mol_type = other DNA
tcagcggggcaaccatcctgcacaaccactaccggggcggcggactgagtgtcacgcaaacgatggggggcttcg

SEQ ID NO: 395555 - DNA, 75 bp, synthetic construct
  source 1..75: mol_type = other DNA
ccgcagggctgggctttacacgggctcttgggattctgggggcggtttcagtcagtgccggtgtctcaaaagcca

SEQ ID NO: 395556 - DNA, 75 bp, synthetic construct
  source 1..75: mol_type = other DNA
ccagtcctcaagggattacatgtttttattattctagtctacaattctatcaaaaatatttaaaagaaaaatctt

SEQ ID NO: 395557 - DNA, 75 bp, synthetic construct
  source 1..75: mol_type = other DNA
ttctgcgttagaaacacattccgctgacacggttttgaggaagaaattagttaatagtattgttatgaagaatac

SEQ ID NO: 395558 - DNA, 75 bp, synthetic construct
  source 1..75: mol_type = other DNA
gacactttccacggcgctagggggactgaaaagtgatctgattgtcgggaagagcactacccgtagtgacctttt

SEQ ID NO: 395559 - DNA, 75 bp, synthetic construct
  source 1..75: mol_type = other DNA
acggtgacgggggaatagttaaaacggacgaacccggtcttaaggtgccttcctcactacgagctcttagctctc

SEQ ID NO: 395560 - DNA, 75 bp, synthetic construct
  source 1..75: mol_type = other DNA
aaatatcgccgtgcgctttatggacttgcccatcagtcatcagttcgcgcttgatgacgaaaaagagagcgatga

SEQ ID NO: 395561 - DNA, 75 bp, synthetic construct
  source 1..75: mol_type = other DNA
aacaagtcagtatgcatatttatggtaatgtggtcgatcagggctgtgatgttgccaccaaaagtgcattacaaa

SEQ ID NO: 395562 - DNA, 75 bp, synthetic construct
  source 1..75: mol_type = other DNA
tcccctatcctatacgcgagaatacaccacgccagcaaggttggtgttttgggctgccttcaggaataacacctg

SEQ ID NO: 395563 - DNA, 75 bp, synthetic construct
  source 1..75: mol_type = other DNA
tattggcgcatgtaaagatgcgcttggtgaaaacatatatagactcaaagtgccagctagattcattgttataga

SEQ ID NO: 395564 - DNA, 75 bp, synthetic construct
  source 1..75: mol_type = other DNA
gggtggtgtcaccggaatggtacgatcatctgtggcgttatcagggcgcttctcaccgcgatatcggctggctgt

SEQ ID NO: 395565 - DNA, 75 bp, synthetic construct
  source 1..75: mol_type = other DNA
tggcgtttgcgcgtattaatcgtcagctgatcgctttgcgcataatgcaacaagttaaggccaacggaaattcgg

SEQ ID NO: 395566 - DNA, 75 bp, synthetic construct
  source 1..75: mol_type = other DNA
tcatagcggctcgcgtggtttggggcagtctattttacagcggcatattgcctcgttttcacatcatggtttgcc

SEQ ID NO: 395567 - DNA, 75 bp, synthetic construct
  source 1..75: mol_type = other DNA
cgcataatgcaacaggtgaaagccatgggaagtccgattctggatgtggcgcataactttgttagcgcgtgtcaa

SEQ ID NO: 395568 - DNA, 75 bp, synthetic construct
  source 1..75: mol_type = other DNA
acacaggcggaagcggtggtatggcaacggggattgccgtgcaaattcttgatgcgcaaagtcagcaagaaatcc

SEQ ID NO: 395569 - DNA, 75 bp, synthetic construct
  source 1..75: mol_type = other DNA
ctcaagtatcaactgcgttacaagtctacaaagacgggagcaacgggcggtaatgcgactgctgtcctgtatttt

SEQ ID NO: 395570 - DNA, 75 bp, synthetic construct
  source 1..75: mol_type = other DNA
gcgttatcttgttctttagcattcttaacatccatgtcgggatggctgggcctgaacaagtcagtatgcatattt

SEQ ID NO: 395571 - DNA, 75 bp, synthetic construct
  source 1..75: mol_type = other DNA
gctcactgcgttcacggtctgtccaactggctgtcgccagttgtcgaaccccggtcggggcttctcatcccccgg

SEQ ID NO: 395572 - DNA, 75 bp, synthetic construct
  source 1..75: mol_type = other DNA
ggtacagccacgaatgtcaccctgaagcagggcggcgcactggtcaccagtactgcagcaacggttcttggcagc

SEQ ID NO: 395573 - DNA, 75 bp, synthetic construct
  source 1..75: mol_type = other DNA
cgttttgatgtaggccctgactatgaaacgtatgtatatatatataaaaatatagtagcaggtagaatagatatt

SEQ ID NO: 395574 - DNA, 75 bp, synthetic construct
  source 1..75: mol_type = other DNA
aactggagagagtgaatataccgtaatcgaacaaacaggtgacaaatcttttaagattatacagaaggatgaaaa

SEQ ID NO: 395575 - DNA, 75 bp, synthetic construct
  source 1..75: mol_type = other DNA
gatgctggagccacaactgcagtacacctggcaggggctctccctggatgacggccaggataacgccggttatgt

SEQ ID NO: 395576 - DNA, 75 bp, synthetic construct
  source 1..75: mol_type = other DNA
tgagccgatattttacaggcgttgcacttgaggtctggcccggaagtgaattccagtcggaaaccctgcagaccc

SEQ ID NO: 395577 - DNA, 75 bp, synthetic construct
  source 1..75: mol_type = other DNA
ttgattattgctttaccattagccatcaaaagccttaaaaaggaatacagttataatcttctttataagtgttta

SEQ ID NO: 395578 - DNA, 75 bp, synthetic construct
  source 1..75: mol_type = other DNA
tggttggataagaatccaacagcatctccaggggatcgagcagcagcagaaaacgttcttcaggatttacagaat

SEQ ID NO: 395579 - DNA, 75 bp, synthetic construct
  source 1..75: mol_type = other DNA
cgaaacagagaatggcgaacaggcgaaggcgcggcaccgtagcctggcggaggtgttgcaggaggacacgggtgt

SEQ ID NO: 395580 - DNA, 75 bp, synthetic construct
  source 1..75: mol_type = other DNA
tgaacgaggtagccgctttattcggcgttacccgtcgcacgatattccggtggatgaataagattaaaggttggc

SEQ ID NO: 395581 - DNA, 75 bp, synthetic construct
  source 1..75: mol_type = other DNA
gcaatacaaagaaggtctgttttcggtgtaaaaaacgctcctgcccacactgcggggtgaaagcgggtgcacagt

SEQ ID NO: 395582 - DNA, 75 bp, synthetic construct
  source 1..75: mol_type = other DNA
tacggtgacaccgggcggtgccgcctgtaagtataacgacatcattccggcggaccattgtctgcatgatgtgca

SEQ ID NO: 395583 - DNA, 75 bp, synthetic construct
  source 1..75: mol_type = other DNA
cgacaggaaggtcaacaccattattactggcgatctggcgacaaaaatacgacgatgattatgtaatcttcccat

SEQ ID NO: 395584 - DNA, 75 bp, synthetic construct
  source 1..75: mol_type = other DNA
cggcaggacgagcgttaggtgacggtatctctttcgttctcagcacgctgattgcacacgtgtcaacgacggatg

SEQ ID NO: 395585 - DNA, 75 bp, synthetic construct
  source 1..75: mol_type = other DNA
cggcgctcaattacagccagttgctgaaagtgtaccgggcgctgctgaccgaaggcgtttccctgcgcgatatcg

SEQ ID NO: 395586 - DNA, 75 bp, synthetic construct
  source 1..75: mol_type = other DNA
ggtctcagaaactgaagcacagagtgctggtcaaagactgacgataatagaacaacagtggctcaggatgaagga

SEQ ID NO: 395587 - DNA, 75 bp, synthetic construct
  source 1..75: mol_type = other DNA
gagccaccaagaacgtaataccgttcgtgcggcctacatacataaagctgagcatctggatgaacgcagattaat

SEQ ID NO: 395588 - DNA, 75 bp, synthetic construct
  source 1..75: mol_type = other DNA
tcaatgtgctggacacccacggccaaccgcaaagtatttatcccgtgagcgcggatcagttagtcaatgctactt

SEQ ID NO: 395589 - DNA, 75 bp, synthetic construct
  source 1..75: mol_type = other DNA
gggggattgttgttagtgtcccacctcagcaacctattgctaagttagaagtaaatgctgcccaaaaattagtta

SEQ ID NO: 395590 - DNA, 75 bp, synthetic construct
  source 1..75: mol_type = other DNA
cccgaattatattcggaaaaggtattgaggatttttctctggtgtgggctgcaccaggagttgcagatgttacat

SEQ ID NO: 395591 - DNA, 75 bp, synthetic construct
  source 1..75: mol_type = other DNA
acaatggcgggagccagtggcagttaattaatggcgaacaggagattacgttgcagcctgaggcgcgtttgcaga

SEQ ID NO: 395592 - DNA, 75 bp, synthetic construct
  source 1..75: mol_type = other DNA
ttaactatgatgatattacgcagttgcataaccgtttggcgtcgatggcaccgcgcctggcggaagatttaagcg

SEQ ID NO: 395593 - DNA, 75 bp, synthetic construct
  source 1..75: mol_type = other DNA
aataacatcaactattcttcaagggaaaacagctcattatcaacaaaggcaaaacattctcgataagatcagaga

SEQ ID NO: 395594 - DNA, 75 bp, synthetic construct
  source 1..75: mol_type = other DNA
gaagaaatccgtcttcacattgtttgcgatgtccctgatgaacttattgatttcacgtttgaatggaaagggcag

SEQ ID NO: 395595 - DNA, 75 bp, synthetic construct
  source 1..75: mol_type = other DNA
gctgaaggcgcagacggatgcggcgggacggcggacggagtaccggctgcatatggcgtcgggaaagctgacttc

SEQ ID NO: 395596 - DNA, 75 bp, synthetic construct
  source 1..75: mol_type = other DNA
atataaattttgcctcagggttgcgttctgccgttgaagctattgccggggagcaaccttatatcgagtatatag

SEQ ID NO: 395597 - DNA, 75 bp, synthetic construct
  source 1..75: mol_type = other DNA
agggaaacggggctgcactacaatctgcacaggtactatgatccggatgtcgggcggttcatggtaacggacccg

SEQ ID NO: 395598 - DNA, 75 bp, synthetic construct
  source 1..75: mol_type = other DNA
gggcggttcatggtaacggacccgatagggctgcttgggggattaaacctctatagttatgttccaaacccgtta

SEQ ID NO: 395599 - DNA, 75 bp, synthetic construct
  source 1..75: mol_type = other DNA
actggtgtgtaaacctcaaaatggattattcgttaagaaagatgtagagcaagaggttaaaagtttgtttcttaa

SEQ ID NO: 395600 - DNA, 75 bp, synthetic construct
  source 1..75: mol_type = other DNA
gcttttagccagtcaaatatcgactgtcttcgggcgttacgtgctgatgctatcagcaagcgcagaattgcgctt

SEQ ID NO: 395601 - DNA, 75 bp, synthetic construct
  source 1..75: mol_type = other DNA
gcggtcaaaaaatgtcagacaggggaaggcatcctggtattcactgatgttgccggaggctctccttgcaaccga

SEQ ID NO: 395602 - DNA, 75 bp, synthetic construct
  source 1..75: mol_type = other DNA
catcaacacgagcctgcgccgccaggcagaaataaagcagctcatggccgaagccagcctgcaacactcaagctg

SEQ ID NO: 395603 - DNA, 75 bp, synthetic construct
  source 1..75: mol_type = other DNA
tgaacggaacgtgtgttgagtgcgcaatgaatagtgctcatcgtcaccgtgatgagttcgctgctgcgttgagga

SEQ ID NO: 395604 - DNA, 75 bp, synthetic construct
  source 1..75: mol_type = other DNA
actatttcagtcgcctctggtaataatggtaataatatgcaatgtaaaaataatcctggttgtacacacttacaa

SEQ ID NO: 395605 - DNA, 75 bp, synthetic construct
  source 1..75: mol_type = other DNA
ttttcaacctgaagtgtcagcgagagtaaaaaattatggtgaccattttaccgttgactcaataaggcagatgtg

SEQ ID NO: 395606 - DNA, 75 bp, synthetic construct
  source 1..75: mol_type = other DNA
aaatgcacctttgtttttcaacctgaagtgtcagcgagagtaaaaaattatggtgaccattttaccgttgactca

SEQ ID NO: 395607 - DNA, 75 bp, synthetic construct
  source 1..75: mol_type = other DNA
accctcaaagattattacccagtgctatctgtgctggttgcttaccagcatatgtggctcctggttctgcccagt

SEQ ID NO: 395608 - DNA, 75 bp, synthetic construct
  source 1..75: mol_type = other DNA
atggacgatgagcgactgaagaatccgcctgtcggttcttctgtcctcgaacgcatccgcgatatgcgcgccagc

SEQ ID NO: 395609 - DNA, 75 bp, synthetic construct
  source 1..75: mol_type = other DNA
atatcgtccagaacagcggtgccgctctccagacgagcacggctaacggtattgaaatcagcggtactcaccagt

SEQ ID NO: 395610 - DNA, 75 bp, synthetic construct
  source 1..75: mol_type = other DNA
atgctcgaatgacagcacatctcccgaacaaagatgagtcttacgaatgtttaacaaaagtacagcatgaactac

SEQ ID NO: 395611 - DNA, 75 bp, synthetic construct
  source 1..75: mol_type = other DNA
gttttatcgtctcgatagcctcgattctgatctggttgctgctgggcggcgcgtggatgaagctggtcggcttct

SEQ ID NO: 395612 - DNA, 75 bp, synthetic construct
  source 1..75: mol_type = other DNA
atgagcaggaagcgctacctttactctacctctacacgttaactggggtgcctaatcaggggacggtgccgttgg

SEQ ID NO: 395613 - DNA, 75 bp, synthetic construct
  source 1..75: mol_type = other DNA
gtgctggctaaaacctcggcgaaaaatactaccgttgatgctggcggtaagctgattgtccagaaggaggctaaa

SEQ ID NO: 395614 - DNA, 75 bp, synthetic construct
  source 1..75: mol_type = other DNA
cagtcgtcactggttcccgggcagttgatacgattattaatgccaacggcaaaatggatgtttatggaaaagatg

SEQ ID NO: 395615 - DNA, 75 bp, synthetic construct
  source 1..75: mol_type = other DNA
ttggttatctcgccacaaatggcctaaataatttagttcctgaattccagattttagataatgcagatcactatg

SEQ ID NO: 395616 - DNA, 75 bp, synthetic construct
  source 1..75: mol_type = other DNA
tgatttacgcaaataccagattttaggatttgaagactataaccactacgtcggttatctcgccacaaatggcct

SEQ ID NO: 395617 - DNA, 75 bp, synthetic construct
  source 1..75: mol_type = other DNA
gaaggttactttcactacagcaaataccatgacgggtcagtctgatcttctgaaaaataccaaagaaactgaaat

SEQ ID NO: 395618 - DNA, 75 bp, synthetic construct
  source 1..75: mol_type = other DNA
agcctatgaattattgttagtcggtggaggaagtcgcaacacattgtggaatcagattaaagccaatatgcttga

SEQ ID NO: 395619 - DNA, 75 bp, synthetic construct
  source 1..75: mol_type = other DNA
taatcattatttattaccagaaatgcaagatgaacatttaaggaataactcatcattagtagaagttttgaaaaa

SEQ ID NO: 395620 - DNA, 75 bp, synthetic construct
  source 1..75: mol_type = other DNA
taatcattatttattgccagaaatgcaagatgaacatttaaggaataactcttccttggtagaggtattaaaaaa

SEQ ID NO: 395621 - DNA, 75 bp, synthetic construct
  source 1..75: mol_type = other DNA
aacctggtcgaccttcacctggagtggcgcagataaccactgcgatattttgcctggcatgcgccagtttggcgc

SEQ ID NO: 395622 - DNA, 75 bp, synthetic construct
  source 1..75: mol_type = other DNA
tcacgctagtgatgcgaccatgcaagcagcaaaaaaacgttatgacgaaatattacgaaaagaactcgagttaag

SEQ ID NO: 395623 - DNA, 75 bp, synthetic construct
  source 1..75: mol_type = other DNA
taatcgcaggtgctttcttcgctgtggcaggttcagctatggctgcgcctcaggaagcagttgataccgcgactg

SEQ ID NO: 395624 - DNA, 75 bp, synthetic construct
  source 1..75: mol_type = other DNA
gcaactgtaaggaccacaatcgttgccgcaacggcaaccattaacggcaaggatgtggagttgctgaaagcgggg

SEQ ID NO: 395625 - DNA, 75 bp, synthetic construct
  source 1..75: mol_type = other DNA
caccagttatgtcaagcaggtcgctatttcagtggcgaaaaaggtaaaatataaaagtctgactcgctatgtgct

SEQ ID NO: 395626 - DNA, 75 bp, synthetic construct
  source 1..75: mol_type = other DNA
tgccccccaccttttccccttgaggaaagatataatgctttcaacagaactatatccaccagtcaatatactcag

SEQ ID NO: 395627 - DNA, 75 bp, synthetic construct
  source 1..75: mol_type = other DNA
tcacacccggtgggattgttgggtttctcatcgtgagttaccggttcaatattccagacagactcgcggttcatt

SEQ ID NO: 395628 - DNA, 75 bp, synthetic construct
  source 1..75: mol_type = other DNA
tgagcaagaggtgataacgtttgaagtggtagccagagagtggcacgccagcaatcagaagtggtctgcatcgca

SEQ ID NO: 395629 - DNA, 75 bp, synthetic construct
  source 1..75: mol_type = other DNA
acaatgagttagagacattgtatgctgtgtttaattcgctgggatggccagcttcgccaagtttcccttacttgt

SEQ ID NO: 395630 - DNA, 75 bp, synthetic construct
  source 1..75: mol_type = other DNA
acggggcatataccgcgtgagatctcactggaaagtctgtattcggcttaccctggcaatatcatcgggactgag

SEQ ID NO: 395631 - DNA, 75 bp, synthetic construct
  source 1..75: mol_type = other DNA
ttgtattgttgagcctgtttatcgcttttattttaaaatttttctggcccaccccgcacgatgaacatcttttcc

SEQ ID NO: 395632 - DNA, 75 bp, synthetic construct
  source 1..75: mol_type = other DNA
tatggttcacggaaactgcgtttcggcgggctgctatgccatgaccgatgctggtattgaagagatttatcaact

SEQ ID NO: 395633 - DNA, 75 bp, synthetic construct
  source 1..75: mol_type = other DNA
ctgcacctcaatgcttgtcgagaaaagtatataaccataaaacagttgtaaatgctttagacgaaatatttcatg

SEQ ID NO: 395634 - DNA, 75 bp, synthetic construct
  source 1..75: mol_type = other DNA
cagaacgcctacaggcgacactggccgcggaaggctgtgaactcacaattatttttcataacgcaaaaaactggg

SEQ ID NO: 395635 - DNA, 75 bp, synthetic construct
  source 1..75: mol_type = other DNA
atccattcgatcaaccgggaacttaactttttctaccgctttttaacgcgttttttcgctgctttccactaccgg

SEQ ID NO: 395636 - DNA, 75 bp, synthetic construct
  source 1..75: mol_type = other DNA
tgttgaacatactggtcaggccaagggggctaatggacagtttatatcgagccctgacttcaccactaaaggtaa

SEQ ID NO: 395637 - DNA, 75 bp, synthetic construct
  source 1..75: mol_type = other DNA
tcacgacctgccggtgaagatgcgcggccccggcggtcagtcagtgcggttacagtggcagcagcaccataaact

SEQ ID NO: 395638 - DNA, 75 bp, synthetic construct
  source 1..75: mol_type = other DNA
atgattcctcttcacgcacgctggctgccagctcttcgcccgcaagttgcagttgatacatctgccagtagcgtc

SEQ ID NO: 395639 - DNA, 75 bp, synthetic construct
  source 1..75: mol_type = other DNA
ccagcatatgcacatttgcaatcgacactggacgcggtgcaagtaatgcctgatgaggaaaaccgatttaatgcc

SEQ ID NO: 395640 - DNA, 75 bp, synthetic construct
  source 1..75: mol_type = other DNA
cgacggcgccagtgatacggcagttaacccatatcacgcacagtacatcctgcgccgccgtgacgattatctgga

SEQ ID NO: 395641 - DNA, 75 bp, synthetic construct
  source 1..75: mol_type = other DNA
gtcagtgcggttacagtggcagcagcaccataaactgagtggccttgagcgggcaggaaccggcgcggaaggatt

SEQ ID NO: 395642 - DNA, 75 bp, synthetic construct
  source 1..75: mol_type = other DNA
gatgaattccatcacctgctggcccgccactcccctgccggacgggtggagaaatttgaatacaacgccgtacac

SEQ ID NO: 395643 - DNA, 75 bp, synthetic construct
  source 1..75: mol_type = other DNA
gcggaagccacatggggcggactgctcccctcactggtgcgggagtaccgttacgacagcgcgggcaatgtgtcg

SEQ ID NO: 395644 - DNA, 75 bp, synthetic construct
  source 1..75: mol_type = other DNA
ttcaacttatttatctcaaatggtaaatgctggtcaaggtaatgtaatctgggctgcatgcaccgaattttttta

SEQ ID NO: 395645 - DNA, 75 bp, synthetic construct
  source 1..75: mol_type = other DNA
caccataaactgagcggccttgagcgcactggcaccggcgcggaaggattccgctacgaccgtcacggcaacctg

SEQ ID NO: 395646 - DNA, 75 bp, synthetic construct
  source 1..75: mol_type = other DNA
gtgctggaaccggcgcggaaggatttcgctatgaccgccacggcaacctgctggcgtacacggacggtaacggtg

SEQ ID NO: 395647 - DNA, 75 bp, synthetic construct
  source 1..75: mol_type = other DNA
tttcgaacaagctagcagcagtgtctgtgcgtgacttgcttttagttgaggccgtcgcaatgaaacgtagttttc

SEQ ID NO: 395648 - DNA, 75 bp, synthetic construct
  source 1..75: mol_type = other DNA
ccaaattttctcttagatgaaaaaaacaagtttcttgagcctgctggtgcagtcaatgtactaactgtaggttcg

SEQ ID NO: 395649 - DNA, 75 bp, synthetic construct
  source 1..75: mol_type = other DNA
tggggacatgggacttcagttgcaggaatagccgcatttggtgattttcggcatcaacttagcaccagtgaccat

SEQ ID NO: 395650 - DNA, 75 bp, synthetic construct
  source 1..75: mol_type = other DNA
gatgaaggaaaaagcgacaaaagctataatgcgtcgccagacgtcaaaaactgcacaaagaatatttgtaataat

SEQ ID NO: 395651 - DNA, 75 bp, synthetic construct
  source 1..75: mol_type = other DNA
cggtagttgagcagtacaaacgcatgcaaagccaggaatcaagcgcgaagcgttctgatgagcagcgcaagatga

SEQ ID NO: 395652 - DNA, 75 bp, synthetic construct
  source 1..75: mol_type = other DNA
cgcaattgccgaccgctttggtgcctaccggtatgctgatgcgcgccgccggattcgccacaatgggtatcgccc

SEQ ID NO: 395653 - DNA, 75 bp, synthetic construct
  source 1..75: mol_type = other DNA
tccatgctatggaagaacgtcgattttgaaaacaggattatcaccatcgacgccagtgtgatgaagggacgcaaa

SEQ ID NO: 395654 - DNA, 75 bp, synthetic construct
  source 1..75: mol_type = other DNA
ggaatccgggctgtgctataaccggttccggtattacgagccggaaaccgggatgtacctggtgagtgacccgct

SEQ ID NO: 395655 - DNA, 75 bp, synthetic construct
  source 1..75: mol_type = other DNA
atggtgggcgggcgtggcgaaatcaaaaaagatgtggatttcccggaagccggtgaggacacggcgctctgcgac

SEQ ID NO: 395656 - DNA, 75 bp, synthetic construct
  source 1..75: mol_type = other DNA
ttgttaagatgccacagcaattcgaaagacggaaaaagcctggatttggttccgcacctaaccgaaataatcagc

SEQ ID NO: 395657 - DNA, 75 bp, synthetic construct
  source 1..75: mol_type = other DNA
gcgcggtatttacaaccatgctcagtatctcgataagcgcagagaaatgatgcagtggtgggcggattggcttga

SEQ ID NO: 395658 - DNA, 75 bp, synthetic construct
  source 1..75: mol_type = other DNA
gtcacggattcaggcatgaattcagcacgattatgaacgagcacgaatggcctgctgacgctattgaagtgcaac

SEQ ID NO: 395659 - DNA, 75 bp, synthetic construct
  source 1..75: mol_type = other DNA
cagttcgtttaacaatgccgctaaattactcaatattacgcaacctgcattaacgggtgatgctgccaacttact

SEQ ID NO: 395660 - DNA, 75 bp, synthetic construct
  source 1..75: mol_type = other DNA
atgaaatttctctcttaacaaaatcattaagaccattaccagacaagttccatggtttgcttgaccaagaactca

SEQ ID NO: 395661 - DNA, 75 bp, synthetic construct
  source 1..75: mol_type = other DNA
atgtaaaaggtttatggaataccaagaaacacagagcgttctacaaccgaatgaaagatgctttatctgaacgat

SEQ ID NO: 395662 - DNA, 75 bp, synthetic construct
  source 1..75: mol_type = other DNA
tttccgctctatggcctgcagtgccttgatcgagtccggtttatggtcaaaagatgctgttgaacgtcagatgag

SEQ ID NO: 395663 - DNA, 75 bp, synthetic construct
  source 1..75: mol_type = other DNA
tgacagaagtcattaacccgcagggtgagtcatatctttatgttctggataactgcggccgggtgacggaagagc

SEQ ID NO: 395664 - DNA, 75 bp, synthetic construct
  source 1..75: mol_type = other DNA
gatgataactcttgtcaccttctccgccatcagcctggtgtgcggtttcgtctattcaaagttcattgtctttag

SEQ ID NO: 395665 - DNA, 75 bp, synthetic construct
  source 1..75: mol_type = other DNA
ttcgcgaatgcaaaattcacattcaaagcatcaactacaacgatgcgctacatgttatatgtcgggttcatggga

SEQ ID NO: 395666 - DNA, 75 bp, synthetic construct
  source 1..75: mol_type = other DNA
ccgcgctgccatgctgcattgtgccgaacctgcaagtaagcatgaagagttgccgcttgattatctccaaggtca

SEQ ID NO: 395667 - DNA, 75 bp, synthetic construct
  source 1..75: mol_type = other DNA
cggcaacgctattcgttacgacggtaaaaaatggtttctcaatccggtaacaaatgccattcacgtatatcaaat

SEQ ID NO: 395668 - DNA, 75 bp, synthetic construct
  source 1..75: mol_type = other DNA
acaccgcttacttaaacacgttcgcttgtcatcttcatgaggtactaccgcaggccatctataacacatggtgcg

SEQ ID NO: 395669 - DNA, 75 bp, synthetic construct
  source 1..75: mol_type = other DNA
gaccacagtcgagtaatacacctttaaccttacctgctactgcttcagattatccaacggtggttgctcaggcac

SEQ ID NO: 395670 - DNA, 75 bp, synthetic construct
  source 1..75: mol_type = other DNA
ttagccaaataaaaaaacatttagagttcaaaaacgacctcagttttctttttgcacactcttttttgcaaaatc

SEQ ID NO: 395671 - DNA, 75 bp, synthetic construct
  source 1..75: mol_type = other DNA
tcaaccaaataaaaagtcgtttagaatttaaaaatgatcttggctttttatttgcacactcttttttgcagaagc

SEQ ID NO: 395672 - DNA, 75 bp, synthetic construct
  source 1..75: mol_type = other DNA
tgaggcaggacgtgaagtgctccggcacagtaaccggggttttgcctgtgaacagggctggaatgcagccggtca

SEQ ID NO: 395673 - DNA, 75 bp, synthetic construct
  source 1..75: mol_type = other DNA
ttgattctctggcgacgttagggttgccggggcgcggttacggcatccgctatgactacggtatgttcaagcaga

SEQ ID NO: 395674 - DNA, 75 bp, synthetic construct
  source 1..75: mol_type = other DNA
ctgaacttcgccttcgacggtgacagtgatacggcggttaacccgtatcacgcccagtacattctgcgccgccgc

SEQ ID NO: 395675 - DNA, 75 bp, synthetic construct
  source 1..75: mol_type = other DNA
tgagtggcattgaacgtgctggaaccggcgcggaagggttcagctacgaccgccacggcaacctgctggcctgga

SEQ ID NO: 395676 - DNA, 75 bp, synthetic construct
  source 1..75: mol_type = other DNA
cttttctgacaggaaccattttactgagtggagctgctttatttttccttgcgccggattacgttacaacaaagc

SEQ ID NO: 395677 - DNA, 75 bp, synthetic construct
  source 1..75: mol_type = other DNA
tggtggtcgcattcagcaggaaggtaaaaaacgcgctggattgaaaccgaagagattctgggagtcgcttacgat

SEQ ID NO: 395678 - DNA, 75 bp, synthetic construct
  source 1..75: mol_type = other DNA
aaaaaaacgcgctggattgaaaccgaagagattctgggagtcgcttacgatcagataatccctggttacgatacc

SEQ ID NO: 395679 - DNA, 75 bp, synthetic construct
  source 1..75: mol_type = other DNA
gcaaacctaattagtttttttgtagctgtaacctttagcttttttatcaatgccaaatttacattcaaaagtgaa

SEQ ID NO: 395680 - DNA, 75 bp, synthetic construct
  source 1..75: mol_type = other DNA
tttcactacaggtaagatagctgattatctttctattcctggaattgcaacattaatattcttctcaggaataag

SEQ ID NO: 395681 - DNA, 75 bp, synthetic construct
  source 1..75: mol_type = other DNA
ggcacacagccccaatgaccggatgtacatgctgggcgggatgagcgacaccgccagcaaccgcatcacgtttga

SEQ ID NO: 395682 - DNA, 75 bp, synthetic construct
  source 1..75: mol_type = other DNA
atggatcgcgtcagcgccggcgcatcgcttctgtttcccgccggtccggtattaatggagtttgccaccatggtg

SEQ ID NO: 395683 - DNA, 75 bp, synthetic construct
  source 1..75: mol_type = other DNA
aggcaccggataagtgaagagactgaccagtatgccggaggccaccggctgaaacaggccggaaacacgcagtat

SEQ ID NO: 395684 - DNA, 75 bp, synthetic construct
  source 1..75: mol_type = other DNA
atgacgaacgcgggcgggtgaatgtcaccactcagggccgacgggccattgaataccactaccccgatgaacaca

SEQ ID NO: 395685 - DNA, 75 bp, synthetic construct
  source 1..75: mol_type = other DNA
atcagatacacgcacaataaaaattacccaagacggtcgtaaagagccgctggaaatcaagctcaataaagatca

SEQ ID NO: 395686 - DNA, 75 bp, synthetic construct
  source 1..75: mol_type = other DNA
atgtggaatattgtggtgctgatgaatatttatatcccggattggtggagaaaaagctttttccatgcacttttt

SEQ ID NO: 395687 - DNA, 75 bp, synthetic construct
  source 1..75: mol_type = other DNA
agacgtatgccttatgcccacggcgtcagtacgttaccgccgtgggatgaaagccgcgttgagaaccctgacgaa

SEQ ID NO: 395688 - DNA, 75 bp, synthetic construct
  source 1..75: mol_type = other DNA
cgcgtctaccgatgcgccaaccagcgcgctgtccgttatctataccgaagccggtgagtttgaagagtatctgat

SEQ ID NO: 395689 - DNA, 75 bp, synthetic construct
  source 1..75: mol_type = other DNA
aaggagcacgtaatattggagaaataaaagcaagtgtggaggggcaaattaccccaaatcttagcctttggggta

SEQ ID NO: 395690 - DNA, 75 bp, synthetic construct
  source 1..75: mol_type = other DNA
atataaaaagtaataaatgcagcaccaataattcaacagctacggtgctatctaatcgtgaagtgactatattac

SEQ ID NO: 395691 - DNA, 75 bp, synthetic construct
  source 1..75: mol_type = other DNA
agaatggcgaatatacctacatcatcaacaccacttcaggtcgtcgcgcgattgaagactcccgcgtgatccgtc

SEQ ID NO: 395692 - DNA, 75 bp, synthetic construct
  source 1..75: mol_type = other DNA
ccatatggccctgaccaacgcagtccgcgatgacttcaccagaagcatgttaaaggccgtaaatagcatgatgct

SEQ ID NO: 395693 - DNA, 75 bp, synthetic construct
  source 1..75: mol_type = other DNA
gatggttgcgagggtggcagttattactatctggtggatatgaaggagaaaactgtccagccgctgatgaatgcg

SEQ ID NO: 395694 - DNA, 75 bp, synthetic construct
  source 1..75: mol_type = other DNA
ctacgaatcgctgctggggcgtgccagcatgatactggggtatgacatcaccgcaggcaacagccagctgaatgt

SEQ ID NO: 395695 - DNA, 75 bp, synthetic construct
  source 1..75: mol_type = other DNA
ttcaaacatgctggttattgatcggtgcatcgcgcaaagaaacgccgaaaccgcgcaggcgggcattttcaggtc

SEQ ID NO: 395696 - DNA, 75 bp, synthetic construct
  source 1..75: mol_type = other DNA
gcttcgagctggatgcgacccacggcacggcgattgtgctgggcgaagcgggtatcaatccgcgtctggtaaaca

SEQ ID NO: 395697 - DNA, 75 bp, synthetic construct
  source 1..75: mol_type = other DNA
gcaaaagcgacctgtgcagaaggtgaaaccatccacaatatgccgttcccggtaacgcctgaaagcgtacatgcc

SEQ ID NO: 395698 - DNA, 75 bp, synthetic construct
  source 1..75: mol_type = other DNA
gacccgggcgaggtcgttgccggaaaggtccctctgttcactggcaccgactggaaacaggaagaagatcatcgg

SEQ ID NO: 395699 - DNA, 75 bp, synthetic construct
  source 1..75: mol_type = other DNA
ctcgtgtatattgttgtctggatatttgcgacatcgataactattaagttaatgatcacatatgatgaactaata

SEQ ID NO: 395700 - DNA, 75 bp, synthetic construct
  source 1..75: mol_type = other DNA
atgctgacgcaaatcggctatgtgccgaacgtggcgcaggctgaccacaccattgaagggttgcgccagctgatc

SEQ ID NO: 395701 - DNA, 75 bp, synthetic construct
  source 1..75: mol_type = other DNA
tagttatgtttatccctccagaaaatattcattcagaaagttggatgaccattcctattgcgtataagttgaaag

SEQ ID NO: 395702 - DNA, 75 bp, synthetic construct
  source 1..75: mol_type = other DNA
gttgtaaatccaggagataaagtctggttggttcagtcatgggtagaggataataatcaaaaatactctatagta

SEQ ID NO: 395703 - DNA, 75 bp, synthetic construct
  source 1..75: mol_type = other DNA
tgaattaccttacgttcggctaatggattctgcccatcaacatatgcataactgttcgggaattaatgctggcta

SEQ ID NO: 395704 - DNA, 75 bp, synthetic construct
  source 1..75: mol_type = other DNA
attctgaataatgcagttatctcaatcgtacttgatgatcctgctaaatcaaatattacatggaaagcatccctg

SEQ ID NO: 395705 - DNA, 75 bp, synthetic construct
  source 1..75: mol_type = other DNA
tggaaaccagatcgcggaaaataaaaaaacctgctggtgaggcaggttcttttatttactactttgacgataact

SEQ ID NO: 395706 - DNA, 75 bp, synthetic construct
  source 1..75: mol_type = other DNA
ccagaaagattcctcggtatcgttaagtacccaaacattgagcgcggattcccattcaaccgccacactgacttt

SEQ ID NO: 395707 - DNA, 75 bp, synthetic construct
  source 1..75: mol_type = other DNA
gatggctatcgtgttcgcacttacaaaaatcgacgtgaaggagaagttcttttcgagatcttttccagctacaga

SEQ ID NO: 395708 - DNA, 75 bp, synthetic construct
  source 1..75: mol_type = other DNA
gtactgtggctcggtcgcgacagttttgtgcgtttctcgccgtcagtttcgctgcgccgtatggcggatgaacac

SEQ ID NO: 395709 - DNA, 75 bp, synthetic construct
  source 1..75: mol_type = other DNA
atttcccagaatagttggtatatagctaaacttttcggtaatgattatgtcgaaaactataacgaccaaggcggg

SEQ ID NO: 395710 - DNA, 75 bp, synthetic construct
  source 1..75: mol_type = other DNA
gcagaccgcgatttactccgccggtgagcatctggaactctgctgtggtaaggcaaggctggtgctgactaagga

SEQ ID NO: 395711 - DNA, 75 bp, synthetic construct
  source 1..75: mol_type = other DNA
gcatcaggaggtaacggatggaacacctgcccgtcctctgtcagcggtaaatgagggtttggcaacacgtgggag

SEQ ID NO: 395712 - DNA, 75 bp, synthetic construct
  source 1..75: mol_type = other DNA
tacagctatatgattcgcctgatccgcaaaggcccgctggaagatgattccgcgccgccgccgggcacacccgcc

SEQ ID NO: 395713 - DNA, 75 bp, synthetic construct
  source 1..75: mol_type = other DNA
agacgtcacaaaatgcaaaatatagtgaaacagacaagaaaaaaagtcaccttaaccaggaaatcaaaaagctaa

SEQ ID NO: 395714 - DNA, 75 bp, synthetic construct
  source 1..75: mol_type = other DNA
agcggaagattatcccgctatgtccgtttgcgaaacacgagttcgataaaacgcgcgagtatgatgatattcgta

SEQ ID NO: 395715 - DNA, 75 bp, synthetic construct
  source 1..75: mol_type = other DNA
gcgatgatccgtgaagcgctgctgatggccacacacgcgacgtaccgggaagggcggcagatgctgccggaagat

SEQ ID NO: 395716 - DNA, 75 bp, synthetic construct
  source 1..75: mol_type = other DNA
acggtaaatggggtccgcaattacacatcatcactattctggtgatttgtatgctgattgcctccattctggagt

SEQ ID NO: 395717 - DNA, 75 bp, synthetic construct
  source 1..75: mol_type = other DNA
gacaatgacaacactggcacatgaaattaatcaaccacttaatgcattatctatgtatcttttcagcgccaaccg

SEQ ID NO: 395718 - DNA, 75 bp, synthetic construct
  source 1..75: mol_type = other DNA
tggtgcggtggcttaaccacgctggtggaaattgccgcaatcgccaaatccagggggcaactggtggtgccacac

SEQ ID NO: 395719 - DNA, 75 bp, synthetic construct
  source 1..75: mol_type = other DNA
tattctttgactttttcataaagagaaaagtactaaaaggaacagtggttattgcattagctatgtgttttcata

SEQ ID NO: 395720 - DNA, 75 bp, synthetic construct
  source 1..75: mol_type = other DNA
tcaaaaagcttattaaaaataatattttccctgagctatataatgaacaatgcaataaaatcccctcctcatcga

SEQ ID NO: 395721 - DNA, 75 bp, synthetic construct
  source 1..75: mol_type = other DNA
atgggtatggcggactggtcgattctggcaccgccgatgatgcagggcttcttctccatcggtatcgcctttatg

SEQ ID NO: 395722 - DNA, 75 bp, synthetic construct
  source 1..75: mol_type = other DNA
agaagcatataaagctgtagcagaaacaaagtttggacataaaataacagaagaattagagtcatcagagcatga

SEQ ID NO: 395723 - DNA, 75 bp, synthetic construct
  source 1..75: mol_type = other DNA
ttcaggtggtgagtgagttgttttcacattataaaaatacaataaaaaaagaaaataatcaggtaaagaatgata

SEQ ID NO: 395724 - DNA, 75 bp, synthetic construct
  source 1..75: mol_type = other DNA
caaatatatttactggtttgctgggatgattaatattattagtatctgctttggcattatccttttatataataa

SEQ ID NO: 395725 - DNA, 75 bp, synthetic construct
  source 1..75: mol_type = other DNA
agcaggggttgtgacatctgaagcagccagccaatgtgggcttctcgccggaacgcctgtttttggtggtgtttt

SEQ ID NO: 395726 - DNA, 75 bp, synthetic construct
  source 1..75: mol_type = other DNA
accctgtagcactattgcattggttgaaaaaacatgagactgacaattatggccgcatcggaaccattttgatgg

SEQ ID NO: 395727 - DNA, 75 bp, synthetic construct
  source 1..75: mol_type = other DNA
gatttagtggtgcagttatagccagggaattggctgaacatggtcactcagtagatatctttgagaaaagagacc

SEQ ID NO: 395728 - DNA, 75 bp, synthetic construct
  source 1..75: mol_type = other DNA
aagaacaagctttaaaatttgttggtgaagatttatacaaaacattcttttatggctatcctaaaaaacagtggg

SEQ ID NO: 395729 - DNA, 75 bp, synthetic construct
  source 1..75: mol_type = other DNA
atttccattgttctgtttattcagtggttatcacttttatcgagaaaggtttgcagaacgcggattttttataag

SEQ ID NO: 395730 - DNA, 75 bp, synthetic construct
  source 1..75: mol_type = other DNA
cagaagagtactttagcttagatcctgaagtactcaatatgctaatgatttacgatgcttttattgaaccatccg

SEQ ID NO: 395731 - DNA, 75 bp, synthetic construct
  source 1..75: mol_type = other DNA
caaacggcgtctggtggctggataaccgcccgcataaagtggtggtggttgaccgcctgcgcaaagcgccgccgc

SEQ ID NO: 395732 - DNA, 75 bp, synthetic construct
  source 1..75: mol_type = other DNA
cgcgccgcctgctgaggacaaaaaagccttctggcagcagcttgacctgccggaaactgaaccgctgccggtcct

SEQ ID NO: 395733 - DNA, 75 bp, synthetic construct
  source 1..75: mol_type = other DNA
cgaatctttgcatccacgtattcatttatccagccccgagtcttgagcggttaacccaattagttgatgagaagg

SEQ ID NO: 395734 - DNA, 75 bp, synthetic construct
  source 1..75: mol_type = other DNA
ttctcggcgctattgccgcttttggcgcgttcggattccttggactgttgttcggtatgaaagatcccgtacgca

SEQ ID NO: 395735 - DNA, 75 bp, synthetic construct
  source 1..75: mol_type = other DNA
ctctggtatcgcgctaggttcggtactgggcggtcttaccatcacacacgccggtattgtgtataccggtataag

SEQ ID NO: 395736 - DNA, 75 bp, synthetic construct
  source 1..75: mol_type = other DNA
gtttttgtttgcgaattcagtcaatgcgcatggtatttataccccgccaagacccggtgaatatcctgcacggcc

SEQ ID NO: 395737 - DNA, 75 bp, synthetic construct
  source 1..75: mol_type = other DNA
actttcagatttatgacgccagcctttgaaatcgcagatccacggcgcgaacgtaaaacaaaaatgccagcgccc

SEQ ID NO: 395738 - DNA, 75 bp, synthetic construct
  source 1..75: mol_type = other DNA
ctgaaacaggttgattcagatatttcagcgcatgtgtctgagcatttctccgatatcgctgcactactgacgtct

SEQ ID NO: 395739 - DNA, 75 bp, synthetic construct
  source 1..75: mol_type = other DNA
ttgttacaggtaggtcattaaatccacgaggcgatctgacaaatcttaaaactcagacccaacttgattctgttc

SEQ ID NO: 395740 - DNA, 75 bp, synthetic construct
  source 1..75: mol_type = other DNA
caacgccattacatgaagcattatttcagaagttaaataatgatgcagaacgtaatgagttaagcacaatgacag

SEQ ID NO: 395741 - DNA, 75 bp, synthetic construct
  source 1..75: mol_type = other DNA
tacagatgagtattctttttatgcagaagcccatcttccaaaaattaaaaatattgttgataacaaaactggtga

SEQ ID NO: 395742 - DNA, 75 bp, synthetic construct
  source 1..75: mol_type = other DNA
ttggtcgactggggaccatttcataactatgcagcaccacgatacaacctgcttgccatgaccggtaacaacgcc

SEQ ID NO: 395743 - DNA, 75 bp, synthetic construct
  source 1..75: mol_type = other DNA
gcgccggtagcaagcggctacatattaggtaactgcaagcaggcgttgattcacaaccgcaggctgcacgatgtt

SEQ ID NO: 395744 - DNA, 75 bp, synthetic construct
  source 1..75: mol_type = other DNA
gggggtgttcggtcccggctggaaagcgcccttcgatatccgcttacagatacgcgatgaaggcctgatactcaa

SEQ ID NO: 395745 - DNA, 75 bp, synthetic construct
  source 1..75: mol_type = other DNA
cgggatttgcgcatggcgacgctgaaagtgcaggaggcacgggcgcaatatcgtctgaccgatgccgaccgctac

SEQ ID NO: 395746 - DNA, 75 bp, synthetic construct
  source 1..75: mol_type = other DNA
atagagctttattgcctaagctaagtcattcaaaagatattataacaaaaaaaagaatatatttagactcgctaa

SEQ ID NO: 395747 - DNA, 75 bp, synthetic construct
  source 1..75: mol_type = other DNA
cgataaccagctgcaggtcgcggaatgcaatccaggctcgggggttacgtttctgccactgtcgcgatttatccg

SEQ ID NO: 395748 - DNA, 75 bp, synthetic construct
  source 1..75: mol_type = other DNA
gctttgctttacaacggacaaggatcctgatgttcctggtgatacgggtaggcattgcgtggtaaagagaggttt

SEQ ID NO: 395749 - DNA, 75 bp, synthetic construct
  source 1..75: mol_type = other DNA
gtgaaaacaccgtaaataaagccctgagggttatggggtatgacacaacccaggatgctgtggtcatggattccg

SEQ ID NO: 395750 - DNA, 75 bp, synthetic construct
  source 1..75: mol_type = other DNA
ccgtcgcgccgggtccatactggactgtactgcagtgctgtggtggtcaaccgcaggaaaaggtggagaaatttg

SEQ ID NO: 395751 - DNA, 75 bp, synthetic construct
  source 1..75: mol_type = other DNA
tgaaaatctaggtttattagatttgccgaaatgtaatgagctatataataaatgctccgtaggactctgtattag

SEQ ID NO: 395752 - DNA, 75 bp, synthetic construct
  source 1..75: mol_type = other DNA
gagaaggtgatattgtaaactttcaagatattttaaacagatacaaaaaacatccagctctcagaaaaagagtag

SEQ ID NO: 395753 - DNA, 75 bp, synthetic construct
  source 1..75: mol_type = other DNA
aggtttctatagcaaagccaaaatattctctcgaaaccagattagctgtcgttaatccttatcttgccggacacg

SEQ ID NO: 395754 - DNA, 75 bp, synthetic construct
  source 1..75: mol_type = other DNA
tagttcctgcaggccaaatgagaagtggctgaccgatattacggagttccagcttcctgctggaaaagtctatct

SEQ ID NO: 395755 - DNA, 75 bp, synthetic construct
  source 1..75: mol_type = other DNA
taattcaagtaaaaaaatagactcaacaacatggtacacaactaataaagatttgggtttgcgatttagctggac

SEQ ID NO: 395756 - DNA, 75 bp, synthetic construct
  source 1..75: mol_type = other DNA
atttgatagcagtcaacataataaggggaataaaaataatagtacaggatataatgaacagagtgaagaagaatg

SEQ ID NO: 395757 - DNA, 75 bp, synthetic construct
  source 1..75: mol_type = other DNA
tcgtgggataaaatgcttaatactgaatacaaacaattaatgtcagattcagaatcaagtaaagagttcaaggat

SEQ ID NO: 395758 - DNA, 75 bp, synthetic construct
  source 1..75: mol_type = other DNA
atgaagagatcgataccgtttcgtcctacattgctcgcgatcgtccttgccacaacaatgccggttgcgcacgcc

SEQ ID NO: 395759 - DNA, 75 bp, synthetic construct
  source 1..75: mol_type = other DNA
acacgacaaacaaaaaaagaaaaattagacgatcaaattccgttagaagagcctcatgttcttgaggaaagttta

SEQ ID NO: 395760 - DNA, 75 bp, synthetic construct
  source 1..75: mol_type = other DNA
ggtgcaatcatatagcaccattcttgaacaattagtagctgaattatatgaacacttagacttaccagagaaccg

SEQ ID NO: 395761 - DNA, 75 bp, synthetic construct
  source 1..75: mol_type = other DNA
ggtatatttttaaggcatataaagaaaatatctcctcagcaaggcccttaccatagagtaatccatacagatatt

SEQ ID NO: 395762 - DNA, 75 bp, synthetic construct
  source 1..75: mol_type = other DNA
gtggaatggtcatatcgcggatcgtgggttatcggcgaagcggtcgacgctatcccggatgatatgacccgcaaa

SEQ ID NO: 395763 - DNA, 75 bp, synthetic construct
  source 1..75: mol_type = other DNA
gtggaatggtcctatcgttcgtcctggatcatcggcgaagcggtcgacgctatcccggacgatatgacccggaaa

SEQ ID NO: 395764 - DNA, 75 bp, synthetic construct
  source 1..75: mol_type = other DNA
aacagattagtggcgctgttggtatcccactggtgcggttgttcggacagtccccgaagggattttctaccggcg

SEQ ID NO: 395765 - DNA, 75 bp, synthetic construct
  source 1..75: mol_type = other DNA
atgagactatcaaagcagcaacgccaaatcatgggctatctggaagaaaacgaatcaatcacagcacgccaggcg

SEQ ID NO: 395766 - DNA, 75 bp, synthetic construct
  source 1..75: mol_type = other DNA
acaacacgttcaccaaagcctacttgcagcagcactgcggggacctgctgtcattcgatggtcagggtgacttga

SEQ ID NO: 395767 - DNA, 75 bp, synthetic construct
  source 1..75: mol_type = other DNA
atgcagaccttgccaactattacgaccgggtaagttcgttgcaggagaggcgtttacgtattccggtgcggcgga

SEQ ID NO: 395768 - DNA, 75 bp, synthetic construct
  source 1..75: mol_type = other DNA
atttagaagaaatgctatctgcgataaatttcaccattccatactctatcgcatctgtatcagatagttccaaca

SEQ ID NO: 395769 - DNA, 75 bp, synthetic construct
  source 1..75: mol_type = other DNA
gatttgactgtatccagggtgagcaaggtgaattagtttttgaaccagtgatgttgaatattactttgagccagt

SEQ ID NO: 395770 - DNA, 75 bp, synthetic construct
  source 1..75: mol_type = other DNA
atgaagtggcttttattaatcaccttgagtctatattcttttattgtgcaaagtgctccctgtgcattgaccaat

SEQ ID NO: 395771 - DNA, 75 bp, synthetic construct
  source 1..75: mol_type = other DNA
atggcacgaaacaaacaagccctgcggcgaactgcgcaggccacagctgatggttatgagaattttattgcccgc

SEQ ID NO: 395772 - DNA, 75 bp, synthetic construct
  source 1..75: mol_type = other DNA
tgatggaaaacccgacgacagcgatgcaatcttggacaggctggtacataacgcacacagactggtactgcaggg

SEQ ID NO: 395773 - DNA, 75 bp, synthetic construct
  source 1..75: mol_type = other DNA
tttattgaagtacctttgagcgtcgcctctaaagtattgctgttaaatgcttttttacagtcagaaatcactcag

SEQ ID NO: 395774 - DNA, 75 bp, synthetic construct
  source 1..75: mol_type = other DNA
gaatactggataatgccgcgttcaggtcgccgcaatcatgcacggtatatttcaggcaacaaatacagaacgcct

SEQ ID NO: 395775 - DNA, 75 bp, synthetic construct
  source 1..75: mol_type = other DNA
ggtggtgcatgtggcacttacgcgccggggtttctccgttctacggtttcgcaggtggtttgggtagcttctcca

SEQ ID NO: 395776 - DNA, 75 bp, synthetic construct
  source 1..75: mol_type = other DNA
tgctggaaattgactctgcatttaaattttatgacgaaagactttgggtgtttggcctgaccggaacggcgaaag

SEQ ID NO: 395777 - DNA, 75 bp, synthetic construct
  source 1..75: mol_type = other DNA
tgaagcggttgagtgaaacgaagaggcacaaaaatggcgttaggattcctgaaataactggtgactttggcgacc

SEQ ID NO: 395778 - DNA, 75 bp, synthetic construct
  source 1..75: mol_type = other DNA
cgtgctttaggcgcaagaaaaattctggaaaaatatggtatacacattgattccgcagaaaatggaatatttttg

SEQ ID NO: 395779 - DNA, 75 bp, synthetic construct
  source 1..75: mol_type = other DNA
gaccagctgaccgggtattgcagcgcacagggggagcagtgggaataccgccacgacgccagcggcaggcggacg

SEQ ID NO: 395780 - DNA, 75 bp, synthetic construct
  source 1..75: mol_type = other DNA
tcctctacagccgggacgccgcaggccgcctggcagaaatcatcacgccggaaggcaaaacgcagtatgcgtatg

SEQ ID NO: 395781 - DNA, 75 bp, synthetic construct
  source 1..75: mol_type = other DNA
tttttgccaaaatcgctttgccagtcaatgatcgataatcaacaactagttagccgggtaatcccaacgatgcgc

SEQ ID NO: 395782 - DNA, 75 bp, synthetic construct
  source 1..75: mol_type = other DNA
gcaagcgggcgaaagcccgtttttttcttgcctcattccacgccagacgaattaaaacaggcttacccttccaag

SEQ ID NO: 395783 - DNA, 75 bp, synthetic construct
  source 1..75: mol_type = other DNA
tcttatgctgggcgatggttgcgttacttacaagcagttatggcacgccctgaacacgcttgtagaagatggctt

SEQ ID NO: 395784 - DNA, 75 bp, synthetic construct
  source 1..75: mol_type = other DNA
aggcattccgcgagtcggtattgcgcagttctaaggggttccagtaccttcacacccgcgacttcattaccgcgc

SEQ ID NO: 395785 - DNA, 75 bp, synthetic construct
  source 1..75: mol_type = other DNA
cagagatttttaccgcgattaatggaaacaaatacagattagtttctctgggtaatcagaaatacacgctgaagg

SEQ ID NO: 395786 - DNA, 75 bp, synthetic construct
  source 1..75: mol_type = other DNA
tattttgttttgcaatttcaggtgtaataatttgcagtaatgcatcggcccaggagtcgcaggataagtccgaaa

SEQ ID NO: 395787 - DNA, 75 bp, synthetic construct
  source 1..75: mol_type = other DNA
ggagtccggcctgtattacaaccgccaccgctattatgacccgctgcaggggaggtatatcactcaggatccgat

SEQ ID NO: 395788 - DNA, 75 bp, synthetic construct
  source 1..75: mol_type = other DNA
gggcaacctgctgaatgaagagaacccgcatcagctgcagcagcttatccgcctgccggggcagcagtatgatga

SEQ ID NO: 395789 - DNA, 75 bp, synthetic construct
  source 1..75: mol_type = other DNA
gggagattgttttggcaaggggaaggttttggccatgaattattccccgtgacaaacaaatataatgcatggaga

SEQ ID NO: 395790 - DNA, 75 bp, synthetic construct
  source 1..75: mol_type = other DNA
cttgcaccggcgaaaaccatctcgacgctcgcctgggctactggcgtggtaacggtcacgttggctgccgctcat

SEQ ID NO: 395791 - DNA, 75 bp, synthetic construct
  source 1..75: mol_type = other DNA
tcgcatcatttgtgaaaatgacccaaacgctcttagtgttatgaatctccagttgaaggggtattttcttaaagt

SEQ ID NO: 395792 - DNA, 75 bp, synthetic construct
  source 1..75: mol_type = other DNA
agaatgctactataatgctctgattagtgatatttctccgatcagtttattgtctgggcgcgaaatagatgattt

SEQ ID NO: 395793 - DNA, 75 bp, synthetic construct
  source 1..75: mol_type = other DNA
cggcgcgaaaaatccacctgtaccactgcgaccatcgcggcctgccgctggcgcttgtcagcacggaaggggcaa

SEQ ID NO: 395794 - DNA, 75 bp, synthetic construct
  source 1..75: mol_type = other DNA
ggtgcctgtagtgcagaaatggcaccggaagcggtactccacggattacgcccaattggtatggcttttgtaggg

SEQ ID NO: 395795 - DNA, 75 bp, synthetic construct
  source 1..75: mol_type = other DNA
agcctgatcccgataaaaaagattgaaaccaagatcgattcggttgagtgcatatccattcatagggtagattct

SEQ ID NO: 395796 - DNA, 75 bp, synthetic construct
  source 1..75: mol_type = other DNA
ggcttccggcaaggcgatcaacgacaaggtgcggatgtatgggcgcatcgagcgcacgctgttcattctggattg

SEQ ID NO: 395797 - DNA, 75 bp, synthetic construct
  source 1..75: mol_type = other DNA
aatcatcgaccttcacgaccgtatcatcggcaagctgttcaatgcggccaagaacaagcatcaacagcagttcca

SEQ ID NO: 395798 - DNA, 75 bp, synthetic construct
  source 1..75: mol_type = other DNA
ggactggcatcaaaatatggacacttaaataatggcggatatggagcgagacccaacaaaccgcctacgcccgat

SEQ ID NO: 395799 - DNA, 75 bp, synthetic construct
  source 1..75: mol_type = other DNA
tttcccagatgaatacttcgttctggtcccagggcaaaacgcgggctgtttatgtgctggaactgggcgatgtgt

SEQ ID NO: 395800 - DNA, 75 bp, synthetic construct
  source 1..75: mol_type = other DNA
ctgaatcgcgtaccgtctattccagtgacttcaaacttcggatggtcgaactggcttcacgaccagatgccaacg

SEQ ID NO: 395801 - DNA, 75 bp, synthetic construct
  source 1..75: mol_type = other DNA
cttttaaggcgctgggcaatagcaaaacttaaaggtgttcccaaaactatgctgcgaaaacaagctaaaatattt

SEQ ID NO: 395802 - DNA, 75 bp, synthetic construct
  source 1..75: mol_type = other DNA
cgaaactccggcaacagggagcgcaacacaatttagttgtgtgacaccagcatctcaagaggtcactatctccaa

SEQ ID NO: 395803 - DNA, 75 bp, synthetic construct
  source 1..75: mol_type = other DNA
ccatcatgatgatcgacttcgcgctggctgctgagcgcgagcaaggcatgtcgccgcgcgatgcaatctaccagg

SEQ ID NO: 395804 - DNA, 75 bp, synthetic construct
  source 1..75: mol_type = other DNA
ctgacagacatcacaaatccccgggtggggatttgtgtataagagacagcctgataggggggcgcatacattatg

SEQ ID NO: 395805 - DNA, 75 bp, synthetic construct
  source 1..75: mol_type = other DNA
ctctatcccgccagcagcctacactgcgtcaccccggtcacccgcggcgtgcgtcaggcctctttcctgtggatc

SEQ ID NO: 395806 - DNA, 75 bp, synthetic construct
  source 1..75: mol_type = other DNA
tctttctcagggagtttagtctccaggatttccggggcggttcatgctttaacaccaatggtttcggtgcgatgg

SEQ ID NO: 395807 - DNA, 75 bp, synthetic construct
  source 1..75: mol_type = other DNA
cgggcagcctggtttacttctttgtcaccacaacgatcgcgacctatcaggattgggtcgcgacgaaaaacaaaa

SEQ ID NO: 395808 - DNA, 75 bp, synthetic construct
  source 1..75: mol_type = other DNA
ggcggggtacaatggcgcctataccgctacggtgacaggtgccaacaccttcacctatccgctgacggccaaccc

SEQ ID NO: 395809 - DNA, 75 bp, synthetic construct
  source 1..75: mol_type = other DNA
tgcttgtaccggaaaacgcctcggataaaacgctcacggtgttttccacggatccgcagacagcaacggtaagcc

SEQ ID NO: 395810 - DNA, 75 bp, synthetic construct
  source 1..75: mol_type = other DNA
caaaggacaactacagaagatacaacagagattaagttctcttattgacaaaaataagttccattgttttcatat

SEQ ID NO: 395811 - DNA, 75 bp, synthetic construct
  source 1..75: mol_type = other DNA
aaaattaaaaggagtcaaagatatattatcgtcattggtagaccaaaaagctaatatttatagtgtaaggcaaga

SEQ ID NO: 395812 - DNA, 75 bp, synthetic construct
  source 1..75: mol_type = other DNA
gatagatcactacgcaaaagacgcagcaatagatatggtaagtcaggaagaacttaagaaaaaaaaggcaatgtg

SEQ ID NO: 395813 - DNA, 75 bp, synthetic construct
  source 1..75: mol_type = other DNA
taagtagcaaagatcagaatgaggcgcgtcaagttgaagtgctggcgacgaaggctgacgaaattttgatcgata

SEQ ID NO: 395814 - DNA, 75 bp, synthetic construct
  source 1..75: mol_type = other DNA
ggctgaccgggtgagtgaggaaagccgccgctggctggcatcgtgcggcctgaccgtggagcagatgcaaaacca

SEQ ID NO: 395815 - DNA, 75 bp, synthetic construct
  source 1..75: mol_type = other DNA
gtttatgatagtctaaatttttcaagcaaagatttaacgaattcttatatgaatggaatgggaaaaaaagaatac

SEQ ID NO: 395816 - DNA, 75 bp, synthetic construct
  source 1..75: mol_type = other DNA
atctctgccaccagttggtcgtataccggcatggcctccatctgctatatgactggtgaaatcaaaaaccccggc

SEQ ID NO: 395817 - DNA, 75 bp, synthetic construct
  source 1..75: mol_type = other DNA
gggcattaaagggtatctggctttttttctcaccataatctttttttccggtgtttttttccgggacagacagtt

SEQ ID NO: 395818 - DNA, 75 bp, synthetic construct
  source 1..75: mol_type = other DNA
atacagtgacagccgcatgttgcctccgactttagccagctttgcgcctatcattcatggcgttgccaataccaa

SEQ ID NO: 395819 - DNA, 75 bp, synthetic construct
  source 1..75: mol_type = other DNA
cctaaaaagaaaatcgtcaaaattagagattccggtttgacacggaaagtcatatcagcgctgggagcttaccac

SEQ ID NO: 395820 - DNA, 75 bp, synthetic construct
  source 1..75: mol_type = other DNA
atcaggcacaagcgaatcaccttgagattgttttgcatctcagggcagatctgttctggtttcgcggccattttg

SEQ ID NO: 395821 - DNA, 75 bp, synthetic construct
  source 1..75: mol_type = other DNA
gcgcacagtttgaaaatagttcattcaagaatgccactttattttcctgtgatgttgctggtacgaatatgtcgg

SEQ ID NO: 395822 - DNA, 75 bp, synthetic construct
  source 1..75: mol_type = other DNA
tatgtggcctgcttattagcgctcacgccagtgccgtgccgccgctgtatgcgcaaatcgcccgccagcaacagg

SEQ ID NO: 395823 - DNA, 75 bp, synthetic construct
  source 1..75: mol_type = other DNA
aagctgaccagcaacagcgccagtgctttcctgcgtcagtccaaacgattagccgccaactttgacggcatggac

SEQ ID NO: 395824 - DNA, 75 bp, synthetic construct
  source 1..75: mol_type = other DNA
catatcagcgttaaccgaatgccgcattgacgattctcccgatgacagcgttacgttccatattgcgatcgtgaa

SEQ ID NO: 395825 - DNA, 75 bp, synthetic construct
  source 1..75: mol_type = other DNA
tatctgcgccgtcatcgttattgccactggtctgcctgcttacgccttctgggcgaagcgtagccgccagctcaa

SEQ ID NO: 395826 - DNA, 75 bp, synthetic construct
  source 1..75: mol_type = other DNA
atgagtagtatcagcaagaatactctaggcttttaccacaacgtggatgagagggatgaaaaactcaaggcagag

SEQ ID NO: 395827 - DNA, 75 bp, synthetic construct
  source 1..75: mol_type = other DNA
cgcacgttcccgtatcgttgcagaagcgcgacaacgtggtgatcacgccacatatggccagcgcaacctgggaaa

SEQ ID NO: 395828 - DNA, 75 bp, synthetic construct
  source 1..75: mol_type = other DNA
gcaaccagaatggaagcgagcagcagcaaaaacaaatgaaagatgcatttgttaagctgattcacttttactgtt

SEQ ID NO: 395829 - DNA, 75 bp, synthetic construct
  source 1..75: mol_type = other DNA
gcgctggcctgcggcagaggattacgaacatggggtgcgctggtatatcaatttggttgatgctgtggatgtgag

SEQ ID NO: 395830 - DNA, 75 bp, synthetic construct
  source 1..75: mol_type = other DNA
ataataattttaaaatctatgtaagcgggcaagctcatggcagcgctcaagcgaatatatcaagcaatgatattc

SEQ ID NO: 395831 - DNA, 75 bp, synthetic construct
  source 1..75: mol_type = other DNA
tgcgcctggcgggtcataacaatattttccccacgctttcatggctaaacggcactgccacactccgcgtctggc

SEQ ID NO: 395832 - DNA, 75 bp, synthetic construct
  source 1..75: mol_type = other DNA
agagatcaatatgggcagcatgattaacttctacaacgccgaagttaaacgcctgaattccatccattccgacct

SEQ ID NO: 395833 - DNA, 75 bp, synthetic construct
  source 1..75: mol_type = other DNA
gtcaccaatgcaggctggctggatgccaacacgaccgacggcctgcgcaagtgtctggctgatgagttctccagc

SEQ ID NO: 395834 - DNA, 75 bp, synthetic construct
  source 1..75: mol_type = other DNA
gaatggagcgcacaatatggtgatatcgtaggaattacgacaaaaaaagatgccggtattgatttggtcgcagtg

SEQ ID NO: 395835 - DNA, 75 bp, synthetic construct
  source 1..75: mol_type = other DNA
ataaaaaaaccaatagcgatggttctaataatgtattttataaatatgacattagctacagaaatttgtatgtag

SEQ ID NO: 395836 - DNA, 75 bp, synthetic construct
  source 1..75: mol_type = other DNA
agccaggaacttcctctctcagtcacgttacatctgcagactcagcaatatggggggttacagcgccgttttgca

SEQ ID NO: 395837 - DNA, 75 bp, synthetic construct
  source 1..75: mol_type = other DNA
cgcagcgcatcagttggacacataacgtcaaacaggagctagcgaaggggcgggaactggcatttgatactggtt

SEQ ID NO: 395838 - DNA, 75 bp, synthetic construct
  source 1..75: mol_type = other DNA
attacacaggaaggcaggttattattaaacctgctggctatcagtatggtatcagatacgaggaacttctgatgt

SEQ ID NO: 395839 - DNA, 75 bp, synthetic construct
  source 1..75: mol_type = other DNA
cttaagtcagcaaatactctctggttactgcgctacaaacccgaagatatccccgtactgagggataacttcaac

SEQ ID NO: 395840 - DNA, 75 bp, synthetic construct
  source 1..75: mol_type = other DNA
ggcaggctggcggagaagacggaccgcatcccggaaggggtgatacggatgcacgacgagcggacccaccactac

SEQ ID NO: 395841 - DNA, 75 bp, synthetic construct
  source 1..75: mol_type = other DNA
gtgcgacgcaggaaaaactcggtaatgccatgcaaaaccgccagcgaccgacgaagaccggggaagccctgttag

SEQ ID NO: 395842 - DNA, 75 bp, synthetic construct
  source 1..75: mol_type = other DNA
cagtttctgactcaatccttttaggcgaactaatggattcatatgttagtgatataaaaatgaaatataaaacgg

SEQ ID NO: 395843 - DNA, 75 bp, synthetic construct
  source 1..75: mol_type = other DNA
tgtggtgatagttggcaattcacaatcgaacgcattgatgctgttggatgttatcagatagccaaaagttataat

SEQ ID NO: 395844 - DNA, 75 bp, synthetic construct
  source 1..75: mol_type = other DNA
cggcaccgggcaaactgacgcagtccgccatttgtatggctgatgaactgacccccagccagttcctcgaactgg

SEQ ID NO: 395845 - DNA, 75 bp, synthetic construct
  source 1..75: mol_type = other DNA
gatagcgacggtgctaccagcgcgattctggaagcgcaccgatccctggctggcgatacttccctgcacgaacat

SEQ ID NO: 395846 - DNA, 75 bp, synthetic construct
  source 1..75: mol_type = other DNA
gccaggagaagccgtagctcgttattatcagcaagaagcccgcgtacaggacgccctgcgtgagcaacagcgtgt

SEQ ID NO: 395847 - DNA, 75 bp, synthetic construct
  source 1..75: mol_type = other DNA
cattcagttgaccagtgaaaaacgagtattcaaaggtggtcgttatgtatgggagaaaaagagcaagagcaatct

SEQ ID NO: 395848 - DNA, 75 bp, synthetic construct
  source 1..75: mol_type = other DNA
tgctgttgtggtgccgatggatgcgggctggagcgatgttggttcctggtcttcattatgggagatcagcgccca

SEQ ID NO: 395849 - DNA, 75 bp, synthetic construct
  source 1..75: mol_type = other DNA
gggcgattaaagacacccttttacatgagccggaaaattttatttatcttaacaatggcattactctggttggca

SEQ ID NO: 395850 - DNA, 75 bp, synthetic construct
  source 1..75: mol_type = other DNA
gcgagcggatgccaggctcacaagagtgggtaatcgtgttcgctaaatgggataatcagcaggtcttgtgctggg

SEQ ID NO: 395851 - DNA, 75 bp, synthetic construct
  source 1..75: mol_type = other DNA
tgggctggaaattggcgctgacgactatgtggctaaccgttttcaccccgcgaagtgtgcgccagggtgcgcacc

SEQ ID NO: 395852 - DNA, 75 bp, synthetic construct
  source 1..75: mol_type = other DNA
gaaggttttgccgtcgaggtctttgagcgaggcttgccggtgctggataaagctcgccagcaggttcccgacgtc

SEQ ID NO: 395853 - DNA, 75 bp, synthetic construct
  source 1..75: mol_type = other DNA
gcgatgttattaaggttaattttggattcatcaatggtcagaagtttaccacccgcaatgccatgccagacggtt

SEQ ID NO: 395854 - DNA, 75 bp, synthetic construct
  source 1..75: mol_type = other DNA
ccagcttctgcagaacagcatggatgcgccgaaaatcatcggatcattcccttgtaaaaaagtggctgggcgatg

SEQ ID NO: 395855 - DNA, 75 bp, synthetic construct
  source 1..75: mol_type = other DNA
aaacgcgatttctgaatgtgcaactgctgcagaacagcatggatgcgccgaaaatcatcggttcctttccatgca

SEQ ID NO: 395856 - DNA, 75 bp, synthetic construct
  source 1..75: mol_type = other DNA
ccgttttcgtctggtatcgttaagtcatgagtcagtagggcagccaggcaccgccctgacgctcaacagccgttg

SEQ ID NO: 395857 - DNA, 75 bp, synthetic construct
  source 1..75: mol_type = other DNA
ctggtacgtgttgacgtggcgagtgaccgccagagcctggctcacagctgggtcaacagcgttatgctgatgctt

SEQ ID NO: 395858 - DNA, 75 bp, synthetic construct
  source 1..75: mol_type = other DNA
gcatcccgactatcgtccgccgctcaagtgggtttctatagatattgaaaccacccgccacggtgagctgtactg

SEQ ID NO: 395859 - DNA, 75 bp, synthetic construct
  source 1..75: mol_type = other DNA
taaaacaccagtcaaccctaaaaaaaatagaaggaaattttttctatataaaaccatctacctctcatccaggcc

SEQ ID NO: 395860 - DNA, 75 bp, synthetic construct
  source 1..75: mol_type = other DNA
agcttctggggaacgctgaaaaatgagagcctgagccactatcgttttaagagccgggatgaggccatctcagta

SEQ ID NO: 395861 - DNA, 75 bp, synthetic construct
  source 1..75: mol_type = other DNA
ttcactagtttattacgatttttgcatgaaaattgttggtgtaatttcaagtataacttctagcatatcagcttc

SEQ ID NO: 395862 - DNA, 75 bp, synthetic construct
  source 1..75: mol_type = other DNA
tatattaagtttcgtcaaatatatattatattttctgattcattttcgctctttgctacaaacattgtttcggtg

SEQ ID NO: 395863 - DNA, 75 bp, synthetic construct
  source 1..75: mol_type = other DNA
gaagtaagctagctcttggttcggagcggcttgaggctgtaagagtaatcttcttgtgcaggataatggctgatc

SEQ ID NO: 395864 - DNA, 75 bp, synthetic construct
  source 1..75: mol_type = other DNA
aatccggtacctggggcgctcctaaaattcaattcacaacgcagacctacaacatagctaaaaacactcgtaatt

SEQ ID NO: 395865 - DNA, 75 bp, synthetic construct
  source 1..75: mol_type = other DNA
agcggtatttatgtcgtatcagggctggaatgaccgaatcagtagggaaagtgagcaactggcgaactggctttt

SEQ ID NO: 395866 - DNA, 75 bp, synthetic construct
  source 1..75: mol_type = other DNA
gtgaatattatggctctgccaacacatccactgagcggcagagcgcctacccggtcatgcgtttggtggcgttaa

SEQ ID NO: 395867 - DNA, 75 bp, synthetic construct
  source 1..75: mol_type = other DNA
aaatgttacccctacaaatgaaatgggtatacttcaagaaaaagtaaagggtattgagagtctcacacagtatca

SEQ ID NO: 395868 - DNA, 75 bp, synthetic construct
  source 1..75: mol_type = other DNA
acagatacagatgaaagcgagttcagcccggcgcttgcggcaagagatggtcaactttacgaaccagaatctatc

SEQ ID NO: 395869 - DNA, 75 bp, synthetic construct
  source 1..75: mol_type = other DNA
ccccttcaccacaaccactgaagtttcccccgacagtgcagaaacctctctggaagaatgtgtcagggcacaggt

SEQ ID NO: 395870 - DNA, 75 bp, synthetic construct
  source 1..75: mol_type = other DNA
aacacgtcatcagcgacatcctcgactactcagccggagccggattcagagacatctgtgcagattccggcctaa

SEQ ID NO: 395871 - DNA, 75 bp, synthetic construct
  source 1..75: mol_type = other DNA
gacgtttttatcgttacgcatcccgaaagccttggattaactgttcttgaggcggcaatgtgtggagcgttgata

SEQ ID NO: 395872 - DNA, 75 bp, synthetic construct
  source 1..75: mol_type = other DNA
agtttccagaagctcattttttatttgttggacaaggggatgaggttagactaataaaaaatattgcaactgaac

SEQ ID NO: 395873 - DNA, 75 bp, synthetic construct
  source 1..75: mol_type = other DNA
gctcatgcgaccatttgtcgtcttaacctgagcgcggatggcgaagcggggattagcctgctggcccgcagcgct

SEQ ID NO: 395874 - DNA, 75 bp, synthetic construct
  source 1..75: mol_type = other DNA
tccccgtgagatttcccgcgaggccgcacgggagaccgttctcgcttttgtccgggaaaactttgtcagtcgggg

SEQ ID NO: 395875 - DNA, 75 bp, synthetic construct
  source 1..75: mol_type = other DNA
aaatcatttcgcgaaaaaacggctacagtgccgttgcttctgctgcctaccgttccggctctgtcatacccgatg

SEQ ID NO: 395876 - DNA, 75 bp, synthetic construct
  source 1..75: mol_type = other DNA
tggaaaatccaggaaagataccattagaagtaattgagattcagtcgggtgtatatctagggaaggtgcgaataa

SEQ ID NO: 395877 - DNA, 75 bp, synthetic construct
  source 1..75: mol_type = other DNA
gttgctttcattgaaagtgaagtagacgaatggattcaattaactatcgaaaattcaagaaagcatgttgcctga

SEQ ID NO: 395878 - DNA, 75 bp, synthetic construct
  source 1..75: mol_type = other DNA
aagtgcagaactgcaacaaaatgggcaagtgcaggacagcattagcacaaaactgtcttttgtggacaacagctg

SEQ ID NO: 395879 - DNA, 75 bp, synthetic construct
  source 1..75: mol_type = other DNA
ctattagtttctaatgagtctatatatatccctcagggagcaaaatatagtcttgagaatccaggcgtaatacct

SEQ ID NO: 395880 - DNA, 75 bp, synthetic construct
  source 1..75: mol_type = other DNA
atgaacaatcaaccaacccgcctcatacgcctaccagaagttctcgaacgaactggctacgggaaagcatggatc

SEQ ID NO: 395881 - DNA, 75 bp, synthetic construct
  source 1..75: mol_type = other DNA
ttccggcaccagtgaagatcggagttcgtgctgttgcttttgtcgagagtgaagttgacgagtggattcaatcag

SEQ ID NO: 395882 - DNA, 75 bp, synthetic construct
  source 1..75: mol_type = other DNA
tcgtgctgttgctttcattgaaagtgaagttgaagagtggattcaattggctattaaaaattcaagaaataatgt

SEQ ID NO: 395883 - DNA, 75 bp, synthetic construct
  source 1..75: mol_type = other DNA
aaccaggggaacgcctttcaacacagaagcattatcatcgtgcagaacattgggtggtagtatcaggtactgcaa

SEQ ID NO: 395884 - DNA, 75 bp, synthetic construct
  source 1..75: mol_type = other DNA
ttaatattgatggtgaagattttttattatctgaaaatgagtcaacattcatcaaaattggacagaaacattcga

SEQ ID NO: 395885 - DNA, 75 bp, synthetic construct
  source 1..75: mol_type = other DNA
tggaacgtacggcagatgccgttgtggtgccgatggatgcgggctggagcgatgtcggctcctggtcctctttat

SEQ ID NO: 395886 - DNA, 75 bp, synthetic construct
  source 1..75: mol_type = other DNA
ttattgccggaggaaccggaagccgtctatggccgttgtctcgagtcttataccctaaacaatttttaaatttag

SEQ ID NO: 395887 - DNA, 75 bp, synthetic construct
  source 1..75: mol_type = other DNA
gataacccaattgtaatttgcaatgagcagcatagatttatagttgctgagcaacttcgacaattaaataaactc

SEQ ID NO: 395888 - DNA, 75 bp, synthetic construct
  source 1..75: mol_type = other DNA
ctggtggtaccggtagtcgtttgtggcctttatcacgagttaagcatccaaagcaatttctccatttaggggatg

SEQ ID NO: 395889 - DNA, 75 bp, synthetic construct
  source 1..75: mol_type = other DNA
ggaaaaaatccgctcggtttaccgcgaaagcgacatcgtaccgggagagcagaccgccaccagcatactgaagca

SEQ ID NO: 395890 - DNA, 75 bp, synthetic construct
  source 1..75: mol_type = other DNA
cgacctccccttctactcagagatatgacagtattgtaggaagctggctatctgattactcttacaccgtaaaag

SEQ ID NO: 395891 - DNA, 75 bp, synthetic construct
  source 1..75: mol_type = other DNA
gatccagacccgccaactggcgcagcaaatgcgtcgtgaagtgcgggaactggtggatgtgctgctgagtacgcc

SEQ ID NO: 395892 - DNA, 75 bp, synthetic construct
  source 1..75: mol_type = other DNA
tgctgtttggtaacgacgagcgcaaactgaatggccattatgccgtttactacgtgctgtcgatggagaagggca

SEQ ID NO: 395893 - DNA, 75 bp, synthetic construct
  source 1..75: mol_type = other DNA
ctgattgcgcgcacaaagctgcattacagaagaacccgaaaaatgtgttgctggccggtgtgctggatgcaggga

SEQ ID NO: 395894 - DNA, 75 bp, synthetic construct
  source 1..75: mol_type = other DNA
tgggactgaatgcgctgacgctgacggatgttacaaaaaatgcagcgtatggcgttgagatagaaagtctgatgc

SEQ ID NO: 395895 - DNA, 75 bp, synthetic construct
  source 1..75: mol_type = other DNA
cagccttcatcagtggtaaggcaccggaaatcaaaccctcgcccggcggcaacacgccatcgggtccgtctgcag

SEQ ID NO: 395896 - DNA, 75 bp, synthetic construct
  source 1..75: mol_type = other DNA
atttcagttcatgggcgcgcaggcagcattattccggatcgtgtggcaaccgctattctgaacgcagccgggcgc

SEQ ID NO: 395897 - DNA, 75 bp, synthetic construct
  source 1..75: mol_type = other DNA
acaacaaacggagaagaataatccatttggtttgttctgtggggcgtcttcttctgttagtcaaaaagaagcaga

SEQ ID NO: 395898 - DNA, 75 bp, synthetic construct
  source 1..75: mol_type = other DNA
atgacatttaaacactacgatgttgtcagggcggcgtcgccgtcagaccttgctgatgcacttgcgcaaaaaatt

SEQ ID NO: 395899 - DNA, 75 bp, synthetic construct
  source 1..75: mol_type = other DNA
tgctgtttggtaacgacgaacgcaaactgaatggtcattacgccgtttactacgtgctgtcgatggagaagggca

SEQ ID NO: 395900 - DNA, 75 bp, synthetic construct
  source 1..75: mol_type = other DNA
ctggaggtggaacgcctgcactcgcatctgctcaacctcggcctcgcctgtcactttaccggcttcgactccggc

SEQ ID NO: 395901 - DNA, 75 bp, synthetic construct
  source 1..75: mol_type = other DNA
gtgtttaacgcgcagtgccatggtggcagtgctgcagatgtgccgtggatttgtggtgacacgacgtattactgg

SEQ ID NO: 395902 - DNA, 75 bp, synthetic construct
  source 1..75: mol_type = other DNA
tggggctgaatgcactgacgctgacggatattaccaaaaatgcaacgtatggcgttgagatagaaagtctggtgc

SEQ ID NO: 395903 - DNA, 75 bp, synthetic construct
  source 1..75: mol_type = other DNA
attaaggatggcggaattcagttgtcagatggtgtatttaagatcaccaagcagagcaataaaacctggtccctg

SEQ ID NO: 395904 - DNA, 75 bp, synthetic construct
  source 1..75: mol_type = other DNA
ggccgtctgaagatgcatccatacgcacaatctccctgttgccgacagccggagacgctgctgcgcagggctgga

SEQ ID NO: 395905 - DNA, 75 bp, synthetic construct
  source 1..75: mol_type = other DNA
ttacctgacgtcgtggcgatgaccgggactggtaacccgttcctgatgtcgttcttcacccagaccacagacggc

SEQ ID NO: 395906 - DNA, 75 bp, synthetic construct
  source 1..75: mol_type = other DNA
attaaacattatgatgttgtcagggcggcgtcgccgtcagaccttgcggaaaagctgacacacaaactgaaagag

SEQ ID NO: 395907 - DNA, 75 bp, synthetic construct
  source 1..75: mol_type = other DNA
aggggacattcagcgagtccacgggggccagtcaggattcggcacgctggggggggggggcaagccgttatatca

SEQ ID NO: 395908 - DNA, 75 bp, synthetic construct
  source 1..75: mol_type = other DNA
atgcgctgacgctgacggatgttacaaaaaatgcagcgtatggcgttgagatagaaagtctgatgctggagataa

SEQ ID NO: 395909 - DNA, 75 bp, synthetic construct
  source 1..75: mol_type = other DNA
gcttataaaggaaaggaagcacagaatattttctttgttccttttatgacaggtggcagtggtgaaaacacgccc

SEQ ID NO: 395910 - DNA, 75 bp, synthetic construct
  source 1..75: mol_type = other DNA
atgagtacgctgaatcatccgaaggcagacctgagcaaagggcagtacggctgtgtcggccaggggttacatatt

SEQ ID NO: 395911 - DNA, 75 bp, synthetic construct
  source 1..75: mol_type = other DNA
ctgagccggattggtactacgtcatcgtactggccgggcaatccaatgccatggcttacggtgaagggcttccgc

SEQ ID NO: 395912 - DNA, 75 bp, synthetic construct
  source 1..75: mol_type = other DNA
cgcagtacagtgacgccgggtggggctgcctgcagatataacgatattattccggctgaccactgcctgcatgat

SEQ ID NO: 395913 - DNA, 75 bp, synthetic construct
  source 1..75: mol_type = other DNA
ggcagacgctggagctggtgttcaccgccggcagtgccacggttactccgaaactgaatggagtggctggcccgg

SEQ ID NO: 395914 - DNA, 75 bp, synthetic construct
  source 1..75: mol_type = other DNA
ggcgcgcaatcccgtagtaatggtaattgggtatcgtcaaatcgcccgacacatttcagttcatgggcgcgcagg

SEQ ID NO: 395915 - DNA, 75 bp, synthetic construct
  source 1..75: mol_type = other DNA
tgcgctgacgctgacggatgttacaaaaaatgcagcgtatggcgttgagatagaaagtctggtgctggagataaa

SEQ ID NO: 395916 - DNA, 75 bp, synthetic construct
  source 1..75: mol_type = other DNA
cggatattaccaaaaatgcagcgtatggcgttgagatagaaagtctggtgctggagataaatgcaccggcatcat

SEQ ID NO: 395917 - DNA, 75 bp, synthetic construct
  source 1..75: mol_type = other DNA
gatgacgcagtctccctgctgacacggggtggcagactgagctgtaagtttcgactgtcaggcgcactgaccaac

SEQ ID NO: 395918 - DNA, 75 bp, synthetic construct
  source 1..75: mol_type = other DNA
ccggttgttaactatctgaaagacaaactgtctaacccggttcgtctggttaaagattacctcgacggcgttgac

SEQ ID NO: 395919 - DNA, 75 bp, synthetic construct
  source 1..75: mol_type = other DNA
acaactgggtggtcgtgcaacaccggcagtcggttttgcgatgggcctcgaacgtcttgtattgttagttcaggc

SEQ ID NO: 395920 - DNA, 75 bp, synthetic construct
  source 1..75: mol_type = other DNA
ggaacaactgggcggtcgtgcaacaccggcagtcggttttgcgatgggcctcgaacgtcttgtattgttagtaca

SEQ ID NO: 395921 - DNA, 75 bp, synthetic construct
  source 1..75: mol_type = other DNA
catcagttgggctgcgaagttttcggtctgcaaggcccggatattgatgccgaactgattatgctcaccgcccgc

SEQ ID NO: 395922 - DNA, 75 bp, synthetic construct
  source 1..75: mol_type = other DNA
acgttgcatgtgcaggcccgctgctggcggctgaactggacgcgctgggtaaagcactgaaagaaccagctcgtc

SEQ ID NO: 395923 - DNA, 75 bp, synthetic construct
  source 1..75: mol_type = other DNA
tgctgacctctccgtgtttaacgcgcagtgccatggtggcagtgctgcagatgtgccgtggatttgtggtgacac

SEQ ID NO: 395924 - DNA, 75 bp, synthetic construct
  source 1..75: mol_type = other DNA
atattgccaaaaaactgcttccgtatatcccgaataacgcggggatcctgctggtaccatgctgtcgtggtggtt

SEQ ID NO: 395925 - DNA, 75 bp, synthetic construct
  source 1..75: mol_type = other DNA
gctaacgctatcgcagatagcgaagcgttctccatcgctggcggcggcgacactctggcagcaatcgacctgttc

SEQ ID NO: 395926 - DNA, 75 bp, synthetic construct
  source 1..75: mol_type = other DNA
cttccgcaaaggtactgaaatcgtggctaacgctatcgcagatagcgaagcgttctccatcgctggcggcggcga

SEQ ID NO: 395927 - DNA, 75 bp, synthetic construct
  source 1..75: mol_type = other DNA
ggatattgctgatgcaggttattacggcgcgcaatcccgtagtaatggtaattgggtatcgtcaaatcgtccgac

SEQ ID NO: 395928 - DNA, 75 bp, synthetic construct
  source 1..75: mol_type = other DNA
ggacgaagactgcaaacgccgcatgtacactaacccgttgcgcgtactcgattcaaaaaatccggaagtgcaggt

SEQ ID NO: 395929 - DNA, 75 bp, synthetic construct
  source 1..75: mol_type = other DNA
gcgccgttaccctcgattttcaccgcaagcagccagatattccgcaactcgcttcttataccgtattgcgcaacc

SEQ ID NO: 395930 - DNA, 75 bp, synthetic construct
  source 1..75: mol_type = other DNA
tcgccgacatcatgaacgatatgttcaccattgacggtaggccaaatcagccagtacgcaaaatgatactcggac

SEQ ID NO: 395931 - DNA, 75 bp, synthetic construct
  source 1..75: mol_type = other DNA
atccactgaaaatagaggtgataaacaataaaaagttaccaactattgaggagaatatggctgatgggaaaaacc

SEQ ID NO: 395932 - DNA, 75 bp, synthetic construct
  source 1..75: mol_type = other DNA
atggcttacggtgaagggcttccgcttccggattcatacgatgctccggatccgcgcattaaacagctggcgcgc

SEQ ID NO: 395933 - DNA, 75 bp, synthetic construct
  source 1..75: mol_type = other DNA
aactgaatggagtggctggcccggcattccaggttataaaagacagtctgacactgggactgaatgcgctgacgc

SEQ ID NO: 395934 - DNA, 75 bp, synthetic construct
  source 1..75: mol_type = other DNA
atcccgggcgttcgcgtcgatgccctggttcgtgagggaaacaaggtcactggcgttcaggccggggatgatatt

SEQ ID NO: 395935 - DNA, 75 bp, synthetic construct
  source 1..75: mol_type = other DNA
ctgagccggactggttctatgtggttgtgcttgccggacagtccaacggcatggcctacggtgaagggcttccgt

SEQ ID NO: 395936 - DNA, 75 bp, synthetic construct
  source 1..75: mol_type = other DNA
tattggttcgctggaagctcgcgccaattaccgcgatgcgctggttgcgttccttgaacagcataaagaaaagct

SEQ ID NO: 395937 - DNA, 75 bp, synthetic construct
  source 1..75: mol_type = other DNA
caactttaagaaacagtttgcccgtgctgataaatggggcgcatgtgttgctgtggtgctgggtgagtccgaagt

SEQ ID NO: 395938 - DNA, 75 bp, synthetic construct
  source 1..75: mol_type = other DNA
cgtattactggaaaaatacctacggcacccagtacaacaccatttacggggcgtacaaaaatagggagagtgagg

SEQ ID NO: 395939 - DNA, 75 bp, synthetic construct
  source 1..75: mol_type = other DNA
gcgacacgacatacgcgtggaaacaagaacacggtacacaatatgaagtggtatatggtgcatataaaggtaaag

SEQ ID NO: 395940 - DNA, 75 bp, synthetic construct
  source 1..75: mol_type = other DNA
cgacatcattcctgctgaccattgtctgcatgatgttcaggatatgagtacgattaaccatccccgggctgacct

SEQ ID NO: 395941 - DNA, 75 bp, synthetic construct
  source 1..75: mol_type = other DNA
gataagtccgggcatattaccgtggcaggtaataacgttcctcgttttgaaaaatatggtttgctgatagagaat

SEQ ID NO: 395942 - DNA, 75 bp, synthetic construct
  source 1..75: mol_type = other DNA
gttaatggcatatgccaatttagccgcgcttcatcagcaacgtatattgataagtccgggcatattaccgtggca

SEQ ID NO: 395943 - DNA, 75 bp, synthetic construct
  source 1..75: mol_type = other DNA
gattcgctggatatgattacgggctattctccgggttataaaaaagtgaagattggtgataatgtggttcaggtt

SEQ ID NO: 395944 - DNA, 75 bp, synthetic construct
  source 1..75: mol_type = other DNA
agattgttaagtttaaacgtgcatcgaaagcaacctatattaacaaatctggtgtgctgacagaggctgccattg

SEQ ID NO: 395945 - DNA, 75 bp, synthetic construct
  source 1..75: mol_type = other DNA
tctgcaagcgcggcggctgcttctgccactgcatcagctaacagtcaaaaagcagcaaaaaccagtgaaaccaac

SEQ ID NO: 395946 - DNA, 75 bp, synthetic construct
  source 1..75: mol_type = other DNA
actgcatcagccaacagtcaaaaagctgcaaaaaccagtgaaaccaacgcaaaggcgagcgagactgcggcggat

SEQ ID NO: 395947 - DNA, 75 bp, synthetic construct
  source 1..75: mol_type = other DNA
tggggaatggttggtacgcagttgcaaattgcagccgacagagctgtggggtcttttgcaacaggtgactggata

SEQ ID NO: 395948 - DNA, 75 bp, synthetic construct
  source 1..75: mol_type = other DNA
cataacgacaacagagccagcgactcgtgcatcagatttatgtaaatttccgctgatgaaaaatatgtataccat

SEQ ID NO: 395949 - DNA, 75 bp, synthetic construct
  source 1..75: mol_type = other DNA
aatatatgcacagttgctggtaataaaggcatagatgtgactggcgatgatcagtacagtaaaggtccgtatgtt

SEQ ID NO: 395950 - DNA, 75 bp, synthetic construct
  source 1..75: mol_type = other DNA
gatgaacaactggtattggctttcaggacgcctacaagtccggatgtagaacctttaccttatgttcagtttgga

SEQ ID NO: 395951 - DNA, 75 bp, synthetic construct
  source 1..75: mol_type = other DNA
acagacgactctacatatattaacggcgccattctgatgtcaaacaaactgggtgctaattttgataagactagt

SEQ ID NO: 395952 - DNA, 75 bp, synthetic construct
  source 1..75: mol_type = other DNA
gcaacagacacctgttcggtcatgtgaaaaatttacgcatttggcataaagaattaactgaggcacaaatggggg

SEQ ID NO: 395953 - DNA, 75 bp, synthetic construct
  source 1..75: mol_type = other DNA
tggtaaacaggttaatttcagtcgcgcatcaacggcaacatatatcaacaaatctggcgaactgaaaacggcgga

SEQ ID NO: 395954 - DNA, 75 bp, synthetic construct
  source 1..75: mol_type = other DNA
cggcagcgaagaccagcgaaacgaatgccaaagccagcgaaactgcggcgaaaagcagtcaggatgcagcagctg

SEQ ID NO: 395955 - DNA, 75 bp, synthetic construct
  source 1..75: mol_type = other DNA
tgcagcagccgaaagcgagagtgcggcagctggttctgcgacttcagcagctggatcagcaactgctgcggctaa

SEQ ID NO: 395956 - DNA, 75 bp, synthetic construct
  source 1..75: mol_type = other DNA
aacgcgaaaaacagcgagacagccgcaaagacgagcgaaaccaacgcaaagtccagccagacggcagcgaagacc

SEQ ID NO: 395957 - DNA, 75 bp, synthetic construct
  source 1..75: mol_type = other DNA
accgtctatgaaggttccagaccaggtacgctgaatgattttctcggtgccatgacggaagatgatgtcatgccg

SEQ ID NO: 395958 - DNA, 75 bp, synthetic construct
  source 1..75: mol_type = other DNA
gcgtgtttttaacacaaaccggcatcaaacagaagcggggatcgaaatggggtttggttcatcaggtaggtacga

SEQ ID NO: 395959 - DNA, 75 bp, synthetic construct
  source 1..75: mol_type = other DNA
gcttccggtagaattacggcacgagtcaggaaggatgaaactacaggatggatttttgctgaggcaacaattcag

SEQ ID NO: 395960 - DNA, 75 bp, synthetic construct
  source 1..75: mol_type = other DNA
agcagcaaaaaccagtgaaaccaacgcaaaggtgagcgaaacagcggctgcgaactcagcgaaagcatcggcagc

SEQ ID NO: 395961 - DNA, 75 bp, synthetic construct
  source 1..75: mol_type = other DNA
agcgccacgtgtttttgataccggcggtcatcaaaccggagcggctattattcttggcttcggatcttcggcaga

SEQ ID NO: 395962 - DNA, 75 bp, synthetic construct
  source 1..75: mol_type = other DNA
gcagctggttctgcgacttcagcagctggatcagcaactgctgcggctaacagccagaaagcagcgaagacgagc

SEQ ID NO: 395963 - DNA, 75 bp, synthetic construct
  source 1..75: mol_type = other DNA
cgcgagcaagcgatattgttacattgccttgtaaaaataacatggccagcaaacctttaacctgcatggttgaag

SEQ ID NO: 395964 - DNA, 75 bp, synthetic construct
  source 1..75: mol_type = other DNA
atgtgtggataccgtttaacgattcactggatatgattacgggcttttcgccatcatataaaaagattgttattg

SEQ ID NO: 395965 - DNA, 75 bp, synthetic construct
  source 1..75: mol_type = other DNA
tgggaacttcctcctaatgcagcaccacgtataatggatttttccggtgtgccaacgggccaggccgttattttt

SEQ ID NO: 395966 - DNA, 75 bp, synthetic construct
  source 1..75: mol_type = other DNA
acagcaaactttgaaatcgatccaggtagtggatggatatattttcaggcaacactgaaatgtctgccagaatgg

SEQ ID NO: 395967 - DNA, 75 bp, synthetic construct
  source 1..75: mol_type = other DNA
aagccaacgcaaaggtgagcgaaacagcggcggcgaactcggcgaaagcatcggcagcaagccagacggcagcaa

SEQ ID NO: 395968 - DNA, 75 bp, synthetic construct
  source 1..75: mol_type = other DNA
tgaaaatatttatgaatctgcaaaaaagaagaaaagttcaaaaactaaactatcgcgggcaagtttcgaaactga

SEQ ID NO: 395969 - DNA, 75 bp, synthetic construct
  source 1..75: mol_type = other DNA
cggaggggttgatacttcaggggacgaaaagcatgtaactatatcctgtcgggtaaaaagtgaagttgataatat

SEQ ID NO: 395970 - DNA, 75 bp, synthetic construct
  source 1..75: mol_type = other DNA
aaaggcgagcgagactgcggcggctaactcggcgaaagcatccgctgcaagccagacggctgcaaaagcaagtga

SEQ ID NO: 395971 - DNA, 75 bp, synthetic construct
  source 1..75: mol_type = other DNA
gataccgtttaacgattcactggatatgattacgggcttttcgccgtcatataaaaaaattgttattggtgacga

SEQ ID NO: 395972 - DNA, 75 bp, synthetic construct
  source 1..75: mol_type = other DNA
tcagaaaggacgaagctaccggatggatttttgcagaggcaacaatcctggcaattgatgatgagttaaaaatag

SEQ ID NO: 395973 - DNA, 75 bp, synthetic construct
  source 1..75: mol_type = other DNA
gccaaatatgaggctgagctcaccacaacttcaggcgaaaacctgacaatgactgtcggttacacctatgggaat

SEQ ID NO: 395974 - DNA, 75 bp, synthetic construct
  source 1..75: mol_type = other DNA
catcaactggatcattattgtactgaacgttattatcatcccggttctgacagtgacggccttccgcccgtttct

SEQ ID NO: 395975 - DNA, 75 bp, synthetic construct
  source 1..75: mol_type = other DNA
catcaactggatcattattgtactgaacgttattgtcatcccggtgctgacagtgacggtcttccgcccgtttct

SEQ ID NO: 395976 - DNA, 75 bp, synthetic construct
  source 1..75: mol_type = other DNA
gactgcggcggcgaactcggcgcaagcatcggcagcaagccagacagcagctaaagcaagtgaagacgcagccag

SEQ ID NO: 395977 - DNA, 75 bp, synthetic construct
  source 1..75: mol_type = other DNA
caataacaagagctttgcggtttacaacaatggtaaatcaggggtggctcttatagtgagtcagcgaggagagca

SEQ ID NO: 395978 - DNA, 75 bp, synthetic construct
  source 1..75: mol_type = other DNA
tcagcagttgatgagtaaaacacttgattcatgtgctcgccactggcccgataaacccatctatcttggcgcaca

SEQ ID NO: 395979 - DNA, 75 bp, synthetic construct
  source 1..75: mol_type = other DNA
caggcacgctgaatgattttctcggtgccatgacggaagaagatgtcatgccggaggcattgcgtcgttttgagg

SEQ ID NO: 395980 - DNA, 75 bp, synthetic construct
  source 1..75: mol_type = other DNA
tgggccttgtgtatcatcttttattatatcaggagcgacggcggcgacccgcgcaagcgatatagttacagttcc

SEQ ID NO: 395981 - DNA, 75 bp, synthetic construct
  source 1..75: mol_type = other DNA
cgggcacgctgaatgattttctcggtgccatgacggaagaggatgtcatgccggaggcattgcgtcgttttgagg

SEQ ID NO: 395982 - DNA, 75 bp, synthetic construct
  source 1..75: mol_type = other DNA
cgggcacgctgaatgattttctcggagccatgacggaagatgatgtcatgccggaggcattgcgtcgttttgagg

SEQ ID NO: 395983 - DNA, 75 bp, synthetic construct
  source 1..75: mol_type = other DNA
tttatttgggcatgtgaggaattttcgtctctggcataaagagctaacagatgcgcagcttggggaggttgtgga

SEQ ID NO: 395984 - DNA, 75 bp, synthetic construct
  source 1..75: mol_type = other DNA
ataagaactggtataaaacgccaaatgtagcgccgcgtgtttttgataccggcggtcatcaaaccggagcgggga

SEQ ID NO: 395985 - DNA, 75 bp, synthetic construct
  source 1..75: mol_type = other DNA
aaaggtgagcgaaacagcggctgcgaactcagcgaaagcatcggcagcaagccagacggcagctaaagcaagcga

SEQ ID NO: 395986 - DNA, 75 bp, synthetic construct
  source 1..75: mol_type = other DNA
ctggcacgctgaatgattttctcggtgccatgacggaagatgatgtcatgccggaggcattgcgtcgttttgagg

SEQ ID NO: 395987 - DNA, 75 bp, synthetic construct
  source 1..75: mol_type = other DNA
ctggcacgctgaatgattttctcggagccatgacggaagaagatgtcatgccggaggcattgcgtcgttttgagg

SEQ ID NO: 395988 - DNA, 75 bp, synthetic construct
  source 1..75: mol_type = other DNA
caggcacgctgaatgattttctcggggccatgacggaagatgatgtcatgccggaggcattgcgtcgttttgagg

SEQ ID NO: 395989 - DNA, 75 bp, synthetic construct
  source 1..75: mol_type = other DNA
ccggcacgctgaatgattttctcggtgccatgacggaagacgatgtcatgccggaggcattgcgtcgttttgagg

SEQ ID NO: 395990 - DNA, 75 bp, synthetic construct
  source 1..75: mol_type = other DNA
ctggcacgctgaatgattttctcggggccatgacggaagaggatgtcatgccggaggcattgcgtcgttttgagg

SEQ ID NO: 395991 - DNA, 75 bp, synthetic construct
  source 1..75: mol_type = other DNA
ctggcacgctgaatgattttctcggcgccatgacggaagacgatgtcatgccggaggcattgcgtcgttttgagg

SEQ ID NO: 395992 - DNA, 75 bp, synthetic construct
  source 1..75: mol_type = other DNA
cagataaagaagaagaatggtctcaagctttaactacatgtcgtaggcttctagaagggttggctgatgaacttt

SEQ ID NO: 395993 - DNA, 75 bp, synthetic construct
  source 1..75: mol_type = other DNA
attgaagctgtaaagtcagtatttcacacgtatttagtagtggcggatttgcttgagtatatgtcaaataccaaa

SEQ ID NO: 395994 - DNA, 75 bp, synthetic construct
  source 1..75: mol_type = other DNA
ggtggaggattaataactgcatcagcaatatattttaacttatatggttttttagatgtacatcctgagaaagtc

SEQ ID NO: 395995 - DNA, 75 bp, synthetic construct
  source 1..75: mol_type = other DNA
taaatttatgcgttcttattttcaacaaataaatcgaatttctgaacattatcttaatcatcttgatggtgatgc

SEQ ID NO: 395996 - DNA, 75 bp, synthetic construct
  source 1..75: mol_type = other DNA
tggtcgggccgttgggcaaggtcaatatgtaaatcgcttgtgggcatttatggatggggctattcaatccgaaag

SEQ ID NO: 395997 - DNA, 75 bp, synthetic construct
  source 1..75: mol_type = other DNA
aactctgtatctaagcctgacatcaataaagctactttagatgaactggaagcattgttaaatataaatagaaca

SEQ ID NO: 395998 - DNA, 75 bp, synthetic construct
  source 1..75: mol_type = other DNA
gcaggttcacgatagctaccgcatccctggagagaatggcgaactcagccatgtcattatccctcccgaagtgaa

SEQ ID NO: 395999 - DNA, 75 bp, synthetic construct
  source 1..75: mol_type = other DNA
acgaaacgcttcgcgaccaggagttttctctggcacgccagccgtggtccattatggtgtgcgacgaggcacaaa

SEQ ID NO: 396000 - DNA, 75 bp, synthetic construct
  source 1..75: mol_type = other DNA
gagcaactggctgaagaagactatctgatatcgctgacagcccggtggttgttgagttgggacgcattgtatcgc

SEQ ID NO: 396001 - DNA, 75 bp, synthetic construct
  source 1..75: mol_type = other DNA
gagcaacaatttataaaacaagttcgtgatgcggggattaaagcttcttcaattgatgctcatgctaattatcag

SEQ ID NO: 396002 - DNA, 75 bp, synthetic construct
  source 1..75: mol_type = other DNA
tcgattacaaatattccgacagcgttaagcaacatgattttaggaatttctgccaataaattagttatcctgctg

SEQ ID NO: 396003 - DNA, 75 bp, synthetic construct
  source 1..75: mol_type = other DNA
tgcgggcgcttatagaacctcagactttacgccgaaccaaagaagaggttgcgcgtgatttacctcagaaaattg

SEQ ID NO: 396004 - DNA, 75 bp, synthetic construct
  source 1..75: mol_type = other DNA
atgacattagatgaatatttgaaaaaaaatcgtgtacgacagtcttgtttggccgcactcgctggttgttcgcaa

SEQ ID NO: 396005 - DNA, 75 bp, synthetic construct
  source 1..75: mol_type = other DNA
atggcgctattgccgccttattaacttatgcaggtgggatattagcaatgctggtcacttcgattgtatatcttg

SEQ ID NO: 396006 - DNA, 75 bp, synthetic construct
  source 1..75: mol_type = other DNA
atggggcaatcgcatctttattaacatatgctggagggataattgcattattgctaacttcaatagtttatctcg

SEQ ID NO: 396007 - DNA, 75 bp, synthetic construct
  source 1..75: mol_type = other DNA
ttggcagggggagatccgtgggtatggatggatcagttatgggtgaaggttatacaagttgcaactcttattttt

SEQ ID NO: 396008 - DNA, 75 bp, synthetic construct
  source 1..75: mol_type = other DNA
tgcgaaaatcgatggacgggaatggtcgagctggatcgctatctgaatgaacatggcgtacagggatcggcgctg

SEQ ID NO: 396009 - DNA, 75 bp, synthetic construct
  source 1..75: mol_type = other DNA
ctgttttgcatttgattgggtgtattgctttttcagcaaaagcagtggacatctcattcaatggtgatttaacag

SEQ ID NO: 396010 - DNA, 75 bp, synthetic construct
  source 1..75: mol_type = other DNA
tatggcgcgtggcgcacttggtatgggcagaaatgccggtattggtgcatggaaaggtctgcgtcgtcaggaagg

SEQ ID NO: 396011 - DNA, 75 bp, synthetic construct
  source 1..75: mol_type = other DNA
tcacagcaaaagaagagatcctctcggttctcgatgcttcggtttctggtcagttaacaagtttaagtaatatag

SEQ ID NO: 396012 - DNA, 75 bp, synthetic construct
  source 1..75: mol_type = other DNA
tgatgctggatgagtctccagatatgcccctgcaattcaagtggagaaagtttggtggtgcgatttttactgcca

SEQ ID NO: 396013 - DNA, 75 bp, synthetic construct
  source 1..75: mol_type = other DNA
ctggtcaccaatttcttccgcggctgggtaaccgatctgaccaccgccatttttgagaaaaagatgggcattcaa

SEQ ID NO: 396014 - DNA, 75 bp, synthetic construct
  source 1..75: mol_type = other DNA
gggattggtgctggcgttttcggtgcatcccgtatggcgcgtggcgcacttggtatgggcagaaatgccggtatt

SEQ ID NO: 396015 - DNA, 75 bp, synthetic construct
  source 1..75: mol_type = other DNA
aaacagatggagctatagctgctctttttacttattttggtggaatattagcattagttgcatgtgctatagttt

SEQ ID NO: 396016 - DNA, 75 bp, synthetic construct
  source 1..75: mol_type = other DNA
aatagatggtttaaaggattcgttatctggtaataatgatgcttggttatggttagatcagttatggacgaaagt

SEQ ID NO: 396017 - DNA, 75 bp, synthetic construct
  source 1..75: mol_type = other DNA
aatgaatctcaaggcaacgttgcagataaaacggcccgagccgtactcaaaattgagcagaatattgaagaaacg

SEQ ID NO: 396018 - DNA, 75 bp, synthetic construct
  source 1..75: mol_type = other DNA
tgttggaagaaaccattaatttactggaaaacaacggttggctggctgatgaagcctgggtatatgttgaaagtg

SEQ ID NO: 396019 - DNA, 75 bp, synthetic construct
  source 1..75: mol_type = other DNA
cgggaaaaagtggcgggtcagggggcttatcggctgtatcaacgcgaagcacaaggagaaagtgatgctgattaa

SEQ ID NO: 396020 - DNA, 75 bp, synthetic construct
  source 1..75: mol_type = other DNA
caaaaatctggcgacgctgaaagcaggcaatgcacgcgtggtgaacagtaatgcgatgtcattcctggcgcaaaa

SEQ ID NO: 396021 - DNA, 75 bp, synthetic construct
  source 1..75: mol_type = other DNA
atcaggatcttgtcgggcgctgtcatgcatcgttacatgaaacacaaccactgaggcaaatggaggaaaatcgcc

SEQ ID NO: 396022 - DNA, 75 bp, synthetic construct
  source 1..75: mol_type = other DNA
atcgtgcaagcgggagccaatattcaggatggctgcattatgcatggctactgcgacactgacaccatcgttggg

SEQ ID NO: 396023 - DNA, 75 bp, synthetic construct
  source 1..75: mol_type = other DNA
tcctcggtgatgcgatcaacctcgggctgaccaagatggccgagtcgagccccggcctgacctacgccaagctgt

SEQ ID NO: 396024 - DNA, 75 bp, synthetic construct
  source 1..75: mol_type = other DNA
ggtcagtagcgaaacgctgttctgggaaaccatggaaaaactgaaggcactgggcgcaagctccattctggtgct

SEQ ID NO: 396025 - DNA, 75 bp, synthetic construct
  source 1..75: mol_type = other DNA
tcaaaatacatcatgatgcacgcaccgaccgaacgtctggatgaagtcatcgccctgctgccaggtgccgaacgc

SEQ ID NO: 396026 - DNA, 75 bp, synthetic construct
  source 1..75: mol_type = other DNA
caaccgaacgcctggaagaagtgattgccctgctgccgggtgccgagcgcccaaccattctgccgctggcgggcg

SEQ ID NO: 396027 - DNA, 75 bp, synthetic construct
  source 1..75: mol_type = other DNA
atcgcgcggtttctcagcagttaattaagaatctggcgacactaaaagcaggcaatgcacgcgtggtgaacagca

SEQ ID NO: 396028 - DNA, 75 bp, synthetic construct
  source 1..75: mol_type = other DNA
ttcgtttacccgattatcggccactggcaagacaccctgcccgctgcagaagcctaccgcaatatgtggctgatg

SEQ ID NO: 396029 - DNA, 75 bp, synthetic construct
  source 1..75: mol_type = other DNA
tcgcgaatttgcacaggttactacagttccagcttataaagagatgagtatgtatcaattgcttgtcatttcgca

SEQ ID NO: 396030 - DNA, 75 bp, synthetic construct
  source 1..75: mol_type = other DNA
cactgttagtgacgacaagttacactggaaactgttgaataccagtaagcgtcaacggagcaccgtattgacgct

SEQ ID NO: 396031 - DNA, 75 bp, synthetic construct
  source 1..75: mol_type = other DNA
gtttttgatgagcagcctgccaactggttacagagttttgaccgcacgcaacaggtgcaggatcgttaccgtgtt

SEQ ID NO: 396032 - DNA, 75 bp, synthetic construct
  source 1..75: mol_type = other DNA
tggcaacttctggacgcactacagcaactcaggttgcagcagcgacagacgccgggcgaaacggtcaaccaaacc

SEQ ID NO: 396033 - DNA, 75 bp, synthetic construct
  source 1..75: mol_type = other DNA
atattgccaggctgttctgtggattaacccattgttggcagccatcgagaaggcgaataaccagttggctggtgt

SEQ ID NO: 396034 - DNA, 75 bp, synthetic construct
  source 1..75: mol_type = other DNA
ggcaaggttacgagctggaattaagtcagttcaccgaacagcagtggcacgattgccaggcactgctaactcgct

SEQ ID NO: 396035 - DNA, 75 bp, synthetic construct
  source 1..75: mol_type = other DNA
gtaaacagttgaatatgctgccattgcaacgggatctctatacccactcggttgcaagctggcaaaatcaacagg

SEQ ID NO: 396036 - DNA, 75 bp, synthetic construct
  source 1..75: mol_type = other DNA
actcgataactgggaacgtgaggtcgggaatttcttcctgcgcgagcaggtgtcgattttaaaactctatggtaa

SEQ ID NO: 396037 - DNA, 75 bp, synthetic construct
  source 1..75: mol_type = other DNA
actctcgtggcgctggccaccgagggcatggccaccgtcaccgacgaaatcatcgacctgcacgaccgcatcctg

SEQ ID NO: 396038 - DNA, 75 bp, synthetic construct
  source 1..75: mol_type = other DNA
gaccggtgattacctatggcgcagcagcgccaagatcggcgcggggaagttcaggccgctacggcctctgcaacc

SEQ ID NO: 396039 - DNA, 75 bp, synthetic construct
  source 1..75: mol_type = other DNA
tacagcgttacgagaaacacagccattgacacaaatggaggaaaatcgtccccgtttgcaggggacgacggatgt

SEQ ID NO: 396040 - DNA, 75 bp, synthetic construct
  source 1..75: mol_type = other DNA
atgaagctgacttataagattgtcatcgtggcacttttcttctctgcccttggggcgctcgtctggtctgcaaac

SEQ ID NO: 396041 - DNA, 75 bp, synthetic construct
  source 1..75: mol_type = other DNA
ccgtgaaaagaactgtgatttccctgttcctgctgatattgctgtcgggttgctcaactacgcgaaccgtttacg

SEQ ID NO: 396042 - DNA, 75 bp, synthetic construct
  source 1..75: mol_type = other DNA
ctcgggctgaccaagatggccgagtcgagccccggcctgacctacgccaagctgtcctggctgcaagcctggcac

SEQ ID NO: 396043 - DNA, 75 bp, synthetic construct
  source 1..75: mol_type = other DNA
atgactacacaaaaggaaatggaagaaatcaggactgcattatcttggtttgatgtacgccgatatgatggcctg

SEQ ID NO: 396044 - DNA, 75 bp, synthetic construct
  source 1..75: mol_type = other DNA
aagcattctgattgaaggtgcggatgcgaatgcctctgtcaccggtaatgaatctacggttccgatgcaggtccg

SEQ ID NO: 396045 - DNA, 75 bp, synthetic construct
  source 1..75: mol_type = other DNA
gcgccggacatgacgggggtagtggacagtcgtttcgataccaaagttcagcaacatgcgacaactgaaatgcag

SEQ ID NO: 396046 - DNA, 75 bp, synthetic construct
  source 1..75: mol_type = other DNA
agtcaccaaacgctgaactttcggctcgcgctaaacaaattgcgatgggcgtagacggtgccaacgaagtgtata

SEQ ID NO: 396047 - DNA, 75 bp, synthetic construct
  source 1..75: mol_type = other DNA
agtcccgcttcgcgctgtgcaactgtcgcgtctgcaatcgtcctttcgccgtccagaaagagatcgactacgcca

SEQ ID NO: 396048 - DNA, 75 bp, synthetic construct
  source 1..75: mol_type = other DNA
gtccggtggccatcacgccttataccctgatgcaggccattgcggcggaaggtgatgtcacccacctgtggtggt

SEQ ID NO: 396049 - DNA, 75 bp, synthetic construct
  source 1..75: mol_type = other DNA
tggtggcggaagtcattatctttgcgctgagtaataaacttttccgccgttgtagtgcacgcgatatgctgttga

SEQ ID NO: 396050 - DNA, 75 bp, synthetic construct
  source 1..75: mol_type = other DNA
atgaaccaactgcaagaaatcattcagatactaagtactggtgatgaaggcacaacaaatgctctcataaaaacg

SEQ ID NO: 396051 - DNA, 75 bp, synthetic construct
  source 1..75: mol_type = other DNA
gtgggagttcaatcttggacgctgcatcttctgtggacgctgcgaagaagtctgcccgacggcggcgatcaaact

SEQ ID NO: 396052 - DNA, 75 bp, synthetic construct
  source 1..75: mol_type = other DNA
ctgtaccggtaccaaaccagatacagcgtaaaacgttcagttacgacaaaggaaaaaaaacgaagtcattgccgt

SEQ ID NO: 396053 - DNA, 75 bp, synthetic construct
  source 1..75: mol_type = other DNA
gttggcgccggtgacgttctgaaaatgggggtcggcggtggtgcatctaaagctgcgcagacgctgagcgagtac

SEQ ID NO: 396054 - DNA, 75 bp, synthetic construct
  source 1..75: mol_type = other DNA
ttgtggtcgctgggcgtggtggcggaagtcattatctttgcgctgagtaataaacttttccgccgttgtagtgca

SEQ ID NO: 396055 - DNA, 75 bp, synthetic construct
  source 1..75: mol_type = other DNA
gaaagcggcggcagatattgccagccgggtaagcggcgtgaagcgggtgaccacggcgtttacgtttattaaata

SEQ ID NO: 396056 - DNA, 75 bp, synthetic construct
  source 1..75: mol_type = other DNA
cctggatgccgaatccgtggcctggctggaacgcttcctgcacgaattcgagggcaccgtggtggcgattaccca

SEQ ID NO: 396057 - DNA, 75 bp, synthetic construct
  source 1..75: mol_type = other DNA
atcgtcgggatcatcggtccgaacggtgcgggtaaatcgaccctgttccgtatgatctctggtcaggaacagccg

SEQ ID NO: 396058 - DNA, 75 bp, synthetic construct
  source 1..75: mol_type = other DNA
gctcgacgaaccaaccaacgacttggatatcgaaaccctgcgcgcactggaaaacgccctgctggagttcccggg

SEQ ID NO: 396059 - DNA, 75 bp, synthetic construct
  source 1..75: mol_type = other DNA
ccaggttataaaagacagtctgacactgggactgaatgcgctgacgctgacggatgttacaaaaaatgcagcgta

SEQ ID NO: 396060 - DNA, 75 bp, synthetic construct
  source 1..75: mol_type = other DNA
cttacggtgaagggcttccgttaccggattcttacgatgctccggatccgcgcattaaacaactggcacgccgca

SEQ ID NO: 396061 - DNA, 75 bp, synthetic construct
  source 1..75: mol_type = other DNA
tgggactgaatgcactgacgctgacggatattaccaaaaatgcagcgtatggcgttgagatagaaagtctggtgc

SEQ ID NO: 396062 - DNA, 75 bp, synthetic construct
  source 1..75: mol_type = other DNA
gtgtgccatggatttgtggtgacacgacgtattactggaaaaacacctacggcacgcagtacgacaccatttacg

SEQ ID NO: 396063 - DNA, 75 bp, synthetic construct
  source 1..75: mol_type = other DNA
accactgtctgcatgatgtgcaggatatgagtacgctgaatcatccgagggctgacctgagcaaagggcagtacg

SEQ ID NO: 396064 - DNA, 75 bp, synthetic construct
  source 1..75: mol_type = other DNA
ggcgacacgccatcggggccgtctgatggtgacacatccgttcgtacagtctccctgctgccgacagccggagag

SEQ ID NO: 396065 - DNA, 75 bp, synthetic construct
  source 1..75: mol_type = other DNA
gcattccaggtcataaaagacagtctgacactggggctgaatgcgctgacgctgacggatattaccaaaaatgca

SEQ ID NO: 396066 - DNA, 75 bp, synthetic construct
  source 1..75: mol_type = other DNA
ctgacgctgacggatattaccaaaaatgcaacgtatggcgttgagatagaaagtctggtgctggagataaatgca

SEQ ID NO: 396067 - DNA, 75 bp, synthetic construct
  source 1..75: mol_type = other DNA
tgggcgcagcagaagtttgggcaccaggtgagctggccgcagatgtgcgatttacgggggcgattgatgtcgttg

SEQ ID NO: 396068 - DNA, 75 bp, synthetic construct
  source 1..75: mol_type = other DNA
atggatgttatcgcgatagccacatatctgttctactcgcttggtaatggtcgtatccctttttattccgatatc

SEQ ID NO: 396069 - DNA, 75 bp, synthetic construct
  source 1..75: mol_type = other DNA
atgaatgagtttaagcgttttgaagaccggctgaccggacttattgagtcgctgtcaccgtcagggcgtcggcga

SEQ ID NO: 396070 - DNA, 75 bp, synthetic construct
  source 1..75: mol_type = other DNA
ggtggagtttaccggaaaggtgcagcgcatggcgcgggtgcatcagtacggcctaaaagatcggccaaaccgaaa

SEQ ID NO: 396071 - DNA, 75 bp, synthetic construct
  source 1..75: mol_type = other DNA
ggtaagaaaattgattatccggcgcgtcctctgctcggctttaccggtgaggatgtgcagatgattgaagagatt

SEQ ID NO: 396072 - DNA, 75 bp, synthetic construct
  source 1..75: mol_type = other DNA
ctgacggtagttcatttctgagcgccaacgttaatgtgaatggtaattcggctaattttcgcggctctcagacaa

SEQ ID NO: 396073 - DNA, 75 bp, synthetic construct
  source 1..75: mol_type = other DNA
gcgcgtcctctgctcggctttaccggtgaggatgtgcagatgattgaagagattatcctggcgcacctcgaccgt

SEQ ID NO: 396074 - DNA, 75 bp, synthetic construct
  source 1..75: mol_type = other DNA
cgttaagcgaaaaatgtttgcgaaacttatcaccagtcgttttttgcatatccgcgccagcccggaacaggcatc

SEQ ID NO: 396075 - DNA, 75 bp, synthetic construct
  source 1..75: mol_type = other DNA
cggcgctgattccggcaattatggaggctatcaggatcagcgatttcaggttgtattgtgaaattactgacggaa

SEQ ID NO: 396076 - DNA, 75 bp, synthetic construct
  source 1..75: mol_type = other DNA
attgtctttacctttttgctgttccaaaaaattcgtactgctgatagcgcccccgcaatggctagcagcaagtaa

SEQ ID NO: 396077 - DNA, 75 bp, synthetic construct
  source 1..75: mol_type = other DNA
cgcgcgaaacgttacctcgcctatttccaggcgtataccagcacctttgccgaagttcaggtgctgcgttcgatg

SEQ ID NO: 396078 - DNA, 75 bp, synthetic construct
  source 1..75: mol_type = other DNA
tgacgagcttatagaaaaagctattgctttcaagcatgcgtatcgtcagcaatatcaatattactttgcagataa

SEQ ID NO: 396079 - DNA, 75 bp, synthetic construct
  source 1..75: mol_type = other DNA
ccaaaggcagcgacagtgcggcggtggtggagtttaccggaaaggtgcagcgcatggcgcgggtgcatcagtacg

SEQ ID NO: 396080 - DNA, 75 bp, synthetic construct
  source 1..75: mol_type = other DNA
tcgaccaggaatgacacaggagcaggcgacgatattaatcactgaagcattctgggctttgaaagagcgcccgaa

SEQ ID NO: 396081 - DNA, 75 bp, synthetic construct
  source 1..75: mol_type = other DNA
cgcgtatctgattccagaacatcgacggaatctggtgttgctgcatcatcacttgctgcatcacaaaactattca

SEQ ID NO: 396082 - DNA, 75 bp, synthetic construct
  source 1..75: mol_type = other DNA
acctgaatgccccatgtatcgtcagttatccggaaatgaagaggaaacatattccggagcaagccggcatcccgt

SEQ ID NO: 396083 - DNA, 75 bp, synthetic construct
  source 1..75: mol_type = other DNA
tgcagatttttttgcgacctataaagcaacattaccaatcattggacgtctgatgaacatcagtcaggctatgat

SEQ ID NO: 396084 - DNA, 75 bp, synthetic construct
  source 1..75: mol_type = other DNA
gacttggccatgtgttggatgttgcccgtcaggtccagagaaaacgggacaataatcgctcacaatcgttacctt

SEQ ID NO: 396085 - DNA, 75 bp, synthetic construct
  source 1..75: mol_type = other DNA
gtatcgataaaggctatgagttaacacgctgttataaagagatcgcactacataactttacttccatcttaactc

SEQ ID NO: 396086 - DNA, 75 bp, synthetic construct
  source 1..75: mol_type = other DNA
tcagtttcccttcccgattatagaattgttggcacaagaattcttgcagatctgaacaatggcattcgcctatat

SEQ ID NO: 396087 - DNA, 75 bp, synthetic construct
  source 1..75: mol_type = other DNA
atgagaaagttcatccttatttctatgataacgttagctggtgttagtctgggagcctgcagacagaatgtcacc

SEQ ID NO: 396088 - DNA, 75 bp, synthetic construct
  source 1..75: mol_type = other DNA
ttgtcgctaaaagccgacttctcgctggcaaaaccgctgatcattcacaatgtgttactctcggcactgggcggg

SEQ ID NO: 396089 - DNA, 75 bp, synthetic construct
  source 1..75: mol_type = other DNA
gcttccggacgacgtctgcaggcaggacgctggtttgcgccagcgtatgccattcatctgttttttattggcttt

SEQ ID NO: 396090 - DNA, 75 bp, synthetic construct
  source 1..75: mol_type = other DNA
cacggtgatgtgatgatgttttccggcgtgattctgacgctgacggtgctgttctgtgtccacgggctggtaccg

SEQ ID NO: 396091 - DNA, 75 bp, synthetic construct
  source 1..75: mol_type = other DNA
cactaatattcagtcgccagccgtcattgtcactgtaaagctgagcgatagaatgcctgatattgactcaatatc

SEQ ID NO: 396092 - DNA, 75 bp, synthetic construct
  source 1..75: mol_type = other DNA
atatatccacgacgtcggcggcgcgggcgtgacgacacatgcgctcgccgcactggatatcgcgtactgggacct

SEQ ID NO: 396093 - DNA, 75 bp, synthetic construct
  source 1..75: mol_type = other DNA
ggtgctgaaagaggggaacaatgcaggacgccgtccggtaacggtgttgagcctcggttgtgtggtgattattgt

SEQ ID NO: 396094 - DNA, 75 bp, synthetic construct
  source 1..75: mol_type = other DNA
cccgcggcgcaatcgagatgaatggcacactctacggaacatcgcaaccgtctttagtctatgccggtactacgg

SEQ ID NO: 396095 - DNA, 75 bp, synthetic construct
  source 1..75: mol_type = other DNA
ggcggatgccgcgacgccggacaccttactggacccacagccagtcgcagatcgctcgttttgcgctcagggact

SEQ ID NO: 396096 - DNA, 75 bp, synthetic construct
  source 1..75: mol_type = other DNA
gaccagctgtgggtagctgattttacttacgtcagcacatggcagggcttcgtctatagtggcgttcatcattga

SEQ ID NO: 396097 - DNA, 75 bp, synthetic construct
  source 1..75: mol_type = other DNA
atcttcacaacggggggtacaagacccgcgttcggcaggatgtcaaagacaagctctatggtgaaggaaataaca

SEQ ID NO: 396098 - DNA, 75 bp, synthetic construct
  source 1..75: mol_type = other DNA
cgataaagtgttgctggggtggagtaaagattctttttctccgtatgaagatcttcacaacggggggtacaagac

SEQ ID NO: 396099 - DNA, 75 bp, synthetic construct
  source 1..75: mol_type = other DNA
aatgccttgaataatgcgcccgtgccgtataccgcgttcaccatcacgaaagatatggggaaaaatcgtcagggg

SEQ ID NO: 396100 - DNA, 75 bp, synthetic construct
  source 1..75: mol_type = other DNA
tggacattaagtactactcgtacacagtataatgctggaatgcgtctggagaaacgtaacaagactttgtcagcg

SEQ ID NO: 396101 - DNA, 75 bp, synthetic construct
  source 1..75: mol_type = other DNA
cactgaaagtacaccgctatctgttgcaggttaagcaacgtaatggtgagtttgtgccgggcggaacctgggcca

SEQ ID NO: 396102 - DNA, 75 bp, synthetic construct
  source 1..75: mol_type = other DNA
ctgggcgcaccagagtgaggaatatgaagacatgtcctcttttgacccgtcaaaactgtggggtgaggaaaacca

SEQ ID NO: 396103 - DNA, 75 bp, synthetic construct
  source 1..75: mol_type = other DNA
agcacatggcagggcttcgtctatgtggcgtttatcattgatgtgtttgccggatacatcgtggggtggcgggtc

SEQ ID NO: 396104 - DNA, 75 bp, synthetic construct
  source 1..75: mol_type = other DNA
cctgcttgacggcgaccggcaggggaatgacgtcagcgccatgcgcgtggacattggtgcgcgctcctatgacga

SEQ ID NO: 396105 - DNA, 75 bp, synthetic construct
  source 1..75: mol_type = other DNA
atgatcaacacaaatatgaaatattggtcctggatgggcgcgttttctctgtcgatgctcttctgggccgaactc

SEQ ID NO: 396106 - DNA, 75 bp, synthetic construct
  source 1..75: mol_type = other DNA
gtgtgtgcaggaaagaaggcagtcgcagagccggtttcgtccgtgtttttccgtcgggccgcacttgcgcttgcc

SEQ ID NO: 396107 - DNA, 75 bp, synthetic construct
  source 1..75: mol_type = other DNA
gcggtgccggcggcgaaagacatcatgttcagtcgtacgaccggtgacacggtggcggtggtgaatgtgaaggac

SEQ ID NO: 396108 - DNA, 75 bp, synthetic construct
  source 1..75: mol_type = other DNA
cagtgcagccagtggcgtttcgtctgacaaccctgagtctggttatgtcggcggtactgggcagcgcatcggtta

SEQ ID NO: 396109 - DNA, 75 bp, synthetic construct
  source 1..75: mol_type = other DNA
tggtggtgtgagcagttatctgaatgcgtcgtacagtggtgaccgggcttatctgaatggtgccctgaaccactc

SEQ ID NO: 396110 - DNA, 75 bp, synthetic construct
  source 1..75: mol_type = other DNA
ggtctaagcgcagcggaaatcgttgagttaatccgcgaagaagccgcagcgatttgcagcaaagggggcgcggca

SEQ ID NO: 396111 - DNA, 75 bp, synthetic construct
  source 1..75: mol_type = other DNA
ggtttaagcgcaactgaagtcattgagttaatccgcgaagaagccgcagcgatttgcagtaagggcggtgcagca

SEQ ID NO: 396112 - DNA, 75 bp, synthetic construct
  source 1..75: mol_type = other DNA
tgttcagtcgtacgaccggtgacacggtggcggtggtgaatgtgaaggacacgccgggtgtgaaggtgacgtccg

SEQ ID NO: 396113 - DNA, 75 bp, synthetic construct
  source 1..75: mol_type = other DNA
cgttgtacaccagtggggatgtgaccatgaaggttaccggtgaggacgggcgtgagcagacccaggtctttccgc

SEQ ID NO: 396114 - DNA, 75 bp, synthetic construct
  source 1..75: mol_type = other DNA
tattaccccgcatccacgaccgggagttaccggtacagcgatgacaacggtaaggacacggggattaccggcacc

SEQ ID NO: 396115 - DNA, 75 bp, synthetic construct
  source 1..75: mol_type = other DNA
acgctgcgcaccgggggcgtgtttaaccgggactggcagggtattagcgccggggctgttctggggctgagttat

SEQ ID NO: 396116 - DNA, 75 bp, synthetic construct
  source 1..75: mol_type = other DNA
gtacagcggtgaccgggcttatctgagtggggctctgaaccagtcgtcatccggaggcaccagtggctctgtgtc

SEQ ID NO: 396117 - DNA, 75 bp, synthetic construct
  source 1..75: mol_type = other DNA
ttacagcagcagcacttcggtgagcaccggtaaggatagtggcacgggcttcagtacggggctttccggttcgct

SEQ ID NO: 396118 - DNA, 75 bp, synthetic construct
  source 1..75: mol_type = other DNA
tattacccggcacagaggacaggccgttacaggtacatcgatgacaacggtaaagacttggggattactggtgcc

SEQ ID NO: 396119 - DNA, 75 bp, synthetic construct
  source 1..75: mol_type = other DNA
tgtgctggcagtgccagcagcgcgggacattatgttcagccggacaagtgctgacacggtggctgtggtgaatgt

SEQ ID NO: 396120 - DNA, 75 bp, synthetic construct
  source 1..75: mol_type = other DNA
actaggatatgagagttcatggattgaaatgcaactcgcacatgttgacaagaataatattcgtggtacttacaa

SEQ ID NO: 396121 - DNA, 75 bp, synthetic construct
  source 1..75: mol_type = other DNA
aggttatgcctcggacattatcgaagcctttaataaagatatttttccctatattggccaacaaccggtgaatga

SEQ ID NO: 396122 - DNA, 75 bp, synthetic construct
  source 1..75: mol_type = other DNA
ggtcattacgctatcgtgatgaaatcatcgacacctttgagaaagatccttatacgggaagacgtcctattgtcg

SEQ ID NO: 396123 - DNA, 75 bp, synthetic construct
  source 1..75: mol_type = other DNA
agaatgctatccgtggcacctacaaccatgcgcaatatctcgatggcagacgcgagatgctgcaatggtatgccg

SEQ ID NO: 396124 - DNA, 75 bp, synthetic construct
  source 1..75: mol_type = other DNA
gaaacccagcttgcgcatcttgataagaatgctatccgtggtacctataaccatgcgcaatatcttgatggcaga

SEQ ID NO: 396125 - DNA, 75 bp, synthetic construct
  source 1..75: mol_type = other DNA
atatcggtcaccggccaatcaaagatatcaagccgatggagttgcttgcagttctttcaaagatagaagcaagag

SEQ ID NO: 396126 - DNA, 75 bp, synthetic construct
  source 1..75: mol_type = other DNA
ttcttaatgaactcaaatctatgacaggaaattatcgttacgtttttcctgggcggaatgatccgaacaagccta

SEQ ID NO: 396127 - DNA, 75 bp, synthetic construct
  source 1..75: mol_type = other DNA
ttcgaaaagagcaaaagctggctctgcaagcagagtcagagaacgccttcgaaaagatagccagagagtggcatc

SEQ ID NO: 396128 - DNA, 75 bp, synthetic construct
  source 1..75: mol_type = other DNA
gttcaagcggattggatacacggggaaggtaacggggcatggtttccgccacacgatgagtacgattttgcatga

SEQ ID NO: 396129 - DNA, 75 bp, synthetic construct
  source 1..75: mol_type = other DNA
tatgggaaatttccgctgaacgcatgaaaatgcgccgtccccatatcatcccgctatctacccaagcgttagcca

SEQ ID NO: 396130 - DNA, 75 bp, synthetic construct
  source 1..75: mol_type = other DNA
gcagggctataacactgcgtggatagaaacgcagctcgcgcacgtcgataaaaactcaattcgtggcacatacaa

SEQ ID NO: 396131 - DNA, 75 bp, synthetic construct
  source 1..75: mol_type = other DNA
catcaaacgtatcggttataacgggagagtgacggggcatggatttaggcacacattgtctacaatattgcatga

SEQ ID NO: 396132 - DNA, 75 bp, synthetic construct
  source 1..75: mol_type = other DNA
gtgcttaaaaaaatcgaagccagaggtgcaacagagaaagcaaagaaagtgcgccaacgatgtggtgaagtgttt

SEQ ID NO: 396133 - DNA, 75 bp, synthetic construct
  source 1..75: mol_type = other DNA
ccaggcgcaccgtaggggtgctctggttctccccttccaggattggtgttgctgacgaaattgcggcgacggttg

SEQ ID NO: 396134 - DNA, 75 bp, synthetic construct
  source 1..75: mol_type = other DNA
gtaatcctgacgggcaatgcgccgtcgccatcgacaatattggcgcgggaaccggggagtgggtgttactggtga

SEQ ID NO: 396135 - DNA, 75 bp, synthetic construct
  source 1..75: mol_type = other DNA
gctgggggtatcgatccgatggaagcgaaacgagaggaaaagattgcccgggaaacgcagttaaacaacaccttc

SEQ ID NO: 396136 - DNA, 75 bp, synthetic construct
  source 1..75: mol_type = other DNA
ggttgccgggctgagttacctcggtgcgatatcggttgatggtgcttatgccacagcgaagtatcgtgatggtag

SEQ ID NO: 396137 - DNA, 75 bp, synthetic construct
  source 1..75: mol_type = other DNA
gtggatattttaggtgatataacattagggacatgtcgaattccagccaccaaactcaaagaaactgagaaatta

SEQ ID NO: 396138 - DNA, 75 bp, synthetic construct
  source 1..75: mol_type = other DNA
ggtcatgagcatgtgcagtattttcctatgaccgtgatgagcggcttgttgaatccagggcagcatgaattcagc

SEQ ID NO: 396139 - DNA, 75 bp, synthetic construct
  source 1..75: mol_type = other DNA
gggcgtaatgacccgcgaaaaaccatgagtgaggccagtattaatcaggtgtttaagcgcatcggatacggtggc

SEQ ID NO: 396140 - DNA, 75 bp, synthetic construct
  source 1..75: mol_type = other DNA
atactgcccggcccaaagagaaaccgtacaaactctctgacggtggcggtctctatttactcgtaaatcccaatg

SEQ ID NO: 396141 - DNA, 75 bp, synthetic construct
  source 1..75: mol_type = other DNA
gtgcattggagaaaatgcgcaaagtgcggcaacgttgctcagaggtttttcgatatgccattgctactggaagag

SEQ ID NO: 396142 - DNA, 75 bp, synthetic construct
  source 1..75: mol_type = other DNA
attgtgaccgaggcgctggtgccgacgtcggcctttttcccgctaatcgacaaactggcggcgaaagccaatacc

SEQ ID NO: 396143 - DNA, 75 bp, synthetic construct
  source 1..75: mol_type = other DNA
tggcgggcgcgtgggagcggctggagcaggggcgagcagatatagttatcgcgccggatatgcattttcgttcct

SEQ ID NO: 396144 - DNA, 75 bp, synthetic construct
  source 1..75: mol_type = other DNA
ttataaccatgctcaatatctggaaggacgcagagaaatgatgcaatggtatgctgattttattgagggaatgaa

SEQ ID NO: 396145 - DNA, 75 bp, synthetic construct
  source 1..75: mol_type = other DNA
gccgcaagctggaatctctcgacgtcgaacagtcatttattcgcgccgtttatggcgtcggctaccgttgggaag

SEQ ID NO: 396146 - DNA, 75 bp, synthetic construct
  source 1..75: mol_type = other DNA
acgataaccaactggggatgttattcaccctggccaacctatttcgggtggaccaaatgatacgtcagtgggaga

SEQ ID NO: 396147 - DNA, 75 bp, synthetic construct
  source 1..75: mol_type = other DNA
tacatgaaagccagcatccgtgccagggtggagcacccgtttcgcatcatcaagcggcagttcggcttcgtgaaa

SEQ ID NO: 396148 - DNA, 75 bp, synthetic construct
  source 1..75: mol_type = other DNA
ttgatctgacccctgcggaatttcgcctgctgaaaacactctcccatgaaccgggaaaagtgttctcccgcgagc

SEQ ID NO: 396149 - DNA, 75 bp, synthetic construct
  source 1..75: mol_type = other DNA
aattgctcaatcatctttatgacgactaccgcgtagtaaccgaccgcaccattgacagccacattaaaaacctgc

SEQ ID NO: 396150 - DNA, 75 bp, synthetic construct
  source 1..75: mol_type = other DNA
ctcattgattatctgcgtgctgcgagctatgcgccaacgttgattagccacggcgatcaggtactaccatatgtg

SEQ ID NO: 396151 - DNA, 75 bp, synthetic construct
  source 1..75: mol_type = other DNA
agtgaattgaacggtacgccgttgcaggcagcggaacctgattaccaggaaagcctgagcgaacccatcgggaag

SEQ ID NO: 396152 - DNA, 75 bp, synthetic construct
  source 1..75: mol_type = other DNA
acgtttctcaaaccgcgaaatccccggcagagcgcaagagagcgcagcgcgagagggaaaaattacgaaaacaga

SEQ ID NO: 396153 - DNA, 75 bp, synthetic construct
  source 1..75: mol_type = other DNA
ttgccgcattccgggattactggatgtcggagggcaaagtgttcacgcaggttcagtgggagcagaaattcgccc

SEQ ID NO: 396154 - DNA, 75 bp, synthetic construct
  source 1..75: mol_type = other DNA
atgaatataaagacgattaacgtcagccttttgtctttttctattattacagtattgtttccgttgaacgcgttg

SEQ ID NO: 396155 - DNA, 75 bp, synthetic construct
  source 1..75: mol_type = other DNA
atgtggtatcaaaagacgctcacgcttagcgccaaatctcgtgggtttcatctggtaacggatgaaattctgaat

SEQ ID NO: 396156 - DNA, 63 bp, synthetic construct
  source 1..63: mol_type = other DNA
atgctgtgcagcaaagggactattgctttgtccctttgctgcgattatctgattacggtacag

SEQ ID NO: 396157 - DNA, 75 bp, synthetic construct
  source 1..75: mol_type = other DNA
acacgccacgcattttaatcgtggaagatgaacccaagctggggcagttgctcatcgattatctgcgtgccgcga

SEQ ID NO: 396158 - DNA, 75 bp, synthetic construct
  source 1..75: mol_type = other DNA
cctgcgtatcaacggcaaaacggctgctgacgtagagcgggcgctaaatgcctcgcaattcacccgcgacgatat

SEQ ID NO: 396159 - DNA, 75 bp, synthetic construct
  source 1..75: mol_type = other DNA
cggattttccatgagcaatcgcatcaagcgcaaaacgctggatgaagcggatatcgccagggaaagcgccgctat

SEQ ID NO: 396160 - DNA, 75 bp, synthetic construct
  source 1..75: mol_type = other DNA
gacttcttctggcggctggaaacgccggatcggctggggcgtgcggggattgataagataggcctcggcgcgcta

SEQ ID NO: 396161 - DNA, 75 bp, synthetic construct
  source 1..75: mol_type = other DNA
aaaaagcatcacagaaaataaatatcaatcggcctcgcttgccgaaatatcagctccatctcccgttgctgataa

SEQ ID NO: 396162 - DNA, 75 bp, synthetic construct
  source 1..75: mol_type = other DNA
ttgactgctatatggttgccgaacatttgctatggctgcaacagcattactggcaaagccgctactctgtctcct

SEQ ID NO: 396163 - DNA, 75 bp, synthetic construct
  source 1..75: mol_type = other DNA
ggagattgaactgtcactctccacgcgggaatcaccgtggtttcgcgatcgcgttattccgctggcaatcaataa

SEQ ID NO: 396164 - DNA, 75 bp, synthetic construct
  source 1..75: mol_type = other DNA
atggcgacataccttattggcgatgttcatggctgttacgatgaactgatcgcattgctacacaaaatagaattt

SEQ ID NO: 396165 - DNA, 75 bp, synthetic construct
  source 1..75: mol_type = other DNA
aaacggccatcaacatcgaatatatgaaagccagcatccgtgccaaggtggagcacccgtttcgcatcatcaagc

SEQ ID NO: 396166 - DNA, 75 bp, synthetic construct
  source 1..75: mol_type = other DNA
attatctctggatagcgccctgccggatcgcaccaccatcatgaatttccaccacctgctcgagcagcatcaact

SEQ ID NO: 396167 - DNA, 75 bp, synthetic construct
  source 1..75: mol_type = other DNA
aaaggaaaaaacaggacttcttctggcggctggaaacgccggatcggctggggcgtgcggggattgataagatag

SEQ ID NO: 396168 - DNA, 75 bp, synthetic construct
  source 1..75: mol_type = other DNA
ggttcattaacctgcctgcgctgggaagataagcagtattttgtccagccgtcgaaccggcacaaggatatgggg

SEQ ID NO: 396169 - DNA, 75 bp, synthetic construct
  source 1..75: mol_type = other DNA
gatggcccacgccgggatcacgccgcagtgggatctgcagaccgccaaagagtgcgcgcgcgatgtagaagcggt

SEQ ID NO: 396170 - DNA, 75 bp, synthetic construct
  source 1..75: mol_type = other DNA
cggtgtatatccaccttctggtgagtgcgtcacgaaatgtcacgacatgtcacggcgtgtcactacgtggtcaca

SEQ ID NO: 396171 - DNA, 75 bp, synthetic construct
  source 1..75: mol_type = other DNA
aacagaggggcatccgcgccgtgcaactcattccccatatagaatttgatgaccggggcgagctgacggcagcgt

SEQ ID NO: 396172 - DNA, 75 bp, synthetic construct
  source 1..75: mol_type = other DNA
atgacaggaagtcaggttatagatgctaaagaggacaggcataaactggttgtagagtataaagatgcattacaa

SEQ ID NO: 396173 - DNA, 75 bp, synthetic construct
  source 1..75: mol_type = other DNA
ctcttgctgaagacttcggattcaatcatgcaatagaacggatgaaacgacggattactgaaattccggctgctg

SEQ ID NO: 396174 - DNA, 75 bp, synthetic construct
  source 1..75: mol_type = other DNA
caagcgcattgcagaactggaggcgagggaaatccagttacctgctggcttcgaccttcgatatggacacccgat

SEQ ID NO: 396175 - DNA, 75 bp, synthetic construct
  source 1..75: mol_type = other DNA
tgcgagaggcggcagagaaagcaactaaaggaagctacatcgtggggcatacgtctgttaaccagaatggcaatt

SEQ ID NO: 396176 - DNA, 75 bp, synthetic construct
  source 1..75: mol_type = other DNA
atggaaaggagagcccggtggcgtaattgcagaatgtcatgttaactgcctggttgaaacagatgttcaggctta

SEQ ID NO: 396177 - DNA, 75 bp, synthetic construct
  source 1..75: mol_type = other DNA
cttaatgagaactgcgatcccaccgtacgccacgacatggagcgttttttcctccgcgccgttcccgataacgga

SEQ ID NO: 396178 - DNA, 75 bp, synthetic construct
  source 1..75: mol_type = other DNA
tcaatgtatgtgatccagtcatcgatgatttttgtttacagtctggtctttactgtgttgttggcgatcccgctg

SEQ ID NO: 396179 - DNA, 75 bp, synthetic construct
  source 1..75: mol_type = other DNA
ccgcaacaaaatcaggcactgacctgctggctatgctcaccaaagccacgcaggaaggtaaagcagctgctgctg

SEQ ID NO: 396180 - DNA, 75 bp, synthetic construct
  source 1..75: mol_type = other DNA
tggatgatggcgataccgtaacgcttaaggaagcgacagatgcgctgatgcattgtgcggaacagcttcgggaag

SEQ ID NO: 396181 - DNA, 75 bp, synthetic construct
  source 1..75: mol_type = other DNA
cacccagttcgcgccttacttcactgaaatggcgctcaaaggcggtttcagttttgccggtgaaagtgcgcaaat

SEQ ID NO: 396182 - DNA, 75 bp, synthetic construct
  source 1..75: mol_type = other DNA
cggtatgtaacggcccaatagttgagattggcggggcagaaccgcgtttcgaaccactgaacgcgacagcgaatc

SEQ ID NO: 396183 - DNA, 75 bp, synthetic construct
  source 1..75: mol_type = other DNA
tcgccggattttcgacggcgggctgcactgtggggagtggctctgccggagcctgaatttacacctgctgaactt

SEQ ID NO: 396184 - DNA, 75 bp, synthetic construct
  source 1..75: mol_type = other DNA
tttacatagctgattacctggcggacaccatgcatttgtccgcagaggagcacggcgtgtatttgttgctgatgt

SEQ ID NO: 396185 - DNA, 75 bp, synthetic construct
  source 1..75: mol_type = other DNA
gatgagtcacgacgtgtcacgcatctgtcacgacaagtcacgacagataaagatacagatacagaattaaacccc

SEQ ID NO: 396186 - DNA, 75 bp, synthetic construct
  source 1..75: mol_type = other DNA
cacaggtaaaaccagtcagcaagggggtaagccatgcagcatcaggtggcacggcatcacgggcagttcaggaaa

SEQ ID NO: 396187 - DNA, 75 bp, synthetic construct
  source 1..75: mol_type = other DNA
ggcaatatttcgcaaaccgcaaaatctccggcagagcgcaagagggcgcagcgtgagagggaaagaaagcgggaa

SEQ ID NO: 396188 - DNA, 75 bp, synthetic construct
  source 1..75: mol_type = other DNA
cagacagccgaacctgaatacctggacggcctgagcgaaccgatcgggaaatttccgatgactggtgtctggcag

SEQ ID NO: 396189 - DNA, 75 bp, synthetic construct
  source 1..75: mol_type = other DNA
aggcgggactggcggcaatctatgatgccgaacccggcagtaacctgacggcctctggcgaagctttcgatccga

SEQ ID NO: 396190 - DNA, 75 bp, synthetic construct
  source 1..75: mol_type = other DNA
ttaccacagtcgccaaacagacttacgccctgccagcacctcccgatttaagcggtggcgcgggaacaagttcag

SEQ ID NO: 396191 - DNA, 75 bp, synthetic construct
  source 1..75: mol_type = other DNA
gaaccactgaacgcgacggcaaatcaggattaccagcgcgacggtaaaagctacaaaatcgtgcaggatccgtct

SEQ ID NO: 396192 - DNA, 75 bp, synthetic construct
  source 1..75: mol_type = other DNA
tcgcctccatgcgcctgtttgcccgcttatccctggatagcgccgtgccggatcgcaccaccatcatgaatttcc

SEQ ID NO: 396193 - DNA, 75 bp, synthetic construct
  source 1..75: mol_type = other DNA
tcgcctccatgcgcctgtttgcccgcttatccctggatagcgccttgccggagcgcaccaccatcatgaatttcc

SEQ ID NO: 396194 - DNA, 75 bp, synthetic construct
  source 1..75: mol_type = other DNA
cttagcgcctggtgtactggaaggcagcgaaccgacacctgcaccacagcccgttgttacagctccgtcgacaac

SEQ ID NO: 396195 - DNA, 75 bp, synthetic construct
  source 1..75: mol_type = other DNA
gcatcggcagcaagccagacggcagcaaaagcaagtgaagatgctgccagagaatacgcaaaccagacagcagag

SEQ ID NO: 396196 - DNA, 75 bp, synthetic construct
  source 1..75: mol_type = other DNA
cggcatcatcgaagaacgcggcgaaaacctcagaaacgaacgcagctaacagcgcacaggcggcagcggcctcac

SEQ ID NO: 396197 - DNA, 75 bp, synthetic construct
  source 1..75: mol_type = other DNA
aaaaatggttatggggatgcgtgtaaagtcagagcagtctacgtgctcagtaagtaacgggcatatatccagcga

SEQ ID NO: 396198 - DNA, 75 bp, synthetic construct
  source 1..75: mol_type = other DNA
ggttcctattacgatgcttcaaaatataaatgtcctatttactcaggtgtcacgctgtttgaaattatggttcat

SEQ ID NO: 396199 - DNA, 75 bp, synthetic construct
  source 1..75: mol_type = other DNA
cgaataaatgaaaatgccgggctggaaaaaatgcttattggtatgcgggtaaagtccgaacggtccacatgtgta

SEQ ID NO: 396200 - DNA, 75 bp, synthetic construct
  source 1..75: mol_type = other DNA
gagttaacaaagatgaagctacgggctggatttttgtagaggcaacgattcaagcaagtaaagaaacttacataa

SEQ ID NO: 396201 - DNA, 75 bp, synthetic construct
  source 1..75: mol_type = other DNA
ggcgcatctgcaaaacttctaccagagttttggctttatccctgtgacggaggtctatgaagaagatggtatccc

SEQ ID NO: 396202 - DNA, 75 bp, synthetic construct
  source 1..75: mol_type = other DNA
attctcggttggcataacgggacactggtggcgtatgcgaggattctgaaaagtgacgacgaactgcaacccgtt

SEQ ID NO: 396203 - DNA, 75 bp, synthetic construct
  source 1..75: mol_type = other DNA
cgagagtcagaaaggacgaagctaccggatggatttttgcagaggcaacaattcaggcaattgatggggagttaa

SEQ ID NO: 396204 - DNA, 75 bp, synthetic construct
  source 1..75: mol_type = other DNA
tttaaacgcgcatcgaaagcaacctatattaataaatctggtgtgctgacagaggctgccattgacgagccacga

SEQ ID NO: 396205 - DNA, 75 bp, synthetic construct
  source 1..75: mol_type = other DNA
cgcctctcagagcgcagcggcggcaaagaaatccgaaactgcagcggcatcatcgaagaacgcggcgaaaacctc

SEQ ID NO: 396206 - DNA, 75 bp, synthetic construct
  source 1..75: mol_type = other DNA
caaaagaggctaccaaattacttggtgctatgctgcagttggttatgcctaataaaaaactcaccttgaaatcta

SEQ ID NO: 396207 - DNA, 75 bp, synthetic construct
  source 1..75: mol_type = other DNA
gcgtttctgtagtcagcgcctttattggcgcaccagtgttgatctttcttgtccgacgtaaaacgcgaggtggcg

SEQ ID NO: 396208 - DNA, 75 bp, synthetic construct
  source 1..75: mol_type = other DNA
atgtctggttctgttgccgtgacacgcgccattgccgtgcccggattgctgttattactgattatcgcgacggca

SEQ ID NO: 396209 - DNA, 75 bp, synthetic construct
  source 1..75: mol_type = other DNA
cagccaaaaaatcagaaaccaacgcgaaaaatagcgagacagccgcaaagacgagcgaaaccaacgcaaagtcca

SEQ ID NO: 396210 - DNA, 75 bp, synthetic construct
  source 1..75: mol_type = other DNA
tttacacaccttaaaagtggtgctgatcccggtgctgatcgccggagcaaccgcactattactgagccgcgcgct

SEQ ID NO: 396211 - DNA, 75 bp, synthetic construct
  source 1..75: mol_type = other DNA
caccgcgacggcgctgggcagtcgcgtggcgcgcacacagttgattggtctgctggcgattaccgtgctttgtgg

SEQ ID NO: 396212 - DNA, 75 bp, synthetic construct
  source 1..75: mol_type = other DNA
gcgtttctgtggtcagtgcgtttattggtgcaccggtgctgatcttcctcgtgcgacgtaaaacgcgaggtggtg

SEQ ID NO: 396213 - DNA, 75 bp, synthetic construct
  source 1..75: mol_type = other DNA
tattacattttttcttttccaatgctaagtttgcggctgatttagcaatataccgtgacatcggtgaatatatct

SEQ ID NO: 396214 - DNA, 75 bp, synthetic construct
  source 1..75: mol_type = other DNA
tagaggcgaaggtaatttggcatcgccgtattatcgtaaagaacttctagaaatattcaatacacttgatgatta

SEQ ID NO: 396215 - DNA, 75 bp, synthetic construct
  source 1..75: mol_type = other DNA
atatgaataggcagtcgaatgaatatagtggtgaatgggaaacaccttttcacttccttctctgtcatttattta

SEQ ID NO: 396216 - DNA, 75 bp, synthetic construct
  source 1..75: mol_type = other DNA
gcaagccagacggctgcaaaagcaagtgaagacgcagccagagagtatgcaagccaggctgcggagccgtataaa

SEQ ID NO: 396217 - DNA, 75 bp, synthetic construct
  source 1..75: mol_type = other DNA
gtaacagacgactctacatatattaacggcgccattctgatgtcaaacaaactgggtgctaattttgataagact

SEQ ID NO: 396218 - DNA, 75 bp, synthetic construct
  source 1..75: mol_type = other DNA
ccggaattgtggaataaaaatccaggcctgaagataagcgagacaaaaaccgattccaggggttttaaatatgca

SEQ ID NO: 396219 - DNA, 75 bp, synthetic construct
  source 1..75: mol_type = other DNA
ctggaggagaacgtcacttgtttggtcacgttcgtaacctgagaatatggcataaagaattaactgatgcgcaaa

SEQ ID NO: 396220 - DNA, 75 bp, synthetic construct
  source 1..75: mol_type = other DNA
gataccatttaacgattcgctggatatgattacgggcttttcgccgtcatataaaaaaattgttattggtgacga

SEQ ID NO: 396221 - DNA, 75 bp, synthetic construct
  source 1..75: mol_type = other DNA
aaaagattgttattggtgacgacgaaataacgatgcctggcgacaagattgttaagtttaaacgtgcatcgaaag

SEQ ID NO: 396222 - DNA, 75 bp, synthetic construct
  source 1..75: mol_type = other DNA
cagcgaagaccagcgaaacgaatgccaaagccagtgaaactgcggcgaaaagcagtcaggatgcagcggcccaaa

SEQ ID NO: 396223 - DNA, 75 bp, synthetic construct
  source 1..75: mol_type = other DNA
taaacgcgcatcgaaagcaacctatattaataaatctggtgtgctgacagaggctgccattgacgagccacgatt

SEQ ID NO: 396224 - DNA, 75 bp, synthetic construct
  source 1..75: mol_type = other DNA
taagtaacgggcgtatatccagcgaaacaaaaaccacatggtcctgtattcagaacaccgcaattatccgtattg

SEQ ID NO: 396225 - DNA, 75 bp, synthetic construct
  source 1..75: mol_type = other DNA
agattacgacggatttccttattgtgatattggtgggtctaacagacggataaacgaaaatgcatcacttgaaaa

SEQ ID NO: 396226 - DNA, 75 bp, synthetic construct
  source 1..75: mol_type = other DNA
ttaatatggcagtagtttcaacctcgggggctgtcgatgtatcaggcgataataagtgtgtgacgacatcgtgca

SEQ ID NO: 396227 - DNA, 75 bp, synthetic construct
  source 1..75: mol_type = other DNA
ataaaaaaattgttattggtgatgatgaaataacgatgcctggcgacaaggttgttaagtttaaacgcgcatcaa

SEQ ID NO: 396228 - DNA, 75 bp, synthetic construct
  source 1..75: mol_type = other DNA
cgatttggagggcagacgaatactggagaacgacatctgtttggccatattcgcaatttccgcatatggcataaa

SEQ ID NO: 396229 - DNA, 75 bp, synthetic construct
  source 1..75: mol_type = other DNA
gacgttgagtatggtcagtacagcgtcatcctgtggattgagggttctcagccatcacatgttgggaccattacc

SEQ ID NO: 396230 - DNA, 75 bp, synthetic construct
  source 1..75: mol_type = other DNA
agacgcagccagagagtatgcaagtcaggcagcagagccgtataaatatgtcttacagccgctgcctgatgtgtg

SEQ ID NO: 396231 - DNA, 75 bp, synthetic construct
  source 1..75: mol_type = other DNA
atatgtcttacagccactgcctgatgtgtggataccgtttaacgattcactggatatgattacgggcttttcgcc

SEQ ID NO: 396232 - DNA, 75 bp, synthetic construct
  source 1..75: mol_type = other DNA
aatgccaaagccagtgaaactgcggcgaaaaacagtcaggatgctgcagcccaaagcgagagtgccgcagctggt

SEQ ID NO: 396233 - DNA, 75 bp, synthetic construct
  source 1..75: mol_type = other DNA
aaactgcggcaaaaaacagccaggttgcagcagcccaaagcgagagcgcggcagccggttctgtgacttcagcag

SEQ ID NO: 396234 - DNA, 75 bp, synthetic construct
  source 1..75: mol_type = other DNA
ttgttcgtgacggtgagtgggttgctgtagaggctgtttataaagtaacagacgactctacatatattaacggcg

SEQ ID NO: 396235 - DNA, 75 bp, synthetic construct
  source 1..75: mol_type = other DNA
tcctgcttctgtccctccgcttcctgatatctggctacccatgaatgattctctggaagcgataacagggtatgc

SEQ ID NO: 396236 - DNA, 75 bp, synthetic construct
  source 1..75: mol_type = other DNA
ataaaacaataaccatcggtagtgatgaaatcactgtgccagttaatggaatatgtcagtttagccgggcttcat

SEQ ID NO: 396237 - DNA, 75 bp, synthetic construct
  source 1..75: mol_type = other DNA
gctaaagcaagcgaagatgcagccagagagtacgcaagccaggctgcggagccgtataaatatgtcttacagccg

SEQ ID NO: 396238 - DNA, 75 bp, synthetic construct
  source 1..75: mol_type = other DNA
atgtgtggataccatttaacgattcgctggatatgattacgggcttttcgccgtcatataaaaaaattgttattg

SEQ ID NO: 396239 - DNA, 75 bp, synthetic construct
  source 1..75: mol_type = other DNA
ggacgctgaatgattttctgggagccatgacggaagaggatgtcatgccggaggcattgcgtcgttttgaggtaa

SEQ ID NO: 396240 - DNA, 75 bp, synthetic construct
  source 1..75: mol_type = other DNA
ccgttagcggaaaaacagttaccggaactggtactgaattcaacgccgcattatctctgatcagggttggttgca

SEQ ID NO: 396241 - DNA, 75 bp, synthetic construct
  source 1..75: mol_type = other DNA
cccgcgtgtgggatatagcagcagccaataccgggcaatcagcaattgcagcaatcaacagaggtagtggtaagt

SEQ ID NO: 396242 - DNA, 75 bp, synthetic construct
  source 1..75: mol_type = other DNA
caggctgcggagccgtataaatatgtcttacagccgctacctgatgtgtggataccatttaacgattcgctggat

SEQ ID NO: 396243 - DNA, 75 bp, synthetic construct
  source 1..75: mol_type = other DNA
catcaactgcgccttcgccgtttccgctgctttcgcgctgggcgaccatttaggcttcgccgctgccaacatgaa

SEQ ID NO: 396244 - DNA, 75 bp, synthetic construct
  source 1..75: mol_type = other DNA
cggcgtaacggcgattggcgtggcgatgatgctggtgccaaaagacgacgcgaccgcggctaaaaccgaagcgga

SEQ ID NO: 396245 - DNA, 75 bp, synthetic construct
  source 1..75: mol_type = other DNA
tgccctgatcctgatgaacatgatcccggtacttatcgttgcggtgctggtggcgctggggctgaaattcatccc

SEQ ID NO: 396246 - DNA, 75 bp, synthetic construct
  source 1..75: mol_type = other DNA
cgtccggttcggtggggacggagggcgcgatattttatcgtctgcggatgtggcggatgtcatggtggatgaagc

SEQ ID NO: 396247 - DNA, 75 bp, synthetic construct
  source 1..75: mol_type = other DNA
tgcttgccgggatgacatccaccgaatatgccgattggcaccgtttttaccgcacgcattattttcaggataccc

SEQ ID NO: 396248 - DNA, 75 bp, synthetic construct
  source 1..75: mol_type = other DNA
tttaatagtgcttataaccgtaaactacttggtactaaatcagttccagatatcccactaactgtaaactatcta

SEQ ID NO: 396249 - DNA, 75 bp, synthetic construct
  source 1..75: mol_type = other DNA
aactaggccgccttggcggacaggaggatgatttgttggtggatgaaaaagattctgcttatacatcacctgttg

SEQ ID NO: 396250 - DNA, 75 bp, synthetic construct
  source 1..75: mol_type = other DNA
tggcggatgtcatggtggatgatgccgtattaatgatgtcttcagcggggatttccggaggtgtgagatatgtcc

SEQ ID NO: 396251 - DNA, 75 bp, synthetic construct
  source 1..75: mol_type = other DNA
tttaataatgcgtatgaccgaaaattattaggtactaaatcaatccctgatattagtcttgaagttaactactta

SEQ ID NO: 396252 - DNA, 75 bp, synthetic construct
  source 1..75: mol_type = other DNA
gataaagatgaagtagtaactaagactttcacccttgcagttgatggtgaagcaattgattcaggtctgattact

SEQ ID NO: 396253 - DNA, 75 bp, synthetic construct
  source 1..75: mol_type = other DNA
actatgaatattaactatattccaagtgaccccatccatcaaaagctacttgctcttgccgattcacaaaagcgt

SEQ ID NO: 396254 - DNA, 75 bp, synthetic construct
  source 1..75: mol_type = other DNA
attttattgcgatatttggctggtcagtggcgactttattccagggctttgccacgggattaatgtcattaattg

SEQ ID NO: 396255 - DNA, 75 bp, synthetic construct
  source 1..75: mol_type = other DNA
gcgcctgattggtttaaccggcggcgtgtttaacttcgccggtggtctgggcggcatcaccgttccgctggtggt

SEQ ID NO: 396256 - DNA, 75 bp, synthetic construct
  source 1..75: mol_type = other DNA
ttgtcaccggtggtatcggcattatctggtcgctgatttggtttaaggtttatcagccgccgcgcctgaccaaag

SEQ ID NO: 396257 - DNA, 75 bp, synthetic construct
  source 1..75: mol_type = other DNA
taatcaccctcggtcttgccgctgcggtggtgaaattcctcctcggttgggaactgatccccggtcttgatccga

SEQ ID NO: 396258 - DNA, 75 bp, synthetic construct
  source 1..75: mol_type = other DNA
ctgcggacgtaatacgtacggagtcactttctgatgcctttgccgcgcgaactgccaaagggatcattcttttcg

SEQ ID NO: 396259 - DNA, 75 bp, synthetic construct
  source 1..75: mol_type = other DNA
gggcttttgtcacgcagggctatcgtagaactggagccgtttatggccgcattccgccagatgatgtcagaagct

SEQ ID NO: 396260 - DNA, 75 bp, synthetic construct
  source 1..75: mol_type = other DNA
agtgacgccaagtgtcggaatctggtgaacgcatatcaaattcctacagacacccacgaattcatgactccggac

SEQ ID NO: 396261 - DNA, 75 bp, synthetic construct
  source 1..75: mol_type = other DNA
tagcgttgccttggtaggtccagcggcggaggaactctttgatccggttcctgaacaggatctatttgaggcgct

SEQ ID NO: 396262 - DNA, 75 bp, synthetic construct
  source 1..75: mol_type = other DNA
gtggctaaaacaaagttaaacatcatgagggaagtggtgatcgccgaagtatcgactcaactatcagaggtagtt

SEQ ID NO: 396263 - DNA, 75 bp, synthetic construct
  source 1..75: mol_type = other DNA
gaagatcgaaacggtcaccaaagctgtggagaacatcaaacgcggcacaatgcgcaccggatatgtcggttaccg

SEQ ID NO: 396264 - DNA, 75 bp, synthetic construct
  source 1..75: mol_type = other DNA
cgcagagctggtgggtagccaacacaaagatgttaagcgcagcattgaaaggctcatggataaggggattattcg

SEQ ID NO: 396265 - DNA, 75 bp, synthetic construct
  source 1..75: mol_type = other DNA
agccgttcgccaacagaaacggatcactcaggtggaagaaaaagtcagccacgttgctgaaacagtcgagcaaat

SEQ ID NO: 396266 - DNA, 75 bp, synthetic construct
  source 1..75: mol_type = other DNA
agacgttcgcttccagaacggtgatggttttggtctttccacttcatatgactttgacttcggtttgagctgtat

SEQ ID NO: 396267 - DNA, 75 bp, synthetic construct
  source 1..75: mol_type = other DNA
caaaagaggcaccatacgcgatggttatgcaggctaccgtcagctggtagcgaaaacgggtatgtcagatgcgaa

SEQ ID NO: 396268 - DNA, 75 bp, synthetic construct
  source 1..75: mol_type = other DNA
aaaatcaataacttagggtttaaagttcaacatgagcattacttgtttgaaggcgaacaaggcaaacgcgacagc

SEQ ID NO: 396269 - DNA, 75 bp, synthetic construct
  source 1..75: mol_type = other DNA
gcgtcgcgcgattgttgcagtagaacccttcatgtctgcttttcatcgcatgatgagtgaagcagaaccacgagg

SEQ ID NO: 396270 - DNA, 75 bp, synthetic construct
  source 1..75: mol_type = other DNA
gcggcggaggaactctttgatccagttcctgaacaagatctaatcaaggcgctgaatgaaaccttgaagctatgg

SEQ ID NO: 396271 - DNA, 75 bp, synthetic construct
  source 1..75: mol_type = other DNA
gtcgtttgatgaaagtgtgtcgtgcgcgcgtcgtaccgctgtttccgatttatgatggcaagacgcaccgtttga

SEQ ID NO: 396272 - DNA, 75 bp, synthetic construct
  source 1..75: mol_type = other DNA
gaatttgttgatttctttgccacctataaagcgacgttgcccgcgattggtcgtttgatgaaagtgtgccgtgcg

SEQ ID NO: 396273 - DNA, 75 bp, synthetic construct
  source 1..75: mol_type = other DNA
accagagcaatacacctggattttaaaattgctcaagactcgcaaaccgggcgaaattcagccttataaacgcaa

SEQ ID NO: 396274 - DNA, 75 bp, synthetic construct
  source 1..75: mol_type = other DNA
agcagatggacattcgcggcaaagtgatcaactgcgctttcgccgtttccgcagccttcgcgctgggcgaccatt

SEQ ID NO: 396275 - DNA, 75 bp, synthetic construct
  source 1..75: mol_type = other DNA
cacaaattttagaggacagtggggaaaaaaatgatgaggttcgtgtcggatcaacattgaatgacaaggtagtgg

SEQ ID NO: 396276 - DNA, 75 bp, synthetic construct
  source 1..75: mol_type = other DNA
gccctgccggaaccggaatttacacctgctgaacttgctgcattccgggattactggatggctgagggcaaagtg

SEQ ID NO: 396277 - DNA, 75 bp, synthetic construct
  source 1..75: mol_type = other DNA
cttcgagccagccacgatcgacatcgatctggctatcttgctaacgaaagcgagagaacatagcgtggctttggt

SEQ ID NO: 396278 - DNA, 75 bp, synthetic construct
  source 1..75: mol_type = other DNA
accgcaaggcttgatgacacaacgcggcgagctttgttcaacgatcttttggaggtttcggctttcccaggcgag

SEQ ID NO: 396279 - DNA, 75 bp, synthetic construct
  source 1..75: mol_type = other DNA
ctattgttgatgagatgtttgccaccgcgccgcaggcaatggtgatgatggcggagttggcgctacgcgggccag

SEQ ID NO: 396280 - DNA, 75 bp, synthetic construct
  source 1..75: mol_type = other DNA
tgacttgtcagaggcagatgaccataccattgcgcggcggatgaatgaagaagtcgagatttttgttggtccgcg

SEQ ID NO: 396281 - DNA, 75 bp, synthetic construct
  source 1..75: mol_type = other DNA
taaggcaatttgtgcaacaagcactgaacagaggtgaagcttatcatcaactaagaagagcaatagcatcagtaa

SEQ ID NO: 396282 - DNA, 75 bp, synthetic construct
  source 1..75: mol_type = other DNA
cgatgagtgaacgcaatcttgcccgactgatagtgaaagagacggggttgagttttcgccagtggcgtcagcagt

SEQ ID NO: 396283 - DNA, 75 bp, synthetic construct
  source 1..75: mol_type = other DNA
ttgtgcgggctgactataaaacccgtgtgggtgtgaaagtgctgatgacgctgatgagaaacgggaaagcagttc

SEQ ID NO: 396284 - DNA, 75 bp, synthetic construct
  source 1..75: mol_type = other DNA
cgatgattgccaccaccgtggtgttgctgctactggcactgattggcggtatctggacgttacgtaaatcgcgta

SEQ ID NO: 396285 - DNA, 75 bp, synthetic construct
  source 1..75: mol_type = other DNA
actgtcagaagcacagtcaaaagccctttcagcgcgttttaacacggcactggaagccagcctgcaggcgtggca

SEQ ID NO: 396286 - DNA, 75 bp, synthetic construct
  source 1..75: mol_type = other DNA
attcaacaacggcttttattaccatgtttaagaaaggcctggggcaaaccccaggccgatatattgcgggattaa

SEQ ID NO: 396287 - DNA, 75 bp, synthetic construct
  source 1..75: mol_type = other DNA
tgttgcacgctgaaaattgcgcctttatgtcgtgaattaattttaacgctggcaaaaagaacagcagctcaacgt

SEQ ID NO: 396288 - DNA, 75 bp, synthetic construct
  source 1..75: mol_type = other DNA
gatgttagctcttaacgtcaatatacctttcagccattggctgcgttctgacagtaaatctcagtggcgacatgc

SEQ ID NO: 396289 - DNA, 75 bp, synthetic construct
  source 1..75: mol_type = other DNA
gctcgtggcgtggaagtgaaaggcatcgtggttcgggaaggtcagccggtcattcgtattcagcgccatgccatg

SEQ ID NO: 396290 - DNA, 75 bp, synthetic construct
  source 1..75: mol_type = other DNA
aaaaaagactcttcaataaattatcactcaagttcagataaagttaaaaatttgtttctgtacattaaagaagag

SEQ ID NO: 396291 - DNA, 75 bp, synthetic construct
  source 1..75: mol_type = other DNA
gttgatccgcaatatcgcctgaatgcgatgattgccaccaccgtggtgttgctgctactggcactgattggcggt

SEQ ID NO: 396292 - DNA, 75 bp, synthetic construct
  source 1..75: mol_type = other DNA
agccacctgagcgaaggccaccgtgtcgctgtccactacggctacgacgataagggccgcctgacgggcgaacgg

SEQ ID NO: 396293 - DNA, 75 bp, synthetic construct
  source 1..75: mol_type = other DNA
cgctggataccaataccctggctgataacgtcgatttagataatgcggtcgctaacgttgttcccacccgtgggg

SEQ ID NO: 396294 - DNA, 75 bp, synthetic construct
  source 1..75: mol_type = other DNA
agaagcgcagtcaaaagccctttcagcgcgttttaacacggcactggaagccagcctgcaggcgtggcagcagaa

SEQ ID NO: 396295 - DNA, 75 bp, synthetic construct
  source 1..75: mol_type = other DNA
ttgattgatgatgctgtcgcatgggcgaaacagcagagcaacgatcgcgcacagcaaatcgtggacgcgactgac

SEQ ID NO: 396296 - DNA, 75 bp, synthetic construct
  source 1..75: mol_type = other DNA
agggatattcgctggcagaggaaattgccaatagtgtcagtcatggtatcggactggtgtttggcattgtcgggc

SEQ ID NO: 396297 - DNA, 75 bp, synthetic construct
  source 1..75: mol_type = other DNA
ttcgacgctctatcacgccattccccatcaacgggcaaaaatgtggctgaagaaatttgaccactgcgctattta

SEQ ID NO: 396298 - DNA, 75 bp, synthetic construct
  source 1..75: mol_type = other DNA
ggctgtctggtggaaaaaattaaggtcggtgatttctccacaccggccagggcaaccgcagagccgggagcgtaa

SEQ ID NO: 396299 - DNA, 75 bp, synthetic construct
  source 1..75: mol_type = other DNA
attgccagcaccaccgacaccgccggtggcaccgagcgtcagccgaaggacttctcgaagctggcgtccaacaag

SEQ ID NO: 396300 - DNA, 75 bp, synthetic construct
  source 1..75: mol_type = other DNA
tttccttcgcccaggcgcgtgcttgtgcagaagctggcgtattcctgatctctccgtttgttggccgtattcttg

SEQ ID NO: 396301 - DNA, 75 bp, synthetic construct
  source 1..75: mol_type = other DNA
gaaaccataaagcgaaacctccgcgaaaggatgaaaaatgctaaacaagtagtactgttgggaagcggtaatact

SEQ ID NO: 396302 - DNA, 75 bp, synthetic construct
  source 1..75: mol_type = other DNA
ctgaatttaaacgcgagtacaaaacgttcgccagctcaatggatatgtcattgaaagaagtgctgacaaaatctt

SEQ ID NO: 396303 - DNA, 75 bp, synthetic construct
  source 1..75: mol_type = other DNA
acttttcaggtgtcacgatgcagcttcttgacggaggtcgcctccgctaccagttaacaggaaaattttatgcgc

SEQ ID NO: 396304 - DNA, 75 bp, synthetic construct
  source 1..75: mol_type = other DNA
cggcattgggctggtgtttggtatcgttgggctggtgttgctactggttcaggcggtggatctcaatgccagcgc

SEQ ID NO: 396305 - DNA, 75 bp, synthetic construct
  source 1..75: mol_type = other DNA
gcatgaacgggcagaaatcattaaatgcgccgaatatatcaggttttctttatatcctgaggtcaaccgacttca

SEQ ID NO: 396306 - DNA, 75 bp, synthetic construct
  source 1..75: mol_type = other DNA
gaaacgataaagaaaaatctccgcgagcgtatgaaaaatgctaaacaggttgtacttcttgggagcagcgatgcg

SEQ ID NO: 396307 - DNA, 75 bp, synthetic construct
  source 1..75: mol_type = other DNA
atgttaccaattaaacccgtttgtctcgcactggctttattttcactcaattcaatagcctgctccggcgtacca

SEQ ID NO: 396308 - DNA, 75 bp, synthetic construct
  source 1..75: mol_type = other DNA
gctaatgcgctggcaaccaataaactgcaggcttgtggcggctctatctctgcaaccatctattttattcgctgt

SEQ ID NO: 396309 - DNA, 75 bp, synthetic construct
  source 1..75: mol_type = other DNA
atcgccagcgccggatgtatggactgccatttgcgctggtggcggggggctgcgtcggtttttacgatggattct

SEQ ID NO: 396310 - DNA, 75 bp, synthetic construct
  source 1..75: mol_type = other DNA
atcgccagcgccggatgtacggactacctttcgcgttaattgccggtggctgcgtcggtttttacgatggattct

SEQ ID NO: 396311 - DNA, 75 bp, synthetic construct
  source 1..75: mol_type = other DNA
gccagcgccggatgtacggtttacccttcgcgttaattgccggtggctgcgtcggtttttatgacggattctttg

SEQ ID NO: 396312 - DNA, 75 bp, synthetic construct
  source 1..75: mol_type = other DNA
aacttaatattgccatgacctttgtcggctcaatgagcggcgcactgttggtacagtacgttcaggctgatgtct

SEQ ID NO: 396313 - DNA, 75 bp, synthetic construct
  source 1..75: mol_type = other DNA
tttattctcggcggcaaagtgatttgggcgacgggctttgtgatgctggtggggcagttcctcggcgcgcgcatg

SEQ ID NO: 396314 - DNA, 75 bp, synthetic construct
  source 1..75: mol_type = other DNA
acaaattcccgtaaggtatataaaagacaaaattacttttgtatccaataaagacaggggggaacacttcgatgt

SEQ ID NO: 396315 - DNA, 75 bp, synthetic construct
  source 1..75: mol_type = other DNA
atgcaggagattaacgctttccagatgcgctataacgcgttctttcagcctgccgagggcgttcattggctgcat

SEQ ID NO: 396316 - DNA, 75 bp, synthetic construct
  source 1..75: mol_type = other DNA
agacataatttttaaaggcctttgggcatgtaaaccggaaacatcagggaataacaccaacaaatggtattacgg

SEQ ID NO: 396317 - DNA, 75 bp, synthetic construct
  source 1..75: mol_type = other DNA
gggcagaaactttctggttacggcaaggatatgtcactttatgggctggaggattacaccgtcgtccgccacgtc

SEQ ID NO: 396318 - DNA, 75 bp, synthetic construct
  source 1..75: mol_type = other DNA
aggggttccagtgatagctggttgccctagagctgtaaatgtctgggacttatcaaattgtaataattacgcatg

SEQ ID NO: 396319 - DNA, 75 bp, synthetic construct
  source 1..75: mol_type = other DNA
ctccggcgcacgctgacccgcaccggctttgtcatcgaccacatccactactacgccgatgcgctcaagccgtgg

SEQ ID NO: 396320 - DNA, 75 bp, synthetic construct
  source 1..75: mol_type = other DNA
attttgctattatattccgtgatcttggaactggttctgcaattatacaaaagaaaaagattgatgatggttttc

SEQ ID NO: 396321 - DNA, 75 bp, synthetic construct
  source 1..75: mol_type = other DNA
aaggcttatgacgatgggatgcaggccgcaagaaaggcactggaaagaatgaaaaaattaaaacagaaaaaagcc

SEQ ID NO: 396322 - DNA, 75 bp, synthetic construct
  source 1..75: mol_type = other DNA
atcggtgatggaccggaagaatacgctggagagatccgggaaggtgaatataagccgacatttgacgtccttgaa

SEQ ID NO: 396323 - DNA, 75 bp, synthetic construct
  source 1..75: mol_type = other DNA
tattgcttgataaaaaggcttatgacgatggaatgagggaggctatggaggtgctggaaagactaaaaaaatcca

SEQ ID NO: 396324 - DNA, 75 bp, synthetic construct
  source 1..75: mol_type = other DNA
ttgatgaagacacggttgagcattttgaactgaaaggccaatggacgtggtttaaatacgccaatggtcaattat

SEQ ID NO: 396325 - DNA, 75 bp, synthetic construct
  source 1..75: mol_type = other DNA
aaggtgttaatattgtaggggataaagtttatttcattgcgagcgatgatgtgactatttttgatattaatgggc

SEQ ID NO: 396326 - DNA, 75 bp, synthetic construct
  source 1..75: mol_type = other DNA
gtgggggcaaggacaaaatatattgttgaagatagcgatggttacggactctattttccggatattcatttaccg

SEQ ID NO: 396327 - DNA, 75 bp, synthetic construct
  source 1..75: mol_type = other DNA
acgctcaggtcaggctggcgctgggttttctgcgcgaaaccgaacctgaaatgcaggatattaatgcttttcaga

SEQ ID NO: 396328 - DNA, 75 bp, synthetic construct
  source 1..75: mol_type = other DNA
cgtccgttctccgtcagggcatccggtggagacaatgacggagggggcaaccgtatgggcagaagttaaggggat

SEQ ID NO: 396329 - DNA, 75 bp, synthetic construct
  source 1..75: mol_type = other DNA
attattatgattatctcaccactcgttgctgttttctttcatgagagccaattaacatatgtgttgatcttgtta

SEQ ID NO: 396330 - DNA, 75 bp, synthetic construct
  source 1..75: mol_type = other DNA
attggtgatggcccggaagaagagtccggggaaatcccggaaggggaatataagccgacttttaacgtccttgaa

SEQ ID NO: 396331 - DNA, 75 bp, synthetic construct
  source 1..75: mol_type = other DNA
acgaaatagccccgttattgggtgaatgtaggttaacttcttccggcaagttacgactaaaacccggactgatgc

SEQ ID NO: 396332 - DNA, 75 bp, synthetic construct
  source 1..75: mol_type = other DNA
atgattcatgttcgaacaggacaatttgcggcggtggtagacggcaggcggtatgtgtttaatccctgtttcgct

SEQ ID NO: 396333 - DNA, 75 bp, synthetic construct
  source 1..75: mol_type = other DNA
caatgactcatctttggcaatgatagaaaatctggatgctattagttcagaaaccgttcctttaattttattatt

SEQ ID NO: 396334 - DNA, 75 bp, synthetic construct
  source 1..75: mol_type = other DNA
agcgtaaaaaagttaattcagatgaactggcatatcttcgcaatcactatccagatttaagcgaagaagaggccg

SEQ ID NO: 396335 - DNA, 75 bp, synthetic construct
  source 1..75: mol_type = other DNA
tgcgatgatacaaacatagttgccatggcacatgggcaaggaggggctgagataaaaaccgataattcggcacca

SEQ ID NO: 396336 - DNA, 75 bp, synthetic construct
  source 1..75: mol_type = other DNA
agaggcctgttcagcgatgcagatgcgtaccctctggaccaggcatttccgctgctgatgaaacaactgtaactc

SEQ ID NO: 396337 - DNA, 75 bp, synthetic construct
  source 1..75: mol_type = other DNA
cacttcccgacgacaatcacgaccgcccctggtgggggctaccctgcaccgtgacgccctgtttcggggcacgtc

SEQ ID NO: 396338 - DNA, 75 bp, synthetic construct
  source 1..75: mol_type = other DNA
tgcatttgaactggaaaaacggaatttaaatgacagtgtggccttaattggccaccgcatcgctcacggcggcag

SEQ ID NO: 396339 - DNA, 75 bp, synthetic construct
  source 1..75: mol_type = other DNA
aatcattctctgcgcgttttcacctgtgatttcaaagttgaggcgaatgaacgtgattcatttgaaaaattttag

SEQ ID NO: 396340 - DNA, 75 bp, synthetic construct
  source 1..75: mol_type = other DNA
gctgacgtcatcatcagccagaaacgcatcggtaacctgccggcggtacgcgtcccgtacttcccggcggatgcg

SEQ ID NO: 396341 - DNA, 75 bp, synthetic construct
  source 1..75: mol_type = other DNA
aaatggcgctaccggaagaaacggtggtctgcgttactggcgacggcagtattcaaatgaatattcaggaactgt

SEQ ID NO: 396342 - DNA, 75 bp, synthetic construct
  source 1..75: mol_type = other DNA
ctcgaacagacctcgatcccgcaacggtactttttgagttcgaaggcgtgcgccggaatattgcgccgagcagag

SEQ ID NO: 396343 - DNA, 75 bp, synthetic construct
  source 1..75: mol_type = other DNA
gtggctaatacggaagaatttcactggttaccagaggatgggaaaaacagaaataaaccatcgataaaaactgta

SEQ ID NO: 396344 - DNA, 75 bp, synthetic construct
  source 1..75: mol_type = other DNA
taaaaactgtaagatttggcgatggttatgagcaacgaagtccaaatggacttaatcattctcagcgtgttttca

SEQ ID NO: 396345 - DNA, 75 bp, synthetic construct
  source 1..75: mol_type = other DNA
agaggcctgttcagcgatgcagatgcgtaccctctggaccaggcttttccgctgctgatgaaacaactggaactc

SEQ ID NO: 396346 - DNA, 75 bp, synthetic construct
  source 1..75: mol_type = other DNA
gcgtcgcgcatcatgcgtatctgcttgggcggcaactgatgcacacacgggcatcgcttccggcaattgcccgac

SEQ ID NO: 396347 - DNA, 75 bp, synthetic construct
  source 1..75: mol_type = other DNA
ttaccttgccgaccgcgccggtatcagaggccggttcagcaatgcagatgcataccacctggaccaggcctttgc

SEQ ID NO: 396348 - DNA, 75 bp, synthetic construct
  source 1..75: mol_type = other DNA
ccgtcacgctgtatgcaaaagggctgacctgcaaagccgataccctcagcagttgtagttacgtttatctggctg

SEQ ID NO: 396349 - DNA, 75 bp, synthetic construct
  source 1..75: mol_type = other DNA
ctgactggtatcggtgatgccatcggcgaattgcacacataccaatgttcacgggagcacgtgtgcagctataga

SEQ ID NO: 396350 - DNA, 75 bp, synthetic construct
  source 1..75: mol_type = other DNA
cgtcaatatttgctgtgcctggtttgatgaaaacgatgctgatgccacgcaaattagcgatggagcggcctttcg

SEQ ID NO: 396351 - DNA, 75 bp, synthetic construct
  source 1..75: mol_type = other DNA
aacaggattttgcgcacgtctggcagtttccatcaggaacgccgcttcaaagcgcgagctggcgggaaaaagcgc

SEQ ID NO: 396352 - DNA, 75 bp, synthetic construct
  source 1..75: mol_type = other DNA
atgtctattaagtctaattttttagtggtgtttattagtcttgagatatttggtattatttcttgtgagattact

SEQ ID NO: 396353 - DNA, 75 bp, synthetic construct
  source 1..75: mol_type = other DNA
tggtgcaggagggtaaccggttgcattaccttgccgaccgcgccggtattagaggcctgttcagcgatgcagatg

SEQ ID NO: 396354 - DNA, 75 bp, synthetic construct
  source 1..75: mol_type = other DNA
agaggcctgttcagcgatgcagatgcgtaccctctggaccaggcctttcctctgctgatgaaacaactgaaactc

SEQ ID NO: 396355 - DNA, 75 bp, synthetic construct
  source 1..75: mol_type = other DNA
agaggccggttcagcgacgcggatgcgaaccatctggaccagacctttccgctgctgatgaaacaactggagctc

SEQ ID NO: 396356 - DNA, 75 bp, synthetic construct
  source 1..75: mol_type = other DNA
gtatgcaaaagggctgacctgcgaagccgacaccctcggcagctgtggttgcgtttatctggctgtttatccgac

SEQ ID NO: 396357 - DNA, 75 bp, synthetic construct
  source 1..75: mol_type = other DNA
gtgtcagacacactccataagacaaattatcccgacgacaacaacgaccgcccctggtgggggctcccctgcacc

SEQ ID NO: 396358 - DNA, 75 bp, synthetic construct
  source 1..75: mol_type = other DNA
atggcctggcgcgcgcgacaggggaagtcggtgtcgtgctggtgacgtccgggccgggagcaactaacgctatta

SEQ ID NO: 396359 - DNA, 75 bp, synthetic construct
  source 1..75: mol_type = other DNA
taccgctgtgccgcactggtggaaaacatccagattggcgacttcagcgccgccgcagcagaaaccggagcgtaa

SEQ ID NO: 396360 - DNA, 75 bp, synthetic construct
  source 1..75: mol_type = other DNA
caaaagagcgtgagcctgtcgatccgacgctaatggtcgatgtggaatataaatgcgagcagaccaactttgaca

SEQ ID NO: 396361 - DNA, 75 bp, synthetic construct
  source 1..75: mol_type = other DNA
gaactgtccagcaagttcactgtagagccgtctgtgcagcagacgctgaaagaccagatccagcagtccgccgct

SEQ ID NO: 396362 - DNA, 75 bp, synthetic construct
  source 1..75: mol_type = other DNA
cttcaccgcgcttgagtccaacaagtacgagtgcgaccagattaactttgatttccatctgaaatacaaaaccct

SEQ ID NO: 396363 - DNA, 75 bp, synthetic construct
  source 1..75: mol_type = other DNA
tacgtggtcgaaacctacgccgccgggtgcttcattgaaaatatcaagctgggcgatttctctgccgcgcaaccg

SEQ ID NO: 396364 - DNA, 75 bp, synthetic construct
  source 1..75: mol_type = other DNA
catgatcggctttaacggcgtgaagcgtgcgaaaacctccaaccgtagcgaaaacccgctgctacaggatgtgaa

SEQ ID NO: 396365 - DNA, 75 bp, synthetic construct
  source 1..75: mol_type = other DNA
cgcaatgaagctgccgcgcgcgtgatgtccaacgtcaccgatgatgacggcaaggtcatttccgatgtgatccgc

SEQ ID NO: 396366 - DNA, 75 bp, synthetic construct
  source 1..75: mol_type = other DNA
cgaaacgtgaccggattgaaaattttgaatccgttaatgaagcctacgtggttgaggactaccgctgcgccgcac

SEQ ID NO: 396367 - DNA, 75 bp, synthetic construct
  source 1..75: mol_type = other DNA
attgccggaaccactgacaccaccgcgaaagagcgtgaacccgtcgatccgaccctgatggtcgatgtggaatat

SEQ ID NO: 396368 - DNA, 75 bp, synthetic construct
  source 1..75: mol_type = other DNA
gcgtgggtaaactgcctatcgacctgagccagttgaaagttgacctgatgtctttctccggtcacaaaatctatg

SEQ ID NO: 396369 - DNA, 75 bp, synthetic construct
  source 1..75: mol_type = other DNA
tgaaagaactcgaagcggcgatgcgtgacgacaccatcctcgtttctatcatgcacgtgaataacgaaatcggcg

SEQ ID NO: 396370 - DNA, 75 bp, synthetic construct
  source 1..75: mol_type = other DNA
ggcggtcggctggctgcagaaataccgcaatgaagcaccggcgcgcgtgatgagcaaggtcactgacgaggaagg

SEQ ID NO: 396371 - DNA, 75 bp, synthetic construct
  source 1..75: mol_type = other DNA
gaagactacgccgccggttgcctggtggaaaaaattaaggtcggtgatttctccacaccggccagggcgaccgca

SEQ ID NO: 396372 - DNA, 75 bp, synthetic construct
  source 1..75: mol_type = other DNA
gcagtaacccgatgctgcaggatgtggcggtcggctggctgcagaaataccgcaatgaagccccggcgcgcgtga

SEQ ID NO: 396373 - DNA, 75 bp, synthetic construct
  source 1..75: mol_type = other DNA
tacgtggtggaagactacgccgccggttgtctggtggaaaaaattaaggtcggtgatttctccacacaggccagg

SEQ ID NO: 396374 - DNA, 75 bp, synthetic construct
  source 1..75: mol_type = other DNA
tggggcgtcagctactggcggacaagtatttccccatcgtcaacaagagcaggacaacagcgaatgctggccgct

SEQ ID NO: 396375 - DNA, 75 bp, synthetic construct
  source 1..75: mol_type = other DNA
ttgatttacccaaagatattcttaatccggcgaacaaattaccctacgtctggccggagtcggtcagtatgcgat

SEQ ID NO: 396376 - DNA, 75 bp, synthetic construct
  source 1..75: mol_type = other DNA
gaacaggcggcagtgcatatggccgatggtctggcgcgcgcgaccggagaagtgggcgttgtgctggtgacatcg

SEQ ID NO: 396377 - DNA, 75 bp, synthetic construct
  source 1..75: mol_type = other DNA
atgttttcgaactttttcatggcttcctcagctgacatgtatgttctgttatatagtgagtctcagaagtgtttt

SEQ ID NO: 396378 - DNA, 75 bp, synthetic construct
  source 1..75: mol_type = other DNA
ttaatggcgtaacgcggtacaaccaaaatggcgagttcaacgtggggtatggcaaatacaaagcgccctacttcc

SEQ ID NO: 396379 - DNA, 75 bp, synthetic construct
  source 1..75: mol_type = other DNA
ttcacgaactattccggtcatgactttaagtttgaagagcaaaaacgcctggtgtctctgttgacggatgctcat

SEQ ID NO: 396380 - DNA, 75 bp, synthetic construct
  source 1..75: mol_type = other DNA
cagaagggaagcgcctgattgaacctttcgttggtggcggagctgtcttcatgaatgccggataccaggaaaatc

SEQ ID NO: 396381 - DNA, 75 bp, synthetic construct
  source 1..75: mol_type = other DNA
gtggcgaaagcctaaatccatgcctacacgctgacatgccacccggtatgaaatcgacgaaagccgtaaacgctt

SEQ ID NO: 396382 - DNA, 75 bp, synthetic construct
  source 1..75: mol_type = other DNA
gcggataaacagcaaaaaacaataaataccattacctacacaagaaaactccggactccggatgaatatgaacgc

SEQ ID NO: 396383 - DNA, 75 bp, synthetic construct
  source 1..75: mol_type = other DNA
aggctatcttgatactgatgggacaccaagtggtaaagcgggatttagaattaatagtgttagttctgcgcttgc

SEQ ID NO: 396384 - DNA, 75 bp, synthetic construct
  source 1..75: mol_type = other DNA
ctggtgctttatggcagcgcacattgacagggtttacaaattttgcctgggttaatacatctggtgatacttacg

SEQ ID NO: 396385 - DNA, 75 bp, synthetic construct
  source 1..75: mol_type = other DNA
tgcgcgtgctatctggatggcggtacagcagcccagtaaagaaatcgccgttaaaacggaagagcagcagtcagt

SEQ ID NO: 396386 - DNA, 75 bp, synthetic construct
  source 1..75: mol_type = other DNA
cagcaacccggtaaggaaattgcggttaaaacggaagagcagcagtcggtactggttctgcaccggacccgcagg

SEQ ID NO: 396387 - DNA, 75 bp, synthetic construct
  source 1..75: mol_type = other DNA
atgatgtcggcattaggcacgttgctggtcgtgcaatcttcctcgccagcccaggcggtagcgtttatctcaatg

SEQ ID NO: 396388 - DNA, 75 bp, synthetic construct
  source 1..75: mol_type = other DNA
agataaacgcgcttcacagtctcttgctggaatttggtgaaacgacgcacaaggggcgtgctgctttggcgaagg

SEQ ID NO: 396389 - DNA, 75 bp, synthetic construct
  source 1..75: mol_type = other DNA
acgcggggatacctacctccggacattatttattcatggggcaaggtcggcagcattgctgaccaaagagcccga

SEQ ID NO: 396390 - DNA, 75 bp, synthetic construct
  source 1..75: mol_type = other DNA
atgaagtcgatatatttaaaatatgttctttcttttatagttgttggtgttggggctatgtttatatgtggtctt

SEQ ID NO: 396391 - DNA, 75 bp, synthetic construct
  source 1..75: mol_type = other DNA
tggaagaggcgcgacgggtaagagaaaacgagctcaaaaaaatacgcgaaaaacaactacaggcattaagtgatg

SEQ ID NO: 396392 - DNA, 75 bp, synthetic construct
  source 1..75: mol_type = other DNA
tggcagaggtgaaacgggtaagagaaaatgagcgaaataagatacgtgaaaaacaacttcaggcattaaatgctg

SEQ ID NO: 396393 - DNA, 75 bp, synthetic construct
  source 1..75: mol_type = other DNA
atggatgtctgtgggggctctcagcactgggctcgtgagctgaaaaaactggggcacaaagttcggctgttgcag

SEQ ID NO: 396394 - DNA, 75 bp, synthetic construct
  source 1..75: mol_type = other DNA
aaataaacgcgcttcacggtctcttgctggaatttggtgaaacgacgcacaaggggcgtgctgctttggcgaagg

SEQ ID NO: 396395 - DNA, 75 bp, synthetic construct
  source 1..75: mol_type = other DNA
actggttctgcaccggccccgcatgcaactggtgaagttccggaccgcacaaattaatgccctgcacgggacgtt

SEQ ID NO: 396396 - DNA, 75 bp, synthetic construct
  source 1..75: mol_type = other DNA
gccggtgggggccgcgacgctctctgatattcaggtttctaacggtaatcaacaggcgcggataacgttgagttt

SEQ ID NO: 396397 - DNA, 75 bp, synthetic construct
  source 1..75: mol_type = other DNA
ctaccgggaagaattactggttctctgaagatgccgccgtcaacactgcggtcagaaaaagaggcgtcttgtctg

SEQ ID NO: 396398 - DNA, 75 bp, synthetic construct
  source 1..75: mol_type = other DNA
tgaacgttgctacaactcaatgattaatgccgcgttaaagcatgtgtttgggcgctcaaacagccctgaactgaa

SEQ ID NO: 396399 - DNA, 75 bp, synthetic construct
  source 1..75: mol_type = other DNA
cccgcctttttcctgccggtccccggacagagcacaaaggaagtcgccgccggctccgctttacccggccatgcg

SEQ ID NO: 396400 - DNA, 75 bp, synthetic construct
  source 1..75: mol_type = other DNA
attatggatttaattggacggcaactcagcaagtagctaaaaataaaaaagatattgaaaaattaactaggattt

SEQ ID NO: 396401 - DNA, 75 bp, synthetic construct
  source 1..75: mol_type = other DNA
gctacgctatgttggaggtttagcttttttgggatctgtattcttatatctattggctccatttataataaaaat

SEQ ID NO: 396402 - DNA, 75 bp, synthetic construct
  source 1..75: mol_type = other DNA
ggtggtgctttttcattaattctgctcttgggtgcatctatactagtaaaaataagtatagggccgggatatgat

SEQ ID NO: 396403 - DNA, 75 bp, synthetic construct
  source 1..75: mol_type = other DNA
cagcgaaatggccagctggctggagcagcacgagaaacagtcgggagctgctgggcggagcgggcgatgtgctgg

SEQ ID NO: 396404 - DNA, 75 bp, synthetic construct
  source 1..75: mol_type = other DNA
cgacggctaacactggcgataaaattatcatcgctattgatgccggacacggcggtcaggaccctggcgctatcg

SEQ ID NO: 396405 - DNA, 75 bp, synthetic construct
  source 1..75: mol_type = other DNA
gatctcaccgaaaacggtaaaaccgaagcggtgaagcggcagaatggcagcaattacactgtcgtctttacgatt

SEQ ID NO: 396406 - DNA, 75 bp, synthetic construct
  source 1..75: mol_type = other DNA
caggaagcggaggagtggtatcgcgggcgcgatgtttacccgcaagccgcgccagtggcggatgatgtattggtt

SEQ ID NO: 396407 - DNA, 75 bp, synthetic construct
  source 1..75: mol_type = other DNA
aacgcctgcggttgtcgcaccgcgcgtaagcgagccagcgcgtaatccgtttaaaactgacagcaatcggactgc

SEQ ID NO: 396408 - DNA, 75 bp, synthetic construct
  source 1..75: mol_type = other DNA
ctggcgaacagtcagtctgacccctatttaagccaggcggtgctggatttacagttcggtcattcccagcgggta

SEQ ID NO: 396409 - DNA, 75 bp, synthetic construct
  source 1..75: mol_type = other DNA
tcgccagcatccaccggatctttaaaaatgacgccgcgccggaagatatcgccgccatcgtgattgagccggttc

SEQ ID NO: 396410 - DNA, 75 bp, synthetic construct
  source 1..75: mol_type = other DNA
gactatcacttctacccgtgatgctctcaatgcttcaatcactgctggcgacaccgcagccaacaaacgaattga

SEQ ID NO: 396411 - DNA, 75 bp, synthetic construct
  source 1..75: mol_type = other DNA
tgggcgtcagggtgctagcggtttcatgaaaataaaccatttgggtgatagtgccagtggacgacacaacattct

SEQ ID NO: 396412 - DNA, 75 bp, synthetic construct
  source 1..75: mol_type = other DNA
tgaattaactctcgttaaaccttctgttggtgttaccgatgctcgtgttattacgatgttcaacaccgaaaacaa

SEQ ID NO: 396413 - DNA, 75 bp, synthetic construct
  source 1..75: mol_type = other DNA
acacaaaatagttatgatattgttcatctaagcaatgatagaggtactggacggaaatatattcgtaaattccgt

SEQ ID NO: 396414 - DNA, 75 bp, synthetic construct
  source 1..75: mol_type = other DNA
gactcaatggagagatcgcggtactggtttgcaggttgattgtcaacaatccgaaaactcagcacataacatttg

SEQ ID NO: 396415 - DNA, 75 bp, synthetic construct
  source 1..75: mol_type = other DNA
ccgcattcttccggtattcagcacggtcgcggatttactttccagtatggtcacactggatcgcgcgtagaaact

SEQ ID NO: 396416 - DNA, 75 bp, synthetic construct
  source 1..75: mol_type = other DNA
ctgaacgtgctatgggtactggtaacataacaacacgttttagaggctttgtacgtgtagaatctggtgaaattg

SEQ ID NO: 396417 - DNA, 75 bp, synthetic construct
  source 1..75: mol_type = other DNA
ggatcggttatggtaatgctgatactaacgtttttgaatggtatagtgatgtaggtggcagttctattcgtcacc

SEQ ID NO: 396418 - DNA, 75 bp, synthetic construct
  source 1..75: mol_type = other DNA
actaacgctcaattcatctcaatgaatagcgacgcctaccgcatgctctacggtaattatggtgcattctggcgt

SEQ ID NO: 396419 - DNA, 75 bp, synthetic construct
  source 1..75: mol_type = other DNA
tgattttaccgcaggtcgtaacggtagctttaacgatgtttacattcgctctgactctcgtctgaaaattaacaa

SEQ ID NO: 396420 - DNA, 75 bp, synthetic construct
  source 1..75: mol_type = other DNA
aaagcaacccatcaaggtaaatatcatatcgcagcaatgggtgtacatgttcctagcggtactatcggtaatgct

SEQ ID NO: 396421 - DNA, 75 bp, synthetic construct
  source 1..75: mol_type = other DNA
gcttccgtggtgagaaacaaaccgaagtctggaaattcggcggtaagatgattcaccttgaaacgggcactgtat

SEQ ID NO: 396422 - DNA, 75 bp, synthetic construct
  source 1..75: mol_type = other DNA
ataacgttaactcctatgatcaggttgatttccttgaaattgttatccgtagtggtaacgatagacctaaaggtg

SEQ ID NO: 396423 - DNA, 75 bp, synthetic construct
  source 1..75: mol_type = other DNA
ctacaaaaagctgagaagaaaaaaaacattgtctggcgttatgagaatttttcactggagtggcagtccgccatt

SEQ ID NO: 396424 - DNA, 75 bp, synthetic construct
  source 1..75: mol_type = other DNA
cggataacgcgcaactggaactgaaatataaaaagggtaaaacaccactcagccatcgcaattggccgggtgaac

SEQ ID NO: 396425 - DNA, 75 bp, synthetic construct
  source 1..75: mol_type = other DNA
tgatagcaccgataacagcagtctgcctgaaatgctcgtttcaccaccgtggcgtagtaagaaaaaaaatgacag

SEQ ID NO: 396426 - DNA, 75 bp, synthetic construct
  source 1..75: mol_type = other DNA
agcgcagttgaaaaaactgtcgcacacttgcttccaggtgctggcttatgagccatatctggcgctgtgcgaaat

SEQ ID NO: 396427 - DNA, 75 bp, synthetic construct
  source 1..75: mol_type = other DNA
tcgcgcgctttatccttgcccgctgcacggcatcagtgaggatgacgctatcgccagcatccaccggatcttcaa

SEQ ID NO: 396428 - DNA, 75 bp, synthetic construct
  source 1..75: mol_type = other DNA
ctgataacgcccaactggaactgaaatataaaaagggtaaaacaccactcagccatcgcaattggccgggcgaac

SEQ ID NO: 396429 - DNA, 75 bp, synthetic construct
  source 1..75: mol_type = other DNA
gtgatatcgtgatcgaaatgtatcagcgtggtgaactgcagcagctgatcaaagaaactgccgctaaatacaagt

SEQ ID NO: 396430 - DNA, 75 bp, synthetic construct
  source 1..75: mol_type = other DNA
tttacggcaattatggtgcattttggcgcaatgactccgcaaaagtttatcttctgtcaacggctgaaaacgata

SEQ ID NO: 396431 - DNA, 75 bp, synthetic construct
  source 1..75: mol_type = other DNA
cgtatgcagcgaccgaatggtcaaagtaactatttggaatattgggataaccgtaacggtgcaaataaacgtcaa

SEQ ID NO: 396432 - DNA, 75 bp, synthetic construct
  source 1..75: mol_type = other DNA
tcgacgaaatcgtccaacaagaggggctggaatatgcgactgaggtggtgattgcacgccagtttattacacgat

SEQ ID NO: 396433 - DNA, 75 bp, synthetic construct
  source 1..75: mol_type = other DNA
gctacatgtcgcatgaaaaccacttcggctacgcggcctgcgccgcccttttgcgcgaacaaggactggcagccg

SEQ ID NO: 396434 - DNA, 75 bp, synthetic construct
  source 1..75: mol_type = other DNA
taatcggcgatgtagtattacgcaccctggcaacttacttagccagttggacgcgtgattacgaaacggtttatc

SEQ ID NO: 396435 - DNA, 75 bp, synthetic construct
  source 1..75: mol_type = other DNA
tttgtgttaaccgacaacggctggactttactggctggcgatgcggcatgggcgccagctaactaccgggagctg

SEQ ID NO: 396436 - DNA, 75 bp, synthetic construct
  source 1..75: mol_type = other DNA
agtaacatgactggtccatcgacgccttcttcttctgatgcgtttttggatcgtacgataatttcgcactcagac

SEQ ID NO: 396437 - DNA, 75 bp, synthetic construct
  source 1..75: mol_type = other DNA
gaataaagctctgataggtatatgcgtaccttcatatcgtgcaagaggtaaaggaataagtgaaatcgctggcta

SEQ ID NO: 396438 - DNA, 75 bp, synthetic construct
  source 1..75: mol_type = other DNA
ctccctgaaggcacggatatttcaggaaactggacgtttgataatggcgttatctcccgacttccggttaactac

SEQ ID NO: 396439 - DNA, 75 bp, synthetic construct
  source 1..75: mol_type = other DNA
gatggcatacatcagtcaggtgaagaaaatggaactacccgccattaaaacagaagctgaatttaacgccattaa

SEQ ID NO: 396440 - DNA, 75 bp, synthetic construct
  source 1..75: mol_type = other DNA
atgaaaccagcaaaaattgttttattagaaccgcaattttccggttattcgggaatgttgtgcggcgttcagttc

SEQ ID NO: 396441 - DNA, 75 bp, synthetic construct
  source 1..75: mol_type = other DNA
tgccaatattctttcgactacctcccctcaaagccatatcacgtacgttaatcctgacttcattaaaatcagtgg

SEQ ID NO: 396442 - DNA, 75 bp, synthetic construct
  source 1..75: mol_type = other DNA
tctgcagttgccaaccttgatcctgagctaaaatcgaagttaacacctgaacttcttgagagagtttctaagaac

SEQ ID NO: 396443 - DNA, 75 bp, synthetic construct
  source 1..75: mol_type = other DNA
accgttatagtgatccttctattgtgccaccgccacctgcctggcaaatgaaagcggcttcgctaatgcacatca

SEQ ID NO: 396444 - DNA, 75 bp, synthetic construct
  source 1..75: mol_type = other DNA
actatttgcaacagtgccaaaaatcgctgtaaaaatggcgaccactattgggtaagtgcttatgtaacgccaata

SEQ ID NO: 396445 - DNA, 75 bp, synthetic construct
  source 1..75: mol_type = other DNA
tgcgagcaatgcacagcatgctgcagatgcggccggaagagcagacactgagacggcatctggccagcgtctggt

SEQ ID NO: 396446 - DNA, 75 bp, synthetic construct
  source 1..75: mol_type = other DNA
caataagcagcttattgttagccactttaatgtcaggaagcttaagctctgttagtgttttggctattctctctc

SEQ ID NO: 396447 - DNA, 75 bp, synthetic construct
  source 1..75: mol_type = other DNA
gataatcccctagttatctcatacaggcaaccctacaaaacagctaaggtaggagggcgttcttttgaaaatggt

SEQ ID NO: 396448 - DNA, 75 bp, synthetic construct
  source 1..75: mol_type = other DNA
attgaatcggcacagcaattatttccaggtgtaactcaggtggcggtatttgataccagcttccatcagacaatg

SEQ ID NO: 396449 - DNA, 75 bp, synthetic construct
  source 1..75: mol_type = other DNA
tcaccaggcacttctgcagtatatccgtccgggcgcacagaaccagatgaaagtgattctggccgaagaagcaaa

SEQ ID NO: 396450 - DNA, 75 bp, synthetic construct
  source 1..75: mol_type = other DNA
cccatctttcacgttaaaaacctcagtaacaaaaagctggtttagtcaatttcatagtgagatggggttaatagt

SEQ ID NO: 396451 - DNA, 75 bp, synthetic construct
  source 1..75: mol_type = other DNA
gtgcgccatgccgggtgtgaaatgccgcacagatgcgtaaggagagaatgcacgtccaagcgcttttccgcttcc

SEQ ID NO: 396452 - DNA, 75 bp, synthetic construct
  source 1..75: mol_type = other DNA
gtgagcaaaaagcaaagcaccggaagaagccagcgacacaggcgtttttccataggctccgcccccctgacaagc

SEQ ID NO: 396453 - DNA, 75 bp, synthetic construct
  source 1..75: mol_type = other DNA
gtgccagtaccatttgagctgggtagggataaatttcccggagtatttaagacaagtgggccagcctatgaacgt

SEQ ID NO: 396454 - DNA, 75 bp, synthetic construct
  source 1..75: mol_type = other DNA
gtgcctgttccatttaaattaggctgggagaaacttcccggagtatttaagaaaagtggggcgaccaatgagcgt

SEQ ID NO: 396455 - DNA, 75 bp, synthetic construct
  source 1..75: mol_type = other DNA
acagatcttcaactgtacttacaaagatcctgcggcgaagataaggtggcgctctgatgtcatgcgacgcaagct

SEQ ID NO: 396456 - DNA, 75 bp, synthetic construct
  source 1..75: mol_type = other DNA
tccgctacgtcggtttgggaatgactattcagcgagcctgctctcagcagcccgtcgaactttgtgggggtgaaa

SEQ ID NO: 396457 - DNA, 75 bp, synthetic construct
  source 1..75: mol_type = other DNA
agtctaaacgcgatatccctaacactgccttcagggaactggttgtgagtgtatgggacaaccttgagccgcttg

SEQ ID NO: 396458 - DNA, 75 bp, synthetic construct
  source 1..75: mol_type = other DNA
aaaaggtggaaacgccttctgaagcctctacgagatgatttggagttgctgctggatagttacgaggccaaagca

SEQ ID NO: 396459 - DNA, 75 bp, synthetic construct
  source 1..75: mol_type = other DNA
ttaacgataaatattctaaagctgttaatattttaaaggataaccttaaagaacactaccatgttttttatggtt

SEQ ID NO: 396460 - DNA, 75 bp, synthetic construct
  source 1..75: mol_type = other DNA
cattctttccggaaaacattctggagaaatttcgttatatcaaagagatgggcttcgatggttttgagattgacg

SEQ ID NO: 396461 - DNA, 75 bp, synthetic construct
  source 1..75: mol_type = other DNA
ctgatgccaaagctgggtgaagaagatcgccagcgtcggatgtatggactgccatttgcgctggtggcggggggc

SEQ ID NO: 396462 - DNA, 75 bp, synthetic construct
  source 1..75: mol_type = other DNA
atggtgttgatgtcttaattaccggtcacgcacatgtcggaacaccgcaaccaataaaagttaataacacattaa

SEQ ID NO: 396463 - DNA, 75 bp, synthetic construct
  source 1..75: mol_type = other DNA
catttcggttatcagcacatatgttgatgcgattgtgatgcgccatccacaggaaggcgcggcgcgtctggctac

SEQ ID NO: 396464 - DNA, 75 bp, synthetic construct
  source 1..75: mol_type = other DNA
aagaagcggcaaacgccgtcagtgaagaactgcgcgggcaggatggcatcagcgaagaactggagcagcgcatcc

SEQ ID NO: 396465 - DNA, 75 bp, synthetic construct
  source 1..75: mol_type = other DNA
agaactgcgcgggcaggatggtatcagcgaagaactggagcagcgtatccgtgatgtgttgctgggtaaagcgta

SEQ ID NO: 396466 - DNA, 75 bp, synthetic construct
  source 1..75: mol_type = other DNA
gatacaaactatccgcaggcattaagtttaattaaaaaatctttacgatatataggtttattatctttgctcgga

SEQ ID NO: 396467 - DNA, 75 bp, synthetic construct
  source 1..75: mol_type = other DNA
tggggtgacaaatcttataattatttacccattaattcgtttattttctggtgatggtgcggctatttcactatt

SEQ ID NO: 396468 - DNA, 75 bp, synthetic construct
  source 1..75: mol_type = other DNA
acgattattgttgattataatgatattaaacagtgcttaaaggatggttggcatgtatttatttcaacatcagct

SEQ ID NO: 396469 - DNA, 75 bp, synthetic construct
  source 1..75: mol_type = other DNA
tttcctaaaggcgatatcacactgggagatgttattagcacattcccctttaataatgacctcatcgagatggat

SEQ ID NO: 396470 - DNA, 75 bp, synthetic construct
  source 1..75: mol_type = other DNA
tgttgatgtcttaattaccggtcacgcacatgtcggaacaccgcaaccaataaaagttaataacacattaattgt

SEQ ID NO: 396471 - DNA, 75 bp, synthetic construct
  source 1..75: mol_type = other DNA
acattcttatattgagtggtgttcttaatctaacaattatatttcccttggtttataaatattctgcaataggtg

SEQ ID NO: 396472 - DNA, 75 bp, synthetic construct
  source 1..75: mol_type = other DNA
aacatccgacgcaaaccttgctggatctgttcaccattcaggaaacccagggacgtctggacaatcttcgtgtcg

SEQ ID NO: 396473 - DNA, 75 bp, synthetic construct
  source 1..75: mol_type = other DNA
tggcgactcattaaaccgacagagaagacttattgctgaatggttaaaggtaaatagtgattattatcttgatac

SEQ ID NO: 396474 - DNA, 75 bp, synthetic construct
  source 1..75: mol_type = other DNA
ctttaatgaaagtaatatccgcccagcaggcgataagtactcttaaatatatggttgatggtgagatttattttt

SEQ ID NO: 396475 - DNA, 75 bp, synthetic construct
  source 1..75: mol_type = other DNA
tggatgatggtcgcctgagctatagcctggaacaaagtctggatgacgataacaaccataacagtagcctgaacg

SEQ ID NO: 396476 - DNA, 75 bp, synthetic construct
  source 1..75: mol_type = other DNA
atgaaatatcaggtgaaagaatttattactgataaatatgcgaaggctgttaatattttaaaagataatgttaaa

SEQ ID NO: 396477 - DNA, 75 bp, synthetic construct
  source 1..75: mol_type = other DNA
tgaagaacgttttcaacctattagtggtagagttgtttttcatcctgttatctattcagaagaactgtttcgaga

SEQ ID NO: 396478 - DNA, 75 bp, synthetic construct
  source 1..75: mol_type = other DNA
catggctattatgtttgtccgatgagaagattacatcgatgtgacaggccatcaataaagagagatttggttgat

SEQ ID NO: 396479 - DNA, 75 bp, synthetic construct
  source 1..75: mol_type = other DNA
tgccatggtggcgtgtaagcccatcgagtacatgcatattgctggattgaataatctggtacatgcaattttggc

SEQ ID NO: 396480 - DNA, 75 bp, synthetic construct
  source 1..75: mol_type = other DNA
agcaaccctcgccgcatacgcaaactcgactgaaataaaaaagctgatgaagtatgacggtaaggccttacttgt

SEQ ID NO: 396481 - DNA, 75 bp, synthetic construct
  source 1..75: mol_type = other DNA
cagtacgtaaaccaactgcggcacgttccaatgtctctgcgaccgtcaacagtacagaagtaaagaaattgatga

SEQ ID NO: 396482 - DNA, 75 bp, synthetic construct
  source 1..75: mol_type = other DNA
actctcaggtgttgccaaaacactggctgcagccgtaacccccaatgaagttaataaagtctatggccttattgc

SEQ ID NO: 396483 - DNA, 75 bp, synthetic construct
  source 1..75: mol_type = other DNA
tccaaaggtgataaggagtattcaacttatcttggttcgcgcctgcgccgtttgaatgaaatcaaaaccgaacgc

SEQ ID NO: 396484 - DNA, 75 bp, synthetic construct
  source 1..75: mol_type = other DNA
catcgtatctgggatcacgtctgcgccgtatcagcgacatcaaaaccgaacgcctcgccgctctcgccgccgcac

SEQ ID NO: 396485 - DNA, 75 bp, synthetic construct
  source 1..75: mol_type = other DNA
aaatcgcccgtgattatagccccgtaggaccgctgatccgcggcagtggttttgcccgtgatttgcgctttgatc

SEQ ID NO: 396486 - DNA, 75 bp, synthetic construct
  source 1..75: mol_type = other DNA
gaatattggtttgtctatctggttttttattcagagtctgaatgtactggataatcgtcggcgtgatcgaattat

SEQ ID NO: 396487 - DNA, 75 bp, synthetic construct
  source 1..75: mol_type = other DNA
cagttgcagggtaatcagggcgcggcttgcctgtttgcgggatcacccaccgatggcctgatgggcggtggcttc

SEQ ID NO: 396488 - DNA, 75 bp, synthetic construct
  source 1..75: mol_type = other DNA
ctcacccggacggtatgcaaatcaaaattacccgtcaggaaatcggtcagattgtcggctgttctcgtgaaaccg

SEQ ID NO: 396489 - DNA, 75 bp, synthetic construct
  source 1..75: mol_type = other DNA
gagggcaacagcgatgcgcgggtgatccctgtcggcccgctgcatatcacctccgatgaaccgggtcacttccgc

SEQ ID NO: 396490 - DNA, 75 bp, synthetic construct
  source 1..75: mol_type = other DNA
ggcggcgatgtcttctcccgcgtgatggtccgtgtcaaagagacgtttgattcgctggcaatgctggaatttgcc

SEQ ID NO: 396491 - DNA, 75 bp, synthetic construct
  source 1..75: mol_type = other DNA
aacaaaggataaatgggtcagtgacgtgatcggaaaacttgaccgaaaatattacacccgctccgacggtcagtt

SEQ ID NO: 396492 - DNA, 75 bp, synthetic construct
  source 1..75: mol_type = other DNA
gtggaagggaagaatgagcagactggtggtgatctggttaagctggggaaggggctgatgccaggtgcgaatctc

SEQ ID NO: 396493 - DNA, 75 bp, synthetic construct
  source 1..75: mol_type = other DNA
gtctgcgaaggttaccaaccttccaatgaaccagttattccgcaaccagcttgaagctatggacccaacgaaccg

SEQ ID NO: 396494 - DNA, 75 bp, synthetic construct
  source 1..75: mol_type = other DNA
ggcgttccttgataacccacgcatgtttaacggctacccggaactggcggtgggcgtggcgcgtgacctgttcac

SEQ ID NO: 396495 - DNA, 75 bp, synthetic construct
  source 1..75: mol_type = other DNA
atcatgatttcagtatttcgccctctgaccagtatacctacggacgccctggattattattgaaagccgcctact

SEQ ID NO: 396496 - DNA, 75 bp, synthetic construct
  source 1..75: mol_type = other DNA
tggcttggtgctctactgaaaggtggtggtcttggcctttacggtgactttttattgtcagatcacactaggtac

SEQ ID NO: 396497 - DNA, 75 bp, synthetic construct
  source 1..75: mol_type = other DNA
gctcaccggtaacctgagcgctgcacagcgtgctcttgctcagttcggtacgcctgaactgaaagaatatctgga

SEQ ID NO: 396498 - DNA, 75 bp, synthetic construct
  source 1..75: mol_type = other DNA
tcgagtacaagcctcgccaggtaatgctggcagatggtatggatggcaaggtaatggtccccgctgtcactcatg

SEQ ID NO: 396499 - DNA, 75 bp, synthetic construct
  source 1..75: mol_type = other DNA
tatccggtaatgttcccgtcgttgaaggaaggggagtcatacaggctgactgtttccggggcggatgcgcagggc

SEQ ID NO: 396500 - DNA, 75 bp, synthetic construct
  source 1..75: mol_type = other DNA
gttgatgaatgtaatatttatcctgcaggggcactatttgtttcaactaatggggaaggaagtcacagctactcc

SEQ ID NO: 396501 - DNA, 75 bp, synthetic construct
  source 1..75: mol_type = other DNA
tccgtgctaccggccaggtggtgtgggaaaccacgaaggatgacggtaaaacttgggagcagttcatcccggaag

SEQ ID NO: 396502 - DNA, 75 bp, synthetic construct
  source 1..75: mol_type = other DNA
gcatcaaacggagaagctcagttctcggtcgatctgtctggcgtggatacttcctctgtccgcatagcggctgag

SEQ ID NO: 396503 - DNA, 75 bp, synthetic construct
  source 1..75: mol_type = other DNA
caaggtccctgatgtgaaaacggaggcgatctatcgggctatcgcagcaccttctgacagcatccgtcctgtcgt

SEQ ID NO: 396504 - DNA, 75 bp, synthetic construct
  source 1..75: mol_type = other DNA
ctgggccatagaggcaaacggtcaaaccacccgtttcggcagccagatgactgcctggcgcgattacgagtacat

SEQ ID NO: 396505 - DNA, 75 bp, synthetic construct
  source 1..75: mol_type = other DNA
ggctattcttatgttggtcgtcatactattcccttgggttataatcggtgcaaaaatggtatttgataaagaaga

SEQ ID NO: 396506 - DNA, 75 bp, synthetic construct
  source 1..75: mol_type = other DNA
ctcacgatggacataatctggataaccagttggagcgtgctgctgatgcattgcgccttccgccgtgggacgcca

SEQ ID NO: 396507 - DNA, 75 bp, synthetic construct
  source 1..75: mol_type = other DNA
gtgcagaataacggcaatgtgctcaatgtcatcagagcagtcaaatactggcagcggcgaccgacgatgccatcc

SEQ ID NO: 396508 - DNA, 75 bp, synthetic construct
  source 1..75: mol_type = other DNA
accgcgccgccgggcttatcggttccggggggattattgcggccattatcccgccctccataccactcattatct

SEQ ID NO: 396509 - DNA, 75 bp, synthetic construct
  source 1..75: mol_type = other DNA
caatgacaatttttgaaacgcaaaatgacaaagcacaacaagaaatcgaatcgttagttaaagaggttattctgt

SEQ ID NO: 396510 - DNA, 75 bp, synthetic construct
  source 1..75: mol_type = other DNA
tgtttggtgaattaccttcaggatatgtcaggggggcattatcgttgcttcggacagcactggaggttaaagtaa

SEQ ID NO: 396511 - DNA, 75 bp, synthetic construct
  source 1..75: mol_type = other DNA
atggaaaatctatatattaacggtaaaaaggttgatagcttcggtgactggtcaccacagactgaacatccagct

SEQ ID NO: 396512 - DNA, 75 bp, synthetic construct
  source 1..75: mol_type = other DNA
acgatgaaagaattgcacttgagcaagagttaaagatgtcaccaaaggtaatttcctttgtgtctcctgagcctc

SEQ ID NO: 396513 - DNA, 75 bp, synthetic construct
  source 1..75: mol_type = other DNA
ctggtcgccacagactgaacatccagctatcactatccagcgcaaagaacacgatgaaagaattgcacttgagca

SEQ ID NO: 396514 - DNA, 75 bp, synthetic construct
  source 1..75: mol_type = other DNA
taacggcttaccgtttaaagaggtttcaccggctgaagtaacttctgcgatgtcggaacttaggctatctccaac

SEQ ID NO: 396515 - DNA, 75 bp, synthetic construct
  source 1..75: mol_type = other DNA
aaaatctggagaagatgatcaacgccatcgaagagacgcagaaacgcggcgtcaaccgcgccgagcaccgcctgc

SEQ ID NO: 396516 - DNA, 75 bp, synthetic construct
  source 1..75: mol_type = other DNA
atgaatcacagaagaagattgctatgcaggctgatattgagcagttagtgaagatttcaacgaagtacgcaaagg

SEQ ID NO: 396517 - DNA, 75 bp, synthetic construct
  source 1..75: mol_type = other DNA
gatggttttggtacttttcctgagaatatcccagacgtgattaataatcttcctgatggatatcgaattgtgaaa

SEQ ID NO: 396518 - DNA, 75 bp, synthetic construct
  source 1..75: mol_type = other DNA
atggaaaatctatatattagcggtagaaaggttgatagcttcggtgactggtcaccacagactgaacatccagct

SEQ ID NO: 396519 - DNA, 75 bp, synthetic construct
  source 1..75: mol_type = other DNA
tctgttttagtgatcaggacgatatttggtataaagataaaataaaaaatgcaattgactgcttggtatttaata

SEQ ID NO: 396520 - DNA, 75 bp, synthetic construct
  source 1..75: mol_type = other DNA
atgacaaacgatttatatattaacggtcgaaagattgataccttcggtgactggtcgccacagactgaacatcca

SEQ ID NO: 396521 - DNA, 75 bp, synthetic construct
  source 1..75: mol_type = other DNA
tagtgaatatgagtcgcagaagaaggttgccatgcaggctgatattgagcagcttacgaagatttctcaaaaata

SEQ ID NO: 396522 - DNA, 75 bp, synthetic construct
  source 1..75: mol_type = other DNA
aagagagaatgttccaaaagtgcttcaaagtattcctgacggttttcgattaatggatgtcagacaagcttcacg

SEQ ID NO: 396523 - DNA, 75 bp, synthetic construct
  source 1..75: mol_type = other DNA
tgttgaaacaggatattccacgccagataatgcgctttattattatcaggattcgaaagagctaatttattacta

SEQ ID NO: 396524 - DNA, 75 bp, synthetic construct
  source 1..75: mol_type = other DNA
acaccggccttgataatgcgatgacactctcggtcagcggtgatgatgcgctacaaagttttatgggctatgacg

SEQ ID NO: 396525 - DNA, 75 bp, synthetic construct
  source 1..75: mol_type = other DNA
tttgtatttgcctgtttagaaggcaattctggcagcaatcgttacggaaacgatccgaagtttggttcaaattaa

SEQ ID NO: 396526 - DNA, 75 bp, synthetic construct
  source 1..75: mol_type = other DNA
cgtgcttctggtttttttctgcacagaagatacttctggcagcaatcgttacggaaacgatccgaagtttggttc

SEQ ID NO: 396527 - DNA, 75 bp, synthetic construct
  source 1..75: mol_type = other DNA
tagaaaaaatataaagtatggctcgttgttttattggctttaccatgtaaaagcctatcaggatgcatttattga

SEQ ID NO: 396528 - DNA, 75 bp, synthetic construct
  source 1..75: mol_type = other DNA
ggacagcactggaggttaaagtaaatagaaaaaatataaagtatggctcgttgttttattggctttaccatgtaa

SEQ ID NO: 396529 - DNA, 75 bp, synthetic construct
  source 1..75: mol_type = other DNA
taagtgtcttacttgatatacaacgaaagacgaagatacttcaaagccttgcatattatctcagagtgttggtga

SEQ ID NO: 396530 - DNA, 75 bp, synthetic construct
  source 1..75: mol_type = other DNA
aataatgctgaaaacaagaacagacgcagactgatctacaacgcattaaccatcatttgtggtgatgatactaaa

SEQ ID NO: 396531 - DNA, 75 bp, synthetic construct
  source 1..75: mol_type = other DNA
agtcgaaactattacgatgggaaaacttcataatatgagttgtccgccttatatgaggcatggcgcgattattat

SEQ ID NO: 396532 - DNA, 75 bp, synthetic construct
  source 1..75: mol_type = other DNA
agtacagaattgactcccattgtccgttaattgagcagaacagaagcgccgtagaaaccatatttctgattatat

SEQ ID NO: 396533 - DNA, 75 bp, synthetic construct
  source 1..75: mol_type = other DNA
atctggtaccgatcattggctggttagttctgtttgtatttgcctgtttagagggcaattctggcagcaatcgtt

SEQ ID NO: 396534 - DNA, 75 bp, synthetic construct
  source 1..75: mol_type = other DNA
tttttacagaagtcgtattgtccttgtcttgatcactctgatacagaaagcgatgaagctgctgttaaacgttat

SEQ ID NO: 396535 - DNA, 75 bp, synthetic construct
  source 1..75: mol_type = other DNA
cggaaacgatccgaagtttggttcaaattaatcttagaattggggcgatatttcgcccctttttattaacaataa

SEQ ID NO: 396536 - DNA, 75 bp, synthetic construct
  source 1..75: mol_type = other DNA
gagctacatcaacgactacggcggacgtccggttctgcagttctcctgtgcaggaagtcgctgtactgcagtaaa

SEQ ID NO: 396537 - DNA, 75 bp, synthetic construct
  source 1..75: mol_type = other DNA
gaaaatgaaaccggcgctgaaaaaaacgctgatggcggtagcgtgcctgagcgcagtaccggcagcccaggctgc

SEQ ID NO: 396538 - DNA, 75 bp, synthetic construct
  source 1..75: mol_type = other DNA
tcgctgcttttttcgttactgccattggttctttcatctggtcagccaactactactacagcaaatatcagtacg

SEQ ID NO: 396539 - DNA, 75 bp, synthetic construct
  source 1..75: mol_type = other DNA
accaccccgtactatgacaactctgccctgtttgtgggtcagcaaggcaaatacaccagtgttgatcagctgaaa

SEQ ID NO: 396540 - DNA, 75 bp, synthetic construct
  source 1..75: mol_type = other DNA
tattagagaattggcgttaaacaatccatcagttcgtttttatgtacatatggatgccaagtatccaaataaaat

SEQ ID NO: 396541 - DNA, 75 bp, synthetic construct
  source 1..75: mol_type = other DNA
gttattgccacacctccggtgcagcgtcttgagccgggaagtaaaagtatggtgcgcctttccacaactccggac

SEQ ID NO: 396542 - DNA, 75 bp, synthetic construct
  source 1..75: mol_type = other DNA
gtccctgctggcgcagttaagcggctgcacgaatacgcgaacggtctacgtgccggttccggtagttccattacc

SEQ ID NO: 396543 - DNA, 75 bp, synthetic construct
  source 1..75: mol_type = other DNA
agaaattcaggctgcacgcggtcgcaagggcggttctaagtctaagcgcagcacagtagctacatctgcacgcac

SEQ ID NO: 396544 - DNA, 75 bp, synthetic construct
  source 1..75: mol_type = other DNA
aggtattcctgtcaggtggcagggaaatgactgtagctctgtataaagacgaaggcgaggcactgactgacgcgc

SEQ ID NO: 396545 - DNA, 75 bp, synthetic construct
  source 1..75: mol_type = other DNA
cggttcttttatctggtatgccgggcattactacagcaaatatcagtacgaaaaggagcgtgctgatgaggctgt

SEQ ID NO: 396546 - DNA, 75 bp, synthetic construct
  source 1..75: mol_type = other DNA
cattactacagcaaatatcagcacgaaaaggagcgtgctgatgaggctgtacgaaacgctgaatctgcaacagcc

SEQ ID NO: 396547 - DNA, 75 bp, synthetic construct
  source 1..75: mol_type = other DNA
acgaaatgctgaatcagcaacagctattacccgtaacatcctgcaatcaatacaaatcgtaaatacagttctgga

SEQ ID NO: 396548 - DNA, 75 bp, synthetic construct
  source 1..75: mol_type = other DNA
ggcaaaaaagtcggcgttcagaacgggacgacgcaccagaaattcattatggataaacatccggaaatcaccacg

SEQ ID NO: 396549 - DNA, 75 bp, synthetic construct
  source 1..75: mol_type = other DNA
atggcggcagccaacgacctgccggatgccatcatcaccgagtcgggcttgaagatcacgccgctggatgcggcg

SEQ ID NO: 396550 - DNA, 75 bp, synthetic construct
  source 1..75: mol_type = other DNA
aggcctttgaataagacaaaaggctgcctcatcgctaactttgcaacagtgccggccagcgaattgccgctggcc

SEQ ID NO: 396551 - DNA, 75 bp, synthetic construct
  source 1..75: mol_type = other DNA
actttgcaacagtgccagctgcgggccgctcccgccgcgaaggacgtgctcgacgccatcgaggtgctgcgcggc

SEQ ID NO: 396552 - DNA, 75 bp, synthetic construct
  source 1..75: mol_type = other DNA
ctactttaccctgcgtcgtctggatttcggcggctgccgtctttcgctggcaacgccggttgatgaagcctggga

SEQ ID NO: 396553 - DNA, 75 bp, synthetic construct
  source 1..75: mol_type = other DNA
gcacttcgcccacctgaagtcaggcgacctggccaaggacaaaaacctgttgctgaccacgatcctcgccgacgc

SEQ ID NO: 396554 - DNA, 75 bp, synthetic construct
  source 1..75: mol_type = other DNA
tcgaggactacctggtgccgcccgcgaaattcgccagcctcaagcaggccagcgaattgccgctggccgtggcca

SEQ ID NO: 396555 - DNA, 75 bp, synthetic construct
  source 1..75: mol_type = other DNA
aatgaatctgaccttgatagtgaagctactaaagaggtcgttaaaaaggaagataaaatctctgatgtgattgct

SEQ ID NO: 396556 - DNA, 75 bp, synthetic construct
  source 1..75: mol_type = other DNA
ttctttcacaccaaagaagaaagtagttagtgaaaataagaagcaaaggattaagcctaaaatgtactatgcagg

SEQ ID NO: 396557 - DNA, 75 bp, synthetic construct
  source 1..75: mol_type = other DNA
agagcgtgaaaaacaggtgctgttcaccactccgtactatgacaactccgccctgtttgtgggtcagcaaggtaa

SEQ ID NO: 396558 - DNA, 75 bp, synthetic construct
  source 1..75: mol_type = other DNA
tgctgttttgaacctggctctctgttgctgcgcctgcaccagaacaggctactcgggtggctggcctgcacagag

SEQ ID NO: 396559 - DNA, 75 bp, synthetic construct
  source 1..75: mol_type = other DNA
tcaggaggaggagccattgtttgttgaccctctgcagccagagcaggtgctgttgttccgtttgggggatgacgt

SEQ ID NO: 396560 - DNA, 75 bp, synthetic construct
  source 1..75: mol_type = other DNA
gttgcatgcggcggagacgaccagcctcgtatccgaagaacagctggtgcgactggcgcagaccggactggtcag

SEQ ID NO: 396561 - DNA, 75 bp, synthetic construct
  source 1..75: mol_type = other DNA
atgccagcgcctctgtatggtgcggatgacccgcgccgctgttccggcaattccgtatcggaggtgctggaaagt

SEQ ID NO: 396562 - DNA, 75 bp, synthetic construct
  source 1..75: mol_type = other DNA
gccagtgaggcaaatggcgtgccgttgcagacagcggaacctgattacctggaaggcctgagcgaacccatcggg

SEQ ID NO: 396563 - DNA, 75 bp, synthetic construct
  source 1..75: mol_type = other DNA
aattcgcccgtcacgtaaatcacgtcagggcgcaggttaaaccagtcagcaagggggcaaactatgcagcagcac

SEQ ID NO: 396564 - DNA, 75 bp, synthetic construct
  source 1..75: mol_type = other DNA
aatggctcctcttgtgcatgaaataaaaaagaatcccgaattagaactgaaagtatgtgtaacagcgcagcatcg

SEQ ID NO: 396565 - DNA, 75 bp, synthetic construct
  source 1..75: mol_type = other DNA
gtcacgtaaatcacgtcagggcgcaggctaaaccagtcagcaagggggtaaaccatgcagcagcaccaggtggca

SEQ ID NO: 396566 - DNA, 75 bp, synthetic construct
  source 1..75: mol_type = other DNA
gaaacggcgtggaagctgtgggaactcatgggggaggtttattcgaaccgctggacccagaagaacggggccgca

SEQ ID NO: 396567 - DNA, 75 bp, synthetic construct
  source 1..75: mol_type = other DNA
tgcaggggcgggtgcttgatggagatttaatcactggatgggaaaaacgccaggtagcgaaagaggataacggca

SEQ ID NO: 396568 - DNA, 75 bp, synthetic construct
  source 1..75: mol_type = other DNA
actcaatgatctcgatgcatacacagaaatgagtttcgcccacaacccttacggtgatggtcaagcctgtcaaag

SEQ ID NO: 396569 - DNA, 75 bp, synthetic construct
  source 1..75: mol_type = other DNA
atgacgttgctaaaacggcggttgacttccgagctgtgaaggcaccccgcccttatgtggtagggcctcaagtca

SEQ ID NO: 396570 - DNA, 75 bp, synthetic construct
  source 1..75: mol_type = other DNA
aaaccggatattgctgttgtcggcccgaccacgttgtttgtgggaagtgaaggcaagtacacggcgagtctggcg

SEQ ID NO: 396571 - DNA, 75 bp, synthetic construct
  source 1..75: mol_type = other DNA
gctggttcatggtgataccgcaactacatttgccgtgagtttagctgcttactatgagaaaatttcagtgggaca

SEQ ID NO: 396572 - DNA, 75 bp, synthetic construct
  source 1..75: mol_type = other DNA
cagaaagaaatggtgaaaaatcttccatttgatgtcaacaccaataaaattatcttaataacaggtcatagaaga

SEQ ID NO: 396573 - DNA, 75 bp, synthetic construct
  source 1..75: mol_type = other DNA
tgtcaactgcttctaatccgtatggtgatggtcaaacctcgacacgaataacagagatattggctgaatggtata

SEQ ID NO: 396574 - DNA, 75 bp, synthetic construct
  source 1..75: mol_type = other DNA
atggtgattgttgcggagaaatatcacgctatgtcacggcatgtcacgacgagtcacgcatatgtcacgatgagt

SEQ ID NO: 396575 - DNA, 75 bp, synthetic construct
  source 1..75: mol_type = other DNA
tgttggagccacagggtatgccagggagactgaccggtcactgatgcaactggtcaccgcattctgggcaacgct

SEQ ID NO: 396576 - DNA, 75 bp, synthetic construct
  source 1..75: mol_type = other DNA
gctggagccacagagtatgccagggagactgaccggtcactgatgcaactggtcaccgcattctgggcaacgctg

SEQ ID NO: 396577 - DNA, 75 bp, synthetic construct
  source 1..75: mol_type = other DNA
ttctgccactggccacaatggccctgatggctctgtttgttttatggaaggacaacaccacgccggggaaattac

SEQ ID NO: 396578 - DNA, 75 bp, synthetic construct
  source 1..75: mol_type = other DNA
atcaggaaatgccctgtttatttccatgatgacagaacaaacagaagcaacggagataaaaatgaacatgcgtaa

SEQ ID NO: 396579 - DNA, 75 bp, synthetic construct
  source 1..75: mol_type = other DNA
cgggtgggaaccgcagatgaacatctgaaggaagtttatacggaagatacttctctgtcggaaaaaaatcaggaa

SEQ ID NO: 396580 - DNA, 75 bp, synthetic construct
  source 1..75: mol_type = other DNA
tgtctctaccgcaggaaacgaaagaggaaaaggaatttcgccactgtatatggcttgcagagaaagaagaacgcg

SEQ ID NO: 396581 - DNA, 75 bp, synthetic construct
  source 1..75: mol_type = other DNA
atggcaaataatatgtcactccgtcagatatgccatgccacccggtatgttgttgtccggggcctgtgttggttg

SEQ ID NO: 396582 - DNA, 75 bp, synthetic construct
  source 1..75: mol_type = other DNA
tgctggtgaatcgtagccaggcggatgtcgacaccgcactccgactggcggaagatatcctgcgcttcgcccgct

SEQ ID NO: 396583 - DNA, 75 bp, synthetic construct
  source 1..75: mol_type = other DNA
gatggccgatggctggcatccgtcgctggattttcgacgacgggctgcgttgtggggagcggctttgccggaacc

SEQ ID NO: 396584 - DNA, 75 bp, synthetic construct
  source 1..75: mol_type = other DNA
gtgctgcgtttgtcgttcgctggctgctgtgggccgtcaggtttgtgattatctggccgctggcgacaatggccc

SEQ ID NO: 396585 - DNA, 75 bp, synthetic construct
  source 1..75: mol_type = other DNA
gataacaccacacctggtcagttgctgatgcaggaaattgagttcgtcagggaggtggctcctgccgggcaattc

SEQ ID NO: 396586 - DNA, 75 bp, synthetic construct
  source 1..75: mol_type = other DNA
atgagtctccgtcattgagtacatattcgaacggtatttattactccccgcaattttttgcttttgcaaaaggag

SEQ ID NO: 396587 - DNA, 75 bp, synthetic construct
  source 1..75: mol_type = other DNA
aaacggtcagccgaaaacagtagcgttaattcgcggtgtgcagtttaaaggtgagatccgcaggctggaaggtga

SEQ ID NO: 396588 - DNA, 75 bp, synthetic construct
  source 1..75: mol_type = other DNA
cgcatcccgacgacaatcacgaccgcccctggtgggggctaccctgcaccgcgacgccctgtttcggcgcccgtc

SEQ ID NO: 396589 - DNA, 75 bp, synthetic construct
  source 1..75: mol_type = other DNA
cgtaccacctggaccaggcctttccgctgctgatgaaacaactggaactcatgctcaccggcggtgaactgaatc

SEQ ID NO: 396590 - DNA, 75 bp, synthetic construct
  source 1..75: mol_type = other DNA
ttcagcgacgcggatttgcgccatctcgatcaggcgtttccgctgcttttgaaacagcttgagctgatgctcacc

SEQ ID NO: 396591 - DNA, 75 bp, synthetic construct
  source 1..75: mol_type = other DNA
gtatgcgaaggggctgacctgtgaagccgacaccctcggctcctgtggttacgtttatctggctgtttatccgac

SEQ ID NO: 396592 - DNA, 75 bp, synthetic construct
  source 1..75: mol_type = other DNA
aatccggctcgatgaaatcaaattcaccgacaacacgctgggctttggtaaaaaaataatttggttacgtgactc

SEQ ID NO: 396593 - DNA, 75 bp, synthetic construct
  source 1..75: mol_type = other DNA
ttaccttgccgaccgcgccggtatcagaggcctgttcagcgacgcggatgcgtaccacctggaccaggcctttcc

SEQ ID NO: 396594 - DNA, 75 bp, synthetic construct
  source 1..75: mol_type = other DNA
cacctggtggggactgccctgcaccgtgacgccctgttttggggcacgtctggtacaggaaggcaaccggttgca

SEQ ID NO: 396595 - DNA, 75 bp, synthetic construct
  source 1..75: mol_type = other DNA
attattccgacaacaataacgaccgcccctggtggggactcccctgtagcgtgacgccctgttttggcgcccgtc

SEQ ID NO: 396596 - DNA, 75 bp, synthetic construct
  source 1..75: mol_type = other DNA
actcatgctcaccagcggtgaactgaatccccgccatcagcataccgttacgctgtatgcgaaaggactgacctg

SEQ ID NO: 396597 - DNA, 75 bp, synthetic construct
  source 1..75: mol_type = other DNA
actcatgctcaccagcggtgaactgaatccccgccatcagcataccgttactctgtatgcgaatggactgacctg

SEQ ID NO: 396598 - DNA, 75 bp, synthetic construct
  source 1..75: mol_type = other DNA
actcatgctcaccagcggtgaactgaatccccgccatcagcataccgttacactgtatgcgaagggactgacctg

SEQ ID NO: 396599 - DNA, 75 bp, synthetic construct
  source 1..75: mol_type = other DNA
gtatcagaggcctgttcagcgacgcggatgcgtaccacctggaccaggcctttccgctgctgatgaaacaactgg

SEQ ID NO: 396600 - DNA, 75 bp, synthetic construct
  source 1..75: mol_type = other DNA
ccaagctattgtgcttatggctgaattaactctattcggcgctgataaaatttcacatcgtatacgctggaacgg

SEQ ID NO: 396601 - DNA, 75 bp, synthetic construct
  source 1..75: mol_type = other DNA
ttcctcgttttaggaaaacattattattacctcgttactggctcacatggctcgggctggccattatcagtgtat

SEQ ID NO: 396602 - DNA, 75 bp, synthetic construct
  source 1..75: mol_type = other DNA
attcgcggcacacagagacttgcggaaaaaagcgttccacatggaatcttaactggaaagggaaactatttttaa

SEQ ID NO: 396603 - DNA, 75 bp, synthetic construct
  source 1..75: mol_type = other DNA
gcggtcgcggcgtctggcagcggttattatttacagccaggatcatggggagatcgggcgctttgtttattaccc

SEQ ID NO: 396604 - DNA, 75 bp, synthetic construct
  source 1..75: mol_type = other DNA
ggcactggcatcatcaacggctgattgagtcatcgttaggcgttgttgagtatcacggcacgttagctggcaaag

SEQ ID NO: 396605 - DNA, 75 bp, synthetic construct
  source 1..75: mol_type = other DNA
atttaaccgggtttttgtgccaatgcgcgatgcattacgagcgctgcgtggggaattaagaaacacaatgcggat

SEQ ID NO: 396606 - DNA, 75 bp, synthetic construct
  source 1..75: mol_type = other DNA
gagagaaaagaattattaaaaaaagtagatatagatatatcactggaaaacttgattatttattacaaaatggaa

SEQ ID NO: 396607 - DNA, 75 bp, synthetic construct
  source 1..75: mol_type = other DNA
tgcgaagccgacaccctcggcagttgtggttacgtttatctggctgtttatccaacatccaaaacgaaaaagtaa

SEQ ID NO: 396608 - DNA, 75 bp, synthetic construct
  source 1..75: mol_type = other DNA
cccgccatcagcataccgtgacactgtatgcgaaagggctgacctgcgaagccgacaccttcggctcctgtggtt

SEQ ID NO: 396609 - DNA, 75 bp, synthetic construct
  source 1..75: mol_type = other DNA
ctttccccggtactggatgacgtggacaggtatcggcattatctgtgtgtctgcaatggtgccccccgctctgag

SEQ ID NO: 396610 - DNA, 75 bp, synthetic construct
  source 1..75: mol_type = other DNA
gtccacttattaacataattctgggtacccagacactggaacaaaaaaaagtgccgaaaggggtattaacaggca

SEQ ID NO: 396611 - DNA, 75 bp, synthetic construct
  source 1..75: mol_type = other DNA
tctgacgttactatgttgctttgcgacggaatacaacaacgttgccagcgccgactacatcagggcaatggcttg

SEQ ID NO: 396612 - DNA, 75 bp, synthetic construct
  source 1..75: mol_type = other DNA
tgcaaagccgacaccctcggcagttgtggttacgtttatctggctgtttatccaacatccgaaacgaaaaagtaa

SEQ ID NO: 396613 - DNA, 75 bp, synthetic construct
  source 1..75: mol_type = other DNA
gtctggaagcgattccgacgctatttattcttattactatttcgttctttatgatgcgcctcgctccgggcagcc

SEQ ID NO: 396614 - DNA, 75 bp, synthetic construct
  source 1..75: mol_type = other DNA
attggctgccgggcggtggctggaatggtggggcgcttaaattcatgatattgccgatggtggcgttgtcactcg

SEQ ID NO: 396615 - DNA, 75 bp, synthetic construct
  source 1..75: mol_type = other DNA
ttgtctcgggcggacaaacaactgtggcgaacttgttctataacatgagctcgcgccaagttgggttggtcggaa

SEQ ID NO: 396616 - DNA, 75 bp, synthetic construct
  source 1..75: mol_type = other DNA
taccatcgcagatggttaaagataacgagaagctattaatgggtggtatctggtgcatgatcaccgtgaactatt

SEQ ID NO: 396617 - DNA, 75 bp, synthetic construct
  source 1..75: mol_type = other DNA
aggatctggcagcatgtctacaggtagcattcgatagtggggctaagcgcgtactgctgccgatggcatcagcta

SEQ ID NO: 396618 - DNA, 75 bp, synthetic construct
  source 1..75: mol_type = other DNA
agagggcagttcagcgatgcagatgcatgccatctggaccaggcctttccgctgctgatgaaacaactggagctc

SEQ ID NO: 396619 - DNA, 75 bp, synthetic construct
  source 1..75: mol_type = other DNA
tctgaaagaaaccatgcagatgcaaggattatggtcagattatatgcaggaacttcatgatgaatctttgagcct

SEQ ID NO: 396620 - DNA, 75 bp, synthetic construct
  source 1..75: mol_type = other DNA
tctcccagatgatcaacatcgtgaatacctttggctaactaaacaccaaataaatgctaaacaagatgttcataa

SEQ ID NO: 396621 - DNA, 75 bp, synthetic construct
  source 1..75: mol_type = other DNA
gtgtcagactcgctccatgagacaaattatcccgacgaccataacgaccgcccctggtggggactgccctgcacc

SEQ ID NO: 396622 - DNA, 75 bp, synthetic construct
  source 1..75: mol_type = other DNA
tggtgcaggaaggcaaccagttgcattaccttgccgaccgtgccggtatcagagggcggttcagcgatgcagatg

SEQ ID NO: 396623 - DNA, 75 bp, synthetic construct
  source 1..75: mol_type = other DNA
gcgacaccctgttttggcgcccgtctggtgcaggaaggcaaccagttgcattaccttgccgaccgtgccggtatc

SEQ ID NO: 396624 - DNA, 75 bp, synthetic construct
  source 1..75: mol_type = other DNA
ggtgaagaccagtcatctgttggcaccttttcctgaagccatgattgacactgctttttttgaccgtttccattc

SEQ ID NO: 396625 - DNA, 75 bp, synthetic construct
  source 1..75: mol_type = other DNA
cccgacgacaatcacgaccgcccctggtgggggcttccctgcacagtgaggccctgttttggcgcccgtctggtg

SEQ ID NO: 396626 - DNA, 75 bp, synthetic construct
  source 1..75: mol_type = other DNA
gcaggaacagatggtggtgttgggcagtatgacgcttggtggagtaattaacccggtgcaggatcttgccgccag

SEQ ID NO: 396627 - DNA, 75 bp, synthetic construct
  source 1..75: mol_type = other DNA
gccgatacccttggctcctgtggttacgtttatctggctgtttatcctgcgaccgaaacggaaaatgtagtggtc

SEQ ID NO: 396628 - DNA, 75 bp, synthetic construct
  source 1..75: mol_type = other DNA
accttgccgaccgcgccggtatcagaggccgcttcagcgacgcagatgcataccatctggaccaggcctttccgc

SEQ ID NO: 396629 - DNA, 75 bp, synthetic construct
  source 1..75: mol_type = other DNA
ctggtgcaggagggtaaccgcctgcattaccttgccgaccgcgccggtatcagaggcctgttcagcgatgcagat

SEQ ID NO: 396630 - DNA, 75 bp, synthetic construct
  source 1..75: mol_type = other DNA
gaactgaatccccgccatcagcataccatcacactgtatgcgaaagggctgacctgcgaagccgatacccttggc

SEQ ID NO: 396631 - DNA, 75 bp, synthetic construct
  source 1..75: mol_type = other DNA
tcggcaataccggacaggagtgtaaggcggaaatcgttaaccggagtgaatttaaaaactacacctgtgaacgtg

SEQ ID NO: 396632 - DNA, 75 bp, synthetic construct
  source 1..75: mol_type = other DNA
tttcactaatttcatggaagacctgatgaagaatcaaaaaattccggataacgatgcgctcaccaataaaaccaa

SEQ ID NO: 396633 - DNA, 75 bp, synthetic construct
  source 1..75: mol_type = other DNA
gaaaaagcttggcggaatggaattttttgatgtgcactttagctacatcgataacgattcattagaagaattctt

SEQ ID NO: 396634 - DNA, 75 bp, synthetic construct
  source 1..75: mol_type = other DNA
acaggatattcagcagcatatctggactttaggtgagtcacttagcatggctattgaccagttcgtggagagtaa

SEQ ID NO: 396635 - DNA, 75 bp, synthetic construct
  source 1..75: mol_type = other DNA
acaggatattcagcagcatatcgagactttaggtatgtcacttagcatggctattgaccagttcgtggagagtaa

SEQ ID NO: 396636 - DNA, 75 bp, synthetic construct
  source 1..75: mol_type = other DNA
atgaagctaaacatcgacctaggcaaatacgttattaccggaacaaaacacgatctgattcttagtgaaatagga

SEQ ID NO: 396637 - DNA, 75 bp, synthetic construct
  source 1..75: mol_type = other DNA
atgaggatgctgaataaaaaatcctttatgctgctaagtgccttaacagtgaatagcgtactgatttcaccgcca

SEQ ID NO: 396638 - DNA, 75 bp, synthetic construct
  source 1..75: mol_type = other DNA
cctgccgcttgccatgacaaggaagtttcccgacatgaagccgtctatgctggatggactgaaaaagaagttatc

SEQ ID NO: 396639 - DNA, 75 bp, synthetic construct
  source 1..75: mol_type = other DNA
ctgacagcacaggcggaagcgcaggaacttaaaaacgagcgcgaacgcggcgaggtgattgatacaaagttttgc

SEQ ID NO: 396640 - DNA, 75 bp, synthetic construct
  source 1..75: mol_type = other DNA
actcacagtcactgcttgatctcgctgtactgcgtgccaagatcggtgatatacacgatcactatcaatcttttg

SEQ ID NO: 396641 - DNA, 75 bp, synthetic construct
  source 1..75: mol_type = other DNA
gtcgcgaggcgttttatgatgttgccagcgtaatagacaatcgggttagcaatgcaattaaccagattacagacg

SEQ ID NO: 396642 - DNA, 75 bp, synthetic construct
  source 1..75: mol_type = other DNA
cttgacgaaaacctgccacagatactggctgattacctgatggaaactaccggaagcgcgcctgagaagttgcta

SEQ ID NO: 396643 - DNA, 75 bp, synthetic construct
  source 1..75: mol_type = other DNA
gtctggtactgaaaatgattgataccgttgtcggcaaccgtatcgagtgggacagggaagataaggacattgccg

SEQ ID NO: 396644 - DNA, 75 bp, synthetic construct
  source 1..75: mol_type = other DNA
atgacatcagccatctgacggcagaatcttttgcagaatgggtttctgtgctgtttggctaccagctgacattgc

SEQ ID NO: 396645 - DNA, 75 bp, synthetic construct
  source 1..75: mol_type = other DNA
aggtcatcgtgatatctgtctgatcccggcatcggcgcacggtactaatcctgcttccgcgcatatggcaggaat

SEQ ID NO: 396646 - DNA, 75 bp, synthetic construct
  source 1..75: mol_type = other DNA
tggatgggcttaaaagggaagtggttaaagcctgtaatgccagtgccagagttgccgacaacctcccacagatac

SEQ ID NO: 396647 - DNA, 75 bp, synthetic construct
  source 1..75: mol_type = other DNA
cctcccgcttactatgcaaaggagcttcccacagattacccccgccatgctggacaggcttaaaagggaagtggt

SEQ ID NO: 396648 - DNA, 75 bp, synthetic construct
  source 1..75: mol_type = other DNA
tactaccgctgtctgggctgcattcaaagctaatgactggtttaaaaccaagcgtcttgagagtgctgaaaactt

SEQ ID NO: 396649 - DNA, 75 bp, synthetic construct
  source 1..75: mol_type = other DNA
gttatccaaagatcctattcagagcggcgctcttcgtcgtaaggccttcaatccatttgcctcagtggatcatgt

SEQ ID NO: 396650 - DNA, 75 bp, synthetic construct
  source 1..75: mol_type = other DNA
gaaacgaatttgccgatagcttttaatgacgtagattattgtctcagagttcgagatgctggctggagagtaatc

SEQ ID NO: 396651 - DNA, 75 bp, synthetic construct
  source 1..75: mol_type = other DNA
ttggcaaagatgtgtgaaccgaaacagatagtccatattccatcattgatgatgcatttgcctgcaagagcgttg

SEQ ID NO: 396652 - DNA, 75 bp, synthetic construct
  source 1..75: mol_type = other DNA
aagatgtgtgagccgaaacagattgtccatattccatcattgatgatgcatttgcctgcaagagttttgatttcg

SEQ ID NO: 396653 - DNA, 75 bp, synthetic construct
  source 1..75: mol_type = other DNA
ggattgaggagcaattaaaaagtattatagggcaaaggggtgtagacctctcaatatttatatcagatgatttat

SEQ ID NO: 396654 - DNA, 75 bp, synthetic construct
  source 1..75: mol_type = other DNA
gtatgtacgacatttattccgttgtacagggcgttgataaattcattccggttgatgtgtatatcccggggtgtc

SEQ ID NO: 396655 - DNA, 75 bp, synthetic construct
  source 1..75: mol_type = other DNA
gatggtgacttcgtttaccgcggtgcatgacgtggcgcgttttggcgcagaagtattgcgtgcttcgccgcgtca

SEQ ID NO: 396656 - DNA, 75 bp, synthetic construct
  source 1..75: mol_type = other DNA
ggaaaaattcgctccacatgatcttcgccgaacctttgcatcggccatgctggacaatggtgaggacatcatcac

SEQ ID NO: 396657 - DNA, 75 bp, synthetic construct
  source 1..75: mol_type = other DNA
gttcgtggtgagcagcccggagctctgtttcagcggatcaggcggtttgatgatgtcaccgccgacagaatgacg

SEQ ID NO: 396658 - DNA, 75 bp, synthetic construct
  source 1..75: mol_type = other DNA
ctcgggtcaaagcgaagcaggcagaccatgagctcattcctcaacattgtcgccaagatgatcgggtttcagaac

SEQ ID NO: 396659 - DNA, 75 bp, synthetic construct
  source 1..75: mol_type = other DNA
gcaggagcatagtgcatatccagaaatctccagtcagtcaggcggcgaatggcagtgggtgttgcctgtaggggc

SEQ ID NO: 396660 - DNA, 75 bp, synthetic construct
  source 1..75: mol_type = other DNA
cctgctgcgcccgggcgtcgggatcgtgggagcacggctcttttacggcgatggccgggttcagcatgcgggtga

SEQ ID NO: 396661 - DNA, 75 bp, synthetic construct
  source 1..75: mol_type = other DNA
ccgccagggggacgcccggaaaaggcataagcaggagaacaacaaaacagacagtaatcagagcagcagaaaaaa

SEQ ID NO: 396662 - DNA, 75 bp, synthetic construct
  source 1..75: mol_type = other DNA
cgaaggttatcagcagatgattgcgcagctggctgactggctggtgaaactgaccggttacgacgccgtttgtat

SEQ ID NO: 396663 - DNA, 75 bp, synthetic construct
  source 1..75: mol_type = other DNA
gttatgactgcaagccctgagtggtggaaagaagcgacaccgcggcagcaggcggagtttttcgcccgttctgag

SEQ ID NO: 396664 - DNA, 75 bp, synthetic construct
  source 1..75: mol_type = other DNA
tcagcaggatcagtggtgcacggataataccgcttttccctgtttatgacggaaagacccatcatctgactattc

SEQ ID NO: 396665 - DNA, 75 bp, synthetic construct
  source 1..75: mol_type = other DNA
ctgctatcgtccaccacacacagtacggcaaaacattccttgcatatcatcacggtcatactatcaaaaaacctg

SEQ ID NO: 396666 - DNA, 75 bp, synthetic construct
  source 1..75: mol_type = other DNA
cagttcgggatcacgctcacgggtaagcatatccgtctgagcaatggtgcaatgctgcgtttcctgtccaccaat

SEQ ID NO: 396667 - DNA, 75 bp, synthetic construct
  source 1..75: mol_type = other DNA
gaattgtttattactgggcgacaaagtttgagtggtacatgcagctcaatacggaaggcgtggaagatgttatcg

SEQ ID NO: 396668 - DNA, 75 bp, synthetic construct
  source 1..75: mol_type = other DNA
ggatctgatttacgccaaccgtattgagtgggatgaggaagccacggatattccggcatcgttcctggccattcg

SEQ ID NO: 396669 - DNA, 75 bp, synthetic construct
  source 1..75: mol_type = other DNA
tgggatcgctgagcgcgtgttgaatgacttctttgactacgccgttggcgctgctccgatgtctgaaaaagccgt

SEQ ID NO: 396670 - DNA, 75 bp, synthetic construct
  source 1..75: mol_type = other DNA
cgccaacaagcgggcacattcttgatcaagatagtcgctacgcaaaacttgtttatgtggcgatccggtctgtcc

SEQ ID NO: 396671 - DNA, 75 bp, synthetic construct
  source 1..75: mol_type = other DNA
aacaattgatcgctgaatacaacaacggtttaacgtacaaacagatcgctgaaaagtacggcatgtctaaacgca

SEQ ID NO: 396672 - DNA, 75 bp, synthetic construct
  source 1..75: mol_type = other DNA
gcggtgattatttacagcccggatcatggggaaattgggcgctttgtttattaccctgaatattccattttgtaa

SEQ ID NO: 396673 - DNA, 75 bp, synthetic construct
  source 1..75: mol_type = other DNA
gcggtcgcggcggctggcggcggtaataatttacagcccggattatggggaaatcgggcgctttgtttattaccc

SEQ ID NO: 396674 - DNA, 75 bp, synthetic construct
  source 1..75: mol_type = other DNA
tttgctgttgggtggggatctacttcattctgatgggatgatcccggttacaccaacaagcggtcatattcttga

SEQ ID NO: 396675 - DNA, 75 bp, synthetic construct
  source 1..75: mol_type = other DNA
ctgtacggctgcgagtttgttgacagcaaggatgcggtatttaagttctccgaactggtcaggtgtgaggtggag

SEQ ID NO: 396676 - DNA, 75 bp, synthetic construct
  source 1..75: mol_type = other DNA
gcagatcgtagcgcggaacacggtcacgctgatgtgtttttcgctatttctcacgcactcagtaacgaaccgctg

SEQ ID NO: 396677 - DNA, 75 bp, synthetic construct
  source 1..75: mol_type = other DNA
gacacgcagacagtttctgggctatcgcccatgccattgacaacgagccattaaactttgaaaaccagcgaaaat

SEQ ID NO: 396678 - DNA, 75 bp, synthetic construct
  source 1..75: mol_type = other DNA
gctgtatatgtgcgtgttcgtggacagcaaggacagcgtattttcgttctctcacgtagaacgctgctgtgtaga

SEQ ID NO: 396679 - DNA, 75 bp, synthetic construct
  source 1..75: mol_type = other DNA
aaaacagcggcgcttttattgaacgccatatcggaccggacgccgcgcaacagcaagaaatgctgaatgccgttg

SEQ ID NO: 396680 - DNA, 75 bp, synthetic construct
  source 1..75: mol_type = other DNA
atctgtggatccccggctttgaacgtcttaatacggttgcttccggtatggccacacactcgcggtggcgtctga

SEQ ID NO: 396681 - DNA, 75 bp, synthetic construct
  source 1..75: mol_type = other DNA
tctggatacctaaattcagtaaattaaatgacgtagcctcagctatggcgacgcacgatcgctggcgtttaactt

SEQ ID NO: 396682 - DNA, 75 bp, synthetic construct
  source 1..75: mol_type = other DNA
tggaagcctgcggcgtggaggtggacacctggcaggatcacaacccggacgctgcgcggccatttggtgacaggc

SEQ ID NO: 396683 - DNA, 75 bp, synthetic construct
  source 1..75: mol_type = other DNA
tgaagaattaatgaaacgctaccggtttacgcatatcggggtggatatcacgggtattggccggggtgtttatga

SEQ ID NO: 396684 - DNA, 75 bp, synthetic construct
  source 1..75: mol_type = other DNA
aaagcggtaacgcgctgacgttcgtggcggaacggtcggatgttacggggcatgcggatgtgttttttgccattt

SEQ ID NO: 396685 - DNA, 75 bp, synthetic construct
  source 1..75: mol_type = other DNA
cggtctgcataacgaaccccttaactatgaaaacaaacctaaatcccgctggggtgtaaggaaagaggcagcatg

SEQ ID NO: 396686 - DNA, 75 bp, synthetic construct
  source 1..75: mol_type = other DNA
cacctggcaggatcacaaccctgatgcagcgcggccattcggtgacaggccagtttggggcggctttgacccggc

SEQ ID NO: 396687 - DNA, 75 bp, synthetic construct
  source 1..75: mol_type = other DNA
tacaagaaaaacgatattacctcgctgacgcaggaggactttgacgcatgggctgaggaacatctttttgaatat

SEQ ID NO: 396688 - DNA, 75 bp, synthetic construct
  source 1..75: mol_type = other DNA
ccggcagattgttattccggcggtggcattcagtggcgctaagcatgagagagagagcatactgatatttactcc

SEQ ID NO: 396689 - DNA, 75 bp, synthetic construct
  source 1..75: mol_type = other DNA
cctgaaatatctgacggctcccaccattaccagcggcggtaatcctcctgcattttcccttacaccggacgggcg

SEQ ID NO: 396690 - DNA, 75 bp, synthetic construct
  source 1..75: mol_type = other DNA
cggtgctgaaatttataaccgtaccgcgctggataatacgctgatttacagtggcgttattgatatgcctgtcgg

SEQ ID NO: 396691 - DNA, 75 bp, synthetic construct
  source 1..75: mol_type = other DNA
tacggcgctgtactggatagcctccggaccggatattgagccgggcaataattattatttttacgttcgcagtgt

SEQ ID NO: 396692 - DNA, 75 bp, synthetic construct
  source 1..75: mol_type = other DNA
gcaacacaaaaccgatgtttgttggtcagggcgatcagatattcatgaacgacgtgttcctgaaacgcctgacgg

SEQ ID NO: 396693 - DNA, 75 bp, synthetic construct
  source 1..75: mol_type = other DNA
agacgccgctggagaaatataccgcccgtcaggaagaactgaacaaggcactgccggacggctttggcggcacgg

SEQ ID NO: 396694 - DNA, 75 bp, synthetic construct
  source 1..75: mol_type = other DNA
taaccgtaccgcgatggataatacgctggtttacagtggtgttattgatatgcctgctggtcgcggcgacatgac

SEQ ID NO: 396695 - DNA, 75 bp, synthetic construct
  source 1..75: mol_type = other DNA
aaatgcggatatcagtggcagtgtgaatgcgaactcaggagcgctcaacaatgtcacgattaaccagaactgtac

SEQ ID NO: 396696 - DNA, 75 bp, synthetic construct
  source 1..75: mol_type = other DNA
ttgagagagatatttttccagcaatcggtgatatcagtgtcactgagattaaggctcatactctggttaaagcag

SEQ ID NO: 396697 - DNA, 75 bp, synthetic construct
  source 1..75: mol_type = other DNA
ggttttccataaaggcaatcagcgggcaggtaatatcaccgactgtacggtgattgtgaccaaaaaagccgcttc

SEQ ID NO: 396698 - DNA, 75 bp, synthetic construct
  source 1..75: mol_type = other DNA
ggacgctcaacaatgtcacgataaatgaaaactgtcgggttctgggaaaactgtctgcgaaccagattgaaggcg

SEQ ID NO: 396699 - DNA, 75 bp, synthetic construct
  source 1..75: mol_type = other DNA
ctgcaggtggatgcggagcagttcggtggccagcagatggtggtgaactaccatatccgcggccgcatcattcag

SEQ ID NO: 396700 - DNA, 75 bp, synthetic construct
  source 1..75: mol_type = other DNA
atcgatgccgccagctgcacactgacgctggaccgagaggtgacactgccggaagcaggggcatcgacggtgaac

SEQ ID NO: 396701 - DNA, 75 bp, synthetic construct
  source 1..75: mol_type = other DNA
acggtcagcaagtctttcccccgcacgagcacttatgccagtggcaccatcacggtaagaatcagtgatgatcag

SEQ ID NO: 396702 - DNA, 75 bp, synthetic construct
  source 1..75: mol_type = other DNA
cggtgaacctgattaacggcagcggtaagccggtgcgcgtggacatcactgcacaccccgcccctgaccggatac

SEQ ID NO: 396703 - DNA, 75 bp, synthetic construct
  source 1..75: mol_type = other DNA
ttcgcccgaattgtggatatgcgtgcgggaggtggacacgtaaccctgacattcactgtcacgtccacacggcat

SEQ ID NO: 396704 - DNA, 75 bp, synthetic construct
  source 1..75: mol_type = other DNA
tcttatcaagggcgggagtggcgctttcccgcgtcagaatgagggcagtgtgaactggccttccggaacgcgcac

SEQ ID NO: 396705 - DNA, 75 bp, synthetic construct
  source 1..75: mol_type = other DNA
tgaactaccatatccgtggtcgcatcattcaggtaccgtcaaactatgacccggaaaaacgcacgtacagcggta

SEQ ID NO: 396706 - DNA, 75 bp, synthetic construct
  source 1..75: mol_type = other DNA
ctgtccgcctgctgattcagcttgagcgtaacgggcactgggtgacggagaaggatatcaccattaacggcaaga

SEQ ID NO: 396707 - DNA, 75 bp, synthetic construct
  source 1..75: mol_type = other DNA
cagtaaaacgctggaagaccagagcgccaccattcagcagatacagcgcgtgcagaaggacacaaatgatgacct

SEQ ID NO: 396708 - DNA, 75 bp, synthetic construct
  source 1..75: mol_type = other DNA
ggacgccggcaacgtacatcagtgatttactggttgtggtcatgaaaaaatccacggcagggatcagtatcagct

SEQ ID NO: 396709 - DNA, 75 bp, synthetic construct
  source 1..75: mol_type = other DNA
atacagcaacaacccggcctggtgcctgtgggacatgctgactcacccgcgctacggcatgggaaaacgcctggg

SEQ ID NO: 396710 - DNA, 75 bp, synthetic construct
  source 1..75: mol_type = other DNA
ggcggagatgaagaccaccatcaccgaaacccgcaatgaaatcacgcagacggtcagtaaaaccctggaagacca

SEQ ID NO: 396711 - DNA, 75 bp, synthetic construct
  source 1..75: mol_type = other DNA
cagcggcggtaatcctccggcattttccctgacacctggcggacggctgacggcgaaaaatgccgatatcagcgg

SEQ ID NO: 396712 - DNA, 75 bp, synthetic construct
  source 1..75: mol_type = other DNA
gactaatccggtgctgattgacgaaaagggcgaaattattgcgggtcacggtcgtgttatggcggctgaaatgct

SEQ ID NO: 396713 - DNA, 75 bp, synthetic construct
  source 1..75: mol_type = other DNA
gcgtagcgggcactgggtgacagagaaggatatcaccattaacggtaagaccacctcgcagtacctgacgtcggt

SEQ ID NO: 396714 - DNA, 75 bp, synthetic construct
  source 1..75: mol_type = other DNA
aagggcttcgccatgtaccgggggatgtcattgaaatctgcgatgatgactatgcgggtatcagcatcggcgggc

SEQ ID NO: 396715 - DNA, 75 bp, synthetic construct
  source 1..75: mol_type = other DNA
ctgtgggacatgctgactcacccgcgctacggcatgggaaaacgcctgggggccgcggatgtggacaagtgggcg

SEQ ID NO: 396716 - DNA, 75 bp, synthetic construct
  source 1..75: mol_type = other DNA
ggcgaacccgccaccaccacgttccggattaacgcaccggcagcgcctgccggtgttgaactgacgccggggtat

SEQ ID NO: 396717 - DNA, 75 bp, synthetic construct
  source 1..75: mol_type = other DNA
acttaaggtgaaagtgaaccgggttcctgacggcgttgcagaatacagtgtgtgggggctgaagctgccgacgtt

SEQ ID NO: 396718 - DNA, 75 bp, synthetic construct
  source 1..75: mol_type = other DNA
acagttatgccagtggcaccatcacggtaagaatcagtgatgatcagaagtttgaccggcaggtcataaagtgct

SEQ ID NO: 396719 - DNA, 75 bp, synthetic construct
  source 1..75: mol_type = other DNA
gcggattatctttccttgttagccaacggaattgacccgcaaattcaagctgaaattgcagaggaacagcagcaa

SEQ ID NO: 396720 - DNA, 75 bp, synthetic construct
  source 1..75: mol_type = other DNA
aacggtcagcttgcgccggacctgactgaaatcaggacgtccattacgaatgtcagcaatgaaatcacgcaaacc

SEQ ID NO: 396721 - DNA, 75 bp, synthetic construct
  source 1..75: mol_type = other DNA
tgtcagcctggctggtaaatggctggtatcccacagcaagtatcagcgatttactggttgtggtgatgaagaaat

SEQ ID NO: 396722 - DNA, 75 bp, synthetic construct
  source 1..75: mol_type = other DNA
gcaacaaagcagcggacaatgatgggactcggtgccttccctgccctttcgcttgctgatgcccgaggtttaaga

SEQ ID NO: 396723 - DNA, 75 bp, synthetic construct
  source 1..75: mol_type = other DNA
tctgtatcagcatggtgggtaaatggctggtatcccacagcaagtatcagcgatttgctggttgttgtgatgaag

SEQ ID NO: 396724 - DNA, 75 bp, synthetic construct
  source 1..75: mol_type = other DNA
agtatcaggtgctggcccgctgggacacgccgaaggtggtgaagggcgtgagcttcctgcttcgcctgaccgtgg

SEQ ID NO: 396725 - DNA, 75 bp, synthetic construct
  source 1..75: mol_type = other DNA
aacggtcactgtgtacgatgaccaggcttttgaccgtcagatagtaatcccacccgttctgtttcgcggtggtaa

SEQ ID NO: 396726 - DNA, 75 bp, synthetic construct
  source 1..75: mol_type = other DNA
aatgtcaccattaacgagaactgtgtcatcagagggaaactgtctgcaaaccagattgaaggcgatctcgttaaa

SEQ ID NO: 396727 - DNA, 75 bp, synthetic construct
  source 1..75: mol_type = other DNA
agttcaggttgatacaaataataacctgaacagcatgtgggctgtgaagctgcaacagatgaaggacggacgcct

SEQ ID NO: 396728 - DNA, 75 bp, synthetic construct
  source 1..75: mol_type = other DNA
ttatagatatgcctgccggacaggggacgctgacactgacattcaccgtatcttcatcaggagcgaataactgga

SEQ ID NO: 396729 - DNA, 75 bp, synthetic construct
  source 1..75: mol_type = other DNA
ctgattaaaactgaactgctggagacgcagaccgtggatttcagcgtcggggcagaagggcttcgccatgtaccg

SEQ ID NO: 396730 - DNA, 75 bp, synthetic construct
  source 1..75: mol_type = other DNA
ctgattaaaactgaactgctggagacgcagaccgtggatttcagcgtcggagcggaagggcttcgccatgtaccg

SEQ ID NO: 396731 - DNA, 75 bp, synthetic construct
  source 1..75: mol_type = other DNA
ctgattaaaactgaactgctggagacgcagaccgtggatttcagcgtaggcgccgaagggcttcgccatgtaccg

SEQ ID NO: 396732 - DNA, 75 bp, synthetic construct
  source 1..75: mol_type = other DNA
taccacgctgataagcctggttgacggccagggcagtccggtcagcgtggaggtacagtccgtcaccgacggcgt

SEQ ID NO: 396733 - DNA, 75 bp, synthetic construct
  source 1..75: mol_type = other DNA
taccacgctgataagcctggttgacggtcagggaattccggtcagcgtggaggtacagtccgtcaccgacggcgt

SEQ ID NO: 396734 - DNA, 75 bp, synthetic construct
  source 1..75: mol_type = other DNA
taccacgctgataagcctggttgacggacagggaagtccggtcagcgtggaggtacagtccgtcaccgacggcgt

SEQ ID NO: 396735 - DNA, 75 bp, synthetic construct
  source 1..75: mol_type = other DNA
taccacgctgataagcctggttgacgggcagggaaatccggtcagcgtggaggtacagtccgtcaccgacggcgt

SEQ ID NO: 396736 - DNA, 75 bp, synthetic construct
  source 1..75: mol_type = other DNA
ggtgtggccgtacaccaacagcgatgtggtggtggatgataacggcgtgggattccgctacagcttcagtgccct

SEQ ID NO: 396737 - DNA, 75 bp, synthetic construct
  source 1..75: mol_type = other DNA
gggcgactgacggcgaaaaatgcggatatcagtggcagtgtgaatgcgaactcagggacgctcaacaacgtcacg

SEQ ID NO: 396738 - DNA, 75 bp, synthetic construct
  source 1..75: mol_type = other DNA
ggaagtgacgaaggcaaaaccggtgacgcgcaccattacgtccgcgaacattgaccgcctgcgggtgaccttcgg

SEQ ID NO: 396739 - DNA, 75 bp, synthetic construct
  source 1..75: mol_type = other DNA
gaaatgctgatatcagcggtaacgtgaatgcgaattccgggacgctcaacaacgtcacgattaacgagaactgtc

SEQ ID NO: 396740 - DNA, 75 bp, synthetic construct
  source 1..75: mol_type = other DNA
aggacggcaacaccacgccgttatttgtggcgcaggggaatcagttgttcatgaacgatgtgttcctgaagcggc

SEQ ID NO: 396741 - DNA, 75 bp, synthetic construct
  source 1..75: mol_type = other DNA
ggatatcaggcaggttgaaaccacagcccgctatcttggcacggcgctgtactggatagctgccagtatcaatat

SEQ ID NO: 396742 - DNA, 75 bp, synthetic construct
  source 1..75: mol_type = other DNA
taccacgctgataagcctggttgacgggcaggggagtccggtcagcgtggaggtacagtccgtcaccgacggcgt

SEQ ID NO: 396743 - DNA, 75 bp, synthetic construct
  source 1..75: mol_type = other DNA
taccacgctgataagcctggttgacgggcagggcactccggtcagcgtggaggtacagtccgtcaccgacggcgt

SEQ ID NO: 396744 - DNA, 75 bp, synthetic construct
  source 1..75: mol_type = other DNA
tcgtcatacaccgaaatcatcgatgtgaaacagtgctacccgaacacggctattgtgggtctgcaggtggatgcg

SEQ ID NO: 396745 - DNA, 75 bp, synthetic construct
  source 1..75: mol_type = other DNA
acgacggatgctcagggcgtattttcctcagttatagatatgcctgtcggacaggggacgctgacactgacattc

SEQ ID NO: 396746 - DNA, 75 bp, synthetic construct
  source 1..75: mol_type = other DNA
ttaaggggaaactgtccgccaaccagattgaaggcgatattgtcaaaacggtcagcaagtctttcccccgcacga

SEQ ID NO: 396747 - DNA, 75 bp, synthetic construct
  source 1..75: mol_type = other DNA
ggtgatattgtcaaaacggtgggaaaagcctttccgagaaatggcagttatgccagcggtacaataacggtcact

SEQ ID NO: 396748 - DNA, 75 bp, synthetic construct
  source 1..75: mol_type = other DNA
cagattgttattccggcggtggctttcagcggtgccagacatgagcgggagaacagcgatacttattcgtcatgc

SEQ ID NO: 396749 - DNA, 75 bp, synthetic construct
  source 1..75: mol_type = other DNA
cggcgtattaatcgcatccagagaaactaaaggggccattcccggtagttacagtgcagttattgatatgcctag

SEQ ID NO: 396750 - DNA, 75 bp, synthetic construct
  source 1..75: mol_type = other DNA
ggttccgctacagcttcagtgccctgaaggaccggcacacggcggtggaggtgaattacaccgacccgcagaacg

SEQ ID NO: 396751 - DNA, 75 bp, synthetic construct
  source 1..75: mol_type = other DNA
gtggtgaagggcgtgcgcttcagtctgcgcctgaccagcggaaacggtgaaaacagccgcctggtgaccagcgcc

SEQ ID NO: 396752 - DNA, 75 bp, synthetic construct
  source 1..75: mol_type = other DNA
gtgcctcagacggccagtatctggcgctggcgaaatgggacacgccgcgggtggtgaagggcgtgcgcttcagtc

SEQ ID NO: 396753 - DNA, 75 bp, synthetic construct
  source 1..75: mol_type = other DNA
aggtggtgaagggtgtgagcttcctgcttcgcctgaccgtggcagcggatgacggcagtgagcggctggtcagca

SEQ ID NO: 396754 - DNA, 75 bp, synthetic construct
  source 1..75: mol_type = other DNA
ggaaaaaataggaaaactgcatctggctcaggggctgtgggagctgatagacaacagacagcttgcggatgagat

SEQ ID NO: 396755 - DNA, 75 bp, synthetic construct
  source 1..75: mol_type = other DNA
acacggagcaccgtttcagcggcctgccactgggggaatacaccctgacggtgcgggccattaacagctacggcc

SEQ ID NO: 396756 - DNA, 75 bp, synthetic construct
  source 1..75: mol_type = other DNA
cgttatctggggaccggcagtcagtggactgtccaggggagccggattaagccggggacggatttctggttttat

SEQ ID NO: 396757 - DNA, 75 bp, synthetic construct
  source 1..75: mol_type = other DNA
agtgtatccggcccgcacattaagcccgggaaggatttctggttttacgtgcgcagcgtcaacctggtggggaaa

SEQ ID NO: 396758 - DNA, 75 bp, synthetic construct
  source 1..75: mol_type = other DNA
gcatactgatatttactcctcatgccgtctgatagtgcggaaaaacggtgctgaaatttataaccgtaccgcgct

SEQ ID NO: 396759 - DNA, 75 bp, synthetic construct
  source 1..75: mol_type = other DNA
ggggacgctgacactgacattcaccgtatcttcatcaggagcgaataactggacaccaacaaccagtatcagcga

SEQ ID NO: 396760 - DNA, 75 bp, synthetic construct
  source 1..75: mol_type = other DNA
tgtgtctccatccgggaaaacacggacggcacctttgccatcacggcggtgcagcacgtgccggaaaaagaagcc

SEQ ID NO: 396761 - DNA, 75 bp, synthetic construct
  source 1..75: mol_type = other DNA
gcacgagcacttatgccagtggcaccatcacggtaagaatcagtgatgatcagaagtttgaccggcaggtcatga

SEQ ID NO: 396762 - DNA, 75 bp, synthetic construct
  source 1..75: mol_type = other DNA
tgatatcagcggtaacgtgaatgcgaattccgggacgctcaacaacgtcacgattaacgagaactgtcgggttct

SEQ ID NO: 396763 - DNA, 75 bp, synthetic construct
  source 1..75: mol_type = other DNA
aacctgattaacggcagtggtaagccggtgagcgtggccatcactgcacaccccgcgccggaccggatacaggtc

SEQ ID NO: 396764 - DNA, 75 bp, synthetic construct
  source 1..75: mol_type = other DNA
cgggaaaacacggacggcacctttgccatcacggcggtgcagcacgtaccggaaaaagaagccatcgtggataac

SEQ ID NO: 396765 - DNA, 75 bp, synthetic construct
  source 1..75: mol_type = other DNA
tgtggggctgcaggtggatgcggagcagttcggcggtcagcagatgacggtgaactaccatatccgcggtcgcat

SEQ ID NO: 396766 - DNA, 75 bp, synthetic construct
  source 1..75: mol_type = other DNA
gacgctcaacaacgtcacgattaatgagaactgtcagattaaggggaaactgtcagccaaccagattgaaggcga

SEQ ID NO: 396767 - DNA, 75 bp, synthetic construct
  source 1..75: mol_type = other DNA
tgtggctcagggggatcagctgttcctgaatgaggttttcatgtccagggcgacgattgattttgcggaaattac

SEQ ID NO: 396768 - DNA, 75 bp, synthetic construct
  source 1..75: mol_type = other DNA
gtggtggtggatgataacggcgtggggttccgctacagcttcagcgccctgaaggaccgccacacggcggtggag

SEQ ID NO: 396769 - DNA, 75 bp, synthetic construct
  source 1..75: mol_type = other DNA
gtatctggaatttttccgggaaaaaataggaaaactgcatctggctcaggggttgtgggaactgatagataacag

SEQ ID NO: 396770 - DNA, 75 bp, synthetic construct
  source 1..75: mol_type = other DNA
ggaagtgaaatacgacacgccgatcacccgcaccatcacgtcggcaaacatcgatcgtctgcgctttactttcgg

SEQ ID NO: 396771 - DNA, 75 bp, synthetic construct
  source 1..75: mol_type = other DNA
cacgccgaaggtggtgaagggtgtgagctttatgcttcgcctgactgtggcagcagacgacggcagtgagcggct

SEQ ID NO: 396772 - DNA, 75 bp, synthetic construct
  source 1..75: mol_type = other DNA
tccggcggtggcattcagcggcgctaaacatgagagagagcatactgatatttactcctcatgccgtctgatagt

SEQ ID NO: 396773 - DNA, 75 bp, synthetic construct
  source 1..75: mol_type = other DNA
ttttcgaaagagtggaaggacgccaacgataaatggaatgccatgtggggcgtcaaaattgagcagaccgaagac

SEQ ID NO: 396774 - DNA, 75 bp, synthetic construct
  source 1..75: mol_type = other DNA
cggacgtgtcctgtccatcgatgccgccagccgcacgcgcagtactgcgagccagaggtcccggatggtttcggg

SEQ ID NO: 396775 - DNA, 75 bp, synthetic construct
  source 1..75: mol_type = other DNA
gctacggaatgggaaaacgcctgggggcggcggatgtggacaagtgggcgctgtatgccattgcgcagtactgcg

SEQ ID NO: 396776 - DNA, 75 bp, synthetic construct
  source 1..75: mol_type = other DNA
actccgggacgctcaacaacgtcacgattaacgagaactgtcgggttctgggaaaattgtccgcgaaccagattg

SEQ ID NO: 396777 - DNA, 75 bp, synthetic construct
  source 1..75: mol_type = other DNA
gaagtcaggggacagggaggctgggatctgagccgggaactgaactgcttcagggtcgatgatgaaaacaatgtc

SEQ ID NO: 396778 - DNA, 75 bp, synthetic construct
  source 1..75: mol_type = other DNA
ccccgtccctttaacatccggatggtccgggagacggcggacagcaccacggaccagctgcagaacagaacgctg

SEQ ID NO: 396779 - DNA, 75 bp, synthetic construct
  source 1..75: mol_type = other DNA
gtctttcccccgcacgaacagttatgccagtggcaccatcacggtaagaatcagtgatgatcagaaatttgaccg

SEQ ID NO: 396780 - DNA, 75 bp, synthetic construct
  source 1..75: mol_type = other DNA
cagagtgcagcgatccagcagatacagaaggttcaggttgatacaaataataacctgaacagcatgtgggctgtg

SEQ ID NO: 396781 - DNA, 75 bp, synthetic construct
  source 1..75: mol_type = other DNA
gcagatacagaaggttcaggttgataccagtaatgacctgaacagcatgtgggctgtgaagctgcaacagatgaa

SEQ ID NO: 396782 - DNA, 75 bp, synthetic construct
  source 1..75: mol_type = other DNA
acgaaacaccagaatttcaacagcccgaatcagcagtcgtactggtattccacctgtaagctgcaggtgctgaag

SEQ ID NO: 396783 - DNA, 75 bp, synthetic construct
  source 1..75: mol_type = other DNA
gggatggtaaatggaagattgcggcgattgattttgcatcgttacacgagtttgaaaaaaacggtcgggttactg

SEQ ID NO: 396784 - DNA, 75 bp, synthetic construct
  source 1..75: mol_type = other DNA
actcccgtgcaccggagcggtggccatcaggaaccattaccgtcagggtttatgacgatcagccgtttgaccggc

SEQ ID NO: 396785 - DNA, 75 bp, synthetic construct
  source 1..75: mol_type = other DNA
ggctgaaatcaggacgtccattacgaatgtcagcaatgaaatcacgcagaccgtcaataaaaaactggaaaatca

SEQ ID NO: 396786 - DNA, 75 bp, synthetic construct
  source 1..75: mol_type = other DNA
ggaagtgaaatacgacacgccgatcacccggaccatcacgtcggtaaacattgaccgtctgcgctttaccttcgg

SEQ ID NO: 396787 - DNA, 75 bp, synthetic construct
  source 1..75: mol_type = other DNA
gcgaaaatttgatgaaggaaatgtggggggctattccctctgaatcagaaatgatggaaatcagttcagaatatg

SEQ ID NO: 396788 - DNA, 75 bp, synthetic construct
  source 1..75: mol_type = other DNA
tgttgccggtattggagcggggattgaggatactgatggccagcccctgagcaacatactgctgctggctgaccg

SEQ ID NO: 396789 - DNA, 75 bp, synthetic construct
  source 1..75: mol_type = other DNA
gcaatcccgtgatacacggtgtgaccgcggtctggcgtgccggggagcaggagcagacaccaccggaaggctttg

SEQ ID NO: 396790 - DNA, 75 bp, synthetic construct
  source 1..75: mol_type = other DNA
atacagcaacaaccctgcctggtgcctgtgggacatgctgacccacccgcgctacggaatgggaaaacgcctggg

SEQ ID NO: 396791 - DNA, 75 bp, synthetic construct
  source 1..75: mol_type = other DNA
caatcccagagagggatatgatattgaaaccttcaaggaatattctgatgatgaactggagtttaattattttct

SEQ ID NO: 396792 - DNA, 75 bp, synthetic construct
  source 1..75: mol_type = other DNA
gttcaggttgatacaaataataacctgaacagcatgtgggcagtgaagctgcagcagatgcaggacggacgcctt

SEQ ID NO: 396793 - DNA, 75 bp, synthetic construct
  source 1..75: mol_type = other DNA
gccggtgcgaacaactggacgccgacaacgtacatcagtgatttactggttgtggtcatgaaaaaatccacagca

SEQ ID NO: 396794 - DNA, 75 bp, synthetic construct
  source 1..75: mol_type = other DNA
gtttaaaaaaaatactgggtatacaccattacagtaccgtaacagcaatgtatggtcattcatgaatcttaccgg

SEQ ID NO: 396795 - DNA, 75 bp, synthetic construct
  source 1..75: mol_type = other DNA
cacacacccggtgacattattgaaatctgtgataatgactatgccgggaccctgaccggcggacgtgtcctgtcc

SEQ ID NO: 396796 - DNA, 75 bp, synthetic construct
  source 1..75: mol_type = other DNA
tcacagactgtcagccaggggcagtcagaaaacgcccgacagatagcacaggtccgccagtacgtggataaaaaa

SEQ ID NO: 396797 - DNA, 75 bp, synthetic construct
  source 1..75: mol_type = other DNA
gatgagatggcggagatgaagaccaccatcaccgaaacccgcaatgaaatcacacagacggtcagtaaaacgctg

SEQ ID NO: 396798 - DNA, 75 bp, synthetic construct
  source 1..75: mol_type = other DNA
gctgtcggccagccggttaatgatgctgaggtgtatctcaatttttttgaagggaaaataaacagcaccctgctg

SEQ ID NO: 396799 - DNA, 75 bp, synthetic construct
  source 1..75: mol_type = other DNA
caccgtttcagcggcctgccgttcggggaatacaccctgacggtgcgggcgataaacagctatggccagcagggt

SEQ ID NO: 396800 - DNA, 75 bp, synthetic construct
  source 1..75: mol_type = other DNA
gcacagattcgcacgatcgccttgcggaaatgcagcaagtatttacgcctgctttaatggagcctgtactgaaat

SEQ ID NO: 396801 - DNA, 75 bp, synthetic construct
  source 1..75: mol_type = other DNA
ggtattggtgccggtattgagaacacccctgacggcatgcagagtcaggtgctgctggcggcggacaggattgcg

SEQ ID NO: 396802 - DNA, 75 bp, synthetic construct
  source 1..75: mol_type = other DNA
taatcgcatccagagaaactaaaggggccattcccggtagttacagtgcagttattgatatgccgagtggcaggg

SEQ ID NO: 396803 - DNA, 75 bp, synthetic construct
  source 1..75: mol_type = other DNA
tccggcggtggctttcagcggtgccagacatgagcgggagaacagcgatacttattcgtcatgccgcctgatagt

SEQ ID NO: 396804 - DNA, 75 bp, synthetic construct
  source 1..75: mol_type = other DNA
ggtaaggctttcccccgtgactcccgtgcaccgaagcgttggccatcaggaaccattaccgtcagggtttatgac

SEQ ID NO: 396805 - DNA, 75 bp, synthetic construct
  source 1..75: mol_type = other DNA
cggccagcgtggaggttcagtccgttaccgacggcgtgaaggtgaaagtgaactgggttcctgacggtgttgctg

SEQ ID NO: 396806 - DNA, 75 bp, synthetic construct
  source 1..75: mol_type = other DNA
gaaacgccttggtgcggcagatgtggataaatgggcgctgtacgttatcggccagtactgcgaccagttggtacc

SEQ ID NO: 396807 - DNA, 75 bp, synthetic construct
  source 1..75: mol_type = other DNA
cattcaggtgccgtcaaactatgacccggaaaaacgcacgtacagtggtatctgggacggcagtctgaaaccggc

SEQ ID NO: 396808 - DNA, 75 bp, synthetic construct
  source 1..75: mol_type = other DNA
acattgccaattaccaatatccctctgaccgttctggaagcctttaataacgcgggtggcctcaccgaaaaagcc

SEQ ID NO: 396809 - DNA, 75 bp, synthetic construct
  source 1..75: mol_type = other DNA
gcagacaggattgcgatgattaatcctgcgaatggcaacacaaagccgatgtttgttggtcagggcgatcagata

SEQ ID NO: 396810 - DNA, 75 bp, synthetic construct
  source 1..75: mol_type = other DNA
tagtcaaaacagtgggtaaggcttttccgcgggactcccgggcaccggagcggtggccatcagggaccattaccg

SEQ ID NO: 396811 - DNA, 75 bp, synthetic construct
  source 1..75: mol_type = other DNA
ctgtatgccattgtgcagtactgcgaccagacggtcccggatggtttcgggggcacagagccgcggatgaccttt

SEQ ID NO: 396812 - DNA, 75 bp, synthetic construct
  source 1..75: mol_type = other DNA
ggcagcggtaagccggtgagtgtggacatcaccgcacaccccgcgccggaccggatacaggtcagtaccctgccg

SEQ ID NO: 396813 - DNA, 75 bp, synthetic construct
  source 1..75: mol_type = other DNA
tgacgccggacagcacccacagaccagctgcagaacaaaaacgctctggtcgtcatacaccgaaatcatcgatgt

SEQ ID NO: 396814 - DNA, 75 bp, synthetic construct
  source 1..75: mol_type = other DNA
ccggatacaggtcagtaccctgcctgatggtgtggagacatacggtgtatggggactctccctgccgtcactgcg

SEQ ID NO: 396815 - DNA, 75 bp, synthetic construct
  source 1..75: mol_type = other DNA
tgttgaactgacgccggggtattttcagataacggcagtcccgaaactgaccatttatgacccgacggtgcagtt

SEQ ID NO: 396816 - DNA, 75 bp, synthetic construct
  source 1..75: mol_type = other DNA
tggcgcggggatcgaggatgtcgatggtcagacgctgagtaacattctgctgcaggccgatcgcattgcgatgat

SEQ ID NO: 396817 - DNA, 75 bp, synthetic construct
  source 1..75: mol_type = other DNA
aacagtgctacccgaacacggcgattgtggggctgcaggtggatgcggagcagttcggcggccagcagatgacgg

SEQ ID NO: 396818 - DNA, 75 bp, synthetic construct
  source 1..75: mol_type = other DNA
cagtactgcgaccagacggtcccggatggtttcgggggcacagagccgcggatgacctttaatgcgtacctgtca

SEQ ID NO: 396819 - DNA, 75 bp, synthetic construct
  source 1..75: mol_type = other DNA
ataaagcgcagcgttcagcactaaaagcgttgcttatcacccatatcggttcgttggggttgtatcttgccgccg

SEQ ID NO: 396820 - DNA, 75 bp, synthetic construct
  source 1..75: mol_type = other DNA
cagcggacgatggcagtgagcggctggtcagcacggccaggacgacggaaactacataccgcttcacgcaactgg

SEQ ID NO: 396821 - DNA, 75 bp, synthetic construct
  source 1..75: mol_type = other DNA
agtcatactggtattcaacctgtaagctgcaggtactgaagaacggacaggaaatctttcagcaacccgcgacgg

SEQ ID NO: 396822 - DNA, 75 bp, synthetic construct
  source 1..75: mol_type = other DNA
ttacatccgcagtgtgaacaccgttggcaaatcggcatttgtggaggctgttggccagccgagtgatgatgcatc

SEQ ID NO: 396823 - DNA, 75 bp, synthetic construct
  source 1..75: mol_type = other DNA
agttttcgaaagagtggaaggacgccaacgataaatggaatgccatgtggggcgtcaaaattgagcagaccaaag

SEQ ID NO: 396824 - DNA, 75 bp, synthetic construct
  source 1..75: mol_type = other DNA
aagttcagtccgtcaccgacggacttaaggtgaaagtgaaccgggttcctgacggcgttgcagaatacagtgtgt

SEQ ID NO: 396825 - DNA, 75 bp, synthetic construct
  source 1..75: mol_type = other DNA
actgcagcagatgcaggatggtcgcctttatattgcgggtatcggtgccggtattgagaacacccctgacggtat

SEQ ID NO: 396826 - DNA, 75 bp, synthetic construct
  source 1..75: mol_type = other DNA
tgaagttgagcaactggaggatgagatcaatcagcagatagagagtgatattgctgaagtgacccaaaaaatcgg

SEQ ID NO: 396827 - DNA, 75 bp, synthetic construct
  source 1..75: mol_type = other DNA
tggacgccaacgaccagtatcagcgaccttcttgttgtcgtgatgaagaaatcaacagccggtatcagtatcagc

SEQ ID NO: 396828 - DNA, 75 bp, synthetic construct
  source 1..75: mol_type = other DNA
cgtcactgcgtcgtcgcctgttccgctgtgtttccatccgggaaaacacggacggcacctttgccatcacggcgg

SEQ ID NO: 396829 - DNA, 75 bp, synthetic construct
  source 1..75: mol_type = other DNA
ttaagattttccagaaaggcaatcagggggcagggaatatcaccgactgtacggtgattgtgaccaaaaaagcgg

SEQ ID NO: 396830 - DNA, 75 bp, synthetic construct
  source 1..75: mol_type = other DNA
gcgaaaaatgccgatatcagcggtaacgtgaatgcgaactccgggacgctcaacaacgtcacggtaaatgaaaac

SEQ ID NO: 396831 - DNA, 75 bp, synthetic construct
  source 1..75: mol_type = other DNA
ccatacagcaaatccagcgtgtgcagacggacacaaataatgacctgaacagcatgtgggcggtgaagctacagc

SEQ ID NO: 396832 - DNA, 75 bp, synthetic construct
  source 1..75: mol_type = other DNA
cggtggaaggtccggtgaaggggctgcagagtatcctggtgaacaaaaccccgctgacggacacggacggtaatc

SEQ ID NO: 396833 - DNA, 75 bp, synthetic construct
  source 1..75: mol_type = other DNA
aagattttccagaaaggcaatcagggcgcaggtaacatcacagactgtacggtgattgtgaccaaaaaagctgct

SEQ ID NO: 396834 - DNA, 75 bp, synthetic construct
  source 1..75: mol_type = other DNA
cagttcggtggccagcagctgacggtgaactaccatatccgtggtcgcatcattcaggtgccgtcaaactatgac

SEQ ID NO: 396835 - DNA, 75 bp, synthetic construct
  source 1..75: mol_type = other DNA
aaattttccgtgggctgatagatgaggcgctgctggggaaggcactgaaagagcgtattgatgcgtcagccctgc

SEQ ID NO: 396836 - DNA, 75 bp, synthetic construct
  source 1..75: mol_type = other DNA
tgcggaaaaacggtgctgaaatttataaccgtaccgcgctggataatacgctgatttacagtggcgttattgata

SEQ ID NO: 396837 - DNA, 75 bp, synthetic construct
  source 1..75: mol_type = other DNA
cagagccgcggatgacctttaatgcgtacctgtcacaacagcgtaaggcgtgggacgttctcagtgatttctgct

SEQ ID NO: 396838 - DNA, 75 bp, synthetic construct
  source 1..75: mol_type = other DNA
tgccgctttgcagagcgcatcacgacgagttgcacgctgacaccgtggcatttgaggagaagcacggctcacagc

SEQ ID NO: 396839 - DNA, 75 bp, synthetic construct
  source 1..75: mol_type = other DNA
atgatcctgccgttcgggccgttgttccgcaatgaggcagtgatccgtcgtgctggtggcgtggaatgtcttgaa

SEQ ID NO: 396840 - DNA, 75 bp, synthetic construct
  source 1..75: mol_type = other DNA
ccgctgaagtttgagaaaaagtacggctctcagattgagttaatttttcgttttcttgatcacgcctttgcgact

SEQ ID NO: 396841 - DNA, 75 bp, synthetic construct
  source 1..75: mol_type = other DNA
tgctggagcctgagccggagcattattcatctttcgccagtggtgccgttcccgcggcatcacaaccgctggcgg

SEQ ID NO: 396842 - DNA, 75 bp, synthetic construct
  source 1..75: mol_type = other DNA
cagtggtgccgttccggcagcatcacaaccgctggcggatgatcctgccgttcgggccgtgttccgccatgaggc

SEQ ID NO: 396843 - DNA, 75 bp, synthetic construct
  source 1..75: mol_type = other DNA
agcgaaaattttacgctgttccggcatgagcctggcagcatccgcctttgctgggcctgcgataacctggtgcgt

SEQ ID NO: 396844 - DNA, 75 bp, synthetic construct
  source 1..75: mol_type = other DNA
gcctttccccggaataacagttatgccagcgggacggtaaccgtcacagtttacgatgaccagggcttcgaccgg

SEQ ID NO: 396845 - DNA, 75 bp, synthetic construct
  source 1..75: mol_type = other DNA
ctggcactgcgataaccagctgcgtgaccagttcacggaacggctggaatcaatggcaacggataactgtgcccg

SEQ ID NO: 396846 - DNA, 75 bp, synthetic construct
  source 1..75: mol_type = other DNA
gtgccttcggttcctgccaccagcattatccaggataaagcgaaaaaggtgctggcgctgaaagtggatccggag

SEQ ID NO: 396847 - DNA, 75 bp, synthetic construct
  source 1..75: mol_type = other DNA
ctgaccaagcagcgaaccaaacagagcttcggtgcctaccctgccgtctcgctttctgatgcacgtaaactcaga

SEQ ID NO: 396848 - DNA, 75 bp, synthetic construct
  source 1..75: mol_type = other DNA
accgtggcatttgaagagaagtatggctcccaactggagctgatatttcgttttatcgatcgtgcgctggcaatt

SEQ ID NO: 396849 - DNA, 75 bp, synthetic construct
  source 1..75: mol_type = other DNA
gctgatgtgcttccggagtctgtattgtgtcgttcactgggattaccggtggaaaaaatccgctccgtataccgt

SEQ ID NO: 396850 - DNA, 75 bp, synthetic construct
  source 1..75: mol_type = other DNA
ccaacaccgaagttctgcgcgcgaaagcgttagagaaggatctaacgctgcatgatggtgatgggcttttcctga

SEQ ID NO: 396851 - DNA, 75 bp, synthetic construct
  source 1..75: mol_type = other DNA
cggccagaattgcgaccagtcggtgccggatggctttggtggcacggagccgcgcatcacctgtaatgcctggct

SEQ ID NO: 396852 - DNA, 75 bp, synthetic construct
  source 1..75: mol_type = other DNA
tggtaccagaacttgggctggtggtccttaaaccagggcgtgaatccatgcaggtatttcataatcctcgagtgt

SEQ ID NO: 396853 - DNA, 75 bp, synthetic construct
  source 1..75: mol_type = other DNA
tttttgtgttgcctttgtgcagaaagcatcacgagagctgcatgcgaataccgtggcatttgaagagaattatgg

SEQ ID NO: 396854 - DNA, 75 bp, synthetic construct
  source 1..75: mol_type = other DNA
gaaatatgaaatcccgccgctcttttatcgcctttccggaacgtttcgccaggcgaatccacaatcagaacattg

SEQ ID NO: 396855 - DNA, 75 bp, synthetic construct
  source 1..75: mol_type = other DNA
tggaggacacgccggaaggcaaactgagccagtttctggtcgccgctaaccgtattgcgtttattgatccgtcta

SEQ ID NO: 396856 - DNA, 75 bp, synthetic construct
  source 1..75: mol_type = other DNA
atgtcttgaaagctggttacttcgtgaaaaaggctgccagtggcctcattccgactggcacagcgagaacatgac

SEQ ID NO: 396857 - DNA, 75 bp, synthetic construct
  source 1..75: mol_type = other DNA
cctgaagtatctgacggctcccaccattaccagcggcggtaatcctccggcattttccctgacaccggacgggcg

SEQ ID NO: 396858 - DNA, 75 bp, synthetic construct
  source 1..75: mol_type = other DNA
taacgtgaatgcgaactccgggacgctcaataatgtcacgattaaccagaactgtcggattctgggaaaactgtc

SEQ ID NO: 396859 - DNA, 75 bp, synthetic construct
  source 1..75: mol_type = other DNA
gcagagccagatactgctggcagcggaccgcgtggcattcattaacccggaaaatggtaacaccacacccgcact

SEQ ID NO: 396860 - DNA, 75 bp, synthetic construct
  source 1..75: mol_type = other DNA
cgggacgctcaacaacgttacgataaatgagaactgtcagattaaagggaaactgtcagccaaccagattgaagg

SEQ ID NO: 396861 - DNA, 75 bp, synthetic construct
  source 1..75: mol_type = other DNA
actggacgccaacgaccagtatcagcgaccttcttgttgttgtgatgaagaaatctacagccggtatcagtatca

SEQ ID NO: 396862 - DNA, 75 bp, synthetic construct
  source 1..75: mol_type = other DNA
attaacgagaactgtgtcatcagagggaaactgtctgcaaaccagattgaaggcgatctcgttaaaacagtgggt

SEQ ID NO: 396863 - DNA, 75 bp, synthetic construct
  source 1..75: mol_type = other DNA
agcaatgaaatcacgcagactgtcaataagaaactggaagaccagagtgcggcgatccagcagatacagaaggtt

SEQ ID NO: 396864 - DNA, 75 bp, synthetic construct
  source 1..75: mol_type = other DNA
ttgccggatacagcgtatgggggctgaagttgccgacgttgcgccagcgcctgttccgctgtgtgagtatccgtg

SEQ ID NO: 396865 - DNA, 75 bp, synthetic construct
  source 1..75: mol_type = other DNA
ggtggccatcaggaaccattaccgtcagggtttatgacgatcagccgtttgaccggcagattgttattccggcgg

SEQ ID NO: 396866 - DNA, 75 bp, synthetic construct
  source 1..75: mol_type = other DNA
ggactcccgtgcaccggagcggtggccatcagggaccattaccgtcagggtttatgacgatcagccgtttgaccg

SEQ ID NO: 396867 - DNA, 75 bp, synthetic construct
  source 1..75: mol_type = other DNA
attgtcaaaacagtgggtaaggctttcccgcgggactcccgggcaccggagcggtggccatcagggaccattacc

SEQ ID NO: 396868 - DNA, 75 bp, synthetic construct
  source 1..75: mol_type = other DNA
caatcccccgacgttttccctgacgccggagggcaggctgaccgcaagaaatgctgatatcagcggtaacgtgaa

SEQ ID NO: 396869 - DNA, 75 bp, synthetic construct
  source 1..75: mol_type = other DNA
acaaagccgatgtttgttggtcagggcgatcagatattcatgaacgacgtgttcctgaaacgcctgtttgcggtg

SEQ ID NO: 396870 - DNA, 75 bp, synthetic construct
  source 1..75: mol_type = other DNA
ccgtcaaatcattattccgcccattatctttaacggaatagcgtatagcgatccgggaagtggtaataacccggg

SEQ ID NO: 396871 - DNA, 75 bp, synthetic construct
  source 1..75: mol_type = other DNA
tgaactgacgccggggtattttcagataacggcggtcccgcgtcttgcggtgtatgacccgacggtacagtttga

SEQ ID NO: 396872 - DNA, 75 bp, synthetic construct
  source 1..75: mol_type = other DNA
atgacctggctgcgctgtacatgctgaaggttacaaaaaacgaaagacggcattccctatgtggccgggattggt

SEQ ID NO: 396873 - DNA, 75 bp, synthetic construct
  source 1..75: mol_type = other DNA
ataacggtcagcttgcgcctgacctggctgaaatcaggacgtccattacgggtgtcagcaatgaaatcacgcaga

SEQ ID NO: 396874 - DNA, 75 bp, synthetic construct
  source 1..75: mol_type = other DNA
cagtccgcctgctgattcaggtgcagcgtaacggcaactgggtgacggagaaggatgtcaccattaacggcaaga

SEQ ID NO: 396875 - DNA, 75 bp, synthetic construct
  source 1..75: mol_type = other DNA
tcagccgggtgttctcatcggtgatagatatgccggcagggcggggtcatgtcaccctgacgtttaatgtgtcgt

SEQ ID NO: 396876 - DNA, 75 bp, synthetic construct
  source 1..75: mol_type = other DNA
ggaggtgacgagggcgaagccggtgacgcgcaccatcacgtcagcgaacattgaccgtctgcgggtcaccttcgg

SEQ ID NO: 396877 - DNA, 75 bp, synthetic construct
  source 1..75: mol_type = other DNA
tccgtgagaacgatgacggcacgtatgccatcactgccgtgcagcatgtaccggaaaaagaggccatcgtggata

SEQ ID NO: 396878 - DNA, 75 bp, synthetic construct
  source 1..75: mol_type = other DNA
gaagaccagcatcacggaaacccgcaatgaaatcacacagacggtcaacaaaacactggagaaccagagcgccac

SEQ ID NO: 396879 - DNA, 75 bp, synthetic construct
  source 1..75: mol_type = other DNA
cagcgcgtgcagacggacacaaatgatgacctggctgcactctacatgctgaaggtacagaaaacgaaagacggt

SEQ ID NO: 396880 - DNA, 75 bp, synthetic construct
  source 1..75: mol_type = other DNA
cattgaactgacgccgggttattttgaaataatggtggtaccgaaactggctgtatatgatccgaccgttcagtt

SEQ ID NO: 396881 - DNA, 75 bp, synthetic construct
  source 1..75: mol_type = other DNA
gttttcattacagcttcagtgccctcaaggacagacacacggcagttgaggtgaattacaccgatccgcagaatg

SEQ ID NO: 396882 - DNA, 75 bp, synthetic construct
  source 1..75: mol_type = other DNA
ccggcagcatcacaaccgctggcggatgatcctgccgttcgggccgtgttccgcaatgaggcagtgatccgtcgt

SEQ ID NO: 396883 - DNA, 75 bp, synthetic construct
  source 1..75: mol_type = other DNA
tcacactaccgttgtgccgggagcaccacaacgaacttcatgctgacccgctggagtttgagaaaaagtacggct

SEQ ID NO: 396884 - DNA, 75 bp, synthetic construct
  source 1..75: mol_type = other DNA
taagcattgccgttgatccggagtctccggaatccttcatgaaacgacctaaacgtcgccgctgggtaaatgaga

SEQ ID NO: 396885 - DNA, 75 bp, synthetic construct
  source 1..75: mol_type = other DNA
ctggtgggcggcctgcaatcaggtggtggatgcactacctgaggcagtagcgcgtcgttcgctgggattaccggt

SEQ ID NO: 396886 - DNA, 75 bp, synthetic construct
  source 1..75: mol_type = other DNA
tgcctggatgattgacgtcatccgtcacgcaataagcggtacgcaggagagggagttatcgctggccgaattatc

SEQ ID NO: 396887 - DNA, 75 bp, synthetic construct
  source 1..75: mol_type = other DNA
agaccgccaccagcatactgaaacagcgcacaaaaaatcttgcgccgctgcctcacgcccaccagcaaaacccgc

SEQ ID NO: 396888 - DNA, 75 bp, synthetic construct
  source 1..75: mol_type = other DNA
ccaccagcatcatccaggataaagcgaaaaaggtgctggtgctgaaagtggatccggagtcgccggagtctttta

SEQ ID NO: 396889 - DNA, 75 bp, synthetic construct
  source 1..75: mol_type = other DNA
tacgtcgttctctggggttacgtgcggaaaaaatccgctcggtgtaccgcgaaagcgacatcataccgggagaac

SEQ ID NO: 396890 - DNA, 75 bp, synthetic construct
  source 1..75: mol_type = other DNA
tgataccggaactcgggctggtggtccttaagcccggtcgtgaatccatgccggtatttcacaatcctcgagtgc

SEQ ID NO: 396891 - DNA, 75 bp, synthetic construct
  source 1..75: mol_type = other DNA
actggttattacgtcacgtgaaatcctgccagtggccacacggcgattatcatcacagcgaaacagtcattcacc

SEQ ID NO: 396892 - DNA, 75 bp, synthetic construct
  source 1..75: mol_type = other DNA
cgagccacagttcagtatatcggagggcatcctcaaagcgatgccgtggtatgtaaactctctgggcaacaaaaa

SEQ ID NO: 396893 - DNA, 75 bp, synthetic construct
  source 1..75: mol_type = other DNA
gatgtgagacattctctagctgatattagtaaagctagagaaatgctcggctatcaacctcagtttgatattaaa

SEQ ID NO: 396894 - DNA, 75 bp, synthetic construct
  source 1..75: mol_type = other DNA
cccctgtttatgcaggggcgtgtcctgctggagcctgagccggaacgttattcatctttcgccagcggtgccgtt

SEQ ID NO: 396895 - DNA, 75 bp, synthetic construct
  source 1..75: mol_type = other DNA
aatcaggcagatgatccgcatcacatcattggtcatggactgggagggatgggaacaaaggctgatgatttgttt

SEQ ID NO: 396896 - DNA, 75 bp, synthetic construct
  source 1..75: mol_type = other DNA
catttgaagagaagtatggctcccaactggagctgatatttcgttttatcgatcgcgcgctggcaactggcgtac

SEQ ID NO: 396897 - DNA, 75 bp, synthetic construct
  source 1..75: mol_type = other DNA
taatctgccgtccggggtcgttcctgccgttcgccagccgctggaggaggataaagcattcctgccttttttcag

SEQ ID NO: 396898 - DNA, 75 bp, synthetic construct
  source 1..75: mol_type = other DNA
ggaaaaaatccgctccttgtaccgcgaaagcgacatcgtaccgggagagcagacagccaccagcatactgaagca

SEQ ID NO: 396899 - DNA, 75 bp, synthetic construct
  source 1..75: mol_type = other DNA
atgattgacgtcatccgtcacgcaataagcggtacgcaggagagggagttatcgctggccgaattatcctggtgg

SEQ ID NO: 396900 - DNA, 75 bp, synthetic construct
  source 1..75: mol_type = other DNA
tgcggatccgctggcattcgaagaaaagcatggttcccaggttgatttaatttttcattttcttgatcacgcctt

SEQ ID NO: 396901 - DNA, 75 bp, synthetic construct
  source 1..75: mol_type = other DNA
agtctccggaatctttcatgaggcgacctaaacgtcgccgttgggtaaatgagaaatatacgagctgggtgaaga

SEQ ID NO: 396902 - DNA, 75 bp, synthetic construct
  source 1..75: mol_type = other DNA
aacatcacaacgagcttcatgcggatccgctggcattcgaagaaaagcatggttcccaggttgatttaatttttc

SEQ ID NO: 396903 - DNA, 75 bp, synthetic construct
  source 1..75: mol_type = other DNA
gaaagcatcacgacgagctgcatgcggataccgtggcatttgaagagaagtatggctcccagctggagctgatat

SEQ ID NO: 396904 - DNA, 75 bp, synthetic construct
  source 1..75: mol_type = other DNA
taatctgccgtccggggtcgttcctgccgttcgccagccgctggaggacgataaagcattgctgccttttttcag

SEQ ID NO: 396905 - DNA, 75 bp, synthetic construct
  source 1..75: mol_type = other DNA
taatctgccgtccggggtcgttcctgccgttcgccagccgctggaggatgataaagcattactgccgtttttcag

SEQ ID NO: 396906 - DNA, 75 bp, synthetic construct
  source 1..75: mol_type = other DNA
taatctgccgtccggggtcgttcctgccgttcgccagccgctggaggaagataaagcatttctgccgtttttcag

SEQ ID NO: 396907 - DNA, 75 bp, synthetic construct
  source 1..75: mol_type = other DNA
aaagttttatttttgccgcatcaagttcaacatacggcgatcataccggactacctaaaatagaacatacaattg

SEQ ID NO: 396908 - DNA, 75 bp, synthetic construct
  source 1..75: mol_type = other DNA
cctcacgcccaccagcaaaacccgccacaggaaaagacggtggtcagcattgccgttgatccggagtcaccggaa

SEQ ID NO: 396909 - DNA, 75 bp, synthetic construct
  source 1..75: mol_type = other DNA
taatctgccgtccggggtcgttcctgccgttcgccagccgctgggggatgagaaaccatttctgccgtttttcag

SEQ ID NO: 396910 - DNA, 75 bp, synthetic construct
  source 1..75: mol_type = other DNA
taatctgccgtccggggtcgttcctgccgttcgccagccgctgggggatgacaaagcatttctgccgtttttcag

SEQ ID NO: 396911 - DNA, 75 bp, synthetic construct
  source 1..75: mol_type = other DNA
ccaggcatcagcgagaccaagagtaaccggctcatttaaaccgtctggtctgtttcctccggctctacaaaaata

SEQ ID NO: 396912 - DNA, 75 bp, synthetic construct
  source 1..75: mol_type = other DNA
atgagcgaagtaatcatgattgtctctcccggtaaatgggtatctgaagaacagctaattgcactgaaaggaata

SEQ ID NO: 396913 - DNA, 75 bp, synthetic construct
  source 1..75: mol_type = other DNA
cgggcagggcggaatgggaaccaaagcacatgatctctttgtgttgcctttgtgcagaaagcatcacgacgagtt

SEQ ID NO: 396914 - DNA, 75 bp, synthetic construct
  source 1..75: mol_type = other DNA
taatctgccgtccggggtcgttcctgccgttcgccagccgctgggggatgataaaccatttctgccttttttcag

SEQ ID NO: 396915 - DNA, 75 bp, synthetic construct
  source 1..75: mol_type = other DNA
taatctgccgtccggggtcgttcctgccgttcgccagccgctgggggatgaaaaaccatttctgccatttttcag

SEQ ID NO: 396916 - DNA, 75 bp, synthetic construct
  source 1..75: mol_type = other DNA
aaaaatccgctccttgtaccgcgaaagcgacatcgtaccgggagagcagaccgccaccagcatactgaagcagcg

SEQ ID NO: 396917 - DNA, 75 bp, synthetic construct
  source 1..75: mol_type = other DNA
taatctgccgtccggggtcgttcctgccgttcgccagccgctgggggatgacaaaccatttctgccctttttcag

SEQ ID NO: 396918 - DNA, 75 bp, synthetic construct
  source 1..75: mol_type = other DNA
taatctgccgtccggggtcgttcctgccgttcgccagccgctgggggatgacaaatcatttctgccttttttcag

SEQ ID NO: 396919 - DNA, 75 bp, synthetic construct
  source 1..75: mol_type = other DNA
taatctgccgtccggggtcgttcctgccgttcgccagccgctgggggatgacaaaacatttctgccatttttcag

SEQ ID NO: 396920 - DNA, 75 bp, synthetic construct
  source 1..75: mol_type = other DNA
tgaagcagcgcacaaaaaatattgcgctgccacttcacgtccaccagcaacaaaatccaccacagaaaaaaacgg

SEQ ID NO: 396921 - DNA, 75 bp, synthetic construct
  source 1..75: mol_type = other DNA
agtacgccggtgctggacagtgaggggaataccaacatctccggtgttacggtggttttccgggctggtgagcag

SEQ ID NO: 396922 - DNA, 75 bp, synthetic construct
  source 1..75: mol_type = other DNA
catgccgcctgatagtgaagaaaaacggtgctgaaatttataaccgaacgaccctggataatacgctgatatata

SEQ ID NO: 396923 - DNA, 75 bp, synthetic construct
  source 1..75: mol_type = other DNA
tcgtcatgccgcctgatagtgaagaaaaacggtgctgaaatttataaccgtaccgcgctggataatacgctggtt

SEQ ID NO: 396924 - DNA, 75 bp, synthetic construct
  source 1..75: mol_type = other DNA
catcacagtgaaaccgtcatacatcgttacggtaccggcgcgatggtgttgtgctggcactgcgacaaccagttg

SEQ ID NO: 396925 - DNA, 75 bp, synthetic construct
  source 1..75: mol_type = other DNA
tccctgactccggacgggcggctgacggcgaaaaatgcggatatcagcggtaatgtgaacgcgaactccgggaca

SEQ ID NO: 396926 - DNA, 75 bp, synthetic construct
  source 1..75: mol_type = other DNA
cggcgctaaacatgagcgggagaataacgatatttattcgtcatgccgcctgatagtgaagaaaaatggtgctga

SEQ ID NO: 396927 - DNA, 75 bp, synthetic construct
  source 1..75: mol_type = other DNA
gtatagaccaaatataaaaatcagagagggattacgactttcaatgccgtggtatgtgagatttttaaaaggcta

SEQ ID NO: 396928 - DNA, 75 bp, synthetic construct
  source 1..75: mol_type = other DNA
acagtcaccatcagcgatgatcataactttgaccgccagattattattccgcccattatttttaacggtatagcg

SEQ ID NO: 396929 - DNA, 75 bp, synthetic construct
  source 1..75: mol_type = other DNA
gcacaggtggaaaccgctgcccgttatctggggaccggcagccagtggagcgtctccggcagccggattaagccg

SEQ ID NO: 396930 - DNA, 75 bp, synthetic construct
  source 1..75: mol_type = other DNA
acccgcaatgaaatcacacagacggtcagtaaaacgctggaggaccagagcgccaccatacagcagatacagcgc

SEQ ID NO: 396931 - DNA, 75 bp, synthetic construct
  source 1..75: mol_type = other DNA
cccagcaatgatggtgaagggtatctggaatttttccgggaaaaaataggaaaactgcatctggctcaggggcta

SEQ ID NO: 396932 - DNA, 75 bp, synthetic construct
  source 1..75: mol_type = other DNA
atgtggggcgtcaaaattgagcagaccgaagacgtcaggcattatgtcgcggggcttggccttagtatggaggat

SEQ ID NO: 396933 - DNA, 75 bp, synthetic construct
  source 1..75: mol_type = other DNA
gtcacggtcacatgacactggagttttcggtgtcagcatggctggtaaataactggtatcccacagcaagtatca

SEQ ID NO: 396934 - DNA, 75 bp, synthetic construct
  source 1..75: mol_type = other DNA
gaacaactggacgccgacaacgtacatcagtgatttactggttgtggtgatgaaaaaatccacggcagggatcag

SEQ ID NO: 396935 - DNA, 75 bp, synthetic construct
  source 1..75: mol_type = other DNA
ggtacaataacggtcactgtgtacgatgaccaggcttttgaccgtcagatagtcgtcccccccgttctgtttcgc

SEQ ID NO: 396936 - DNA, 75 bp, synthetic construct
  source 1..75: mol_type = other DNA
gaaatatctgacggctcccaccattaccagcggtggcaatcccccaacgttttcactgacacctgatggtcgact

SEQ ID NO: 396937 - DNA, 75 bp, synthetic construct
  source 1..75: mol_type = other DNA
cggcagtcagtggagtgtctccggtccgcacattaagcccggaaaggatttctggttttatgtgcgcagcgtcaa

SEQ ID NO: 396938 - DNA, 75 bp, synthetic construct
  source 1..75: mol_type = other DNA
tttcagataacggcagtcccgaaactgaccatttatgacccgacggtgcagtttgagttctggttttcggaggca

SEQ ID NO: 396939 - DNA, 75 bp, synthetic construct
  source 1..75: mol_type = other DNA
tggcgggtatcccacagcaagtatcagcgatttgctggttgtggtgatgaagaaagccaccgcaggcatcagtat

SEQ ID NO: 396940 - DNA, 75 bp, synthetic construct
  source 1..75: mol_type = other DNA
acggaggaaggcaaactgagccagttcctggttgccgctaaccgtatcgcgtttattgacccggcaaacgggaat

SEQ ID NO: 396941 - DNA, 75 bp, synthetic construct
  source 1..75: mol_type = other DNA
ccggctcactgaacagcgttatcccgccggctgtgcagcacctcacggtggaggtgagtgcctcagacggccagt

SEQ ID NO: 396942 - DNA, 75 bp, synthetic construct
  source 1..75: mol_type = other DNA
gggaaccggccaccaccacgttcaggattaatgcacctgcggtacccgccacgattgagctgacaccgggctatt

SEQ ID NO: 396943 - DNA, 75 bp, synthetic construct
  source 1..75: mol_type = other DNA
ggctgcggcacacgcccggtgacatcattgaaatctgtgataacgactatgccgggaccctgaccggcggacgta

SEQ ID NO: 396944 - DNA, 75 bp, synthetic construct
  source 1..75: mol_type = other DNA
gtggaagggagaaagagagagctggtgcggtggagatatgacgcctttactctcatggtggcgaaatcgacagat

SEQ ID NO: 396945 - DNA, 75 bp, synthetic construct
  source 1..75: mol_type = other DNA
cctttgcccgttatctggggacaggcagccagtggagtgtctccggcccgcacattaagccggggaaggatttct

SEQ ID NO: 396946 - DNA, 75 bp, synthetic construct
  source 1..75: mol_type = other DNA
tgtgggggctgcaggtggatgcggagcagtttggcggtcagcagatgacggtgaactaccatatccgcggtcgca

SEQ ID NO: 396947 - DNA, 75 bp, synthetic construct
  source 1..75: mol_type = other DNA
ctggtatcccacagcaagtatcagcgatttgctggttgttgtgatgaagaaagccactgcaggcatcacgattag

SEQ ID NO: 396948 - DNA, 75 bp, synthetic construct
  source 1..75: mol_type = other DNA
agttttcggtgtcagcatggctggtaaatgactggtatcccacagcaagtatcagcgatttgctggttgtggtga

SEQ ID NO: 396949 - DNA, 75 bp, synthetic construct
  source 1..75: mol_type = other DNA
ctgtctgccaaccagattgaaggcgatattgttaaaaccgtggggaaggctttcccgcgggactcccgcgcaccg

SEQ ID NO: 396950 - DNA, 75 bp, synthetic construct
  source 1..75: mol_type = other DNA
aaataactggacgccaacgaccagtatcagcgaccttcttgttgtcgtgatgaagaaatcaacagccggcatcag

SEQ ID NO: 396951 - DNA, 75 bp, synthetic construct
  source 1..75: mol_type = other DNA
taccacgctgataagcctggttgacggtcagggtaatccggtcagcgtggaggtccagtccgtcaccgacggcgt

SEQ ID NO: 396952 - DNA, 75 bp, synthetic construct
  source 1..75: mol_type = other DNA
accgtaccgcgctggataatacgctgatttacagtggcgttattgatatgcctgccggtcacggtcacatgacgc

SEQ ID NO: 396953 - DNA, 75 bp, synthetic construct
  source 1..75: mol_type = other DNA
gcgagcgatgatgcggaaggttatctgaatttttataaagggttgatcaataaaacgcatctcggcaaggaactg

SEQ ID NO: 396954 - DNA, 75 bp, synthetic construct
  source 1..75: mol_type = other DNA
aaagccgatgtttgttgggcagggcgatcagatattcatgaacgaagtgttcctgaaatatctgacggctcccac

SEQ ID NO: 396955 - DNA, 75 bp, synthetic construct
  source 1..75: mol_type = other DNA
ccagattgaaggcgatattgttaaaaccgtggggaaggctttcccgcgggactcccgcgcaccggagcggtggcc

SEQ ID NO: 396956 - DNA, 75 bp, synthetic construct
  source 1..75: mol_type = other DNA
accggaaaaagaagccatcgtggataacggggcccgctttgagccgctctccggttcactgaacagcgtcatccc

SEQ ID NO: 396957 - DNA, 75 bp, synthetic construct
  source 1..75: mol_type = other DNA
ggtacagtcactggtggagaccacctcaaagggtgaccgtaatccctcttctgtccgcctgctgattcagcttga

SEQ ID NO: 396958 - DNA, 75 bp, synthetic construct
  source 1..75: mol_type = other DNA
acagttatgccagcgggacggtaaccgtcacagtttacgatgaccagggcttcgaccggcagatcatcattcccc

SEQ ID NO: 396959 - DNA, 75 bp, synthetic construct
  source 1..75: mol_type = other DNA
ggactccaacaaccagtatcagcgatctgctggttgtggtgatgaaaaaatccacagcaggtatcagtatcagct

SEQ ID NO: 396960 - DNA, 75 bp, synthetic construct
  source 1..75: mol_type = other DNA
gcagagtattctggtgaacaaaaccccgctgacggacacggacggtaatcctgtgatacatggtgtgacagcggt

SEQ ID NO: 396961 - DNA, 75 bp, synthetic construct
  source 1..75: mol_type = other DNA
agctacggccagcagggcgaaccggccaccaccacgttccggattaacgcaccggcagcgcctgccggtgttgaa

SEQ ID NO: 396962 - DNA, 75 bp, synthetic construct
  source 1..75: mol_type = other DNA
accgaatcccatcttggtaaagagctgctggaaaaagtcgacctgacggaggataacgccagcaaactggagcag

SEQ ID NO: 396963 - DNA, 75 bp, synthetic construct
  source 1..75: mol_type = other DNA
agattttccagaaaggcaatcagggggcaggcaatatcaccgactgtacggtgattgtgaccaaaaaagcggctt

SEQ ID NO: 396964 - DNA, 75 bp, synthetic construct
  source 1..75: mol_type = other DNA
aaagctgtatcaaaagccttcccgaaaaaagtcggtacgtggggtaacacggaaacaccaaacgggacggttaca

SEQ ID NO: 396965 - DNA, 75 bp, synthetic construct
  source 1..75: mol_type = other DNA
tggattttttcaaaggagagatagggaaaacccatctggctcaggagttgtggactcagattgataacggtcagc

SEQ ID NO: 396966 - DNA, 75 bp, synthetic construct
  source 1..75: mol_type = other DNA
agcggctggtcagcacagcccggacggcagaaaccacataccgcttcacacaactggcgctggggcgttacacgc

SEQ ID NO: 396967 - DNA, 75 bp, synthetic construct
  source 1..75: mol_type = other DNA
accgccatcactgccggtacggagcaccgtttcagtggcctgcctctcggggaatacaccctgacggtcagggcg

SEQ ID NO: 396968 - DNA, 75 bp, synthetic construct
  source 1..75: mol_type = other DNA
tactgcgaccagacggtcccggatggtttcgggggcacagagccgcggatgaccttcaatgcgtacctggcacaa

SEQ ID NO: 396969 - DNA, 75 bp, synthetic construct
  source 1..75: mol_type = other DNA
tgctgactcacccgcgctacggcatgggaaaacgtctgggggcggcggatgtggacaagtgggcgctgtatgcca

SEQ ID NO: 396970 - DNA, 75 bp, synthetic construct
  source 1..75: mol_type = other DNA
ttaatcctgcgaatggcaacacaaagccgatgtttgttggtcagggcgatcagatattcatgaatgaagtgttcc

SEQ ID NO: 396971 - DNA, 75 bp, synthetic construct
  source 1..75: mol_type = other DNA
atacacgggttatggttttgaagttcgcaaaaacggtgtattaatcgcatccagagaaactaaaggggccattcc

SEQ ID NO: 396972 - DNA, 75 bp, synthetic construct
  source 1..75: mol_type = other DNA
ttattgaaatctgtgataacgactatgccgggaccatgaccggcggacgtatcctgtccatcgatgccgccagcc

SEQ ID NO: 396973 - DNA, 75 bp, synthetic construct
  source 1..75: mol_type = other DNA
ctgtttgcggtgagcatcacgtcatccggcaatcctccgacgttttccctgacgccggatggcaggctgacagcc

SEQ ID NO: 396974 - DNA, 75 bp, synthetic construct
  source 1..75: mol_type = other DNA
ctcaggtcagaggtgacttcgttaaagctgtatccaaatcattcccgaaacaggctggtacgtggggtaacacgg

SEQ ID NO: 396975 - DNA, 75 bp, synthetic construct
  source 1..75: mol_type = other DNA
catcaggaaccattaccgtcagggtttatgacgatcagccgtttaaccggcagattgttattccggcggtggctt

SEQ ID NO: 396976 - DNA, 75 bp, synthetic construct
  source 1..75: mol_type = other DNA
ataaccgtaccgcgctggataatacgctgatttacagtggtgttattgatatgcctgctggtcgcggccacatga

SEQ ID NO: 396977 - DNA, 75 bp, synthetic construct
  source 1..75: mol_type = other DNA
cgcggggtatcttcatgcccggacgagcgctcccggtagcgataatcttaacgggattaacgtgaaataccgtta

SEQ ID NO: 396978 - DNA, 75 bp, synthetic construct
  source 1..75: mol_type = other DNA
gaaagctgactgctaaaaatgcggatatcagtggcagtgtgaatgcgaactccgggacgctcaacaacgtcacga

SEQ ID NO: 396979 - DNA, 75 bp, synthetic construct
  source 1..75: mol_type = other DNA
cggctcaggtatttaccatgaatctggtgatgctgggcagtgctgaacacctgtactttaacggtaacgagcaga

SEQ ID NO: 396980 - DNA, 75 bp, synthetic construct
  source 1..75: mol_type = other DNA
tcataactttgaccgccagattattattccgcccattatttttaacggtatagcgtatgacgatccggggagcgg

SEQ ID NO: 396981 - DNA, 75 bp, synthetic construct
  source 1..75: mol_type = other DNA
gattaatcctgcgaatggcaacacaaagccgatgtttgttggtcagggcgatcagatattcatgaatgaagtgtt

SEQ ID NO: 396982 - DNA, 75 bp, synthetic construct
  source 1..75: mol_type = other DNA
cgcgctgggacacgccgaaggtggtgaagggggtgagctttatgcttcgcctgaccgtggcagcggatgacggca

SEQ ID NO: 396983 - DNA, 75 bp, synthetic construct
  source 1..75: mol_type = other DNA
cgatgaccagggcttcgaccggcagattatcattccaccggtgctgtttcgtgggacgaaacaccagaacgtcaa

SEQ ID NO: 396984 - DNA, 75 bp, synthetic construct
  source 1..75: mol_type = other DNA
gaacgccgggacgctcaacaatgtcacaattaatgagaactgtcagattaaggggaaactgtcagccaaccagat

SEQ ID NO: 396985 - DNA, 75 bp, synthetic construct
  source 1..75: mol_type = other DNA
gattcagttgcagcgtaacggtaactgggtgacggaaaaggatgtcaccattaacggcaagaccacctcgcagtt

SEQ ID NO: 396986 - DNA, 75 bp, synthetic construct
  source 1..75: mol_type = other DNA
ggcttcgaccggcagatcatcattcccccggtgctgtttcgcgggacgaaacaccagaatttcaacagcccgaat

SEQ ID NO: 396987 - DNA, 75 bp, synthetic construct
  source 1..75: mol_type = other DNA
tctgggggcggcggatgtggacaagtgggcgctgtatgccatcgggcagtactgcgaccagacggtcccggatgg

SEQ ID NO: 396988 - DNA, 75 bp, synthetic construct
  source 1..75: mol_type = other DNA
attgaaggtgatattgtcaaaacggtcagcaagtctttcccccgcacgagcacttatgccagtggcaccatcacg

SEQ ID NO: 396989 - DNA, 75 bp, synthetic construct
  source 1..75: mol_type = other DNA
tgacggctcccaccattaccagcggcggtaatcctccggcattttccctgacaccagacgggcgactgacggcga

SEQ ID NO: 396990 - DNA, 75 bp, synthetic construct
  source 1..75: mol_type = other DNA
gcagagtcaggtgctgctggcagcagacaggattgcgatgattaatcctgcgaatggcaacacaaagccgatgtt

SEQ ID NO: 396991 - DNA, 75 bp, synthetic construct
  source 1..75: mol_type = other DNA
gtcagccgagtgatgacgcatccggctatctggattttttcaaaggcgagatagggaaaacccatctggctcagg

SEQ ID NO: 396992 - DNA, 75 bp, synthetic construct
  source 1..75: mol_type = other DNA
gtgaggtgacactgccggagacaggtgccgccacggtgaacctgattaacggcagcggtaagccggtgagcgtgg

SEQ ID NO: 396993 - DNA, 75 bp, synthetic construct
  source 1..75: mol_type = other DNA
ataacgatatttattcatcatgccggctgatggtgaaatgtaacggcagggtgctttttgaaaggacggcgctgg

SEQ ID NO: 396994 - DNA, 75 bp, synthetic construct
  source 1..75: mol_type = other DNA
tagtggcctgccgctcggggaatacaccctgacggtcagggcgataaacagctatggacagcagggcgaacctgc

SEQ ID NO: 396995 - DNA, 75 bp, synthetic construct
  source 1..75: mol_type = other DNA
tcatgccgcctgatagtacggaaaaacggtgctgaaatttataaccgtaccgcgatggataatacgctggtttac

SEQ ID NO: 396996 - DNA, 75 bp, synthetic construct
  source 1..75: mol_type = other DNA
cagggtttatgacgatcagccgtttgaccggcaaattgttattccggcggtggcattcagcggtgccagacatga

SEQ ID NO: 396997 - DNA, 75 bp, synthetic construct
  source 1..75: mol_type = other DNA
caacacaaaaccgatgtttgttggtcagggtgatcagatattcatgaatgaagtgttcctgaaatatctgacggc

SEQ ID NO: 396998 - DNA, 75 bp, synthetic construct
  source 1..75: mol_type = other DNA
ccggcaggtcatgataccgccagtgttattccgcggtggtaagcatgagaatttcaacagtaataaccaacagtc

SEQ ID NO: 396999 - DNA, 75 bp, synthetic construct
  source 1..75: mol_type = other DNA
tttcgttaaagctgtatcaaaagccttcccgaaaaaagtcggtacgtggggtaacacggaaacaccaaacggtac

SEQ ID NO: 397000 - DNA, 75 bp, synthetic construct
  source 1..75: mol_type = other DNA
caggtgctggcgcgctgggacacgccgaaggtggtgaagggcgtgagcttcctgcttcgcctgaccgtggcagcg

SEQ ID NO: 397001 - DNA, 75 bp, synthetic construct
  source 1..75: mol_type = other DNA
ggacggacgcctttatattgcgggtatcggtgccggtattgagaacacccctgacggcatgcagagtcaggtgct

SEQ ID NO: 397002 - DNA, 75 bp, synthetic construct
  source 1..75: mol_type = other DNA
ggtgtcagcatggctggtaaataactggtatcccacagcaagcatcagcgatttgctggttgtggtgatgaagaa

SEQ ID NO: 397003 - DNA, 75 bp, synthetic construct
  source 1..75: mol_type = other DNA
gaggcgacccaggtcagaggggatttcgttaaagctgtatcaaaagccttcccgaaaaaagtcggtacgtggggt

SEQ ID NO: 397004 - DNA, 75 bp, synthetic construct
  source 1..75: mol_type = other DNA
cgaactccgggacgctcaacaacgtcacgattaacgagaactgtccgattaagggcaaactgtcagccaaccaga

SEQ ID NO: 397005 - DNA, 75 bp, synthetic construct
  source 1..75: mol_type = other DNA
cagtccacgacggatgctcagggcgtattttcctcagttatagatatgcctgccggacaggggacgctgacactg

SEQ ID NO: 397006 - DNA, 75 bp, synthetic construct
  source 1..75: mol_type = other DNA
tgtttgcggtgagtatcacctcgtccggcaaccccccgacgttttccctgacgccggaagggaagctgacagcca

SEQ ID NO: 397007 - DNA, 75 bp, synthetic construct
  source 1..75: mol_type = other DNA
ccagcttgcggatgagatggcggagatgaagaccaccatcacggaaacccgcaatgaaatcacacagacggtcag

SEQ ID NO: 397008 - DNA, 75 bp, synthetic construct
  source 1..75: mol_type = other DNA
aagtctggcgtcagttgttacgggaaggtatcagagtggccagatgcactgtggcacgtctcatggcagttatgg

SEQ ID NO: 397009 - DNA, 75 bp, synthetic construct
  source 1..75: mol_type = other DNA
ctaagccccggttacaccgtgaccaccggctggaaaaactttacccgcgtcttcaccgacgaaggcattcagaaa

SEQ ID NO: 397010 - DNA, 75 bp, synthetic construct
  source 1..75: mol_type = other DNA
tgattttcaagggattgttcaatcagagcttcggtgaaatcaacatgatgttgagcacgctgtttggcgtaaaac

SEQ ID NO: 397011 - DNA, 75 bp, synthetic construct
  source 1..75: mol_type = other DNA
gcagggcttcgtctatgtggcgtttatcattgatgtgtttgccggatacatcgtggggtggcgggtctcatcgtc

SEQ ID NO: 397012 - DNA, 75 bp, synthetic construct
  source 1..75: mol_type = other DNA
attgctgggaaggctgggtcatatccctccggcagaagcagaaaaagcttattatgcttccatcggaaacgatga

SEQ ID NO: 397013 - DNA, 75 bp, synthetic construct
  source 1..75: mol_type = other DNA
ggaggtaatacaccgtaagagctggaaaaaccggacagaagtggaactggccacactaacgtgggtggactggta

SEQ ID NO: 397014 - DNA, 75 bp, synthetic construct
  source 1..75: mol_type = other DNA
atggcgttcatcattgatgtgttcgccggatacatcgtgggatggcaggtctcatcatccatggaaacaacattc

SEQ ID NO: 397015 - DNA, 75 bp, synthetic construct
  source 1..75: mol_type = other DNA
aatggaaaactggccaacgtattatccctatcagttgagtagcgaagaagtggtcgaggaaatgatgtctcattg

SEQ ID NO: 397016 - DNA, 75 bp, synthetic construct
  source 1..75: mol_type = other DNA
aacaaaaagctgctaatggtgtttttgatgatgccaatgtacaaaaccgaacgctcagtgactgggatggagtct

SEQ ID NO: 397017 - DNA, 75 bp, synthetic construct
  source 1..75: mol_type = other DNA
ggcccggatcgtcttggcaccaccacgccagccggttataccgacctgctcgttaactacacctaccgtatcgcc

SEQ ID NO: 397018 - DNA, 75 bp, synthetic construct
  source 1..75: mol_type = other DNA
ctttttaacggttgcagtcggcatggtgctggcctgtctggtgcaatgggaagcgttgcgcggcaaagctatcta

SEQ ID NO: 397019 - DNA, 75 bp, synthetic construct
  source 1..75: mol_type = other DNA
cgtaagagctggaaaaaccgtgcagaagtggaactggccacactcacgtgggtggactggtataacaatcgatga

SEQ ID NO: 397020 - DNA, 75 bp, synthetic construct
  source 1..75: mol_type = other DNA
ggtaaaaaggtccgtacgaccatcagccggaaagccgttgccgcaggcgaccgcgtaaaccgtcagttcgtggga

SEQ ID NO: 397021 - DNA, 75 bp, synthetic construct
  source 1..75: mol_type = other DNA
cggtgtggcggtgggccatggaaccggtacaccaacaggcaatgcagagccttcccccaaaccaacgtttatctc

SEQ ID NO: 397022 - DNA, 75 bp, synthetic construct
  source 1..75: mol_type = other DNA
gcactcacaagcgcaaactgtgaccgcatttttgaagaccgtatgagcggaaaagttgccaaccgtcccggtctg

SEQ ID NO: 397023 - DNA, 75 bp, synthetic construct
  source 1..75: mol_type = other DNA
gccggacgattaattacatcaggagttcctcgccagaaggtggcgatcatctatgatgttggcgtatcgactttg

SEQ ID NO: 397024 - DNA, 75 bp, synthetic construct
  source 1..75: mol_type = other DNA
cgaggcatcaactttcgtagtctgacggattcaattgatactagtaccccaatggggcgctttttctttcatgtg

SEQ ID NO: 397025 - DNA, 75 bp, synthetic construct
  source 1..75: mol_type = other DNA
agcgtattgctatggcggttaaagtaaacgaatcagcacctgagccggatgatgccgagcttaaattccgtaaag

SEQ ID NO: 397026 - DNA, 75 bp, synthetic construct
  source 1..75: mol_type = other DNA
gtgttgttcgatccacaaaccattcgtgatgttgccagcttttctgatcccaaacgcccggcagatggcattgag

SEQ ID NO: 397027 - DNA, 75 bp, synthetic construct
  source 1..75: mol_type = other DNA
tgtggcgatgttgccacaccgctgtagccctgagttgctcaactacagtgttgtagattcaattggtcaacgcaa

SEQ ID NO: 397028 - DNA, 75 bp, synthetic construct
  source 1..75: mol_type = other DNA
ggtaaaaaggtccgtacgaccatcagccggaaaaccgttgccgcaggcgaccgcgtaccgtcagttcgtggcaga

SEQ ID NO: 397029 - DNA, 75 bp, synthetic construct
  source 1..75: mol_type = other DNA
tatgggcccgtcgaccgtctggcaccatccatcacagcgataaaggctctcagtatgtgtcactggcctatacgg

SEQ ID NO: 397030 - DNA, 75 bp, synthetic construct
  source 1..75: mol_type = other DNA
agtcagggggcgctggggttaagttccgggctggcctatgccacagcatttcaggcgactaccgaagaagtcatg

SEQ ID NO: 397031 - DNA, 75 bp, synthetic construct
  source 1..75: mol_type = other DNA
aaatgagcggaaaaacagcagacaggccagggctaaaaaggttgctcaggacgttatcagagggagacacgctgg

SEQ ID NO: 397032 - DNA, 75 bp, synthetic construct
  source 1..75: mol_type = other DNA
aaaagacgtctggaggacaccataaagcgcgtggctatgggtgtggtaagagaacagagcacacgcccaggggga

SEQ ID NO: 397033 - DNA, 75 bp, synthetic construct
  source 1..75: mol_type = other DNA
cctttacaaagcggaggtaatacaccgtaagagctggaaaaaccggacagaagtggagctggccacactcacgtg

SEQ ID NO: 397034 - DNA, 75 bp, synthetic construct
  source 1..75: mol_type = other DNA
acattatcgatttcccatcaatccctgtggcgatgttgccgcaccgctgtagccctgagttgctcaactacagtg

SEQ ID NO: 397035 - DNA, 75 bp, synthetic construct
  source 1..75: mol_type = other DNA
caccgtaagagctggaaaaaccggacagaagtggaactggccacactaacgtgggtggactggtataacaatcga

SEQ ID NO: 397036 - DNA, 75 bp, synthetic construct
  source 1..75: mol_type = other DNA
tggcatcaacagggagtactggcgactcgtatgacaacgcgatggctgagagcatcaatggtctttacaaagcgg

SEQ ID NO: 397037 - DNA, 75 bp, synthetic construct
  source 1..75: mol_type = other DNA
tatgtatcgctggcctacacgcagcggcttaaggaagccggattactggcatcaacagggagcacaggcgactcg

SEQ ID NO: 397038 - DNA, 75 bp, synthetic construct
  source 1..75: mol_type = other DNA
tcgtatgacaacgcgatggcggagagcatcaatggactttacaaagcggaggtaatacaccgtaagagctggaaa

SEQ ID NO: 397039 - DNA, 75 bp, synthetic construct
  source 1..75: mol_type = other DNA
aatcgacgattgctggaaaggctgggccacatccctccggcagaagcagaaaaagcttattatgcttccatcgga

SEQ ID NO: 397040 - DNA, 75 bp, synthetic construct
  source 1..75: mol_type = other DNA
cgttctgaccagttgtgggtggctgattttacttacggtgtgcccggagttcagggcgggcatggatgcttaaat

SEQ ID NO: 397041 - DNA, 75 bp, synthetic construct
  source 1..75: mol_type = other DNA
gaacgtcctgaccagctgtgggtggctgtattttacttacgtcagcacatggcagggcttcgtctatgtggcgtt

SEQ ID NO: 397042 - DNA, 75 bp, synthetic construct
  source 1..75: mol_type = other DNA
actgctggcatcaacaggaagtaccggcgactcgtatgacaacgcgatggcggagagcatcaatggcctttacaa

SEQ ID NO: 397043 - DNA, 75 bp, synthetic construct
  source 1..75: mol_type = other DNA
atgagaatcatcaggtatacggtgagcgtaaagtctggcgtcagttgttacgggaagaaatcagggtagccagat

SEQ ID NO: 397044 - DNA, 75 bp, synthetic construct
  source 1..75: mol_type = other DNA
atcattgatgtgtttgccggatacatcgtggggtggcgggtctcatcgtctatggaaacgacattcatgctggat

SEQ ID NO: 397045 - DNA, 75 bp, synthetic construct
  source 1..75: mol_type = other DNA
gtcggcagtccggcacagtccatcacagtgataaaggttctcagtatgtatcactggcctatacggagcgactaa

SEQ ID NO: 397046 - DNA, 75 bp, synthetic construct
  source 1..75: mol_type = other DNA
acctattatcagggaccgtacgaccaaacagttactggattacagctggacaatgccgacgccacacggcagcta

SEQ ID NO: 397047 - DNA, 75 bp, synthetic construct
  source 1..75: mol_type = other DNA
tcatggcggttatgggacttgccggtgttctccggggtaaaaaggtccgcactaccgtcagccggaaagccgttg

SEQ ID NO: 397048 - DNA, 75 bp, synthetic construct
  source 1..75: mol_type = other DNA
agttagagagcaatctggcagagctgcgtggcggcagcgattacgcgcaacgaaaaatcaagatagccgctgcac

SEQ ID NO: 397049 - DNA, 75 bp, synthetic construct
  source 1..75: mol_type = other DNA
aacaagggaaaatcttccattcgcagatccgccatctgttgcaacagttagaaagcaacctggcagagctgcgtg

SEQ ID NO: 397050 - DNA, 75 bp, synthetic construct
  source 1..75: mol_type = other DNA
gaggtaatacaccgtaatagctggaaaaaccggacagaagtggaactgcccactcacgtgggtggactggtataa

SEQ ID NO: 397051 - DNA, 75 bp, synthetic construct
  source 1..75: mol_type = other DNA
caataaccgacggttgctggaacgactgggtcatatcccgccggcagaagcggaaaaggcctggtacgcttccat

SEQ ID NO: 397052 - DNA, 75 bp, synthetic construct
  source 1..75: mol_type = other DNA
acgatgagaatcatcaggtatacggtgagcgtaaagtctggtgtcagttgttacgggaagaaatcagggtagcca

SEQ ID NO: 397053 - DNA, 75 bp, synthetic construct
  source 1..75: mol_type = other DNA
accgtcagttcgtggcagaacgtcctgaccagctgtgggtggctgattttacttacgtcagcacatggcagggct

SEQ ID NO: 397054 - DNA, 75 bp, synthetic construct
  source 1..75: mol_type = other DNA
taaaagaagcaaaactgctggcatcaacagggagtacaggtgactcgtatgacaacgcgatggcggagagcatca

SEQ ID NO: 397055 - DNA, 75 bp, synthetic construct
  source 1..75: mol_type = other DNA
atgttgaatatgtcgcaaccggcactgagtaaatctattcaggagctggaagaagggttagcggcgcaactcttt

SEQ ID NO: 397056 - DNA, 75 bp, synthetic construct
  source 1..75: mol_type = other DNA
cggtgttctccggggtaaaaaggtccgtacgaccatcagccggaaagccgttgccgcaggcgaccgcgtaaaccg

SEQ ID NO: 397057 - DNA, 75 bp, synthetic construct
  source 1..75: mol_type = other DNA
acaatcgacgattgctgggaaggctgaggcatactcctccggcagaagcagaaaaagcgtattatgcttccatcg

SEQ ID NO: 397058 - DNA, 75 bp, synthetic construct
  source 1..75: mol_type = other DNA
tcagccggaaagccgttgccgcaggcgaccgcgtaaaccgtcagtttgtggcagaacgtcctgaccagctgtggg

SEQ ID NO: 397059 - DNA, 75 bp, synthetic construct
  source 1..75: mol_type = other DNA
cagcatagacacgtctacgccgatgggccgattcttctttcatgttatgggggctttggcagaaatggaaagaga

SEQ ID NO: 397060 - DNA, 75 bp, synthetic construct
  source 1..75: mol_type = other DNA
ctctccggcgggggagaaaaggcggaaggccaccggcgatagatgctgaaaaggttgatcaaatcctcgcagctc

SEQ ID NO: 397061 - DNA, 75 bp, synthetic construct
  source 1..75: mol_type = other DNA
cggagcaataacccttatattatctattctgattgcgatattcgcctttaaaatgccgattgatatggcatttgc

SEQ ID NO: 397062 - DNA, 75 bp, synthetic construct
  source 1..75: mol_type = other DNA
aacgtttatgaaaatgcagagataatggctaactggcatcatccccggtttttattcaggggattgatcatgcta

SEQ ID NO: 397063 - DNA, 75 bp, synthetic construct
  source 1..75: mol_type = other DNA
aggataaaatcagtggcactaagtccgacagaccagggttgaaaaaactgctcaggacactatcggcaggagaca

SEQ ID NO: 397064 - DNA, 75 bp, synthetic construct
  source 1..75: mol_type = other DNA
gtcgtattggtggcagacgtcctaaactcaccacgagtgagtgggagcaggccgggcgtttgctggctgcagggg

SEQ ID NO: 397065 - DNA, 75 bp, synthetic construct
  source 1..75: mol_type = other DNA
ggatgtgagcggatttttgaggataaaatcagtggaactaagtccgacagaccaggactgaaaaaactgctcagg

SEQ ID NO: 397066 - DNA, 75 bp, synthetic construct
  source 1..75: mol_type = other DNA
tttctcgccagaaggtggtgatcatctatgatgttggcgtatcgactttgtataagaagtttccggtcggagatg

SEQ ID NO: 397067 - DNA, 75 bp, synthetic construct
  source 1..75: mol_type = other DNA
gtgaagattactacgctgccgccagctaaacgtgtttacggtggcgaagcggataaggcggaagcagccaataag

SEQ ID NO: 397068 - DNA, 75 bp, synthetic construct
  source 1..75: mol_type = other DNA
cgctaattagcctgaagtggccgatactgtcgattggcatggtgctggcgttcgccttcgtcaccaactattccg

SEQ ID NO: 397069 - DNA, 75 bp, synthetic construct
  source 1..75: mol_type = other DNA
cacccattgtcgcccaaccgacgccaatggatgcggtgtttaaatttgatccactctccgctggcggaactgcga

SEQ ID NO: 397070 - DNA, 75 bp, synthetic construct
  source 1..75: mol_type = other DNA
tgtgtctgattgccaacactgcgccggtggcgtttggtgcgttgggcgtgccgattctggtcgccggtcaggtaa

SEQ ID NO: 397071 - DNA, 75 bp, synthetic construct
  source 1..75: mol_type = other DNA
atgcggcatctggtcattctggttgaggagttgcgcgaacgtggcgttaattttcgcagcctgacggatgctatt

SEQ ID NO: 397072 - DNA, 75 bp, synthetic construct
  source 1..75: mol_type = other DNA
ttttgaagacaagataagcggtacaaagtccgaaaggccgggactgaaaaaactgctcaggacattatcggcagg

SEQ ID NO: 397073 - DNA, 75 bp, synthetic construct
  source 1..75: mol_type = other DNA
ggccgtttcttttttcatgtcatgggggccccggctgaaatggagcgtgaactgattgttgaacgaacaaaagct

SEQ ID NO: 397074 - DNA, 75 bp, synthetic construct
  source 1..75: mol_type = other DNA
atgctcatcggttatgtacgtgtgtcaacaaatgaccagaacaccgcattgcaacgaaacgcactggagtgcgca

SEQ ID NO: 397075 - DNA, 75 bp, synthetic construct
  source 1..75: mol_type = other DNA
gcgcagtatgcggcatcttgttacgctaatagaagagctgcgccagcgtggcgtgaatttccgaagcctgactga

SEQ ID NO: 397076 - DNA, 75 bp, synthetic construct
  source 1..75: mol_type = other DNA
tgccattgataccagcacgccgatggggcgttttttctttcatgtgatgggtgccctggctgaaatggaacgaga

SEQ ID NO: 397077 - DNA, 75 bp, synthetic construct
  source 1..75: mol_type = other DNA
cagtattgataccagtaccccaatgggccgtttcttttttcatgttatgggtgccctggctgaaatggaacgcga

SEQ ID NO: 397078 - DNA, 75 bp, synthetic construct
  source 1..75: mol_type = other DNA
atgcttattggctatgtccgcgtgtcaacaaatgaccagaatacggaattgcagcgtaacgcgctggagtgcgca

SEQ ID NO: 397079 - DNA, 75 bp, synthetic construct
  source 1..75: mol_type = other DNA
actcaccgcgagtgagtgggagcaggccgggcgtttgctggctgcaggggagtcacgtcaacgcgtggcactgat

SEQ ID NO: 397080 - DNA, 75 bp, synthetic construct
  source 1..75: mol_type = other DNA
gcactgatttttgatgtgggtgtttccacaatttatagaaaatttccgccaaataagagcaatgaatccccctga

SEQ ID NO: 397081 - DNA, 75 bp, synthetic construct
  source 1..75: mol_type = other DNA
ggacgctttttcttccatgtcatgggcgcacttgccgaaatggaaagggagctgatagtcgaacgtaccagggcg

SEQ ID NO: 397082 - DNA, 75 bp, synthetic construct
  source 1..75: mol_type = other DNA
acattatcggcaggtgacacgctggtggtctggaaactggatcgactcggtcgcagcatgcggcatcttgtcgtt

SEQ ID NO: 397083 - DNA, 75 bp, synthetic construct
  source 1..75: mol_type = other DNA
tgggaaggttcttttttcatatgatgggtgcactggcagaaatggagcgtgaactgatagttgagcgcacgctgg

SEQ ID NO: 397084 - DNA, 75 bp, synthetic construct
  source 1..75: mol_type = other DNA
aactggcgaaagcgtacgttggcgtcgatccggttaaagaaccgattccggtacgtccgaccgcgcactacacca

SEQ ID NO: 397085 - DNA, 75 bp, synthetic construct
  source 1..75: mol_type = other DNA
aatttgtatggtaaggaaaatactgtggaaaaaaaagtaacgccagtgacgcagtggcagataggcactgattat

SEQ ID NO: 397086 - DNA, 75 bp, synthetic construct
  source 1..75: mol_type = other DNA
tccatcaccactggcaaaagagatcatgtccggtatctgattttcccctgttcctacattccgttttgccgcttc

SEQ ID NO: 397087 - DNA, 75 bp, synthetic construct
  source 1..75: mol_type = other DNA
tgaggccgaaatcaatcgtatggcccgtgaacgtaaattacgtgaggaagcggaactaataaaatatactgaaag

SEQ ID NO: 397088 - DNA, 75 bp, synthetic construct
  source 1..75: mol_type = other DNA
aaaacgtgccgatagccgctttgaacttattcagaaaaacgttggctatttctttaaagatattgaacgttcggc

SEQ ID NO: 397089 - DNA, 75 bp, synthetic construct
  source 1..75: mol_type = other DNA
tccttaaaatggaaatgatgccatttttagactcggtgggactggtacttgatgataataaatattatctctttt

SEQ ID NO: 397090 - DNA, 75 bp, synthetic construct
  source 1..75: mol_type = other DNA
gagttacgcagaaaaactgaaactggcgatttccagtatccgtgaccatatgttctccgagtttattttttgtga

SEQ ID NO: 397091 - DNA, 75 bp, synthetic construct
  source 1..75: mol_type = other DNA
aaaaggctttcagtaaagccgatacgccacaaaaacgtgaagagcttcagaataacattcttctcgaaactgccg

SEQ ID NO: 397092 - DNA, 75 bp, synthetic construct
  source 1..75: mol_type = other DNA
atgagctttttagatatggcccgccagcgtattggtatggcggttaaagcaaacggatcagcagcggaaccggat

SEQ ID NO: 397093 - DNA, 75 bp, synthetic construct
  source 1..75: mol_type = other DNA
gcttatcgttgaacgtacacgcgctggacttgatgcagctcgcgcggaaggtcggataggagggcgtcggcctaa

SEQ ID NO: 397094 - DNA, 75 bp, synthetic construct
  source 1..75: mol_type = other DNA
ttcaattgatacacagtatcttgttaacaccaacacatggctgcaggagggatattatcggtacccgatttcagg

SEQ ID NO: 397095 - DNA, 75 bp, synthetic construct
  source 1..75: mol_type = other DNA
atgcttattggatacattcgcgtatcaactaatgaccaaaacaccgctttacaacgaaacgcccttgaaagcgca

SEQ ID NO: 397096 - DNA, 75 bp, synthetic construct
  source 1..75: mol_type = other DNA
caggacattatcggcaggtgacactctggttgtctggaagctggatcggctggggcgcagtgtgcggcatcttgt

SEQ ID NO: 397097 - DNA, 75 bp, synthetic construct
  source 1..75: mol_type = other DNA
caaaaaaacgttggctatttctttaaagatattgaacgttcggccctgacgttaaaagactcactctatttgttg

SEQ ID NO: 397098 - DNA, 75 bp, synthetic construct
  source 1..75: mol_type = other DNA
gcaacgcaatgcactgaactgtgcgggatgtgagcggatttttgaggataaaatcagtggcaccaagtcagacag

SEQ ID NO: 397099 - DNA, 75 bp, synthetic construct
  source 1..75: mol_type = other DNA
tacgctgatagaagagctgcgccagcgtggcgtgaatttccgaagcctgactgacagtattgataccagcacccc

SEQ ID NO: 397100 - DNA, 75 bp, synthetic construct
  source 1..75: mol_type = other DNA
actgatagttgaacgtaccagagcggggattgctgcagctcgcgacaaaggcagagtaggtggacgccgtcctaa

SEQ ID NO: 397101 - DNA, 75 bp, synthetic construct
  source 1..75: mol_type = other DNA
actgattgttgaacgaacaaaagctggactggaagcaactcgcgcacagggacgaattggtggacgtcgtcccaa

SEQ ID NO: 397102 - DNA, 75 bp, synthetic construct
  source 1..75: mol_type = other DNA
ggattaattttcgcagtctgaccgacagcatagatacatcttctccaatggggcgttttttcttccacgtgatgg

SEQ ID NO: 397103 - DNA, 75 bp, synthetic construct
  source 1..75: mol_type = other DNA
tggagtgacgggcgcgtttaaagttaaggttgacatatctcgcggtgataaagatagaaaagagaatagtgagaa

SEQ ID NO: 397104 - DNA, 75 bp, synthetic construct
  source 1..75: mol_type = other DNA
cagcatagatacttcatcgccaatggggcgcttcttctttcatgttatgggggcattggccgagatggaacgtga

SEQ ID NO: 397105 - DNA, 75 bp, synthetic construct
  source 1..75: mol_type = other DNA
aaaataaactacgaagcggatggacaaatacaaccgctgagtttgagttgtttcacaagacatctcttaccgttg

SEQ ID NO: 397106 - DNA, 75 bp, synthetic construct
  source 1..75: mol_type = other DNA
aatcggcagttcctaataatccattgttcgatatctatttttattatcctacgggggatttatttaacgcatcag

SEQ ID NO: 397107 - DNA, 75 bp, synthetic construct
  source 1..75: mol_type = other DNA
gccgtatcggtgggcgaccacctaaactaaccaaagcggaatgggagcaggccgggcgtttattagcacaaggaa

SEQ ID NO: 397108 - DNA, 75 bp, synthetic construct
  source 1..75: mol_type = other DNA
gcgtgaatttccgaagcctgactgacagtattgataccagcaccccaatggccgtttcttttttcatgtcatggg

SEQ ID NO: 397109 - DNA, 75 bp, synthetic construct
  source 1..75: mol_type = other DNA
aaactcgtcagagggtggccctaatttatgacgtcggaatctcaaccctgtacaaacgattcccagcatctgaca

SEQ ID NO: 397110 - DNA, 75 bp, synthetic construct
  source 1..75: mol_type = other DNA
acggaagaactgacgcgtctttccctagcccgggcagagggattcgataaggttgaaatcacaggcccccgactg

SEQ ID NO: 397111 - DNA, 75 bp, synthetic construct
  source 1..75: mol_type = other DNA
ctacgcggttccggcattcaatattcacaatctcgaaacgatgcaggtggtggtggaaagcgcagccagcctgaa

SEQ ID NO: 397112 - DNA, 75 bp, synthetic construct
  source 1..75: mol_type = other DNA
tggtggaaaccgctgccagcatgcatgcgccggtcatcatcgccggaacgcccggcacatttactcatgctggta

SEQ ID NO: 397113 - DNA, 75 bp, synthetic construct
  source 1..75: mol_type = other DNA
atgttatatatagagtgattcgatttataccttcacttgcaccacctctttggtggtcaatacctgcaaacgttg

SEQ ID NO: 397114 - DNA, 75 bp, synthetic construct
  source 1..75: mol_type = other DNA
tggcccgtgctgagggattcgataaggttgagatcaccggcccccgcctggatatggataacgatttcaagacct

SEQ ID NO: 397115 - DNA, 75 bp, synthetic construct
  source 1..75: mol_type = other DNA
ccagtcatcccgcaggctgcgtgagcgcatcagcccttccctgaagcgcattgccggtaccgtaatttcgttttc

SEQ ID NO: 397116 - DNA, 75 bp, synthetic construct
  source 1..75: mol_type = other DNA
gttcgctggaaagcgcggcccaggcggcgaaaaacgatctcattgaaccgttctttgacgatacccaaatcttta

SEQ ID NO: 397117 - DNA, 75 bp, synthetic construct
  source 1..75: mol_type = other DNA
ggccatcaatgccctgaagcgccgggagtccgcccaggccctttatacctttatagagagtctgccgcgggatcc

SEQ ID NO: 397118 - DNA, 75 bp, synthetic construct
  source 1..75: mol_type = other DNA
tccggataaacgcagtgcccgtgcgcagcgcgatgactggctgaagaaagagatacagcgcgtatacgatgaaaa

SEQ ID NO: 397119 - DNA, 75 bp, synthetic construct
  source 1..75: mol_type = other DNA
tgcatggcgcgtcagggttatcgactaaggatattcagcaaaccatcaaactggggatatgcaaaatcaacgttg

SEQ ID NO: 397120 - DNA, 75 bp, synthetic construct
  source 1..75: mol_type = other DNA
gtcatgattgacgcctcgcatttgccttttgcgcaaaatatttcacgggtcaaagaggtggtggatttttgccat

SEQ ID NO: 397121 - DNA, 75 bp, synthetic construct
  source 1..75: mol_type = other DNA
gcagcggtagaagagaaatatcgcttttttagttacggtgatgcgatgtttatcacgtacaatccgctggcaatt

SEQ ID NO: 397122 - DNA, 75 bp, synthetic construct
  source 1..75: mol_type = other DNA
ttatcagccagatgccgccgctctttacctgggcaattgaagccattgatgtcgatgaagcggtcgataaactgc

SEQ ID NO: 397123 - DNA, 75 bp, synthetic construct
  source 1..75: mol_type = other DNA
gcctttacaaagcggaggtaatacaccgtaagagctggaaaaaccgtaagcgtcgtctcagcaccgtctggcaga

SEQ ID NO: 397124 - DNA, 75 bp, synthetic construct
  source 1..75: mol_type = other DNA
atgtacagcaaggacgagctgatcaaacttgaggatataggtatagaacttcaagagaaagctataaatctcttt

SEQ ID NO: 397125 - DNA, 75 bp, synthetic construct
  source 1..75: mol_type = other DNA
ttttttcagttatcaccttaagaccctttttattctgagaaatgacagagttaaaaagaatgctgtgcgtaatgg

SEQ ID NO: 397126 - DNA, 75 bp, synthetic construct
  source 1..75: mol_type = other DNA
gccggatatatgttgggatggcgggtttcatcgtccatggaaaagacattgatgtcggattcatttgagcaggcg

SEQ ID NO: 397127 - DNA, 75 bp, synthetic construct
  source 1..75: mol_type = other DNA
cgtctggcaccatccatcacagtaataaaggttctcagtatgtatcgctggcctatacggagcgactaaaagaag

SEQ ID NO: 397128 - DNA, 75 bp, synthetic construct
  source 1..75: mol_type = other DNA
tccgtctggcaccatccatcacagcgataaaggctctcagtatgtgtcactggcctatacggagcgattaaaaga

SEQ ID NO: 397129 - DNA, 75 bp, synthetic construct
  source 1..75: mol_type = other DNA
tcgtatgacaacgcgatggcggagagcattaatggtctttacaaaacggaggtaatacaccgtaagagctggaaa

SEQ ID NO: 397130 - DNA, 75 bp, synthetic construct
  source 1..75: mol_type = other DNA
gcgggaagtcgataaagaagctcgcgatcacgttcgcaaagatgagcaagttatcgggatttttcatccggacta

SEQ ID NO: 397131 - DNA, 75 bp, synthetic construct
  source 1..75: mol_type = other DNA
gcggagaaacttgccctgcttgaaaaactgggcatcacgctggatgacctggaaaaactcttcaaatcccgctga

SEQ ID NO: 397132 - DNA, 75 bp, synthetic construct
  source 1..75: mol_type = other DNA
acatcaatggtctttacaaagcggaggtaatacaccgtaagagctggaaaaaccgtgcagaagtggaactggcca

SEQ ID NO: 397133 - DNA, 75 bp, synthetic construct
  source 1..75: mol_type = other DNA
ccggatatatcgtggggtggtgggtctcatcgtctatggaaacgacattcgtgctggatgcgctggagcaggcgt

SEQ ID NO: 397134 - DNA, 75 bp, synthetic construct
  source 1..75: mol_type = other DNA
taccgtcagccggaaagccgttgccgcaggcgaccgcgtaaaccgtcagtttgtggcagaacgttctgaccagtt

SEQ ID NO: 397135 - DNA, 75 bp, synthetic construct
  source 1..75: mol_type = other DNA
gttcgtggcagtacgtcctgaccagctgtgggggggattttacttacgtcagcacatggcagggcttcgtctatg

SEQ ID NO: 397136 - DNA, 75 bp, synthetic construct
  source 1..75: mol_type = other DNA
gaaatgggtgacagatatcaccgaattcagggctggcggacaaaaactgtacctgtccccgatacttgatttgtt

SEQ ID NO: 397137 - DNA, 75 bp, synthetic construct
  source 1..75: mol_type = other DNA
gccttgaactgcttgaaaatgaattgtcgcaaaataaacaagagctgagagcaacacagaatgaactgggagtat

SEQ ID NO: 397138 - DNA, 75 bp, synthetic construct
  source 1..75: mol_type = other DNA
aaataaggggctggaaagccttgctgaaggggagaaaccgctgctccacagtgatcaaggatggcattaccggat

SEQ ID NO: 397139 - DNA, 75 bp, synthetic construct
  source 1..75: mol_type = other DNA
atgaacccgattgcagtcaccctactcaccggttttttaggcgcgggcaagaccaccctgctacgccatattctt

SEQ ID NO: 397140 - DNA, 75 bp, synthetic construct
  source 1..75: mol_type = other DNA
atcaacgcccgcgcaccggtctacaccgtcacccacggcgacatcgacctgggcctgctgttcaacaccaacggt

SEQ ID NO: 397141 - DNA, 75 bp, synthetic construct
  source 1..75: mol_type = other DNA
tttatgctggaagaaaacgtcgtcagcaccaaaccgcgtttccactttatcgcggataaacaaaacgatatttcg

SEQ ID NO: 397142 - DNA, 75 bp, synthetic construct
  source 1..75: mol_type = other DNA
aacccgatcactaatacttttaagctcggccccggcgtcgatgtgaactatatgctgcacacgcagaataagtga

SEQ ID NO: 397143 - DNA, 75 bp, synthetic construct
  source 1..75: mol_type = other DNA
aggaaaccgtggaagagcacgcggcaaaacatgccgggcagtatgatgtggtgacctgcatggagatgctggagc

SEQ ID NO: 397144 - DNA, 75 bp, synthetic construct
  source 1..75: mol_type = other DNA
cggcattctggccgagagtatggcgcgcgaaggcgcgacggtgaccggtctggatatgggctttgagccattgca

SEQ ID NO: 397145 - DNA, 75 bp, synthetic construct
  source 1..75: mol_type = other DNA
gccatatgaccgggctacattacaacccaatcacaaatacttttaagctcggccccggcgtggatgtgaactata

SEQ ID NO: 397146 - DNA, 75 bp, synthetic construct
  source 1..75: mol_type = other DNA
acgtccccgatccgcagtcagtggtcagagcctgtgcgcaactggtgaaaccgggcggcgatgtctttttctcga

SEQ ID NO: 397147 - DNA, 75 bp, synthetic construct
  source 1..75: mol_type = other DNA
cgcttaaccgcaacggcaagtcatggctgatggcggtggttggtgctgaatatattttgcgcatggtgcccaaag

SEQ ID NO: 397148 - DNA, 75 bp, synthetic construct
  source 1..75: mol_type = other DNA
cggaagtggcaaaagaggattttgcgaacattgttgccgctcttaatcaactgacggtttccttcactgcatggc

SEQ ID NO: 397149 - DNA, 75 bp, synthetic construct
  source 1..75: mol_type = other DNA
tggaagatgatcttaagcgtcgcgatctgaccatcaatgcactggctcaggatgataacggcaagattatcgacc

SEQ ID NO: 397150 - DNA, 75 bp, synthetic construct
  source 1..75: mol_type = other DNA
accggtcaaagaccgagattgggtagttgtcggcggcacgccacaggaaatgctcgacgcgggctaccaacaggt

SEQ ID NO: 397151 - DNA, 75 bp, synthetic construct
  source 1..75: mol_type = other DNA
gcgggtgtgaagttagtggaacaactgtgtcagcgtctgcgcgtgcctaatgaaatccgcgacttagccaaactg

SEQ ID NO: 397152 - DNA, 75 bp, synthetic construct
  source 1..75: mol_type = other DNA
acaaatcgagcgctacaccaccgaagtacactgcgttgaaatgcagatgcttggtggtcgtggaaatgcacctca

SEQ ID NO: 397153 - DNA, 75 bp, synthetic construct
  source 1..75: mol_type = other DNA
gtgtaccggcggatccattgtgagcttcagaaaagaggtcttaagttcagtggcaaaacagtgcgaaaactgatg

SEQ ID NO: 397154 - DNA, 75 bp, synthetic construct
  source 1..75: mol_type = other DNA
cccgcttttggcgaagatccgttacgcgtgttgcgcgtagcgcgttttgctgcgcgttatgcccacctcagtttc

SEQ ID NO: 397155 - DNA, 75 bp, synthetic construct
  source 1..75: mol_type = other DNA
ccgaaaaatggaaatcctgctgggaacgctggtggcaatcgatccggtacgggcagcggtattgtgtgatacgca

SEQ ID NO: 397156 - DNA, 75 bp, synthetic construct
  source 1..75: mol_type = other DNA
cagtggtatctgcatcaggcgctgactaaggcgggcgcaccgtgggacaggtggacagccgttatccgtcaggac

SEQ ID NO: 397157 - DNA, 75 bp, synthetic construct
  source 1..75: mol_type = other DNA
ggatagcgcagcaggtcatgatgcgggaagacggcgcatggcttgcggggaaagccgctgtaccgacagacgacg

SEQ ID NO: 397158 - DNA, 75 bp, synthetic construct
  source 1..75: mol_type = other DNA
cggttcgggatgcgttattagggctaccggtcaaagacagagattgggtggttgtcggcagcacgccacaacaga

SEQ ID NO: 397159 - DNA, 75 bp, synthetic construct
  source 1..75: mol_type = other DNA
cgcgaggagctgacccgacggcggattgcggcggtagccagctggaaggaacaacgttgcccaaagcctgaatga

SEQ ID NO: 397160 - DNA, 75 bp, synthetic construct
  source 1..75: mol_type = other DNA
aaggactgacgccgccagaactttggccgcgtcatcatggtcatggcccggcgggtgttaagttagtggaacaac

SEQ ID NO: 397161 - DNA, 75 bp, synthetic construct
  source 1..75: mol_type = other DNA
tcacgtgggtggactggtataacaatcgacgattgctgggaaggctgggtcatatccctccggcagaagcagaaa

SEQ ID NO: 397162 - DNA, 75 bp, synthetic construct
  source 1..75: mol_type = other DNA
tacaccgtaagagctggaaaaaccggacagaagtggaacaggccacactaacgtgggtggactggtataacaatc

SEQ ID NO: 397163 - DNA, 75 bp, synthetic construct
  source 1..75: mol_type = other DNA
taaaccgtcagttcgtggcagaacgtcctgaccagctgtgggtggctgattttacttacggtgtgcccggagttc

SEQ ID NO: 397164 - DNA, 75 bp, synthetic construct
  source 1..75: mol_type = other DNA
cactgtcagcaacagcgacatcatccggataaacgcagtgcccgtgcgcagcgcgatgactgcgtattaccgtga

SEQ ID NO: 397165 - DNA, 75 bp, synthetic construct
  source 1..75: mol_type = other DNA
atcattgatgtgtttgccggatacatcgtggggtgcgggtctcatcgtctatggaaacgacattcgtgctggatg

SEQ ID NO: 397166 - DNA, 75 bp, synthetic construct
  source 1..75: mol_type = other DNA
ctgtaaatagaatttctgaggcttatctggctgttcttactacggcattgacagtttattattttccaaaaactg

SEQ ID NO: 397167 - DNA, 75 bp, synthetic construct
  source 1..75: mol_type = other DNA
ccgtaagagctggaaaaaccggacagaagtggagctggccacactcacgtgggtggactggtataacaatcgacg

SEQ ID NO: 397168 - DNA, 75 bp, synthetic construct
  source 1..75: mol_type = other DNA
atcgttatttttaaatatattgaacaaataaacatattactgaataatagtttaactgattcagaaacatacaat

SEQ ID NO: 397169 - DNA, 75 bp, synthetic construct
  source 1..75: mol_type = other DNA
aatcgacgattgctggaaaggctgggccatattcctccggcagaagcagaaaaagcttattatgcttccatcgga

SEQ ID NO: 397170 - DNA, 75 bp, synthetic construct
  source 1..75: mol_type = other DNA
tacggggtcggaccggtatgcagtgaactgcatattgccccgtcaacgtattaccattgtcagcagcagcggcat

SEQ ID NO: 397171 - DNA, 75 bp, synthetic construct
  source 1..75: mol_type = other DNA
aagaaagagatacagcgcgtatacgatgggaatcacaaggtatacggtgtgcgtaaagtctggcgtcagttgtta

SEQ ID NO: 397172 - DNA, 75 bp, synthetic construct
  source 1..75: mol_type = other DNA
tgagcgtaaagtctggtgtcagttgttacgggaagaaatcagggtagccagatgtacagtggcgcgcctcatagc

SEQ ID NO: 397173 - DNA, 75 bp, synthetic construct
  source 1..75: mol_type = other DNA
tatgggacttgccggtgttctccggggtaaaaaggtccgcactaccgtcagccggaaaaccgttgccgcaggtga

SEQ ID NO: 397174 - DNA, 75 bp, synthetic construct
  source 1..75: mol_type = other DNA
ctcatcgtctatggaaacgacattcgtgctggatgccctggagcaggcgttttgggcccgtcgaccgtccggcac

SEQ ID NO: 397175 - DNA, 75 bp, synthetic construct
  source 1..75: mol_type = other DNA
ctcatcgtctatggaaacgacattcgtgctggatgctctggagcaggcgttttgggcccgccgaccgtccggcac

SEQ ID NO: 397176 - DNA, 75 bp, synthetic construct
  source 1..75: mol_type = other DNA
ctcatcgtctatggaaacgacattcgtgctggatgctctggagcaggcgttttgggcccgacgcccgtccggcac

SEQ ID NO: 397177 - DNA, 75 bp, synthetic construct
  source 1..75: mol_type = other DNA
actcctggcatcaacaggaagtacgggcgactcgtatgacaacgcgatggcggagagcatcaatggcctttacaa

SEQ ID NO: 397178 - DNA, 75 bp, synthetic construct
  source 1..75: mol_type = other DNA
acttctggcatcaacagggagtactggcgactcgtatgacaacgcgatggcggagagcatcaatggcctttacaa

SEQ ID NO: 397179 - DNA, 75 bp, synthetic construct
  source 1..75: mol_type = other DNA
actactggcatcaacaggtagtactggcgactcgtatgacaacgcgatggcggagagcatcaatggcctttacaa

SEQ ID NO: 397180 - DNA, 75 bp, synthetic construct
  source 1..75: mol_type = other DNA
caacgaattaccactgtcagcaacagcgacatcatcctgataaacgcagttcccgtgcgcagcacgatgactggc

SEQ ID NO: 397181 - DNA, 75 bp, synthetic construct
  source 1..75: mol_type = other DNA
gatgactggctgaagaaagagatactgcgcgtatacgatgggaatcatcaggtatacggtgtgcgtaaagtctgg

SEQ ID NO: 397182 - DNA, 75 bp, synthetic construct
  source 1..75: mol_type = other DNA
gaacgacctgaccagctgtgggtggctgattttacttacgtcagcacatggcaggggcttcgtctatgtggcgtt

SEQ ID NO: 397183 - DNA, 75 bp, synthetic construct
  source 1..75: mol_type = other DNA
ctcatcgtctatggaaacgacattcgtgctggatgcactggagcaggcgttttgggcccgtcgcccgtccggcac

SEQ ID NO: 397184 - DNA, 75 bp, synthetic construct
  source 1..75: mol_type = other DNA
gagcaggcgttatgggcccgtcgaccgtccggcacagtccatcacagtgataaaggttctcagtatgtatcgctg

SEQ ID NO: 397185 - DNA, 75 bp, synthetic construct
  source 1..75: mol_type = other DNA
ctgaagagagagatacagcgcgtatacgatgaaaatcatcaggtgtacggtgtgcgtaaagtctggcgtcagttg

SEQ ID NO: 397186 - DNA, 75 bp, synthetic construct
  source 1..75: mol_type = other DNA
tcaacgtattaccattgtcagcagcagcggcatcatcctgataaacgcagtgcccgtgcgcagcgcgatgactag

SEQ ID NO: 397187 - DNA, 75 bp, synthetic construct
  source 1..75: mol_type = other DNA
cagaagtggaactggccacactcacgtgggtggactggtataacaatcgatgattgctggcaaggctgggccata

SEQ ID NO: 397188 - DNA, 75 bp, synthetic construct
  source 1..75: mol_type = other DNA
cagaagtggaactggccacactcacgtgggtggactggtataacaatcgaagattgctggcaaggcggggccata

SEQ ID NO: 397189 - DNA, 75 bp, synthetic construct
  source 1..75: mol_type = other DNA
gtacagtggcgagcctcatggcggttatgggacttgccggtgttctccggggtaaaaagtccgtacgaccatcag

SEQ ID NO: 397190 - DNA, 75 bp, synthetic construct
  source 1..75: mol_type = other DNA
tgggtggactggtataacaatcgatgcttactggtaaggctgggccacatccctccgtcagaggcagaaaaagcg

SEQ ID NO: 397191 - DNA, 75 bp, synthetic construct
  source 1..75: mol_type = other DNA
cagaagtggaactggccacactcacgtgggtggactggtataacaatcgaggattgctggcaaggcagggccata

SEQ ID NO: 397192 - DNA, 75 bp, synthetic construct
  source 1..75: mol_type = other DNA
cagaagtggaactggccacactcacgtgggtggactggtataacaatcgacgattgctggaaaggccgggccata

SEQ ID NO: 397193 - DNA, 75 bp, synthetic construct
  source 1..75: mol_type = other DNA
acgtattaccactgtcagcaacagcgacatcatcctgataaacgccgtacacatgctcagcgcgatgactggctg

SEQ ID NO: 397194 - DNA, 75 bp, synthetic construct
  source 1..75: mol_type = other DNA
acgtattaccactgtcagcaacagcgacatcatcctgataaacgctgtccacatgcccagcgcgatgactggctg

SEQ ID NO: 397195 - DNA, 75 bp, synthetic construct
  source 1..75: mol_type = other DNA
aacgcgatggctgagagcatcaatggtctttacaaagcggaggtaatacaccgtaagagctggaaaaaccgtgca

SEQ ID NO: 397196 - DNA, 75 bp, synthetic construct
  source 1..75: mol_type = other DNA
acgtattaccattgtcagcagcagcggcatcatcctgataaacgcagtgcccgttctcagcgcgatgactggctg

SEQ ID NO: 397197 - DNA, 75 bp, synthetic construct
  source 1..75: mol_type = other DNA
ggtaaaaaggtccgcactaccatcagccggaaagccgttgccgcaggcgaccgcgtaaaccgtcagttcgtggca

SEQ ID NO: 397198 - DNA, 75 bp, synthetic construct
  source 1..75: mol_type = other DNA
acgtattaccactgtcagcaacagcgacatcatcctgataaacgccgttcacatgcacagcgcgatgactggctg

SEQ ID NO: 397199 - DNA, 75 bp, synthetic construct
  source 1..75: mol_type = other DNA
aacgtattaccattgtcagcagcagcggcatcatcctgataaacgcagtgcccgtgcgcagcgcgatgactggct

SEQ ID NO: 397200 - DNA, 75 bp, synthetic construct
  source 1..75: mol_type = other DNA
ctgctggcatcaacagggagtacaggtgactcgtatgacaacgcgatggcggagagcatcaatggtctttacaaa

SEQ ID NO: 397201 - DNA, 75 bp, synthetic construct
  source 1..75: mol_type = other DNA
gagagcatcaatggtctttacaaagcggaggtaatacaccgtaagagctggaaaaaccgtgcagaagtggaactg

SEQ ID NO: 397202 - DNA, 75 bp, synthetic construct
  source 1..75: mol_type = other DNA
acaaagcggaggtaatacaccgtaagagctggaaaaaccgtgcagaagcggaactggccacactaacgtgggtgg

SEQ ID NO: 397203 - DNA, 75 bp, synthetic construct
  source 1..75: mol_type = other DNA
ctgtcggtttttctcttgcttttactgccggtgccgccgatatccatgccggcggtggtcaggtgaatttcttcg

SEQ ID NO: 397204 - DNA, 75 bp, synthetic construct
  source 1..75: mol_type = other DNA
gatggacatagagtatggtttttagatgttcaaacaggtcaaggttttaatctttatgatagcgtagaaaaggat

SEQ ID NO: 397205 - DNA, 75 bp, synthetic construct
  source 1..75: mol_type = other DNA
acaccagtgtccgtgtcccccatacctgcagcttggtaaaaagtggggggctggcaatccagtctgcctcccgga

SEQ ID NO: 397206 - DNA, 75 bp, synthetic construct
  source 1..75: mol_type = other DNA
gaacgacctgaccagctgtgggtggctgattttacttacgtcagcacatggcagggcttcgtctatgtggcgttc

SEQ ID NO: 397207 - DNA, 75 bp, synthetic construct
  source 1..75: mol_type = other DNA
gtcgaccgtccggcacgatccatcacagtgataaaggttctcagtatgtatcgctggcctacacacagcggctta

SEQ ID NO: 397208 - DNA, 75 bp, synthetic construct
  source 1..75: mol_type = other DNA
ggtgaaattatggttccaaaagttttaggattggcactaatggatgtatatggaatgttttcttttcgggaggga

SEQ ID NO: 397209 - DNA, 75 bp, synthetic construct
  source 1..75: mol_type = other DNA
caatcgatgcttactggtaaggctgggccacatccctccgtcagaggcagaaaaagcgtattatgcttccatcgg

SEQ ID NO: 397210 - DNA, 75 bp, synthetic construct
  source 1..75: mol_type = other DNA
cgaccgcgtaaaccgtcagtttgtggcagaacgtcctgaccagttgtgggtggctgattttacttacggtgtgcc

SEQ ID NO: 397211 - DNA, 75 bp, synthetic construct
  source 1..75: mol_type = other DNA
accagctgtgggtggctgattttacttacggtgtgcccggagttcagggcgggcatggatgcttaaatgaaccgc

SEQ ID NO: 397212 - DNA, 75 bp, synthetic construct
  source 1..75: mol_type = other DNA
cggtttggttgggatgaatatatccgcgtgctagagttattgtgtcaggacaatcttaaaactattgataattta

SEQ ID NO: 397213 - DNA, 75 bp, synthetic construct
  source 1..75: mol_type = other DNA
tgcaatatcaaggtaagaacagcaatcgtggcgttactaaacaaaacggtgatggctatgcgttgtctgtagact

SEQ ID NO: 397214 - DNA, 75 bp, synthetic construct
  source 1..75: mol_type = other DNA
agcttgcgcctgacctggctgaaatcaggacgtccattacggatgtcagcaatgaaatcacgcagaccgtcaata

SEQ ID NO: 397215 - DNA, 75 bp, synthetic construct
  source 1..75: mol_type = other DNA
atctatatctagggaactacaaaacgtatttccgatgaaaaaaggaaataggatagctgttctgaattcacgtat

SEQ ID NO: 397216 - DNA, 75 bp, synthetic construct
  source 1..75: mol_type = other DNA
ataactggacaccaacaaccagtatcagcgatctgctggttgtggtgatgaaaaaatccacagcaggtattagta

SEQ ID NO: 397217 - DNA, 75 bp, synthetic construct
  source 1..75: mol_type = other DNA
ccacctcacagtatctggcctcggtggtggtgggtaacctgccgccgcgcccgttcaatatccggatgcgcagga

SEQ ID NO: 397218 - DNA, 75 bp, synthetic construct
  source 1..75: mol_type = other DNA
gtggccatcagggaccatcaccgtcagggtttatgacgatcagccgtttgaccggcagattgttattccggcggt

SEQ ID NO: 397219 - DNA, 75 bp, synthetic construct
  source 1..75: mol_type = other DNA
taacgtgaatgcgaactccgggacgctcaacaacgtcacgattaacgagaactgtcgggttctgggaaaactgtc

SEQ ID NO: 397220 - DNA, 75 bp, synthetic construct
  source 1..75: mol_type = other DNA
atgatattccagaaggaattgccacgctgggcgcttttatgggttattcccattcacatatcggttttgatcgcg

SEQ ID NO: 397221 - DNA, 75 bp, synthetic construct
  source 1..75: mol_type = other DNA
gtggtggtggatgataacggcgtgggtttccgctacagcttcagtgccctgaaggaccggcacacggcggtggag

SEQ ID NO: 397222 - DNA, 75 bp, synthetic construct
  source 1..75: mol_type = other DNA
ttgccatcacggcggtgcagcacgtaccggaaaaagaagccattgtggataacggggcccgctttgagccgcagt

SEQ ID NO: 397223 - DNA, 75 bp, synthetic construct
  source 1..75: mol_type = other DNA
gggttctgggaaaactgtccgccaaccagattgaaggcgatctcgttaaaacagtgggcaaagctttcccccggg

SEQ ID NO: 397224 - DNA, 75 bp, synthetic construct
  source 1..75: mol_type = other DNA
acaaccatgttcgtactaagtacgttatatgtagaacaagggaagagaagaaacgttgtgatgcaaaatctattc

SEQ ID NO: 397225 - DNA, 75 bp, synthetic construct
  source 1..75: mol_type = other DNA
ctcgataataccggtgaaatgctggttgctataaatgacatgaatattagcaacgctattacggtgatgctgcca

SEQ ID NO: 397226 - DNA, 75 bp, synthetic construct
  source 1..75: mol_type = other DNA
tgtggggttgcaggtggatgcggagcagtttggcggtcagcagatgacggtgaactaccatatccgcggtcgcat

SEQ ID NO: 397227 - DNA, 75 bp, synthetic construct
  source 1..75: mol_type = other DNA
gcagaagtcaccgcagacagcggggaataccaggtgctggcgcgctgggacacgccgaaggtggtgaagggggga

SEQ ID NO: 397228 - DNA, 75 bp, synthetic construct
  source 1..75: mol_type = other DNA
cggtcagcttgcgcctgacctggctgaaatcaggacgtccattacggatgtcagcaatgaaatcacgcagaccgt

SEQ ID NO: 397229 - DNA, 75 bp, synthetic construct
  source 1..75: mol_type = other DNA
actggctctggggcgttacacgctgactgtccgggcggtaaatgcgtggggacagcagggcgacccggcgtcggt

SEQ ID NO: 397230 - DNA, 75 bp, synthetic construct
  source 1..75: mol_type = other DNA
aagtatactcaagatgaaatagtattagggttcatgagtaatatttctatagagaaaggaataaaagatgcagta

SEQ ID NO: 397231 - DNA, 75 bp, synthetic construct
  source 1..75: mol_type = other DNA
cagtatctggcggtggcgaaatgggacacgccgcgggtggtgaagggcgtgcgcttcagtctgcgcctgaccagc

SEQ ID NO: 397232 - DNA, 75 bp, synthetic construct
  source 1..75: mol_type = other DNA
ccgtatgttgccggtattggtgcggggattgaggatgctgatggccagcccctgagcaatattctgctgcaggcg

SEQ ID NO: 397233 - DNA, 75 bp, synthetic construct
  source 1..75: mol_type = other DNA
gtcaggatttatgacgatcagccttttgacaggcaaattgttattccggcggtggcattcagcggcgctaaacat

SEQ ID NO: 397234 - DNA, 75 bp, synthetic construct
  source 1..75: mol_type = other DNA
gattaaggggaaactgtcagccaaccagattgaaggcgatattgtcaaaacggtcagcaagtctttcccccgcac

SEQ ID NO: 397235 - DNA, 75 bp, synthetic construct
  source 1..75: mol_type = other DNA
gttttgaagttcgcaaaaatggcgtattaatcgcatccagagaaactaaaggagccattcccggtagttacagtg

SEQ ID NO: 397236 - DNA, 75 bp, synthetic construct
  source 1..75: mol_type = other DNA
caccatttacgatgatcataactttgaccgccaaatcattattccgcccattatttttaacggtgtggcgtatga

SEQ ID NO: 397237 - DNA, 75 bp, synthetic construct
  source 1..75: mol_type = other DNA
atgtctccacggggaacactttatcagccgggaaataatgcgggcaacagtgtttaattatatcgaatgtgatta

SEQ ID NO: 397238 - DNA, 75 bp, synthetic construct
  source 1..75: mol_type = other DNA
gaaagtgagccgtgttcctgacggcgttgccgaatacagcgtgtgggggctgaagctgccgacgctgcgccagcg

SEQ ID NO: 397239 - DNA, 75 bp, synthetic construct
  source 1..75: mol_type = other DNA
gtatggaacggacagacgctgacgtttgttcaggacagaccatcggatgttgtctggacttataccgccggtaat

SEQ ID NO: 397240 - DNA, 75 bp, synthetic construct
  source 1..75: mol_type = other DNA
gattatccttatgtaatgagggaaaaggaaaattttccagagtttgctacaaaagctattattgataatatcact

SEQ ID NO: 397241 - DNA, 75 bp, synthetic construct
  source 1..75: mol_type = other DNA
cgatagaaggcccggtgaaggggctgcagagtattctggtgaacaaaaccccgctgacggacacggacggtaatc

SEQ ID NO: 397242 - DNA, 75 bp, synthetic construct
  source 1..75: mol_type = other DNA
ataaaaaagggagtgaaattacctcgaccacggataaaaagctgggtgaccaggccgtgaccatacagcaaatcc

SEQ ID NO: 397243 - DNA, 75 bp, synthetic construct
  source 1..75: mol_type = other DNA
aagtctttcccccgcacgagcacttatgccagtggcaccatcacggtaagaatcagtgatgatcagaaatttgac

SEQ ID NO: 397244 - DNA, 75 bp, synthetic construct
  source 1..75: mol_type = other DNA
acgcggattaccgatatcaggcaggttgaaaccacagcccgctaccttggcacggggctgtactggatagccgcc

SEQ ID NO: 397245 - DNA, 75 bp, synthetic construct
  source 1..75: mol_type = other DNA
caatattctgctgcaggcggaccgtatcgcgatgattaacccggagaacggcaacaccacgccgctgtttgtggc

SEQ ID NO: 397246 - DNA, 75 bp, synthetic construct
  source 1..75: mol_type = other DNA
ggcgatatcattgaaatcagtgataatgcgtatgccggtaccgtgatcggcgggcggatcctgtccgtcgacaac

SEQ ID NO: 397247 - DNA, 75 bp, synthetic construct
  source 1..75: mol_type = other DNA
tttgttgacaacaatagctagttttaaatgtgataagatctatttgcatcatcgtagctatgcatatattaataa

SEQ ID NO: 397248 - DNA, 75 bp, synthetic construct
  source 1..75: mol_type = other DNA
ggaagtgaaatacgacacgccgatcatccggactatcacgtctgcaaacatcgaccgtctgcgttttaccttcgg

SEQ ID NO: 397249 - DNA, 75 bp, synthetic construct
  source 1..75: mol_type = other DNA
atgctgatatcagcggtaacgtgaatgcgaactccgggacgctcaataatgtcacggtaaatgaaaactgtatga

SEQ ID NO: 397250 - DNA, 75 bp, synthetic construct
  source 1..75: mol_type = other DNA
aaatgggaatacaactcaaacaacaaaaaacaaccgggatacacccaggctctggaacacatcaggttagtccat

SEQ ID NO: 397251 - DNA, 75 bp, synthetic construct
  source 1..75: mol_type = other DNA
acatctcggtaaagagctgctggaaaacgctgaactgacggaagataacgccagcagactggaggcgttttcgaa

SEQ ID NO: 397252 - DNA, 75 bp, synthetic construct
  source 1..75: mol_type = other DNA
accatcagcgatgatcataactttgaccgtcagattattatcccgcccattatctttaacggtatagcgtatacc

SEQ ID NO: 397253 - DNA, 75 bp, synthetic construct
  source 1..75: mol_type = other DNA
tccataaaggcaatcagtgggcaggtaatatcaccgactgtacggtgattgtgaccaaaaaagcggcttccggca

SEQ ID NO: 397254 - DNA, 75 bp, synthetic construct
  source 1..75: mol_type = other DNA
acactggggatggtgacgtcgttcagctatgcaggagacaggaatcgccagctgacccattacagcgatacccgc

SEQ ID NO: 397255 - DNA, 75 bp, synthetic construct
  source 1..75: mol_type = other DNA
caggacggaggtcattcccggattctgtaaagtgacgctggttccgcatcaggcgcaggcacagacggacgtgac

SEQ ID NO: 397256 - DNA, 75 bp, synthetic construct
  source 1..75: mol_type = other DNA
aggtccgtctgcaggttcagatccggcgtgacggtgactgggtgacggaaaaggacatcaccattaaggggaaaa

SEQ ID NO: 397257 - DNA, 75 bp, synthetic construct
  source 1..75: mol_type = other DNA
ccggtattttccctgacaccggacgggcggctgacggcgaaaaatgccgatatcagcggtaacgtgaatgcgaac

SEQ ID NO: 397258 - DNA, 75 bp, synthetic construct
  source 1..75: mol_type = other DNA
cgattgaaggtccggtggatggattaaaaagcgtgctgctgaacagtacgtcggtgctggacagtgatgggaata

SEQ ID NO: 397259 - DNA, 75 bp, synthetic construct
  source 1..75: mol_type = other DNA
cactcggggctacttgcaataactggacttggagttggtcgtttgttaatcatgaaaagaaaatggtcatttttg

SEQ ID NO: 397260 - DNA, 75 bp, synthetic construct
  source 1..75: mol_type = other DNA
ggtggccatcagggaccattaccgtcaggatttatgacgatcagccgtttgaccggcagattgttattccggcgg

SEQ ID NO: 397261 - DNA, 75 bp, synthetic construct
  source 1..75: mol_type = other DNA
agaatttcaacagcccgaatcagcagtcgtactggtattccacctgtaagctgcaggtgctgaagaacggggttg

SEQ ID NO: 397262 - DNA, 75 bp, synthetic construct
  source 1..75: mol_type = other DNA
tatgacccgacggtacagtttgagttctggttttcggagacaaaaatcgcagacacatctcaggtggaaacctct

SEQ ID NO: 397263 - DNA, 75 bp, synthetic construct
  source 1..75: mol_type = other DNA
ggtgcggggattgaggatgtcgatggtcagaccatgagcaacattctgcttcaggctgaccgcattgcgatgatt

SEQ ID NO: 397264 - DNA, 75 bp, synthetic construct
  source 1..75: mol_type = other DNA
gccagcagggcgaaccggccaccaccaccttccggattaacgcgccagcaaaacccgccaccattgaactgacgc

SEQ ID NO: 397265 - DNA, 75 bp, synthetic construct
  source 1..75: mol_type = other DNA
ttgcgtttattgatccgtctaatggcaacacacgaccaatgtttgttggtcagggcgatcagatattcatgaacg

SEQ ID NO: 397266 - DNA, 75 bp, synthetic construct
  source 1..75: mol_type = other DNA
ctgaagaacggggttgagattttccatgaaccggcaacggatgtcagccgggtgttctcatcggtgatagatatg

SEQ ID NO: 397267 - DNA, 75 bp, synthetic construct
  source 1..75: mol_type = other DNA
ctttccccggaataacagttatgccagcgggacggtaaccgtcacagtttacgatgaccagggcttcgaccggca

SEQ ID NO: 397268 - DNA, 75 bp, synthetic construct
  source 1..75: mol_type = other DNA
gaaggatttctggttttacgtgcgcagcgtcaacctggtggggaaatctgcgtttgtggaagtcagcgggcagcc

SEQ ID NO: 397269 - DNA, 75 bp, synthetic construct
  source 1..75: mol_type = other DNA
ggatttatgacgatcagccttttgacaggcaaattgttattccggcggtggcattctgcggcgctaaacatgagc

SEQ ID NO: 397270 - DNA, 75 bp, synthetic construct
  source 1..75: mol_type = other DNA
tttctgcggctcacgcgggttatctcacgccgcctgatgttatctgggggcggctggcagagaacttaagcgaat

SEQ ID NO: 397271 - DNA, 75 bp, synthetic construct
  source 1..75: mol_type = other DNA
aacgggcagggtaatccggtcagcgtggaggtccagtccgtcaccgacggcgtgaaggtgaaagtgagccgtgtt

SEQ ID NO: 397272 - DNA, 75 bp, synthetic construct
  source 1..75: mol_type = other DNA
gaggtgagcgcggctgacggtcagtatctggcacaggcgaaatgggacacgccgcgggtggtgaagggtgtgcgc

SEQ ID NO: 397273 - DNA, 75 bp, synthetic construct
  source 1..75: mol_type = other DNA
tcgcgcgctgctgccggaggatgagagatggaaaccctggcgacaatcggcgataactgcgtcgatatctacccg

SEQ ID NO: 397274 - DNA, 75 bp, synthetic construct
  source 1..75: mol_type = other DNA
aagtgacccggaaaatcggggaggcggaaaacagcctcacgcagctggttgcgaaaaagaatgaggaccagacac

SEQ ID NO: 397275 - DNA, 75 bp, synthetic construct
  source 1..75: mol_type = other DNA
tggttgagaaatgtagataacaagtaccaagttataccggaacaggcagaactgattgttaaatgtttcatgtgg

SEQ ID NO: 397276 - DNA, 75 bp, synthetic construct
  source 1..75: mol_type = other DNA
gcaggtccagtcagacacgaatgatgagctggcagcgctgtacatgctgaaggtgcagaaaacgaaaaacggcat

SEQ ID NO: 397277 - DNA, 75 bp, synthetic construct
  source 1..75: mol_type = other DNA
gatttctggttttatgtgcgcagcgtcaacctggtggggaaatctgcgtttgtggaggccagcgggcaggccagc

SEQ ID NO: 397278 - DNA, 75 bp, synthetic construct
  source 1..75: mol_type = other DNA
ggccagtatctggcgctggcgaaatgggacacgccgcgggtggtgaagggcgtgcgcttcagtctgcgcctgacc

SEQ ID NO: 397279 - DNA, 75 bp, synthetic construct
  source 1..75: mol_type = other DNA
tcacagctaatcgcatgatggatcgtgttatgttggagaagaataaaccagcagaagacctgctacttgaatctg

SEQ ID NO: 397280 - DNA, 75 bp, synthetic construct
  source 1..75: mol_type = other DNA
ctgatttacagtggcgttattgatatgcctgccggtcacggtcacatgacgctggagttttcggtgtcagcatgg

SEQ ID NO: 397281 - DNA, 75 bp, synthetic construct
  source 1..75: mol_type = other DNA
tgtggggctgcaggtggatgcggagcagttcggcggccagcagatgacggtgaactaccatatccgcggtcgtat

SEQ ID NO: 397282 - DNA, 75 bp, synthetic construct
  source 1..75: mol_type = other DNA
cctcagttatagatatgcctgccggacaggggacgctgacactgacattcaccgtatcttcatcaggagcgaata

SEQ ID NO: 397283 - DNA, 75 bp, synthetic construct
  source 1..75: mol_type = other DNA
atgccgctgagggaactgatgcgcgatattatcgaccggggctatgagggttactgtacggtggagctggtgacg

SEQ ID NO: 397284 - DNA, 75 bp, synthetic construct
  source 1..75: mol_type = other DNA
ttactgtacggtggagctggtgacgatgtatatgaacgagcccagactctatgcccgccaggcgctggaacgctt

SEQ ID NO: 397285 - DNA, 75 bp, synthetic construct
  source 1..75: mol_type = other DNA
gttaaaacagtgggcaaagctttcccccgggactcccgtgcaccggagcggtggccatcagggaccattaccgtc

SEQ ID NO: 397286 - DNA, 75 bp, synthetic construct
  source 1..75: mol_type = other DNA
catatggtgcaaataactggacgccaacgaccagtatcagcgaccttcttgttgtcgtgatgaagaaatcaacag

SEQ ID NO: 397287 - DNA, 75 bp, synthetic construct
  source 1..75: mol_type = other DNA
acgggcggttgacggcgaaaaatgccgatatcagcggtaacgtgaatgcgaactcagggacgctcaataatgtca

SEQ ID NO: 397288 - DNA, 75 bp, synthetic construct
  source 1..75: mol_type = other DNA
gtgaagggtatctggaatttttccgggaaaaaataggaaaactgcatctggctcaggggttgtgggaactgatag

SEQ ID NO: 397289 - DNA, 75 bp, synthetic construct
  source 1..75: mol_type = other DNA
acggtggaggtgagcgcggctgacggtcagtatctggcacaggcgaaatgggacacgccgcgggtggtgaagggt

SEQ ID NO: 397290 - DNA, 75 bp, synthetic construct
  source 1..75: mol_type = other DNA
cgccctgaaggaccgccacacggcggtggaggtgaattacaccgacccgcagaacggctggcagacctccacgga

SEQ ID NO: 397291 - DNA, 75 bp, synthetic construct
  source 1..75: mol_type = other DNA
ctggcgtgccggggagcaggagcagacaccgccggaaggctttgagtcctccggggcagaaaccgcactgggcgt

SEQ ID NO: 397292 - DNA, 75 bp, synthetic construct
  source 1..75: mol_type = other DNA
atgtgggagctgattgataacagccagcttgatgatgagatggcagagatgaagaccaccatcacagaaacccgc

SEQ ID NO: 397293 - DNA, 75 bp, synthetic construct
  source 1..75: mol_type = other DNA
agtggcctgccgctcggggaatacaccctgacggtcagggcgataaacagctacggccagcagggcgaacctgcc

SEQ ID NO: 397294 - DNA, 75 bp, synthetic construct
  source 1..75: mol_type = other DNA
gacgctggcctattatcggttacatctggataatccggaaaagccgcggctctgggtgagtcgtcagcgtacaga

SEQ ID NO: 397295 - DNA, 75 bp, synthetic construct
  source 1..75: mol_type = other DNA
aaatggaaagcaattctgacagcgccccctatacgttattaaaaaactatgctgacagatttaaaaaatattcag

SEQ ID NO: 397296 - DNA, 75 bp, synthetic construct
  source 1..75: mol_type = other DNA
cggtgcgaacaactggacgccgacaacgtacatcagtgatttactggttgtggtcatgaaaaaatccacggcagg

SEQ ID NO: 397297 - DNA, 75 bp, synthetic construct
  source 1..75: mol_type = other DNA
accggcagtgcagcacctgacggtggaggtgagtgcagctgacggtcagtatctggcacaggcgaaatgggacac

SEQ ID NO: 397298 - DNA, 75 bp, synthetic construct
  source 1..75: mol_type = other DNA
cctgtttcgctgtgtctgcatccgggaaaacacggacggcacttttgccatcacggcagtgcagcatgtgccgga

SEQ ID NO: 397299 - DNA, 75 bp, synthetic construct
  source 1..75: mol_type = other DNA
gctgcaggtggatgcggagcagtttggcggtcagcagatgacggtgaactaccatatccgcggtcgcatcatcca

SEQ ID NO: 397300 - DNA, 75 bp, synthetic construct
  source 1..75: mol_type = other DNA
gttgatacaaataataacctgaacagcatgtgggctgtgaagctgcagcagatgcaggacggacgcctttatatc

SEQ ID NO: 397301 - DNA, 75 bp, synthetic construct
  source 1..75: mol_type = other DNA
tttaacatccggatggtccgggagacagcggacagcacctcggaccagctgcagaataagacgctctggtcgtca

SEQ ID NO: 397302 - DNA, 75 bp, synthetic construct
  source 1..75: mol_type = other DNA
ctgattttcagccgtatgtgatcagaatactaaacggcccccttatggggtgcgaatacccattacaggctggaa

SEQ ID NO: 397303 - DNA, 75 bp, synthetic construct
  source 1..75: mol_type = other DNA
gcgtggtggtaaatggatgacggaaaaggatgtcaccattaacggcaagaccacctcgcagttcctggcgtcggt

SEQ ID NO: 397304 - DNA, 75 bp, synthetic construct
  source 1..75: mol_type = other DNA
ctggattttttcaaaggagagatagggaaaacccatctggctcaggagttgtggactcagattgataacggtcag

SEQ ID NO: 397305 - DNA, 75 bp, synthetic construct
  source 1..75: mol_type = other DNA
gcgatccattgtagcggacccacgtgcattacctcgcagaaaagaatgggttagcgggcagcagtacagttacgt

SEQ ID NO: 397306 - DNA, 75 bp, synthetic construct
  source 1..75: mol_type = other DNA
gttccgctgtgtttccatccgggaaaacacggacggcacctttgccatcacggcggtgcagcatgtgccggaaaa

SEQ ID NO: 397307 - DNA, 75 bp, synthetic construct
  source 1..75: mol_type = other DNA
gatgttaatcgccctgatcgtcatctgtttaaccgtcatagtgacggcactggtaacgaggaaagacctctgcga

SEQ ID NO: 397308 - DNA, 75 bp, synthetic construct
  source 1..75: mol_type = other DNA
aggttagcctcttacgtgccgaaaggcaaggagaagcaggctatgaagcagcaaaaggcgatgttaatcgccctg

SEQ ID NO: 397309 - DNA, 75 bp, synthetic construct
  source 1..75: mol_type = other DNA
atgggcactgttgcaaagttagcgatgaggcagccttttgtcttattcaaaggccttacatttcaaaaactctgc

SEQ ID NO: 397310 - DNA, 75 bp, synthetic construct
  source 1..75: mol_type = other DNA
gtttaaccgtcattgtgacggcactggtaacgaggaaagacctctgcgaggtacgactccgaaccggccagacgg

SEQ ID NO: 397311 - DNA, 75 bp, synthetic construct
  source 1..75: mol_type = other DNA
gacctctgcgaggtacgaatccgaaccggccagacggaggttgctgtcttcgtggactacgaatctgagaagtaa

SEQ ID NO: 397312 - DNA, 75 bp, synthetic construct
  source 1..75: mol_type = other DNA
gtttaaccgtcatagtgacggcactggtaacgaggaaagacctctgcgaggtgcgaatccgaaccggtcagacgg

SEQ ID NO: 397313 - DNA, 75 bp, synthetic construct
  source 1..75: mol_type = other DNA
gaccccaaagatgccacacgggttcagggtttttttcagcatttgcaggtcaggtttggtgacgggccgtggcag

SEQ ID NO: 397314 - DNA, 75 bp, synthetic construct
  source 1..75: mol_type = other DNA
ttacgacatcggtatatcgacgatttatcgttatcaccctgtaggtgacacgcaacccggaggaataattgagaa

SEQ ID NO: 397315 - DNA, 75 bp, synthetic construct
  source 1..75: mol_type = other DNA
ctgatagaagagttgcgccagtgtggcgtgaatttccgaagcctgactgacagtattgataccagcaccccaatg

SEQ ID NO: 397316 - DNA, 75 bp, synthetic construct
  source 1..75: mol_type = other DNA
tcctggtgcggctgtggaacggctaaccctgaagcagagggagtaaccctttctcgcctcgatgttgggatttac

SEQ ID NO: 397317 - DNA, 75 bp, synthetic construct
  source 1..75: mol_type = other DNA
agagctgatggatgttccggcgaacagctggatcgatgttcgcctggatatgcccgcagattcactgtttaacca

SEQ ID NO: 397318 - DNA, 75 bp, synthetic construct
  source 1..75: mol_type = other DNA
catcaagccctgtttgatcggcggttttctggctaaaagtacccatcgtcctgttattctgagttttgtcggttt

SEQ ID NO: 397319 - DNA, 75 bp, synthetic construct
  source 1..75: mol_type = other DNA
ttcaaatcaaaatgacagcgctgtctgtcattttttttatattccccgcagcttgctctgtgacagatttttcca

SEQ ID NO: 397320 - DNA, 75 bp, synthetic construct
  source 1..75: mol_type = other DNA
cagataacggcggtaccgcgtcttgcggtgtatgacccgacggtgcagtttgagttctggttttcggaggcaaaa

SEQ ID NO: 397321 - DNA, 75 bp, synthetic construct
  source 1..75: mol_type = other DNA
tggtttcgaaaaagttacccctacatctgatgcttatcttatatacgctgtatgtaaaaatagaaatgctggcgt

SEQ ID NO: 397322 - DNA, 75 bp, synthetic construct
  source 1..75: mol_type = other DNA
ggcatcgacggtgaacctgattaacggcagcggtaagccggtgcgcgtggacatcactgcacaccccgcccctga

SEQ ID NO: 397323 - DNA, 75 bp, synthetic construct
  source 1..75: mol_type = other DNA
atgtcctgggggatttctgctcggcgatgcgctgtatgccggtatggaacggccagacgctgacgttcgttcagg

SEQ ID NO: 397324 - DNA, 75 bp, synthetic construct
  source 1..75: mol_type = other DNA
ggggactctccctgccgtcactgcgccgtcgcctgttccgctgtgtctccgtccgggaaaacacggacggcacct

SEQ ID NO: 397325 - DNA, 75 bp, synthetic construct
  source 1..75: mol_type = other DNA
tgccggtatggaacggccagacgctgacgttcgttcaggaccgtccgtcggatgtggtgtggccgtacaccaaca

SEQ ID NO: 397326 - DNA, 75 bp, synthetic construct
  source 1..75: mol_type = other DNA
tcgtcgcctgtttcgctgtgtctgcatccgggaaaacacggacggcacttttgccatcacggcggtgcagcatgt

SEQ ID NO: 397327 - DNA, 75 bp, synthetic construct
  source 1..75: mol_type = other DNA
ccacctcacagtacctggcgtcggtgattctggagaatctgcctccccgtccttttaacatccggatggtccggg

SEQ ID NO: 397328 - DNA, 75 bp, synthetic construct
  source 1..75: mol_type = other DNA
atgaaaacattcaaacacgaattcagtatacctgagcaattcaaccatcagattgacaacctcgccggtgagtta

SEQ ID NO: 397329 - DNA, 75 bp, synthetic construct
  source 1..75: mol_type = other DNA
gtatgcgaagcatcatgatgggtattatcattttcttcctgcggtcagcgacaagcattcgtcgttttatggtct

SEQ ID NO: 397330 - DNA, 75 bp, synthetic construct
  source 1..75: mol_type = other DNA
cacgcaactggaagaagatatccgtcagcggatggacacggatatcgcagaagtgacccggaaaatcgggaaggc

SEQ ID NO: 397331 - DNA, 75 bp, synthetic construct
  source 1..75: mol_type = other DNA
ctgacggcgttgccgaatacagcgtgtgggggctgaagctgccgacgctgcgccagcgcctgttccgctgtgtga

SEQ ID NO: 397332 - DNA, 75 bp, synthetic construct
  source 1..75: mol_type = other DNA
gattctggataatctgcctccccggccctttaacatccggatggtccgggagacagcggacagcaccacggacca

SEQ ID NO: 397333 - DNA, 75 bp, synthetic construct
  source 1..75: mol_type = other DNA
ccccccgacgttttccctgacgccggaagggaagctgacagctaggaacgcggatatcagcggagcaattaccgc

SEQ ID NO: 397334 - DNA, 75 bp, synthetic construct
  source 1..75: mol_type = other DNA
gtattctctcagaccggtaaaggcaccaatgctgcatccggcatgaaaaaaggacactttgtcagcaatctgtag

SEQ ID NO: 397335 - DNA, 75 bp, synthetic construct
  source 1..75: mol_type = other DNA
catgccgtctgatagtacgaaaaaacggtgctgaaatttataaccgaacggctctggataatacgctgatatata

SEQ ID NO: 397336 - DNA, 75 bp, synthetic construct
  source 1..75: mol_type = other DNA
taacatccaacggtttgaatgaaagaggcctgattactgcgggatgctcttttctttatctattaattatgatgg

SEQ ID NO: 397337 - DNA, 75 bp, synthetic construct
  source 1..75: mol_type = other DNA
attttccagaaaggcaatcagggggcaggcaatatcaccgactgtacggtgattgtgaccaaaaaagccgcttcc

SEQ ID NO: 397338 - DNA, 75 bp, synthetic construct
  source 1..75: mol_type = other DNA
gctcaggggctgtgggagctgatagataacagccagcttgcggatgatatggcggaaatgcagaccaccatcacc

SEQ ID NO: 397339 - DNA, 75 bp, synthetic construct
  source 1..75: mol_type = other DNA
accgatgccgccaccggctcacaggttgagatcgtgaacgtgacagctaaggccggagacatcttcacgattgaa

SEQ ID NO: 397340 - DNA, 75 bp, synthetic construct
  source 1..75: mol_type = other DNA
ctgaacattatcgctcaatatgcccagcaggcagctgcatcagcagatcaggcaattgaggctgctaataacgcc

SEQ ID NO: 397341 - DNA, 75 bp, synthetic construct
  source 1..75: mol_type = other DNA
aactgtatccaaatcattcccgaaaaaggctggtacgtggggtaacacggaaacaccaaacgggacggttacagt

SEQ ID NO: 397342 - DNA, 75 bp, synthetic construct
  source 1..75: mol_type = other DNA
cgtatcgcgtttattgatccgtctaatggcaacacgcgaccaatgtttgttggtcagggcgatcagatattcatg

SEQ ID NO: 397343 - DNA, 75 bp, synthetic construct
  source 1..75: mol_type = other DNA
tggttcaatgctgatggaatccatcctgaccctgcaactggaggtgggctgccgatcgtttctgctgttttgaag

SEQ ID NO: 397344 - DNA, 75 bp, synthetic construct
  source 1..75: mol_type = other DNA
ctggtcagcacggcccggacggcggaaaccacttaccgcttcaggcagctggcgctggggcgttacacgctgacg

SEQ ID NO: 397345 - DNA, 75 bp, synthetic construct
  source 1..75: mol_type = other DNA
agaacagcgatacttattcgtcatgccgcctgatagtgaagaaaaacggtgctgaaatttataaccgtaccgcga

SEQ ID NO: 397346 - DNA, 75 bp, synthetic construct
  source 1..75: mol_type = other DNA
gaaccggccaccaccacgttcaggattaacgcacctgcaaaacccgccaccattgagctgacgccggggtatttt

SEQ ID NO: 397347 - DNA, 75 bp, synthetic construct
  source 1..75: mol_type = other DNA
ttgccgccgggcatgagatggcttcggaactgaaagcagaatgtggtgccgttgacatgcgcagtgtggcaaagc

SEQ ID NO: 397348 - DNA, 75 bp, synthetic construct
  source 1..75: mol_type = other DNA
atgcgctacgcttatcaggcatgggggaaatcatttgtattctctcagaccggtaaaggcaccaatgctgcatcc

SEQ ID NO: 397349 - DNA, 75 bp, synthetic construct
  source 1..75: mol_type = other DNA
atcctgcaaatggcaacacaaaaccgatgtttgttggtcagggtgatcagatattcatgaatgaagtgttcctga

SEQ ID NO: 397350 - DNA, 75 bp, synthetic construct
  source 1..75: mol_type = other DNA
tctctattttcgaaggggataaaacgcttcctgttgttgattatatggtggtgttgaatcatggaacaacagttg

SEQ ID NO: 397351 - DNA, 75 bp, synthetic construct
  source 1..75: mol_type = other DNA
gtctattatggaactgcaccgggttttatgaccacagggatacagatcacaacgatgaaggcgacagcctccgga

SEQ ID NO: 397352 - DNA, 75 bp, synthetic construct
  source 1..75: mol_type = other DNA
tgaagcgactgtttgcggtgagcatcacctcgtctggcaatcccccgacgttctccctgacgccggacggcaggc

SEQ ID NO: 397353 - DNA, 72 bp, synthetic construct
  source 1..72: mol_type = other DNA
cgtgagttggggcttattaatcctcctgtttctgaggtaaatgaacaaaatatggagactgatgatgcctaa

SEQ ID NO: 397354 - DNA, 75 bp, synthetic construct
  source 1..75: mol_type = other DNA
acggccacatgacgctggagttttcggtgtcagcatggctggtaaatgactggtatcccacagcaagtatcagcg

SEQ ID NO: 397355 - DNA, 75 bp, synthetic construct
  source 1..75: mol_type = other DNA
gctcagaggttgtgggaactgatagataacagccagcttgcagatgagatggcggagatgaagaccagcatcacg

SEQ ID NO: 397356 - DNA, 75 bp, synthetic construct
  source 1..75: mol_type = other DNA
tccgcgtggtgagaagggtgaacagggggagcgaggaccgcagggaataccaggcctgaagggggataccggaga

SEQ ID NO: 397357 - DNA, 75 bp, synthetic construct
  source 1..75: mol_type = other DNA
tctcaaatccacgcagatgatgagtgtgattgatgccattggtgagggaccggtggaaggtccggtgaagggact

SEQ ID NO: 397358 - DNA, 75 bp, synthetic construct
  source 1..75: mol_type = other DNA
tctgggacggcagtctgaaaccggcatacagcaataacccggcctggtgcctgtgggacatgctgactcacccgc

SEQ ID NO: 397359 - DNA, 75 bp, synthetic construct
  source 1..75: mol_type = other DNA
ggaacagcaccgggttttatgaccacagggatacagatcacaacgatgaaggcgacagcctcaggatttatggaa

SEQ ID NO: 397360 - DNA, 75 bp, synthetic construct
  source 1..75: mol_type = other DNA
gataaacagctacggccagcagggcgaacctgccaccaccacattccggattaatgcgcctgcagcaccggccag

SEQ ID NO: 397361 - DNA, 75 bp, synthetic construct
  source 1..75: mol_type = other DNA
tacggacgcaatctgctgaagatggatgcgtttggctgtaccagccgcggtcaggctcaccgtgcaggtctgtgg

SEQ ID NO: 397362 - DNA, 75 bp, synthetic construct
  source 1..75: mol_type = other DNA
cggacgtgtcctgtccattgatgctgccacccgcaccctgacgctggaccgtgaggtgacactcccggagacggg

SEQ ID NO: 397363 - DNA, 75 bp, synthetic construct
  source 1..75: mol_type = other DNA
gacatctggacagagtgcttcctgcatgttgatcagaacggacgccggatttattccggcaggtcagtgacagag

SEQ ID NO: 397364 - DNA, 75 bp, synthetic construct
  source 1..75: mol_type = other DNA
gcaatcacagcagcagggaatgcagaggacagctcgacccgtgccggtgagtctgaaaaagccgccggagctgat

SEQ ID NO: 397365 - DNA, 75 bp, synthetic construct
  source 1..75: mol_type = other DNA
tccacggaactggtggaagacccggacgccatcctgcgctacggacgcaacctgctgaagatggacgcgttcggc

SEQ ID NO: 397366 - DNA, 75 bp, synthetic construct
  source 1..75: mol_type = other DNA
gctacggcatggggaagcgtctcggtgcggcggatgtggacaaatgggcgctgtatgtcatcggccagaattgcg

SEQ ID NO: 397367 - DNA, 75 bp, synthetic construct
  source 1..75: mol_type = other DNA
tgcgtgcgttacgtcaggtaagcccaggtggaaatattcgcaacattccattcgtcgtgctggtgggcggctctt

SEQ ID NO: 397368 - DNA, 75 bp, synthetic construct
  source 1..75: mol_type = other DNA
gaaatttttattcaggatttactggcgatagatacctctgttcccgtcagcgtaaccggtggtctggcgggtgaa

SEQ ID NO: 397369 - DNA, 75 bp, synthetic construct
  source 1..75: mol_type = other DNA
tcgtgtcatcggcatttgattttgccgatatcgcgaccatgataaacgcctccgtgcgtgccgggtatcaactga

SEQ ID NO: 397370 - DNA, 75 bp, synthetic construct
  source 1..75: mol_type = other DNA
tctacgcttttctacgcgaacctcatcgggtgatgagtgctgttcgtaaggtgctttctgcgccgcagcaaacgc

SEQ ID NO: 397371 - DNA, 75 bp, synthetic construct
  source 1..75: mol_type = other DNA
caggaggcgctcgcacaggcaacgaaaaaagtcggcatcaatgtcagcgatatttcgcttattcgtatcaacgaa

SEQ ID NO: 397372 - DNA, 75 bp, synthetic construct
  source 1..75: mol_type = other DNA
tccgtggcaacgaaggaccgcgcaatgcggtagctaccgggctactcatcgcctggcacaaggagtcggcttatg

SEQ ID NO: 397373 - DNA, 75 bp, synthetic construct
  source 1..75: mol_type = other DNA
ctcgccaggaatttgattatctttctgcggaagagattgctgaagaaatacgccgtgactcagaacgtggctatt

SEQ ID NO: 397374 - DNA, 75 bp, synthetic construct
  source 1..75: mol_type = other DNA
cagactctggcatttgaactggctcgccaagaatttgattatcgttctgcagaagagatcacggatgagatacgc

SEQ ID NO: 397375 - DNA, 75 bp, synthetic construct
  source 1..75: mol_type = other DNA
cttgtggactgacggtcttggcgtgatgacccgcggtgtgaccgatggcagcggtaccttgcagttacaacatat

SEQ ID NO: 397376 - DNA, 75 bp, synthetic construct
  source 1..75: mol_type = other DNA
tccgtggtagagaaggcccgcgcaatgcggtggctaccgggctactcatctcctggcacaaggcgtcggttcatg

SEQ ID NO: 397377 - DNA, 75 bp, synthetic construct
  source 1..75: mol_type = other DNA
gcatggtaataactgggttgtcacaactcaagattttcttcatcagcaactaaaaaatgattttgataaaacaat

SEQ ID NO: 397378 - DNA, 75 bp, synthetic construct
  source 1..75: mol_type = other DNA
gagtcaagatttaattcgtgagttgttctccatcaacagacctattacaaatccaagaaatattttccagattgt

SEQ ID NO: 397379 - DNA, 75 bp, synthetic construct
  source 1..75: mol_type = other DNA
ctgacaagaatgatggaaccggtaatgcagtatcttctgttgaagggagttccactgcaacaacagctgctgacc

SEQ ID NO: 397380 - DNA, 75 bp, synthetic construct
  source 1..75: mol_type = other DNA
atgaaagtctacgcgatgcagggcgataccctcgacgcgctttgcgtccggtattacgggcgcactgagggcgtg

SEQ ID NO: 397381 - DNA, 75 bp, synthetic construct
  source 1..75: mol_type = other DNA
tggatatgtgaaagaaagtggcggtgtatacaaagatcgtagtcattttcttgctcaggcagcacgtcatgaact

SEQ ID NO: 397382 - DNA, 75 bp, synthetic construct
  source 1..75: mol_type = other DNA
aggcttggaggtggattgcaatatataaaggataaaaatggaaatcttacaccggtatatacaaatggtggtttc

SEQ ID NO: 397383 - DNA, 75 bp, synthetic construct
  source 1..75: mol_type = other DNA
acaccatcgacgcgctttgtgcccggtattacgggcgcactgagggcgtggtcgaggcggtgctgcaggctaatc

SEQ ID NO: 397384 - DNA, 75 bp, synthetic construct
  source 1..75: mol_type = other DNA
acaccatcgacgcgctttgcgcccggcattacgggcgcactgagggcgtggtcgaggcggtgctgcaggctaatc

SEQ ID NO: 397385 - DNA, 75 bp, synthetic construct
  source 1..75: mol_type = other DNA
tctgccgcacggcacggccattgaactgcccgaaaccgacagcgccccgaaaaccgaaacggtgaatctatggga

SEQ ID NO: 397386 - DNA, 75 bp, synthetic construct
  source 1..75: mol_type = other DNA
gccacacagtgggtgctgactggatatcagtctgtcgctgatgccagagcctcgaaaatcgcaacggactttatg

SEQ ID NO: 397387 - DNA, 75 bp, synthetic construct
  source 1..75: mol_type = other DNA
catgggtggaaccacagatggaactggtttatggttcggtatcaggaaagtcatttaactggaaagaccagggaa

SEQ ID NO: 397388 - DNA, 75 bp, synthetic construct
  source 1..75: mol_type = other DNA
aaaactgactgcacagagtggtattttcacaaataacactatggaaataaaagaaaacgcctctctgactctgac

SEQ ID NO: 397389 - DNA, 75 bp, synthetic construct
  source 1..75: mol_type = other DNA
atttcgggattttgccgaaaataaaggagcttttatagttggcgcatcaaatataaatatctacgataagaatgg

SEQ ID NO: 397390 - DNA, 75 bp, synthetic construct
  source 1..75: mol_type = other DNA
atgaataaagtgttctctcttaagtatagttttttagccaaaggttttattgctgtttctgaacttgcccgtcgc

SEQ ID NO: 397391 - DNA, 75 bp, synthetic construct
  source 1..75: mol_type = other DNA
tctccattattcaataccttaatgaggggatataatgctgttttgcagggcaatattatggggccacagagctca

SEQ ID NO: 397392 - DNA, 75 bp, synthetic construct
  source 1..75: mol_type = other DNA
gacattctctcttttggtgacgaattaccgccgcaaaatgtgcaggtccgctggcgtgaaccggcaaaaacggct

SEQ ID NO: 397393 - DNA, 75 bp, synthetic construct
  source 1..75: mol_type = other DNA
cattgaagagcgggtagaacagctgatccgggccaaattcagcatcacccctgatatgtcagcggtagtgaaata

SEQ ID NO: 397394 - DNA, 75 bp, synthetic construct
  source 1..75: mol_type = other DNA
tcggtactgtgcagccaaattgtgccgccagagtttgcctttgaagccctgatgcatgacgcagctgaagcctat

SEQ ID NO: 397395 - DNA, 75 bp, synthetic construct
  source 1..75: mol_type = other DNA
agcatctgcatttacagggcgatcatgtgcagaatattgcagccgcagtcgattctcagttttgtatggcggagg

SEQ ID NO: 397396 - DNA, 75 bp, synthetic construct
  source 1..75: mol_type = other DNA
tgtggtgctgaaaaccccgcagggagatgtgcgatcaagagtgatcccggcgggtaagatctttatccgtggtga

SEQ ID NO: 397397 - DNA, 75 bp, synthetic construct
  source 1..75: mol_type = other DNA
caccgaatcgaccatgatcggtcataacccgcagacgccgggcggggtgggcgttggcgtggggacgactatcgc

SEQ ID NO: 397398 - DNA, 75 bp, synthetic construct
  source 1..75: mol_type = other DNA
gaaaagcccctgcccatcgttgatgaagttcgctatatagaccgcattccgctgggtatgctggcggcaatcgag

SEQ ID NO: 397399 - DNA, 75 bp, synthetic construct
  source 1..75: mol_type = other DNA
tccccgctgaccgccgaccgcctgggtgagctggcgctggaagccggtattccggcgggcgtgctgaacgtggta

SEQ ID NO: 397400 - DNA, 75 bp, synthetic construct
  source 1..75: mol_type = other DNA
gcgcgtggcattgaagctggcatggtgttcgtcaacacccagaacgtgcgtgacctgcgccagccgtttggcggc

SEQ ID NO: 397401 - DNA, 75 bp, synthetic construct
  source 1..75: mol_type = other DNA
aagatgctcaactacacgctggtgcagccggtaggcgtttgtgcactggtgtcaccgtggaacgtgccgtttatg

SEQ ID NO: 397402 - DNA, 75 bp, synthetic construct
  source 1..75: mol_type = other DNA
gattcgggaagcgtttcttgaatcattgtgtccagatgtcgttttcattacgagtttgtttgaaggtcatgtcga

SEQ ID NO: 397403 - DNA, 75 bp, synthetic construct
  source 1..75: mol_type = other DNA
tttatgaccgccacctggaaggtcgcgccgtgtcttgcgctgggcaataccgcggtgctgaagatgtcggaactc

SEQ ID NO: 397404 - DNA, 75 bp, synthetic construct
  source 1..75: mol_type = other DNA
gtaaaagcctccggcaccgggcgtgaaggcggtgagtacagcttcgaagtgttcgcggaaatgaagaacgtctgc

SEQ ID NO: 397405 - DNA, 75 bp, synthetic construct
  source 1..75: mol_type = other DNA
atgatgattttggtgacgggtggtgcacggagtgggaagagtcggcacgccgagaggcttatcggggatacacca

SEQ ID NO: 397406 - DNA, 75 bp, synthetic construct
  source 1..75: mol_type = other DNA
ctggtgctggcgtgggcacaggagatgaatctgccgtgcaaaacgttgttgaaagggttggatgaagctatcgcc

SEQ ID NO: 397407 - DNA, 75 bp, synthetic construct
  source 1..75: mol_type = other DNA
aactgatcttgatgaacacagccttatgctgatggctgatggaaaacctgttaagagccttccccctggctatgt

SEQ ID NO: 397408 - DNA, 75 bp, synthetic construct
  source 1..75: mol_type = other DNA
gaacgtatcgcaaatgcccttgatgtagccctccctgaattactcgaaactactgaccttgacgaaaacagcctg

SEQ ID NO: 397409 - DNA, 75 bp, synthetic construct
  source 1..75: mol_type = other DNA
aagcactgggcgaaccgatgctttccacttcgctaatgctgccaggcagcgaatttaccgaatccgatcccgaag

SEQ ID NO: 397410 - DNA, 75 bp, synthetic construct
  source 1..75: mol_type = other DNA
aaaggcggggtgattgtttatccaactgattccggctatgcgctcggctgtaaaattgaagataaaaacgcgatg

SEQ ID NO: 397411 - DNA, 75 bp, synthetic construct
  source 1..75: mol_type = other DNA
aatattcagcaatctggcttgttaagtgcagaactgcaacaaaatgggcaagtgcaggacagcattagcacaaaa

SEQ ID NO: 397412 - DNA, 75 bp, synthetic construct
  source 1..75: mol_type = other DNA
acggatagaacatcatcggcaaggccgcccggagcactggcgcacggtggagcgttggcaacatcttgatgaatt

SEQ ID NO: 397413 - DNA, 75 bp, synthetic construct
  source 1..75: mol_type = other DNA
gtaaatcagcagttggccgctgcggcaaatgaagtatggctggtggtttcgggtattggagtaaaaatcaaatga

SEQ ID NO: 397414 - DNA, 75 bp, synthetic construct
  source 1..75: mol_type = other DNA
gatgaatgggattatcaggcgatggaacaggcgattaatgctgaagtcgttgattgctgcctgccaacgttgccc

SEQ ID NO: 397415 - DNA, 75 bp, synthetic construct
  source 1..75: mol_type = other DNA
caaaaagctggggtttcaatctcttttttgtcggacctaacaaatggaaaagcgaacccatctttaagggtgatg

SEQ ID NO: 397416 - DNA, 75 bp, synthetic construct
  source 1..75: mol_type = other DNA
tatctacgccgccctttgggtaaaaggcacgattaccgccatggtggaaggatgggttaccagcgcctgggcgaa

SEQ ID NO: 397417 - DNA, 75 bp, synthetic construct
  source 1..75: mol_type = other DNA
tcgtaagatcgtcgtcaacgaggaagtaggtgacaccgggcgttataacttcggtcagaaatgcgttttctgggc

SEQ ID NO: 397418 - DNA, 75 bp, synthetic construct
  source 1..75: mol_type = other DNA
tggcaaaccgttcccgctatggaccagtgaacaaggcgttggtcgcaacaaacaaacctatgtcacctggcaggc

SEQ ID NO: 397419 - DNA, 75 bp, synthetic construct
  source 1..75: mol_type = other DNA
aagataatccttgtttatggattggctcaggtatagcggatatcgatatgttccgcggtaatttcagcattaaag

SEQ ID NO: 397420 - DNA, 75 bp, synthetic construct
  source 1..75: mol_type = other DNA
tgaaactgcagctgtcggctttaacctctctttaggcattggtttcgaagcgggcaacaagccgaaagaactgta

SEQ ID NO: 397421 - DNA, 75 bp, synthetic construct
  source 1..75: mol_type = other DNA
agtgaacaaggcgttggtcgcaacaaacaaacctatgtcacctggcaggccgactgcaaagagaacgcgggcggc

SEQ ID NO: 397422 - DNA, 75 bp, synthetic construct
  source 1..75: mol_type = other DNA
ccggatggttggttaatccatttcagccgtggttctgacattagcgccacgctgcgtatctctgccgacgatcag

SEQ ID NO: 397423 - DNA, 75 bp, synthetic construct
  source 1..75: mol_type = other DNA
gcattacgaagacgatgcacagacctacaccctgaaatatcagtacctgttaggccgcgacattctggtcgcccc

SEQ ID NO: 397424 - DNA, 75 bp, synthetic construct
  source 1..75: mol_type = other DNA
atgaatgaacatcacactgtggcagcaacagatgattcaggccttcaggtcagtggtgacagtcctgtcacggta

SEQ ID NO: 397425 - DNA, 75 bp, synthetic construct
  source 1..75: mol_type = other DNA
ctggcagaagtgcgttgcagtcgtacgcagtttcgtcgtgcggggttcctgttcatgcggggacgccagcaggtt

SEQ ID NO: 397426 - DNA, 75 bp, synthetic construct
  source 1..75: mol_type = other DNA
gaaaggaatggctggcgtaccacgcgcctcaatggtggttatcgccgccacgctcaaccagttcaatattccgga

SEQ ID NO: 397427 - DNA, 75 bp, synthetic construct
  source 1..75: mol_type = other DNA
cgttattgccggtcataaagaagcggttgagcgtgcaggtgctgcctgtaaagctgcgggcgcaaaacgtgcgtt

SEQ ID NO: 397428 - DNA, 75 bp, synthetic construct
  source 1..75: mol_type = other DNA
gaaaatcacctttaacgcaccaacagttcctgttgtgaataacgttgatgtgaaatgcgaaaccaatggtgatgc

SEQ ID NO: 397429 - DNA, 75 bp, synthetic construct
  source 1..75: mol_type = other DNA
agccgaagccgaagccgaagccgaagccggacaggatgctccccggaaaaagaccggtaacaaagcgaaacaggc

SEQ ID NO: 397430 - DNA, 75 bp, synthetic construct
  source 1..75: mol_type = other DNA
ctgaaatatcagtacctgttaggtcgcgacattctggtcgctccggtgcatgaagaaggccgtagcgactggacg

SEQ ID NO: 397431 - DNA, 75 bp, synthetic construct
  source 1..75: mol_type = other DNA
gcaggagtttgaattgcagtggctggatgaggccagtgcgtggctctcctttgaactgattgacggcgtggagca

SEQ ID NO: 397432 - DNA, 75 bp, synthetic construct
  source 1..75: mol_type = other DNA
gaaaggcgattccggcgagcgttataccaaactggaggcagtcttaccgggcggttcacgcatcaccgcgctgcc

SEQ ID NO: 397433 - DNA, 75 bp, synthetic construct
  source 1..75: mol_type = other DNA
tagtgcggccagtaagctgacgctggccacgcgcggtaaagaagtctttcaggatcggcatatccgtattccgct

SEQ ID NO: 397434 - DNA, 75 bp, synthetic construct
  source 1..75: mol_type = other DNA
gcaggttacccaggcacaccacagcctgacgctggaagaactttatcagatgttccgtgacggcgcggacggcgt

SEQ ID NO: 397435 - DNA, 75 bp, synthetic construct
  source 1..75: mol_type = other DNA
gtgtgacatcgacgccgaacggcaagggaaacaagttttatgaactgatgaccagcaacgcccttgaaaatgtct

SEQ ID NO: 397436 - DNA, 75 bp, synthetic construct
  source 1..75: mol_type = other DNA
ctgcataaacttcgcaaggttaccgggcctaccggaactccccgctttgtggccgaaagtgatgcagcaggtcac

SEQ ID NO: 397437 - DNA, 75 bp, synthetic construct
  source 1..75: mol_type = other DNA
ctaaacaaggtgaaccagacccagaattaaacacatctttaaaattcgttattgaacgtgcgaagcaggcacaag

SEQ ID NO: 397438 - DNA, 75 bp, synthetic construct
  source 1..75: mol_type = other DNA
atgcataacgcctggcccgcgctgtgggcgaaatgtaactacgaagcccttgaagaaacgggcaagctcggcgag

SEQ ID NO: 397439 - DNA, 75 bp, synthetic construct
  source 1..75: mol_type = other DNA
tggacgctctatctgccggaggataactgggtccacgcctggacgggtgaagcgttccggggcggggaagtgacc

SEQ ID NO: 397440 - DNA, 75 bp, synthetic construct
  source 1..75: mol_type = other DNA
ctggatgatgtatttttccgctatcgggtactgcgttgctgtatggatcagaccgggatgggcgaaaagccggtg

SEQ ID NO: 397441 - DNA, 75 bp, synthetic construct
  source 1..75: mol_type = other DNA
cagaagatttagaaatctttgaagggcttgttgatgccctcgaagatgatgatgatgtccaaaaagtttatcata

SEQ ID NO: 397442 - DNA, 75 bp, synthetic construct
  source 1..75: mol_type = other DNA
aagccaaaggcggcggagatgaaacgttcgtacagggacgttatgaaggctttggtcctaatggctcaatgatta

SEQ ID NO: 397443 - DNA, 75 bp, synthetic construct
  source 1..75: mol_type = other DNA
ttatttcgcatgctttccccaccagcattgtcgatgccatggcgcacaatgaaattttgcaaatcgtggtgttct

SEQ ID NO: 397444 - DNA, 75 bp, synthetic construct
  source 1..75: mol_type = other DNA
acacccgacatccacgggtatccgcaggcctccccggcggatcttcgcccgcaatgtctggcgctacaccctctg

SEQ ID NO: 397445 - DNA, 75 bp, synthetic construct
  source 1..75: mol_type = other DNA
tatgtaaaaatgcgttcggctcttttggcgctcattcaattcgcatcacgagcaaagacagatccagtagaaccg

SEQ ID NO: 397446 - DNA, 75 bp, synthetic construct
  source 1..75: mol_type = other DNA
tttactcctcatccccgggcaataaggggcgtgcgctatccacttttttgcccgtccatattcgacggcttcttt

SEQ ID NO: 397447 - DNA, 75 bp, synthetic construct
  source 1..75: mol_type = other DNA
agggtgaaatggtctggatgcccgaccttgccgccccctggatagtcggcctgaaccgcctggcgctccgcgaca

SEQ ID NO: 397448 - DNA, 75 bp, synthetic construct
  source 1..75: mol_type = other DNA
atctaccctacaggtaaaggtgccgggtcaatgctgaacgcgtttattgcgcacgttcagcaggtctctgcagta

SEQ ID NO: 397449 - DNA, 75 bp, synthetic construct
  source 1..75: mol_type = other DNA
ttattgcccacaaagcttaaagataaaccagcaaaagagcgggttttcgccgcgctcaaagacgttatcgtccta

SEQ ID NO: 397450 - DNA, 75 bp, synthetic construct
  source 1..75: mol_type = other DNA
tcgactggctgtaccgctgtggcgacattttcaccaaacagagcgattttctcaccggccttgataaagagatcg

SEQ ID NO: 397451 - DNA, 75 bp, synthetic construct
  source 1..75: mol_type = other DNA
cgctcttcattaagcaaagccagtcgatctcgttccagggcgactcttatacaggagtgtgagaaacttatttcg

SEQ ID NO: 397452 - DNA, 75 bp, synthetic construct
  source 1..75: mol_type = other DNA
atgtataagttcactcccgtccaaattattgctgattatatactgaggtttcttaaaaataatgcggatgccaag

SEQ ID NO: 397453 - DNA, 75 bp, synthetic construct
  source 1..75: mol_type = other DNA
acagacaacccaggcacggcaaagcctgacgctggaagagctttatcagatgttccgcgatggcgcggacggcgt

SEQ ID NO: 397454 - DNA, 75 bp, synthetic construct
  source 1..75: mol_type = other DNA
caagttcaaagaggtgttcccgaaagcgcaggtttctatgtatgaagcgcaactgtcttcgttcttaccggcaat

SEQ ID NO: 397455 - DNA, 75 bp, synthetic construct
  source 1..75: mol_type = other DNA
atccctgccgcgctggatgccgcctgcgaagtggccgagcgcgccgcccacgccaccatcaccatgcaggcgcgt

SEQ ID NO: 397456 - DNA, 75 bp, synthetic construct
  source 1..75: mol_type = other DNA
acgcgaaattattaaagcagctgcgtggcagaataagcaccgcggaacgcgtggagctgttgaacgagcgttatt

SEQ ID NO: 397457 - DNA, 75 bp, synthetic construct
  source 1..75: mol_type = other DNA
tctcatctctgagcggactaaactgtgggacgctaagtcgactactggtttcactcaggggacgctccagcaaga

SEQ ID NO: 397458 - DNA, 75 bp, synthetic construct
  source 1..75: mol_type = other DNA
accgttccgtccggtcaggagattgtggtcgaaccgattgaacaggctattctcatctctgagcggactaaactg

SEQ ID NO: 397459 - DNA, 75 bp, synthetic construct
  source 1..75: mol_type = other DNA
gtacgagaacacggagtcttctttcggttctgaggtttctgactacggcattatcgcccatgagtcacacctcaa

SEQ ID NO: 397460 - DNA, 75 bp, synthetic construct
  source 1..75: mol_type = other DNA
gggcgctgcgatggtgagtcggtgggaaggcgaacatttcggcgagggctgtcggggtaaagcattaaaacccaa

SEQ ID NO: 397461 - DNA, 75 bp, synthetic construct
  source 1..75: mol_type = other DNA
aagctgaccgggagtctcctgcctaaggcggaggctatcgtagatgcgctgtttgagagtactgagtccgcttat

SEQ ID NO: 397462 - DNA, 75 bp, synthetic construct
  source 1..75: mol_type = other DNA
ctgactggcaccctgaccgaacgtgctgagcatattctcgacgctctgtacgagaacactgagtctgcctatggc

SEQ ID NO: 397463 - DNA, 75 bp, synthetic construct
  source 1..75: mol_type = other DNA
ggcgatctgcctggcgatattcgaattattaaaaatcccgatttgtgtcctgcaaatctgttgccgtggctggcg

SEQ ID NO: 397464 - DNA, 75 bp, synthetic construct
  source 1..75: mol_type = other DNA
gaaataaattttgaaacgggtgtcgatggtgaattttttatagctggtgcgccttacgcgaaaataggcgtaaat

SEQ ID NO: 397465 - DNA, 75 bp, synthetic construct
  source 1..75: mol_type = other DNA
taaaaattaacggcgggctatatatatcgggctcaccaattgttagtttaaatgtggagatagggccaaatggct

SEQ ID NO: 397466 - DNA, 75 bp, synthetic construct
  source 1..75: mol_type = other DNA
atgaatatgactaaaaacgctttccagtttggcattgagcctgttcatatcaccgacaacgacaaccttcaggtt

SEQ ID NO: 397467 - DNA, 75 bp, synthetic construct
  source 1..75: mol_type = other DNA
tgacaacaccgaatcttctttcggttctgaggttgctgattacggtatcatcgcccatgagtcacacctcaaggc

SEQ ID NO: 397468 - DNA, 75 bp, synthetic construct
  source 1..75: mol_type = other DNA
gtatcagaacgcagtattggttgcagatcaaataggactgaaaaaccgggtatgggcgggatataccgattcata

SEQ ID NO: 397469 - DNA, 75 bp, synthetic construct
  source 1..75: mol_type = other DNA
taaaggcgggcgcttaattgttgaaaaagatgggattgccgtctttgccgctatcgaaaagggaggattactgga

SEQ ID NO: 397470 - DNA, 75 bp, synthetic construct
  source 1..75: mol_type = other DNA
gctttacttttctgaccatggactgtcggtcagcgacagcgctaatcctgttcatcatgatggtcatgtgcaggg

SEQ ID NO: 397471 - DNA, 75 bp, synthetic construct
  source 1..75: mol_type = other DNA
gcggcactactgctaactacactctggctgaaagcctgcgtaatatgcttagcaataaaatgttccaggtattta

SEQ ID NO: 397472 - DNA, 75 bp, synthetic construct
  source 1..75: mol_type = other DNA
cacgattgttattgttactggtgagagtgtccgcagggattatatgtcggtatatggttatcccgagccaaccac

SEQ ID NO: 397473 - DNA, 75 bp, synthetic construct
  source 1..75: mol_type = other DNA
cccggaagattgcctgttacctcgccagcatcagtaaactggataactttctcgggcagcttgatggtatccttc

SEQ ID NO: 397474 - DNA, 75 bp, synthetic construct
  source 1..75: mol_type = other DNA
catccattacagcgctgttatttatgttctgttgtgcactgtatgcgcctgcgggtatgacgtacggtaaaatca

SEQ ID NO: 397475 - DNA, 75 bp, synthetic construct
  source 1..75: mol_type = other DNA
gtggttaaacgccgacgaactgcgcgagcgcgaaccgaatatcaccgggctcggcggtatttttgtgccgtccag

SEQ ID NO: 397476 - DNA, 75 bp, synthetic construct
  source 1..75: mol_type = other DNA
gaactggtccgatattttcgtgaaaaaagcggagatgaacccgctggaaaaacgttacggcatcagcgacagcga

SEQ ID NO: 397477 - DNA, 75 bp, synthetic construct
  source 1..75: mol_type = other DNA
cgtcatctttcgcgcgccgcatcaccgttaacacgccgatgaaaatcaccggcccggcgctgcataacccgctga

SEQ ID NO: 397478 - DNA, 75 bp, synthetic construct
  source 1..75: mol_type = other DNA
cgggcaacactccccggattatattgtttttattcttttttgttgtttctgtcataaccacaattgcatgcggat

SEQ ID NO: 397479 - DNA, 75 bp, synthetic construct
  source 1..75: mol_type = other DNA
tgcacgtttacgcagaatggggtagtgaaggtaactccaaatgttagagtaactgagaagtttctctacattgaa

SEQ ID NO: 397480 - DNA, 75 bp, synthetic construct
  source 1..75: mol_type = other DNA
tcgccggacggtaagctgattgacgattttctgtttgtcaccaccccgcgcacgatccacacctgcaatgcgccc

SEQ ID NO: 397481 - DNA, 75 bp, synthetic construct
  source 1..75: mol_type = other DNA
ttaccgggatgattcctgtttatcattttctggtcagtgccgcgattctggtgttcatggttattttctggcgga

SEQ ID NO: 397482 - DNA, 75 bp, synthetic construct
  source 1..75: mol_type = other DNA
tattcgtactgaaaatataccgccattcaacccgctgataaatgaagataatgaacctgttatggtttttaacgg

SEQ ID NO: 397483 - DNA, 75 bp, synthetic construct
  source 1..75: mol_type = other DNA
tgatcgacggcagcgtgaccgtcgggccaaacgcggtgctggcgttcaaacgcgaaggctatcgcaagcgcgact

SEQ ID NO: 397484 - DNA, 75 bp, synthetic construct
  source 1..75: mol_type = other DNA
gatgcccgcattgcgttgctggaaaaagagtccggcccggccagtcaccagacgggtcacaacagcggcgtgatc

SEQ ID NO: 397485 - DNA, 75 bp, synthetic construct
  source 1..75: mol_type = other DNA
tcctgctgcaagtctgtataacggcttcccacatatcggcaccatgctgacagcgagtcgttatcagaatcaaat

SEQ ID NO: 397486 - DNA, 75 bp, synthetic construct
  source 1..75: mol_type = other DNA
caaccacgccgtggctgaatacagctcccggtttatttattgacggctatacatcggcagcagccagtaccgtac

SEQ ID NO: 397487 - DNA, 75 bp, synthetic construct
  source 1..75: mol_type = other DNA
tgatggtatccttcgctggcattcccgtcattttgccatgctttacttttctgaccatggactgtcagtcagcga

SEQ ID NO: 397488 - DNA, 75 bp, synthetic construct
  source 1..75: mol_type = other DNA
cacgattgttatcgtcactggtgagagtgtgcgcagggattatatgtcggtatatggctatcccgtgccaaccac

SEQ ID NO: 397489 - DNA, 75 bp, synthetic construct
  source 1..75: mol_type = other DNA
ttcttctgcatgaacattgcaccgcagagtatgcctggcagcaggttcttaaagaacttagccagcaatatcagc

SEQ ID NO: 397490 - DNA, 75 bp, synthetic construct
  source 1..75: mol_type = other DNA
gttgttagacctgatgacgttaacggcaaaggcagaagcaagcgggcttaacgatatcgccgcgatcttttccgg

SEQ ID NO: 397491 - DNA, 75 bp, synthetic construct
  source 1..75: mol_type = other DNA
cgccacgtctgaactcgaaatggaacggatgcgcgcgttgtgggaacgcacggcggcgaacgggatcgagcgcga

SEQ ID NO: 397492 - DNA, 75 bp, synthetic construct
  source 1..75: mol_type = other DNA
atcagcattaatgatgctggtaatggcaaacggtgaaaaaattatcagctcgttcctggatgctggtattcctct

SEQ ID NO: 397493 - DNA, 75 bp, synthetic construct
  source 1..75: mol_type = other DNA
gtagcctgaaggcacagttttgcctggcgggaaaccgcgccaccaaagccttttgcgatcaaaacggcattcgct

SEQ ID NO: 397494 - DNA, 75 bp, synthetic construct
  source 1..75: mol_type = other DNA
cggtctactgtttaaagatggcgatgccaactggagcgccgataaagctcttaaaggccagaacgcgatgggcgt

SEQ ID NO: 397495 - DNA, 75 bp, synthetic construct
  source 1..75: mol_type = other DNA
gaatagcttcgaatccgcatgggaattcaaaagaaatccgttattaaatgaatgtggaggaatttcagaggcgta

SEQ ID NO: 397496 - DNA, 75 bp, synthetic construct
  source 1..75: mol_type = other DNA
aaaaagcggccaatctactggctcttcagctccggcaaagaaaaagcctttgagtgcctggtgtatctgcatcgc

SEQ ID NO: 397497 - DNA, 75 bp, synthetic construct
  source 1..75: mol_type = other DNA
attcttgcttatctaaactcagaacaagcccagttttttctaaaagcttactcaccgtcaccaagaattaaaatc

SEQ ID NO: 397498 - DNA, 75 bp, synthetic construct
  source 1..75: mol_type = other DNA
attgtaacccttattttcgctatagttctgataattcagaattagataccgatgttagatttaaatctgatatct

SEQ ID NO: 397499 - DNA, 75 bp, synthetic construct
  source 1..75: mol_type = other DNA
caggaaggcgatttccagcagaaggccgcagcgaaagcgtttattccgtttattcagcaggcgtggattctggcg

SEQ ID NO: 397500 - DNA, 75 bp, synthetic construct
  source 1..75: mol_type = other DNA
agtcaactggtttaatgatggtgaagctataatagctaacgggaaggcatatccaagaagcaaagattattattt

SEQ ID NO: 397501 - DNA, 75 bp, synthetic construct
  source 1..75: mol_type = other DNA
ccgttggccgccagtggttgcagacctacccggactcgccgctgaaagacaaaatggagtactacatcgagcctg

SEQ ID NO: 397502 - DNA, 75 bp, synthetic construct
  source 1..75: mol_type = other DNA
aaaacaatggtggtcattggtcaagatatcttgttagcttagatcgttttttctgccaaggtttaacttggtctg

SEQ ID NO: 397503 - DNA, 75 bp, synthetic construct
  source 1..75: mol_type = other DNA
ttaacccaaaccgacagcgcagaatatcagctgctgatgcgcacgttgaaacgctttgtgaatgcaaaaacgctg

SEQ ID NO: 397504 - DNA, 75 bp, synthetic construct
  source 1..75: mol_type = other DNA
tctgaacgcgctgtatcgcctggaacaggaaggcgatttccagcagaaggctgcggcaaaagcgtttattccgtt

SEQ ID NO: 397505 - DNA, 75 bp, synthetic construct
  source 1..75: mol_type = other DNA
ttaacccaaactgacagcgcagaatatcagttgctgatgcgcacgttgaaacgctttgtgaatgcaaaaacgctg

SEQ ID NO: 397506 - DNA, 75 bp, synthetic construct
  source 1..75: mol_type = other DNA
tgatgtcatgtcattaccattcatcaaaatggaagcagctgttcaagaaaaaatcgaaactaatgaacagctgct

SEQ ID NO: 397507 - DNA, 75 bp, synthetic construct
  source 1..75: mol_type = other DNA
ctcatcaataataaagcattcattacaatggcccatcttggagctagggcctttggtcagatctcaggtgaaata

SEQ ID NO: 397508 - DNA, 75 bp, synthetic construct
  source 1..75: mol_type = other DNA
gcccaaaagttatcaaatctgacagtctgctttgagcaagaagcggacatttgcctgtcagggtatatgccgctc

SEQ ID NO: 397509 - DNA, 75 bp, synthetic construct
  source 1..75: mol_type = other DNA
aggaaataattaactccaattattttgatgagcgaagtgaccaaaaatgggtcttcgcatcagcatgtcaagccg

SEQ ID NO: 397510 - DNA, 75 bp, synthetic construct
  source 1..75: mol_type = other DNA
aacaattctcctactttgatctgcgcggcaaaccgttcccgctgtggaccagtgaacaaggcgttggtcgcaaca

SEQ ID NO: 397511 - DNA, 75 bp, synthetic construct
  source 1..75: mol_type = other DNA
accacggaagaacaggcggcgcaggccgggatgcaccacgacggcatggcgtggtttagcctgccgcagggcggg

SEQ ID NO: 397512 - DNA, 75 bp, synthetic construct
  source 1..75: mol_type = other DNA
ggcgacccgaccgcgctgcagttcgcctgggatattctggtgatgggcggtcgcaccgatactgacaaaccggaa

SEQ ID NO: 397513 - DNA, 75 bp, synthetic construct
  source 1..75: mol_type = other DNA
cagagcataagacgctatttgacctgactggtcagtggatgaaacaacagattaaagaaaaggcgggcaactcgc

SEQ ID NO: 397514 - DNA, 75 bp, synthetic construct
  source 1..75: mol_type = other DNA
ataattttaaccggttatatgagatcgaatttaaaaataacacgctttttttagatttatataaattacaagatg

SEQ ID NO: 397515 - DNA, 75 bp, synthetic construct
  source 1..75: mol_type = other DNA
tagcccaactggttttatatcagaaaccaaaggtgctgtttgttttgctgatgataaagatattttattatcgat

SEQ ID NO: 397516 - DNA, 75 bp, synthetic construct
  source 1..75: mol_type = other DNA
ccattcgtcgctatctttccacccagttctggaaagatcatatgaagatgtacaaaaagcggccaatctactggc

SEQ ID NO: 397517 - DNA, 75 bp, synthetic construct
  source 1..75: mol_type = other DNA
tcgatataagccagcggtgaggtcaactgagcgaaaaaatggagcattttcatcaggtttttcgaacgattttga

SEQ ID NO: 397518 - DNA, 75 bp, synthetic construct
  source 1..75: mol_type = other DNA
tgctcactacgcgggaattgggggtacttaagctcctgatgcagggtattcgtttcagtaaagctgcatgttatg

SEQ ID NO: 397519 - DNA, 75 bp, synthetic construct
  source 1..75: mol_type = other DNA
caccaatagcctattggctaggccagaatataaatattttcgataatgacaaaatagctaattcatggttctctg

SEQ ID NO: 397520 - DNA, 75 bp, synthetic construct
  source 1..75: mol_type = other DNA
cgagcgccgggcgatcacttccggagagcacaaagctcttctcgatccattctcccctcttacctctgacatgaa

SEQ ID NO: 397521 - DNA, 75 bp, synthetic construct
  source 1..75: mol_type = other DNA
atggatgtaaaaatcacgattttgcaggttgatgttgccaaccttcgcccgaatacctggaacaccaattcggtt

SEQ ID NO: 397522 - DNA, 75 bp, synthetic construct
  source 1..75: mol_type = other DNA
ctcgaaggcacaccggagcagcacaaagcgcaggacgtttacaacatcagacgagatgaattagaaggggcaact

SEQ ID NO: 397523 - DNA, 75 bp, synthetic construct
  source 1..75: mol_type = other DNA
ttgatttcaaacaaccggaggagatggagtttaatcgtgccaggctccgaagggcatttgttcaaatcgggcgtg

SEQ ID NO: 397524 - DNA, 75 bp, synthetic construct
  source 1..75: mol_type = other DNA
ggaaaaacttaacgcagtcaaacagcgttatcaggccggaaaggaactggccggaaatatggcctcagtgggcgc

SEQ ID NO: 397525 - DNA, 75 bp, synthetic construct
  source 1..75: mol_type = other DNA
atgaatcagacagcatttttacacgtcgactttaaacaaccaaaggagctggagtttaatcgtgcccgtctgcgg

SEQ ID NO: 397526 - DNA, 75 bp, synthetic construct
  source 1..75: mol_type = other DNA
attatgctctgtaaacagctggccgttacggatggttaaaggaacagttgtgggaacaactgacacattgcgtga

SEQ ID NO: 397527 - DNA, 75 bp, synthetic construct
  source 1..75: mol_type = other DNA
ctcggtcagcttgatggtatccttcgccggcactcccgtcattttgccatgctttacttttctgaccatggtctg

SEQ ID NO: 397528 - DNA, 75 bp, synthetic construct
  source 1..75: mol_type = other DNA
ctcgaaggcacacctgagcagcacaaagcgcaggacgtttacaacatcagacgagacgaattagaaggagcggct

SEQ ID NO: 397529 - DNA, 75 bp, synthetic construct
  source 1..75: mol_type = other DNA
atgagcaaagaattttacgcaaaactggcagctattcaggagaacttgaatgcgccaaagaatcagtacaactca

SEQ ID NO: 397530 - DNA, 75 bp, synthetic construct
  source 1..75: mol_type = other DNA
agcattttgccgatgacgttatcgcccagcgcggcgtgcggcacgggcatttgcagtgcttgccgaaggaagatt

SEQ ID NO: 397531 - DNA, 75 bp, synthetic construct
  source 1..75: mol_type = other DNA
agataatgaacccgttatggtttttaacggagagaaaaatgtgccggcagacagtctgaaaccgcagcctctgat

SEQ ID NO: 397532 - DNA, 75 bp, synthetic construct
  source 1..75: mol_type = other DNA
taattccagctatttttttttcgtttaaaactcccggggttattagggggctaatattatcactgacagtattat

SEQ ID NO: 397533 - DNA, 75 bp, synthetic construct
  source 1..75: mol_type = other DNA
tgcatcatgttcatttaatgaagatgtaaatattattattggtcgaaatgggaccggtaaaacaacctttatgaa

SEQ ID NO: 397534 - DNA, 75 bp, synthetic construct
  source 1..75: mol_type = other DNA
cctgggaagagtcttcaccgtatgaaagcctcctggtatcactaaatcgtgccgttcgtcagggtggaatgcctg

SEQ ID NO: 397535 - DNA, 75 bp, synthetic construct
  source 1..75: mol_type = other DNA
gtatgtgatcgacgggttaacccagaatcgcactgagttctttcaggacgggaaagcgcggaagattgattttac

SEQ ID NO: 397536 - DNA, 75 bp, synthetic construct
  source 1..75: mol_type = other DNA
ccggctgatatgacgcgctgggctgaaattaaaaagaatctgcgcttcaggatgcggcaggaagccgggacgaat

SEQ ID NO: 397537 - DNA, 75 bp, synthetic construct
  source 1..75: mol_type = other DNA
taaagaataaaagtgaaagtggctttgatattcgttcgatcgaagcattgagaaaaacacaaaaaataatcaaaa

SEQ ID NO: 397538 - DNA, 75 bp, synthetic construct
  source 1..75: mol_type = other DNA
aattatcgccgctacgcattcaccagaagtggcctctaaatatcgaaatgcaatctttgatatggagaaattggt

SEQ ID NO: 397539 - DNA, 75 bp, synthetic construct
  source 1..75: mol_type = other DNA
ctgataacccgcagcaacgcctgatcaaccaggcggtggagatcgtgcgtaaaggcggggtgattgtttatccaa

SEQ ID NO: 397540 - DNA, 75 bp, synthetic construct
  source 1..75: mol_type = other DNA
aaaaacctgttcctccatggctgtggcgaaaagaaaataaaaatgacaacaaacagtgcataaatattgaataca

SEQ ID NO: 397541 - DNA, 75 bp, synthetic construct
  source 1..75: mol_type = other DNA
tttctcctaaccagaaaaacgggcaggggaatcgccgtttccctgaaggcgcaccctattatccggcatttctgt

SEQ ID NO: 397542 - DNA, 75 bp, synthetic construct
  source 1..75: mol_type = other DNA
cggaagaaattaaagaccgtctggaaaaacaggtggatttgattattcacggcggctatctcgggcagaaaccaa

SEQ ID NO: 397543 - DNA, 75 bp, synthetic construct
  source 1..75: mol_type = other DNA
tcgcgtttcgcctgatgaaaaacaacacgccaggtaactacaccttcatcctgaagggaacgaaagaggtgccgc

SEQ ID NO: 397544 - DNA, 75 bp, synthetic construct
  source 1..75: mol_type = other DNA
ccagcgctgaaatgtgcggtaactcgcgtcagcaggccatgacctggcttatcgatctggaaatgctgaccgcgc

SEQ ID NO: 397545 - DNA, 75 bp, synthetic construct
  source 1..75: mol_type = other DNA
cagcagcaaagcaatcaaaaccatcacctacacctgaacaggttctaaaagcattcactgacgcagcaatgcaga

SEQ ID NO: 397546 - DNA, 75 bp, synthetic construct
  source 1..75: mol_type = other DNA
caaggtaagcgaattggcatttatgaacattcgagtgccggacgtgatatttatggtcaactctttgcttctctg

SEQ ID NO: 397547 - DNA, 75 bp, synthetic construct
  source 1..75: mol_type = other DNA
gtggcatcatcggcatgtcgaccaccatgcaactgattgatgtctacccggacgcccgcattgcgttgctggaaa

SEQ ID NO: 397548 - DNA, 75 bp, synthetic construct
  source 1..75: mol_type = other DNA
gagcataaaaacggcgtggtcgtccgtacccgtcagggtagcgaatacgaagcgtcaacgctgattagctgttcc

SEQ ID NO: 397549 - DNA, 75 bp, synthetic construct
  source 1..75: mol_type = other DNA
gatctcggtggcggaagttctggagccgcaggatcgggaattactgcgtagcgtgttcaacaatgtgggggaaat

SEQ ID NO: 397550 - DNA, 75 bp, synthetic construct
  source 1..75: mol_type = other DNA
ccggcgatattcagaccgtttttgccgatgcctgtagtcgtgtgctggcaatgacactgccgctaacagtcgatt

SEQ ID NO: 397551 - DNA, 75 bp, synthetic construct
  source 1..75: mol_type = other DNA
cggaaatgcgccagagctacggtgttatgctgaagctaactcctttgagcaagcccagcaaatcgttagtcaggt

SEQ ID NO: 397552 - DNA, 75 bp, synthetic construct
  source 1..75: mol_type = other DNA
cagtccgtcagcaggaaaatcagtgcccgtcatttcgcaggcatttttcagtggctgaccggtattcgtaccgaa

SEQ ID NO: 397553 - DNA, 75 bp, synthetic construct
  source 1..75: mol_type = other DNA
tatccgctggttactacgtcctttgcccggcgatatgagtgatttctggctcctgactgcacgggagttgagcgt

SEQ ID NO: 397554 - DNA, 75 bp, synthetic construct
  source 1..75: mol_type = other DNA
tctatcaaccggttctgtcggcaatgttacctgcatcagaacagaagaggagttacgcaataaattgcggcacag

SEQ ID NO: 397555 - DNA, 75 bp, synthetic construct
  source 1..75: mol_type = other DNA
tcgccgttgctgtggcggctgtttaccttagtgcgtcactatatatcactgtggcgattgttaagctgattactg

SEQ ID NO: 397556 - DNA, 75 bp, synthetic construct
  source 1..75: mol_type = other DNA
ttatccgcagcatggttatgcgtaccaagcacgctgttaccgaagtatctccgatggttaaagcgaaagacgagc

SEQ ID NO: 397557 - DNA, 75 bp, synthetic construct
  source 1..75: mol_type = other DNA
caagaaaggcagctttgcttcccgtaaaacggatgacatgctgttgttacaggaaacagaacgtgcactggcgga

SEQ ID NO: 397558 - DNA, 75 bp, synthetic construct
  source 1..75: mol_type = other DNA
ttggtggcaagcgaacagccatgcccctgtggctgcgcgacaatggcgattgcgcgtatcgaagggcggcaggat

SEQ ID NO: 397559 - DNA, 75 bp, synthetic construct
  source 1..75: mol_type = other DNA
tcccctgattattaccgccagtgacatcacgtctcatcagtccgtcagcagaaaaatcagtgcccgtcatttcgc

SEQ ID NO: 397560 - DNA, 75 bp, synthetic construct
  source 1..75: mol_type = other DNA
aggatacagcacatggtggatatccaatcagggaaaactgggagagcatgacacacgcatctctgttattgcttc

SEQ ID NO: 397561 - DNA, 75 bp, synthetic construct
  source 1..75: mol_type = other DNA
aacctcttaagcaaaagactaaatattcaagaatatacatatataggttttggtggtccgatgcttgaagatttt

SEQ ID NO: 397562 - DNA, 75 bp, synthetic construct
  source 1..75: mol_type = other DNA
tgccggtgtggggattgctgctgcgggaacgatggccggtgttaagctgctgatgcccggttatgagtttgcgta

SEQ ID NO: 397563 - DNA, 75 bp, synthetic construct
  source 1..75: mol_type = other DNA
agtgtatttcgctcggttgggatagcagccgccagacgctggatgcgcaggtaatcagcggcgaaggtgaagata

SEQ ID NO: 397564 - DNA, 75 bp, synthetic construct
  source 1..75: mol_type = other DNA
tgttattgtgaggctgacagtgagttttgtgctcaaaaatatgtggagagaattttaagttcggttgcttgcctt

SEQ ID NO: 397565 - DNA, 75 bp, synthetic construct
  source 1..75: mol_type = other DNA
atatcccttttgatcgtaatggcttaaaattctacagacctgatggtgaaatcactaaagaggatgagctcgcaa

SEQ ID NO: 397566 - DNA, 75 bp, synthetic construct
  source 1..75: mol_type = other DNA
aaagttgctttagccattgacaaccgcccgagtagttatgaaattgctcaggcatgcgcgttcgctatcaaacaa

SEQ ID NO: 397567 - DNA, 75 bp, synthetic construct
  source 1..75: mol_type = other DNA
gacgcgcgcattgcgttgctggagaaagagtctggcccggcctgtcaccagacgggccacaacagcggcgtgatc

SEQ ID NO: 397568 - DNA, 75 bp, synthetic construct
  source 1..75: mol_type = other DNA
acctgctcttgctttaaaagctaagaatgacagtgtgccgtgtataatgattaccggaagccatattccctttga

SEQ ID NO: 397569 - DNA, 75 bp, synthetic construct
  source 1..75: mol_type = other DNA
ttctgcagcatgagtcattatttaatataactttaccactaccatctttatccgtatctcaaattgcttctaaaa

SEQ ID NO: 397570 - DNA, 75 bp, synthetic construct
  source 1..75: mol_type = other DNA
cggtagctatggcagtggtgtcttttggtgtaaatgctgctccaactattccacagggccagggagaagtaactt

SEQ ID NO: 397571 - DNA, 75 bp, synthetic construct
  source 1..75: mol_type = other DNA
aaacaggaaattgattttggccagatctctaaatccttcctgcaggagggcggggaaagccagccaaaagatctg

SEQ ID NO: 397572 - DNA, 75 bp, synthetic construct
  source 1..75: mol_type = other DNA
ctgcgcttctttacggtctatggtccctggggccgtccggacatggcgttattcaaattcacgaaagcgatgctg

SEQ ID NO: 397573 - DNA, 75 bp, synthetic construct
  source 1..75: mol_type = other DNA
gccccggcgctggtttgtattggtatcggccttgcgtgtgtaaatattgctgagttaaaccacggtctccccaat

SEQ ID NO: 397574 - DNA, 75 bp, synthetic construct
  source 1..75: mol_type = other DNA
cggtagctatggcagtggtgtcttttggtgtaaatgctgctgcaactgttcctcaggggcagggtaaggtaactt

SEQ ID NO: 397575 - DNA, 75 bp, synthetic construct
  source 1..75: mol_type = other DNA
attttactgctgcggtcagaaaggatgatagtggcaaccctgtaacagaaggtgctttctcagcagttgcgaatt

SEQ ID NO: 397576 - DNA, 75 bp, synthetic construct
  source 1..75: mol_type = other DNA
atgaatactaatgacactgaactactccgcttattcgaaacactaaccactgagcaaaagattgatatcgcaaaa

SEQ ID NO: 397577 - DNA, 75 bp, synthetic construct
  source 1..75: mol_type = other DNA
tactgcggacacctcgattttgtgtggcgctcgataacgcaacgctctggcagtcgccatttgtggggggaatgc

SEQ ID NO: 397578 - DNA, 75 bp, synthetic construct
  source 1..75: mol_type = other DNA
tctaagtgtcctgaagagtcaattgattacgctgtaatggaaaaaacaaaagacgcaattgttattccaatggat

SEQ ID NO: 397579 - DNA, 75 bp, synthetic construct
  source 1..75: mol_type = other DNA
tggagttagccgatcgtgaagccatggcagcgctgtttgcctctgagaagtttgagcgcgtgatacatctggccg

SEQ ID NO: 397580 - DNA, 75 bp, synthetic construct
  source 1..75: mol_type = other DNA
ctgacgttacgccctgcgccggccaacaccggggtcatctatcgtcgcactgacttgaatccaccggtagatttc

SEQ ID NO: 397581 - DNA, 75 bp, synthetic construct
  source 1..75: mol_type = other DNA
acttgatgagaaacgtaaagagcatttgagtaatgctaaaagcctcaatgctgatattgaacaatatccagagta

SEQ ID NO: 397582 - DNA, 75 bp, synthetic construct
  source 1..75: mol_type = other DNA
ctgccggtggtgattcctgtcctcgccaatctgctttatagccagcgtgacggtaaactcgcgtggggaaaactc

SEQ ID NO: 397583 - DNA, 75 bp, synthetic construct
  source 1..75: mol_type = other DNA
accagcccggatacgccgaaggctaactattggggccatatgccggaaacctttaccagcagcgcgggcgtcgcg

SEQ ID NO: 397584 - DNA, 75 bp, synthetic construct
  source 1..75: mol_type = other DNA
tgtcgatggttcaatcaccttaaccgtaaccacccaagattgtgaaggtaatattgcgagcaatatcccttttgt

SEQ ID NO: 397585 - DNA, 75 bp, synthetic construct
  source 1..75: mol_type = other DNA
attaaccacgttatcgacaagctggggcggtcatgctgtagacggctggccagtattaaaagtctatgacaccag

SEQ ID NO: 397586 - DNA, 75 bp, synthetic construct
  source 1..75: mol_type = other DNA
tgttccaccgctatttgcggcaaaaatcgcacaatatgtgtatggagttttgcagggacggtataagaataacat

SEQ ID NO: 397587 - DNA, 75 bp, synthetic construct
  source 1..75: mol_type = other DNA
gatgtggtcataggtggccccccgtgtcagggattcagtttattgaataagaatcgttatggtgatcaccgaaga

SEQ ID NO: 397588 - DNA, 75 bp, synthetic construct
  source 1..75: mol_type = other DNA
aagactgggcgttattcgatcaaaataccagtatgcaggcagaatgcggcacggggcatataccgcgtgagatct

SEQ ID NO: 397589 - DNA, 75 bp, synthetic construct
  source 1..75: mol_type = other DNA
gggcatatggctgaaacggcgacaggcgatgacggtctcatttataaaaggccattgctgagagacgagattagc

SEQ ID NO: 397590 - DNA, 75 bp, synthetic construct
  source 1..75: mol_type = other DNA
atcgcagcataattataaagccgtcgatctgggcaatggaaccagtacctcaatatccgcttccgagaggaagtt

SEQ ID NO: 397591 - DNA, 75 bp, synthetic construct
  source 1..75: mol_type = other DNA
tgagttaaaccacggactccccgattttgactgggcacgttatacctctggcatcgtgctggcgttagtttccgt

SEQ ID NO: 397592 - DNA, 75 bp, synthetic construct
  source 1..75: mol_type = other DNA
ctatatctcgaatactgtcgcagatatgttcactcaaacctttaagtttgatgtcgtttcgttgaaaacgggaga

SEQ ID NO: 397593 - DNA, 75 bp, synthetic construct
  source 1..75: mol_type = other DNA
gctgaaaaaaggcgaaacgctccaggttaaggtaacggtgaaggatgcccagggcaatgcattgtcggatatgcc

SEQ ID NO: 397594 - DNA, 75 bp, synthetic construct
  source 1..75: mol_type = other DNA
ccgacggcgcaaaaagattaccttagtgcggtacaacaagagccacactcctccgtgaacctgggcacaggtaac

SEQ ID NO: 397595 - DNA, 75 bp, synthetic construct
  source 1..75: mol_type = other DNA
gttgcgtatactcagccttatggtgcttttcgggctgggttgatgcatatccatctttgtctaccgccaaacaag

SEQ ID NO: 397596 - DNA, 75 bp, synthetic construct
  source 1..75: mol_type = other DNA
ggaacgcacgcgctatctgctggaaaactgtcgtcccgacctggtgatcagccaggaagatgcgcaggttgttgg

SEQ ID NO: 397597 - DNA, 75 bp, synthetic construct
  source 1..75: mol_type = other DNA
atgctactgcgacgttaaacttgccgcaggagccttcactggtggatgccgagctggactggcaggaaaatagcg

SEQ ID NO: 397598 - DNA, 75 bp, synthetic construct
  source 1..75: mol_type = other DNA
tttctccctgacgctggccgctggcagtggcgctactggggaaaagggagttttacaccgatgaatgccacctgg

SEQ ID NO: 397599 - DNA, 75 bp, synthetic construct
  source 1..75: mol_type = other DNA
acgacgcggttacgccctctcgtttgccctggcaacgaccactgagtgaaataaagtgtccagaatggcgacgtg

SEQ ID NO: 397600 - DNA, 75 bp, synthetic construct
  source 1..75: mol_type = other DNA
cacgcgcaagaaacaatggcacaacttcatgaacgggtttcgcacggtaactatcctggagtcagcattatgcgc

SEQ ID NO: 397601 - DNA, 75 bp, synthetic construct
  source 1..75: mol_type = other DNA
taccggagatagaggatgtctttcgccaacatcccgccattaacgatatcatcgtggtggactacgcaacggatg

SEQ ID NO: 397602 - DNA, 75 bp, synthetic construct
  source 1..75: mol_type = other DNA
tccccccaaaacgcgcgcatttggtcgttttactcacgcaggcagctacaccaccacgattactcgccctactct

SEQ ID NO: 397603 - DNA, 75 bp, synthetic construct
  source 1..75: mol_type = other DNA
ctttcgttcgtatctcaatgaacaactaacgttactgtatcaagattatggtgcgcacatctccgtgcaaccctc

SEQ ID NO: 397604 - DNA, 75 bp, synthetic construct
  source 1..75: mol_type = other DNA
ggcagtgctacgcccggatgtctggttgatgattggtcactgtggcggattacgtgaaagtcaggccattggcga

SEQ ID NO: 397605 - DNA, 75 bp, synthetic construct
  source 1..75: mol_type = other DNA
tgccgttgcggacgaaaatgccagctgtcagccggaacatctgaagggccgttcagcgggcgccggcagggcgtg

SEQ ID NO: 397606 - DNA, 75 bp, synthetic construct
  source 1..75: mol_type = other DNA
cagcttgtacaagtgcttgcgcattttgttcgaatgcctgttgccgacgtgaataaatggtgccgattattcggt

SEQ ID NO: 397607 - DNA, 75 bp, synthetic construct
  source 1..75: mol_type = other DNA
aagaggccgctgccgcatcactgatgaatggtgacggattgctggaactgttattaggtgtggcaaaggagctaa

SEQ ID NO: 397608 - DNA, 75 bp, synthetic construct
  source 1..75: mol_type = other DNA
tatgcgtcgtattcagttaattgttgaccgcgagtcgctgaatattccacttcgcgaagcgctgtcgtataccca

SEQ ID NO: 397609 - DNA, 75 bp, synthetic construct
  source 1..75: mol_type = other DNA
ttgtcttcttctgcaagaaatttatttaagattctctcttctttcttgatccagaaaaaccctcatcatgaagaa

SEQ ID NO: 397610 - DNA, 75 bp, synthetic construct
  source 1..75: mol_type = other DNA
ccgtattgtcaaaccggtcaacatttatgaatgtgaactcagggacaatgtgtttgtcggccccttcgttgagat

SEQ ID NO: 397611 - DNA, 75 bp, synthetic construct
  source 1..75: mol_type = other DNA
ttgctgtacacctttttgttacgccagcaaatgccgccgctaatgacgctgagcggtatcgcgctgttagtggtt

SEQ ID NO: 397612 - DNA, 75 bp, synthetic construct
  source 1..75: mol_type = other DNA
ttggcggcggcgatgtgtcgttacaggatatccttcgccaggtgtctcaggaactggaaaacgaaggtatgcaag

SEQ ID NO: 397613 - DNA, 75 bp, synthetic construct
  source 1..75: mol_type = other DNA
aagacaagtgacggtgaattacatcgataagcttaaaaatgatcctgaatttctgacatttagtactgataaaac

SEQ ID NO: 397614 - DNA, 75 bp, synthetic construct
  source 1..75: mol_type = other DNA
gctgccgagtgtgaggactttgtcttttcacatcgagttaaagcatttatctgccttgatgacgacgaatcatta

SEQ ID NO: 397615 - DNA, 75 bp, synthetic construct
  source 1..75: mol_type = other DNA
ttatttgtgagaacgtaacactgggagagaactgcttcattggtcataacgtgacgttcgccaacgatctgtttc

SEQ ID NO: 397616 - DNA, 75 bp, synthetic construct
  source 1..75: mol_type = other DNA
tcctggcgttggaccacttattgcgacggcagcggtggccaccatgggggaagcatcagcgtttaaatcggggcg

SEQ ID NO: 397617 - DNA, 75 bp, synthetic construct
  source 1..75: mol_type = other DNA
ttcaaaataatggcggaacaatcgttataaacaaagactggaaaatagatgaaagtctttatttgagatccaaag

SEQ ID NO: 397618 - DNA, 75 bp, synthetic construct
  source 1..75: mol_type = other DNA
ggcgacggcgcaggcgctggtcacgctgccggtttctctcatcggctatctcgtcgcctgttactggctgaatac

SEQ ID NO: 397619 - DNA, 75 bp, synthetic construct
  source 1..75: mol_type = other DNA
tctctcatcggctatctcgtcgcttgttactggctgaatacgcaaacgccggacttctccctaccttttggcccc

SEQ ID NO: 397620 - DNA, 75 bp, synthetic construct
  source 1..75: mol_type = other DNA
gcaaacgccggacttctccctaccttttggcccccgtccgctggtgtttattagtctgatggttgcgatagccgt

SEQ ID NO: 397621 - DNA, 75 bp, synthetic construct
  source 1..75: mol_type = other DNA
aaatcgttcttgaggctgcggaccccgcgaaatttgacagtacgaataatgttgtcaaagcgaaaaaaggggaag

SEQ ID NO: 397622 - DNA, 75 bp, synthetic construct
  source 1..75: mol_type = other DNA
tctcagacgtgaaggctcgaagaaccgtcaaaatgccgagatgataaataagtcgattacggtaattaacgcggc

SEQ ID NO: 397623 - DNA, 75 bp, synthetic construct
  source 1..75: mol_type = other DNA
caaaaacgtcgctgaccgccgcgctctattcagacacaacgaaaaaagcgaccctcgataccatttttaccgttg

SEQ ID NO: 397624 - DNA, 75 bp, synthetic construct
  source 1..75: mol_type = other DNA
ccagcgtttgttacccaacaaacccgttgaagtcattgattcactgttatatggcaaagtcgatggtttaggcgt

SEQ ID NO: 397625 - DNA, 75 bp, synthetic construct
  source 1..75: mol_type = other DNA
gcgggctaggccattggttaaatgccagacgtgaaccgaacctagaggttatagcgaagatttttaacatattga

SEQ ID NO: 397626 - DNA, 75 bp, synthetic construct
  source 1..75: mol_type = other DNA
agcaaaagatccggaaaccacggcgcagtggattgagcgttgccttgctggcagcgaaccgattcccgaatcgct

SEQ ID NO: 397627 - DNA, 75 bp, synthetic construct
  source 1..75: mol_type = other DNA
cactcaggcggcgaaagtgaaaaaaggcgaagccatgtccgttaccgtgacggtgaaagacagcgccgggaatac

SEQ ID NO: 397628 - DNA, 75 bp, synthetic construct
  source 1..75: mol_type = other DNA
aattatttctgttaacggtgcggcggcccactgcgccagcgtcggcgatattgtcatcatcgccagcttcgttac

SEQ ID NO: 397629 - DNA, 75 bp, synthetic construct
  source 1..75: mol_type = other DNA
cccaacgtcgcctattttgaaggcgacaatgaaatgaaacgtaccgcgaaagcgattccggtacaggttgcctga

SEQ ID NO: 397630 - DNA, 75 bp, synthetic construct
  source 1..75: mol_type = other DNA
acgataacgttcaacgttacccaaaataacaccgttggtctggtaacgccgtttacagcttcattggcgcgaaat

SEQ ID NO: 397631 - DNA, 75 bp, synthetic construct
  source 1..75: mol_type = other DNA
cgacgcttcccgttgtctttacggtgcttaccagcccggattcgccaaaagccaaattctgggggcatatgcctg

SEQ ID NO: 397632 - DNA, 75 bp, synthetic construct
  source 1..75: mol_type = other DNA
cgaaaacgtcgctgaccgctaggctctattcagatacaacgaaaaaagcgaccctcgataccatttttaccgttg

SEQ ID NO: 397633 - DNA, 75 bp, synthetic construct
  source 1..75: mol_type = other DNA
tttgttctgcgggcatgtcaacttccttactggtatcaaagatgcgtgcgcaggctgaaaaatatgaagtaccgg

SEQ ID NO: 397634 - DNA, 75 bp, synthetic construct
  source 1..75: mol_type = other DNA
gaaaatcaagactatattttgctttccaatttgggaaagcaaacatctggtagaggcggtcacaaccgcaaggac

SEQ ID NO: 397635 - DNA, 75 bp, synthetic construct
  source 1..75: mol_type = other DNA
cattaaaatattgctgatgagtcgcggtggcgaccttggcatgatgatcatgatgctgtgtggttttgccgctta

SEQ ID NO: 397636 - DNA, 75 bp, synthetic construct
  source 1..75: mol_type = other DNA
cgtaaaacgcacctcggtgccggtgcttgttggtttggtgattgttatcgttgctacagagctgatggtgccagg

SEQ ID NO: 397637 - DNA, 75 bp, synthetic construct
  source 1..75: mol_type = other DNA
aactttttggctctgtgcgtcaggcgctgcaattagtgcaaaacgaattaccaggttcaggttttgagccggcca

SEQ ID NO: 397638 - DNA, 75 bp, synthetic construct
  source 1..75: mol_type = other DNA
ttaccgctgccgttaaaacaaaacagcagaacctgttatctctcctggcatgaagctgccggcgcgataaaggcc

SEQ ID NO: 397639 - DNA, 75 bp, synthetic construct
  source 1..75: mol_type = other DNA
ccagtatcgcgtatcagggcatggcaatgatgagcgtacttagcgctgatgaatcccctaatgatttttatcaaa

SEQ ID NO: 397640 - DNA, 75 bp, synthetic construct
  source 1..75: mol_type = other DNA
cgcatgacgattatctcgaatatcagcaacttgaagaggctgaaacccttgccagtcttgacgaactgctgaacg

SEQ ID NO: 397641 - DNA, 75 bp, synthetic construct
  source 1..75: mol_type = other DNA
aaagcgttgattctggtgccatcatcatcaccggtgaaagcgcgaaaacccgcaacgctcgcccggcggtgatgg

SEQ ID NO: 397642 - DNA, 75 bp, synthetic construct
  source 1..75: mol_type = other DNA
cagtttccggcgcaaaccgtgcgcgccacggtgattggcgcgggtgcacataccctttcgctctctggcagcaca

SEQ ID NO: 397643 - DNA, 75 bp, synthetic construct
  source 1..75: mol_type = other DNA
ctggcaacgttatctggataaaaaagagcacatctctcatgaaatgttagatgtcagcgaaatcaccaccactgc

SEQ ID NO: 397644 - DNA, 75 bp, synthetic construct
  source 1..75: mol_type = other DNA
taacgtggtgatgctgctggttgccgctggggtattcgctcaggggcttagcaccatcggctttattcaaagtct

SEQ ID NO: 397645 - DNA, 75 bp, synthetic construct
  source 1..75: mol_type = other DNA
ctgccaatctcaattgctgcaattatcggcatggcgattgcccactttttctggcagcgctatctggacaacaaa

SEQ ID NO: 397646 - DNA, 75 bp, synthetic construct
  source 1..75: mol_type = other DNA
tggcgacccaacgttgcttattttgaaggcgacaatgaaatgaaacgtaccgcgaaagcgattccagttcaggtg

SEQ ID NO: 397647 - DNA, 75 bp, synthetic construct
  source 1..75: mol_type = other DNA
ggcacatcgcagccgtcgatggtttatacgggtacgacagatgcacaaggcgtggcgacggtagagattgagcaa

SEQ ID NO: 397648 - DNA, 75 bp, synthetic construct
  source 1..75: mol_type = other DNA
aagcccagtccacgctgggaacatgagatagctacagctttgggtgtgaagccgtctgagatttggccggagcgg

SEQ ID NO: 397649 - DNA, 75 bp, synthetic construct
  source 1..75: mol_type = other DNA
tgacaaagaataccaggccgtattaagcgtggctcctgtgcctgtttttatcgcgatggaaattgcatatctgtg

SEQ ID NO: 397650 - DNA, 75 bp, synthetic construct
  source 1..75: mol_type = other DNA
cttttgagaatggtgaagattgggcaagattcagtgtggttcagtcaaataacaccgatatggatggatgcggtg

SEQ ID NO: 397651 - DNA, 75 bp, synthetic construct
  source 1..75: mol_type = other DNA
ggcgacgccgttaaccgtaacgctggcgcgtgatacgacgaaagccgccacgctggatgttatctatacggtgat

SEQ ID NO: 397652 - DNA, 75 bp, synthetic construct
  source 1..75: mol_type = other DNA
tggatacaatggacgatttgactgtacaaccctcatccggtgcggcagtcacgttggctgatagcgggaatacaa

SEQ ID NO: 397653 - DNA, 75 bp, synthetic construct
  source 1..75: mol_type = other DNA
gtctcagtcgtgtatacgggtggggatatgagcgtggatatgtgaagaataacccatgcaaaggagtcaggaaat

SEQ ID NO: 397654 - DNA, 75 bp, synthetic construct
  source 1..75: mol_type = other DNA
atatgagcgtgggtatgtgaaaaataatccatgcaaaggagtcagaaaattcacgcttaaagcccgtactgttta

SEQ ID NO: 397655 - DNA, 75 bp, synthetic construct
  source 1..75: mol_type = other DNA
ggcagcagtcgcgacaaacaaattttcagtggacacaaaacagaaaatcaggtgttgatttacgatcgtaaaaca

SEQ ID NO: 397656 - DNA, 75 bp, synthetic construct
  source 1..75: mol_type = other DNA
atatcccaataaatatagttatgtatggaaaccaacatccagagaatctgtaaccttaactgcaatcaaggatgg

SEQ ID NO: 397657 - DNA, 75 bp, synthetic construct
  source 1..75: mol_type = other DNA
tttcggcatttccggtccttggcggtacgggaatacacatcagcgatctcaaactggcaatggggcttaacgcat

SEQ ID NO: 397658 - DNA, 75 bp, synthetic construct
  source 1..75: mol_type = other DNA
ccgtaacgtgtccgataatggcatgggaaaagcttactgaagccagacttgaagaagttatggcttttttaatgg

SEQ ID NO: 397659 - DNA, 75 bp, synthetic construct
  source 1..75: mol_type = other DNA
gcatcgtccagttatacggcggtagtgatgtgcctggtggaaccgcataccgttccggcgacgatagcgatcact

SEQ ID NO: 397660 - DNA, 75 bp, synthetic construct
  source 1..75: mol_type = other DNA
ccaactatattccgactcaggccggtctgacgtcactgtttgctaataatgcgggcaacaccatgaaaaccgtgc

SEQ ID NO: 397661 - DNA, 75 bp, synthetic construct
  source 1..75: mol_type = other DNA
caaagtgggtgacaccattgtgatgaccgtgcgtacgattaactcgctcaataatatccctgtaccctttactgc

SEQ ID NO: 397662 - DNA, 75 bp, synthetic construct
  source 1..75: mol_type = other DNA
aaatcattatgcttctgggcatgttggcagcgtttatgctgtctgactttgcacgggcaggggcggaatggcaga

SEQ ID NO: 397663 - DNA, 75 bp, synthetic construct
  source 1..75: mol_type = other DNA
tcccggtaacgcgattggcactgagtatggctggcccaccgcacaacagagctacctaagcgcggtggagcaaga

SEQ ID NO: 397664 - DNA, 75 bp, synthetic construct
  source 1..75: mol_type = other DNA
gccgttgatgactgccagccagattacgctggaagcctcagaccccgggcagtttgtcagcattgacagcacact

SEQ ID NO: 397665 - DNA, 75 bp, synthetic construct
  source 1..75: mol_type = other DNA
tgaatggcacgcaatacggcacatcgcagccgtcgatggtttatacgggtacgacagatgcacaaggcgtggcga

SEQ ID NO: 397666 - DNA, 75 bp, synthetic construct
  source 1..75: mol_type = other DNA
gccacgccggatacgccgctcaatccacagcccatcgccaaccgcagcttttgcgcgcaaggtctggccgggcgt

SEQ ID NO: 397667 - DNA, 75 bp, synthetic construct
  source 1..75: mol_type = other DNA
gtttctctggagcctgcggacgccacgcaatttgttaaggtagacgataccctgagcgccattaaggtgaaaaaa

SEQ ID NO: 397668 - DNA, 75 bp, synthetic construct
  source 1..75: mol_type = other DNA
aaacgctcggtgcggcaaaaaccaccgttggcgacaccctcacgctgaccgtcaccaccaaagactgtcagggca

SEQ ID NO: 397669 - DNA, 75 bp, synthetic construct
  source 1..75: mol_type = other DNA
aacgggagcgtcgacagctattccggctttaagccgaattacctctcctgttcgggtaatgagatggtagcgaat

SEQ ID NO: 397670 - DNA, 75 bp, synthetic construct
  source 1..75: mol_type = other DNA
tgccggacacctttaccagttcggcgggcgtcaccttcaaacgacccctgctgaaaaccgaaaccagctcaggct

SEQ ID NO: 397671 - DNA, 75 bp, synthetic construct
  source 1..75: mol_type = other DNA
aagagctgccgtcgacatccggggtaagtcagataacgaatagcaatgaagcctggccagtgtttaacgcaacgc

SEQ ID NO: 397672 - DNA, 75 bp, synthetic construct
  source 1..75: mol_type = other DNA
catgcccagtggcgttgggatctggcgatcgcttcccacggcattcatatgcacgcaccggaagaaggtctgagg

SEQ ID NO: 397673 - DNA, 75 bp, synthetic construct
  source 1..75: mol_type = other DNA
tccagaaagacggcgaagatggctacttccacggtaaatgggcgcgcggcggcccggaaatcgtcaacaacttag

SEQ ID NO: 397674 - DNA, 75 bp, synthetic construct
  source 1..75: mol_type = other DNA
ccgcggatgctcgtaccaaactggcgcgtctgttagcgactaaaggtatcacccatgaaatccagatcccggata

SEQ ID NO: 397675 - DNA, 75 bp, synthetic construct
  source 1..75: mol_type = other DNA
aagtgccgcatctggcagcgttatgaaaatagcgcagtttgcttcgcgctatcaatatgatcccgaactggctcg

SEQ ID NO: 397676 - DNA, 75 bp, synthetic construct
  source 1..75: mol_type = other DNA
gagcggctctcgaaaaatctgagcctccggttattatcgcgacttcaacgaataaccaggctgtaacgaacatta

SEQ ID NO: 397677 - DNA, 75 bp, synthetic construct
  source 1..75: mol_type = other DNA
cgcactggcggaagatccacgtctggtgatcctgtgggcgggatatcccttctcacgcgattacaacaagccgcg

SEQ ID NO: 397678 - DNA, 75 bp, synthetic construct
  source 1..75: mol_type = other DNA
gctgttcgagtccgagtttgtgctggtagccagtaagtcccgaacatgcaccggcaccaccacgctggagtcgtt

SEQ ID NO: 397679 - DNA, 75 bp, synthetic construct
  source 1..75: mol_type = other DNA
ttacctttatgtccgggatgatcaacaaattcaaagaggtgttcccgaaagcgcaggtctcaatgtatgaagcgc

SEQ ID NO: 397680 - DNA, 75 bp, synthetic construct
  source 1..75: mol_type = other DNA
actgtaatacgctctgctatcacggtaagttgttgcctaaaagagggcgtgaaaatagcaatttaatgcccgcaa

SEQ ID NO: 397681 - DNA, 75 bp, synthetic construct
  source 1..75: mol_type = other DNA
ttttgataaaaatcattaggggattcatcagcgctgagcacggttatattgttaaaacggcgcaatctggtggtg

SEQ ID NO: 397682 - DNA, 75 bp, synthetic construct
  source 1..75: mol_type = other DNA
cgattgttatattctcgccagtctattcaaaacatgaagatggcgggtttattgatagcgataacagcatgctga

SEQ ID NO: 397683 - DNA, 75 bp, synthetic construct
  source 1..75: mol_type = other DNA
gatgaactggctgatacgcagattcgcttccctgcatttttactgacgactcactactgggaagtgaagtggttt

SEQ ID NO: 397684 - DNA, 75 bp, synthetic construct
  source 1..75: mol_type = other DNA
caggtgtttgcgccacatcagtacgtaagtttaaccaactggcaacaaaaatcgacaacactgttgttctgtgca

SEQ ID NO: 397685 - DNA, 75 bp, synthetic construct
  source 1..75: mol_type = other DNA
cagtttggcgtgcgttccggcgctaaatcaggtcttgaggcgaacctggacattactgaggacggtatttccatt

SEQ ID NO: 397686 - DNA, 75 bp, synthetic construct
  source 1..75: mol_type = other DNA
ttcaaaacaaacagcgttccccagggcgtccgcgaccgggcattcgaagaatgggagcagatcatcatagataat

SEQ ID NO: 397687 - DNA, 75 bp, synthetic construct
  source 1..75: mol_type = other DNA
gaggtgcgcagggaagggggaagtaaagctctgcgcatgtaccgtccggacgggaaatggcggacggtcgtcgat

SEQ ID NO: 397688 - DNA, 75 bp, synthetic construct
  source 1..75: mol_type = other DNA
tcaggtatcgacttattattactggaaccaggaaaaacgcaccgcctgttttttaatattcacgggcagcacaat

SEQ ID NO: 397689 - DNA, 75 bp, synthetic construct
  source 1..75: mol_type = other DNA
tcagggactggcagttgaacctatgagttgcccgcctaacgcctttaattcaggtatcgacttattattactgga

SEQ ID NO: 397690 - DNA, 75 bp, synthetic construct
  source 1..75: mol_type = other DNA
ttctcccgtggttaggagggaagcgtcgtctggcaaaacatattctgccgttatttcctgagcacactctgtatg

SEQ ID NO: 397691 - DNA, 75 bp, synthetic construct
  source 1..75: mol_type = other DNA
ctgacggaagcatggtggtataccgagacaaaaacgcctggtaactggctaatcggcaacgtgtattcagtgctt

SEQ ID NO: 397692 - DNA, 75 bp, synthetic construct
  source 1..75: mol_type = other DNA
ggaactgttcgcccgtgagcagagcacgctttcggcacgtaccggctttgagtttgtgctggcaggtgtggtgga

SEQ ID NO: 397693 - DNA, 75 bp, synthetic construct
  source 1..75: mol_type = other DNA
tgacaatgtaatttttagccaactggtagatgaaatcactaccgagccgaattacgaagcagtactgactgcact

SEQ ID NO: 397694 - DNA, 75 bp, synthetic construct
  source 1..75: mol_type = other DNA
actttaaaattattagatataaatcgattaaattctgacgtatccgctccactacctgtaagttgtaatgcgaaa

SEQ ID NO: 397695 - DNA, 75 bp, synthetic construct
  source 1..75: mol_type = other DNA
tgctgcaattttgctacacctcagaagtggccgacagtgcgctgaaaattctcgacgaagcgggattacctggcg

SEQ ID NO: 397696 - DNA, 75 bp, synthetic construct
  source 1..75: mol_type = other DNA
tttaacccgcgaacaggccgcacagatttacctgcgtgattactggctgcctgccggatgtgaccagtggcctga

SEQ ID NO: 397697 - DNA, 75 bp, synthetic construct
  source 1..75: mol_type = other DNA
attatcgcgacttcaacgaacaaccaggctgtaacgaacattatcgaagcgttcgggaaagatttttcacagggc

SEQ ID NO: 397698 - DNA, 75 bp, synthetic construct
  source 1..75: mol_type = other DNA
ttttgctcatttttaaggcacgtcagctatatcaggatccagaatatcgcccctggtttgaagaacagcacaaag

SEQ ID NO: 397699 - DNA, 75 bp, synthetic construct
  source 1..75: mol_type = other DNA
aagcgcaaatcttgtaggcgctggttctgtatttggtggcatttgtttagctcgcgccttctcttgctggcgtga

SEQ ID NO: 397700 - DNA, 75 bp, synthetic construct
  source 1..75: mol_type = other DNA
gcgcgtgattaccattgaggccaccagcgaacaggaggcacgccagcaatccccggctggctgcgtgatggtatt

SEQ ID NO: 397701 - DNA, 75 bp, synthetic construct
  source 1..75: mol_type = other DNA
tactaacgatgtgagtaaacttagggaaggtgcgaataagcggggaaatacttctcggctgactcagtcatttca

SEQ ID NO: 397702 - DNA, 75 bp, synthetic construct
  source 1..75: mol_type = other DNA
gaagagaatgagcagcgggtgctggatctgctcaccgatctgcatcgtcaggggcgcacgattgtgatggtgacg

SEQ ID NO: 397703 - DNA, 75 bp, synthetic construct
  source 1..75: mol_type = other DNA
aacagaagaaaaaaataaaagattcccctacagcaaagatcgacatgcgatccaacctttatggagcaaatgcgt

SEQ ID NO: 397704 - DNA, 75 bp, synthetic construct
  source 1..75: mol_type = other DNA
gcgtggtagagagtcctgcggatatctacgctattgagcagacggggcagttttccggtcgctattttgtgttga

SEQ ID NO: 397705 - DNA, 75 bp, synthetic construct
  source 1..75: mol_type = other DNA
ggcgaaagtgctgattaaagaactggagccgtatcgcccgctgtttattgaagagccggtgctggcggaacaagc

SEQ ID NO: 397706 - DNA, 75 bp, synthetic construct
  source 1..75: mol_type = other DNA
tccacggtcgcgtcagcgcgccgatggcgaaagtactgattaaagaactggaaccgtatcgcccgctgtttattg

SEQ ID NO: 397707 - DNA, 75 bp, synthetic construct
  source 1..75: mol_type = other DNA
atgagcgcattcaaactcccggatacatctcaatcacagctcgtttcaacagctgagttagctaaaatccttagc

SEQ ID NO: 397708 - DNA, 75 bp, synthetic construct
  source 1..75: mol_type = other DNA
tattaccatcattgattttgtcgcgctaatcaatggcagttactgctctgcgccagaagccgatgtcttactgtc

SEQ ID NO: 397709 - DNA, 75 bp, synthetic construct
  source 1..75: mol_type = other DNA
tatcaccatcatcgactttgtcgcactcatcaatggtagttactgctctgtgcctgaagcggctgtgtcactttc

SEQ ID NO: 397710 - DNA, 75 bp, synthetic construct
  source 1..75: mol_type = other DNA
cgtcaaggcagatggcagtctacaacttccacaagatatcagtgacacttcgcttaaccgttaccgtcaagcagt

SEQ ID NO: 397711 - DNA, 75 bp, synthetic construct
  source 1..75: mol_type = other DNA
acctgttagagatcactttacgggtaagcatatattaggtgcccatttttttagaaatggagtaagatggattga

SEQ ID NO: 397712 - DNA, 75 bp, synthetic construct
  source 1..75: mol_type = other DNA
gccgcacgattttaatagcgaggctgtttataacacttttttcaaacctgttttggaaggtggtgagctttgtag

SEQ ID NO: 397713 - DNA, 75 bp, synthetic construct
  source 1..75: mol_type = other DNA
ttgtacattgatgataattggcgcatggagtatcgcttcacaatgggatgccggtgccaatgcattaacgctggc

SEQ ID NO: 397714 - DNA, 75 bp, synthetic construct
  source 1..75: mol_type = other DNA
ctcgctgagcacggttatattgttaaaacggcgcaatctggcggtgccagtttccatatcctttcgctttatgat

SEQ ID NO: 397715 - DNA, 75 bp, synthetic construct
  source 1..75: mol_type = other DNA
cgtcacgatagtcactgacagaagctacaacactgaacataatgattttgagatgcgaaaagagaagcagcaaaa

SEQ ID NO: 397716 - DNA, 75 bp, synthetic construct
  source 1..75: mol_type = other DNA
ctgaatcagacatttgaaaataccagtaaacacatcacgatagtttctccatggctgacctggcaaaggctggag

SEQ ID NO: 397717 - DNA, 75 bp, synthetic construct
  source 1..75: mol_type = other DNA
attaacaatgaatttgttacgtattcaggcgttctggagccactatcgctttcgccagcaaaacgcacgccttaa

SEQ ID NO: 397718 - DNA, 75 bp, synthetic construct
  source 1..75: mol_type = other DNA
cacacttgaagaattacagcggatttgcgacagccttgcccgtcatcatcaacctgccgcccgtgagctggcggc

SEQ ID NO: 397719 - DNA, 75 bp, synthetic construct
  source 1..75: mol_type = other DNA
tctcagatgttgacagctcttgcagattatctggatgttaaagagtcgtttttcttcactggaaggaaatcacca

SEQ ID NO: 397720 - DNA, 75 bp, synthetic construct
  source 1..75: mol_type = other DNA
gttaaattcggtctgatggtgcagattagcgatctgtggcaatttttattgtttctctttccgctgctggcaacg

SEQ ID NO: 397721 - DNA, 75 bp, synthetic construct
  source 1..75: mol_type = other DNA
gttaagtttggtctgatggttcagattagcgatctgtggcaatttttgctgtttctcttcccgctactggcgacg

SEQ ID NO: 397722 - DNA, 75 bp, synthetic construct
  source 1..75: mol_type = other DNA
gacgaatgttactgaactggccctcatcgccagccgcaacgcgggaaatcctcgaacagttattaaaggcgcttg

SEQ ID NO: 397723 - DNA, 75 bp, synthetic construct
  source 1..75: mol_type = other DNA
gttctatcaagtttgtaatcctgacggtttagccgatgcgttatggggggcgattattggttacggcacattcgc

SEQ ID NO: 397724 - DNA, 75 bp, synthetic construct
  source 1..75: mol_type = other DNA
cgccgatcacaggcttgcggaactcacaatgaataaactctacgataaagtccctccatccgtctggaaatatgt

SEQ ID NO: 397725 - DNA, 75 bp, synthetic construct
  source 1..75: mol_type = other DNA
gggtatacagtgccgacccgcgtaaagtgaaagatgcctgcctgctgccattgctgcgtctggatgaagccagcg

SEQ ID NO: 397726 - DNA, 75 bp, synthetic construct
  source 1..75: mol_type = other DNA
cttctttcctttctcagcttgccggggttgagtacggcaacaagcttgaaagtaagcttcgtaaagacaatgctt

SEQ ID NO: 397727 - DNA, 75 bp, synthetic construct
  source 1..75: mol_type = other DNA
acttgaacaactgaagtttgagaagctcaaatttcagtatcaaatgtacatcgataaacaaaaacaactgtctga

SEQ ID NO: 397728 - DNA, 75 bp, synthetic construct
  source 1..75: mol_type = other DNA
ataaaaagaaaatggaggttggtagatgttgctgatgcgttaaatctttcagaaataactgtgaggaaaaaactt

SEQ ID NO: 397729 - DNA, 75 bp, synthetic construct
  source 1..75: mol_type = other DNA
ggcgatcaactactccatcaatgcatatattgaagtatttgatcaaattacctggggcgcactggcgtgtgtagg

SEQ ID NO: 397730 - DNA, 75 bp, synthetic construct
  source 1..75: mol_type = other DNA
atggatcaggtgcgtgagcgcgagctgtttgatctcatcaaagcctgtacccaaccggtgctgggcatctgctta

SEQ ID NO: 397731 - DNA, 75 bp, synthetic construct
  source 1..75: mol_type = other DNA
acacagctacgctatgccggtaaacccgtggaccatcgcccagtgcaattacggcgaaccgtttaccgcggcagt

SEQ ID NO: 397732 - DNA, 75 bp, synthetic construct
  source 1..75: mol_type = other DNA
ggtacgtgtggaatcgctggtgcctgctcattgcgaaggcggcagcatcgaccatttctttgaaaatggcgatga

SEQ ID NO: 397733 - DNA, 75 bp, synthetic construct
  source 1..75: mol_type = other DNA
tccgtcttccgcgcagaaaaacgcatcggcctggtattgttcggcaaaggcaatatcggttcccgctggctggaa

SEQ ID NO: 397734 - DNA, 75 bp, synthetic construct
  source 1..75: mol_type = other DNA
agcagcagaccaccggttagcgggattaatcaccggaaagttatatggcaggataccaaaagaaatatggaaata

SEQ ID NO: 397735 - DNA, 75 bp, synthetic construct
  source 1..75: mol_type = other DNA
tacttaccagaaacagcagttagacgccgtgaacgagccactttcgtataaggaacaatttacgaagcagagttt

SEQ ID NO: 397736 - DNA, 75 bp, synthetic construct
  source 1..75: mol_type = other DNA
cagagacggcggagttaagcaagccacaactacgcatggtcgatctcaacttattaaccgttttcgatgccgtga

SEQ ID NO: 397737 - DNA, 75 bp, synthetic construct
  source 1..75: mol_type = other DNA
gatgacctccgatattctgccgcgtagtggcctgcattattcgccgatgtttgactatgaagtgcgtctggtgtt

SEQ ID NO: 397738 - DNA, 75 bp, synthetic construct
  source 1..75: mol_type = other DNA
agcacctgaccatccactggcggcgaaaacgcgaatcacgccggaagacctcgccagcgaaacgctgttgattta

SEQ ID NO: 397739 - DNA, 75 bp, synthetic construct
  source 1..75: mol_type = other DNA
ttacgtacttgcgcatgcttatttacgcgatgaccacgttctcgatgcggttctgccgcccgatattcctattcc

SEQ ID NO: 397740 - DNA, 75 bp, synthetic construct
  source 1..75: mol_type = other DNA
tattgttttttgctgcattctttgcattttcctgtcaggcagcaagaagtcctttccaggtagacaggatgcgag

SEQ ID NO: 397741 - DNA, 75 bp, synthetic construct
  source 1..75: mol_type = other DNA
tcgtttcgcgtcatttagtcaaccgtggtatgacacggtagataaacaagccagtatcgcgtatcagggcatggc

SEQ ID NO: 397742 - DNA, 75 bp, synthetic construct
  source 1..75: mol_type = other DNA
agcttcctttacattctcgccaaatgtgcttgcgttaaaacgacttctcaaattagcagagtactaccccactat

SEQ ID NO: 397743 - DNA, 75 bp, synthetic construct
  source 1..75: mol_type = other DNA
agcaaaaaaatcaccatccatcacgatccgattgccgcagtcaactggccggagatgaccatgcgttttaccatc

SEQ ID NO: 397744 - DNA, 75 bp, synthetic construct
  source 1..75: mol_type = other DNA
aattggagaagatttatgatcaaggtaatgcttttattgatgattacatcaaaaacccggatgcggcactgtctg

SEQ ID NO: 397745 - DNA, 75 bp, synthetic construct
  source 1..75: mol_type = other DNA
ttgcatcagacgcaatccgccctgtctcaccagtttagcgatctggaacaacgccttggcttccggctatttgtg

SEQ ID NO: 397746 - DNA, 75 bp, synthetic construct
  source 1..75: mol_type = other DNA
gagttcagtaaaaatgccccggactggcgtaatccgctctggcgtcatgaagataacagcgtagcagagtggtaa

SEQ ID NO: 397747 - DNA, 75 bp, synthetic construct
  source 1..75: mol_type = other DNA
ctggttcgcgacaaaattaaagcctacagttgggtcggcggcgatcgtccggcggatgttatcgacggcattaaa

SEQ ID NO: 397748 - DNA, 75 bp, synthetic construct
  source 1..75: mol_type = other DNA
acaaaaagataacttctacggcgtgcagttccatccggagcgttctggtgccgctggcgctaagttgctgaaaaa

SEQ ID NO: 397749 - DNA, 75 bp, synthetic construct
  source 1..75: mol_type = other DNA
gatatccagagctactacgatcagcatcaggatcaattcacccagccgcagcgtacccgctacagcatcatccag

SEQ ID NO: 397750 - DNA, 75 bp, synthetic construct
  source 1..75: mol_type = other DNA
attgaacatgaattgcgagtatgtctttctctaggattgttttcagaaccagaaacaaagcttgaaagtgttttt

SEQ ID NO: 397751 - DNA, 75 bp, synthetic construct
  source 1..75: mol_type = other DNA
aatagcctcagcgtataaccaagcagaaagctattgtagctatacaataacaacacatagcccatatattctaag

SEQ ID NO: 397752 - DNA, 75 bp, synthetic construct
  source 1..75: mol_type = other DNA
tcaggttactcgccagcatcatcaaatccggctcttattcagttgcttatatcgttaaaaaaattacaggaaagt

SEQ ID NO: 397753 - DNA, 75 bp, synthetic construct
  source 1..75: mol_type = other DNA
aaactgtgtcagttaaagacggtgataagtgggctcttttacatccggactctaagttttcggtaatgactccaa

SEQ ID NO: 397754 - DNA, 75 bp, synthetic construct
  source 1..75: mol_type = other DNA
gtgaaaccgctggcagatgttcaggaacaggttaaggcgctggttcagcacaacaaagctgagcaacaggcgaaa

SEQ ID NO: 397755 - DNA, 75 bp, synthetic construct
  source 1..75: mol_type = other DNA
tgaagaagcagatagcctcattagcgcttttgtcagcgatctggaacgcctggcggcactgctcgacagcggtat

SEQ ID NO: 397756 - DNA, 75 bp, synthetic construct
  source 1..75: mol_type = other DNA
tccggcaccgatttaatattactgcaacccggaaaaacacaccgcctgttttttaatatttacggacagagaaaa

SEQ ID NO: 397757 - DNA, 75 bp, synthetic construct
  source 1..75: mol_type = other DNA
aacatggttcaaaagccgctattcatgggctgctcgcctggcgtgactggcaaatcagcgaattaaccgccacca

SEQ ID NO: 397758 - DNA, 75 bp, synthetic construct
  source 1..75: mol_type = other DNA
gcgttaccaatggctttaatgttatcctcatggccgtatttacagtctatgactagtaagagttttattattgag

SEQ ID NO: 397759 - DNA, 75 bp, synthetic construct
  source 1..75: mol_type = other DNA
ggtttaggtggtgttaagaagttcaagaagatgattgcagcactacaccgcaaggattggaagggggcgattatt

SEQ ID NO: 397760 - DNA, 75 bp, synthetic construct
  source 1..75: mol_type = other DNA
tatatgaaggtactaaagaataccaacgagtacgcggatactatcgacaagacaagttctacccatatgtggata

SEQ ID NO: 397761 - DNA, 75 bp, synthetic construct
  source 1..75: mol_type = other DNA
taacacaacaacatcctttctatattgatcttgcgaatgccatgaaagaagaggcaaaaaagacaatgtcaattt

SEQ ID NO: 397762 - DNA, 75 bp, synthetic construct
  source 1..75: mol_type = other DNA
ctgcaacaattattggtgcaacatccgggcaaacgtctggtggtgaccgggtttatcagccgcaacaacgcgggg

SEQ ID NO: 397763 - DNA, 75 bp, synthetic construct
  source 1..75: mol_type = other DNA
gtcacccgtaacccgctgcattgccaccgtttctggcagcaactgaaaggccagccggtcgaatttacctggcag

SEQ ID NO: 397764 - DNA, 75 bp, synthetic construct
  source 1..75: mol_type = other DNA
ctgcaacaactgctggtgcagcatccgggcaaacgtctggtagtgaccgggtttatcagccgtaacaacgccggt

SEQ ID NO: 397765 - DNA, 75 bp, synthetic construct
  source 1..75: mol_type = other DNA
gcagaaagataacttcttcggcgtgcagtttcacccggaacgttcgggtgccgcaggcgctcagctgctgaaaaa

SEQ ID NO: 397766 - DNA, 75 bp, synthetic construct
  source 1..75: mol_type = other DNA
cgtcgaactgctgggtattattgaagaagacgtgccaaaaatggccgatcacggtttaccactgccacatatggg

SEQ ID NO: 397767 - DNA, 75 bp, synthetic construct
  source 1..75: mol_type = other DNA
ggcgaccgcctgttccggggtatcgaagatggcgcgtacttctatttcgtccacagctacgccatgccggtgaac

SEQ ID NO: 397768 - DNA, 75 bp, synthetic construct
  source 1..75: mol_type = other DNA
cgcgtttgatgtccgcggtgcttaaccaacaaggactgcctgcggcctggctcgatgcccgtgaatttttacgcg

SEQ ID NO: 397769 - DNA, 75 bp, synthetic construct
  source 1..75: mol_type = other DNA
tattcaatatcaaattcaggcgaccaaaaacagattgtataatctgttggaagataaaaggaagtatgaagattt

SEQ ID NO: 397770 - DNA, 75 bp, synthetic construct
  source 1..75: mol_type = other DNA
acttttttaagaaagcgattcttaaaggcaatgaagatcttctaaatgatttcactcctgccgtcagagagttta

SEQ ID NO: 397771 - DNA, 75 bp, synthetic construct
  source 1..75: mol_type = other DNA
tctcggcgcgtaccggatttgagtttgtgctggcaggcgtggtggacagccgccgcagcctgttgagctatgatg

SEQ ID NO: 397772 - DNA, 75 bp, synthetic construct
  source 1..75: mol_type = other DNA
aactggcgcgtctggcagcccctgttctccacgcccgtaccttacagcccgtttctggtagcgaaatcgacctgc

SEQ ID NO: 397773 - DNA, 75 bp, synthetic construct
  source 1..75: mol_type = other DNA
caggatgaagagtcgttgttcctgtggatgcgcgcccatccgtatgatgatttagtggtgctggacgttaccgcc

SEQ ID NO: 397774 - DNA, 75 bp, synthetic construct
  source 1..75: mol_type = other DNA
tgacgtgtgctaaatggaccaccaggataaatatgctgcgtgtggaatttagtgctgagtttaaacaggtagtaa

SEQ ID NO: 397775 - DNA, 75 bp, synthetic construct
  source 1..75: mol_type = other DNA
aaccgggaatggaagtgacctctcaaccgtcggttatggaagtacgttttggggacgggtattcccagcgtgcgc

SEQ ID NO: 397776 - DNA, 75 bp, synthetic construct
  source 1..75: mol_type = other DNA
acccgggaggaggcccgacatctggaggcattcctggcagagcacggtggctggaaggcgtttctgtggacacct

SEQ ID NO: 397777 - DNA, 75 bp, synthetic construct
  source 1..75: mol_type = other DNA
cgattacagcacagggggctgccctgcatgcggggggtatgaatggcagtacccgcttacttgtcgatactgatg

SEQ ID NO: 397778 - DNA, 75 bp, synthetic construct
  source 1..75: mol_type = other DNA
tgacctgcgcaaaatggtcatcgcgggtggggatgctgcgggtgacgttcagtgccgagtttaagcaggtggtga

SEQ ID NO: 397779 - DNA, 75 bp, synthetic construct
  source 1..75: mol_type = other DNA
gacgtacagggtgacgctttccgtgacccgggaggaggcccggcatctggaagcgttcctggcagagcacggggg

SEQ ID NO: 397780 - DNA, 75 bp, synthetic construct
  source 1..75: mol_type = other DNA
gataggtccagataaatttgattctatagatagcaccgcatatggcgccttaaataaaataaatagccaatctat

SEQ ID NO: 397781 - DNA, 75 bp, synthetic construct
  source 1..75: mol_type = other DNA
ttctcctttcaataagttacataactacagtaaatgttttcaagccttctgcagttgctcaatccacaaaatatt

SEQ ID NO: 397782 - DNA, 75 bp, synthetic construct
  source 1..75: mol_type = other DNA
tcgggtaaaaccgcaattgctgaagtgctgtcgcccggtcaacacccgactaaacgcggattaatttacgccgcg

SEQ ID NO: 397783 - DNA, 75 bp, synthetic construct
  source 1..75: mol_type = other DNA
tgacctgtgccgggtggtctgcgcgggtcgggatgttgcgcgttgagttcagcgcggagtttgaacaggtggtga

SEQ ID NO: 397784 - DNA, 75 bp, synthetic construct
  source 1..75: mol_type = other DNA
tagtgactaaatggttcgacgttgacaagtataatgtgctgaacgagctgacggttgaacagatatacatagaag

SEQ ID NO: 397785 - DNA, 75 bp, synthetic construct
  source 1..75: mol_type = other DNA
tgacctgcgcaaaatggacgtcgcgggtcagtatgttgcgtgttgagttcagcgcagagtttaagcaggtggtga

SEQ ID NO: 397786 - DNA, 75 bp, synthetic construct
  source 1..75: mol_type = other DNA
gcctatttaatttccggcattggtctgggtcgcctgataagcattttattcttcggcgtgatatccgataaattt

SEQ ID NO: 397787 - DNA, 75 bp, synthetic construct
  source 1..75: mol_type = other DNA
ttgaggttatcgagcaggacgggcggaaaaaaacgttccaggtggacacggcatatgtgccgtatctgacccgtc

SEQ ID NO: 397788 - DNA, 75 bp, synthetic construct
  source 1..75: mol_type = other DNA
ggcgtctgcgtgcggactatcagggctacctgaatcataccaccggcattgcacagggaacgaacagtcagttta

SEQ ID NO: 397789 - DNA, 75 bp, synthetic construct
  source 1..75: mol_type = other DNA
cggaaaaaaacgttccaggtggacacggcatatgtgccctatctgacccgtccgggccaggttcgttaccggctg

SEQ ID NO: 397790 - DNA, 75 bp, synthetic construct
  source 1..75: mol_type = other DNA
ctgccggtgaggcatcctggggtatcagtaacaagtggtcactttacggtggcggtatcgttgccggggattaca

SEQ ID NO: 397791 - DNA, 75 bp, synthetic construct
  source 1..75: mol_type = other DNA
gttaccgcaggcctgtctgacgccggagatggtcagccggatggggctgacggcggcttctcaggagaaggtcac

SEQ ID NO: 397792 - DNA, 75 bp, synthetic construct
  source 1..75: mol_type = other DNA
tcccaggcgggatatatcatgcccgggcagtaccagatggacattatggtgaatgaccagggcatttctccgtcg

SEQ ID NO: 397793 - DNA, 75 bp, synthetic construct
  source 1..75: mol_type = other DNA
ggctggcggcattttacaactcggcgtttcggtcatgtcggagtttttccccaaaagcaaagctaaagtcaccag

SEQ ID NO: 397794 - DNA, 75 bp, synthetic construct
  source 1..75: mol_type = other DNA
tatttttgccgcgctactgaaaaaaatagtacgccccatctgggctaacgtatttaactctgcactggcaacggt

SEQ ID NO: 397795 - DNA, 75 bp, synthetic construct
  source 1..75: mol_type = other DNA
gcattaaaaaccatctcttattacagtatgggttcgctggtctgtgtctttatatttgccgcgttactgaaaaaa

SEQ ID NO: 397796 - DNA, 75 bp, synthetic construct
  source 1..75: mol_type = other DNA
ggagatacgcccgaatccggcagaagggatgctgtacatcaatatgccgcaggcctggctggaatattccgacgc

SEQ ID NO: 397797 - DNA, 75 bp, synthetic construct
  source 1..75: mol_type = other DNA
gacagctccgtgcgtggccgcctggatgttgaagttatcgagcaggacgggcggaaaaaaacgttccaggtggac

SEQ ID NO: 397798 - DNA, 75 bp, synthetic construct
  source 1..75: mol_type = other DNA
ctttggtattccggcctgcccaagtttagctctcgcttacggtctggcagtgtgcgttggtatcgccaactcggc

SEQ ID NO: 397799 - DNA, 75 bp, synthetic construct
  source 1..75: mol_type = other DNA
tcaaggataaaaatttcacgctgggatgtttttttctttttctggaggggttaggatattctctactgtatattt

SEQ ID NO: 397800 - DNA, 75 bp, synthetic construct
  source 1..75: mol_type = other DNA
taaatgaagaactggaacaagacctgaaagacaacatcgcgctgcgaatgaaaaacttgcaggattctctgaaga

SEQ ID NO: 397801 - DNA, 75 bp, synthetic construct
  source 1..75: mol_type = other DNA
actcggcaatgcaaagctttcactcaatggtgttgatatacctgcaaatgcacaaatgttgcttcgcgatgcact

SEQ ID NO: 397802 - DNA, 75 bp, synthetic construct
  source 1..75: mol_type = other DNA
atatggaatgatgaggccagggagttacgcaactggcgaacaacgggcaggggtgagcaccgcgcaatcaccggc

SEQ ID NO: 397803 - DNA, 75 bp, synthetic construct
  source 1..75: mol_type = other DNA
atccggcatattaaccatgacgccgaatcggttgttcagagtgcccacgctgcatcacccgttgcaacacttccg

SEQ ID NO: 397804 - DNA, 75 bp, synthetic construct
  source 1..75: mol_type = other DNA
cgttgaaaatgctggttttgtgcgccacatccggcatattaaccatgacgtcgaatcggttgttcagagtgccca

SEQ ID NO: 397805 - DNA, 75 bp, synthetic construct
  source 1..75: mol_type = other DNA
aggcgcaggtgacaaagccgcagattcagcagacacaggacgtaacccaggatactatgttccttttggggagcg

SEQ ID NO: 397806 - DNA, 75 bp, synthetic construct
  source 1..75: mol_type = other DNA
cgtcagtgaacagtatttctcgctacaaaaccatcgaatggctgaactatatcgccaccgaactgcataagggat

SEQ ID NO: 397807 - DNA, 75 bp, synthetic construct
  source 1..75: mol_type = other DNA
tcacacctctgtttcgccctgatacaccggaagagtacaaaccaacagttcgcgcgcaactggagaaaaagctgc

SEQ ID NO: 397808 - DNA, 75 bp, synthetic construct
  source 1..75: mol_type = other DNA
caggttcctgcgttactgctcgatgatgccacgctactgacagaaggcgtggcgattatgcaataccttgccgat

SEQ ID NO: 397809 - DNA, 75 bp, synthetic construct
  source 1..75: mol_type = other DNA
gcatttaatatgaataatatctacctcgcgaaggattttgatactatttataccctgaaaaacgaacttcatgat

SEQ ID NO: 397810 - DNA, 75 bp, synthetic construct
  source 1..75: mol_type = other DNA
tcgttagatacacctaacgcttgcattaacataagtatctctcaatcatcagatggaaacatttatgttaccagc

SEQ ID NO: 397811 - DNA, 75 bp, synthetic construct
  source 1..75: mol_type = other DNA
cccaacactcaggtcggcgtatatggcgactggtttaatgatggcaatccaacttgggatgacggtgatggcgaa

SEQ ID NO: 397812 - DNA, 75 bp, synthetic construct
  source 1..75: mol_type = other DNA
aacggtggggttcaattttactgactgtacaaacgttaataatgttaaaatatcattttctggtgataaaattga

SEQ ID NO: 397813 - DNA, 75 bp, synthetic construct
  source 1..75: mol_type = other DNA
gcaaaccatcgatccgcagctggttacgccgcaaggtgctgacgatattctatcgccagcctttatgacgtcgtt

SEQ ID NO: 397814 - DNA, 75 bp, synthetic construct
  source 1..75: mol_type = other DNA
aagttccgctacgatcattaaagatctctatctgaatttgcgcccggaccagatgcaaaacgagacgcgtctgaa

SEQ ID NO: 397815 - DNA, 75 bp, synthetic construct
  source 1..75: mol_type = other DNA
caacattaatggtaaaagtgctgccgccgtttgctgccggaatcttccttgctgcacctatggccgcgatcatgt

SEQ ID NO: 397816 - DNA, 75 bp, synthetic construct
  source 1..75: mol_type = other DNA
catctatcttccgcctcttactcgtggcaataaccataattacgatggaaaaagcgttgtcgaaattagaaaact

SEQ ID NO: 397817 - DNA, 75 bp, synthetic construct
  source 1..75: mol_type = other DNA
tttgccggaaaggaatatgagttaaaggtcattgatgaaaaaacgcctattctttttcagtggtttgaacctaat

SEQ ID NO: 397818 - DNA, 75 bp, synthetic construct
  source 1..75: mol_type = other DNA
agagcattgatgaaaaaacacctattctttttcagtggtttgaacttaatccggaacggtataagaaaaatgaga

SEQ ID NO: 397819 - DNA, 75 bp, synthetic construct
  source 1..75: mol_type = other DNA
caagagtaaaaatattataaagaacaagtcaggggcagattatgcatcaggtattgcagtagggctttatgatgg

SEQ ID NO: 397820 - DNA, 75 bp, synthetic construct
  source 1..75: mol_type = other DNA
tcgccagtatgtgtattggattatttattgctcagcttgatattcaaattgtatcgtcatccctaaatgaaatag

SEQ ID NO: 397821 - DNA, 75 bp, synthetic construct
  source 1..75: mol_type = other DNA
taaagaaaacagaattcagcttaaagagttacaagatatattagttaacaattcagactcgtttgattttcgtgt

SEQ ID NO: 397822 - DNA, 75 bp, synthetic construct
  source 1..75: mol_type = other DNA
gttctcggcgcgttgctgctgcttgccgcctggaagccgccagaaatgatcatctggctgaatttgctggccttc

SEQ ID NO: 397823 - DNA, 75 bp, synthetic construct
  source 1..75: mol_type = other DNA
tgggtgttactggcgatgatccagctacctgcggtctggctttcactcggtattctcggcaagaagttcgcaatt

SEQ ID NO: 397824 - DNA, 75 bp, synthetic construct
  source 1..75: mol_type = other DNA
cagtctgtcgatatgaatttcatcgtcaatgtcgcaccaccagtgtgcaaactaaaggaaaccgagttatcagtg

SEQ ID NO: 397825 - DNA, 75 bp, synthetic construct
  source 1..75: mol_type = other DNA
tgcgggacagcattaatcaacagctggaggcacaactgcgttatcttgactcattacagattacgcttcagcgtg

SEQ ID NO: 397826 - DNA, 75 bp, synthetic construct
  source 1..75: mol_type = other DNA
ctttatttgcaacccgacaaactttacttgatctgaattatgcccgtcaggttaacgaaatttctttgtataccg

SEQ ID NO: 397827 - DNA, 75 bp, synthetic construct
  source 1..75: mol_type = other DNA
atatcagcacggcgcagtaagttatctggaagtgctggatgccgagcgttctttatttgcaacccgacaaacttt

SEQ ID NO: 397828 - DNA, 75 bp, synthetic construct
  source 1..75: mol_type = other DNA
atacacgcggtgatctacagcaacgaggaaaagaacgcgctgacggcctgcgacggtcgggacatggcgatagaa

SEQ ID NO: 397829 - DNA, 75 bp, synthetic construct
  source 1..75: mol_type = other DNA
catggtcttttcgtttcaggcgggcgagcggcccccgctggaagtcctgcacgccattgaagacgaactttgcga

SEQ ID NO: 397830 - DNA, 75 bp, synthetic construct
  source 1..75: mol_type = other DNA
agtcagcagctggcttatgaacaactccgtatcgcacgtgagacgctgaagaattacgaacagtcctatgcgttc

SEQ ID NO: 397831 - DNA, 75 bp, synthetic construct
  source 1..75: mol_type = other DNA
gtgacccgggaggaggcccgacatctggaggcattcctggcagagcacggtggctggaaggcgtttctgtggaca

SEQ ID NO: 397832 - DNA, 75 bp, synthetic construct
  source 1..75: mol_type = other DNA
tagcgactggcaggacatctacagccaagctaaagatctccctaatttgcgcactcgctacggcctaaccagtag

SEQ ID NO: 397833 - DNA, 75 bp, synthetic construct
  source 1..75: mol_type = other DNA
atgttaactggggcttttctctgtctgccttacggtggcatgcccgaggcagacagcctcaagcacccgcagcaa

SEQ ID NO: 397834 - DNA, 75 bp, synthetic construct
  source 1..75: mol_type = other DNA
agatagcctcaagcacccgcagcaattctacttaactctgccgttacagcaaaccgttttcgcccgatatgggaa

SEQ ID NO: 397835 - DNA, 75 bp, synthetic construct
  source 1..75: mol_type = other DNA
ccgaccttcttggcccgttccagccttccgaacggcaggccgaggcaaaggcgaaccgcaagcggtacaagccac

SEQ ID NO: 397836 - DNA, 75 bp, synthetic construct
  source 1..75: mol_type = other DNA
ccttgagaaggggatatatacgcccgccgtggtggtggatcacattatcccgattaatggcggtgatgatgttct

SEQ ID NO: 397837 - DNA, 75 bp, synthetic construct
  source 1..75: mol_type = other DNA
gaagcggtcggcattgttggggtgaacggcgcaggtaaaagtacgttactgaagctgctgactggcaccactcag

SEQ ID NO: 397838 - DNA, 75 bp, synthetic construct
  source 1..75: mol_type = other DNA
cttctggcctgagtggaaccaccaggcattgtgccagacgtgccacaaccgtaagacgacacgggaagatccagc

SEQ ID NO: 397839 - DNA, 75 bp, synthetic construct
  source 1..75: mol_type = other DNA
tattcaatcacggctatcagaagtaacgtctccattggttgcattaattgtggcggctttgttgtttggttttta

SEQ ID NO: 397840 - DNA, 75 bp, synthetic construct
  source 1..75: mol_type = other DNA
aagtgtctttgtggaaatggggggctctgttgctctctgttcctcttatactgtttttggctgtttttttggtgg

SEQ ID NO: 397841 - DNA, 75 bp, synthetic construct
  source 1..75: mol_type = other DNA
cacaggcgggcggcatggcgtgcagaggatgccagacgaggacaccgccgcgcgcgtgggtactccagacagtgg

SEQ ID NO: 397842 - DNA, 75 bp, synthetic construct
  source 1..75: mol_type = other DNA
gcggtccgacaggctgaatgcgctcacggcaacgctgagtgatgacctggcagcggcgctgtcggcgccgtcaca

SEQ ID NO: 397843 - DNA, 75 bp, synthetic construct
  source 1..75: mol_type = other DNA
gtgaatcttgagaaaagcacgcagaacctgactgacgccttcgggcggatgaacagctcatcgcagaaggtggtg

SEQ ID NO: 397844 - DNA, 75 bp, synthetic construct
  source 1..75: mol_type = other DNA
cctcagcatatcggagcctcctgaagccaaaaccctgaacgggttgcgcaagctgtccgatacccgtctacagag

SEQ ID NO: 397845 - DNA, 75 bp, synthetic construct
  source 1..75: mol_type = other DNA
tcatctttatgatgcctcgaaagcggcatacagccttgatgtgaacgcaagaaacgccggaatgagtgtgagtgc

SEQ ID NO: 397846 - DNA, 75 bp, synthetic construct
  source 1..75: mol_type = other DNA
gtgaatgaaacgcccctgagcggggcatccggtgcggcagatgcgctgggcgggaagataacgcagatccacgac

SEQ ID NO: 397847 - DNA, 75 bp, synthetic construct
  source 1..75: mol_type = other DNA
agctgaatgcaaaggacaacgcgagtgcgcttttacagagagcctcagaggctgccggttcgctggcgggtaacg

SEQ ID NO: 397848 - DNA, 75 bp, synthetic construct
  source 1..75: mol_type = other DNA
acattacgttcgccgggtatcgtttctcagagcgaaactatatgaccatggagcagtacctgaacgcccgctacc

SEQ ID NO: 397849 - DNA, 75 bp, synthetic construct
  source 1..75: mol_type = other DNA
accgaagggcctgtatttgcgaccggagaggcgtcctgggggctcagtaaccagtggtcgctgtatggcggggct

SEQ ID NO: 397850 - DNA, 75 bp, synthetic construct
  source 1..75: mol_type = other DNA
ttattgaacagaacggacggaagaaaacctttcaggtcgatacggcctcggttccttatctgacgcgtccgggac

SEQ ID NO: 397851 - DNA, 75 bp, synthetic construct
  source 1..75: mol_type = other DNA
gaagctgacgccagaatgttcgctaacggttgtgcacatatgaaaagaatgcatccccatcttagcgacgagcac

SEQ ID NO: 397852 - DNA, 75 bp, synthetic construct
  source 1..75: mol_type = other DNA
acaaacagcgccaggatgaaatcatcaacgccgcccgtcggtgttttcatcgctgcggttttcatgccgccagta

SEQ ID NO: 397853 - DNA, 75 bp, synthetic construct
  source 1..75: mol_type = other DNA
gagtggcgtgacgccgggggaaaccctgtcggtaaactgggatggaaaaatacagtgtcaggtaaatgtaccgga

SEQ ID NO: 397854 - DNA, 75 bp, synthetic construct
  source 1..75: mol_type = other DNA
ttaacggcattacatatgcgctgctgctttccctggcaggcgcaccggcttatgccgtcgactttaatacagatg

SEQ ID NO: 397855 - DNA, 75 bp, synthetic construct
  source 1..75: mol_type = other DNA
ccggagatagtcagccggatgggactgactgaggcgtcacaggaaaaagttacgtactggaataacggacaatgt

SEQ ID NO: 397856 - DNA, 75 bp, synthetic construct
  source 1..75: mol_type = other DNA
tggggaattggtgtggtgacggatgtgagcagctattaccgcaacaccacctcagtggacctgaacaggctgccg

SEQ ID NO: 397857 - DNA, 75 bp, synthetic construct
  source 1..75: mol_type = other DNA
tctatgacgccaccgtgccggcaggtccgttcaccattcaggacctggacagctccgtgcgtggccgcctggatg

SEQ ID NO: 397858 - DNA, 75 bp, synthetic construct
  source 1..75: mol_type = other DNA
gtgaaaccctgaatgtcggctgggacggccggacacagtgtgtggtggacatcccggcacatccggacccggcac

SEQ ID NO: 397859 - DNA, 75 bp, synthetic construct
  source 1..75: mol_type = other DNA
ataagccgcacaagggaaagcagtcacagtcactgagctataacgggacagcgggtgccaacttcggtgcctggc

SEQ ID NO: 397860 - DNA, 75 bp, synthetic construct
  source 1..75: mol_type = other DNA
aacccggcatggatgtggcttcggccccttccgtcagggaagtgcgctttggtgatggctattcccagcgagcgc

SEQ ID NO: 397861 - DNA, 75 bp, synthetic construct
  source 1..75: mol_type = other DNA
tgacctgtgccgcctggtcatcacgggttcgcatgctgcgggttgaattcagcgcagagtttaagcaggtggtga

SEQ ID NO: 397862 - DNA, 75 bp, synthetic construct
  source 1..75: mol_type = other DNA
tgacctgtgccgcctggtcatcacgggttcgcatgctgcgggttgaattcagagccgagtttaagcaggtggtga

SEQ ID NO: 397863 - DNA, 75 bp, synthetic construct
  source 1..75: mol_type = other DNA
tgacctgtgccgcctggtcatcacgggttcgcatgctgtgggttgaattcagagctgagtttaagcaggtggtga

SEQ ID NO: 397864 - DNA, 75 bp, synthetic construct
  source 1..75: mol_type = other DNA
tgacctgtgccgcctggtcatcacgggttcgcatgctgggggttgaattcagggcagagtttaagcaggtggtga

SEQ ID NO: 397865 - DNA, 75 bp, synthetic construct
  source 1..75: mol_type = other DNA
tgacctgtgccgcctggtcatcacgggttcgcatgctgggggttgaattcagagcggagtttaagcaggtggtga

SEQ ID NO: 397866 - DNA, 75 bp, synthetic construct
  source 1..75: mol_type = other DNA
gccgggagctgggcatggtggccgacgaaggccttgcctggctgagtggcgtgacgccgggggaaaccctgtcgg

SEQ ID NO: 397867 - DNA, 75 bp, synthetic construct
  source 1..75: mol_type = other DNA
gtgacgccgggggaaaccctgtcggtaaactgggatggaaaaacacagtgtcaggtaaatgtaccggagacagca

SEQ ID NO: 397868 - DNA, 75 bp, synthetic construct
  source 1..75: mol_type = other DNA
cgcgcatgggtggtctggttgcgcgaacgggtgggttatcacgccgggcagcatatccgttttgccatccgccgc

SEQ ID NO: 397869 - DNA, 75 bp, synthetic construct
  source 1..75: mol_type = other DNA
tgacctgtgccgcctggtcatcacgggttcgcatgctgagggttgaattcagagcagagtttaagcaggtggtga

SEQ ID NO: 397870 - DNA, 75 bp, synthetic construct
  source 1..75: mol_type = other DNA
agtcgtttctggctgagcacgggggctggaaagcctttctgtggacgccgccttatggctggcggcagatcaggg

SEQ ID NO: 397871 - DNA, 75 bp, synthetic construct
  source 1..75: mol_type = other DNA
gaaaaaatacagtgtcaggtaaatgtaccggaggcagcaatatctgaccagcagttattgatcccctgtacgcct

SEQ ID NO: 397872 - DNA, 75 bp, synthetic construct
  source 1..75: mol_type = other DNA
gcggactgaacaccacctcggtgaaaagtggacagcaatgggatgcgccaaatggctgggcaccgttgcaatggg

SEQ ID NO: 397873 - DNA, 75 bp, synthetic construct
  source 1..75: mol_type = other DNA
ttaacccgttctaccgaaagtaccgagaaatgggattctctgttgccgttaccggaaccctatgtcgtgccggga

SEQ ID NO: 397874 - DNA, 75 bp, synthetic construct
  source 1..75: mol_type = other DNA
actggcacaacatgacggtgacgctgcattaaaacaatatctgccgcaactgcaaaaagagtatgcctggtggat

SEQ ID NO: 397875 - DNA, 75 bp, synthetic construct
  source 1..75: mol_type = other DNA
gtagccgcattgcccgtcgtgaatatggttccctgctgtcgacactgatagcccagccacaaaatccggcattac

SEQ ID NO: 397876 - DNA, 75 bp, synthetic construct
  source 1..75: mol_type = other DNA
aatgggatgcgccaaatggctgggcaccgttgcagtgggtcgcgacagaaggattacaaaactacgggcaaaaag

SEQ ID NO: 397877 - DNA, 75 bp, synthetic construct
  source 1..75: mol_type = other DNA
cgggcaaaatgaggtggcgatggatattagctggaatttcctgaccaatgttcaacacacttatgaccgggagaa

SEQ ID NO: 397878 - DNA, 75 bp, synthetic construct
  source 1..75: mol_type = other DNA
ccgtatccgctggtcgatgatctggagcgtttttatggtcatctggaacaaacgctgctggcaaccggttttatc

SEQ ID NO: 397879 - DNA, 75 bp, synthetic construct
  source 1..75: mol_type = other DNA
tgactcccaggcgatcgcgttggcagcgggagccagtgatgtgattggtaatgcgcagattgtcgatacactcga

SEQ ID NO: 397880 - DNA, 75 bp, synthetic construct
  source 1..75: mol_type = other DNA
gcaggggccagcgatgtgattggtaatgctcacatcgtcgatacgctcgacgaagcgttagccggttgtagcctg

SEQ ID NO: 397881 - DNA, 75 bp, synthetic construct
  source 1..75: mol_type = other DNA
cacaaaaaatagcgttaatttctgccagcattttattatgtttatctgcgttcccggcgcaggcagaagaaattg

SEQ ID NO: 397882 - DNA, 75 bp, synthetic construct
  source 1..75: mol_type = other DNA
ggcaaatgcccgtcaaaaagggatcgaaaaatacatgtggaacgatcaacaaggctggtatgccgattacgacct

SEQ ID NO: 397883 - DNA, 75 bp, synthetic construct
  source 1..75: mol_type = other DNA
ccgaaagagggcgagaaatatgttccgccagagggacagtcactgcgcgaacatattgacggactttggccggta

SEQ ID NO: 397884 - DNA, 75 bp, synthetic construct
  source 1..75: mol_type = other DNA
atgacgatgtattacggcatgaacagcgcaacgggcaaggccattaccgatattgagcacctcaatcagtctgtt

SEQ ID NO: 397885 - DNA, 75 bp, synthetic construct
  source 1..75: mol_type = other DNA
cgacaacatgaaagcgcgctgttggtacgaacaccatttcccgctactgctcaataaaaaagaaggccagatacc

SEQ ID NO: 397886 - DNA, 75 bp, synthetic construct
  source 1..75: mol_type = other DNA
caaacaacgaagtttaataaagaccactttattaaacgtggcgtgactgaacacgtatgcccacattgttctgcg

SEQ ID NO: 397887 - DNA, 75 bp, synthetic construct
  source 1..75: mol_type = other DNA
atgctcgtgctgcattagaacaagctcaaaaagaagagcacaagaagaaagtgcgggatctaatggaacgattag

SEQ ID NO: 397888 - DNA, 75 bp, synthetic construct
  source 1..75: mol_type = other DNA
atgccgcggcgtatacgtattgattttaataccacgacagtcggcaactgcgatatttgcgacgagcagaacgac

SEQ ID NO: 397889 - DNA, 75 bp, synthetic construct
  source 1..75: mol_type = other DNA
caaacaacaaagtttaataaagaccactttatcaagcgtggtgtaacggaacacctgtgcccacagtgttctgca

SEQ ID NO: 397890 - DNA, 75 bp, synthetic construct
  source 1..75: mol_type = other DNA
atggcagtttttgctgggactactacaaaccagcttcggcccaaaaatcacggtcgttgggatgatatctgggaa

SEQ ID NO: 397891 - DNA, 75 bp, synthetic construct
  source 1..75: mol_type = other DNA
cggctgacgctggattctatcaccatcaacagcaactttgacggttcaatggtggtggcgctgagcgggcagcgt

SEQ ID NO: 397892 - DNA, 75 bp, synthetic construct
  source 1..75: mol_type = other DNA
gtagccgcattgcccgccgggaatatggttccctcctgtcggttttaatagatcagccacaaaatccggcattac

SEQ ID NO: 397893 - DNA, 75 bp, synthetic construct
  source 1..75: mol_type = other DNA
gcctgcaggtcatgtcggctgtgtatgtggcactgagtcgctgggagccacggctgatgctggattccatcacta

SEQ ID NO: 397894 - DNA, 75 bp, synthetic construct
  source 1..75: mol_type = other DNA
taaagttccgtactctgactgggataaagagcaacttcaggatgcaaacacaagctggatggtcgacgactcatt

SEQ ID NO: 397895 - DNA, 75 bp, synthetic construct
  source 1..75: mol_type = other DNA
acctgatatcgcaaaataagtttgatacagaagcggcaatgaagaaagtgtctgaactggaaacgctggtggcgc

SEQ ID NO: 397896 - DNA, 75 bp, synthetic construct
  source 1..75: mol_type = other DNA
cggcttacgctggactccataaccatcaacagccattttgacggttctatggtggtggagctggccgggcggcgg

SEQ ID NO: 397897 - DNA, 75 bp, synthetic construct
  source 1..75: mol_type = other DNA
acgcaaaattatcggctggtccatgcaatcccggatgacaaaggacattgccctgaacgcactgctgatggttgt

SEQ ID NO: 397898 - DNA, 75 bp, synthetic construct
  source 1..75: mol_type = other DNA
aaataatgattgtgatattttcttatttgattattcgtgggggcataattaccaacattggttaatatcttcatt

SEQ ID NO: 397899 - DNA, 75 bp, synthetic construct
  source 1..75: mol_type = other DNA
acagtctcttgtcgtgaatgaattcaccggcgatgacacgggtgaaaaacgcgtcgtcctcatcacgcctcacgt

SEQ ID NO: 397900 - DNA, 75 bp, synthetic construct
  source 1..75: mol_type = other DNA
cggatattcagggtaccaccggcaatatcactctgcggctctcggccacagaccagaaacgaaaacagactgttg

SEQ ID NO: 397901 - DNA, 75 bp, synthetic construct
  source 1..75: mol_type = other DNA
atattcgtgaggtctacaatttagcttccagcctgcgggctgactttcgtcgtgttgaagactcctggcgtgagg

SEQ ID NO: 397902 - DNA, 75 bp, synthetic construct
  source 1..75: mol_type = other DNA
tggtgctcatagtgattttgacagtattcgcactgtaataagaccggcctggatctggaatacatggaatcagac

SEQ ID NO: 397903 - DNA, 75 bp, synthetic construct
  source 1..75: mol_type = other DNA
ttgtggatgcggccatcgaagccggaaaagtggccccggcaaaccgtgacatgttccttgccacctgccgcacgg

SEQ ID NO: 397904 - DNA, 75 bp, synthetic construct
  source 1..75: mol_type = other DNA
ttgctattgatatccagcttcatgctacgacgccgatagaagacctgttgcgattactaaaaggaatggcagggg

SEQ ID NO: 397905 - DNA, 75 bp, synthetic construct
  source 1..75: mol_type = other DNA
gtatggttattggcagcggtatgtacgaactgggtatttatggttcagtgatgaccttgttggtgctggaagtct

SEQ ID NO: 397906 - DNA, 75 bp, synthetic construct
  source 1..75: mol_type = other DNA
ccgccaggattacgaaccacagggtgccagcgtcactattctggtgagcgaagagccggttgatccgaaacttat

SEQ ID NO: 397907 - DNA, 75 bp, synthetic construct
  source 1..75: mol_type = other DNA
tctctcagaccggaacagtcccttgtcatgaatggattcgccggaggtggagctagcgaaaaacgcgtcgttctc

SEQ ID NO: 397908 - DNA, 75 bp, synthetic construct
  source 1..75: mol_type = other DNA
agccgtacatcgggggatcatcatcggtacgattgtagtcgcaatcctgatgttcggtatgcatctggccggagc

SEQ ID NO: 397909 - DNA, 75 bp, synthetic construct
  source 1..75: mol_type = other DNA
cctatcgtgccctcgttactactaagtttgctggctttcctggtcggaaaccgtttcggtacatccgtcccgcaa

SEQ ID NO: 397910 - DNA, 75 bp, synthetic construct
  source 1..75: mol_type = other DNA
actgtcctccaggctcgcgcccgtagcgagcgtgatgtccgtggtttcatgaaaaccggtcttgctgctgaacat

SEQ ID NO: 397911 - DNA, 75 bp, synthetic construct
  source 1..75: mol_type = other DNA
acgtgaacggataaagaaaaagatctacggaacgcgggaagaagcccgcagtgatatttttgattacatcgaaat

SEQ ID NO: 397912 - DNA, 75 bp, synthetic construct
  source 1..75: mol_type = other DNA
ctggatctgcgtgacagcgggcaacagtgcggagtaaacagagtctggagactgatgaaacgtgtcggaataaag

SEQ ID NO: 397913 - DNA, 75 bp, synthetic construct
  source 1..75: mol_type = other DNA
ttccagttgttgaaacgtgaacggataaagaaaaagatctacggaacgcgggaagaaggtaaccggctcatttaa

SEQ ID NO: 397914 - DNA, 75 bp, synthetic construct
  source 1..75: mol_type = other DNA
cgttcctgaaatcacacgggctggagggcagtatgagccgtcgcggtaactgtcatgacaacgcagtcgcagaaa

SEQ ID NO: 397915 - DNA, 75 bp, synthetic construct
  source 1..75: mol_type = other DNA
atgctcaggccgagatccgccgtctccgaaagagctgaaacgggttaccgacgaacgggacatattaaaaaaagc

SEQ ID NO: 397916 - DNA, 75 bp, synthetic construct
  source 1..75: mol_type = other DNA
aaacagagtctggagactgatgaaacgtgtcggaataaaggctcaggtcggataccgaagcccgcgggcacgtaa

SEQ ID NO: 397917 - DNA, 75 bp, synthetic construct
  source 1..75: mol_type = other DNA
ccagactacagaaactctattaaagagtctatctctgcaattgaatcattatgcagaaaaattacgggtaatgat

SEQ ID NO: 397918 - DNA, 75 bp, synthetic construct
  source 1..75: mol_type = other DNA
tttgttacaagaatagggcacttaaaacactttcgctcttagtgcaaagtttaagatctaaaaaagtgctccttt

SEQ ID NO: 397919 - DNA, 75 bp, synthetic construct
  source 1..75: mol_type = other DNA
cgcgatttggctttgtaccgggagatcgctccgaataacatcacctttgatggtagcgacaagatctatcgtatc

SEQ ID NO: 397920 - DNA, 75 bp, synthetic construct
  source 1..75: mol_type = other DNA
gcactggaacagtgatgctatcgaaatgcagctggcacacgttagcggcggcaccagatcggtatacaaccatgc

SEQ ID NO: 397921 - DNA, 75 bp, synthetic construct
  source 1..75: mol_type = other DNA
atggtagtgtccgctattgccagtacacctcagtacgcctttatccgtgacaactcctgttgctggcctgttcgc

SEQ ID NO: 397922 - DNA, 75 bp, synthetic construct
  source 1..75: mol_type = other DNA
agttcaatccggatgctccggatgagcgttgggtaacggacataacctacatcaggacccacgaaggctggctgt

SEQ ID NO: 397923 - DNA, 75 bp, synthetic construct
  source 1..75: mol_type = other DNA
acggcgagtatatggcaggacaggtacaaggggaatacgtggagttgagcgacggcactttatcgtggttaggga

SEQ ID NO: 397924 - DNA, 75 bp, synthetic construct
  source 1..75: mol_type = other DNA
gggtatgccacttccaatctatctggtgcatacaatatgttttctgagttctggaatgttgctgtctcagctgcg

SEQ ID NO: 397925 - DNA, 75 bp, synthetic construct
  source 1..75: mol_type = other DNA
gccgggtaatggtattgagcaggcaactcactggatgcctctaccagaaccgcctcaggaggttaaccgtggcta

SEQ ID NO: 397926 - DNA, 75 bp, synthetic construct
  source 1..75: mol_type = other DNA
gacggtggtggcgaagacctgtatctcaaggaggtaacccactggatgcctctaccagaaccgccgcaggaggtt

SEQ ID NO: 397927 - DNA, 75 bp, synthetic construct
  source 1..75: mol_type = other DNA
tcttacggctggactgagtgcgataccttcgaagggtattacgattgttcgagaaacaaatggtgggcagttact

SEQ ID NO: 397928 - DNA, 75 bp, synthetic construct
  source 1..75: mol_type = other DNA
acgatgccgttaagtgcaactcctgcggtcgtggcggagtcattcaagtctgtgaggggcaggcgcgagttttat

SEQ ID NO: 397929 - DNA, 75 bp, synthetic construct
  source 1..75: mol_type = other DNA
ctgaaattaccgctgctatggaagataaattgaagatcaacatggagcgccagtggcctgaaccaaaagatggtg

SEQ ID NO: 397930 - DNA, 75 bp, synthetic construct
  source 1..75: mol_type = other DNA
tcgggcgggatattcttgcgaaatcgaccgttgctgccgttatcgaatacctcggtttacgagaactcggcacaa

SEQ ID NO: 397931 - DNA, 75 bp, synthetic construct
  source 1..75: mol_type = other DNA
ttaatggggataggcattatggctttatggagagtcttaaatacggagacgatagcggcaaccatcctcaaacta

SEQ ID NO: 397932 - DNA, 75 bp, synthetic construct
  source 1..75: mol_type = other DNA
tattgttgcggcggcgctgttatatttaatcgccagcggtaaagctggatttgatgctgccgccagcggctttgc

SEQ ID NO: 397933 - DNA, 75 bp, synthetic construct
  source 1..75: mol_type = other DNA
atagagctttcacgtatttatcaggaaatatcttggatgacgtaactcactggatgccgctgccagaaccgccgg

SEQ ID NO: 397934 - DNA, 75 bp, synthetic construct
  source 1..75: mol_type = other DNA
aaccggtgtgctgtgtgtggttctgctggcgatcctcgcggatcagtcgacgatcaatagtgaagcgctcatcaa

SEQ ID NO: 397935 - DNA, 75 bp, synthetic construct
  source 1..75: mol_type = other DNA
cctgaaccaaaagatggtgagcctcgcttgcacattaaagaacccggcaactatccggtaattccggatggttta

SEQ ID NO: 397936 - DNA, 75 bp, synthetic construct
  source 1..75: mol_type = other DNA
gggaaattattctgggctttaacggatgaaagcaataaagagcaaccggacgttattcctgtttatgctgactca

SEQ ID NO: 397937 - DNA, 75 bp, synthetic construct
  source 1..75: mol_type = other DNA
tgccagggagtttgacaggaaaggtgactggcgaatgaaatgggcgacttacatcccgggtcatcctgacgctaa

SEQ ID NO: 397938 - DNA, 75 bp, synthetic construct
  source 1..75: mol_type = other DNA
ggagtacgacgacgatgagccaattggcggtgtaacccactggatgcctctaccagaaccgcctcgattaaagga

SEQ ID NO: 397939 - DNA, 75 bp, synthetic construct
  source 1..75: mol_type = other DNA
taatgccagatgatggtcagcacgtaattattttatgtgatggcgcattcgttctttatgcgcaatatcgagacg

SEQ ID NO: 397940 - DNA, 75 bp, synthetic construct
  source 1..75: mol_type = other DNA
tggtgcgtcgtggaaaccgtcacactggatgccgctaccagaaccgccgcagggagtgaatgatgccgccagtta

SEQ ID NO: 397941 - DNA, 75 bp, synthetic construct
  source 1..75: mol_type = other DNA
tgattgccttcgcggtgggatttgcagtcggtattgcgcagtatatgccaacgctgtggctgggcgcggggcgtt

SEQ ID NO: 397942 - DNA, 75 bp, synthetic construct
  source 1..75: mol_type = other DNA
gtttatcctgcaacccgcctggcagcgcattgattcacggttaattttgattgcgcaaacactgggctggtcgcg

SEQ ID NO: 397943 - DNA, 75 bp, synthetic construct
  source 1..75: mol_type = other DNA
ttattctcgggccaggtaatcccccgacgctggcggtaattagctggcagtggttaacccagggcgacattgacc

SEQ ID NO: 397944 - DNA, 75 bp, synthetic construct
  source 1..75: mol_type = other DNA
tctgactccacatttggctgcgttggccccattggtccactgaaacacctctcaaaagaggctctggaagccgca

SEQ ID NO: 397945 - DNA, 75 bp, synthetic construct
  source 1..75: mol_type = other DNA
tatggcgcgcctggaggaacaccattccccgcgaagatggcgttcgcaaaccagccacggctttactgcccggct

SEQ ID NO: 397946 - DNA, 75 bp, synthetic construct
  source 1..75: mol_type = other DNA
taattttattgctgtgggtggtgatggcggtgatttacgcaccgctgatcccggcagcgctcacgctgataacgc

SEQ ID NO: 397947 - DNA, 75 bp, synthetic construct
  source 1..75: mol_type = other DNA
gttctagcgatatttcaattagtgccaaaaatgtcaatgcatttgcactccgacaaacaggtaatactgttaatg

SEQ ID NO: 397948 - DNA, 75 bp, synthetic construct
  source 1..75: mol_type = other DNA
agaagcagctgtatgaaaaactaggcatccagagtgatattaccttctggcgggatatcttttttcaatatcatc

SEQ ID NO: 397949 - DNA, 75 bp, synthetic construct
  source 1..75: mol_type = other DNA
gcaaatcagaattgtgaaaatgcaagaaatgcattaaaacaaataaaccgaaagaaaaccatctcaagcatgttt

SEQ ID NO: 397950 - DNA, 75 bp, synthetic construct
  source 1..75: mol_type = other DNA
gagttaaggttagttctattgcttcgcttcttcctgacacaccaggaaaacaaacaaaagaacgaaataaagacc

SEQ ID NO: 397951 - DNA, 75 bp, synthetic construct
  source 1..75: mol_type = other DNA
atcatgtttttcagagagtatctttgtaaagaaacatatttctgaaatatgtcttgtcggctttgtcatatattt

SEQ ID NO: 397952 - DNA, 75 bp, synthetic construct
  source 1..75: mol_type = other DNA
ttgtgcaaatggcgagtgtcgatgaaatctccggtcatattgtggacaatattgtcgaactggcgcgtaagcctg

SEQ ID NO: 397953 - DNA, 75 bp, synthetic construct
  source 1..75: mol_type = other DNA
cctggtcaagaaattaggtaacgataaaatcaaactggttctcgagctaacggaacgtaaccctattccggtaac

SEQ ID NO: 397954 - DNA, 75 bp, synthetic construct
  source 1..75: mol_type = other DNA
attttattaagcgagacacaacacagcatatatgtctgcattgtgtgcctttagcgcttttttcaatccagttga

SEQ ID NO: 397955 - DNA, 75 bp, synthetic construct
  source 1..75: mol_type = other DNA
gatttcagttttgtggatatcgacttctggaacaaaactcagcatcgcttcctgaggttagtgcgccaaattgaa

SEQ ID NO: 397956 - DNA, 75 bp, synthetic construct
  source 1..75: mol_type = other DNA
attactgcctgaaattcccggctctcaaacgacgaagtttaataaagaccactttatcaagcgtggtgtaacgga

SEQ ID NO: 397957 - DNA, 75 bp, synthetic construct
  source 1..75: mol_type = other DNA
gtctatggggatttggctatgatttcgaaaaaatgaaagcgcgctgttggtacgaacaccatttccctctattgc

SEQ ID NO: 397958 - DNA, 75 bp, synthetic construct
  source 1..75: mol_type = other DNA
ttgggatgatatatgggaagacggactggaagctgaaaagctaagggaagcattgctgtcattagaacatgcttt

SEQ ID NO: 397959 - DNA, 75 bp, synthetic construct
  source 1..75: mol_type = other DNA
tcgcaccggtttacgcggcggtgggccgatgacgactctgattgaattgcaggagtatcagggcaatcaacaagc

SEQ ID NO: 397960 - DNA, 75 bp, synthetic construct
  source 1..75: mol_type = other DNA
aatatgaaatgatgaattataatgacgggtggtattatgttttagccagatatgataccacacttgttttatcaa

SEQ ID NO: 397961 - DNA, 75 bp, synthetic construct
  source 1..75: mol_type = other DNA
ttgttttatgtttcattagaagagtttcctatagatgatccttattatggagagtttattggtgttcctgtagat

SEQ ID NO: 397962 - DNA, 75 bp, synthetic construct
  source 1..75: mol_type = other DNA
acctgcggatacctgccggaagcggaaatcgtctttcttgatgagatctggaaagcgggtccggcgatacttaac

SEQ ID NO: 397963 - DNA, 75 bp, synthetic construct
  source 1..75: mol_type = other DNA
ggcgactggttaggtcgcattgaagccagcctacaggatgtcggcgcacagattcgccaggcacaacaatgctaa

SEQ ID NO: 397964 - DNA, 75 bp, synthetic construct
  source 1..75: mol_type = other DNA
tccgtattttacggggaatgatgttgccagtctggcaaccctgacaaaagttgggcgggatattcttgcgaaatc

SEQ ID NO: 397965 - DNA, 75 bp, synthetic construct
  source 1..75: mol_type = other DNA
acgttaattattcatttttatatgggagaaggaagttgtcctgcagctcagtttcggattaattataaaaatggc

SEQ ID NO: 397966 - DNA, 75 bp, synthetic construct
  source 1..75: mol_type = other DNA
gccaaaagtttgatcgcccggcgcttaaaattcgcctttcagaatgcccgcgcgtttgaatatctgatgacccgc

SEQ ID NO: 397967 - DNA, 75 bp, synthetic construct
  source 1..75: mol_type = other DNA
aagatcaagaacacatgcttcaggagatgaaagataaaaaagaatcaatggatcgtacggttgcgcggtggttag

SEQ ID NO: 397968 - DNA, 75 bp, synthetic construct
  source 1..75: mol_type = other DNA
ctaaatggtcaaaccccactaaaccttgaggctgttctaaagtttgctggcttactgaaagttccccctgagtca

SEQ ID NO: 397969 - DNA, 75 bp, synthetic construct
  source 1..75: mol_type = other DNA
gcaaaaatgtctgtttatccatagcgactggttaggtcgcattgaagccagcctacaggatgtcggtgcccagat

SEQ ID NO: 397970 - DNA, 75 bp, synthetic construct
  source 1..75: mol_type = other DNA
cgcgtttgaatatctgatgacccgcttctccacaccggaagaagtttttggtcccctttctattcaggcgctaaa

SEQ ID NO: 397971 - DNA, 75 bp, synthetic construct
  source 1..75: mol_type = other DNA
gccaaaagtctgattgcccggcgtttaaaattcgcctttcaaaatgctcgcgcgtttgaatatctgatgacccgc

SEQ ID NO: 397972 - DNA, 75 bp, synthetic construct
  source 1..75: mol_type = other DNA
catcattattatctggcggagaaaaacaacgtattgctctcgcaagagcgttaataaaaaaaccaaaaatattat

SEQ ID NO: 397973 - DNA, 75 bp, synthetic construct
  source 1..75: mol_type = other DNA
gaggtacagttgtcatggttactcatgatcttgagttaatcaatgaaaatatgaatttaattcaactttcaaata

SEQ ID NO: 397974 - DNA, 75 bp, synthetic construct
  source 1..75: mol_type = other DNA
tcctttcaggtggagagaaacaaaggttggctcttgcgcgagcattaataaaaaaacccaatatacttttagccg

SEQ ID NO: 397975 - DNA, 75 bp, synthetic construct
  source 1..75: mol_type = other DNA
tatgaatctcagcggcaaagccgtcgcggcgatggccagttttttccgcattaatccggacgaaattctggtcgc

SEQ ID NO: 397976 - DNA, 75 bp, synthetic construct
  source 1..75: mol_type = other DNA
agagatatttctgctggtttgcccccctcatcagaatttaacactaaaagagcaggtaaaattgtctgaatgttc

SEQ ID NO: 397977 - DNA, 75 bp, synthetic construct
  source 1..75: mol_type = other DNA
atgttatctgtagttaaacctcttcaggaatttggtaagctcgataaatgtttgtccagatacggcacgcgcttc

SEQ ID NO: 397978 - DNA, 75 bp, synthetic construct
  source 1..75: mol_type = other DNA
tatggatattcgcgggatggcggatatccgttacccacaagcggcttctcatcccggtacgattcattgttcggc

SEQ ID NO: 397979 - DNA, 75 bp, synthetic construct
  source 1..75: mol_type = other DNA
gcaaggtgttcagcaactgtttgtttatttgcccgatgagtcagtttattgcagcgaaaaggatggcgagcaatt

SEQ ID NO: 397980 - DNA, 75 bp, synthetic construct
  source 1..75: mol_type = other DNA
caaagcacatcgacgtatctggcaattgccaatcgagacgatcaaaccgtgctggcgattaacgatacccatctg

SEQ ID NO: 397981 - DNA, 75 bp, synthetic construct
  source 1..75: mol_type = other DNA
ataagaaaggagtattttggttttatatttcaagactctcttattaatgagaaacaaagtgtaatacgcaatctt

SEQ ID NO: 397982 - DNA, 75 bp, synthetic construct
  source 1..75: mol_type = other DNA
gttttatcgccctcctattgaattacaggaaaaattcatcaatataaaaaataaaattgaatcaattttttatag

SEQ ID NO: 397983 - DNA, 75 bp, synthetic construct
  source 1..75: mol_type = other DNA
ttgcaatattaaggcgtaacccgctgattcagcagaacgaaattgcggatatgctgcaaatcagccgttcgcgcg

SEQ ID NO: 397984 - DNA, 75 bp, synthetic construct
  source 1..75: mol_type = other DNA
atgatccgcaaccaacatattgattctgcaatttcgggacgttacactgttcctgcaccttataaagcgggtgcc

SEQ ID NO: 397985 - DNA, 75 bp, synthetic construct
  source 1..75: mol_type = other DNA
ggaagaagttgctccgcctactcagcggcccattccgcctgtttcgggtaaagccttttattatcaaccagtttt

SEQ ID NO: 397986 - DNA, 75 bp, synthetic construct
  source 1..75: mol_type = other DNA
atggtaaacctggtcatagtttcacatagcgcccgactgggagaaggtgtcggtgaattagcccgtcagatgtta

SEQ ID NO: 397987 - DNA, 75 bp, synthetic construct
  source 1..75: mol_type = other DNA
ttttcgcggcgaaggtgatgagttacattacaatgcgcgcgttcacctcggcgagttgggcacccatttcccacc

SEQ ID NO: 397988 - DNA, 75 bp, synthetic construct
  source 1..75: mol_type = other DNA
tagggaaaatcaaggatcaagataagaaacgtcttgagaaatatatggatgttattgtcagcggtactgtagagg

SEQ ID NO: 397989 - DNA, 75 bp, synthetic construct
  source 1..75: mol_type = other DNA
tgctgagtcaaatagtgagtttagtttgagaaagttagtgtatatatttgaacgaaagagattggagaaatacga

SEQ ID NO: 397990 - DNA, 75 bp, synthetic construct
  source 1..75: mol_type = other DNA
aagattcatgagcttattaataataaagaattatttgataaagtctcgtctaatgctcgcacttttgttgaaaca

SEQ ID NO: 397991 - DNA, 75 bp, synthetic construct
  source 1..75: mol_type = other DNA
gttgcctgccacttcaagcgcatgcaccagaacatcgttgacaaaatcgagtatctgaactgctcgcgtgaattt

SEQ ID NO: 397992 - DNA, 75 bp, synthetic construct
  source 1..75: mol_type = other DNA
tcaaaatcgaagtcgtcaacggcaaggccgttattttctctttgcatgtagcctgccatttcaagcgcatgcacc

SEQ ID NO: 397993 - DNA, 75 bp, synthetic construct
  source 1..75: mol_type = other DNA
gagttgcattgaagcgttccatgaggctgaaaccgtccaggtgcattccgctttccgtcgtcatcaacgggaggt

SEQ ID NO: 397994 - DNA, 75 bp, synthetic construct
  source 1..75: mol_type = other DNA
gattgcaaaagggccagaggctgaagaggcgttggtcgcttttcgccagttggctgaagataactttggtgaaat

SEQ ID NO: 397995 - DNA, 75 bp, synthetic construct
  source 1..75: mol_type = other DNA
gctcagttcaccaccagcgaaattggcgtttccggtggtggaagttatccattgcatacggaggctgccatcatg

SEQ ID NO: 397996 - DNA, 75 bp, synthetic construct
  source 1..75: mol_type = other DNA
tggtcaggctgttacttcatccctggctgttgccaacttcttctccaaacgtcatgacgatgtactgaaaaagat

SEQ ID NO: 397997 - DNA, 75 bp, synthetic construct
  source 1..75: mol_type = other DNA
attagtcaagatggtatattaaaacttatgttttatcgccctcctattgaattacaggaaaaattcatcaatata

SEQ ID NO: 397998 - DNA, 75 bp, synthetic construct
  source 1..75: mol_type = other DNA
agagcaggccggtgcggttgctattcgtatagaaggagtggcaaacctgaaagccactcgtgcggtagtgagcgt

SEQ ID NO: 397999 - DNA, 75 bp, synthetic construct
  source 1..75: mol_type = other DNA
tgcgttggcgcaggcgggcgcggatattatcgccattgacggtaccgaacgcccgcgtccggtgcctgttgaaac

SEQ ID NO: 398000 - DNA, 75 bp, synthetic construct
  source 1..75: mol_type = other DNA
atataggcacaaaagatccggtcactgggttaaacacttttatttatgataatgtgggtgaggcaaatatcagag

SEQ ID NO: 398001 - DNA, 75 bp, synthetic construct
  source 1..75: mol_type = other DNA
gcggggaaatcttaaacaaccaaacagtaaaagagaaactcataattcacgtagtcactgggtagcagcatggaa

SEQ ID NO: 398002 - DNA, 75 bp, synthetic construct
  source 1..75: mol_type = other DNA
ctggtcgatggacgacgtcagagcggtcgggaatccagaccaaatggcagcggcggttttgaagccggatttatc

SEQ ID NO: 398003 - DNA, 75 bp, synthetic construct
  source 1..75: mol_type = other DNA
attatcgcgattgatggcaccgatcgtccgcgtccggtgcctgttgaaacgctgcttgcgcgtattcaccaccac

SEQ ID NO: 398004 - DNA, 75 bp, synthetic construct
  source 1..75: mol_type = other DNA
atgaaacttgagtcatctttaaaacacttcagccctatggggatgcatatcagcaacgatgtaaaaggaacttcg

SEQ ID NO: 398005 - DNA, 75 bp, synthetic construct
  source 1..75: mol_type = other DNA
tcctccttttctgcaatatatgacacgatatgaggcagaactaaaaaacacctcagcattagatccactggatac

SEQ ID NO: 398006 - DNA, 75 bp, synthetic construct
  source 1..75: mol_type = other DNA
ctgtcggcaatctggaactggcgaatgatgaggtacgctttaacgcgcgctttggtggcattccgcgtcaggttt

SEQ ID NO: 398007 - DNA, 75 bp, synthetic construct
  source 1..75: mol_type = other DNA
agaaagctgtttttatagaaaatgaatatgctgcaacggattctctcgctttgactggaggactgcgtctcgata

SEQ ID NO: 398008 - DNA, 75 bp, synthetic construct
  source 1..75: mol_type = other DNA
gcggcggtaaaggcgaggttctagaccgcaaggccacaagcgagcgcggcgcgccggtgtttaaaacctgcgagc

SEQ ID NO: 398009 - DNA, 75 bp, synthetic construct
  source 1..75: mol_type = other DNA
gcttttgctgagtattcccgatcggcggccaccagcgtaacatgccatagttgcagtggtaccggactaacaccc

SEQ ID NO: 398010 - DNA, 75 bp, synthetic construct
  source 1..75: mol_type = other DNA
tgtgaatgataaatggcgtgtatctgcaaactatacattcactgactcccgtcgagaaagcgatgacgaaagtct

SEQ ID NO: 398011 - DNA, 75 bp, synthetic construct
  source 1..75: mol_type = other DNA
ttctccccggttgttatgccggtgaaggtggcgcgctgttttcatgaccacaccggctggtttaacaacatccgg

SEQ ID NO: 398012 - DNA, 75 bp, synthetic construct
  source 1..75: mol_type = other DNA
aaaccctgctgaaccatatctcactggcatgtgaccttaatcaggaaattcaccgggcattaatcgccgagctgg

SEQ ID NO: 398013 - DNA, 75 bp, synthetic construct
  source 1..75: mol_type = other DNA
caacatatagggattgggaaagattatctaaatgtttaaatgcaataaaaaaacaaagatatcccgcagagttta

SEQ ID NO: 398014 - DNA, 75 bp, synthetic construct
  source 1..75: mol_type = other DNA
cttacgattttaaagaccgacagttcgttgtaaaaagagggctgagaagcccttttttacgaatttattatatca

SEQ ID NO: 398015 - DNA, 75 bp, synthetic construct
  source 1..75: mol_type = other DNA
caaagcctgatatgttcttcagagatatgattaagaaaagacgtggggatacaataaaagactcaaataataaaa

SEQ ID NO: 398016 - DNA, 75 bp, synthetic construct
  source 1..75: mol_type = other DNA
gacatggcgtttatcactcaactgaccggcctaaccgataagtggtttgacaaactcatcaaagatgggggcttt

SEQ ID NO: 398017 - DNA, 75 bp, synthetic construct
  source 1..75: mol_type = other DNA
ctaaccactcaccgttggtcattgccgaacagttcggcacgcttaatacactctatccggggcgaatcgatttgg

SEQ ID NO: 398018 - DNA, 75 bp, synthetic construct
  source 1..75: mol_type = other DNA
acccgcgccgcgaaattagcgatggattatggtttcactgttcttaatctttataagctttatctgattgttgat

SEQ ID NO: 398019 - DNA, 75 bp, synthetic construct
  source 1..75: mol_type = other DNA
ggattcacatctatggatattggtctaaattaccagattctgccagacatgctgattaattttgccgttcttaac

SEQ ID NO: 398020 - DNA, 75 bp, synthetic construct
  source 1..75: mol_type = other DNA
accactcaccgttggtgattgccgaacagttcggcacgctcaatacgctctatccggggcgaatcgatttggggc

SEQ ID NO: 398021 - DNA, 75 bp, synthetic construct
  source 1..75: mol_type = other DNA
ttaacgggcagattttcgaccaccaggcgcgcctgcattcgtttgaactggcgatggatgtgaaggaagagttgt

SEQ ID NO: 398022 - DNA, 75 bp, synthetic construct
  source 1..75: mol_type = other DNA
agaacagttcggcacgctcaatacactctatccggggcgaatcgatttggggctgggtcgtgctccgggtagtga

SEQ ID NO: 398023 - DNA, 75 bp, synthetic construct
  source 1..75: mol_type = other DNA
aaaaaataagaaattttggaattgaaaatggtaaagttcgatcacataattacaatctagattttatatttagaa

SEQ ID NO: 398024 - DNA, 75 bp, synthetic construct
  source 1..75: mol_type = other DNA
tgagatgaagctttcaggtaatcaggatgaagctctgtaccgtgaactgctgctggggcagtgccacgccctgca

SEQ ID NO: 398025 - DNA, 75 bp, synthetic construct
  source 1..75: mol_type = other DNA
atgaataccaataacattaaaaaatatgccccacaggcccgtaacgacttccgtgatgcggtgatccagaagcta

SEQ ID NO: 398026 - DNA, 75 bp, synthetic construct
  source 1..75: mol_type = other DNA
agctttttcacagatctcaggtgaagtagtacaaacgtgtgcgtgggttatcggtaactactcgattccagtata

SEQ ID NO: 398027 - DNA, 75 bp, synthetic construct
  source 1..75: mol_type = other DNA
caaatcctccgtatatgggcggtaaaggcatgaatgcagatcttaaagattttgcaaggaaatactatccaaata

SEQ ID NO: 398028 - DNA, 75 bp, synthetic construct
  source 1..75: mol_type = other DNA
tcggtcgtcaatggctgcaaacctatccagattctgccattaaatcgcagatggaatactacattgagccagctg

SEQ ID NO: 398029 - DNA, 75 bp, synthetic construct
  source 1..75: mol_type = other DNA
agccggcagcgaagcaattgattgagtttgttcaccaggctttggttctgtccattcgttacgatgctgtcattg

SEQ ID NO: 398030 - DNA, 75 bp, synthetic construct
  source 1..75: mol_type = other DNA
gaaggcttttgagtgtttggtttacttacataggtacaacgagggcacgctttctcgtatgcgtaccgagtatgt

SEQ ID NO: 398031 - DNA, 75 bp, synthetic construct
  source 1..75: mol_type = other DNA
tcctgataatccttttgggcatgctgcggcggcaaatcgatatggattaatgagttcgggaactggggatgagat

SEQ ID NO: 398032 - DNA, 75 bp, synthetic construct
  source 1..75: mol_type = other DNA
gcggtagatgacgaagcggaactgctgctgccggataacctgacccgtactgactccattctacgtgggctggtt

SEQ ID NO: 398033 - DNA, 75 bp, synthetic construct
  source 1..75: mol_type = other DNA
tcatgggccgctactctcttgatcgagaaggtttggtctacgcccacttaggtaatgaaggttttgctcaactgg

SEQ ID NO: 398034 - DNA, 75 bp, synthetic construct
  source 1..75: mol_type = other DNA
tatagctacatttttgaagagtgggttcgcgctactgaagttgtacaggagttagagcaggaaaataaccaaatt

SEQ ID NO: 398035 - DNA, 75 bp, synthetic construct
  source 1..75: mol_type = other DNA
aacagataaggcggggacatctcgtagatggtatgggaatgctgacttcgttatgaactgggagaatgacggata

SEQ ID NO: 398036 - DNA, 75 bp, synthetic construct
  source 1..75: mol_type = other DNA
ttattgaatgcaaaacccacaatttctattttagccttgctgaatccaacgttaaacatgagcacaggaactgtt

SEQ ID NO: 398037 - DNA, 75 bp, synthetic construct
  source 1..75: mol_type = other DNA
gcccaacttgggtttatgacaccatttgtatggatgtttatttctagttatgaagagcttcgttctcgattgatt

SEQ ID NO: 398038 - DNA, 75 bp, synthetic construct
  source 1..75: mol_type = other DNA
aacgaaaacaatcttgccttggcagaaataacattggaaaataatgttttccagtcattaagctcaatttcaaaa

SEQ ID NO: 398039 - DNA, 75 bp, synthetic construct
  source 1..75: mol_type = other DNA
aaggttaactacggcaagtttggcgatctgctggcagatgtcaaagccatcaccggcaatgccccagaggtgatc

SEQ ID NO: 398040 - DNA, 75 bp, synthetic construct
  source 1..75: mol_type = other DNA
gaactgcgtagttatgacgaccgcctgcgtcactatgctgatatgagaatcagtattgatctcgacgatggcgtt

SEQ ID NO: 398041 - DNA, 75 bp, synthetic construct
  source 1..75: mol_type = other DNA
aaaaaaggcgaatcttcactcgataccattcgccgctatctttccacgcagttctggaaagatcatatgaaaatg

SEQ ID NO: 398042 - DNA, 75 bp, synthetic construct
  source 1..75: mol_type = other DNA
ccaattctacatctctgaaaagaaagatcaggtaatgggtaaggtggtcaagagtgaagacatccctgccgccac

SEQ ID NO: 398043 - DNA, 75 bp, synthetic construct
  source 1..75: mol_type = other DNA
tggatcttgatgatggtgtgaaagtgaattacggcaagtttggtgatctgttggctgatgttaaggccattaccg

SEQ ID NO: 398044 - DNA, 75 bp, synthetic construct
  source 1..75: mol_type = other DNA
cagagcaacttgagaagcagattgaaacggcagactcgaccagtgaagcgaaccgcttcaagaaagagttggatg

SEQ ID NO: 398045 - DNA, 75 bp, synthetic construct
  source 1..75: mol_type = other DNA
gcgtacaactcaatggtgactatgcaatcatggatgtttttgtctagctatgaaaatatgcgtgcgaatatattg

SEQ ID NO: 398046 - DNA, 75 bp, synthetic construct
  source 1..75: mol_type = other DNA
tggctgtatgatgggtcgttactctcttgatcgtgagggcgtaatgtatgctcattccgacaatgaagaatttga

SEQ ID NO: 398047 - DNA, 75 bp, synthetic construct
  source 1..75: mol_type = other DNA
ttaatgtactgtcattgcaggaaagtaaccatcttgacctgccgaccttatggaaagcactcaacctatcgggaa

SEQ ID NO: 398048 - DNA, 75 bp, synthetic construct
  source 1..75: mol_type = other DNA
gaccttattgtgacctccatgcgaaccaacagtgattatggcgtccctacgcttaacggcgccgccctgctcaca

SEQ ID NO: 398049 - DNA, 75 bp, synthetic construct
  source 1..75: mol_type = other DNA
gggttacataatttttcttgtttggaagtttacaattacatactgtacttttataagcaagagcggcctgatctg

SEQ ID NO: 398050 - DNA, 75 bp, synthetic construct
  source 1..75: mol_type = other DNA
agacggcaatacggcgtggagcggggagtatgatgagtggggaaacctgctgaatgaggaaaacccgcatcacct

SEQ ID NO: 398051 - DNA, 75 bp, synthetic construct
  source 1..75: mol_type = other DNA
tgattatatttatgagcaagataagaagtttgaagaattgaagaaaatagaaactattaatcatggtatgaatgg

SEQ ID NO: 398052 - DNA, 75 bp, synthetic construct
  source 1..75: mol_type = other DNA
cgcattgaaggtgtggcaaatctgcaagccacgcgtgcggtggtgagcgtgccgattattggaattgtgaaacgc

SEQ ID NO: 398053 - DNA, 75 bp, synthetic construct
  source 1..75: mol_type = other DNA
atgttatggagcagcaacgatgttacgcagcagggcagtcgccctaaaacaaagttaggcatcacaaagtacagc

SEQ ID NO: 398054 - DNA, 75 bp, synthetic construct
  source 1..75: mol_type = other DNA
caacagcaacgattccgtcacactgcgcctcatgactgagcatgaccttgcgatgctctatgagtggctaaatcg

SEQ ID NO: 398055 - DNA, 75 bp, synthetic construct
  source 1..75: mol_type = other DNA
ccattgctaagcgcgtgaaagaaacaccaaacgcgacctggccggtacatgccgtaattactaactctacctatg

SEQ ID NO: 398056 - DNA, 75 bp, synthetic construct
  source 1..75: mol_type = other DNA
cgtgctctgactgacttcaaacgtgcgttcgacctgaacctgcgtgtgaaaaacatgctgccgtctctgtatcgt

SEQ ID NO: 398057 - DNA, 75 bp, synthetic construct
  source 1..75: mol_type = other DNA
ctatgatttctttggtccgaataccatgaaatctgatatttccatttcagtatctgaactgggttctctgctgga

SEQ ID NO: 398058 - DNA, 75 bp, synthetic construct
  source 1..75: mol_type = other DNA
tatgtctcattggtgaattgcttgattgcatacaaaaaagcgctgagcgcaataataaaaatataacatacggta

SEQ ID NO: 398059 - DNA, 75 bp, synthetic construct
  source 1..75: mol_type = other DNA
ccggctacgtttatgtcaacgtaaaaccgcaaacatggattgctggcaagaattcgacctcaaacccagctcgca

SEQ ID NO: 398060 - DNA, 75 bp, synthetic construct
  source 1..75: mol_type = other DNA
ggcctatttctggtgtaccggttaattcaaacgtaaggatgactagcagttatagcactgcctcttcaactggta

SEQ ID NO: 398061 - DNA, 75 bp, synthetic construct
  source 1..75: mol_type = other DNA
atgcaagctgttttttcttccccgtctccctcccctgtgacgccactgatgccgctgccggacatcacgcaggag

SEQ ID NO: 398062 - DNA, 75 bp, synthetic construct
  source 1..75: mol_type = other DNA
gtaaaaatgtcgcctgggcacagtctgaggtcagcgcatggatggcagaccgtatcagcgcccgtgggcggggat

SEQ ID NO: 398063 - DNA, 75 bp, synthetic construct
  source 1..75: mol_type = other DNA
ttcccgcagcagatatcactgggtggaaaaaatgtggcctgggtacagtcggaggtcagtgcatggatggcggcg

SEQ ID NO: 398064 - DNA, 75 bp, synthetic construct
  source 1..75: mol_type = other DNA
ttacgccacatgccgaaaaactcgcgccgttactggctcaatggcaccaaaaaggcttaagccgcgatgcgtcaa

SEQ ID NO: 398065 - DNA, 75 bp, synthetic construct
  source 1..75: mol_type = other DNA
tagctaaagattcaagtgaaattctttatggtaaagttgattatgcaaaaaatgagattgatcggcttgtttgta

SEQ ID NO: 398066 - DNA, 75 bp, synthetic construct
  source 1..75: mol_type = other DNA
gggcacgctttctcgtatgcgtaccgagtatgtcacgcccttactaggcaaatacgaagcttatgctgagcagct

SEQ ID NO: 398067 - DNA, 75 bp, synthetic construct
  source 1..75: mol_type = other DNA
ccgccttgctgacgaactgccggagttcaatattaaaaccattgccgccagcctgcgtgtaagcgtgcagcaaga

SEQ ID NO: 398068 - DNA, 75 bp, synthetic construct
  source 1..75: mol_type = other DNA
atgcaagctgttttttcctccccgtctcccgcccctgtgacgccactgatgccgctgccggacatcacacaggag

SEQ ID NO: 398069 - DNA, 75 bp, synthetic construct
  source 1..75: mol_type = other DNA
acgcaaccgatggcagtgctgaaaggcgatttggcatcgattaccgcgcaacttgaacaatggcgtaatgtgcca

SEQ ID NO: 398070 - DNA, 75 bp, synthetic construct
  source 1..75: mol_type = other DNA
aagtattgctggtacgccggagtcgtgaacagcgcgagcgtgtgttagccagccaacagcgtgaaaccctcagcg

SEQ ID NO: 398071 - DNA, 75 bp, synthetic construct
  source 1..75: mol_type = other DNA
tcgtttctgggcaagcaatattttgcagtctcttaatgaactaattcaggtacttaatgcgccagcgattgtgcg

SEQ ID NO: 398072 - DNA, 75 bp, synthetic construct
  source 1..75: mol_type = other DNA
tgcgacacactgcacgttttgtggtttttatcagaaccgttttaatgaagatgcgtgtgctcattataccgacgc

SEQ ID NO: 398073 - DNA, 75 bp, synthetic construct
  source 1..75: mol_type = other DNA
gattcgagaaatcgagctggaggcggacagtgtattgcatcagtccgcgcccatccacgcagtctatttcggtgg

SEQ ID NO: 398074 - DNA, 75 bp, synthetic construct
  source 1..75: mol_type = other DNA
gtcagaacgatccttcttcagataatagttatcttgattttccatttcccgacagggagctaaaacataagccat

SEQ ID NO: 398075 - DNA, 75 bp, synthetic construct
  source 1..75: mol_type = other DNA
ttacattgaaggaaacataaagaaaaatcatggctggataacaaagaattattacaaacagcgatatcagttctt

SEQ ID NO: 398076 - DNA, 75 bp, synthetic construct
  source 1..75: mol_type = other DNA
ctggataacaaagaattattacaaacagcgatatcagttcttaaagacaaccaaaatttaaatggtaaaatgtaa

SEQ ID NO: 398077 - DNA, 75 bp, synthetic construct
  source 1..75: mol_type = other DNA
tcacaatggacttacttgtgaagctgacactctcggctcttatggctacgtttatatcgccatttatccccatca

SEQ ID NO: 398078 - DNA, 75 bp, synthetic construct
  source 1..75: mol_type = other DNA
accgaaaggtttagatggatatgaattatggaataatgtacatactgcaactctagaagactttaaaattaaaga

SEQ ID NO: 398079 - DNA, 75 bp, synthetic construct
  source 1..75: mol_type = other DNA
agagaaagatggtggaacgctatcaaaggtaataaccttgctgatgactatcttgatttcccgttccctgaacgt

SEQ ID NO: 398080 - DNA, 75 bp, synthetic construct
  source 1..75: mol_type = other DNA
atgcaaaaacttgaaaaccggtgtgagctgctgctcatccagcatcagaaatggatgacaaacgtgacgaggctt

SEQ ID NO: 398081 - DNA, 75 bp, synthetic construct
  source 1..75: mol_type = other DNA
gcggccagccacagaccaccggcacagcgccagcggcaggaaacgaaccgcctccgttcgacgatgatataccgt

SEQ ID NO: 398082 - DNA, 75 bp, synthetic construct
  source 1..75: mol_type = other DNA
gagcagactgaatggcatcgcgtggtattgttcggcaagctggccgaggtcgccggtgaatatctgcgtaaaggt

SEQ ID NO: 398083 - DNA, 75 bp, synthetic construct
  source 1..75: mol_type = other DNA
caggggaagagataatcttcattttagaatctaacagcccaccacttacaaacgaagaattagaaattattcaat

SEQ ID NO: 398084 - DNA, 75 bp, synthetic construct
  source 1..75: mol_type = other DNA
aaataattagtctgccactaagtgtaatcgataaaaaatcttacctagcaagtgttcatgaaccaaacgataccg

SEQ ID NO: 398085 - DNA, 75 bp, synthetic construct
  source 1..75: mol_type = other DNA
atctgctgctcatccagcatcagaaatggatggcaagtgtaacccggtttattgtcgctcatggaatgggctctc

SEQ ID NO: 398086 - DNA, 75 bp, synthetic construct
  source 1..75: mol_type = other DNA
ggctcattcagtgacgatgaagctttgcgtctggaccaggcatttccactgatgatgaaacagcttgagcggatg

SEQ ID NO: 398087 - DNA, 75 bp, synthetic construct
  source 1..75: mol_type = other DNA
cctatttcccgcgttgatgcgaaaagcggtcaaaccctgcgtattaagctcggcagtaatgcagggctggctaaa

SEQ ID NO: 398088 - DNA, 75 bp, synthetic construct
  source 1..75: mol_type = other DNA
taccaccccgtttattatcaccccgccgatttcgcgcgttgacgccaagagcggccagacgctgcgtattaagct

SEQ ID NO: 398089 - DNA, 75 bp, synthetic construct
  source 1..75: mol_type = other DNA
gtgccatttttagtttcgcagcaagcgccagtaatatcattgtgaatggtacgcgctttatttatccgggaaatg

SEQ ID NO: 398090 - DNA, 75 bp, synthetic construct
  source 1..75: mol_type = other DNA
catctggatgtgaggcggaataatagccgaaattcggtaaggggcttcgaaggggcttttaaggggcttcgaagc

SEQ ID NO: 398091 - DNA, 75 bp, synthetic construct
  source 1..75: mol_type = other DNA
gacgccgttgactgggtacttaaagaggcttgccaggttgctggcattgaagtggtatctgcgccagttgcctct

SEQ ID NO: 398092 - DNA, 75 bp, synthetic construct
  source 1..75: mol_type = other DNA
tctttgacgaaatcctgaggcgtattaatcaccatgatgtgcgggatgatattgagcgccgggcttatgaaatcg

SEQ ID NO: 398093 - DNA, 75 bp, synthetic construct
  source 1..75: mol_type = other DNA
aagagataaaacccttctggtccatggcgaaaaaatcgccacggacccactggtggattcttgtcccgttctgac

SEQ ID NO: 398094 - DNA, 75 bp, synthetic construct
  source 1..75: mol_type = other DNA
aaacctggcgataaccgttgtgctggggtaagaaatgaatattccgcgttgctggaaaatccttttttatcatcc

SEQ ID NO: 398095 - DNA, 75 bp, synthetic construct
  source 1..75: mol_type = other DNA
cttcatggcgaaaaaatcgccacaaaccaggcaggggatgttcagaacgtcaatcctggtcagccagcaggcacg

SEQ ID NO: 398096 - DNA, 75 bp, synthetic construct
  source 1..75: mol_type = other DNA
gatctccctcgcggtgttatctctcgcaatactgtttgctgttacgcatatacaccaacttatcgtattaattga

SEQ ID NO: 398097 - DNA, 75 bp, synthetic construct
  source 1..75: mol_type = other DNA
acaccaaccgcagcagcctgaagccgattccgcgatgagcgggaagccgattgggttaacccgggcgatgccggg

SEQ ID NO: 398098 - DNA, 75 bp, synthetic construct
  source 1..75: mol_type = other DNA
cggtaagcggcacgaacaaccagcgttgtgtgaatcatatttctgaacctgatacagaaattccgcctggtttca

SEQ ID NO: 398099 - DNA, 75 bp, synthetic construct
  source 1..75: mol_type = other DNA
cctgactgtccccacgtcagatacgcactaactcatgtggcagccgtgcctgcccgtcctgcggaaaaaaggcca

SEQ ID NO: 398100 - DNA, 75 bp, synthetic construct
  source 1..75: mol_type = other DNA
ctggagcaactcacattattaatcgcccaggaaaatcagtttgccgaaatgggccaggcgctggaagtgctttac

SEQ ID NO: 398101 - DNA, 75 bp, synthetic construct
  source 1..75: mol_type = other DNA
ttcaaaaacagccacaatccctgcgcctcgttattggaaaacatctggcggagccgcgctggcatgatagctgcg

SEQ ID NO: 398102 - DNA, 75 bp, synthetic construct
  source 1..75: mol_type = other DNA
atgcttaagccagagagcgaagaaagaatgattcatcttcctggggttattctgatagataaaacagaatatgcg

SEQ ID NO: 398103 - DNA, 75 bp, synthetic construct
  source 1..75: mol_type = other DNA
gatcgcacgctgtggctatgtgaatccaacggcagaccggatgaaaaggagtttcacgctcacctgcatagctgg

SEQ ID NO: 398104 - DNA, 75 bp, synthetic construct
  source 1..75: mol_type = other DNA
gcaaaccacactgtgtgcggcgatagatcgaacgttgtggttatgtgaatccaacggcaggccggacgaaaaaga

SEQ ID NO: 398105 - DNA, 75 bp, synthetic construct
  source 1..75: mol_type = other DNA
ctttatggcccgctggattggatgggcgatgcagcaaaataatggcgacgtgttagtcgtctgcggtggctggca

SEQ ID NO: 398106 - DNA, 75 bp, synthetic construct
  source 1..75: mol_type = other DNA
accaaatccggtacccgcctcttcgatcttgaacagaaactggcatccggcgctgaaaatccgggtgagaagaaa

SEQ ID NO: 398107 - DNA, 75 bp, synthetic construct
  source 1..75: mol_type = other DNA
aagctatcgaaaactcccaaaaagaagtaaaggagcttatcgaagaacagcgtaaatccatcaaccagaccggtg

SEQ ID NO: 398108 - DNA, 75 bp, synthetic construct
  source 1..75: mol_type = other DNA
gataacttcgttaaaaacatgctgaccatcctttgcgaagagcgcctggcgctggcccactatcgcccggcagcg

SEQ ID NO: 398109 - DNA, 75 bp, synthetic construct
  source 1..75: mol_type = other DNA
tatttatgcacgcacgactgacagaaaaagaatttaaccagccatactggcgaattaatgaagagtcatgttact

SEQ ID NO: 398110 - DNA, 75 bp, synthetic construct
  source 1..75: mol_type = other DNA
atgacagtgatgacgctcaatctcgttgaaaaacaaccagcaactatgcgccggataattggtaagcatcttgcc

SEQ ID NO: 398111 - DNA, 75 bp, synthetic construct
  source 1..75: mol_type = other DNA
acgtgagttgtttagcctgtttgagtacgcgccgacgatattaacatcggtcaagcctgagcaatatttgcatta

SEQ ID NO: 398112 - DNA, 75 bp, synthetic construct
  source 1..75: mol_type = other DNA
tggcacgctccggcactggcaaaaatgtggcgcgaatgtttgcaagaaatgaacaagccagaattgccttcgctg

SEQ ID NO: 398113 - DNA, 75 bp, synthetic construct
  source 1..75: mol_type = other DNA
cgaacggttaacggtttgcttccatgctcagttaaaacagcgtcacgcaacgatgtgttttgaagaaatgaacga

SEQ ID NO: 398114 - DNA, 75 bp, synthetic construct
  source 1..75: mol_type = other DNA
attattataatcagatgatggagcgcgaacggctaacagtttgctttcatgcgcagttaaaacaacgtcacgcaa

SEQ ID NO: 398115 - DNA, 75 bp, synthetic construct
  source 1..75: mol_type = other DNA
ggattggatgggcgatgcagcaaaatgatggcgacgtattggttgtctgcggtggctggcacgctccggcactgg

SEQ ID NO: 398116 - DNA, 75 bp, synthetic construct
  source 1..75: mol_type = other DNA
aagaaaaatcatggctggataacaaagaattattacaaacagcgatatcagttcttaaagacaaccaaaatttaa

SEQ ID NO: 398117 - DNA, 75 bp, synthetic construct
  source 1..75: mol_type = other DNA
aaaagaattcaatcagccatactggcgaattaatgaagagtcatgttactggcgtgatgctttattccgtgcatt

SEQ ID NO: 398118 - DNA, 75 bp, synthetic construct
  source 1..75: mol_type = other DNA
cgcattaatgaagaatcatgttactggcgtgatgctttattccgtgcattacgtgaattattcagcctgtttgag

SEQ ID NO: 398119 - DNA, 75 bp, synthetic construct
  source 1..75: mol_type = other DNA
ccatttgccgaattttcgccggagtggcaggcgctacaagccgcacgtcgcattcaggcgcaaacgtactttatc

SEQ ID NO: 398120 - DNA, 75 bp, synthetic construct
  source 1..75: mol_type = other DNA
attgaagccgcctgctttggcgccacactccaggaagccgcacgccataaattagaagccgatatgctggacgcg

SEQ ID NO: 398121 - DNA, 75 bp, synthetic construct
  source 1..75: mol_type = other DNA
cgctgattaaagaagccctgaatgcgccgttgccgtggagctatcgcggcgttattcatcccgataccgatccga

SEQ ID NO: 398122 - DNA, 75 bp, synthetic construct
  source 1..75: mol_type = other DNA
ccaacggcagaccggacgaaaaagaatttcacgcccatttgcatagctggcgagcgttgtgtcatatcctgcgcg

SEQ ID NO: 398123 - DNA, 75 bp, synthetic construct
  source 1..75: mol_type = other DNA
tgccacccgcatggataacagcgataccctgtgggatcacttgttcgaagatgaaagccagcaaactgcattacc

SEQ ID NO: 398124 - DNA, 75 bp, synthetic construct
  source 1..75: mol_type = other DNA
agtgaaaagcgccttgatgtgctggcaggatacctttccggaatgcctgccccggtctggcaaaactggtgctgg

SEQ ID NO: 398125 - DNA, 75 bp, synthetic construct
  source 1..75: mol_type = other DNA
ccgatgaagaaaaccaaaagcgcggtcgccccttgcaatatcagaaccgcggcaccattaagtacgtatggacca

SEQ ID NO: 398126 - DNA, 75 bp, synthetic construct
  source 1..75: mol_type = other DNA
gtctggctgaaaggtgcacattcggaagaagaagcggcgaaaatcggtcgtgcactggtgcagcacgttaacgcc

SEQ ID NO: 398127 - DNA, 75 bp, synthetic construct
  source 1..75: mol_type = other DNA
cgtatgcatcgcgctggttatgtcgcgcctaatctcggcgaagtgccgccgcacgccagccctggcggctacgtg

SEQ ID NO: 398128 - DNA, 75 bp, synthetic construct
  source 1..75: mol_type = other DNA
accgtaaacgccttcgccgtccgctgagcgaatatcagcgtaatgttccgcctcatgtacgcgccgctcgccttg

SEQ ID NO: 398129 - DNA, 75 bp, synthetic construct
  source 1..75: mol_type = other DNA
cgcatcgtttatatgctggggccggagaatggcgatgcctccgcgcttgatttcgaactggagtacgtcgccagt

SEQ ID NO: 398130 - DNA, 75 bp, synthetic construct
  source 1..75: mol_type = other DNA
agaatggcgacgcctccgcgctcgattttgaactggagtacgtcgccagccgcccgcagctactggaaaaactca

SEQ ID NO: 398131 - DNA, 75 bp, synthetic construct
  source 1..75: mol_type = other DNA
acaatacagcggcaaaagccattgcccatgccattctcggtggtgtgacagcagcccttcagggcaacagtgcgg

SEQ ID NO: 398132 - DNA, 75 bp, synthetic construct
  source 1..75: mol_type = other DNA
cgttgtttgccagcagttttctcagcgctacactattacccggtaattccgaaatagttctggtggcaatgttgc

SEQ ID NO: 398133 - DNA, 75 bp, synthetic construct
  source 1..75: mol_type = other DNA
ttttttgtgccttggtaaagcgttacgttatgttgcagttgcagcagcgaccgttcagggcatgatgtggtggca

SEQ ID NO: 398134 - DNA, 75 bp, synthetic construct
  source 1..75: mol_type = other DNA
attcaaaatactggagtctacgttaccgctttggtggcaacgagaagatactgcgctggggaaataccctcaaga

SEQ ID NO: 398135 - DNA, 75 bp, synthetic construct
  source 1..75: mol_type = other DNA
aagagagaattgctgaatacgctcctggagcacgcgccccggcgtatcgacaaatcatcaacgcgatagataata

SEQ ID NO: 398136 - DNA, 75 bp, synthetic construct
  source 1..75: mol_type = other DNA
cagcattcctcttaacagcgggatggtaagtatttttgtcatccaccagccatcagatctgcgatacacacgcga

SEQ ID NO: 398137 - DNA, 75 bp, synthetic construct
  source 1..75: mol_type = other DNA
ggacgcgatgaagccaaacgtcagggcaataagccgctgtcgcaggcactgaaaatcatcatgaatgccttttat

SEQ ID NO: 398138 - DNA, 75 bp, synthetic construct
  source 1..75: mol_type = other DNA
gaactgccacgaatccctgaattgtcaccggaagagcaggcagcactggacaaatcgatggaaaaagagcgcgca

SEQ ID NO: 398139 - DNA, 75 bp, synthetic construct
  source 1..75: mol_type = other DNA
tatgaagggacacctggagcttgccttaaagcccttattaactcaataggtaattcaccatatgatatagcagta

SEQ ID NO: 398140 - DNA, 75 bp, synthetic construct
  source 1..75: mol_type = other DNA
agtaattaaggccgatgcgtatgttatggcatttggctcttactcgacggcgatgctcaagggcattgtcgatat

SEQ ID NO: 398141 - DNA, 75 bp, synthetic construct
  source 1..75: mol_type = other DNA
gcaatattaccctccgtttcagcagtttctgctcaggtatgagaaggaactcagaaataagcctgtagcagatcc

SEQ ID NO: 398142 - DNA, 75 bp, synthetic construct
  source 1..75: mol_type = other DNA
ggggatggttggtcattagtgataggttctcgttacgtcagctggaagaacatgccatctcaacaaacacatgga

SEQ ID NO: 398143 - DNA, 75 bp, synthetic construct
  source 1..75: mol_type = other DNA
cgccaaattcattatttttaccgcaggtattcctaaagcaagacgagatgaaataaaaaagtcgctctcattaat

SEQ ID NO: 398144 - DNA, 75 bp, synthetic construct
  source 1..75: mol_type = other DNA
ggcagcctgagttcacagataaaacactctccaggaaacccggggcggttcagtttgcaattcagcaattccaga

SEQ ID NO: 398145 - DNA, 75 bp, synthetic construct
  source 1..75: mol_type = other DNA
ttttgaactggaatacgtcgccagtcgcccgcagctactggaaaaactcaacgcctggtttgcgactcacgatcc

SEQ ID NO: 398146 - DNA, 75 bp, synthetic construct
  source 1..75: mol_type = other DNA
gtgagctgtactgcatcggcctggaaggttgcgggcagcgtatcgtttatatgctggggccagagaatggcgacg

SEQ ID NO: 398147 - DNA, 75 bp, synthetic construct
  source 1..75: mol_type = other DNA
cagctatttacccagaatctggcgcggatggcggagcaggcgggggttaaattccgctttaatacgcccgttgac

SEQ ID NO: 398148 - DNA, 75 bp, synthetic construct
  source 1..75: mol_type = other DNA
ttcagttgaaatggatgtggcaaatgttacgtaactgcgataccagccactatatggaaaacaaagggcgaatgg

SEQ ID NO: 398149 - DNA, 75 bp, synthetic construct
  source 1..75: mol_type = other DNA
aaatgccgggcaaatctcccccggatatgctgcgccgtgggcggcgccaggtgtgccgctgaaagcgattaaatg

SEQ ID NO: 398150 - DNA, 75 bp, synthetic construct
  source 1..75: mol_type = other DNA
gggaatggcgtgttctacgaactaccagaggtcggagttctacaggctgcgtttgcccgtctgatcggtatgggg

SEQ ID NO: 398151 - DNA, 75 bp, synthetic construct
  source 1..75: mol_type = other DNA
ctatgaacagcgccgggaacggcagcagcaggggatcgccagggcgaaaagggaaggaaagtataaaggccgcca

SEQ ID NO: 398152 - DNA, 75 bp, synthetic construct
  source 1..75: mol_type = other DNA
taatttattatggagtgaagttcctaacgataaaaaatataaaaaaattattaaaaacaggcttaaattactcgg

SEQ ID NO: 398153 - DNA, 75 bp, synthetic construct
  source 1..75: mol_type = other DNA
aagacggcaaatataaaggccgtaaacctaatcaggccagatatgacgcaattaacagactgattgaaagcggta

SEQ ID NO: 398154 - DNA, 75 bp, synthetic construct
  source 1..75: mol_type = other DNA
gtaattataaaaatccgtattttcctgaaaaagaaattcgtacatttgcagtaaaagcccagcgggcaacgttta

SEQ ID NO: 398155 - DNA, 75 bp, synthetic construct
  source 1..75: mol_type = other DNA
agtaaggccgttagacagagcaagttgtgtcgccaaccgccagctccagagccgggaatgcgactttcagctatt

SEQ ID NO: 398156 - DNA, 75 bp, synthetic construct
  source 1..75: mol_type = other DNA
gctcctggacacaggtacagaaagtgctagggtgcagccgtggcacaataagcagtgcgctaaaacgtaaaaccg

SEQ ID NO: 398157 - DNA, 75 bp, synthetic construct
  source 1..75: mol_type = other DNA
gggaatacccgttgcgtgctggagcaaacccgaagaaatccgctttcagtgcatggaaggccagattacgcgagg

SEQ ID NO: 398158 - DNA, 75 bp, synthetic construct
  source 1..75: mol_type = other DNA
aattttgagaacccctggttgctcccggtaagcggcacgaacaaccagcgttgtgtgaatcatatttctgaaccg

SEQ ID NO: 398159 - DNA, 75 bp, synthetic construct
  source 1..75: mol_type = other DNA
tccggtaagcggcacgaacaaccagcgttgtgtgaatcacatttctgaaccggacaccgaaattccgccgggatt

SEQ ID NO: 398160 - DNA, 75 bp, synthetic construct
  source 1..75: mol_type = other DNA
ggctcccgtcttgaccgtccagaactttttcgtcttctgagagattgccagcaaaatgacattttgcttattgag

SEQ ID NO: 398161 - DNA, 75 bp, synthetic construct
  source 1..75: mol_type = other DNA
gcgcaagagggcgcagcgagagagggaaagaaagcgggaacaaaatggcgattgtcacggcgcgtcacgaaatgt

SEQ ID NO: 398162 - DNA, 75 bp, synthetic construct
  source 1..75: mol_type = other DNA
caagttaaaaacttagtaattgataagttatattatgattatagtgataaccattgggtacttgatgcaatattt

SEQ ID NO: 398163 - DNA, 75 bp, synthetic construct
  source 1..75: mol_type = other DNA
ataaacaggctgattgcgagcggcagctcctggagccagattcaaaaagtgctgggttgtagccgggcgactatc

SEQ ID NO: 398164 - DNA, 75 bp, synthetic construct
  source 1..75: mol_type = other DNA
tggtatttgctgacgaagtgacgatccacaagccgtctgaagctgacagacttaaagcgattattagcgaaccga

SEQ ID NO: 398165 - DNA, 75 bp, synthetic construct
  source 1..75: mol_type = other DNA
gctgaccttgagctcgagtcacgaaagctgtgcgttcggcgcctgaaaaacggcttcagtaccgtgcatccctta

SEQ ID NO: 398166 - DNA, 75 bp, synthetic construct
  source 1..75: mol_type = other DNA
ttaaaattttacggcgtaacccgctgattcaacagaatgacatcgccgatattctgcaaatcagccgctcacgtg

SEQ ID NO: 398167 - DNA, 75 bp, synthetic construct
  source 1..75: mol_type = other DNA
ggtgaagcatggaagaccagaccgagggaatggcgtgttctacgaactaccagaggtcggagttctacaggctgc

SEQ ID NO: 398168 - DNA, 75 bp, synthetic construct
  source 1..75: mol_type = other DNA
gcccggttgatatttgccagtaacagcacacaggtattacaggcggggataagagagcgccgctatctcgtgctt

SEQ ID NO: 398169 - DNA, 75 bp, synthetic construct
  source 1..75: mol_type = other DNA
actataaagccgactggaacgactatcaccaacaacacgggctggcggcagccacagcagcatttaaagattcga

SEQ ID NO: 398170 - DNA, 75 bp, synthetic construct
  source 1..75: mol_type = other DNA
gacgttgacagactttcccgcctgtcaggggaagactggaataagctgaagaaaatgatccgtcagaaagatatc

SEQ ID NO: 398171 - DNA, 75 bp, synthetic construct
  source 1..75: mol_type = other DNA
ggttcgaggcttgaccggcctgaattattcaggttgctcaaagactgccggcacaacgatattctcttaattgag

SEQ ID NO: 398172 - DNA, 75 bp, synthetic construct
  source 1..75: mol_type = other DNA
gttgcggattgtcagtcttgatgtgcccacatcatggcaggctctgtcagataaagatccttcgcaagcagaccc

SEQ ID NO: 398173 - DNA, 75 bp, synthetic construct
  source 1..75: mol_type = other DNA
tggcaatgattccatagacctggatgcaggttgcgttcttctggatgccgcaggtaataaaattgacaccatctg

SEQ ID NO: 398174 - DNA, 75 bp, synthetic construct
  source 1..75: mol_type = other DNA
ggttctcgtctcgatcgtcctgaactcttccgtcttctgagagattgccagcaaaatgacattttgctcattgag

SEQ ID NO: 398175 - DNA, 75 bp, synthetic construct
  source 1..75: mol_type = other DNA
aaaatactggggtgcagccgtggcacaataagcagtgcgctaaaacgtaaaaccgggcagaaatccagtaagtag

SEQ ID NO: 398176 - DNA, 75 bp, synthetic construct
  source 1..75: mol_type = other DNA
gtcagtacggctgtgtgggacaggggctgcatatcgccaaaaagctgctgccgtttataccggcgaatgcgggca

SEQ ID NO: 398177 - DNA, 75 bp, synthetic construct
  source 1..75: mol_type = other DNA
agagttccacccgctggggggtgggcaggccgctgtataaggacctcattggtcgtacaaaagccgcgctggcga

SEQ ID NO: 398178 - DNA, 75 bp, synthetic construct
  source 1..75: mol_type = other DNA
tacagtgacactactggcgcctcagagagttccacccgctggggggtgggcaggccgctgtataaggacctcatt

SEQ ID NO: 398179 - DNA, 75 bp, synthetic construct
  source 1..75: mol_type = other DNA
ctcgactataacgtatacgccagccagtacgacccacatcacggagacagcacccaaaatatcagttcctacggt

SEQ ID NO: 398180 - DNA, 75 bp, synthetic construct
  source 1..75: mol_type = other DNA
tcgtttcaggggcagttggatgtcacagtggaagaagaagatggccgcaccagcaccttccaggttggctccgca

SEQ ID NO: 398181 - DNA, 75 bp, synthetic construct
  source 1..75: mol_type = other DNA
ttaatacggaatttattgaatcattgcaaaccatagctggcagcgaatgtctcaatttaagccaacgtcaggaat

SEQ ID NO: 398182 - DNA, 75 bp, synthetic construct
  source 1..75: mol_type = other DNA
actggcagttgtcgtccctgccggagggagtgacgctgtcagaggaaggcaacgacatgctgatgtccttcttcc

SEQ ID NO: 398183 - DNA, 75 bp, synthetic construct
  source 1..75: mol_type = other DNA
cggggacatatgaccgtccggacccgcgtattaagcaactggcgcgtcgcagtacggtgacaccgggcggtgcag

SEQ ID NO: 398184 - DNA, 75 bp, synthetic construct
  source 1..75: mol_type = other DNA
cttgagacaaccagaaacaagtatgcctttggtttgtactggcgaatagcggaatggccgggtgagggtggtgaa

SEQ ID NO: 398185 - DNA, 75 bp, synthetic construct
  source 1..75: mol_type = other DNA
ccgctttcttggacgtgagttgtgcgttcttggctgggcagcagaacatgcctcacccgatgaatgtctggttat

SEQ ID NO: 398186 - DNA, 75 bp, synthetic construct
  source 1..75: mol_type = other DNA
actcaggccgcactgaaggccaaccctaaaaatattctgcttgcagtggtctggatgcagggcgagtttgatttg

SEQ ID NO: 398187 - DNA, 75 bp, synthetic construct
  source 1..75: mol_type = other DNA
agaattcagcgcgctggggtgtggacaagccgctgtataaggaccttatcggtcgaacaaaagcagcactgaaga

SEQ ID NO: 398188 - DNA, 75 bp, synthetic construct
  source 1..75: mol_type = other DNA
ccagtatcgattttccgattcgtttggtggtaacccaccattatattcgtgcggtcttagtgcgctgtaatatcc

SEQ ID NO: 398189 - DNA, 75 bp, synthetic construct
  source 1..75: mol_type = other DNA
cttcgggtaataaaggggggatcaccttcgcagactgtgtgatccgcttcagcacgaaagagccattatgggtaa

SEQ ID NO: 398190 - DNA, 75 bp, synthetic construct
  source 1..75: mol_type = other DNA
atgtcagactcccagtggaaaatgctctccgccatgcccggagagttttcagtcaaggttgccggtggcacggtg

SEQ ID NO: 398191 - DNA, 75 bp, synthetic construct
  source 1..75: mol_type = other DNA
caaaaaagcttcggacaatcagctgaaaccttatggctgggacggtatggatggcagacgcacactggttgatga

SEQ ID NO: 398192 - DNA, 75 bp, synthetic construct
  source 1..75: mol_type = other DNA
tttgtgtcgcttccagtcatcgtttgccatttgctgatgtaagtatggatgccattattcgtatctacgcgccgt

SEQ ID NO: 398193 - DNA, 75 bp, synthetic construct
  source 1..75: mol_type = other DNA
actggccggtttctgccctgccgcaaggggttactctggaaggaaatgccggtcataacctgctggcatcgttct

SEQ ID NO: 398194 - DNA, 75 bp, synthetic construct
  source 1..75: mol_type = other DNA
ttacggcagacaagttgcgcgtgaccgatatcactaacggtgcaacatacccggtgctgattgacagcattgtgg

SEQ ID NO: 398195 - DNA, 75 bp, synthetic construct
  source 1..75: mol_type = other DNA
ctcgattacaatctgtatgccagtcagtatgctccccatcacggagatagcacccagaacatcagttcttacggt

SEQ ID NO: 398196 - DNA, 75 bp, synthetic construct
  source 1..75: mol_type = other DNA
aagtggctcattactttgcctgaccaaagaacatttaaccagctttggcctgagtatggactttatttcatcact

SEQ ID NO: 398197 - DNA, 75 bp, synthetic construct
  source 1..75: mol_type = other DNA
gtattacttctcattctctctgccgttacagcaaagtcgcaacctttcctacagcatgcagcgcacgggtggtag

SEQ ID NO: 398198 - DNA, 75 bp, synthetic construct
  source 1..75: mol_type = other DNA
gtttaacatggggggataacatgtgcgaaatgactccgcccaataaaagtaatatcagcgaaaacgctattattt

SEQ ID NO: 398199 - DNA, 75 bp, synthetic construct
  source 1..75: mol_type = other DNA
caacacctttcaagtcggcgctgcttctatcccttatttaacccgtaaagggcaagtgcgctataaaatgtcact

SEQ ID NO: 398200 - DNA, 75 bp, synthetic construct
  source 1..75: mol_type = other DNA
ggacggctgaagcctcatggggttggttgaataatgtgtcgctctatggcggaggcatgttcacagcggacgatt

SEQ ID NO: 398201 - DNA, 75 bp, synthetic construct
  source 1..75: mol_type = other DNA
caggccgctgtataaggacctcattggtcgtacaaaagccgcgctggcgaagaatccgaaaaatgtgctgcttgc

SEQ ID NO: 398202 - DNA, 75 bp, synthetic construct
  source 1..75: mol_type = other DNA
tattaccaaaagtgcgacttacccggtgctgattgacagcattgcggtggaagtgaacaacgcggatgccgcggc

SEQ ID NO: 398203 - DNA, 75 bp, synthetic construct
  source 1..75: mol_type = other DNA
tttctgccagtagctgtgatgaactgcaaaaaaaactggcagaaaaaataagtgaagggtggcagccatatagtt

SEQ ID NO: 398204 - DNA, 75 bp, synthetic construct
  source 1..75: mol_type = other DNA
gacaaactgcaactgaccgacgtatcaaaggtggcgacgtatacgctgctgattgacagtgtgaaggtggaagtg

SEQ ID NO: 398205 - DNA, 75 bp, synthetic construct
  source 1..75: mol_type = other DNA
acgatgtgcctgcaagtaaagcagctgaattacttcagagaggcggtgaaattgccttccgtttcaaaattcccg

SEQ ID NO: 398206 - DNA, 75 bp, synthetic construct
  source 1..75: mol_type = other DNA
cgacaagctgttactcactgacattaccagtaaccaggatacctacccggttctgattgagcacgtaacagtggc

SEQ ID NO: 398207 - DNA, 75 bp, synthetic construct
  source 1..75: mol_type = other DNA
gtttctcagctacctgaaaacgttgttctggaaggcagcgcaggaaacgatatgctggccgccttcttcatccag

SEQ ID NO: 398208 - DNA, 75 bp, synthetic construct
  source 1..75: mol_type = other DNA
tcagcgccgctcttacgcagcacacgcatatttacgccagcataaattatgagaaaggtgacgggatggaatcgc

SEQ ID NO: 398209 - DNA, 75 bp, synthetic construct
  source 1..75: mol_type = other DNA
gcacagggtggcagcgcccaaatcaataatggtgctctggatagcttctggctctatggactgatggacgtcagc

SEQ ID NO: 398210 - DNA, 75 bp, synthetic construct
  source 1..75: mol_type = other DNA
ccgctaatgacacggctgtttatggcacgatgcaaaatcagggcggactcgataaaaacaccacggtgcagtccg

SEQ ID NO: 398211 - DNA, 75 bp, synthetic construct
  source 1..75: mol_type = other DNA
accaacttaccggcagaagacccggatattgctgatgcaggttattacggcgcgcaatcccgtagtaatggtaat

SEQ ID NO: 398212 - DNA, 75 bp, synthetic construct
  source 1..75: mol_type = other DNA
cactgacgctaccgtttatctcgttatctgccaaagctgattaccacactcaaattaacgccggaaataccgttt

SEQ ID NO: 398213 - DNA, 75 bp, synthetic construct
  source 1..75: mol_type = other DNA
tcagcgccgctcttacgcaacacacgcgtatttacgccagcataaattacgagaaaggtgatgggatggaatcgc

SEQ ID NO: 398214 - DNA, 75 bp, synthetic construct
  source 1..75: mol_type = other DNA
gggtgaatgtgccgacgaacaaaccggaagaagacccggacattccgggtatcggatattacggttcgaaatggc

SEQ ID NO: 398215 - DNA, 75 bp, synthetic construct
  source 1..75: mol_type = other DNA
accactgcctgcatgatgtgcaggacatgagcgggataaaccacccaaaagctgacctgaacaaggggcagtatg

SEQ ID NO: 398216 - DNA, 75 bp, synthetic construct
  source 1..75: mol_type = other DNA
gcagcgatctggcgcgcgcgtcttccggtcgcaccgagcatttctttatcccgttcacggataaaacgttccatc

SEQ ID NO: 398217 - DNA, 75 bp, synthetic construct
  source 1..75: mol_type = other DNA
gtaacggcgtcaataccgccactaacgcaccggcagaagatccggatattccggcatcaggatattacggtgcgg

SEQ ID NO: 398218 - DNA, 75 bp, synthetic construct
  source 1..75: mol_type = other DNA
acaaattgcgcgtgaccgatatcactagcggtgcgacatatccggtgctgattgaaagtataacagtggaagtga

SEQ ID NO: 398219 - DNA, 75 bp, synthetic construct
  source 1..75: mol_type = other DNA
cggacgggaaatcaatgacgacgctgttttcttaccgcgcatcggagtcaggcggagcactgacgccacagggct

SEQ ID NO: 398220 - DNA, 75 bp, synthetic construct
  source 1..75: mol_type = other DNA
tcaggaagtcagcagcataatggtttattcacagccatggttcagcagttcagaaccgacctgtctccacttgca

SEQ ID NO: 398221 - DNA, 75 bp, synthetic construct
  source 1..75: mol_type = other DNA
gctgaatctgcaaaatgcctggagtctggcagaggctgagaaaacggtggatgtgtcgcggttgcgccgtctggt

SEQ ID NO: 398222 - DNA, 75 bp, synthetic construct
  source 1..75: mol_type = other DNA
gatgagtctgctggcatccggtgaagacctggcatcacagggctggcgctattatcacaaaccggcgagcggaga

SEQ ID NO: 398223 - DNA, 75 bp, synthetic construct
  source 1..75: mol_type = other DNA
ggctagccaggattcggcacgctggggtgtgggtaaaccgttatatcaggacctgattgcgcgcaccaaagctgc

SEQ ID NO: 398224 - DNA, 75 bp, synthetic construct
  source 1..75: mol_type = other DNA
gtctacggaaaagcgctggctgaagcaggctatgtcgtgatcgcctatgacgccagtttccagggggaatccggc

SEQ ID NO: 398225 - DNA, 75 bp, synthetic construct
  source 1..75: mol_type = other DNA
caggcctcacaagccaagttgaaaaacaatcagaccaaatcgaaggaaataaaaaacaatattgccacgagttgc

SEQ ID NO: 398226 - DNA, 75 bp, synthetic construct
  source 1..75: mol_type = other DNA
gggaaaactgaagaatctggcgagactcggcaaactggggaacctgctggggaaaagcgggaagctgctggggca

SEQ ID NO: 398227 - DNA, 75 bp, synthetic construct
  source 1..75: mol_type = other DNA
gagaacgttggcgattttcgtcttatgtcacgcgaagtagtggaaaatataaagcttcttcctgagcgcaacctg

SEQ ID NO: 398228 - DNA, 75 bp, synthetic construct
  source 1..75: mol_type = other DNA
ttaataggaattggagtacttggtgagtatattggtagaatatatttagaaaccaaaaaaaggccaaaatatctt

SEQ ID NO: 398229 - DNA, 75 bp, synthetic construct
  source 1..75: mol_type = other DNA
cttcgcgtatggacttatataggcttgtttgttgcaagcatttcgtttttatatggtgcatggatgattatagac

SEQ ID NO: 398230 - DNA, 75 bp, synthetic construct
  source 1..75: mol_type = other DNA
ctctgcccgccacacgctggcgctactggcaaaggccgattacgtgctgaccgataacagcggctttattttcga

SEQ ID NO: 398231 - DNA, 75 bp, synthetic construct
  source 1..75: mol_type = other DNA
cgttgacttgcaagatcccatagaagtcatcccgcacctgattgagaagtggcagcagggttcggatatggttct

SEQ ID NO: 398232 - DNA, 75 bp, synthetic construct
  source 1..75: mol_type = other DNA
ttcatgaaaggtattcttagttgggttggtggggatacagatgttgttgagtatgtccgtgctgagcgtgtagct

SEQ ID NO: 398233 - DNA, 75 bp, synthetic construct
  source 1..75: mol_type = other DNA
tggggtgccggtaaacccctgtatcaggacatggtcagccggacaaaagcggcgctggcgaagaacccgaaaaac

SEQ ID NO: 398234 - DNA, 75 bp, synthetic construct
  source 1..75: mol_type = other DNA
gtgccgtggatttgtggtgataccacgtattactggaaaaacgctggcaccgataaatatgaggcggtatacggt

SEQ ID NO: 398235 - DNA, 75 bp, synthetic construct
  source 1..75: mol_type = other DNA
aaactgcatgtgacagacattaccaaaaatgcgacttacccggtgctgattgacagcattgtggtggaagtgaaa

SEQ ID NO: 398236 - DNA, 75 bp, synthetic construct
  source 1..75: mol_type = other DNA
ctgatcgggattggtgttctcggagaatatataggcagaatatatattgaagtaaaaaatagacctaaatatatt

SEQ ID NO: 398237 - DNA, 75 bp, synthetic construct
  source 1..75: mol_type = other DNA
atcattgtcttcatgatgtgatggatatgagtgaaaaaaatcacccccgggcagacctcaataaaggtcagtatg

SEQ ID NO: 398238 - DNA, 75 bp, synthetic construct
  source 1..75: mol_type = other DNA
cgaaatttatcgttcacggtaagaaaggtacatttattaaatacggtatcgaccagcaggaaaccagcctgaagg

SEQ ID NO: 398239 - DNA, 75 bp, synthetic construct
  source 1..75: mol_type = other DNA
caacccgattcccgtaaacctacggtgctctacgcccccacgtttggcgcattaagctccctgccccactgggca

SEQ ID NO: 398240 - DNA, 75 bp, synthetic construct
  source 1..75: mol_type = other DNA
tgttgacctgcaagacccgattgaggttattcctcatctgattgaaaagtggcaggcaggtgccgatatggtgct

SEQ ID NO: 398241 - DNA, 75 bp, synthetic construct
  source 1..75: mol_type = other DNA
tatttaacgaagaggctacaataccgatcttctataaaacggttcgtgaatttgaagaacttcaaaatcatgaag

SEQ ID NO: 398242 - DNA, 75 bp, synthetic construct
  source 1..75: mol_type = other DNA
gatggcagactgaagaggaaaaccgccgagtggttctataagctgcataacaaaatcagcaacccgcagatcgag

SEQ ID NO: 398243 - DNA, 75 bp, synthetic construct
  source 1..75: mol_type = other DNA
tgttgacctgcaggatcctatagaggttatccctcatcttattaagaaatggcgggtcggtgcagatatggtgct

SEQ ID NO: 398244 - DNA, 75 bp, synthetic construct
  source 1..75: mol_type = other DNA
ctgatcggtatcggtgtcctgggtgaatatatcggaagaatttatgtcgaggttaagcaacgtcctcgttatatt

SEQ ID NO: 398245 - DNA, 75 bp, synthetic construct
  source 1..75: mol_type = other DNA
tttatgaaaggcgttttatcttgggttggcggtaagacggatgttgttgaatacatccgtgctgaacgcgttgcc

SEQ ID NO: 398246 - DNA, 75 bp, synthetic construct
  source 1..75: mol_type = other DNA
aattttttataaaacggtacgtgaattcgaagagttgaagccatatgaagtggaaattgttttcataaatgatgg

SEQ ID NO: 398247 - DNA, 75 bp, synthetic construct
  source 1..75: mol_type = other DNA
tcttcaatgaagaagaagcgataccaattttttataaaacggtacgagaattcgaagagttgaagccatatgaag

SEQ ID NO: 398248 - DNA, 75 bp, synthetic construct
  source 1..75: mol_type = other DNA
agtctggcgaaaattccctggcaggtgatgatcctcggcggcgaaatttcgcagggaacgatgctaaaaagtttg

SEQ ID NO: 398249 - DNA, 75 bp, synthetic construct
  source 1..75: mol_type = other DNA
ggcagcactaagtttaatggctggaagctctggaacctggcgcttgaagggattaccagcttctcaacatttccg

SEQ ID NO: 398250 - DNA, 75 bp, synthetic construct
  source 1..75: mol_type = other DNA
tggaaatcgttttcataaatgacggcagcaaagacgctacggagtcaatcattaatgctctggctgtttcagatc

SEQ ID NO: 398251 - DNA, 75 bp, synthetic construct
  source 1..75: mol_type = other DNA
ggaacaactaaatttaatgggtggaaattatggaacctggctctggagggtatcactagcttctctacatttcct

SEQ ID NO: 398252 - DNA, 75 bp, synthetic construct
  source 1..75: mol_type = other DNA
gggagccggtaaacccctgtatcaggacctgctcagccgcaccagagcggcgctggagaagaaccagaaaaacag

SEQ ID NO: 398253 - DNA, 75 bp, synthetic construct
  source 1..75: mol_type = other DNA
gcattactatgcgatcagttatgtggcgatgctggtttatgatgccataaccaccgaatgggggctggtttcact

SEQ ID NO: 398254 - DNA, 75 bp, synthetic construct
  source 1..75: mol_type = other DNA
cggatgcgacgaacctgaacgcgatgcaccacaagaagccgaatgcgaagctggatacgttcggggtctttgata

SEQ ID NO: 398255 - DNA, 75 bp, synthetic construct
  source 1..75: mol_type = other DNA
ccgaccgtctggcaacggcgattttgcgccatgcgggaagagtggcgctaaacgcgggggcatcatcgacagtat

SEQ ID NO: 398256 - DNA, 75 bp, synthetic construct
  source 1..75: mol_type = other DNA
gcaatatggcaccgtgggtcaggggcttcacattgccaaaaaactgctgccgtttattccggcagatgcggggat

SEQ ID NO: 398257 - DNA, 75 bp, synthetic construct
  source 1..75: mol_type = other DNA
agacattaccaaaggtgcgacttacccggtactgatagacagcattacggtggaagtgaacaacgcggacactgc

SEQ ID NO: 398258 - DNA, 75 bp, synthetic construct
  source 1..75: mol_type = other DNA
ctgccgtttataccggcgaatgcgggcattctgctggttccgtgctgtcgtggtggttcagcgttcaccaccgga

SEQ ID NO: 398259 - DNA, 75 bp, synthetic construct
  source 1..75: mol_type = other DNA
tggggctgaatgcgctgacgctgacggatattaccaaaaatgcagcgtatggcgttgagatagaaagtctggtgc

SEQ ID NO: 398260 - DNA, 75 bp, synthetic construct
  source 1..75: mol_type = other DNA
gctgcgcagggctggagcattaagaatggcggaattcagttgtcgggtggtgtatttaagatcgccaagcagagc

SEQ ID NO: 398261 - DNA, 75 bp, synthetic construct
  source 1..75: mol_type = other DNA
cagctatatctgtcccaaacggcatcaatttgatatggcgaaagagggatatgttaatttgctgcccgttcagca

SEQ ID NO: 398262 - DNA, 75 bp, synthetic construct
  source 1..75: mol_type = other DNA
tattgatggtcaggatggcacaccgttcacgctgacgcagtcaccggtcagtgcctttgcggcggataaactgca

SEQ ID NO: 398263 - DNA, 75 bp, synthetic construct
  source 1..75: mol_type = other DNA
tgagcgtacggtttaagttgccgggttcactggtgccgaatcagtttgctctgggcatttactggcagttgtcgt

SEQ ID NO: 398264 - DNA, 75 bp, synthetic construct
  source 1..75: mol_type = other DNA
cgggggtaaggccatgaaactgaccaaggaaacaggcaaatcctcctggtaccttgagcatgatgccggtaatgg

SEQ ID NO: 398265 - DNA, 75 bp, synthetic construct
  source 1..75: mol_type = other DNA
ttcatttcgtcccattaatgacagatgaaaatggcgcgaatgtacccaccaacaatccggcagaagacccggata

SEQ ID NO: 398266 - DNA, 75 bp, synthetic construct
  source 1..75: mol_type = other DNA
gggaagctttggcgcatttgataacgaatggcatacgctggccttccgctttgccgggaataacagccttcaggt

SEQ ID NO: 398267 - DNA, 75 bp, synthetic construct
  source 1..75: mol_type = other DNA
ctggacgtcacaggacagggcgagccatttcagcacctgggcacgccgggggattatttccgaccgtctggcaac

SEQ ID NO: 398268 - DNA, 75 bp, synthetic construct
  source 1..75: mol_type = other DNA
aacgaatggcatacgctgggcttccgttttgccggtaacaacagtattgaggtgacgccggtcattgatggtaag

SEQ ID NO: 398269 - DNA, 75 bp, synthetic construct
  source 1..75: mol_type = other DNA
tttctgccagtagcggtgatgaactgcaaaaaaagctgtcagaaaaaataagtgaagggtggcagccatatggtt

SEQ ID NO: 398270 - DNA, 75 bp, synthetic construct
  source 1..75: mol_type = other DNA
taagttgcatgtgacagatattaccaaaagtgcgacttacccggtgctgattgacagcattgcggtggaagtgaa

SEQ ID NO: 398271 - DNA, 75 bp, synthetic construct
  source 1..75: mol_type = other DNA
caccggtcagtgcattttcggcggataagttgcatgtgacagatattaccaaaagtgcgacttacccggtgctga

SEQ ID NO: 398272 - DNA, 75 bp, synthetic construct
  source 1..75: mol_type = other DNA
tcaggcggtgcttatgcgccacagggctggagcgcaggaggtggtaaggctgaaatcgtggatgatgccggagcc

SEQ ID NO: 398273 - DNA, 75 bp, synthetic construct
  source 1..75: mol_type = other DNA
gaatggagtggctggcccggcattccaggttataaaagacagtctgacactggggctgaatgcgctgacgctgac

SEQ ID NO: 398274 - DNA, 75 bp, synthetic construct
  source 1..75: mol_type = other DNA
aaaagaccgaactgatcaaccagacggtgacctgtcatatcgacctgattttgcaaggattatcgcaaaggagtt

SEQ ID NO: 398275 - DNA, 75 bp, synthetic construct
  source 1..75: mol_type = other DNA
gtcagcagcataatggtttattcactgccatggttcagcagttcagagccgacctgtctccgcttgctgcgcagt

SEQ ID NO: 398276 - DNA, 75 bp, synthetic construct
  source 1..75: mol_type = other DNA
ctggtcaatgtactgtgatattgctgcagacaaggcaaaacttttactggaaaaaggcggggaaattgctgtccg

SEQ ID NO: 398277 - DNA, 75 bp, synthetic construct
  source 1..75: mol_type = other DNA
ttccgtgctgccgtggtggttcagctttcaccaccggggcagatggaacatacagtgacgtgaccggtgcctcag

SEQ ID NO: 398278 - DNA, 75 bp, synthetic construct
  source 1..75: mol_type = other DNA
aaagacatttccacggagtgataagcttgcgcagttatcagagattagcggttatccacaatcctggttcttagg

SEQ ID NO: 398279 - DNA, 75 bp, synthetic construct
  source 1..75: mol_type = other DNA
gtgaaaactttcactggcaaggtgacgccctggtattggtattggtaacgggcgtcaggccggtggcggtcagca

SEQ ID NO: 398280 - DNA, 75 bp, synthetic construct
  source 1..75: mol_type = other DNA
caaccggaccattgtgaaatccgcggcgaacattttcactggcaaggagatgcgctgattattggcattggtaat

SEQ ID NO: 398281 - DNA, 75 bp, synthetic construct
  source 1..75: mol_type = other DNA
cctgaataacgaactacaggacaaattcgccaattggtatcccggttgtacgatagacgctcagagtagagggac

SEQ ID NO: 398282 - DNA, 75 bp, synthetic construct
  source 1..75: mol_type = other DNA
tggagcatcgaaaaagagggaatggcgctgctgtatatccagtcaaaagtcatctcatctgtaccattcaatatc

SEQ ID NO: 398283 - DNA, 75 bp, synthetic construct
  source 1..75: mol_type = other DNA
aaattggaagcaaaatcatggtgttatctgataaccccaattatcaaccatggagcatcgaaaaagaggggttag

SEQ ID NO: 398284 - DNA, 75 bp, synthetic construct
  source 1..75: mol_type = other DNA
tggagcattgaaaaagatgctcttgagctgctttatatccaatcgaaggtaatctcatctgttccattcaatata

SEQ ID NO: 398285 - DNA, 75 bp, synthetic construct
  source 1..75: mol_type = other DNA
ctgcaatggtgtatttcctgcgtgatgcagttgatgccggtgcactgactgagctgaatggcttttacgatgttc

SEQ ID NO: 398286 - DNA, 75 bp, synthetic construct
  source 1..75: mol_type = other DNA
aagacgaaacgcaacggagcaacccgctgttgatgatgctaaatggtgcacgttccgtcgttcgttgccctggct

SEQ ID NO: 398287 - DNA, 75 bp, synthetic construct
  source 1..75: mol_type = other DNA
attgggaacagcgaatgattttgccaccagcgtggggatccctgaggcactggataaggcgctgaaactggcaat

SEQ ID NO: 398288 - DNA, 75 bp, synthetic construct
  source 1..75: mol_type = other DNA
gtgattgccggtggtggcgatggcaccattaatgaagtttctacggcattgattcaatgtgagggggatgacata

SEQ ID NO: 398289 - DNA, 75 bp, synthetic construct
  source 1..75: mol_type = other DNA
cgccctggtcattggtattggtaacgggcgtcaggccggtggcggtcagcaattgtgtccgaacgcgttaattaa

SEQ ID NO: 398290 - DNA, 75 bp, synthetic construct
  source 1..75: mol_type = other DNA
accttccgttgaactgtccaacgcgctgatgcatcaccctgacatcaacctgatccttgcgaccgggggtcctgg

SEQ ID NO: 398291 - DNA, 75 bp, synthetic construct
  source 1..75: mol_type = other DNA
ttcaactgctatcttcaaatcgctgatcagcctgaagacccgtaacgccattatcttctccccgcacccgcgtgc

SEQ ID NO: 398292 - DNA, 75 bp, synthetic construct
  source 1..75: mol_type = other DNA
cggcgctaacccgcgttacccgctgatctccgagctgaaacagattctgctggatacctactatggtcgtgatta

SEQ ID NO: 398293 - DNA, 75 bp, synthetic construct
  source 1..75: mol_type = other DNA
tggcgaacgccctgctgattagcaacgttattcgttataacgcgaacgacaacccgactaagcagacagcattca

SEQ ID NO: 398294 - DNA, 75 bp, synthetic construct
  source 1..75: mol_type = other DNA
ggggtggattggtcgatgagaaaagtttatataccgcacttagcaatcagaaaattgcttttgccagtgaagata

SEQ ID NO: 398295 - DNA, 75 bp, synthetic construct
  source 1..75: mol_type = other DNA
gaccttttgttgataaaggcaaagtctatattgaaaaactacaatctgcaggttatgacgttgaatgtaatgcca

SEQ ID NO: 398296 - DNA, 75 bp, synthetic construct
  source 1..75: mol_type = other DNA
ctctgtatttgagaagatgaaaccttcggctattttgattaacaccgccagaggaggattaattgatgaagaaag

SEQ ID NO: 398297 - DNA, 75 bp, synthetic construct
  source 1..75: mol_type = other DNA
aaaacctgccggcgtcttacaacgaagggtctaaaaacccggttgcccgtgaacgtgttcacagtgcagccacca

SEQ ID NO: 398298 - DNA, 75 bp, synthetic construct
  source 1..75: mol_type = other DNA
gcggcatacagctccggtaaaccagctatcggcgtaggtgcaggtaacaccccagttgttattgatgaaactgct

SEQ ID NO: 398299 - DNA, 75 bp, synthetic construct
  source 1..75: mol_type = other DNA
taaaaaccactttgcttctgaatatatctataacgcatacaaagatgaaaagacctgtgacgttctgtctgaaga

SEQ ID NO: 398300 - DNA, 75 bp, synthetic construct
  source 1..75: mol_type = other DNA
gccgcgaaaatcatgtgggttatgtacgaacatccggaaactcactttgaagaactggcgctgcgctttatggat

SEQ ID NO: 398301 - DNA, 75 bp, synthetic construct
  source 1..75: mol_type = other DNA
gactggtggtccgggcatggttaaagcagcatacagctccggtaaaccggcaatcggtgtaggtgctggtaacac

SEQ ID NO: 398302 - DNA, 75 bp, synthetic construct
  source 1..75: mol_type = other DNA
aaagatgaaaaaacctgcggtgtactgtctgaagacgacactttcggtaccatcactattgctgaaccggttggt

SEQ ID NO: 398303 - DNA, 75 bp, synthetic construct
  source 1..75: mol_type = other DNA
tggaatatcaccgaccatgtactgcgttatctcattcttgattgttctccggttcccgcagcggtgcaggaggtg

SEQ ID NO: 398304 - DNA, 75 bp, synthetic construct
  source 1..75: mol_type = other DNA
gccggggacgcacaatggtggtggtgacacatcgtctgcaggttctgaatattgttgaccgtattgtcgtgatga

SEQ ID NO: 398305 - DNA, 75 bp, synthetic construct
  source 1..75: mol_type = other DNA
tgaaggatggtacaggaaaaccggtaccgaactgcaccatagagctgaaagccgtgagaaccagcgagacggtga

SEQ ID NO: 398306 - DNA, 75 bp, synthetic construct
  source 1..75: mol_type = other DNA
gtattgtcgtgatgaatgaagggcgggtaatgatggacggtccccgtgatgaaatactgaaaaaactgtcaggga

SEQ ID NO: 398307 - DNA, 75 bp, synthetic construct
  source 1..75: mol_type = other DNA
ggacttgatatgcagacaggggaaggcggtcaggggctgtcaggaggacagaggcagatggttgccctgacgaga

SEQ ID NO: 398308 - DNA, 75 bp, synthetic construct
  source 1..75: mol_type = other DNA
gtccagcgccgctgggatggatatacagccagtgtcgcccgctcgtccatacgggtaaaaaataccagtaatgtc

SEQ ID NO: 398309 - DNA, 75 bp, synthetic construct
  source 1..75: mol_type = other DNA
ggacttgatatgcagataggggaaggaggtcaggggctgtcaggaggacagcgtcagatggtcgctctgacgaga

SEQ ID NO: 398310 - DNA, 75 bp, synthetic construct
  source 1..75: mol_type = other DNA
tgggacgcagaatttatgtaccaggactgggagggcatcccgtcacagtttgtatctgaatcctcggtggactgg

SEQ ID NO: 398311 - DNA, 75 bp, synthetic construct
  source 1..75: mol_type = other DNA
atgaggcgtattgtggcgaggctgaaagcgaggaggattttgcttatggctttgtggaggatcacggcctgttaa

SEQ ID NO: 398312 - DNA, 75 bp, synthetic construct
  source 1..75: mol_type = other DNA
gattttgaagcctgggcgcgtgacctgttcagcagcggctatgtgttccatgacggctatgtcttcagcaactga

SEQ ID NO: 398313 - DNA, 75 bp, synthetic construct
  source 1..75: mol_type = other DNA
ctgctggtttgttcagccacaggcaacacaggatcgccgttcggaactgccggagtatgacatgaccggggcatg

SEQ ID NO: 398314 - DNA, 75 bp, synthetic construct
  source 1..75: mol_type = other DNA
caggtcattgttgcgttgaatattgcagcgatgtcagaagcattaacgctggcggccaaagcgggcgttaacccg

SEQ ID NO: 398315 - DNA, 75 bp, synthetic construct
  source 1..75: mol_type = other DNA
atgatgcaggcactgcgtgcagatggtttaggaacggcggatcatagcgccctggcgtgctactacgaaaaactg

SEQ ID NO: 398316 - DNA, 75 bp, synthetic construct
  source 1..75: mol_type = other DNA
attgttgaccgtattgtcgtgatgaatgaagggcgggtaatgatggacggtccccgtgatgaaatactgaaaaaa

SEQ ID NO: 398317 - DNA, 75 bp, synthetic construct
  source 1..75: mol_type = other DNA
gaaaatgatggtggggctataccgtcaaaacaaaggacaaattacccttgacggggttgctatgcagcagctgga

SEQ ID NO: 398318 - DNA, 75 bp, synthetic construct
  source 1..75: mol_type = other DNA
ggatatccggggggaattccggttcagggacgttgtgtttgcctataaatccggattaccggcagccctgtccgg

SEQ ID NO: 398319 - DNA, 75 bp, synthetic construct
  source 1..75: mol_type = other DNA
ggatatccagggggaattccatttcagcgcagtcacgtttttctataagcctgaattacctgcagccttgaaagg

SEQ ID NO: 398320 - DNA, 75 bp, synthetic construct
  source 1..75: mol_type = other DNA
tgacctgtgagtccgttcacatcgttgcagaagtggatgacgagatgtgcaaacagggaatgccccgttttgtga

SEQ ID NO: 398321 - DNA, 75 bp, synthetic construct
  source 1..75: mol_type = other DNA
atggcaaatgtcgttaaagttcctggctggatcggatcatcggctgtatcggtgacgggtaagcgatggatgaaa

SEQ ID NO: 398322 - DNA, 75 bp, synthetic construct
  source 1..75: mol_type = other DNA
cgatatatcatggctgggtatgttgatggctggaacgcctgccgcgctgccatgcttcagagccaaggtggaggc

SEQ ID NO: 398323 - DNA, 75 bp, synthetic construct
  source 1..75: mol_type = other DNA
tactgtggcgattcagggcatattacggacaggttattgttgcgagttttatcattaactttcttgctctggtca

SEQ ID NO: 398324 - DNA, 75 bp, synthetic construct
  source 1..75: mol_type = other DNA
gataatcatctttcccggcgggctccggaagatattccttctcttgcggttcctgtgcttcttttactgaatgca

SEQ ID NO: 398325 - DNA, 75 bp, synthetic construct
  source 1..75: mol_type = other DNA
gtatcatgtgcttcagcccggtgggctccgtaatagactgtctcacgaagcgttaatggctgtttattctggtta

SEQ ID NO: 398326 - DNA, 75 bp, synthetic construct
  source 1..75: mol_type = other DNA
gttcagcgacgctgggatggatatactgcaagtgtcgcccgttcgtccattcgggtaaaaaataccagtaatgtc

SEQ ID NO: 398327 - DNA, 75 bp, synthetic construct
  source 1..75: mol_type = other DNA
gtgaagagtatttttgaaggattatcacagataacggcgttactgggtacacctgtatctgctgagactctggct

SEQ ID NO: 398328 - DNA, 75 bp, synthetic construct
  source 1..75: mol_type = other DNA
agacagagaacattgttctgaaagggctgaatcactggagccgtggacgcacaatggtggtggtgacgcatcgtc

SEQ ID NO: 398329 - DNA, 75 bp, synthetic construct
  source 1..75: mol_type = other DNA
gatccaatgttgacgcagtttcaacagttattacttccaaaaccgcagccgattataaccaggctgtcagcaatg

SEQ ID NO: 398330 - DNA, 75 bp, synthetic construct
  source 1..75: mol_type = other DNA
ataaaagatataaaagatataaaagataacatcaataaattaagtaatgctgtagatttttatttagatgagaca

SEQ ID NO: 398331 - DNA, 75 bp, synthetic construct
  source 1..75: mol_type = other DNA
gatgcagcagttggtgccattgatggccgtgtcacccgtaacacgcaatccattgagaaaaacagcaaggcgatt

SEQ ID NO: 398332 - DNA, 75 bp, synthetic construct
  source 1..75: mol_type = other DNA
acaacatgttggtctccaaatggcaatgcaacaaattttgttcccagttgattctcctagtttaaagcttgataa

SEQ ID NO: 398333 - DNA, 75 bp, synthetic construct
  source 1..75: mol_type = other DNA
ttctttcttctgctgttgccggactgatgctggtgagttctggggctatggctgcggagcctgaagttattaatg

SEQ ID NO: 398334 - DNA, 75 bp, synthetic construct
  source 1..75: mol_type = other DNA
ctgatattgaaaaaataaaatctaatattgatggtgttaattcagttatcaccagtaaaactgcaaaagattaca

SEQ ID NO: 398335 - DNA, 75 bp, synthetic construct
  source 1..75: mol_type = other DNA
ttctttcatctgctgttgccggtctgttgttggtgagtggtggggttgttgcggcaaatcctgaggacgtaaata

SEQ ID NO: 398336 - DNA, 75 bp, synthetic construct
  source 1..75: mol_type = other DNA
tggtattccagatccgttacataacggtgagatgttggcggtgttattgatctctgatgctgttacttataagag

SEQ ID NO: 398337 - DNA, 75 bp, synthetic construct
  source 1..75: mol_type = other DNA
gacaataaacctcattcatttcacccatcaggccacgtcttctccgggagacgtggctttttcatttattacacc

SEQ ID NO: 398338 - DNA, 75 bp, synthetic construct
  source 1..75: mol_type = other DNA
agttgcagccattcaggcagatacaaccatttatcaggaagaggatggcagctatacacttgatcagaccgcgcc

SEQ ID NO: 398339 - DNA, 75 bp, synthetic construct
  source 1..75: mol_type = other DNA
atcaaggcgaacgagcagggccaatacaccgggcattttatctacatcctgctgcgacgttctgatgacaaaaaa

SEQ ID NO: 398340 - DNA, 75 bp, synthetic construct
  source 1..75: mol_type = other DNA
caggaatacaaccgcatcgttaccaatatagataggttgaataaagacacaacttttgctatcgatgctaacggt

SEQ ID NO: 398341 - DNA, 75 bp, synthetic construct
  source 1..75: mol_type = other DNA
gtatgcagaattaaaaaaaaaatacaataacgataatgtcgtagataagatgatagtacagcatgcagcaaatat

SEQ ID NO: 398342 - DNA, 75 bp, synthetic construct
  source 1..75: mol_type = other DNA
ccatgggcttctttgacctgattggtgctttcttcctggtcacctttattgctgaacgtcgcgcaaaacgcgcct

SEQ ID NO: 398343 - DNA, 75 bp, synthetic construct
  source 1..75: mol_type = other DNA
cgacaaaggtcagatggccactgttaacggcatgcgcggttctgccgcgtggatcgcaagtttcctgttctccct

SEQ ID NO: 398344 - DNA, 75 bp, synthetic construct
  source 1..75: mol_type = other DNA
ttaaggcattgtagtcgaatgattatggatttacttccttactacgtgtgtgacgatacggataatattcaaaat

SEQ ID NO: 398345 - DNA, 75 bp, synthetic construct
  source 1..75: mol_type = other DNA
gaagccaacggcgattttgggatctggataaatgatactggcgacccccccgcagatccgcagtcgctacaggtt

SEQ ID NO: 398346 - DNA, 75 bp, synthetic construct
  source 1..75: mol_type = other DNA
cactgacgctaccgtttatctcgttatctgccagagcggattaccacacccaaatcaacgccggaaataccgtct

SEQ ID NO: 398347 - DNA, 75 bp, synthetic construct
  source 1..75: mol_type = other DNA
cagataagaaagccaactctaataccaatacattagctgattacccagggatgacaaatttccccacaccatcaa

SEQ ID NO: 398348 - DNA, 75 bp, synthetic construct
  source 1..75: mol_type = other DNA
tgcgtttctggcgctcaccaaagcaggaagtttaatttttctcaacggattgatgctggcattaccgattattac

SEQ ID NO: 398349 - DNA, 75 bp, synthetic construct
  source 1..75: mol_type = other DNA
atcttctgccgccagcaggactgctgggaaaactggggaatctggcgaaactgggcaaactgggaaacctgctgg

SEQ ID NO: 398350 - DNA, 75 bp, synthetic construct
  source 1..75: mol_type = other DNA
tgataaggggcagatggctactgttaatggaatgcgtggttctgccgcatggattgccagctttttattctcact

SEQ ID NO: 398351 - DNA, 75 bp, synthetic construct
  source 1..75: mol_type = other DNA
cgttaattgctccattttgtgaacatttatttagtgaaatttttaatttactggcggacattattagcgaatttc

SEQ ID NO: 398352 - DNA, 75 bp, synthetic construct
  source 1..75: mol_type = other DNA
ctgccaacgatgttcccattttttcgttttatgccctgtggctggcaatgcagcagatcctgattggcattgcgc

SEQ ID NO: 398353 - DNA, 75 bp, synthetic construct
  source 1..75: mol_type = other DNA
ccgccaacgatgttcccattttttcgttctatgctttgtggttagcagtacagcaaatcctgattggcatagcac

SEQ ID NO: 398354 - DNA, 75 bp, synthetic construct
  source 1..75: mol_type = other DNA
ggatgccaaagcgccgatggggatggaccgcaacttcaagccgggcttccgtattgatctgcatattaaggatct

SEQ ID NO: 398355 - DNA, 75 bp, synthetic construct
  source 1..75: mol_type = other DNA
aactggcatgtgaagataactccggattgccggaagagagccagtttcaaacatggctgaatgcggtgatcccgc

SEQ ID NO: 398356 - DNA, 75 bp, synthetic construct
  source 1..75: mol_type = other DNA
atgtgggactggctccctgttttattgcccgaaggccctttctcacgcgaacaggcggttggcgtcacaacagct

SEQ ID NO: 398357 - DNA, 75 bp, synthetic construct
  source 1..75: mol_type = other DNA
atgttggactggcaccctgttttattgcccgaaggccctttctcacgcgaacaggcggttggcgtcacaacagct

SEQ ID NO: 398358 - DNA, 75 bp, synthetic construct
  source 1..75: mol_type = other DNA
agcacgccgatgtgctgatcgtcaatggcggactggggccgaccagtgatgatttaagcgcactcgccgcagcga

SEQ ID NO: 398359 - DNA, 75 bp, synthetic construct
  source 1..75: mol_type = other DNA
tgcccgaaggccctttctcacgcgaacaggcgatgactgtcacaacagcttaccgcaatgtgcttattgaagatg

SEQ ID NO: 398360 - DNA, 75 bp, synthetic construct
  source 1..75: mol_type = other DNA
agccacagtctcaatctgacctatcgcggtaaggataagccgaccaacgtgctctccttcccgtttgaagtgccg

SEQ ID NO: 398361 - DNA, 75 bp, synthetic construct
  source 1..75: mol_type = other DNA
ctgcatgatattgatgaagacctgaagcaggtagaagccgagattgccgcgctactggcggaggtggccagcgaa

SEQ ID NO: 398362 - DNA, 75 bp, synthetic construct
  source 1..75: mol_type = other DNA
cagggtgaagtatcgtctccggtaacccttccggctcaggcactccggtctgatggtccggacgtacaggaatat

SEQ ID NO: 398363 - DNA, 75 bp, synthetic construct
  source 1..75: mol_type = other DNA
ccgaaacattcctgaaggcactgagtgacacgcttgcccggcacgaacttaaacagagcaataaagtggcgttgc

SEQ ID NO: 398364 - DNA, 75 bp, synthetic construct
  source 1..75: mol_type = other DNA
atgtaggactgtccccctgttttattgcccgaaggccctttctcacgcgaacaggcggttggcgtcacaacagct

SEQ ID NO: 398365 - DNA, 75 bp, synthetic construct
  source 1..75: mol_type = other DNA
taccgcaatgtgcttattgaggatgaccagggaacgcatttccggctggttatccgcaatgccgaagggcagcta

SEQ ID NO: 398366 - DNA, 75 bp, synthetic construct
  source 1..75: mol_type = other DNA
taatcttcagctggacctgcgtacattctcgctggtggatccacaaaaccccccagccaccttctggacaatcaa

SEQ ID NO: 398367 - DNA, 75 bp, synthetic construct
  source 1..75: mol_type = other DNA
gcgcctgcgcgagcgtttttctttaccgcagccgccggtttgtctgcgtttgactaccttcggtcgttcggaaag

SEQ ID NO: 398368 - DNA, 75 bp, synthetic construct
  source 1..75: mol_type = other DNA
acctacgattccttcgccgccgactgggggcctggtccggtggtcaaaaaagcctttgaagccgactgtaattgc

SEQ ID NO: 398369 - DNA, 75 bp, synthetic construct
  source 1..75: mol_type = other DNA
gacaataaacgtcattcatttcacccgtcaggccgcgtcttctccgggagacgtggctttttcatttattacacc

SEQ ID NO: 398370 - DNA, 75 bp, synthetic construct
  source 1..75: mol_type = other DNA
tgggctatcgctcctcgatgccgataattgaacttaagctgaccggaccggcaagcgagcaacaggcgatggaaa

SEQ ID NO: 398371 - DNA, 75 bp, synthetic construct
  source 1..75: mol_type = other DNA
tgcccgaaggccctttctcacgcgaacaggtggttgctgttacaacagtttaccgcaatgtgtttactgaagatg

SEQ ID NO: 398372 - DNA, 75 bp, synthetic construct
  source 1..75: mol_type = other DNA
agggagcaacagatatgccgggttgtacatcacgtttattgcccgaaggccctttctcacgcaaccaggcacttg

SEQ ID NO: 398373 - DNA, 75 bp, synthetic construct
  source 1..75: mol_type = other DNA
acaatctgttagatgccgccagcaaaaccgggctgtttgctaaaagcggtgtggcagcggatgccgttaacgttc

SEQ ID NO: 398374 - DNA, 75 bp, synthetic construct
  source 1..75: mol_type = other DNA
ccgcaaccgccggtttgtctgcggctgaccacttttggtcgttcagaaagcgatctggcgcaaagcctggatgcg

SEQ ID NO: 398375 - DNA, 75 bp, synthetic construct
  source 1..75: mol_type = other DNA
cgttggttaaacggccaggacatcgccagtgagcatggctggattgaggttgttgagtccatgactttatccagt

SEQ ID NO: 398376 - DNA, 75 bp, synthetic construct
  source 1..75: mol_type = other DNA
cgtttcagcactacacgctacagcctggctatccgtcaggaagtgtgcgcaatgatggcactgaatatgctgcgc

SEQ ID NO: 398377 - DNA, 75 bp, synthetic construct
  source 1..75: mol_type = other DNA
catttcagtgccacacgctacagtctggctattcgccaggaagtctgcgcaatgatggcgcttaatatgctacgc

SEQ ID NO: 398378 - DNA, 75 bp, synthetic construct
  source 1..75: mol_type = other DNA
aatcgttgacactaacgctgcctggctggcggattttttctttcaccagggattgccattatctcgccgcaatac

SEQ ID NO: 398379 - DNA, 75 bp, synthetic construct
  source 1..75: mol_type = other DNA
cgcactggattacagaacggcgggcgaaccattttgctgggttggcactggctgtttctggtctggaagatgagc

SEQ ID NO: 398380 - DNA, 75 bp, synthetic construct
  source 1..75: mol_type = other DNA
caaaataccttacaagtcattatcggtacaaaagtcatcgccctacgtcgggatatggataattacatggggata

SEQ ID NO: 398381 - DNA, 75 bp, synthetic construct
  source 1..75: mol_type = other DNA
atgaatggattcgctaacatggttctgccatatatgggcgtgaagatgggatttactggcgatctgattcaattt

SEQ ID NO: 398382 - DNA, 75 bp, synthetic construct
  source 1..75: mol_type = other DNA
ccattcttaaatttaacctgatgaccgtaggacgtgaagagtccagccccatcgcgataaacgcccacgaagata

SEQ ID NO: 398383 - DNA, 75 bp, synthetic construct
  source 1..75: mol_type = other DNA
ttgtgatgagtggatttggtctgatcattccttttatctggccgccgtttttcaatcttttcatgctcattggcc

SEQ ID NO: 398384 - DNA, 75 bp, synthetic construct
  source 1..75: mol_type = other DNA
ttgcaacgcgaattgaaagataaagtcgcgatgatgaatcgactacagcaggcgctggaacacaaccattttttc

SEQ ID NO: 398385 - DNA, 75 bp, synthetic construct
  source 1..75: mol_type = other DNA
cagcggagcaaatggttaaggctctgggtggtaaagaaaatattaaatcactggataattgtgtaactcgtttgc

SEQ ID NO: 398386 - DNA, 75 bp, synthetic construct
  source 1..75: mol_type = other DNA
ttagtttgcttggtattataaactccctttgttttgaatttcaattaagaagctttttagctactggtcatgtat

SEQ ID NO: 398387 - DNA, 75 bp, synthetic construct
  source 1..75: mol_type = other DNA
tgtcggcgtgagcttgaggcgttgaagcgaattgatatcagggaatccacacaagatgcggtggatgcttattgc

SEQ ID NO: 398388 - DNA, 75 bp, synthetic construct
  source 1..75: mol_type = other DNA
tgatgtcagagcgtccacacaggatgcagtggatgcctattaccgatatcgtgttgacaagatgtgtgctgatat

SEQ ID NO: 398389 - DNA, 75 bp, synthetic construct
  source 1..75: mol_type = other DNA
attggcggtgaagagtattacggcaccctgaacatgtttatggcatacgtcaaagagaatgcggtcattccgctg

SEQ ID NO: 398390 - DNA, 75 bp, synthetic construct
  source 1..75: mol_type = other DNA
cttttatttttaataaaggtgaatcccttaatgataatattcaacttagtgtgtatgataaaaacttaaatatta

SEQ ID NO: 398391 - DNA, 75 bp, synthetic construct
  source 1..75: mol_type = other DNA
tggatttgaatgaatttaataagcttctgtcttcatttgataagattgagttagctgaaaaagaaagtttattga

SEQ ID NO: 398392 - DNA, 75 bp, synthetic construct
  source 1..75: mol_type = other DNA
cgtttttgctgtaggtagcttactctatgactatttacatagacgttttaggaatgccaatctcagggatctaaa

SEQ ID NO: 398393 - DNA, 75 bp, synthetic construct
  source 1..75: mol_type = other DNA
ccgttatcttggcgtgctgctgtacgatgccgacgcgattgaacgtgcagccagcaccgagaacgagaaagatct

SEQ ID NO: 398394 - DNA, 75 bp, synthetic construct
  source 1..75: mol_type = other DNA
cgtacaggcgatgtgaaacagccgaacgatccgggtgaaatcaccaatgaagtgacgccaattaaagtgggcgac

SEQ ID NO: 398395 - DNA, 75 bp, synthetic construct
  source 1..75: mol_type = other DNA
tctgccgatgggcgtgaccacgccagatatctggggcggtaatcgcacaccggaacaggaacgttatgccagctc

SEQ ID NO: 398396 - DNA, 75 bp, synthetic construct
  source 1..75: mol_type = other DNA
gagatgtatcgttatctggctattgccaactacgaagatcgctttgtggtgccgagcagtcatcgtgaactggcg

SEQ ID NO: 398397 - DNA, 75 bp, synthetic construct
  source 1..75: mol_type = other DNA
aaccggtactgcgcgcgctgaaacgtatgctggcgatgcgtcattacaaacgtgctgaaaccgttgacggtaaag

SEQ ID NO: 398398 - DNA, 75 bp, synthetic construct
  source 1..75: mol_type = other DNA
cttcaactggaagagcggtaagtctgagaagtgcatcttctgctatccgcgtattgaagccggccagccgacaat

SEQ ID NO: 398399 - DNA, 75 bp, synthetic construct
  source 1..75: mol_type = other DNA
ttccggattaccgccggaaggaaaaatccgtatcgctggagaaaatggttttcctgcatggtctgaaattccacc

SEQ ID NO: 398400 - DNA, 75 bp, synthetic construct
  source 1..75: mol_type = other DNA
ctgtggttgatttttgccggtatgatgcttttctctacaggattctttgccgctcactctgtcgccagtagctgg

SEQ ID NO: 398401 - DNA, 75 bp, synthetic construct
  source 1..75: mol_type = other DNA
ccccctatccgatgccattggtcgcaaaccagtgatggtcacggcgctactgttggcctccatttgtacgttact

SEQ ID NO: 398402 - DNA, 75 bp, synthetic construct
  source 1..75: mol_type = other DNA
ctgaactgagcttccgtccgacgaaagatttgagcggtgcggatatgtggggagccaccatgtttgaccagctgg

SEQ ID NO: 398403 - DNA, 75 bp, synthetic construct
  source 1..75: mol_type = other DNA
ctaccctatcgctggccttgtgatgctcggcgtcgcctggatgctgtggcgcagtaaacgcgccgcgctttggct

SEQ ID NO: 398404 - DNA, 75 bp, synthetic construct
  source 1..75: mol_type = other DNA
ccgatctctctaacccgcaaaccgttttattttttatcagtattttctcagtaacattaaatgccgaaacaccaa

SEQ ID NO: 398405 - DNA, 75 bp, synthetic construct
  source 1..75: mol_type = other DNA
aaaatggaacgttgtcggcgggaactggaggcgctgaagaaaatagattcggcggtatataacaaacgtaaagcg

SEQ ID NO: 398406 - DNA, 75 bp, synthetic construct
  source 1..75: mol_type = other DNA
tcccaatgcttccacgggaactttccgacgatctctgctccctgcgtgccaatgaagtgcgtccggtgctggcat

SEQ ID NO: 398407 - DNA, 75 bp, synthetic construct
  source 1..75: mol_type = other DNA
atgacgcccttttcgctaaggcgttgccggatggcaaacttcagctgattgtggcgattgccgatccaaccgcgt

SEQ ID NO: 398408 - DNA, 75 bp, synthetic construct
  source 1..75: mol_type = other DNA
ttgaagcggagctgggggcgattctcggcaaagaagatgatcacgtcagcgaagccgattgcaaaacggaaccgg

SEQ ID NO: 398409 - DNA, 75 bp, synthetic construct
  source 1..75: mol_type = other DNA
tggcaactggtaatggcagaaggcggcgaaattagctggggtcttgatgatggtagccagatggtactgagggct

SEQ ID NO: 398410 - DNA, 75 bp, synthetic construct
  source 1..75: mol_type = other DNA
aactggggttctccccgctatccaaaaagatcatgttggcaaaaatgcgcgatgttgacggcggtcgcttgcgag

SEQ ID NO: 398411 - DNA, 75 bp, synthetic construct
  source 1..75: mol_type = other DNA
cgaaacagcgacgcgcccgcaggatgaaatcaccgtccaaatggcagaacgtcgccgtcttaaccggatggcaga

SEQ ID NO: 398412 - DNA, 75 bp, synthetic construct
  source 1..75: mol_type = other DNA
taacccgcatcaggcgcgtcgtttccatcaggagatgctgaatctgtttctgaaatactccgccaaccttggcgc

SEQ ID NO: 398413 - DNA, 75 bp, synthetic construct
  source 1..75: mol_type = other DNA
atggcaacctttgcctctagcggacgcattactctggacgtggttgaagatgagataaaccgtctgcgctataac

SEQ ID NO: 398414 - DNA, 75 bp, synthetic construct
  source 1..75: mol_type = other DNA
ggcaaagccagcgtcaatgacgcggatcggctacgcaaatacctggcgcgttttggtctgacgtgggaagcattg

SEQ ID NO: 398415 - DNA, 75 bp, synthetic construct
  source 1..75: mol_type = other DNA
atggctactttaaaaccggattaatgatgctggtggggagtatcaaccgcgttattcgtccgcgtctgaaactgc

SEQ ID NO: 398416 - DNA, 75 bp, synthetic construct
  source 1..75: mol_type = other DNA
tattaaccaactggtggtggaaccaacgctacagactacgcgcgatcctgacatttatgccattggcgactgcgc

SEQ ID NO: 398417 - DNA, 75 bp, synthetic construct
  source 1..75: mol_type = other DNA
gttggcggcggcgcgacgggtgtagaactctccgctgaattgcacaacgccgtcaagcaactgcacagctacggt

SEQ ID NO: 398418 - DNA, 75 bp, synthetic construct
  source 1..75: mol_type = other DNA
gcgaaattagctggggtcttgatgatggtagccagatggtactgagggctgaaaagcaggtgtggaatgatggcc

SEQ ID NO: 398419 - DNA, 75 bp, synthetic construct
  source 1..75: mol_type = other DNA
ataggcagcggcgcgacagcttcgtcaatttaatctcctacgatccggtgggcgatccgcgggaaattgaaacca

SEQ ID NO: 398420 - DNA, 75 bp, synthetic construct
  source 1..75: mol_type = other DNA
cgtgacgatgagccccagcaggatacgattgtggtcaccggagagaaagttgcaaggacactcggcaataccagc

SEQ ID NO: 398421 - DNA, 75 bp, synthetic construct
  source 1..75: mol_type = other DNA
cgtcgcgcaaatttgctggtttctgctggcggaagctcgttacctgcccgcccgactggcgcaaacttcaccacc

SEQ ID NO: 398422 - DNA, 75 bp, synthetic construct
  source 1..75: mol_type = other DNA
tcaacagcgcttcggtaaaaaatgtgaaacgctgtctggtatgcaacgctccctgttcgaagaggatgttgatgc

SEQ ID NO: 398423 - DNA, 75 bp, synthetic construct
  source 1..75: mol_type = other DNA
cgaggatataacgccggtggggcaggaatgacttttgttgcgccgttaattaactatacctacgatcctgaatat

SEQ ID NO: 398424 - DNA, 75 bp, synthetic construct
  source 1..75: mol_type = other DNA
atcgtcagcgcaaaggcggtgcgacccggaaggtggattttgatgaaacctgggacgttttcctgccgaaacttg

SEQ ID NO: 398425 - DNA, 75 bp, synthetic construct
  source 1..75: mol_type = other DNA
gatttcagacttggtactcctgtaagggttaatatttatggcagagatgatgtcgatcctgttttaatcggtttg

SEQ ID NO: 398426 - DNA, 75 bp, synthetic construct
  source 1..75: mol_type = other DNA
gtattgcagctttgatcactggatgtggcgaagagagtgattttgaaaatgccattaatgagaaaatcagtaaag

SEQ ID NO: 398427 - DNA, 75 bp, synthetic construct
  source 1..75: mol_type = other DNA
cgttgggtcgacttaatggagattacaaaatgggcaagaaagaacaaggatcattatctctccctagaggagtaa

SEQ ID NO: 398428 - DNA, 75 bp, synthetic construct
  source 1..75: mol_type = other DNA
ttcttgatgagattggcgaactgggcgcagacgaacaggcaatgctgctaaaagccattgaagagaaaacctttt

SEQ ID NO: 398429 - DNA, 75 bp, synthetic construct
  source 1..75: mol_type = other DNA
atgaaacctgaactgaccctgaatgtattacagaccatgagcgcacaggaatacgaagacagtcgtgctgcggga

SEQ ID NO: 398430 - DNA, 75 bp, synthetic construct
  source 1..75: mol_type = other DNA
ctggtgtgaaagggatgtctgaaccagaagaagccaaaattgttctggtgaaaaccaataacggttggcaagcgc

SEQ ID NO: 398431 - DNA, 75 bp, synthetic construct
  source 1..75: mol_type = other DNA
gacggaaagagcgtggttaatccgcgaaggtgaaggctggcgctgccgcgttccgctcagcgagattcctgagcc

SEQ ID NO: 398432 - DNA, 75 bp, synthetic construct
  source 1..75: mol_type = other DNA
cgcctttgaaatagcgatggcggcgcactggcgcgctaaaggactgaggccagacttcgccattgggcattccgt

SEQ ID NO: 398433 - DNA, 75 bp, synthetic construct
  source 1..75: mol_type = other DNA
cccgactcggcgcagctggacaatatggcctgggcccagccggcaattgtcgcctttgaaatagcgatggcggcg

SEQ ID NO: 398434 - DNA, 75 bp, synthetic construct
  source 1..75: mol_type = other DNA
ctgatattaaaatgacaatggtctatgcacacttcgctccagaccatttagaagatgcagtgacgaaaaacccac

SEQ ID NO: 398435 - DNA, 75 bp, synthetic construct
  source 1..75: mol_type = other DNA
gaacgggcgcgacggcaagcgtgtgcgcaaacaattttcgacaaaaggcgaggccatagcattcgaaaacttcac

SEQ ID NO: 398436 - DNA, 75 bp, synthetic construct
  source 1..75: mol_type = other DNA
cattttacagatccggcaaagagaagcgttatttacgccgctgcatgcgccgactgagccagccaaacccacgcc

SEQ ID NO: 398437 - DNA, 75 bp, synthetic construct
  source 1..75: mol_type = other DNA
gcgtttcttgcggcgggcgccgcacagcgcctgtacgccaaaggcaagcaggttcggatggtgttaatcgatccc

SEQ ID NO: 398438 - DNA, 75 bp, synthetic construct
  source 1..75: mol_type = other DNA
atcgcccgtgccggcgatcggttatatgaaatgatgagcggcgcggaagaaccggtggcgattatcttcccgcaa

SEQ ID NO: 398439 - DNA, 75 bp, synthetic construct
  source 1..75: mol_type = other DNA
ggcgagtggctgccgctatcgcccgccgagcctcttcctgcgccgcaaacgcattatcaatggcgctggacgccc

SEQ ID NO: 398440 - DNA, 75 bp, synthetic construct
  source 1..75: mol_type = other DNA
gccgaaggacaaacgcctctggcactgcccgaacatttcgaccagcagacgcccgacagccagcttgccgacttt

SEQ ID NO: 398441 - DNA, 75 bp, synthetic construct
  source 1..75: mol_type = other DNA
cggttccaggacgcctgcgcgggactgcacgcagagccggggcaaataccgattgtttccacgctcaccgccgac

SEQ ID NO: 398442 - DNA, 75 bp, synthetic construct
  source 1..75: mol_type = other DNA
acaccctttggctcccttcactgtcgcccaatacgggatgcgccgatgaattaccggcaaacgtgtttaccggcg

SEQ ID NO: 398443 - DNA, 75 bp, synthetic construct
  source 1..75: mol_type = other DNA
agtaaagcgagctggcatcgagctgccagagggccaatgcactcacgtgctacgtcatacattcgccagccattt

SEQ ID NO: 398444 - DNA, 75 bp, synthetic construct
  source 1..75: mol_type = other DNA
gatctacttcagcgagaaatggaaaaaaggagcaagcccggtcaccgttaacctggagcaaagctatctaagtag

SEQ ID NO: 398445 - DNA, 75 bp, synthetic construct
  source 1..75: mol_type = other DNA
gatggaagaaaccgaagcaaagccctggctgggtgaatcagtggatcgtcgaacactgaaagacgtggttgagct

SEQ ID NO: 398446 - DNA, 75 bp, synthetic construct
  source 1..75: mol_type = other DNA
atccttgtattgcaacgcattcttggccacgctaatattcgtgaaacgatgagatatgcccacttttctcccgag

SEQ ID NO: 398447 - DNA, 75 bp, synthetic construct
  source 1..75: mol_type = other DNA
cctgaaggtcaatgtacccacgttctgcgccacactttcgccagccactttatgatgaacggcggaaacatttta

SEQ ID NO: 398448 - DNA, 75 bp, synthetic construct
  source 1..75: mol_type = other DNA
cttggacatactgacataaagatgacgatgcgttacgcgcactttgcacctgaccatttagaggatgctgtaaag

SEQ ID NO: 398449 - DNA, 75 bp, synthetic construct
  source 1..75: mol_type = other DNA
ctgacagctggccagcatgtctatgacaaactgctgttgatggttgacgctctgggcaatccccttgcaaccgat

SEQ ID NO: 398450 - DNA, 75 bp, synthetic construct
  source 1..75: mol_type = other DNA
actagggaatccgctggctacggcgctgaccccaaagatgtttgctcactatcgcgacaaacgcctaaccggaga

SEQ ID NO: 398451 - DNA, 75 bp, synthetic construct
  source 1..75: mol_type = other DNA
tgctcatttcgcaccagagcatcttgaagatgcggtgacaaaaaatcctttagccactcttttttctactaatta

SEQ ID NO: 398452 - DNA, 75 bp, synthetic construct
  source 1..75: mol_type = other DNA
atgaccatcagaaagcagccaaacggaaaatggttgtgtgaatgctacccgaacgggcgagacggcaagcgtgtg

SEQ ID NO: 398453 - DNA, 75 bp, synthetic construct
  source 1..75: mol_type = other DNA
gaagtatgcacactttgcgcctgaccatcttgagcaagctgttacccttaatccgttgtcgctatatgttggcga

SEQ ID NO: 398454 - DNA, 75 bp, synthetic construct
  source 1..75: mol_type = other DNA
gttgggcgaccctattgcatctcgtcttaccgctaaagattgggctcattaccgtgaccgtcgattacgtggcga

SEQ ID NO: 398455 - DNA, 75 bp, synthetic construct
  source 1..75: mol_type = other DNA
gcaggtaacgaagtaccgcatcacgttcaccagaacgaagggaaagaaaaacagaagcattcctatcagcaaaga

SEQ ID NO: 398456 - DNA, 75 bp, synthetic construct
  source 1..75: mol_type = other DNA
cgattcatgccgctggcgtattggctgacgcgcccttgcaggagcttgatgaccccagctggctgccgttttcgc

SEQ ID NO: 398457 - DNA, 75 bp, synthetic construct
  source 1..75: mol_type = other DNA
gccgccgcgcctcctgcgccgcccgtctcgtatggtgtggaggaagatgtcttccacccggtacgcgcgaaacag

SEQ ID NO: 398458 - DNA, 75 bp, synthetic construct
  source 1..75: mol_type = other DNA
gtggtgaaagacggtaaaacctggttagtgactggtagcccaggcggtagccggatcatcactaccgtgctgcaa

SEQ ID NO: 398459 - DNA, 75 bp, synthetic construct
  source 1..75: mol_type = other DNA
atgggcagtacgcaaagcattatggttgggccggagggtgagttatacggcgcatccgacccgcgctcggtggat

SEQ ID NO: 398460 - DNA, 75 bp, synthetic construct
  source 1..75: mol_type = other DNA
caaagcattatggttgggccggacggtgagttgtacggtgcatccgacccgcgctcggtggatgatttaacggcg

SEQ ID NO: 398461 - DNA, 75 bp, synthetic construct
  source 1..75: mol_type = other DNA
agcgtccgctgtcgtcgatgtcaccaactattgtggtgaaagacggtaaaacctggctggtgactggtagcccag

SEQ ID NO: 398462 - DNA, 75 bp, synthetic construct
  source 1..75: mol_type = other DNA
tccagcgaaattcgccccggcaagcttgcgccttatgagagtaatcaaactacccattactcagtggtggataaa

SEQ ID NO: 398463 - DNA, 75 bp, synthetic construct
  source 1..75: mol_type = other DNA
tgaacgccagtgcgaagtgttcctcgatccgcacgatccctcggtgatcgaagaagccctgaaacaaggtattcc

SEQ ID NO: 398464 - DNA, 75 bp, synthetic construct
  source 1..75: mol_type = other DNA
ttcaacctgttcaacagtagccgtatcgatgccatcaacatcaccgaagtacgcgacaaagcggagggcgaataa

SEQ ID NO: 398465 - DNA, 75 bp, synthetic construct
  source 1..75: mol_type = other DNA
aacactgcctcaatcccagctgcgtggcgacctgcccaagcggcgctatctacaaacgcgaagaagacggcattg

SEQ ID NO: 398466 - DNA, 75 bp, synthetic construct
  source 1..75: mol_type = other DNA
tctgggcggcggtggttttatgctgatccgctcgaaaaatggcaataccaccgctatcgatttccgcgaaatggc

SEQ ID NO: 398467 - DNA, 75 bp, synthetic construct
  source 1..75: mol_type = other DNA
gctcggaatatcttggcgacccggattttgtcaaagtcccgtggcaggcgctgaccaataaagcctatgccaaat

SEQ ID NO: 398468 - DNA, 75 bp, synthetic construct
  source 1..75: mol_type = other DNA
agcgacccgcgatatgttcctcgatgaccagggcaacccggacagcaaaaaatcactcacttcgcatctggcctc

SEQ ID NO: 398469 - DNA, 75 bp, synthetic construct
  source 1..75: mol_type = other DNA
atggtagcatctgtggacgccactgccactcaggtgggggtagatatccttaagcagggcgggaatgccgttgat

SEQ ID NO: 398470 - DNA, 75 bp, synthetic construct
  source 1..75: mol_type = other DNA
acctgctgccgaaatacccgaacgtcgatggtgtggtggggctgaatcacctgtacggctgtggcgtggcgatta

SEQ ID NO: 398471 - DNA, 75 bp, synthetic construct
  source 1..75: mol_type = other DNA
tctgcctgaagcgccccccttacatactttgcctctggcaaccaaagtgccggaacctttacctccgctggaagg

SEQ ID NO: 398472 - DNA, 75 bp, synthetic construct
  source 1..75: mol_type = other DNA
gtgattaaaatggcgacccgcaccgaactggcgaaccgctggtttgacttaatggatatcaacgcaggcaccatc

SEQ ID NO: 398473 - DNA, 75 bp, synthetic construct
  source 1..75: mol_type = other DNA
gacgcgctcagcacctgggctagtgagaaatcgggggcgcaggtatacagcggccacggagccagcggcaagcag

SEQ ID NO: 398474 - DNA, 75 bp, synthetic construct
  source 1..75: mol_type = other DNA
tctgattgcgcaggtcagcccgaacggtttaacgcccgctggcaggaggcctggcgtctgctttcacagcgtcat

SEQ ID NO: 398475 - DNA, 75 bp, synthetic construct
  source 1..75: mol_type = other DNA
aagtatttacgaccggtcgcggcacaccttacggcctgatggcagtgccggtcattaaaatggcaacccgcactg

SEQ ID NO: 398476 - DNA, 75 bp, synthetic construct
  source 1..75: mol_type = other DNA
acacatgaacaaatcacagagcttctgttcgactgtcaacgccaaagccccctgctcgctcttgtcgtcaaaatc

SEQ ID NO: 398477 - DNA, 75 bp, synthetic construct
  source 1..75: mol_type = other DNA
tggcttggcgaatcggtagaccttcgaactctacaggatatcgttgaactctggttcaaactgcacggcaaatcc

SEQ ID NO: 398478 - DNA, 75 bp, synthetic construct
  source 1..75: mol_type = other DNA
atgggcagtacacaaagcattatggttgggccggacggcgaattgtatggcgcttccgacccacgttcggtagat

SEQ ID NO: 398479 - DNA, 75 bp, synthetic construct
  source 1..75: mol_type = other DNA
actaccggaagcgccgccgttacacacgctgccactggcaaccaaagtcccggaacccttaccgccgctggaagg

SEQ ID NO: 398480 - DNA, 75 bp, synthetic construct
  source 1..75: mol_type = other DNA
gatggagtgaagcagaaaacctgcaagggcatcagttatcaaaatatcgcattacttataccaagaccaaaggta

SEQ ID NO: 398481 - DNA, 75 bp, synthetic construct
  source 1..75: mol_type = other DNA
tgagatgtacggtaaaaccttgtcctctggtgcagagcgcaaagtcaaacttgaggcgatttgttccaggctggg

SEQ ID NO: 398482 - DNA, 75 bp, synthetic construct
  source 1..75: mol_type = other DNA
caactggcgcagcagatgagcaacgatgagcactcgctggaagcctgctggcagccgctgctacgcgccgacaaa

SEQ ID NO: 398483 - DNA, 75 bp, synthetic construct
  source 1..75: mol_type = other DNA
ttgcgatgcgtttatggatggcaaggcgggagaacgggcgacgatggtgattgtggaggcgttggcgggcaagga

SEQ ID NO: 398484 - DNA, 75 bp, synthetic construct
  source 1..75: mol_type = other DNA
atgccaacaccaaccattatcaaaacactcgccacccagcgcgaaaaaccgtccgtcagcgtcgtcacgccaacc

SEQ ID NO: 398485 - DNA, 75 bp, synthetic construct
  source 1..75: mol_type = other DNA
agccaaagaggcgtggaaccacgccgactggaatcgtttttaccaacgcattttgtgttatagccactacagcca

SEQ ID NO: 398486 - DNA, 75 bp, synthetic construct
  source 1..75: mol_type = other DNA
ggactacccggcagaccgccgcgaactggtcatcctcgacgactccccgcaaagccatcaacacatcatcgaccg

SEQ ID NO: 398487 - DNA, 75 bp, synthetic construct
  source 1..75: mol_type = other DNA
tggctggcctgttacccgagcctttgctaccagcgaccgggttttagtgatatcgagaaaaaaacgactgataat

SEQ ID NO: 398488 - DNA, 75 bp, synthetic construct
  source 1..75: mol_type = other DNA
gatttctttatggctatcgcagatgacacgccggtgacgttaatctctgccggtgtcggtcaaacaccaatgctg

SEQ ID NO: 398489 - DNA, 75 bp, synthetic construct
  source 1..75: mol_type = other DNA
caggaaattcgtcagtactctttgacccgcaaaccggatggtaaaggctatcgaattgcggtgaaacgtgaagat

SEQ ID NO: 398490 - DNA, 75 bp, synthetic construct
  source 1..75: mol_type = other DNA
gatttctttatggatgtgacggatgacacgccggtaacactgatctctgcgggtgtagggcaaacgccaatgctg

SEQ ID NO: 398491 - DNA, 75 bp, synthetic construct
  source 1..75: mol_type = other DNA
ggtgaggctattgagcatgtattgaacgatgacaagtggttgtacgctacgagaaataataaattaattagtgca

SEQ ID NO: 398492 - DNA, 75 bp, synthetic construct
  source 1..75: mol_type = other DNA
ggaacagtacaacatcgtcggtgaacacctgttggcgacgctggacgaaatgttcagcccggggcaggaagtgct

SEQ ID NO: 398493 - DNA, 75 bp, synthetic construct
  source 1..75: mol_type = other DNA
catgcagtttgctgcgaaacagctagttgagctgggcgtgaagcaggagaatattcattacgaatgctttggccc

SEQ ID NO: 398494 - DNA, 75 bp, synthetic construct
  source 1..75: mol_type = other DNA
gcgctgctggcaaaggccgattacgtgctgaccgataacagcggctttattttcgatgctattcacgttgataag

SEQ ID NO: 398495 - DNA, 75 bp, synthetic construct
  source 1..75: mol_type = other DNA
cagccacgcctgtttgattatctctttacccatcgtaataaacacaaactgatggcgttgattgatgttccgcag

SEQ ID NO: 398496 - DNA, 75 bp, synthetic construct
  source 1..75: mol_type = other DNA
cgacaccatcggcttttttatggaaacctccttccactacgcgctctaccgcccaatcatcaccgccctgcaggc

SEQ ID NO: 398497 - DNA, 75 bp, synthetic construct
  source 1..75: mol_type = other DNA
aaagccgcagctttggcccgcataacatcctcaacggcaccttttgctatcaccgtaactacctgaaaaagcacc

SEQ ID NO: 398498 - DNA, 75 bp, synthetic construct
  source 1..75: mol_type = other DNA
acgagaaaagacaagaagtttctgctcttaaaaaaaacaagcgtgattccattaagttggctgcggatccgtcag

SEQ ID NO: 398499 - DNA, 75 bp, synthetic construct
  source 1..75: mol_type = other DNA
atgggaaaaccgactttttttatttaagccagcagctggttcacggaataaacgcatcagtaaaaaagctgcgtg

SEQ ID NO: 398500 - DNA, 75 bp, synthetic construct
  source 1..75: mol_type = other DNA
gatcgtgcagcaatgaaaattgtgctggaaaccgagccgcgtaatttaccggcactggatatcacttttgttgat

SEQ ID NO: 398501 - DNA, 75 bp, synthetic construct
  source 1..75: mol_type = other DNA
ggtgaaatgcctggtcagcccctaccacacgcccgcgctcaatggcctggcagcggtgaacgttcgcgccatgta

SEQ ID NO: 398502 - DNA, 75 bp, synthetic construct
  source 1..75: mol_type = other DNA
cgcttacagcagatccgtgaagaactcacattgctgcatattcctcctgagaagatcacccgccttgccgccagt

SEQ ID NO: 398503 - DNA, 75 bp, synthetic construct
  source 1..75: mol_type = other DNA
tggctggcctgttacccgagtatttgttaccagcgaccgggctttagcgatatcgagaaaaaagcgaccgataac

SEQ ID NO: 398504 - DNA, 75 bp, synthetic construct
  source 1..75: mol_type = other DNA
gatgctatccacgttgataaacgggtgatcctgctcgactttccgggcatgacggaactgctcgacggtgagaaa

SEQ ID NO: 398505 - DNA, 75 bp, synthetic construct
  source 1..75: mol_type = other DNA
ggcgctggcgcatttcggcagcgcaaaagtggtcggcaatccacgcttcgacgcctggcataacggcacgttcga

SEQ ID NO: 398506 - DNA, 75 bp, synthetic construct
  source 1..75: mol_type = other DNA
ggtgctctacgcccccacgtttggcgcattaagctccctgccccactgggcagaaaaattgggccgcttaagcgg

SEQ ID NO: 398507 - DNA, 75 bp, synthetic construct
  source 1..75: mol_type = other DNA
cacctgttggcgacgctggacgaaatgttcagcccgggacaggaagtgctggacgcgtggggtaaagcctatggc

SEQ ID NO: 398508 - DNA, 75 bp, synthetic construct
  source 1..75: mol_type = other DNA
tcgagcgcggcgatgtgcttccccatgacatggtcgaatcttctgctgctgcatggcgggatgaaatgagcagga

SEQ ID NO: 398509 - DNA, 75 bp, synthetic construct
  source 1..75: mol_type = other DNA
gtatggcccagccttcccagcaatcgtcgattgttataccagtccacccacgttagtgtggccagttccacttct

SEQ ID NO: 398510 - DNA, 75 bp, synthetic construct
  source 1..75: mol_type = other DNA
ataacctgctggcagcgttctacatccagacagatgcaaaagacctgaatgtgatgtaccacaatgcgaaagtgg

SEQ ID NO: 398511 - DNA, 75 bp, synthetic construct
  source 1..75: mol_type = other DNA
actggttacagagtgtgctaatgacagccagataactgcgctgttaaattacattttactgactggcgatgaagc

SEQ ID NO: 398512 - DNA, 75 bp, synthetic construct
  source 1..75: mol_type = other DNA
cttccccatgacatggtcgaatcctccgctactgcatggcgggatgaaatgagcaggaaggtcgccggtaaatga

SEQ ID NO: 398513 - DNA, 75 bp, synthetic construct
  source 1..75: mol_type = other DNA
atggcacaggttaatatgagtttaagaatcgacgctgaactgaaggatgcttttatggccgctgcaaaaaacatg

SEQ ID NO: 398514 - DNA, 75 bp, synthetic construct
  source 1..75: mol_type = other DNA
aattttttataaaacggtacgtgaattcgaagagttgaagccatacgaagtggaaattgttttcataaatgacgg

SEQ ID NO: 398515 - DNA, 75 bp, synthetic construct
  source 1..75: mol_type = other DNA
tgtcacgagaagtagttgagaacattaagagattgccagagcgtaatctgttcatgaaaggcattcttagttggg

SEQ ID NO: 398516 - DNA, 75 bp, synthetic construct
  source 1..75: mol_type = other DNA
tttatgaaaggcgttctgtcttgggttggcggtaaaactgatgttgtagaatatgcgcgagcagaacgcttcgct

SEQ ID NO: 398517 - DNA, 75 bp, synthetic construct
  source 1..75: mol_type = other DNA
atgagaacggggtgaatgtgccgacgaacaaaccggaagaagacccggacattccgggtatcggatattacggtt

SEQ ID NO: 398518 - DNA, 75 bp, synthetic construct
  source 1..75: mol_type = other DNA
tgctaaacgatctgaccgctctacagacagtcgcctgaaacgtaagtccgcagagtggttctataaacttcacaa

SEQ ID NO: 398519 - DNA, 75 bp, synthetic construct
  source 1..75: mol_type = other DNA
ttgtttgcagggttagaccatgcaacaggcgatgctgttattcctattgatgttgacctgcaagacccgattgag

SEQ ID NO: 398520 - DNA, 75 bp, synthetic construct
  source 1..75: mol_type = other DNA
ccatcaacactgccggacagtcgcttcatcgtaaagaaggtcttaataatgatgtcgtcagggttggtgcgctac

SEQ ID NO: 398521 - DNA, 75 bp, synthetic construct
  source 1..75: mol_type = other DNA
aagcaactgaagaaagtaacggccatcgtgtcagtctgccgttatcggttttcgatccccaggactaccatccac

SEQ ID NO: 398522 - DNA, 75 bp, synthetic construct
  source 1..75: mol_type = other DNA
ttggggcctggcgcctgcgtactgattaccagtacgatcagtcatttaacaatggcaaaagccaggcgaccaacc

SEQ ID NO: 398523 - DNA, 75 bp, synthetic construct
  source 1..75: mol_type = other DNA
gactctacctctccggtacatcacagcgagacagttattattctctgaatgccagttggaatggttcattcactg

SEQ ID NO: 398524 - DNA, 75 bp, synthetic construct
  source 1..75: mol_type = other DNA
cagccgagcgaagccgatcgcgctaaaggtcagtttgatagcgaaggtctgatggatttgagcaaactggaaggt

SEQ ID NO: 398525 - DNA, 75 bp, synthetic construct
  source 1..75: mol_type = other DNA
agcacaccagtttccagatcaaaccggaacagtacaacatcgtcggcgaacacctgttggcgacgctggacgaaa

SEQ ID NO: 398526 - DNA, 75 bp, synthetic construct
  source 1..75: mol_type = other DNA
gacagtaatgccacgcgaaccacagacgcatttctggaaacggagtgcgtggaaaatgtcgccacaaccgaaatc

SEQ ID NO: 398527 - DNA, 75 bp, synthetic construct
  source 1..75: mol_type = other DNA
cgcagcttaaacagcaactgcattcccagacgccacgcgctgaaggggtggtaaaagccacagaaaaaggctttg

SEQ ID NO: 398528 - DNA, 75 bp, synthetic construct
  source 1..75: mol_type = other DNA
cagttaatccgggattttatgcgccagaccgtggaacggcagcataatacctggttccgtgaccaggttgaggca

SEQ ID NO: 398529 - DNA, 75 bp, synthetic construct
  source 1..75: mol_type = other DNA
cgcggcgatgtgcttccccatgacatggtcgaatcctccgctactgcatggcgggatgaaatgagcaggaaggtc

SEQ ID NO: 398530 - DNA, 75 bp, synthetic construct
  source 1..75: mol_type = other DNA
gaatatatcaatgacactaaccattacacgaattatggtaatgactccaacttactgatagtgttttatgttcag

SEQ ID NO: 398531 - DNA, 75 bp, synthetic construct
  source 1..75: mol_type = other DNA
cgtctccacttctctaacatttagccgaataaactgggaagaagacaaccaggatctgaatcgccacgggtttaa

SEQ ID NO: 398532 - DNA, 75 bp, synthetic construct
  source 1..75: mol_type = other DNA
ctaccggagttggttttaaccttaactcgttgggctcattatcctttgatgtcacgcgatctgatgctcagttac

SEQ ID NO: 398533 - DNA, 75 bp, synthetic construct
  source 1..75: mol_type = other DNA
tcgcgacggcgctaactggcatgcgttttatggtggtgaagagagtgacgacctgaatgcccgccaggttgctgg

SEQ ID NO: 398534 - DNA, 75 bp, synthetic construct
  source 1..75: mol_type = other DNA
tttcagcctctctttcacgtcagcttacggttgaatatgactatgtatggtttgtcccttctggcgcagtaaaag

SEQ ID NO: 398535 - DNA, 75 bp, synthetic construct
  source 1..75: mol_type = other DNA
ttgtacacaacggcaaggcttatgttactggtggtgttaaccagaatatcttcaatggctattttgaagatctca

SEQ ID NO: 398536 - DNA, 75 bp, synthetic construct
  source 1..75: mol_type = other DNA
gccagtcgggttattggtgcaattattggtgtattcgcgctacgcctgatttacgaaggggtgacgcagcggtga

SEQ ID NO: 398537 - DNA, 75 bp, synthetic construct
  source 1..75: mol_type = other DNA
accaatactagcgatgatactattgctgggatttggttatgcggcattcgatctgccacctgagccattaatggt

SEQ ID NO: 398538 - DNA, 75 bp, synthetic construct
  source 1..75: mol_type = other DNA
atgatgaggatgaagagactcaactggcgatgatggggttacacggcgcgcaactgctggatcgcttgctggaac

SEQ ID NO: 398539 - DNA, 75 bp, synthetic construct
  source 1..75: mol_type = other DNA
gcaattgttgaagtgctgtcgcccggtcaacccccgactaaacgcgcattaatttacgccgcgacgccagccagt

SEQ ID NO: 398540 - DNA, 75 bp, synthetic construct
  source 1..75: mol_type = other DNA
gcaattgttgaagtgctgtcgcccggtcaacccccgactaaacgcgtattaatttacgccgcgacgccagccagc

SEQ ID NO: 398541 - DNA, 75 bp, synthetic construct
  source 1..75: mol_type = other DNA
gcaattgttgaagtgctgtcgcccggtcaactcccgactaaacgcggattaatttacgccgcgacgccagccaga

SEQ ID NO: 398542 - DNA, 75 bp, synthetic construct
  source 1..75: mol_type = other DNA
tctcccccggcggcagtgctcaggcggcagtgctcgatgtcatcggtcaggcccgggaaagcattgaccttgctg

SEQ ID NO: 398543 - DNA, 75 bp, synthetic construct
  source 1..75: mol_type = other DNA
gcaattgttgaagtgctgtcgcccggtcaacgcccgactaaacgcggattaatttacgccgcgacgccagccagt

SEQ ID NO: 398544 - DNA, 75 bp, synthetic construct
  source 1..75: mol_type = other DNA
gcaattgttgaagtgctgtcgcccggtcaacgcccgactaaacgcgtattaatttacgccgcgacgccagccagg

SEQ ID NO: 398545 - DNA, 75 bp, synthetic construct
  source 1..75: mol_type = other DNA
tcttatggtttgcatggtgtagcatgcaccgcctgtcaacaccgcaaatgagcacactacaacaaccgattagcg

SEQ ID NO: 398546 - DNA, 75 bp, synthetic construct
  source 1..75: mol_type = other DNA
ttggagtcattacccaccaccggtacccacgtcgcgcagatttgctggtttctgctggcagaagcgcgttacctg

SEQ ID NO: 398547 - DNA, 75 bp, synthetic construct
  source 1..75: mol_type = other DNA
aaaacgttgctggcgaaagccattgcaggcgaagcgaaagttccgttctttaccatttctggttctgacttcgtt

SEQ ID NO: 398548 - DNA, 75 bp, synthetic construct
  source 1..75: mol_type = other DNA
tgaaaccgcgcgtatcatcgaccaggaagtgaagtcactgattgaacgtaactataatcgtgcgcgtcagttgtt

SEQ ID NO: 398549 - DNA, 75 bp, synthetic construct
  source 1..75: mol_type = other DNA
gcgacagcgtgcgttttaacaccgaagcgcggcgtgcctggctggcctttgcaacatctcctcaggcgacatggc

SEQ ID NO: 398550 - DNA, 75 bp, synthetic construct
  source 1..75: mol_type = other DNA
gccactagcggacgcatcactctggacgtggtggaagatgagataaaccgtctgcgctataactggcaggagagc

SEQ ID NO: 398551 - DNA, 75 bp, synthetic construct
  source 1..75: mol_type = other DNA
aaatggcttccgacactctgtttatgccagcaagaatcgttggtcatcgatcgactggaattattgcatgacgcc

SEQ ID NO: 398552 - DNA, 75 bp, synthetic construct
  source 1..75: mol_type = other DNA
atgaagggaaacaaaaatgaaaaaacgctcgcaacgttatttttattaacgtgtctgggatcatcatccgcttat

SEQ ID NO: 398553 - DNA, 75 bp, synthetic construct
  source 1..75: mol_type = other DNA
gaaaggttccgaaaagtcatataccttccacggtcgtgatgtgtatgcctacaccggtgcacgtctggcttccgg

SEQ ID NO: 398554 - DNA, 75 bp, synthetic construct
  source 1..75: mol_type = other DNA
tatggacaacaccgagaaggtggtgggcctggtggatgagtgctggcggatggggctgaaaatcctgccaccaga

SEQ ID NO: 398555 - DNA, 75 bp, synthetic construct
  source 1..75: mol_type = other DNA
ttcctgcctgaaggcgacgcaatcagcgccagccgacagaaactggaaagtcagattagtaccctgtacggcggt

SEQ ID NO: 398556 - DNA, 75 bp, synthetic construct
  source 1..75: mol_type = other DNA
atggtgatgacggaagcgcagaaagaatcgacggcttaccacgaagcgggtcacgcaattatcggtcgcctggtg

SEQ ID NO: 398557 - DNA, 75 bp, synthetic construct
  source 1..75: mol_type = other DNA
tgaaagtgcatatgcgtcgcgtaccgttggcgccagatgttgatgcggcaattattgctcgtggcacaccaggct

SEQ ID NO: 398558 - DNA, 75 bp, synthetic construct
  source 1..75: mol_type = other DNA
gcaattgttgaagtgctgtcgcccggtcaactcccgactaaacgcgtattaatttacgccgcgacgccagccagt

SEQ ID NO: 398559 - DNA, 75 bp, synthetic construct
  source 1..75: mol_type = other DNA
ttgatgagattggcgaattgggcgcagacgaacaggcaatgctgctgaaagccattgaagagaaaaccttttatc

SEQ ID NO: 398560 - DNA, 75 bp, synthetic construct
  source 1..75: mol_type = other DNA
acgcctcactcaccggcgacagcgtgcgttttaacaccgaagcgcggcgtgcctggctggcctttgcaacatctc

SEQ ID NO: 398561 - DNA, 75 bp, synthetic construct
  source 1..75: mol_type = other DNA
ttaaagcaacaagagaactggtcaatgcagtcccctttctgggaggcagtgactcagaagatgattatcgtgaag

SEQ ID NO: 398562 - DNA, 75 bp, synthetic construct
  source 1..75: mol_type = other DNA
acgcgacggtgcgaactggcacgccttttatggtcgggaagagagtgacgatttatacgcagggcaaattgcggg

SEQ ID NO: 398563 - DNA, 75 bp, synthetic construct
  source 1..75: mol_type = other DNA
acgattgcagagcgaattcataatgatggatatataaaaggggagcagcgcattcttcgattgttgttgcagaat

SEQ ID NO: 398564 - DNA, 75 bp, synthetic construct
  source 1..75: mol_type = other DNA
acatgaaaattccctcattacagtccaacttcaacttttccgccccggcaggatactctgctcccattgctccta

SEQ ID NO: 398565 - DNA, 75 bp, synthetic construct
  source 1..75: mol_type = other DNA
ctgcatccaaaccacatccggcttttctacaaaaaaataccgttgaagcgaaggaaatcattgaagcgtgtatgc

SEQ ID NO: 398566 - DNA, 75 bp, synthetic construct
  source 1..75: mol_type = other DNA
atgaatgtcggatctgaaatttgtgacgagaaaagacaagaagtttctgctcttaaaaaaaacaagcgtgattcc

SEQ ID NO: 398567 - DNA, 75 bp, synthetic construct
  source 1..75: mol_type = other DNA
ttttccaggatcaccatctactgatggaccgtactgtctacgataacgtggcgatcccgctgattatcgccggtg

SEQ ID NO: 398568 - DNA, 75 bp, synthetic construct
  source 1..75: mol_type = other DNA
ccgactaaacgcggattaatttacgccgcgacgccagccagcgattttgtctgtggcacgcaacaggtggcatca

SEQ ID NO: 398569 - DNA, 75 bp, synthetic construct
  source 1..75: mol_type = other DNA
acggcgtggtcgacttgaaccacctctacggctgtggcgtagcgattaatgtaccggccgccgtggtgccaattc

SEQ ID NO: 398570 - DNA, 75 bp, synthetic construct
  source 1..75: mol_type = other DNA
catctatagatgtcatattattttttaaccatacatatatgacggaactatattacgaccccgaagaaaaaaatc

SEQ ID NO: 398571 - DNA, 75 bp, synthetic construct
  source 1..75: mol_type = other DNA
agataaacgaaaaaacattatctatcgaaatccataaattaaagaacgcacgttactcgattggcatagccatgg

SEQ ID NO: 398572 - DNA, 75 bp, synthetic construct
  source 1..75: mol_type = other DNA
tctcaatatgggaaaaaccgaccgcagcgccaacccttcgccgggcaacgagaagggcggcctcgcaaacgtggt

SEQ ID NO: 398573 - DNA, 75 bp, synthetic construct
  source 1..75: mol_type = other DNA
tctcaatatgggaaaaaccgaccgcagcgccaacccttcgccgggcaacgacaagggcgggctcgcaaacgtggt

SEQ ID NO: 398574 - DNA, 75 bp, synthetic construct
  source 1..75: mol_type = other DNA
tctcaatatgggaaaaaccgaccgcagcgccaacccttcgccgggcaacgacaacggcggcctcgcaaacgtggt

SEQ ID NO: 398575 - DNA, 75 bp, synthetic construct
  source 1..75: mol_type = other DNA
gcaattgttgaagtgctgtcgcccggtcaactcccgactaaacgcgaattaatttacgccgcgacgccagccagg

SEQ ID NO: 398576 - DNA, 75 bp, synthetic construct
  source 1..75: mol_type = other DNA
gcaattgttgaagtgctgtcgcccggtcaacacccgactaaacgcgtattaatttacgccgcgacgccagccaga

SEQ ID NO: 398577 - DNA, 75 bp, synthetic construct
  source 1..75: mol_type = other DNA
gcaattgttgaagtgctgtcgcccggtcaacacccgactaaacgcgaattaatttacgccgcgacgccagccagt

SEQ ID NO: 398578 - DNA, 75 bp, synthetic construct
  source 1..75: mol_type = other DNA
tcgtaccattcacaatatttcgctgaaccctaactttggcggcgaagtaatggtgattggtctgggttgtgaaaa

SEQ ID NO: 398579 - DNA, 75 bp, synthetic construct
  source 1..75: mol_type = other DNA
tcggcatgcagtgcggtggcagcgatgcgttttctggcgtaacggcaaatccagccgtgggttatgcatctgatc

SEQ ID NO: 398580 - DNA, 75 bp, synthetic construct
  source 1..75: mol_type = other DNA
gccgatggcagcgtgggcaccaaaaacctgctcggcatcaccaccagcgtccactgtgtggcaggcgtggtggac

SEQ ID NO: 398581 - DNA, 75 bp, synthetic construct
  source 1..75: mol_type = other DNA
tctcaatatgggaaaaaccgaccgcagcgccaacccttcgccgggcaacgacaaaggcggactcgcaaacgtggt

SEQ ID NO: 398582 - DNA, 75 bp, synthetic construct
  source 1..75: mol_type = other DNA
tctcaatatgggaaaaaccgaccgcagcgccaacccttcgccgggcaacgataatggcggcctcgcaaacgtggt

SEQ ID NO: 398583 - DNA, 75 bp, synthetic construct
  source 1..75: mol_type = other DNA
tctcaatatgggaaaaaccgaccgcagcgccaacccttcgccgggcaacgaaaaaggcggcctcgcaaacgtggt

SEQ ID NO: 398584 - DNA, 75 bp, synthetic construct
  source 1..75: mol_type = other DNA
gcgtcagtcggcggggaaactgctgggataacagccccatggaacgcttcttccgcagtctgaaaacagaatggg

SEQ ID NO: 398585 - DNA, 75 bp, synthetic construct
  source 1..75: mol_type = other DNA
aactgctgggataacagtcccatggaacgcttcttccgcagtctgaaaacagaatgggtgccgactgatggctat

SEQ ID NO: 398586 - DNA, 75 bp, synthetic construct
  source 1..75: mol_type = other DNA
ggggattgcgccctctgccacacctattactccagaccagcaacgtatccgcgaactggaaaagcaggttcgccg

SEQ ID NO: 398587 - DNA, 75 bp, synthetic construct
  source 1..75: mol_type = other DNA
tctggtcggtcgggcaacggctatctggatgagcttcgataagcaagaaggcgaatggccgactggtgtgcgctt

SEQ ID NO: 398588 - DNA, 75 bp, synthetic construct
  source 1..75: mol_type = other DNA
tataacggtgggttgacaccggaagagtccgggaacaggtaccatttttactgtaaaaacgtggccagtattact

SEQ ID NO: 398589 - DNA, 75 bp, synthetic construct
  source 1..75: mol_type = other DNA
gttatcggctggagcctgtcagcgaatgccgatactgccctgataagcagtgccctgcggatggcgtatgaggtg

SEQ ID NO: 398590 - DNA, 75 bp, synthetic construct
  source 1..75: mol_type = other DNA
ttaaccgtggactcattgtgtcaggcggcattgcgcggcgatctactggcaaaagacatcattaccggggtgggc

SEQ ID NO: 398591 - DNA, 75 bp, synthetic construct
  source 1..75: mol_type = other DNA
gttaaaagatgactcgccattgctggatcgtatcatttcccatatcgatcagttttttatccgccaccagaaaaa

SEQ ID NO: 398592 - DNA, 75 bp, synthetic construct
  source 1..75: mol_type = other DNA
ctgcgtctcaatcaatccatgagctcgatgttacatggacaaccgttaaccgtggactcattgtgtcaggcggca

SEQ ID NO: 398593 - DNA, 75 bp, synthetic construct
  source 1..75: mol_type = other DNA
attataacggagggctgacgccggaagagtcagagaacagataccatttttactgtaaaaccgtggccagtatta

SEQ ID NO: 398594 - DNA, 75 bp, synthetic construct
  source 1..75: mol_type = other DNA
agttcgctgtgcccgagccagatagggtatggtgcggagatattacgtatatctgggcaggaaatcgctggtgct

SEQ ID NO: 398595 - DNA, 75 bp, synthetic construct
  source 1..75: mol_type = other DNA
tatcggctggagcctgtcagcgaatgccgatactgcactgataagcagtgccttgcggatggcgtatgaggtgcg

SEQ ID NO: 398596 - DNA, 75 bp, synthetic construct
  source 1..75: mol_type = other DNA
tcaaccgggatgcagttccggtcaggcgtgcgaaaacgcgttgccggtcacctattccaacgtggagccgagcga

SEQ ID NO: 398597 - DNA, 75 bp, synthetic construct
  source 1..75: mol_type = other DNA
atattgtaagagggctgtattctgaactgcaaaatcaccataaaacagaggtattgtctcaggataataaatata

SEQ ID NO: 398598 - DNA, 75 bp, synthetic construct
  source 1..75: mol_type = other DNA
gagagcttctgccgggatgtatggagatgctcatattgaatgggggattaaacctaaaattcttggtgttggtgg

SEQ ID NO: 398599 - DNA, 75 bp, synthetic construct
  source 1..75: mol_type = other DNA
ggatcgccatcggtattttcccgctcctggtactggcggctgtcttcaacaaactgacgctgtctgtcctgaaag

SEQ ID NO: 398600 - DNA, 75 bp, synthetic construct
  source 1..75: mol_type = other DNA
tgggcaggaaatcgctggtgctatctggcggtcgtcatggatctttttacccgcagggttatcggctggagcctg

SEQ ID NO: 398601 - DNA, 75 bp, synthetic construct
  source 1..75: mol_type = other DNA
gaacgtcattatggtcgggattgtggcgttgtcggcgctgttctttgatttagtcaccgccacggcgttgattaa

SEQ ID NO: 398602 - DNA, 75 bp, synthetic construct
  source 1..75: mol_type = other DNA
accagctggggcggtttacaggccaccgatgccactcacgcttacgatctcagcgccgaagcgggtaccgcgagc

SEQ ID NO: 398603 - DNA, 75 bp, synthetic construct
  source 1..75: mol_type = other DNA
ctttaaagaggccagcgattactttaccagtcgcaaggtcagtgagtccggcagccatactgacaataatgctga

SEQ ID NO: 398604 - DNA, 75 bp, synthetic construct
  source 1..75: mol_type = other DNA
ggttgataatatggtcacagaatataaagggaatataggtgatactcagaacagcatacgtggcgaggaaaatat

SEQ ID NO: 398605 - DNA, 75 bp, synthetic construct
  source 1..75: mol_type = other DNA
tcagcgaatgccgatactgcactgataagcagtgccttgcggatggcgtatgaggtgcgtggtcagccgcgggac

SEQ ID NO: 398606 - DNA, 75 bp, synthetic construct
  source 1..75: mol_type = other DNA
tgtgtttgccctgatgtggttccagagctggccgttgctgtatgccattctgaacagtgccatgacattctatgc

SEQ ID NO: 398607 - DNA, 75 bp, synthetic construct
  source 1..75: mol_type = other DNA
tacggtgatgcttatgctaaagggcatttaggcataagtgtattgggtaacggtggaggggttggtctccaggcc

SEQ ID NO: 398608 - DNA, 75 bp, synthetic construct
  source 1..75: mol_type = other DNA
agaaaagctggttcaggaaagaatacctggagctgatagtccgaaagaacttttagagaaagcgaaaagctacca

SEQ ID NO: 398609 - DNA, 75 bp, synthetic construct
  source 1..75: mol_type = other DNA
ggaggtgggcgaactgcccaccggcccggtgatctacctgcccgccgaagacccgcccaccgccattcatcaccg

SEQ ID NO: 398610 - DNA, 75 bp, synthetic construct
  source 1..75: mol_type = other DNA
ccactgccggatatatatctgtcatgatacccccgttgtcatggatgatggtaaaaggccttggcgcaggttttt

SEQ ID NO: 398611 - DNA, 75 bp, synthetic construct
  source 1..75: mol_type = other DNA
ctctctgcctccctctcaacaactggtaatcaggttcatgattctaaccggatgccgcgccgcagaaataagaaa

SEQ ID NO: 398612 - DNA, 75 bp, synthetic construct
  source 1..75: mol_type = other DNA
catgatatcgatgctaaagccagtaaggactttaaagaggccagcgattactttaccagtcgcaaagtcagtgaa

SEQ ID NO: 398613 - DNA, 75 bp, synthetic construct
  source 1..75: mol_type = other DNA
aatggcatcccgtactgaaagcatgagtgggcagatgagtgaagacctgtcgcaacagtttgcacagtatgtgat

SEQ ID NO: 398614 - DNA, 75 bp, synthetic construct
  source 1..75: mol_type = other DNA
gaaggtaaatatggcaatgcaataaagttgaaaagagtgacaggtcagttcgaacccgtatgtattgatataagt

SEQ ID NO: 398615 - DNA, 75 bp, synthetic construct
  source 1..75: mol_type = other DNA
tgtttggcgcagaactggtatcaaaaagcaccgactttttgtcccgtaatccggaaatcgccaatcttttccagg

SEQ ID NO: 398616 - DNA, 75 bp, synthetic construct
  source 1..75: mol_type = other DNA
gaagtcgatgtgctgtacggcattggcggcgcgccggaaggcgtggtttctgcggcggtgatccgcgcattagat

SEQ ID NO: 398617 - DNA, 75 bp, synthetic construct
  source 1..75: mol_type = other DNA
gccaccactgagacactgctgattcgcggtaagtcacgcaccattcgccgtattcagtcgattcactatctggat

SEQ ID NO: 398618 - DNA, 75 bp, synthetic construct
  source 1..75: mol_type = other DNA
cggcggcgctcggcaaaccgttgagcgaactgacggtaacgattctggctaaaccacgccacgatgccgttatcg

SEQ ID NO: 398619 - DNA, 75 bp, synthetic construct
  source 1..75: mol_type = other DNA
ggtactatcgtcattggcgaaggtgaaatcgacgaagcgccaatgctctacattggtgaaaaggtcgggacaggc

SEQ ID NO: 398620 - DNA, 75 bp, synthetic construct
  source 1..75: mol_type = other DNA
atccggtagtcctgaatcgtgcgggggcaaccccgcacacatcaataatccctcccttcccctgtgctacacttc

SEQ ID NO: 398621 - DNA, 75 bp, synthetic construct
  source 1..75: mol_type = other DNA
cacgtcatgacgtcaaaggcgacaacgaagagaatcgtcgcattggcgagcaggagctggcgcgctgcaaagcga

SEQ ID NO: 398622 - DNA, 75 bp, synthetic construct
  source 1..75: mol_type = other DNA
atatccgtaacgatgtgaagcagcaggttgataatatggtcacagaatatcgaggcaatatcggagatactcaga

SEQ ID NO: 398623 - DNA, 75 bp, synthetic construct
  source 1..75: mol_type = other DNA
tttaccagtcgcaaggtcagtgaatccggcagccatactgacaataatgccgattccagggtggaccagctgtct

SEQ ID NO: 398624 - DNA, 75 bp, synthetic construct
  source 1..75: mol_type = other DNA
cgacataacgtgatggatttgctgggatgggttgccgtgtttgtgcttatcagtctgctgattaatgtccgcaca

SEQ ID NO: 398625 - DNA, 75 bp, synthetic construct
  source 1..75: mol_type = other DNA
gacggtaatatggtgatggatgcgagcggggcgatgtcccggttaccggtcggtatcaatgcaacgcgtcagatt

SEQ ID NO: 398626 - DNA, 75 bp, synthetic construct
  source 1..75: mol_type = other DNA
ttatgttttacctaacatggttgccggtacggtgggggccttggtttcaccaggtggtgccggaaaatccatgct

SEQ ID NO: 398627 - DNA, 75 bp, synthetic construct
  source 1..75: mol_type = other DNA
cagctgaaatactccgatctggcgtccactgccgggtatatatctgtcatgatacccccgttgtcatggatgatg

SEQ ID NO: 398628 - DNA, 75 bp, synthetic construct
  source 1..75: mol_type = other DNA
cctggcgtgaatcccgtggggacatcggtaaaggaatggagagcgtaccttcgggggggggggggcagccaggat

SEQ ID NO: 398629 - DNA, 75 bp, synthetic construct
  source 1..75: mol_type = other DNA
aggtgtaggaggtagacttggcggaagagccagcattgactggagtgatgatgatgctcatgaagccagcagtgg

SEQ ID NO: 398630 - DNA, 75 bp, synthetic construct
  source 1..75: mol_type = other DNA
gtcaggggactcggggccggattttccagtgtgtacagccatttcgcttcctctgctatcagcccgaccgccagt

SEQ ID NO: 398631 - DNA, 75 bp, synthetic construct
  source 1..75: mol_type = other DNA
agaaaaatcagctcaggaaggaatacccggtgctgacagcccacaggatcttatgaacagggcaaaagagtatca

SEQ ID NO: 398632 - DNA, 75 bp, synthetic construct
  source 1..75: mol_type = other DNA
atataaagggaatataggtgatactcagaacagcatacgtggcgaggaaaatattgtaagagggcagtattctga

SEQ ID NO: 398633 - DNA, 75 bp, synthetic construct
  source 1..75: mol_type = other DNA
aaggcaagcattgatggcagtgatcttgactcacatgaagccagtagtggttcacgggccagccatgatgctcgt

SEQ ID NO: 398634 - DNA, 75 bp, synthetic construct
  source 1..75: mol_type = other DNA
ttcgttcagttttattaatggtgagcagctgcagcgttttgttaagcagattatgagtaatgctgccggttactt

SEQ ID NO: 398635 - DNA, 75 bp, synthetic construct
  source 1..75: mol_type = other DNA
atggataaagaatataaaactctcgtcaataaagcacttgagcgctttcattttcgcttaagcgcatcaggcact

SEQ ID NO: 398636 - DNA, 75 bp, synthetic construct
  source 1..75: mol_type = other DNA
gttcctttcgttgatggcggcgtaatcaaagctgaagttgttgctcacggtcgtggcgagaaagttaaaatcgtt

SEQ ID NO: 398637 - DNA, 75 bp, synthetic construct
  source 1..75: mol_type = other DNA
atgggcaaagaatataagactctcataaacaaagcacttgagcgtttttattttcgcttaagtgcatcaggtact

SEQ ID NO: 398638 - DNA, 75 bp, synthetic construct
  source 1..75: mol_type = other DNA
cgcttgataatcaggaagaacctgaaaaactgactattgaacctactgtaaaaaatcagtcattacctttagcgg

SEQ ID NO: 398639 - DNA, 75 bp, synthetic construct
  source 1..75: mol_type = other DNA
aaacgtgaagccggacaccattcatgtctatcgttacgtcatgaagccggatcttcctatccgacgtgacagccc

SEQ ID NO: 398640 - DNA, 75 bp, synthetic construct
  source 1..75: mol_type = other DNA
gtgattgccactactccggaggaagccttcagcatcgtgtttcaccgtcgcgctttcagcgaaatcaaaaagcag

SEQ ID NO: 398641 - DNA, 75 bp, synthetic construct
  source 1..75: mol_type = other DNA
gatctggatgctctcaatgagctgtctgagcttgttcgtgatgcagaatgcggagtacatattgagccatacgca

SEQ ID NO: 398642 - DNA, 75 bp, synthetic construct
  source 1..75: mol_type = other DNA
attacgttcaaagggaagagtcatcgattcactagacatcgatgaaattcgctggcctttagcgggagtaaaagt

SEQ ID NO: 398643 - DNA, 75 bp, synthetic construct
  source 1..75: mol_type = other DNA
caatgcctggtggcctaaacaatcgctgaccgtattccagccgctgatcccgccagactggaagatgaatctacg

SEQ ID NO: 398644 - DNA, 75 bp, synthetic construct
  source 1..75: mol_type = other DNA
gatttggatgcgattaacgagctttccgaactcgtctgcgctgcagaatgcggggaacatattgaaccgtataaa

SEQ ID NO: 398645 - DNA, 75 bp, synthetic construct
  source 1..75: mol_type = other DNA
ttaacaaagcacttgagcgttttcattttcgcttaaacacatcaggcccccacgccgaacacgcagcccatgact

SEQ ID NO: 398646 - DNA, 75 bp, synthetic construct
  source 1..75: mol_type = other DNA
atgggcaaagaatataaaactctcataaacaaagcacttgagcgtttttattttcgcttaagtacatcaggtact

SEQ ID NO: 398647 - DNA, 75 bp, synthetic construct
  source 1..75: mol_type = other DNA
ctcaaggcgctgccggaaccgtggcggctcggtcgttctggagatcggggcctaaaaatcttcgtgttttactcc

SEQ ID NO: 398648 - DNA, 75 bp, synthetic construct
  source 1..75: mol_type = other DNA
caccacgccactgctgttttatggcgaaacgctgattgcggcggcaggggtatttgtgacgcaagaaggtgtggc

SEQ ID NO: 398649 - DNA, 75 bp, synthetic construct
  source 1..75: mol_type = other DNA
tggggatggatgttaagaagggtgaatcattgaactctgcggcaaaacgttttctttcctcaagttatggagata

SEQ ID NO: 398650 - DNA, 75 bp, synthetic construct
  source 1..75: mol_type = other DNA
gcagcaatcaggctggagaagcactaacagcgcgtggtcaggacatccagatacgtggacagaacatcagcgcac

SEQ ID NO: 398651 - DNA, 75 bp, synthetic construct
  source 1..75: mol_type = other DNA
ctttcctatcagtcagcaatgactggacacggacttgcagcagaaagactggcacttgataagcagaaattcggt

SEQ ID NO: 398652 - DNA, 75 bp, synthetic construct
  source 1..75: mol_type = other DNA
gagattgaccgaggcaggctggcagagacaatccgcagcaatcaggctggcgaggcgctaacagcacgaggccag

SEQ ID NO: 398653 - DNA, 75 bp, synthetic construct
  source 1..75: mol_type = other DNA
cagcaggagcagcaaagaattaacgaaaccattcgcaataatgacatgacgaatgcgagggctattagggggcag

SEQ ID NO: 398654 - DNA, 75 bp, synthetic construct
  source 1..75: mol_type = other DNA
tgcggtttgttcagtgaaattcgcggattaggtctgctgattggctgtgtgctgaatgcggattacgccgggcaa

SEQ ID NO: 398655 - DNA, 75 bp, synthetic construct
  source 1..75: mol_type = other DNA
ccagggggaaggcggtgtggtgccagccagcaacgcgtttttacaaggtctgcgtgaattgtgtgaccgccacaa

SEQ ID NO: 398656 - DNA, 75 bp, synthetic construct
  source 1..75: mol_type = other DNA
caaaccggcgtcgggcgcaccggggaactgtatgcctatatgcactacggcgtgacgcctgatctgttaactacc

SEQ ID NO: 398657 - DNA, 75 bp, synthetic construct
  source 1..75: mol_type = other DNA
tggttttcagccacagcaaaccgagcaaacgctgcgccagattttgcaggatgtcaaagccgccaacgctgaacc

SEQ ID NO: 398658 - DNA, 75 bp, synthetic construct
  source 1..75: mol_type = other DNA
aacaataagctaagaaaatggtggagtggatttaagaatgatgtttcaaccactcgagttgaaaaaatagaaggc

SEQ ID NO: 398659 - DNA, 75 bp, synthetic construct
  source 1..75: mol_type = other DNA
ttggtccatactatagtaatcagtacattgagcaagttctttaatgtttctggtcttggtgctataagtgtaatt

SEQ ID NO: 398660 - DNA, 75 bp, synthetic construct
  source 1..75: mol_type = other DNA
cggcagcgccgaaaacccttgcgcagtggcaatccatgctgcctaacacctggatcaatattgataaactgatcc

SEQ ID NO: 398661 - DNA, 75 bp, synthetic construct
  source 1..75: mol_type = other DNA
atgaggaaaaagctgcccaggaacgaattcccggggcagatactccggatgagttgctgaagaaggccaaagagt

SEQ ID NO: 398662 - DNA, 75 bp, synthetic construct
  source 1..75: mol_type = other DNA
gacggtaatatggtgatggatgcaagcggagcgatgtcccggttaccggtcggtatcaatgcaacgcgtcagatt

SEQ ID NO: 398663 - DNA, 75 bp, synthetic construct
  source 1..75: mol_type = other DNA
ccaacagtaccacgtcatttggtcagatgacgcaccagaccggtagtggtgcaaccgccacgcagacccgtgacg

SEQ ID NO: 398664 - DNA, 75 bp, synthetic construct
  source 1..75: mol_type = other DNA
cgcgctcttaatgtccgactcgctgaacggttcacgatagccgccagactaagtgacagccacacggttgtcagc

SEQ ID NO: 398665 - DNA, 75 bp, synthetic construct
  source 1..75: mol_type = other DNA
aaacaccagttcaccggagattgcagaacgtcgtcgggcgatggcctggtcttttgtgcaggaacaggtacagcc

SEQ ID NO: 398666 - DNA, 75 bp, synthetic construct
  source 1..75: mol_type = other DNA
ttaggtgtcagaggtggtggtcgggcaaatattgactggagtgatgaggatgtgcatcaggccagcagtggttca

SEQ ID NO: 398667 - DNA, 75 bp, synthetic construct
  source 1..75: mol_type = other DNA
atgcacgatgaaggcccatcgctggcaagcctgcttaagcgcgggtgccaggttacacacttcaagaactcacgc

SEQ ID NO: 398668 - DNA, 75 bp, synthetic construct
  source 1..75: mol_type = other DNA
gcagaagcaagccttttgtatatacgaaaaaaataaataggggcgtaataactacgctgattaaattaattaaac

SEQ ID NO: 398669 - DNA, 75 bp, synthetic construct
  source 1..75: mol_type = other DNA
actgctgggataacagtcctgtggaacgcttcttccgcagtctgaaaacagaatgggtgccgacggatggttacg

SEQ ID NO: 398670 - DNA, 75 bp, synthetic construct
  source 1..75: mol_type = other DNA
gtatcaccagtaatgcagcccgtaacggtgacaccgccagcctggtgaatctggccaccacgtcatcgatggaga

SEQ ID NO: 398671 - DNA, 75 bp, synthetic construct
  source 1..75: mol_type = other DNA
tattacctgccagcaggccgctgtcgaactgaagcagcgtctggctgtggattcatcacagggcggaaaaagctg

SEQ ID NO: 398672 - DNA, 75 bp, synthetic construct
  source 1..75: mol_type = other DNA
tctctggaagagctgatggcttccacagacccctacacgctgattttttcaaagccaagcccgctcaggcaggta

SEQ ID NO: 398673 - DNA, 75 bp, synthetic construct
  source 1..75: mol_type = other DNA
ccaactgggtgcacttacaaggtaagcgtcttgaataaattggctggggtacgaggattcgaacctcggaatgcc

SEQ ID NO: 398674 - DNA, 75 bp, synthetic construct
  source 1..75: mol_type = other DNA
gggcgttatccgtggactgaggaagaaccgttattgttaagcaatgttagcgtcgatgtattgggcggtaacgta

SEQ ID NO: 398675 - DNA, 75 bp, synthetic construct
  source 1..75: mol_type = other DNA
atcgggccggttcgtgtaaatggtcgctgggatggtattcgcctgcgcggcaatgcctggtggcccaaacaatca

SEQ ID NO: 398676 - DNA, 75 bp, synthetic construct
  source 1..75: mol_type = other DNA
cactggacgccggacaaacgctttttactggtggcagtgtgttaccgccatcaacgttaaaatttagtgtcgatg

SEQ ID NO: 398677 - DNA, 75 bp, synthetic construct
  source 1..75: mol_type = other DNA
gatgcggtggccaaagacaatatgaccgctggaactgccatcaactggttgcgttatatggaaatcagtcgctca

SEQ ID NO: 398678 - DNA, 75 bp, synthetic construct
  source 1..75: mol_type = other DNA
gattccgcgcgggagggcacggcgtgttgaaaggcggtagtgcctggatgccagataatcaggttaacggtgtcg

SEQ ID NO: 398679 - DNA, 75 bp, synthetic construct
  source 1..75: mol_type = other DNA
gcttaaagggcaacaacttacagtcagcgaactggatgtcgccgcgtttgaaaatcagccgccggtaaaactggt

SEQ ID NO: 398680 - DNA, 75 bp, synthetic construct
  source 1..75: mol_type = other DNA
ccacgtttgtgaacacgttagcgtctggcctggcttcacatgccagcgtgtcgcgtctgctgtatgtgatggggc

SEQ ID NO: 398681 - DNA, 75 bp, synthetic construct
  source 1..75: mol_type = other DNA
ttgctgcgcaacccggtaaaacccgcctgcgaaaatcgctgaaattgtggcaggtggtgatgatggggctggctt

SEQ ID NO: 398682 - DNA, 75 bp, synthetic construct
  source 1..75: mol_type = other DNA
acttacaaggtaagcgtcttgaataaattggctggggtacgaggattcgaacctcggaatgccggaatcagaatc

SEQ ID NO: 398683 - DNA, 75 bp, synthetic construct
  source 1..75: mol_type = other DNA
agtggacggttgggtgtcaaagtcgataactggcaggccgggcttgagaacgcattagtcagtggtcggctgagt

SEQ ID NO: 398684 - DNA, 75 bp, synthetic construct
  source 1..75: mol_type = other DNA
gagctggactggcaggaaaatagcgggcaattgattgtgctggcacgggataacggcgatccgttgctcgatttg

SEQ ID NO: 398685 - DNA, 75 bp, synthetic construct
  source 1..75: mol_type = other DNA
ctcgggctgtgggttcccactctggcgggcatctggctaccgctcgggacacgtattgcattagatgaaagccca

SEQ ID NO: 398686 - DNA, 75 bp, synthetic construct
  source 1..75: mol_type = other DNA
aaatgtcggctttacttggaatcggccgcaccacgctgtggcggaaaatgaagcaacatggcattgatgtgagtc

SEQ ID NO: 398687 - DNA, 75 bp, synthetic construct
  source 1..75: mol_type = other DNA
aacaagcaataaaacaggcacatccgctcaaacacgtagaagccacctttgaaagtcagcatcagtttattgatg

SEQ ID NO: 398688 - DNA, 75 bp, synthetic construct
  source 1..75: mol_type = other DNA
gatatcagcgccacgcgtctttccaccagtctgtcatttgcggaagtcgaaaaagaagcgattattaacgccgcc

SEQ ID NO: 398689 - DNA, 75 bp, synthetic construct
  source 1..75: mol_type = other DNA
gctggtttgcagataaaaactactacttcacgcagatctacggcgagcataaaaatacagataaccctgaccaac

SEQ ID NO: 398690 - DNA, 75 bp, synthetic construct
  source 1..75: mol_type = other DNA
gcgagtattcgtacgcctgataataagatcatattagagaacctgaactttcatgtttcgccaggcaaatggcta

SEQ ID NO: 398691 - DNA, 75 bp, synthetic construct
  source 1..75: mol_type = other DNA
tgagtcggctggaactggcgcacggcggcacgctgtttcttgaaaagattgaatatctggcggtggagttacagt

SEQ ID NO: 398692 - DNA, 75 bp, synthetic construct
  source 1..75: mol_type = other DNA
atgagtcttttgaatgaagttcagaaattcattgaagcccatccggggtgtacttctggagacattgcggatgct

SEQ ID NO: 398693 - DNA, 75 bp, synthetic construct
  source 1..75: mol_type = other DNA
tacctggaagagaagccagaaatggcggaacatctggcggcggttaaggcctatcgcgaagagtttggcgtttaa

SEQ ID NO: 398694 - DNA, 75 bp, synthetic construct
  source 1..75: mol_type = other DNA
tgagcaaactaccgcagctgatttgccgttgacgttggcaatcgcacgcgaggtcggaaatttactgctgacgga

SEQ ID NO: 398695 - DNA, 75 bp, synthetic construct
  source 1..75: mol_type = other DNA
ttcagaaattcattgaagcccatccgggctgtacttccggagacattgcggatgcttttgcaggttactcacggc

SEQ ID NO: 398696 - DNA, 75 bp, synthetic construct
  source 1..75: mol_type = other DNA
gccgttgttggcgattctcctgcacaaactcggttttcctgtggtggttcacggggttagcgaagatccaacccg

SEQ ID NO: 398697 - DNA, 75 bp, synthetic construct
  source 1..75: mol_type = other DNA
cgggtgctgtatgaaaaacaggaccctgctggtagcgagttactgccacaagcaaaagatccggaaaccacggcg

SEQ ID NO: 398698 - DNA, 75 bp, synthetic construct
  source 1..75: mol_type = other DNA
ttggcgtggttaaaattcaggtctggttaaatgactggaataatgattttttcaatgcgctaagccagaaagaaa

SEQ ID NO: 398699 - DNA, 75 bp, synthetic construct
  source 1..75: mol_type = other DNA
atttctatgtcggcactaacgatccccgggtgattttgtgcctgacccgccaggcggaagaactggagtccaggg

SEQ ID NO: 398700 - DNA, 75 bp, synthetic construct
  source 1..75: mol_type = other DNA
gaaaccagacctgtgcgcaatttctatgtcggcactaacgacccgcgggagattttgtgcctgacccgccaggcg

SEQ ID NO: 398701 - DNA, 75 bp, synthetic construct
  source 1..75: mol_type = other DNA
gataactgtaagaacgtgaaacgtgcaggacttataatagcagatacctatcctcccatgaatgaaatatacaag

SEQ ID NO: 398702 - DNA, 75 bp, synthetic construct
  source 1..75: mol_type = other DNA
tgaacagttcaatctgccgattgagaaaacggttaagactctgctggttaaagcggttgaaggcagtagcttccc

SEQ ID NO: 398703 - DNA, 75 bp, synthetic construct
  source 1..75: mol_type = other DNA
tgatgatgaaatccgtgagttgcttaatttagctattgataaaaacatgatttataaagatgaatatccacaaat

SEQ ID NO: 398704 - DNA, 75 bp, synthetic construct
  source 1..75: mol_type = other DNA
agtgaaggcaaaacacacaggcatttttctcgcaaggctgtattgccacctgagccggtgctgaaacatatgagt

SEQ ID NO: 398705 - DNA, 75 bp, synthetic construct
  source 1..75: mol_type = other DNA
atgagtctattgaatgacgttcagaaattcattgaagcccatccggggtgtacttccggggacattgcggatgct

SEQ ID NO: 398706 - DNA, 75 bp, synthetic construct
  source 1..75: mol_type = other DNA
cataaagtgggtaaacgtatccgcccgcttaatgtggagaagcaacgtagcgaagcgacttttcgaactaacctt

SEQ ID NO: 398707 - DNA, 75 bp, synthetic construct
  source 1..75: mol_type = other DNA
gctgcggttatcgatcgcttgtatgagttccatcaactcactgaacagcgccctacgaataagcctaaaaattgc

SEQ ID NO: 398708 - DNA, 75 bp, synthetic construct
  source 1..75: mol_type = other DNA
atgagtctgttgaatgacgttcagaaattcattgaagcccatccggggtgtacttccggagacattgcggatgct

SEQ ID NO: 398709 - DNA, 75 bp, synthetic construct
  source 1..75: mol_type = other DNA
atgagtctgtttaatgacgttcagaaattcattgaagcccatccggggtgtacttccggtgacattgcggatgct

SEQ ID NO: 398710 - DNA, 75 bp, synthetic construct
  source 1..75: mol_type = other DNA
atgagtctgttaaatgacgttcagaaattcattgaagcccatccggggtgtacttccggggacattgcggatgct

SEQ ID NO: 398711 - DNA, 75 bp, synthetic construct
  source 1..75: mol_type = other DNA
ccaggcggcgcgcggtggcttcccggtgctgctgtgcggcgaagagggggttgggaaagagctgctgagccaggc

SEQ ID NO: 398712 - DNA, 75 bp, synthetic construct
  source 1..75: mol_type = other DNA
cacttaactattagtgatgattttactgagcaacaacttgatttagctaagaaattttgttcttctcataaattt

SEQ ID NO: 398713 - DNA, 75 bp, synthetic construct
  source 1..75: mol_type = other DNA
atggcactttcagataccaaactacgcacgcttactcccagaaaccgtccctggcaacttgccgatcatgacggg

SEQ ID NO: 398714 - DNA, 75 bp, synthetic construct
  source 1..75: mol_type = other DNA
aacagcggtaacgccgttcaaacggtacacggttggccaacgcagcgtcagccctactggagcagttcgcccgcg

SEQ ID NO: 398715 - DNA, 75 bp, synthetic construct
  source 1..75: mol_type = other DNA
atgctggcgttgtcgcaatcagcagtgagcgcggcgttgaccgatctggaagggcagctaggcgtgcaactgttt

SEQ ID NO: 398716 - DNA, 75 bp, synthetic construct
  source 1..75: mol_type = other DNA
ctcgttatcgccttgattacccgcagttgccgattgaacttagtgttggtaacagtcaggacgtggtacaggcag

SEQ ID NO: 398717 - DNA, 75 bp, synthetic construct
  source 1..75: mol_type = other DNA
atgctggcgttgtcgcaatcagcagtgagcgcagccttgaccgacctggaagggcagcttggcgtgcaactgttt

SEQ ID NO: 398718 - DNA, 75 bp, synthetic construct
  source 1..75: mol_type = other DNA
atgacggtacgcacctttaatgccttgaataatgcacccgtgccgtataccgcgttcaccatcactaaagatatg

SEQ ID NO: 398719 - DNA, 75 bp, synthetic construct
  source 1..75: mol_type = other DNA
tcatgcagtggcagcttctatagagatgacctccacggcactggatgcggagaaaacggccagcaacgatggtcg

SEQ ID NO: 398720 - DNA, 75 bp, synthetic construct
  source 1..75: mol_type = other DNA
aaaagtgccacgatggatgttattttcactgtgataaccaagtccgaactcaccgaaagcaaaatactggggtca

SEQ ID NO: 398721 - DNA, 75 bp, synthetic construct
  source 1..75: mol_type = other DNA
attattgaagcgaacaatatctttaaacgcccacggctggcggatgaaaccgacaacgaactgggagcagtgcgg

SEQ ID NO: 398722 - DNA, 75 bp, synthetic construct
  source 1..75: mol_type = other DNA
ggaaccgcgctaaagctgcgtacgatgcctctgcagatgatcttaccatcatacctgtggaacctactggggtaa

SEQ ID NO: 398723 - DNA, 75 bp, synthetic construct
  source 1..75: mol_type = other DNA
cgcccgaaattgtggagtgaactgacatcgacttctggcgtcggcaagatcaataacaataatgaagactggccg

SEQ ID NO: 398724 - DNA, 75 bp, synthetic construct
  source 1..75: mol_type = other DNA
caggacttataatagcagatacctatcctcccatgaatgaaatatacaagcaggaagccagagatcttagaaaga

SEQ ID NO: 398725 - DNA, 75 bp, synthetic construct
  source 1..75: mol_type = other DNA
cgactggcttcaggggggagccggaacgtcaaccaatatgaactgcaatgaagtgatttgtaatcttgctgcaga

SEQ ID NO: 398726 - DNA, 75 bp, synthetic construct
  source 1..75: mol_type = other DNA
gctggacaccacagtgatgctggcggcatctgctggtcagcttgagcttaacgttatggagccggtcatcacctt

SEQ ID NO: 398727 - DNA, 75 bp, synthetic construct
  source 1..75: mol_type = other DNA
cctgtgcggtgattgtcgaacccatccagggggaaggcggtgtggtgccagccagcaacgcgtttttacatggtc

SEQ ID NO: 398728 - DNA, 75 bp, synthetic construct
  source 1..75: mol_type = other DNA
ggacgtactcacctgcaggatgcagtgccaatgactctcggccaggagttccatggctggggttttacaattaat

SEQ ID NO: 398729 - DNA, 75 bp, synthetic construct
  source 1..75: mol_type = other DNA
atctgctggtcagcttgagcttaacgttatggagccggtcatcacctttgcgctgttcacctcactcaaggtgat

SEQ ID NO: 398730 - DNA, 75 bp, synthetic construct
  source 1..75: mol_type = other DNA
gacgagttcagcacagtgctcaagatgggacgtactcacctgcaggatgcagtgccaatgactctcggccaggag

SEQ ID NO: 398731 - DNA, 75 bp, synthetic construct
  source 1..75: mol_type = other DNA
gcgaaacgcaagcgaatgtcgatggtctgtacagtggtcatgcaccaacaccactgacggcacgcggtattgagc

SEQ ID NO: 398732 - DNA, 75 bp, synthetic construct
  source 1..75: mol_type = other DNA
atggatgttaccgcaaaatacgaattgattgggctgatggcctatcctatccgccacagtttatcgcctgaaatg

SEQ ID NO: 398733 - DNA, 75 bp, synthetic construct
  source 1..75: mol_type = other DNA
aaatcatgaaaaagccctgggcatcagtatcagtcacctggacaacagagaaaaaacaaagttcgctgatggcct

SEQ ID NO: 398734 - DNA, 75 bp, synthetic construct
  source 1..75: mol_type = other DNA
tacagtttgttcagtgaagttcgcggcttaggtcttttgattggctgtgtactgaatgccgattacgccgggcaa

SEQ ID NO: 398735 - DNA, 75 bp, synthetic construct
  source 1..75: mol_type = other DNA
aggcaaagtgctggatctcatcaacacgccagagatgcttaacggggttaaacagcgtcacgactggtttgttga

SEQ ID NO: 398736 - DNA, 75 bp, synthetic construct
  source 1..75: mol_type = other DNA
cgccacgtttgccgatcgcgtcttcttttgtaactccggtgcggaagccaatgaagcggcgctaaaactggcgcg

SEQ ID NO: 398737 - DNA, 75 bp, synthetic construct
  source 1..75: mol_type = other DNA
tattaaaagcaattgcatggaatgaatcaaaatgcaaaagcggaataaaaagcaaaacaaacaaaaacggaacgt

SEQ ID NO: 398738 - DNA, 75 bp, synthetic construct
  source 1..75: mol_type = other DNA
ccggtgttctttacccctgtcgataaacagggcggtttaaaagaagcggaactgaaaaccttaatcctcgagcaa

SEQ ID NO: 398739 - DNA, 75 bp, synthetic construct
  source 1..75: mol_type = other DNA
ttacgctttctggcggcgtgggcgaatgttatcgccaccagcccgccgacccgttctgttttgccgatattggcc

SEQ ID NO: 398740 - DNA, 75 bp, synthetic construct
  source 1..75: mol_type = other DNA
acaatgacaaaaaggctgaacagagagcacttcctggagcggatacaagagacgaactcctagctaaggcccagg

SEQ ID NO: 398741 - DNA, 75 bp, synthetic construct
  source 1..75: mol_type = other DNA
tgagatggcctcacgaacagaaagcatgagcggccagatgaacgaaaacctgactcaacaatttgctaatttcgt

SEQ ID NO: 398742 - DNA, 75 bp, synthetic construct
  source 1..75: mol_type = other DNA
cccgtgagtctgatgtccaggccgaaagtgcgctgcatggctataacagcagcgtgacaagtgcctggaatagtc

SEQ ID NO: 398743 - DNA, 75 bp, synthetic construct
  source 1..75: mol_type = other DNA
cgtaatgaccatgagttgccaatctgcgatgctacaaagcgaattctggaagatcgaagagatatcgtcaacgat

SEQ ID NO: 398744 - DNA, 75 bp, synthetic construct
  source 1..75: mol_type = other DNA
caatgaaattcttcgtaagtttgatgaaatcgcaagtagagcaaggaccgcatctgagcaaacattcaggtgggc

SEQ ID NO: 398745 - DNA, 75 bp, synthetic construct
  source 1..75: mol_type = other DNA
tgttggacaaagcagaaaatcgtctgaaagagtggcaagctttacgagtgaaggatctcactggtaatgacatcc

SEQ ID NO: 398746 - DNA, 75 bp, synthetic construct
  source 1..75: mol_type = other DNA
ttcagctggatcttgatcccaaaactgacgcgtacgtgctggcgcttcccgcctcgctgcctgtgcgttacgccg

SEQ ID NO: 398747 - DNA, 75 bp, synthetic construct
  source 1..75: mol_type = other DNA
ttacgctctccggcggggttggcgaatgttatcgccaccagcccgctgacccgttctgttttgccgatattggcc

SEQ ID NO: 398748 - DNA, 75 bp, synthetic construct
  source 1..75: mol_type = other DNA
acgaagtaaggttggacactattccgacagtaaaagcctacgtgagtatatctgtcaggaagcaggcataacgaa

SEQ ID NO: 398749 - DNA, 75 bp, synthetic construct
  source 1..75: mol_type = other DNA
cggtaaaggaatggagagcgtaccttcgggcggtggcagccaggatattattgcagaccatcaggggcatcagac

SEQ ID NO: 398750 - DNA, 75 bp, synthetic construct
  source 1..75: mol_type = other DNA
gataattgtaaaaacgtaagacgtgcgggacttataatcgctgacacttatcctccgatgagtgaaatatacaag

SEQ ID NO: 398751 - DNA, 75 bp, synthetic construct
  source 1..75: mol_type = other DNA
cagaacagcatcctcggcgaggaaaatattgtaagagggcagtattctgaactgcaaaatcaccataaaacagag

SEQ ID NO: 398752 - DNA, 75 bp, synthetic construct
  source 1..75: mol_type = other DNA
cgcggtggccgtgatgtgggtacagcggcacaacgtgatggatttgctgggctgggtggccgtgtttgtgcttat

SEQ ID NO: 398753 - DNA, 75 bp, synthetic construct
  source 1..75: mol_type = other DNA
agaagataatacctgagccatcagaagagactgtaaaaaaaatgattgatgagaaaaaggaacgactgaaggggc

SEQ ID NO: 398754 - DNA, 75 bp, synthetic construct
  source 1..75: mol_type = other DNA
cagaaagtgccctgcatggtttcagcagcagtattgccagtgcctggaacacgctcagtcagtttggttctaacc

SEQ ID NO: 398755 - DNA, 75 bp, synthetic construct
  source 1..75: mol_type = other DNA
aggattaggcgttagaggtggtggtcgggctggcattgactggagtgatgatgatgcgcatcaggccagcagtgg

SEQ ID NO: 398756 - DNA, 75 bp, synthetic construct
  source 1..75: mol_type = other DNA
ttttagctgggttgaggatatgcataacacgccgcaagacccggagcatcatggtgaaggcgacgttggtgtgca

SEQ ID NO: 398757 - DNA, 75 bp, synthetic construct
  source 1..75: mol_type = other DNA
aaccgcgactggtcgtattgtacagcaggcaaaagaagaagctcgcgtgcgacttcggcaaaagaagtcgtttgt

SEQ ID NO: 398758 - DNA, 75 bp, synthetic construct
  source 1..75: mol_type = other DNA
agccgaagtttatgggggttggcggaggagtgggaggaaaagttggcggaagagctagcattgactggagtgatg

SEQ ID NO: 398759 - DNA, 75 bp, synthetic construct
  source 1..75: mol_type = other DNA
cgccctgcatgggttcagcagcagtattgccagtgcctggaacacgctcagtcagtttggttctaaccgggggag

SEQ ID NO: 398760 - DNA, 75 bp, synthetic construct
  source 1..75: mol_type = other DNA
gaaagacaagctgaatcttgatacaaagagcggaggcaagacctggcattattatgtgcagcagttatttggcgg

SEQ ID NO: 398761 - DNA, 75 bp, synthetic construct
  source 1..75: mol_type = other DNA
ctacatgggttaccactgtggttactggaacgtccgggaccagagcgtttgctactcagtgctgcaatgcgcatc

SEQ ID NO: 398762 - DNA, 75 bp, synthetic construct
  source 1..75: mol_type = other DNA
attctggaagaccgaagagatatcgtcaacgataacgaaaagcgagcagataaacgcaaatgggtttttccagct

SEQ ID NO: 398763 - DNA, 75 bp, synthetic construct
  source 1..75: mol_type = other DNA
gagccatccagagcaccagaacgcgattttctggtggtggtaatggttttcttcatattggcccttaaaacgcgc

SEQ ID NO: 398764 - DNA, 75 bp, synthetic construct
  source 1..75: mol_type = other DNA
cgacaccccgcatcagtgcgtacgtgctcaatgtggtttccggttctcttccgcttcctcgcccactcgctcact

SEQ ID NO: 398765 - DNA, 75 bp, synthetic construct
  source 1..75: mol_type = other DNA
tcgcagtgatgttctgccggttggtgtgccgcttccatggccaacggatatcccacctactggatgggcaattat

SEQ ID NO: 398766 - DNA, 75 bp, synthetic construct
  source 1..75: mol_type = other DNA
ctcacacacagccagtgcatccagtaccgatttggggacgaaatcaacatcctcatttgattacggtactaaaac

SEQ ID NO: 398767 - DNA, 75 bp, synthetic construct
  source 1..75: mol_type = other DNA
aatgataataaatataaagaaatctttgatgaaatactggcctataatttcaaaacagtaaaagtattacgtaat

SEQ ID NO: 398768 - DNA, 75 bp, synthetic construct
  source 1..75: mol_type = other DNA
cggaaaaactgccgcaggttgcaagcccgctgactttcgcaactgaagaagaaattcgcgccgtggttaaagcgg

SEQ ID NO: 398769 - DNA, 75 bp, synthetic construct
  source 1..75: mol_type = other DNA
gtagtggctgcggcgattgagcagaactacgacgagcgcggcatcgtatggcctgacgcgatcgcgccgttccag

SEQ ID NO: 398770 - DNA, 75 bp, synthetic construct
  source 1..75: mol_type = other DNA
ccagccgatttgtggcaagagagtggtcgttgggaacaatacggtccggaactgctgcgttttgttgaccgtggc

SEQ ID NO: 398771 - DNA, 75 bp, synthetic construct
  source 1..75: mol_type = other DNA
ccgcatcagtgcgtacgtgctcaatgtggtttccggttctcttccgcttcctcgcccactcgctcactaacgttc

SEQ ID NO: 398772 - DNA, 75 bp, synthetic construct
  source 1..75: mol_type = other DNA
cgtttgccatctggtcagggcttcaccccgacaccccgcatcagtgcgtacgtgctcaatgtggtttccggttct

SEQ ID NO: 398773 - DNA, 75 bp, synthetic construct
  source 1..75: mol_type = other DNA
agctggcctctgggttatatacctggctgccgaccggcgtgcgcgttctgaaaaaagtcgaaaacatcgtgcgtg

SEQ ID NO: 398774 - DNA, 75 bp, synthetic construct
  source 1..75: mol_type = other DNA
gcgatgattgtgcatgcgcctgtccagcaaaagctgaaaactgcagaagggcagcaggggaatgtcctgacccgt

SEQ ID NO: 398775 - DNA, 75 bp, synthetic construct
  source 1..75: mol_type = other DNA
ggtttcggtgtcaaaatcagtgcaacgaaaaagacctatatcgttcagcgacgagtgtcttctcctggcaatcgc

SEQ ID NO: 398776 - DNA, 75 bp, synthetic construct
  source 1..75: mol_type = other DNA
atgtcggtgcatctttttgagtttttgttgtttcttattgtgtctcgttttgagtctatgtcaagcagcgttgct

SEQ ID NO: 398777 - DNA, 75 bp, synthetic construct
  source 1..75: mol_type = other DNA
gatgaagtgtatgaatctgaatggctggcaaggatgccggtagaaggatttacttcggagaggattatttcagat

SEQ ID NO: 398778 - DNA, 75 bp, synthetic construct
  source 1..75: mol_type = other DNA
ggttctgttaggtgcgaggaaagaagaaactgcttcgctatgctggcgtgaggttctgactgaagaagaagcaag

SEQ ID NO: 398779 - DNA, 75 bp, synthetic construct
  source 1..75: mol_type = other DNA
ttattatcaacaagttaagcattggtgtgaagcccacccttaaccatgcgggaaaagtcgttttcgaagcaaacc

SEQ ID NO: 398780 - DNA, 75 bp, synthetic construct
  source 1..75: mol_type = other DNA
gtggccccaagtgatacccctttaaactcacataaacccataaatttgtataccagaagtattctagctactatc

SEQ ID NO: 398781 - DNA, 75 bp, synthetic construct
  source 1..75: mol_type = other DNA
tctttgtgtttgccgcaatccgccgtgctgacactcacccccgcatctgtatgcttcgcactgtctcctgcgatg

SEQ ID NO: 398782 - DNA, 75 bp, synthetic construct
  source 1..75: mol_type = other DNA
gcagcctcatcgagctttaccaaagacactcttcatcaggcgtgccgcttactggaattgaagaatggttggtcc

SEQ ID NO: 398783 - DNA, 75 bp, synthetic construct
  source 1..75: mol_type = other DNA
gtttgattcgtgagcaaaataatagtaaaaatgaaatgcaattcagaagtgaaagcgacgacaaattcaatccga

SEQ ID NO: 398784 - DNA, 75 bp, synthetic construct
  source 1..75: mol_type = other DNA
agcccgtgtaacttattggcgacacagcacgcgtcgagcgtgttttttcatgtcgttgctcaggcacacctattt

SEQ ID NO: 398785 - DNA, 75 bp, synthetic construct
  source 1..75: mol_type = other DNA
tggtggcaataaccgctactcaatggaggttgccactatggctacgaccctcaccccgtcacacccgcagtttgt

SEQ ID NO: 398786 - DNA, 75 bp, synthetic construct
  source 1..75: mol_type = other DNA
atgatgatacctgaatacattaaatcccttttttctggcttgcttactgccgtcatttccaggtatagtttttcc

SEQ ID NO: 398787 - DNA, 75 bp, synthetic construct
  source 1..75: mol_type = other DNA
ctgcggcgaaatgccgcactgcgcgatgcagaaaaaacactgaccgaagcattacagaatttacgtgatgcgcat

SEQ ID NO: 398788 - DNA, 75 bp, synthetic construct
  source 1..75: mol_type = other DNA
aaccggctttcgcccgcccttcctcccacgagcggcggcggcagtcaacccggccttggggcactgttgcaaata

SEQ ID NO: 398789 - DNA, 75 bp, synthetic construct
  source 1..75: mol_type = other DNA
atgcatgaactggagacactgctgagtcgtcttaaaatggaacatctgggctaccacgttgaaagcctgctggag

SEQ ID NO: 398790 - DNA, 75 bp, synthetic construct
  source 1..75: mol_type = other DNA
cgggctgataaaaacccgaaccacggggcgtcatgaccttgccgtgggtgaaatctcaaagggacttaaaggcct

SEQ ID NO: 398791 - DNA, 75 bp, synthetic construct
  source 1..75: mol_type = other DNA
gtgtaatgagatgccggaacttgctccggtgattactgataccgggcgtaaaacctgggtgaagtcttcactgga

SEQ ID NO: 398792 - DNA, 75 bp, synthetic construct
  source 1..75: mol_type = other DNA
cttctgttcaccatggagatggcgaacatccagattggtgaacgtatggtgtctgcggctggagggatgccagta

SEQ ID NO: 398793 - DNA, 75 bp, synthetic construct
  source 1..75: mol_type = other DNA
ttaaagcaccttctctgttgcaacttagccctgactggacgagcaattcctgccgtggcgcatgtaagattgtgg

SEQ ID NO: 398794 - DNA, 75 bp, synthetic construct
  source 1..75: mol_type = other DNA
aagtgaccgcgccacctactacggcgtcagtggttccccggaaaaaggctataccgattacccggtctggcaggc

SEQ ID NO: 398795 - DNA, 75 bp, synthetic construct
  source 1..75: mol_type = other DNA
ctgtcagttcaccaactcgcccatctaactataaaagagcgattgaagaattaatgcagaatgaaatatgcttga

SEQ ID NO: 398796 - DNA, 75 bp, synthetic construct
  source 1..75: mol_type = other DNA
agaggacgtcgtcaccgcgctgaaacgcggcgcagatggctatctgttaaaagatatggagccggaagatctgtt

SEQ ID NO: 398797 - DNA, 75 bp, synthetic construct
  source 1..75: mol_type = other DNA
gaagactggtcattctatgtttctgggcactataccgggcagaaacgcgccgacagcgcgacggctaaaacaccg

SEQ ID NO: 398798 - DNA, 75 bp, synthetic construct
  source 1..75: mol_type = other DNA
cgttttccgtaacgatgtgaaagatcgtatcagcatcagccgtacgtctgacgtcaacgctgcaccgggctacca

SEQ ID NO: 398799 - DNA, 75 bp, synthetic construct
  source 1..75: mol_type = other DNA
accaatgcggccgtccaggccgcgcagatacagtaacaaacgaactgacagcagtaagattaaacaaccagataa

SEQ ID NO: 398800 - DNA, 75 bp, synthetic construct
  source 1..75: mol_type = other DNA
attatcaaactgttacggtcgattattgataacgtagcaccaggtacagtgatcattaccgagaccaatgttccg

SEQ ID NO: 398801 - DNA, 75 bp, synthetic construct
  source 1..75: mol_type = other DNA
accacctttagcgacgatcaaattgacctcaattaccgtagccctgaagtgttgctggcgatggtggatgtattg

SEQ ID NO: 398802 - DNA, 75 bp, synthetic construct
  source 1..75: mol_type = other DNA
caccattgatgcgattaattcatttgtaatgcgaattcaaagaagcaatgcggatggtaattgtctgacaggatt

SEQ ID NO: 398803 - DNA, 75 bp, synthetic construct
  source 1..75: mol_type = other DNA
cacaggttctttccaccccaatgcagccgcctcagccgcgcagatacagcaataaacgaaccaacagtagtaaga

SEQ ID NO: 398804 - DNA, 75 bp, synthetic construct
  source 1..75: mol_type = other DNA
tgatgagatatgcgcaacaacgaaacaccatctgattaaacacccggaaacggcgctggtggtggttgattatct

SEQ ID NO: 398805 - DNA, 75 bp, synthetic construct
  source 1..75: mol_type = other DNA
taattgattatcatcaggtcgccagtgaagcgggggagtggcaggatattcagcagctcggtgaatgcagtcatt

SEQ ID NO: 398806 - DNA, 75 bp, synthetic construct
  source 1..75: mol_type = other DNA
tgaagtgtacaacccggatacgcaggccaggggcatcgcagaaatcaatatcacgaaacaacgtaacggttctct

SEQ ID NO: 398807 - DNA, 75 bp, synthetic construct
  source 1..75: mol_type = other DNA
acgttgatgaccggtattgatgaactggacgcaaaaacaggcggcatggagcctggcgacctgatattcatcgcg

SEQ ID NO: 398808 - DNA, 75 bp, synthetic construct
  source 1..75: mol_type = other DNA
aggcaaacctgaccattgatgagatatgtgcaaccacgaagcaccaccggatcaaacacccggaaacggcgctgg

SEQ ID NO: 398809 - DNA, 75 bp, synthetic construct
  source 1..75: mol_type = other DNA
tgaacgatgaagctacattaaggcatgcggtatatcatgagttgtcgcgtttaattatacttcgtcgcagccata

SEQ ID NO: 398810 - DNA, 75 bp, synthetic construct
  source 1..75: mol_type = other DNA
ttaacaccgtttcaaatggatgataattccacgcgccatttatggaccacctttagcgacgatcaaattgacctc

SEQ ID NO: 398811 - DNA, 75 bp, synthetic construct
  source 1..75: mol_type = other DNA
tggacgcaaaaacaggcggcatggagcccggcgacctggtatttattgcggctcgtccgtcaatgggcaaaaccg

SEQ ID NO: 398812 - DNA, 75 bp, synthetic construct
  source 1..75: mol_type = other DNA
ctcagatatgcaaggtgtttatattgatggattattaattgaagagcattttatttctcctgaagatcattaccc

SEQ ID NO: 398813 - DNA, 75 bp, synthetic construct
  source 1..75: mol_type = other DNA
aagcgctggagtcgatgattaagcatgaggcgacccgtccgttggtgttctcatcaaactactatcagactcgtc

SEQ ID NO: 398814 - DNA, 75 bp, synthetic construct
  source 1..75: mol_type = other DNA
acgcgctggagtcgatgattaagcatgaagcgacccgcccactagttttctcgccaaactactatcagactcgtc

SEQ ID NO: 398815 - DNA, 75 bp, synthetic construct
  source 1..75: mol_type = other DNA
ggggcaaatcgctggttataacaatgccataaatgtgatttatggttcagccgcgccgaaagtgtctgagatcca

SEQ ID NO: 398816 - DNA, 75 bp, synthetic construct
  source 1..75: mol_type = other DNA
ctggtggaaaaaaagcttcaccatcaggggatgccagatccgatgtcaatggcacacctggcggtgatgctcagt

SEQ ID NO: 398817 - DNA, 75 bp, synthetic construct
  source 1..75: mol_type = other DNA
acttccacagctatcgttactcaacctgatgtggggcaaatcgctggttataccaacgcgatgaatgtgatttac

SEQ ID NO: 398818 - DNA, 75 bp, synthetic construct
  source 1..75: mol_type = other DNA
gtgctgctgggcggcatggttggtgcggggattgtgttggggcgaaatgctctgcgtaattacaacgcgaagtaa

SEQ ID NO: 398819 - DNA, 75 bp, synthetic construct
  source 1..75: mol_type = other DNA
gtgctgctgggcggcatggttggcgcggggattgtgctggggcgtaacgctctgcgtaattacaacgcgaagtaa

SEQ ID NO: 398820 - DNA, 75 bp, synthetic construct
  source 1..75: mol_type = other DNA
tttcttatgttgggcaaacagcagagggcgcacaaatgaagttggcccaatacattcagcaagttgatgaaaaag

SEQ ID NO: 398821 - DNA, 75 bp, synthetic construct
  source 1..75: mol_type = other DNA
gcagtgctgctaggcggtatggtgggcgcggggattgtgttggggcgtaacgctctgcgtaattacaacgcgaaa

SEQ ID NO: 398822 - DNA, 75 bp, synthetic construct
  source 1..75: mol_type = other DNA
ggaggcgttaattggtcgcttcagttctgccttctctgcattagcagaaacgctggataatcagaaagaaccaga

SEQ ID NO: 398823 - DNA, 75 bp, synthetic construct
  source 1..75: mol_type = other DNA
aagcgctagagtcaatgattaagcacgaagcgacccgtccgcttgtattctcatcaaactactatcagacccgtc

SEQ ID NO: 398824 - DNA, 75 bp, synthetic construct
  source 1..75: mol_type = other DNA
gcaccgctcccagactcgaaaggtggcgctcctgcaactgggaaaggtgatggccgcgatgccaccaagcccggc

SEQ ID NO: 398825 - DNA, 75 bp, synthetic construct
  source 1..75: mol_type = other DNA
aaagcaatcagggaattgttcaggtgatgttaggctgggatccacctttgcagtggtttcatatgtgcattgatt

SEQ ID NO: 398826 - DNA, 75 bp, synthetic construct
  source 1..75: mol_type = other DNA
ttttctgctggggggcatatcgcctcaacgggtggggaatcagatttgtgatttcaaacgtgcttctgacagtaa

SEQ ID NO: 398827 - DNA, 75 bp, synthetic construct
  source 1..75: mol_type = other DNA
gggtgaatatcatttgaaccgtgtcgttacagatgtaaggtcccctctgttgactgtttttaagcccgaaaaaag

SEQ ID NO: 398828 - DNA, 75 bp, synthetic construct
  source 1..75: mol_type = other DNA
tcaagtcccttagagaagctaaaggacttagccaggctcaattggccaagctttgcggctgggctgcgccttcac

SEQ ID NO: 398829 - DNA, 75 bp, synthetic construct
  source 1..75: mol_type = other DNA
gatatttatagcccgagcgaatttttctcaaaaatcgaatccgacttgaagaaaaagaaaagcaagggtgatgtt

SEQ ID NO: 398830 - DNA, 75 bp, synthetic construct
  source 1..75: mol_type = other DNA
ctaatgaaatgagttttcatagaaataatagtacggtctatcttggggcaggtttaactgagcaggatattaatt

SEQ ID NO: 398831 - DNA, 75 bp, synthetic construct
  source 1..75: mol_type = other DNA
aacccgtcgcagctcgtcattaccgataccgacaacgataaattgagttatgcgcgcaagcactatccatcagaa

SEQ ID NO: 398832 - DNA, 75 bp, synthetic construct
  source 1..75: mol_type = other DNA
gaacatttggcccgagctggaagatacccaaacgttaacacaaccactttcctggagcttgattcatgaaaatca

SEQ ID NO: 398833 - DNA, 75 bp, synthetic construct
  source 1..75: mol_type = other DNA
gtcagggaagacggaggggtgattgaagcaaggcttgactcttatgcggtgggtgaagacggaaaggcaggtgtt

SEQ ID NO: 398834 - DNA, 75 bp, synthetic construct
  source 1..75: mol_type = other DNA
aatcaatttggcggttataccggaatgacaccggcagactttcgcgaatttgtttttgcgattgccgataaagtc

SEQ ID NO: 398835 - DNA, 75 bp, synthetic construct
  source 1..75: mol_type = other DNA
accagacggttcaggctgtacgcttacagccaggtatcggcagtttacgtctgacgttcagagattttttcacag

SEQ ID NO: 398836 - DNA, 75 bp, synthetic construct
  source 1..75: mol_type = other DNA
cgtcatcaggggatctggtccggtgaggcggagcaatacctgctcactcatgcagaggcaatttcccatgattaa

SEQ ID NO: 398837 - DNA, 75 bp, synthetic construct
  source 1..75: mol_type = other DNA
tgccccggaagatctgctttatgctcgtttcgatagtccggcactcaagaccttcaccgaacagctgcaacaggc

SEQ ID NO: 398838 - DNA, 75 bp, synthetic construct
  source 1..75: mol_type = other DNA
tcaaatcgataagctggaagacgtagtgaaagtgcagcgtaaccagtccgatccgacgatgttcaacaagattgc

SEQ ID NO: 398839 - DNA, 75 bp, synthetic construct
  source 1..75: mol_type = other DNA
gccgattcaggacagcgacaaaagccacatttggctactggtcaatgacgaccagcgtctggagcagatgataag

SEQ ID NO: 398840 - DNA, 75 bp, synthetic construct
  source 1..75: mol_type = other DNA
ctgattatcagttctacccacggcgccggagacattccggacaacctttctcctttctatgaagcgttgctggaa

SEQ ID NO: 398841 - DNA, 75 bp, synthetic construct
  source 1..75: mol_type = other DNA
tcactgtccgtacccgcgcatttctgcgcagaccggtatcagcaaaaccgccattttttctctggtgaggcgatt

SEQ ID NO: 398842 - DNA, 75 bp, synthetic construct
  source 1..75: mol_type = other DNA
cgattatgccctaaagccagttttaagtgcgttgaaagccaaggagatcctgcacggcgtgtttgccgatgactc

SEQ ID NO: 398843 - DNA, 75 bp, synthetic construct
  source 1..75: mol_type = other DNA
atgccgctgattgaatacattaatagatactacagagggaatcaggcatcgttcgccaggctgaccggagttcaa

SEQ ID NO: 398844 - DNA, 75 bp, synthetic construct
  source 1..75: mol_type = other DNA
gttaagcggcagccttgattttcgagtcaatcatcagactcatcatttacaagccggtgattgtcttgctcttac

SEQ ID NO: 398845 - DNA, 75 bp, synthetic construct
  source 1..75: mol_type = other DNA
acaaggatcttgttaatctggatatccccaacaacaataagagtattgaatgtgatcgctgaattaacggcagca

SEQ ID NO: 398846 - DNA, 75 bp, synthetic construct
  source 1..75: mol_type = other DNA
gttgctatggatgcaaaaagtctatggcgataacgccccgcaagcctggcagaaactggcgaagaaaactgtcac

SEQ ID NO: 398847 - DNA, 75 bp, synthetic construct
  source 1..75: mol_type = other DNA
gtgttaaaaaaatgtcttcccctgctgttgctgtgcacagcgcccgttttcgctaaacccgttctgaccgtctac

SEQ ID NO: 398848 - DNA, 75 bp, synthetic construct
  source 1..75: mol_type = other DNA
gaaaggcaatattccggaaggctacattggctaccgccagctggcggcgaaatgtggcctgactgaagccaaatg

SEQ ID NO: 398849 - DNA, 75 bp, synthetic construct
  source 1..75: mol_type = other DNA
acacggcattcgccatgacaccacggtcattctgtacgggcgtgacgtatacgctgcagcgcgtgtggcgcaaat

SEQ ID NO: 398850 - DNA, 75 bp, synthetic construct
  source 1..75: mol_type = other DNA
tcgcgcatgtgcaacgctgcctgagaaatcgttggtcgtacccggatactttggagtctgttaactccaaattca

SEQ ID NO: 398851 - DNA, 75 bp, synthetic construct
  source 1..75: mol_type = other DNA
attgaagagtcttattggcttgacagagaaatgacgaactttactcttgttgataatgaattaagaggcaattat

SEQ ID NO: 398852 - DNA, 75 bp, synthetic construct
  source 1..75: mol_type = other DNA
tatgctctacgctggcgtgaaagatgtgcgcctgctggatggcggctggcaaacctggtccgacgcgggactgcc

SEQ ID NO: 398853 - DNA, 75 bp, synthetic construct
  source 1..75: mol_type = other DNA
tgagatagataaacaaattgcgcactataaagaaatcgtggacccgctggctgatgcgtatttttctctcagtaa

SEQ ID NO: 398854 - DNA, 75 bp, synthetic construct
  source 1..75: mol_type = other DNA
actgtggtcgatgccagccgtatgatttctgatatggcccggttgatgggtaaagccactagagcgtggggaata

SEQ ID NO: 398855 - DNA, 75 bp, synthetic construct
  source 1..75: mol_type = other DNA
ccactggtttcagcccgagcgacatcgaccgtgtaatccgtggcgtctatgtcgatgacttggcagaccagtgga

SEQ ID NO: 398856 - DNA, 75 bp, synthetic construct
  source 1..75: mol_type = other DNA
cccgcctgcaaaaattgccgcactttgagcaactggtttacccgcaatggctgcatgacctgcaacaaggtaaag

SEQ ID NO: 398857 - DNA, 75 bp, synthetic construct
  source 1..75: mol_type = other DNA
ccgcaggcattactggcaacgctggtgtcgacaaccatcgcggcggtcggggcgttgttgattgccctactggtg

SEQ ID NO: 398858 - DNA, 75 bp, synthetic construct
  source 1..75: mol_type = other DNA
aaacctggtccgacgcgggactgcccgttgagcgcggaacgccaccgaaagtgaaagcggaaccggatttcggcg

SEQ ID NO: 398859 - DNA, 75 bp, synthetic construct
  source 1..75: mol_type = other DNA
cctgaaagccgatgtgccggtggcgttatacggtaatgacaaagacgtcgaagccgtcaaaacgcgtctgcaaaa

SEQ ID NO: 398860 - DNA, 75 bp, synthetic construct
  source 1..75: mol_type = other DNA
tccgacgcgggactgcctgttgagcgcggaacgccaccgaaagtgaaagcggaaccggatttcggcgtgaagatc

SEQ ID NO: 398861 - DNA, 75 bp, synthetic construct
  source 1..75: mol_type = other DNA
acgacggcggctggtacgaatggagcagcgatccgaaaaatcccgtagcaaccggtgagcgcggcccggacagca

SEQ ID NO: 398862 - DNA, 75 bp, synthetic construct
  source 1..75: mol_type = other DNA
gtggtgtacatcaccggccaatccggatccggcaaatccgttgtgctgcgcgagttgcaacgacagatgaaggat

SEQ ID NO: 398863 - DNA, 75 bp, synthetic construct
  source 1..75: mol_type = other DNA
acaacaatggcatgtggtggtcactggcacaccactcccgcacaggtgaaaacagagaaaaccgcacgacattta

SEQ ID NO: 398864 - DNA, 75 bp, synthetic construct
  source 1..75: mol_type = other DNA
aaccctttgaattaccttttgatccgtgtacgactgcactggtcatgatcgacatgcagcgtgactttgtcgagg

SEQ ID NO: 398865 - DNA, 75 bp, synthetic construct
  source 1..75: mol_type = other DNA
tgaactggcagaaatgttacgtacccgtttgctgggtaaacgcgagcgtgaactgacgatggtctttgagtcctt

SEQ ID NO: 398866 - DNA, 75 bp, synthetic construct
  source 1..75: mol_type = other DNA
gctgcatgaaggcattttccgtatcgctctgcaacagccagcaggcgctggcggtaacggacatgcgttatcagt

SEQ ID NO: 398867 - DNA, 75 bp, synthetic construct
  source 1..75: mol_type = other DNA
ttgattggagttgagtcagagggactggcctactcatcattaagtatgagcgcaggagagcaaaagatattttta

SEQ ID NO: 398868 - DNA, 75 bp, synthetic construct
  source 1..75: mol_type = other DNA
cgagtgatggatctggcctccaggcatcccgaatggcatcagtatgtaagtgaagtcactgactggttacagccc

SEQ ID NO: 398869 - DNA, 75 bp, synthetic construct
  source 1..75: mol_type = other DNA
ccggtgattactgataccgggcgtaaaacctgggtgaagtcttcactggagcactatgttgcagcgttgcgtcgc

SEQ ID NO: 398870 - DNA, 75 bp, synthetic construct
  source 1..75: mol_type = other DNA
atgacctagaaggcgctgtcattggcgcgttctttctgcgtggggcagatcctgaagtgatggatattctggcca

SEQ ID NO: 398871 - DNA, 75 bp, synthetic construct
  source 1..75: mol_type = other DNA
ccgggcgtaaaacctgggtgaagtcttcactggagcactatgttgcagccttgcgtcgcaatgccgcactgcgtg

SEQ ID NO: 398872 - DNA, 75 bp, synthetic construct
  source 1..75: mol_type = other DNA
aactgacgatggtctttgagtccttcggcttcaagcacggcattcctattgatgcggattatgtctttgacgtgc

SEQ ID NO: 398873 - DNA, 75 bp, synthetic construct
  source 1..75: mol_type = other DNA
tcacgaaacagcgtaatggcacgctcgggaccatttaccggcgttttcataacggacattttctgcctgtggacc

SEQ ID NO: 398874 - DNA, 75 bp, synthetic construct
  source 1..75: mol_type = other DNA
cacgggtgctttccactcccatgaagcccggcaatccgcgcagatacagtaataaacgaacttacagcagtaaga

SEQ ID NO: 398875 - DNA, 75 bp, synthetic construct
  source 1..75: mol_type = other DNA
agccgccaaacgcgaatggaggctctatcagaagcgccaggcagctttaagtacaaaactggcaaaggacaacgg

SEQ ID NO: 398876 - DNA, 75 bp, synthetic construct
  source 1..75: mol_type = other DNA
acccaaaatggcggactccggcactcaacgtcattatggtcgggattgtcgcgctgtcggcgctgttctttgatt

SEQ ID NO: 398877 - DNA, 75 bp, synthetic construct
  source 1..75: mol_type = other DNA
gcgctccccgcaaccgggccgtggtgtaggggtattattaactggcggatttatcgtatggctggcgatgttgta

SEQ ID NO: 398878 - DNA, 75 bp, synthetic construct
  source 1..75: mol_type = other DNA
gcaaattattttgctatcagcgagctgaccatcggtctgacggtagttgctatcggcaccagcctgccggaactg

SEQ ID NO: 398879 - DNA, 75 bp, synthetic construct
  source 1..75: mol_type = other DNA
gctgcgcccggatatgcagatcaccaagcactacaaagaacgcgtgaaggtggaatatcacaatggtagtcatga

SEQ ID NO: 398880 - DNA, 75 bp, synthetic construct
  source 1..75: mol_type = other DNA
agttctgccgtttcaccgcggaaggcgttcaagagatcgactataaagatatcgctacgctgaaaaactacatca

SEQ ID NO: 398881 - DNA, 75 bp, synthetic construct
  source 1..75: mol_type = other DNA
tgggtcagtgcgagcatttcggtaggcagtcagaaagtggagtccagcaaaaaagaagtgatcggtcttgaagac

SEQ ID NO: 398882 - DNA, 75 bp, synthetic construct
  source 1..75: mol_type = other DNA
gcatccacatacagaaatttataaaatagcaataaaccttttagaacaaataaaagaagagggaaaacaatctac

SEQ ID NO: 398883 - DNA, 75 bp, synthetic construct
  source 1..75: mol_type = other DNA
gggttactgattccaaagccattattgcaggtctggaatgtcaacgacggatgaaaagtgatccacttatatctc

SEQ ID NO: 398884 - DNA, 75 bp, synthetic construct
  source 1..75: mol_type = other DNA
atcgtccggatacgctttgaagaatgggatcagatggttgatgacatcgcagaagacgataaatcagctctcaaa

SEQ ID NO: 398885 - DNA, 75 bp, synthetic construct
  source 1..75: mol_type = other DNA
gcggcgcatatttatggtatctgatccgccgctatcgcaaagtgccgttgtatgatggtgacagaacgccggtga

SEQ ID NO: 398886 - DNA, 75 bp, synthetic construct
  source 1..75: mol_type = other DNA
agccagggcgaaaaaattgaaaccctgcgccgccactaccagatgtcagagacgcagatttactccgttatccgc

SEQ ID NO: 398887 - DNA, 75 bp, synthetic construct
  source 1..75: mol_type = other DNA
atgcgttggcaaaagatccttttttttgaggctaaagtttgcgtcactgcgcagcatcgggagatgcttgatcag

SEQ ID NO: 398888 - DNA, 75 bp, synthetic construct
  source 1..75: mol_type = other DNA
cgaagctcagggggctaacctgcgtgtggacgggcgtggcctcagagtgaaagggcacgagcagggctatttcgt

SEQ ID NO: 398889 - DNA, 75 bp, synthetic construct
  source 1..75: mol_type = other DNA
gcccgcgaatttgctcaatcggttgaagccgggatggtcggtatcaatgttccggtaccggttccaatggcgttt

SEQ ID NO: 398890 - DNA, 75 bp, synthetic construct
  source 1..75: mol_type = other DNA
gcgctggtgccctccgcatcgttacgtatggcgcaactactacaggaggccggactaccggatggtgtattcaat

SEQ ID NO: 398891 - DNA, 75 bp, synthetic construct
  source 1..75: mol_type = other DNA
ggatatgttatcgagaagaaaacaacgcgaaaagataagcacgggcaaactgagacggactatgactataagccg

SEQ ID NO: 398892 - DNA, 75 bp, synthetic construct
  source 1..75: mol_type = other DNA
gacgcccgaagacgccgcaggcgaactgaagcgtggcattgagaacgtggaatacgccacggcggcacctgagtt

SEQ ID NO: 398893 - DNA, 75 bp, synthetic construct
  source 1..75: mol_type = other DNA
ctgacaccgcaaattctggcgctcaaaatcggcgctggttcgcaaagcgggctggacatggggccactggtcacc

SEQ ID NO: 398894 - DNA, 75 bp, synthetic construct
  source 1..75: mol_type = other DNA
tacggtttcacttgctctgacagcaggaatgtttcaccagttcgataaggaacttcgagaaaagtgtatccgtga

SEQ ID NO: 398895 - DNA, 75 bp, synthetic construct
  source 1..75: mol_type = other DNA
atgagtggcgcttttaacaacgatggtcgggacatatctcccttaattgcaacctcctgggagcgatgcaataag

SEQ ID NO: 398896 - DNA, 75 bp, synthetic construct
  source 1..75: mol_type = other DNA
tctgcgtatgcggcgtggcagcattccggcgctggtgaataacaaattacgcagtcttgaaaaacgcttctctac

SEQ ID NO: 398897 - DNA, 75 bp, synthetic construct
  source 1..75: mol_type = other DNA
ctttatatgttaaggatcattattgctgttagtgtatttgttgggttctttttcgctgattctactgattattta

SEQ ID NO: 398898 - DNA, 75 bp, synthetic construct
  source 1..75: mol_type = other DNA
gagactttatgcataaactgcataaagttttgcgaccaacgggtccagttgtttctatggaactgttatttggac

SEQ ID NO: 398899 - DNA, 75 bp, synthetic construct
  source 1..75: mol_type = other DNA
agatgcgattacagctttctggaatgatatcccaacacactgtatgcgatcagctattcgggaagaacctgaatg

SEQ ID NO: 398900 - DNA, 75 bp, synthetic construct
  source 1..75: mol_type = other DNA
ttaatgagttggctaaagataaattgcagtcctatgtcatgcgcgcaatgagcgaactcggcgaactggcgaacg

SEQ ID NO: 398901 - DNA, 75 bp, synthetic construct
  source 1..75: mol_type = other DNA
tcgaattgttcattaaatccccgcttgaaaacgggcttacccgtggcgaacaaatggaactggcacggattgcac

SEQ ID NO: 398902 - DNA, 75 bp, synthetic construct
  source 1..75: mol_type = other DNA
aaccgctcaccaccgcgcagattgttgatgaaatctgcgattttgtggcgaatcagcaggcggttttcctgggcg

SEQ ID NO: 398903 - DNA, 75 bp, synthetic construct
  source 1..75: mol_type = other DNA
tttccataacccggatggcaccatgcgcagcgccgatgatattaccgccatgtggaaagcatggaatatcaaacc

SEQ ID NO: 398904 - DNA, 75 bp, synthetic construct
  source 1..75: mol_type = other DNA
tagctgaaaaaatggatactaccttagatagtgctatggcttattatcgtagatatttagcattacaagaaaaac

SEQ ID NO: 398905 - DNA, 75 bp, synthetic construct
  source 1..75: mol_type = other DNA
gacgctaatgatgggtgggtaatacctggtgcgtcgtggataccatcacactggatgccgctaccagaaccgccg

SEQ ID NO: 398906 - DNA, 75 bp, synthetic construct
  source 1..75: mol_type = other DNA
ggcgacttacatcccggggcatcctgacgctaatgatgggtgggtaatacctggtgcgtcgtggataccatcaca

SEQ ID NO: 398907 - DNA, 75 bp, synthetic construct
  source 1..75: mol_type = other DNA
ggtacggtaacaccgtgctgaaaaacagtggtgcactggatatggatgtcacgacggggtacggacccgagattt

SEQ ID NO: 398908 - DNA, 75 bp, synthetic construct
  source 1..75: mol_type = other DNA
gaaagcgttaacgctggtattcgcatgttgtcgttgtcggcgctggcgttgcatgcgcgtctgcagactaatccc

SEQ ID NO: 398909 - DNA, 75 bp, synthetic construct
  source 1..75: mol_type = other DNA
atgtttgattttcagatttctaaacatcctcactatgacgaagcgtgccgggcttttgcgcagcgtcacaacatg

SEQ ID NO: 398910 - DNA, 75 bp, synthetic construct
  source 1..75: mol_type = other DNA
ttggcacaattatttgctattgtgcatcattttggttattagctcagacactggcttatatacctacagggattg

SEQ ID NO: 398911 - DNA, 75 bp, synthetic construct
  source 1..75: mol_type = other DNA
acctgccagccatcataggcatgatgttgatttgtgccggtgtgttagtcattaacttgttgtcacgaagcgcac

SEQ ID NO: 398912 - DNA, 75 bp, synthetic construct
  source 1..75: mol_type = other DNA
tactggtggcgctttcgcctgtcgctcacagtgaaggtgtgcaggaagtcgagattgacgcaccgctctctggct

SEQ ID NO: 398913 - DNA, 75 bp, synthetic construct
  source 1..75: mol_type = other DNA
ctcgccgcttgattcattttggccgccaggcggcgcgtagtagctttcctgttttgctttgtggcgaagagggcg

SEQ ID NO: 398914 - DNA, 75 bp, synthetic construct
  source 1..75: mol_type = other DNA
agagcaagaaaggtttctcactactcgaactattacttgttttaggcatcattgctgcattagtggtagcggctt

SEQ ID NO: 398915 - DNA, 75 bp, synthetic construct
  source 1..75: mol_type = other DNA
aaagcaagaaaggtttctcactactcgaactattgcttgttttaggcatcattgctgcattagtggtagcggctt

SEQ ID NO: 398916 - DNA, 75 bp, synthetic construct
  source 1..75: mol_type = other DNA
aaaggaaatgttgtggttgaatcagcagatacaggaccttctgcggctgcaggttcctcatttacaataacctat

SEQ ID NO: 398917 - DNA, 75 bp, synthetic construct
  source 1..75: mol_type = other DNA
cgccttcaaacatctgacggaagaaatgcgccgtaaattgctggatatttcccgcacatcggaaaagtcttcccg

SEQ ID NO: 398918 - DNA, 75 bp, synthetic construct
  source 1..75: mol_type = other DNA
ccagaatcaacgctatctatcaactaccctctctcgtggttctcagataaccatccctacgccacgatgaactat

SEQ ID NO: 398919 - DNA, 75 bp, synthetic construct
  source 1..75: mol_type = other DNA
aggttcctcatttacaataacctattcaaacgtgcccgctgcagagtgtacgaaaattatcactgcagctgcggg

SEQ ID NO: 398920 - DNA, 75 bp, synthetic construct
  source 1..75: mol_type = other DNA
cgtcttgttggcgaagatctatctctccgccctcttcccggaagtgccaccgtgggtttgggtggtgacgttcgt

SEQ ID NO: 398921 - DNA, 75 bp, synthetic construct
  source 1..75: mol_type = other DNA
tgttcggtaacgcacagaacatgttcgcaaaacttaccggaagcgatacgacattgcgtgatttgcgcatccgcc

SEQ ID NO: 398922 - DNA, 75 bp, synthetic construct
  source 1..75: mol_type = other DNA
ttcaggatttggtgagtttgttgatcaccttgggatggctgctctcggtccgattgactacttcaatgttcagga

SEQ ID NO: 398923 - DNA, 75 bp, synthetic construct
  source 1..75: mol_type = other DNA
cagtggtgcactggatatggatgtcacgacggggtacggacccgagattttcgccatgccagcgccagttcacgg

SEQ ID NO: 398924 - DNA, 75 bp, synthetic construct
  source 1..75: mol_type = other DNA
tttacggctggttctctcgtgggatacggacaataccgacctcgatcttcacgttgtcacgcccgatggcgaaca

SEQ ID NO: 398925 - DNA, 75 bp, synthetic construct
  source 1..75: mol_type = other DNA
tcacagtgaaggtgtgcaggaagtcgagattgacgcaccgctctctggctggcatccggcagagggcgaagatgc

SEQ ID NO: 398926 - DNA, 75 bp, synthetic construct
  source 1..75: mol_type = other DNA
cgaactattacttgttttaggcatcattgctgcattagtggtagcggcttttatcgtgtatcccaaggttcaggc

SEQ ID NO: 398927 - DNA, 75 bp, synthetic construct
  source 1..75: mol_type = other DNA
ttttcagcccgataacgttaatcatcctggcactggctgcgctgggcgtgggcatttattttctgattacccgct

SEQ ID NO: 398928 - DNA, 75 bp, synthetic construct
  source 1..75: mol_type = other DNA
tgaaattggcacacaactgttacccgttctgtatccattcattcagaaaagcaacgaaggcggtaaatcctttgt

SEQ ID NO: 398929 - DNA, 75 bp, synthetic construct
  source 1..75: mol_type = other DNA
ggatactgccgcctttcagtgggtggctgaaatggtcggcagtatgggggcatggttcggcaatgcatggaacac

SEQ ID NO: 398930 - DNA, 75 bp, synthetic construct
  source 1..75: mol_type = other DNA
cttgcaatcagatgtttcgggcctgcggctttttgtgttccctggtaagtggttactattcttttatgttattcc

SEQ ID NO: 398931 - DNA, 75 bp, synthetic construct
  source 1..75: mol_type = other DNA
gaccacaattgataactcccgtcgcgtggtcaatgtcaatgtgcaggatgcatccccggcccaccttaatgaatg

SEQ ID NO: 398932 - DNA, 75 bp, synthetic construct
  source 1..75: mol_type = other DNA
ttacaaataacagtgagggttctgtattaaccggtggaaaagtcattagcgccgggccaggtggcattgcggcaa

SEQ ID NO: 398933 - DNA, 75 bp, synthetic construct
  source 1..75: mol_type = other DNA
tgtcggcaatgggatggtggagttatgccattatcatcgtcgtctgcgtgctcgggatgctgttcgggctgtacg

SEQ ID NO: 398934 - DNA, 75 bp, synthetic construct
  source 1..75: mol_type = other DNA
cccggccagcgatattgccaccatcaacaccgcctgcggtaacgccaacagcagcgtcaacagcacgacaaaaac

SEQ ID NO: 398935 - DNA, 75 bp, synthetic construct
  source 1..75: mol_type = other DNA
aagttggagtcattacctgagaataatacctcctgggtaagtgagcagatactttcagcgcctccgaaagatgta

SEQ ID NO: 398936 - DNA, 75 bp, synthetic construct
  source 1..75: mol_type = other DNA
agtgggtgccgttgtcaacattatggtgggtgtggcgaagtttgtctggacaggactgcggctggtctggctggc

SEQ ID NO: 398937 - DNA, 75 bp, synthetic construct
  source 1..75: mol_type = other DNA
cgaaatcggcacgcagttgctgcctgttctgtacccgtttatccagaaaagcaacgaaggcggtaaatcctttgt

SEQ ID NO: 398938 - DNA, 75 bp, synthetic construct
  source 1..75: mol_type = other DNA
aggaatacgtggtgcagaaccagcaaggtggcagcggcggcaccatcaccgcaggctacgacttcaaggccaata

SEQ ID NO: 398939 - DNA, 75 bp, synthetic construct
  source 1..75: mol_type = other DNA
ttggtcatctgttacgatattttagtttctgtaaaaaaggatttattagtatttcatcctgaatctgattactca

SEQ ID NO: 398940 - DNA, 75 bp, synthetic construct
  source 1..75: mol_type = other DNA
acgtaccagagttgaagctgaccggcaatgttaaacagaacaaagtgaacgttgacggaacgctgaaaggcaaca

SEQ ID NO: 398941 - DNA, 75 bp, synthetic construct
  source 1..75: mol_type = other DNA
ggcacgctcaacatggagccgttgaaaggtgaaaaagtgaagctgaaagtgggtggtgcgttgcgcgaacaactg

SEQ ID NO: 398942 - DNA, 75 bp, synthetic construct
  source 1..75: mol_type = other DNA
tggcgcgggaagatgcttctccttgcttgcgatttggtgcgtttgaaatacgtcgctatcagtcgcaattgtggt

SEQ ID NO: 398943 - DNA, 75 bp, synthetic construct
  source 1..75: mol_type = other DNA
gaaacgttgattgcggcggcagggatttttgtgacgcaagaaggtgtggctgaagatgagaacggcgtaagtttt

SEQ ID NO: 398944 - DNA, 75 bp, synthetic construct
  source 1..75: mol_type = other DNA
tgaaagcgcttattggcggtgcaggaagtggctttgctctttctggcgggctgtctatgatcatacctactttca

SEQ ID NO: 398945 - DNA, 75 bp, synthetic construct
  source 1..75: mol_type = other DNA
ttacccgtggggaaaaagcagcggggatggtgagtgccaacttgcgtctgggtggtgatgtgcaaagcccgcagt

SEQ ID NO: 398946 - DNA, 75 bp, synthetic construct
  source 1..75: mol_type = other DNA
agccgctcggcgaaacgctgaaagatctcttttctcgcccggtattgccggaaatgaccgacgtgcatttgccgc

SEQ ID NO: 398947 - DNA, 75 bp, synthetic construct
  source 1..75: mol_type = other DNA
agaagaggaagatagcggtccgctggatctctccacgccgtatcccatcaccctgacacgggtggcgctggataa

SEQ ID NO: 398948 - DNA, 75 bp, synthetic construct
  source 1..75: mol_type = other DNA
caagggttggagagcgatcagagcgacagtgcggcgatgacctcgatgctgattggtctgggggttgcacaaagt

SEQ ID NO: 398949 - DNA, 75 bp, synthetic construct
  source 1..75: mol_type = other DNA
atcgggccacactgctggcttaacccgaatgcggaactgtgcgtgccgcaaaccattgatgccggggctgaaggg

SEQ ID NO: 398950 - DNA, 75 bp, synthetic construct
  source 1..75: mol_type = other DNA
aaaggcctgttgattgctttgccgaaagtggcggaagtggcgcaggaagaagtggtcgaaccgaaaattgaaaat

SEQ ID NO: 398951 - DNA, 75 bp, synthetic construct
  source 1..75: mol_type = other DNA
cgtgcagacgaagcggtcagcgtgcgttttaaagcgccaggattgctgcatattgtcgggcgcaacggtgggcgc

SEQ ID NO: 398952 - DNA, 75 bp, synthetic construct
  source 1..75: mol_type = other DNA
ctatctctggatggtgtgtcagtgacaaaacaggtgcgtaacgaacttacaaggatggataatttaatttacggg

SEQ ID NO: 398953 - DNA, 75 bp, synthetic construct
  source 1..75: mol_type = other DNA
ctaaagatgaccgccgttggtttatacctgaggaggttagctaccccatcagatttgacccagatgatgggcatc

SEQ ID NO: 398954 - DNA, 75 bp, synthetic construct
  source 1..75: mol_type = other DNA
tggtaaccaggaacaacatgaaatcattaaccacggaaacagcgctggatattctgattgcgtggctgcaggaca

SEQ ID NO: 398955 - DNA, 75 bp, synthetic construct
  source 1..75: mol_type = other DNA
gatcgatctgtgcttacatatcgtgcgcaaagattatggtcacgaaattgctaataatgtcgcccggcggctggt

SEQ ID NO: 398956 - DNA, 75 bp, synthetic construct
  source 1..75: mol_type = other DNA
gccaacgcacttttttaagacgttttgccgccttaacgggtatgacacctgcccgctggctgcttaatgagcggt

SEQ ID NO: 398957 - DNA, 75 bp, synthetic construct
  source 1..75: mol_type = other DNA
ctggtgggacaggtaagagtttttattttacaggagtgctgtctaagattctcaaaacacaggtctctacgtccg

SEQ ID NO: 398958 - DNA, 75 bp, synthetic construct
  source 1..75: mol_type = other DNA
ccaggctaccaaaggtgttctggaaacgggtatctaccgtggcgtagttagcatttatctgtcccaggctctcta

SEQ ID NO: 398959 - DNA, 75 bp, synthetic construct
  source 1..75: mol_type = other DNA
atgaaaaaggtatttgcaaaatctcttctggtcgcagcgatgttttctgttgcaggctccgcattggcagtacaa

SEQ ID NO: 398960 - DNA, 75 bp, synthetic construct
  source 1..75: mol_type = other DNA
cgcggggagaactggagcagtgggcgttggcgcatggtttacgttggattgaagacgaaagtaatcaggacgact

SEQ ID NO: 398961 - DNA, 75 bp, synthetic construct
  source 1..75: mol_type = other DNA
gaagcttctcatccttccccgcttgggcagaatatttgattgcggattcgtttgagaattccggggcttttgaaa

SEQ ID NO: 398962 - DNA, 75 bp, synthetic construct
  source 1..75: mol_type = other DNA
tttgagagttcagggacttttgaaagtgatggtggtgggggaaggattcgaaccttcgaagtcgatgacggcaga

SEQ ID NO: 398963 - DNA, 75 bp, synthetic construct
  source 1..75: mol_type = other DNA
ttatttcggttgatgatcgtcgtgtctcttatttgcgtgatggttatgattttgaatgtgttatgccgcgtcagc

SEQ ID NO: 398964 - DNA, 75 bp, synthetic construct
  source 1..75: mol_type = other DNA
ctggccggtggatatcaccctcaacagcacactgaacgtggagccgttgaaaggtgaaaaagtgaagctgaaagt

SEQ ID NO: 398965 - DNA, 75 bp, synthetic construct
  source 1..75: mol_type = other DNA
gtaaaaccaaccttgtcggcctgctggatgggtatttccaccacgaagcggatgtcgaaggcggtcaacacctca

SEQ ID NO: 398966 - DNA, 75 bp, synthetic construct
  source 1..75: mol_type = other DNA
acgaagcttcgctaatggcgctgcacgatcgtgatgtctatcgcactatggcatgcggcatcgcgggcctgtcgg

SEQ ID NO: 398967 - DNA, 75 bp, synthetic construct
  source 1..75: mol_type = other DNA
aaggctattacggcggtaaagtcgatctctgggggcaacgctttattgaagtatggtcggggatgccgacgctgt

SEQ ID NO: 398968 - DNA, 75 bp, synthetic construct
  source 1..75: mol_type = other DNA
ccatgcgcagcgccgatgatattatggctatgtggaaagcatggaatatcagaccagatcagcaagtttcattct

SEQ ID NO: 398969 - DNA, 75 bp, synthetic construct
  source 1..75: mol_type = other DNA
accacgaagcatccatcgaaggtggtcagcacctgaacgttaacgtgatgaaccgtgaaatgctgctcgacgcga

SEQ ID NO: 398970 - DNA, 75 bp, synthetic construct
  source 1..75: mol_type = other DNA
ggcgaatacccgcagtttggtaacaacgatccgcgtgtagatgacctggctgttgacctggtagaacgtttcatg

SEQ ID NO: 398971 - DNA, 75 bp, synthetic construct
  source 1..75: mol_type = other DNA
gcatcaaaataatttacttcattccttagataaagaggctttaaccgggagtcttttttccagattagtagagcg

SEQ ID NO: 398972 - DNA, 75 bp, synthetic construct
  source 1..75: mol_type = other DNA
taaactaacgtttatgcatggaaacttatttttatcaaacttaagaacattcatcaatgaattatataattcatt

SEQ ID NO: 398973 - DNA, 75 bp, synthetic construct
  source 1..75: mol_type = other DNA
gctgtgcaggctttacgcagcaacgactgggatctctggcaggcagaagccgctatacgcagcaacaagatgtga

SEQ ID NO: 398974 - DNA, 75 bp, synthetic construct
  source 1..75: mol_type = other DNA
tgctggcgggggcgctacaaggctattacggcggtaaagtcgatctctgggggcaacgctttattgaagtatggt

SEQ ID NO: 398975 - DNA, 75 bp, synthetic construct
  source 1..75: mol_type = other DNA
gcggattatcaggatccgtggctaaaacaacgactggaggataaaggctgggtactgtgggcaccgattcgcttt

SEQ ID NO: 398976 - DNA, 75 bp, synthetic construct
  source 1..75: mol_type = other DNA
cctaacttctggtggctgctggcaattactgtcttgtttggctggatgagtctggtcggcgtggtgcgggcggag

SEQ ID NO: 398977 - DNA, 75 bp, synthetic construct
  source 1..75: mol_type = other DNA
acgacggcggctggtacgaatggagcagcgatccaaaaaatccggtagcaaccggtgaacgcggcccggacagca

SEQ ID NO: 398978 - DNA, 75 bp, synthetic construct
  source 1..75: mol_type = other DNA
gatgaaccgaaagcggagatcttctctgacccggcgatgtcgcaacaggctgcgttgtcttacttgttgcgtgga

SEQ ID NO: 398979 - DNA, 75 bp, synthetic construct
  source 1..75: mol_type = other DNA
attaacagcaacctgattgtccacgtcggcaacaatgtgcgcattgatgcctttggcctgaaagcgcggctgacg

SEQ ID NO: 398980 - DNA, 75 bp, synthetic construct
  source 1..75: mol_type = other DNA
atcgggccgcactgctgggtaaacccgaacgcggaactgtgcgtgccgcaaaccattgatgccggtgcagaaggg

SEQ ID NO: 398981 - DNA, 75 bp, synthetic construct
  source 1..75: mol_type = other DNA
gcaggttcgcgtggaaggcgatatcaaatccaccgatcagattgcgggtaaactcgacgtacgcgttgagcaaat

SEQ ID NO: 398982 - DNA, 75 bp, synthetic construct
  source 1..75: mol_type = other DNA
taacgtcaaacagaacaaagtgaacgttgacggcacgctgaaaggcaacagttatatgcagtggatgatcccagg

SEQ ID NO: 398983 - DNA, 75 bp, synthetic construct
  source 1..75: mol_type = other DNA
gggcagcttaatctggcaggaagttttgatcgcaaagaagaacgctggaagggaacgcttagcaatacccgcttc

SEQ ID NO: 398984 - DNA, 75 bp, synthetic construct
  source 1..75: mol_type = other DNA
gttctggtcggcgaacgcgctatcaccatcaaccgtcaggagaaggtgattcactccagcgccgggcgtaccgtt

SEQ ID NO: 398985 - DNA, 75 bp, synthetic construct
  source 1..75: mol_type = other DNA
gaaagtaaagagatctacaaacgcctgattgtcagcgaagacaacaaaaccctgctcggtgcggtactggtgggc

SEQ ID NO: 398986 - DNA, 75 bp, synthetic construct
  source 1..75: mol_type = other DNA
tctgagccgatcaaaggcgatctcctgaactacgatgaagtgatggagcgcatggatcacttcatggactggctg

SEQ ID NO: 398987 - DNA, 75 bp, synthetic construct
  source 1..75: mol_type = other DNA
gggtcgagcgccggatgcggtgacgctggcaatccagcgatccaggcggaggcgtttttacgggcgcgcggcgcg

SEQ ID NO: 398988 - DNA, 75 bp, synthetic construct
  source 1..75: mol_type = other DNA
tgtctgccgaaaatggagcatgacgaaggacggccctgtattcacgctaaccgcgacgtttgagcaagtgatgaa

SEQ ID NO: 398989 - DNA, 75 bp, synthetic construct
  source 1..75: mol_type = other DNA
acaccagtagagtttaaatttcttctgcttttagctggagaacaccctgattatatactttgtaaaaggaataaa

SEQ ID NO: 398990 - DNA, 75 bp, synthetic construct
  source 1..75: mol_type = other DNA
ccgccaggattacgaaccacagggtgccagcgtgacgattctggtgagcgaagaacccgttgacccgaaacttat

SEQ ID NO: 398991 - DNA, 75 bp, synthetic construct
  source 1..75: mol_type = other DNA
tttattctggtcaacatcatctttacgttcgtgctggggctgctggataaaatgttaggctggcaacgcgctggt

SEQ ID NO: 398992 - DNA, 75 bp, synthetic construct
  source 1..75: mol_type = other DNA
ttgaattatctgaataatagcgagcgttctttagttaagcagatcttaattgaagacgaaattattgtgtgtgca

SEQ ID NO: 398993 - DNA, 75 bp, synthetic construct
  source 1..75: mol_type = other DNA
ccatcagtcaggcggtccgtgccggaaaactgccagaaggctggtatcagatccccgtgacaaaggaaaccctgc

SEQ ID NO: 398994 - DNA, 75 bp, synthetic construct
  source 1..75: mol_type = other DNA
aacgagttgccatagcgcgcaactccatcggtttgactcaatccgagcttgctaagaaagtaggcgtggtatcca

SEQ ID NO: 398995 - DNA, 75 bp, synthetic construct
  source 1..75: mol_type = other DNA
tactggatgtttattctggtcaacatcatctttacgttcgtgctggggctgctggataaaatgttaggctggtaa

SEQ ID NO: 398996 - DNA, 75 bp, synthetic construct
  source 1..75: mol_type = other DNA
cgttcgtgctggggctgctggataaaatgttaggctggcaacgcgctggtggcgaaggcatcctgacgacaatct

SEQ ID NO: 398997 - DNA, 75 bp, synthetic construct
  source 1..75: mol_type = other DNA
caaaaacgtatttttaatgcattacaaacgaatggcattttattgaataatgaatggtgtgcctttctcaaagaa

SEQ ID NO: 398998 - DNA, 75 bp, synthetic construct
  source 1..75: mol_type = other DNA
atgggacatttgaaaaagtcatgacggcaattgatcgtctgaagaagtataaggttgagtttaatacgctaactg

SEQ ID NO: 398999 - DNA, 75 bp, synthetic construct
  source 1..75: mol_type = other DNA
aaatctatcggcagtaaacatatgcaatttatcgaattgctagaaaccgggacgccgaatattgatttcagtggt

SEQ ID NO: 399000 - DNA, 75 bp, synthetic construct
  source 1..75: mol_type = other DNA
gaaggcggcctgtggggctggataactatcatgcgcaacgatgtgtcgaaaggattcaccattactccggacaag

SEQ ID NO: 399001 - DNA, 75 bp, synthetic construct
  source 1..75: mol_type = other DNA
gcaaggataatctggttgttgaaagtaatggagatatttatgaatgcgaccattttgtctatccacagtacaaaa

SEQ ID NO: 399002 - DNA, 75 bp, synthetic construct
  source 1..75: mol_type = other DNA
gtacttctgtgaaggttataaaatcctatttacaactatggtgccatatatgaatgcaatggttgaactcgctaa

SEQ ID NO: 399003 - DNA, 75 bp, synthetic construct
  source 1..75: mol_type = other DNA
cgtacaggcaagatttgaatcgctagatgatttactaaagactgctgctataaaggactttattccagcccctcc

SEQ ID NO: 399004 - DNA, 75 bp, synthetic construct
  source 1..75: mol_type = other DNA
cgcttgatttatcgtctgcagcaattcgttccggatgccttacccgtggtacgtaaagccagctggcactgcagt

SEQ ID NO: 399005 - DNA, 75 bp, synthetic construct
  source 1..75: mol_type = other DNA
atgtacgcaaaatcctttattgcatttgatggcaacggacgtctgaccggcgcacgtactgcacaggccgcacct

SEQ ID NO: 399006 - DNA, 75 bp, synthetic construct
  source 1..75: mol_type = other DNA
agttctgataatacctggaaaatgattgaatcttattcggctaagaatgaaaaagttaaagggattaaattatca

SEQ ID NO: 399007 - DNA, 75 bp, synthetic construct
  source 1..75: mol_type = other DNA
cgcttgattgatcgtctgcagcaattcgttccggatgccttacccgtggtccgtaaagccagctggcactgcagg

SEQ ID NO: 399008 - DNA, 75 bp, synthetic construct
  source 1..75: mol_type = other DNA
cgcttgattcatcgtctgcagcaattcgttccggatgccttacccgtggtgcgtaaagccagctggcactgcagg

SEQ ID NO: 399009 - DNA, 75 bp, synthetic construct
  source 1..75: mol_type = other DNA
cgcttgatttatcgtctgcagcaattcgttccggatgccttacccgtggttcgtaaagccagctggcactgcaga

SEQ ID NO: 399010 - DNA, 75 bp, synthetic construct
  source 1..75: mol_type = other DNA
tattcggcggcctgtttttttcctgcagcgtgatggccgcaaacggtacgctggcccccaccgtggtgccaatgg

SEQ ID NO: 399011 - DNA, 75 bp, synthetic construct
  source 1..75: mol_type = other DNA
gccgcaccttatgctcactacacctgccacctttgcggcagtgcactcagataccatccgcagtacgacactgaa

SEQ ID NO: 399012 - DNA, 75 bp, synthetic construct
  source 1..75: mol_type = other DNA
tcaataatgcgggcgttatgccgctttcaccgcttgcagcaggaaaacaggatgaatgggagctcactattgacg

SEQ ID NO: 399013 - DNA, 75 bp, synthetic construct
  source 1..75: mol_type = other DNA
ccgcggatattgcccgtgctgtaaggcatattattgaatctcccgaaagcgttgatacaaccgaaattaccatca

SEQ ID NO: 399014 - DNA, 75 bp, synthetic construct
  source 1..75: mol_type = other DNA
acgctggcccccaccgtggtgccaatggtgaacggtggtcaggccagtattgccatcagcaataccagcccgaat

SEQ ID NO: 399015 - DNA, 75 bp, synthetic construct
  source 1..75: mol_type = other DNA
tctgcttttttccagaccagtgtccgtgtctggcctcagtatggtcgtgtggaaatccgtggaattcggaaaaca

SEQ ID NO: 399016 - DNA, 75 bp, synthetic construct
  source 1..75: mol_type = other DNA
tgggtgaaattttcatccgtcagtttgaaagctttgtcagccgtttttttggggaatgggcataccagttgtatt

SEQ ID NO: 399017 - DNA, 75 bp, synthetic construct
  source 1..75: mol_type = other DNA
catattttgcaagggtatttgtacgcacagccgatgccgctacgtgattttcccaaatggctggcgggcagccaa

SEQ ID NO: 399018 - DNA, 75 bp, synthetic construct
  source 1..75: mol_type = other DNA
gagcttttcccgcgaaatcaatctgggcctggcgcaacatgagttcgaattgttctgtcagcctttgcttaatgc

SEQ ID NO: 399019 - DNA, 75 bp, synthetic construct
  source 1..75: mol_type = other DNA
cctggctggcgaccgcttaccggatgagcttttcccgcgaaatcaatctgggcctggcgcaacatgagttcgaat

SEQ ID NO: 399020 - DNA, 75 bp, synthetic construct
  source 1..75: mol_type = other DNA
gattaaaggtagtccagtgctgatccagtggtatccctctcaatcacatactggcgatggcgttctggagatgat

SEQ ID NO: 399021 - DNA, 75 bp, synthetic construct
  source 1..75: mol_type = other DNA
gcggttaactcgacggtgaccgatatcatcatcgcactggggcaaagactgaatattgaactggtggcggagggc

SEQ ID NO: 399022 - DNA, 75 bp, synthetic construct
  source 1..75: mol_type = other DNA
aatcacgctgttgaagagctggataaagtcttgcagccccttcaggaaggacgcgagcttttacttccgttgatt

SEQ ID NO: 399023 - DNA, 75 bp, synthetic construct
  source 1..75: mol_type = other DNA
catcccggaaattccccagccacaaccgctgaatccacaaggcgaagcggtggcgaatgattttatcccccgtaa

SEQ ID NO: 399024 - DNA, 75 bp, synthetic construct
  source 1..75: mol_type = other DNA
gacgcaaaattcgtttcggtattcgtctgcatgtgattgttcgtgaaactaacgacgaagcgtggcaggccgccg

SEQ ID NO: 399025 - DNA, 75 bp, synthetic construct
  source 1..75: mol_type = other DNA
caatgaacatgaccatgacgttaaaaaagttcagtccggtgacagcaccataaccagcgaaaaaacagagagtca

SEQ ID NO: 399026 - DNA, 75 bp, synthetic construct
  source 1..75: mol_type = other DNA
cttccaacacaattaccgctggcggtgctgctaagtttactggtgggctacatcgcctggctggcgaccgcttac

SEQ ID NO: 399027 - DNA, 75 bp, synthetic construct
  source 1..75: mol_type = other DNA
ggctacggcgctggcatggcactatcttccaacacaattaccgctggcggtgctgctaagtttactggtgggcta

SEQ ID NO: 399028 - DNA, 75 bp, synthetic construct
  source 1..75: mol_type = other DNA
agagttcgcttttaatgatcaaattgaagacttattgaattcacattattgtgatgattctttgtattggacttt

SEQ ID NO: 399029 - DNA, 75 bp, synthetic construct
  source 1..75: mol_type = other DNA
aaaattcagggtattggcgcaggcttcattccagcgaaccttgacctcaaactggtcgataaagttatcggcatc

SEQ ID NO: 399030 - DNA, 75 bp, synthetic construct
  source 1..75: mol_type = other DNA
acgataaaatcgcgctgggccacgcacaatacattgattttgcagtgaaatacgccaataaagtggcgtttattg

SEQ ID NO: 399031 - DNA, 75 bp, synthetic construct
  source 1..75: mol_type = other DNA
ctttaaacccaaccagaagaagccggaatatgacgacctggtggcactttaccagggcaaagagctgtttcgcta

SEQ ID NO: 399032 - DNA, 75 bp, synthetic construct
  source 1..75: mol_type = other DNA
accattctcggtgatgtaaaaatgggatttgtctgtgggaatacagttcagcccaaaaatcaagataatacaatt

SEQ ID NO: 399033 - DNA, 75 bp, synthetic construct
  source 1..75: mol_type = other DNA
atgattaagcaattaccaaactggaaattcatcatgctctggctggtgatgtttatcgcctctgttggctacctg

SEQ ID NO: 399034 - DNA, 75 bp, synthetic construct
  source 1..75: mol_type = other DNA
cggtaaatccaccctggtaaacaaacttgccaatatcttcaacactaccagtgcgtgggaatatggtcgtgatta

SEQ ID NO: 399035 - DNA, 75 bp, synthetic construct
  source 1..75: mol_type = other DNA
cacagtacctggagcatctggggatcgaaacggtgcttgtcgatccgaaacgtacctttatgagtatcagcggag

SEQ ID NO: 399036 - DNA, 75 bp, synthetic construct
  source 1..75: mol_type = other DNA
gaatttcatcaaaaattaccctgattcaacttacctgccaaacgccaattattggctgggtcagttaaactacaa

SEQ ID NO: 399037 - DNA, 75 bp, synthetic construct
  source 1..75: mol_type = other DNA
caaacctggtactgactgaaggcgcgaagggcatgaaaggcgcgattcaaaaagcagaagaaattgtcgccagta

SEQ ID NO: 399038 - DNA, 75 bp, synthetic construct
  source 1..75: mol_type = other DNA
actggtcgataaagttatcggcatcactaatgaagaagcgatttctactgctcgccgcctgatggaagaagaagg

SEQ ID NO: 399039 - DNA, 75 bp, synthetic construct
  source 1..75: mol_type = other DNA
tcgaccagatgaagaacgctcacgtttgaatcgagcttggctggataaagtcgatctggaatgggggaaacagaa

SEQ ID NO: 399040 - DNA, 75 bp, synthetic construct
  source 1..75: mol_type = other DNA
aatgggtgaaacagaatatttgggccgagtactggaggaaggtcacggatatgactaacgttttgctgatcatgc

SEQ ID NO: 399041 - DNA, 75 bp, synthetic construct
  source 1..75: mol_type = other DNA
attgattccctgcgtggtcagattcaggaaaatcagtatcaactgaatcaggtcgtggagcggcaaaagcagatc

SEQ ID NO: 399042 - DNA, 75 bp, synthetic construct
  source 1..75: mol_type = other DNA
ccgggcacggcgacgtgccaatggcagttgatgcggtaaaaaaaggcgcgtgggattttttgcaaaaaccggttg

SEQ ID NO: 399043 - DNA, 75 bp, synthetic construct
  source 1..75: mol_type = other DNA
ctgtatctgaacaatcagcaccagttaatttcctttgaactcattcattcagggacaattaattcctgcgtaatc

SEQ ID NO: 399044 - DNA, 75 bp, synthetic construct
  source 1..75: mol_type = other DNA
cgtccattatttttgaggtcattgcaacctctgcgctcaagtctagtgagggctttactaggttagtaccgtctt

SEQ ID NO: 399045 - DNA, 75 bp, synthetic construct
  source 1..75: mol_type = other DNA
aatttgacactattgccgacaacgaaaacctgaatattaattcaaaaggtggttgggtggcgatgctgcagcagt

SEQ ID NO: 399046 - DNA, 75 bp, synthetic construct
  source 1..75: mol_type = other DNA
cgaatttgtctaccgcgagctgacaccagacaatgcaccacagcttaatgatttcattgcgctggctcagggggg

SEQ ID NO: 399047 - DNA, 75 bp, synthetic construct
  source 1..75: mol_type = other DNA
tcaatcattgcgcgtcgtcagtattgccaacagacattgcaggtggagttgatagggagaagtgaatggataaat

SEQ ID NO: 399048 - DNA, 75 bp, synthetic construct
  source 1..75: mol_type = other DNA
ttgatggcaacggacgtctgaccggtgcccgtaccgcacagactgctccttatgcccactacacctgccaccttt

SEQ ID NO: 399049 - DNA, 75 bp, synthetic construct
  source 1..75: mol_type = other DNA
tacgatcgctacacttgccacctttgcggcagtgcactcagataccacccgcaatacgacactgaacgtccctgg

SEQ ID NO: 399050 - DNA, 75 bp, synthetic construct
  source 1..75: mol_type = other DNA
tgcccgtactgcacagactgcgccatacgatcgttatacctgccatctttgcggcagtgctctcagataccatcc

SEQ ID NO: 399051 - DNA, 75 bp, synthetic construct
  source 1..75: mol_type = other DNA
attaaacgtctgcagcaattcgtaccggatgccttacccgtggtgcgtaaagccagctggcactgcagacaatgt

SEQ ID NO: 399052 - DNA, 75 bp, synthetic construct
  source 1..75: mol_type = other DNA
tgcccgtaccgcacagactgcaccttatgatcgctacacctgccacctttgcggcagtgcactcagataccaccc

SEQ ID NO: 399053 - DNA, 75 bp, synthetic construct
  source 1..75: mol_type = other DNA
ttgatggcaacggacgtctgacgggcgcccgtactgtacaggccgcaccttatgctcactacacctgccacttgt

SEQ ID NO: 399054 - DNA, 75 bp, synthetic construct
  source 1..75: mol_type = other DNA
atggattcgcaacgcaatcttttagtcatcgctttgctgttcgtgtctttcatgatctggcaaacctgggagcag

SEQ ID NO: 399055 - DNA, 75 bp, synthetic construct
  source 1..75: mol_type = other DNA
tagcagcttttgcaaaaagccctcttgataatcccttgtctcgtagtgagcaaatggagctggcaaggctttttc

SEQ ID NO: 399056 - DNA, 75 bp, synthetic construct
  source 1..75: mol_type = other DNA
ctacgttacctcctgtgcctcagcagggatcgccatcgctgtcgccgccgccattacacgcggcgacaaggcccg

SEQ ID NO: 399057 - DNA, 75 bp, synthetic construct
  source 1..75: mol_type = other DNA
aacactcttattcgcatggggttcacatgggacggtggagcttactggcaagcacctcaccccattttatccggc

SEQ ID NO: 399058 - DNA, 75 bp, synthetic construct
  source 1..75: mol_type = other DNA
cgtcagtgtcggattttgaattacaccttccggcaaaagacactcctgctcagtggcaggcaaaactgaatgtta

SEQ ID NO: 399059 - DNA, 75 bp, synthetic construct
  source 1..75: mol_type = other DNA
atgcttgccaaagatccagcgttaccgtcttacgacgaactgaaaaaaatgggtatctataagcgtaaagatccc

SEQ ID NO: 399060 - DNA, 75 bp, synthetic construct
  source 1..75: mol_type = other DNA
atcagagtctaccaaagccgcaataaacactcttattcgcatggggttcacatgggacggtggagcttactggca

SEQ ID NO: 399061 - DNA, 75 bp, synthetic construct
  source 1..75: mol_type = other DNA
tggcacttctcagcaacgctacagctggtttaaacgtggtttcgacagcggcgatccggcacaatgcaatacttt

SEQ ID NO: 399062 - DNA, 75 bp, synthetic construct
  source 1..75: mol_type = other DNA
tgcctggctgctctggtatcgatttgatgatgttattccaccaggatgatcaacagatccccattctgcttatca

SEQ ID NO: 399063 - DNA, 75 bp, synthetic construct
  source 1..75: mol_type = other DNA
gagaaagacaccaatcggctgtttgcacgacttcgttgggttcagcgcatcatcaagaagcgcttgaaaaccggc

SEQ ID NO: 399064 - DNA, 75 bp, synthetic construct
  source 1..75: mol_type = other DNA
cagaggggatcgtgctggccaacagccaccgaggttattccagctgcgcgccggagaacacattcccggcctttg

SEQ ID NO: 399065 - DNA, 75 bp, synthetic construct
  source 1..75: mol_type = other DNA
accgccgataaccagctggtggtcacccatgatcatcgtgtcgacagggtttccaccggacagggatttgttgag

SEQ ID NO: 399066 - DNA, 75 bp, synthetic construct
  source 1..75: mol_type = other DNA
ctgtcaccgttgtgctctggagcgtttgctccattgcgatggcgaaatcaaccattactctggatggcgaacatc

SEQ ID NO: 399067 - DNA, 75 bp, synthetic construct
  source 1..75: mol_type = other DNA
tttaacggcaagccgattgatccgaacgccatgttcctcgttgccaccaataactatcgcgcttacggcggcaaa

SEQ ID NO: 399068 - DNA, 75 bp, synthetic construct
  source 1..75: mol_type = other DNA
atgtacgcaaaatcctttttcgctcttgatcgcaacggacgtctgacgggcgcccgtactggacaggccgcacct

SEQ ID NO: 399069 - DNA, 75 bp, synthetic construct
  source 1..75: mol_type = other DNA
atgtacgcaaaatcctttatcgctcttgatagcaacggacgtctgacgggcgcccgtactgtacaggccgcacct

SEQ ID NO: 399070 - DNA, 75 bp, synthetic construct
  source 1..75: mol_type = other DNA
caatgtcgccacgcttattatggggagcagtactgcacacactgccagaccgggcgtttcagtgaggagggggta

SEQ ID NO: 399071 - DNA, 75 bp, synthetic construct
  source 1..75: mol_type = other DNA
atgtacgcaaaatcctttgtcgctcttgattgcaacggacgtctgacgggcgcccgtactgcacaggccgcacct

SEQ ID NO: 399072 - DNA, 75 bp, synthetic construct
  source 1..75: mol_type = other DNA
atgtacgcaaaatcctttctcgctcttgattgcaacggacgtctgacgggcgcccgtactggacaggccgcacct

SEQ ID NO: 399073 - DNA, 75 bp, synthetic construct
  source 1..75: mol_type = other DNA
atgtacgcaaaatcctttttcgctcttgatggcaacggacgtctgacgggcgcccgtactgcacaggccgcacct

SEQ ID NO: 399074 - DNA, 75 bp, synthetic construct
  source 1..75: mol_type = other DNA
caatgtcaccacgattattatggggagctgtactgcacacactgccagaccgggcgattcagtgaggaggcggta

SEQ ID NO: 399075 - DNA, 75 bp, synthetic construct
  source 1..75: mol_type = other DNA
caatgtcaccacgattattatggggagcagtactgcacacactgccagaccgggcgtttcagtgaggaggcggta

SEQ ID NO: 399076 - DNA, 75 bp, synthetic construct
  source 1..75: mol_type = other DNA
cgcttgattgatcgtctgcagcaattcgttccggatgccttacccgtggtgcgtaaagccagctggcactgcagc

SEQ ID NO: 399077 - DNA, 75 bp, synthetic construct
  source 1..75: mol_type = other DNA
cagtcaggagtcatttcaggatgccatgtcgcggatctcatttgcggcggtcattttttctttttctgccatgag

SEQ ID NO: 399078 - DNA, 75 bp, synthetic construct
  source 1..75: mol_type = other DNA
gcgacaggatagaaaaagcattgaggtctgtcggcggcaaggcagcaccgatcaaacgtgccaggaagcggaggt

SEQ ID NO: 399079 - DNA, 75 bp, synthetic construct
  source 1..75: mol_type = other DNA
caatgtcaccacgattattatggggagcggtactgcacacactgccagaccgggcggttcagtgaggaggtggta

SEQ ID NO: 399080 - DNA, 75 bp, synthetic construct
  source 1..75: mol_type = other DNA
cgtctgcagcaattcgtaccggatgccttacccgtggtgcgtaaagccagctggcactgcagacaatgtcaccac

SEQ ID NO: 399081 - DNA, 75 bp, synthetic construct
  source 1..75: mol_type = other DNA
aattcccctatgtgaatgccaacgtcatcgacgctaaaaccaaacagccgatgtttacaccgtatttaattaaag

SEQ ID NO: 399082 - DNA, 75 bp, synthetic construct
  source 1..75: mol_type = other DNA
tggcaggtgacgcaggcgaaagcggaagcacggccgatttacgacatcgccaataaaaaatccctcgcggcggaa

SEQ ID NO: 399083 - DNA, 75 bp, synthetic construct
  source 1..75: mol_type = other DNA
caccaataactatcgcgcttacggcggcaaatttgccggtacgggcgacagccatatcgcttttgcttcaccgga

SEQ ID NO: 399084 - DNA, 75 bp, synthetic construct
  source 1..75: mol_type = other DNA
caaagataccgcaacagaaaaatttggactggtacgcaccgcaagcctgattaacgatgctcgcaatgaagtaaa

SEQ ID NO: 399085 - DNA, 75 bp, synthetic construct
  source 1..75: mol_type = other DNA
gccagcggtaaagaggtgaaagagtggctggagtgctccgccggacagtttaaccagattgatcctaacagcacg

SEQ ID NO: 399086 - DNA, 75 bp, synthetic construct
  source 1..75: mol_type = other DNA
gacgccattatgtttggccatgctcacgccgttttcccgagtaaagattttgctgatatcaaaggggctgatatc

SEQ ID NO: 399087 - DNA, 75 bp, synthetic construct
  source 1..75: mol_type = other DNA
ggattaagaacctgacctttaatggcaagccgattgatccgaacgccatgttcctcgttgccaccaataactatc

SEQ ID NO: 399088 - DNA, 75 bp, synthetic construct
  source 1..75: mol_type = other DNA
gatgccgattacgatttgaaaactatgatggttctacctacacattcttaggtgacgcttacttaaatacgacag

SEQ ID NO: 399089 - DNA, 75 bp, synthetic construct
  source 1..75: mol_type = other DNA
caatgtcgccacgattattatggggagcgctattgtacacattgtcatacagggcgcttcagtgaggagacagta

SEQ ID NO: 399090 - DNA, 75 bp, synthetic construct
  source 1..75: mol_type = other DNA
aaaaaaacagacgctgaagattggctatattggcgtcgtgccgccacaaatcatgggctgggataaagctaattt

SEQ ID NO: 399091 - DNA, 75 bp, synthetic construct
  source 1..75: mol_type = other DNA
atctttatctctaccccaatacgctgattgtggtgaaagccagcggtaaagaggtgaaagagtggctggagtgct

SEQ ID NO: 399092 - DNA, 75 bp, synthetic construct
  source 1..75: mol_type = other DNA
cgagtttaactacggtctggattacctgaaaaatgcactggcaggagcgaaattcccttatgtaaatgccaacgt

SEQ ID NO: 399093 - DNA, 75 bp, synthetic construct
  source 1..75: mol_type = other DNA
tcacgacgtcggcggtttctccggtgataagccggacccggaactgtttgtacgctgggtacaaaacggcgtgat

SEQ ID NO: 399094 - DNA, 75 bp, synthetic construct
  source 1..75: mol_type = other DNA
cgtcttatgccttatttatatacattattgtggcaggcacatgccgatgatgagccaatattacgtccaaccttc

SEQ ID NO: 399095 - DNA, 75 bp, synthetic construct
  source 1..75: mol_type = other DNA
gaattgattccacctggaatgataacaatgagtttgaagtatgggatggggaagcgcgctgtcatggttttggca

SEQ ID NO: 399096 - DNA, 75 bp, synthetic construct
  source 1..75: mol_type = other DNA
gataccgtcgccgaagcccatttcgcctatgttgataaaccgcttaccccgtcgctggttaaggacattgtggac

SEQ ID NO: 399097 - DNA, 75 bp, synthetic construct
  source 1..75: mol_type = other DNA
aaaatctgttccgcgtgctgttaaaacgcaaaggcgagctggcgctggatcgcacctggagcattgctccggcgc

SEQ ID NO: 399098 - DNA, 75 bp, synthetic construct
  source 1..75: mol_type = other DNA
ttgttttcctctttgggatatgtcaaaaaagaaatgcaggggtcaagagtgcggtttttcaatgctgatatcaac

SEQ ID NO: 399099 - DNA, 75 bp, synthetic construct
  source 1..75: mol_type = other DNA
aagcctttatggcttgaatggcattataaagataatgctggtcaatggcatgaacttgttaatgatcgccctacc

SEQ ID NO: 399100 - DNA, 75 bp, synthetic construct
  source 1..75: mol_type = other DNA
gttcatattgaggcgaaagtgacgccacgaatgatgccgggtgtggtcgcactgggtgaaggtgcctggtatgac

SEQ ID NO: 399101 - DNA, 75 bp, synthetic construct
  source 1..75: mol_type = other DNA
ttgctgcctgactgcaccgcttccgaacagatggactttgcactggatgcatcctgcgggaatatgtcttacgtg

SEQ ID NO: 399102 - DNA, 75 bp, synthetic construct
  source 1..75: mol_type = other DNA
aaaatatgttccgggttctattaaaacggaagggggttttgtcgctggaccgaacctggagcattgctccggaaa

SEQ ID NO: 399103 - DNA, 75 bp, synthetic construct
  source 1..75: mol_type = other DNA
ctcttagtgaacgtataacatacgtgagtgaaacggaagataatcatcgtaaattgaaattattcccaattaaag

SEQ ID NO: 399104 - DNA, 75 bp, synthetic construct
  source 1..75: mol_type = other DNA
tcctcagggtgaaagtcgtcaactactgattaacggcattgaagcttacgaatggagtatgatctcatcctgtaa

SEQ ID NO: 399105 - DNA, 75 bp, synthetic construct
  source 1..75: mol_type = other DNA
cgtatggctgcaagacagtgcaggaggcgatcacttaccgcgaaaacttcagccagcgcgaagggatgctgatct

SEQ ID NO: 399106 - DNA, 75 bp, synthetic construct
  source 1..75: mol_type = other DNA
gtctacaaaattttttgcgtttcagaaagtaatgacgcccgcgagtgtgcagctccgggcgtcgtggcgttttgt

SEQ ID NO: 399107 - DNA, 75 bp, synthetic construct
  source 1..75: mol_type = other DNA
cgctttattcaaccgccttcgtgccgatggcgatcagttttttccgttgggatgggcaatggttttacagcgtgc

SEQ ID NO: 399108 - DNA, 75 bp, synthetic construct
  source 1..75: mol_type = other DNA
tggtagccggaatcaactggccaagccgcgttgctgattaccgcgataatatggcgaaacagacacaaatcaatt

SEQ ID NO: 399109 - DNA, 75 bp, synthetic construct
  source 1..75: mol_type = other DNA
gtgggtaagcatcactggaaagtaaaaaaacagcctgagtggtatgtgaaagcggtcagaaaaactatcgcggcg

SEQ ID NO: 399110 - DNA, 75 bp, synthetic construct
  source 1..75: mol_type = other DNA
gggtgttcgtatcgcttcctgaaattgaggaagtagagaacgccgatataaaccagcgcctgctggaagtcatcg

SEQ ID NO: 399111 - DNA, 75 bp, synthetic construct
  source 1..75: mol_type = other DNA
tttttcaccatgtacaatggcaacaaaaactggcgcgcagtctgcaaatcggtcgcgccagcagcggcggattag

SEQ ID NO: 399112 - DNA, 75 bp, synthetic construct
  source 1..75: mol_type = other DNA
aaaccctggtggcaatgaatgtcttgcaattctaaatgggcaattagcagtagctaaaaagtgcactgaaagcaa

SEQ ID NO: 399113 - DNA, 75 bp, synthetic construct
  source 1..75: mol_type = other DNA
tcctccgctggaagatatggagctttaccaggcgttcactgatgagttctttggtcctgcatttgcagtgcttgg

SEQ ID NO: 399114 - DNA, 75 bp, synthetic construct
  source 1..75: mol_type = other DNA
atgcacgcgaacgccttttactcgctatgggtaaagaatcaacgccaacaaacaaaaccaacccccgcaaatctt

SEQ ID NO: 399115 - DNA, 75 bp, synthetic construct
  source 1..75: mol_type = other DNA
aaagaggccagcgcgggtaattttgccgacctgctggcccactctgacggtctgattaagaatatcagcgatgat

SEQ ID NO: 399116 - DNA, 75 bp, synthetic construct
  source 1..75: mol_type = other DNA
atgaatactatcggcacgccgttgctatggggcggattcgctgttgttgtcgccattatgctggctatcgacctg

SEQ ID NO: 399117 - DNA, 75 bp, synthetic construct
  source 1..75: mol_type = other DNA
atgattttacagcgcgctgctggcactcactacattgcggatgctgtcgcacagtctgctggtggggtgtttgta

SEQ ID NO: 399118 - DNA, 75 bp, synthetic construct
  source 1..75: mol_type = other DNA
ggaccgcctgaaatatccgatgaaacgagtcggggcgcgcggtgaaggcaaattcgagcgcattagctgggaaga

SEQ ID NO: 399119 - DNA, 75 bp, synthetic construct
  source 1..75: mol_type = other DNA
ctggatgccgacatcgcccatgcgctgatgagcatcaacgcggtgaaaggcgtggaaattggtgatggttttgac

SEQ ID NO: 399120 - DNA, 75 bp, synthetic construct
  source 1..75: mol_type = other DNA
acatgacctcgaccgtcgtcgccctgggacatcgcgctataccacccagcgccgcgagccggatcaggtcaaaat

SEQ ID NO: 399121 - DNA, 75 bp, synthetic construct
  source 1..75: mol_type = other DNA
aaaaccagcctgagatgataaaaaaccgtgcgcttgatcgttcagtagattacctgcgagaagctctttccgtct

SEQ ID NO: 399122 - DNA, 75 bp, synthetic construct
  source 1..75: mol_type = other DNA
agctgacggccattgcccgaaactgtgccatacagcgtgccacagatgccctgcgtgaagcccttctgtcctggc

SEQ ID NO: 399123 - DNA, 75 bp, synthetic construct
  source 1..75: mol_type = other DNA
cctgtcagaataacaaagcagcatggctgcaacgcaaaaatgagctggctgcggccgaacaggaatatctgcggc

SEQ ID NO: 399124 - DNA, 75 bp, synthetic construct
  source 1..75: mol_type = other DNA
ttaacaccggccgtcgccgcacaccgtatttttattcttcagcatgatgagaaagagataacgatggaaagcaca

SEQ ID NO: 399125 - DNA, 75 bp, synthetic construct
  source 1..75: mol_type = other DNA
actaccggcaccagcattggtttgttgatcgaaaacactgaccagcgttctcaggattacagcgcaattaaagac

SEQ ID NO: 399126 - DNA, 75 bp, synthetic construct
  source 1..75: mol_type = other DNA
aagaggtgatggttaacggcaagccacgccacgtattgggctatttgcaggacttcctgttccatccgaaacggg

SEQ ID NO: 399127 - DNA, 75 bp, synthetic construct
  source 1..75: mol_type = other DNA
gcaatttactgatcctcgacgaaccgaccaacgaccttgacgtcgaaacgctcgaactgcttgaagagctaatcg

SEQ ID NO: 399128 - DNA, 75 bp, synthetic construct
  source 1..75: mol_type = other DNA
aacggcgtggctgaactgtaaagccgaactgaccgccgcagaacaggaatatcaggaattattgctggatgacaa

SEQ ID NO: 399129 - DNA, 75 bp, synthetic construct
  source 1..75: mol_type = other DNA
gtgaccactgtgaccatacagcaggcctttgaggcctgtcagacgaacaaaaatacctggctgaaacgtaaagcc

SEQ ID NO: 399130 - DNA, 75 bp, synthetic construct
  source 1..75: mol_type = other DNA
gcgtggcggcaggggcgattgccaaaaaatatctcgccgagaaatttggcattgagattcgcggctgcctgaccc

SEQ ID NO: 399131 - DNA, 75 bp, synthetic construct
  source 1..75: mol_type = other DNA
gagcgtctggtagcggaaggcgcagggtttgcagaactgttgagcagcctgcaaaccccaaagattaaaagcgat

SEQ ID NO: 399132 - DNA, 75 bp, synthetic construct
  source 1..75: mol_type = other DNA
aacgcgcgcggggattatcgtcctgcatggagtgcactgaaagtgtcattaccattggaagaaaaacgcacgctg

SEQ ID NO: 399133 - DNA, 75 bp, synthetic construct
  source 1..75: mol_type = other DNA
gtgtgggcacaacgtccggcctgctgtttgaagacgatggcgaaagctggggctaccaaactggtaatgcgcttt

SEQ ID NO: 399134 - DNA, 75 bp, synthetic construct
  source 1..75: mol_type = other DNA
acgaagtggcagaaagaggactgttcatccgtgattcagaaacagatgaaccagaacgttccagcttctgggatg

SEQ ID NO: 399135 - DNA, 75 bp, synthetic construct
  source 1..75: mol_type = other DNA
gccgagcacgggcagttctatttcgaagataaaaattgccgtgtctggggcgcgttgttcagttgcgtctctcac

SEQ ID NO: 399136 - DNA, 75 bp, synthetic construct
  source 1..75: mol_type = other DNA
gatgaattcacgccagattcactgaaagctctggcgctgtggatgaagcgtaacgtcaggaatgaactagaaatt

SEQ ID NO: 399137 - DNA, 75 bp, synthetic construct
  source 1..75: mol_type = other DNA
attctggttcagcgtcgtaccgagacaaaagactttttacctgggatgttagatgctacggcaggtggtgtagtt

SEQ ID NO: 399138 - DNA, 75 bp, synthetic construct
  source 1..75: mol_type = other DNA
aggcgcttgacactatcgccactagcctgaaaaaaaccgtcgagcaatatggcaacgaagctgtttatattcagt

SEQ ID NO: 399139 - DNA, 75 bp, synthetic construct
  source 1..75: mol_type = other DNA
atgattcgctacctgaatattgattctgtaattccgggacgttacactgttccggcaccttataaagcgggtgcc

SEQ ID NO: 399140 - DNA, 75 bp, synthetic construct
  source 1..75: mol_type = other DNA
atgcggcttcgcgggatgataatcgcgagaaattcaccccagcacagaacctgatttacacccgccgacgtgcag

SEQ ID NO: 399141 - DNA, 75 bp, synthetic construct
  source 1..75: mol_type = other DNA
tgcacaaacagtctgcccaccacgttgaactgctggtcgatggccagcatatcctgtgcctgtacgtgctggaag

SEQ ID NO: 399142 - DNA, 75 bp, synthetic construct
  source 1..75: mol_type = other DNA
atgaaaacatggttttccattaaggctatggcagatgttgtctatgtgcgcatttatgacgagatcggcgggtac

SEQ ID NO: 399143 - DNA, 75 bp, synthetic construct
  source 1..75: mol_type = other DNA
ggatgggattcccctgaacgcagcaccttcccactacaactgtttggtttccattataaatcccgtactcactcc

SEQ ID NO: 399144 - DNA, 75 bp, synthetic construct
  source 1..75: mol_type = other DNA
aggtcgcggtagtgaacccgacgccgaccccactttctcgtgaagaacgtaacgatttgctggattacggtaact

SEQ ID NO: 399145 - DNA, 75 bp, synthetic construct
  source 1..75: mol_type = other DNA
tggtcgtcactcctgtcgatatgcgccggggtatcgataccctgacacaatacgtccagaacgaacttaacgctg

SEQ ID NO: 399146 - DNA, 75 bp, synthetic construct
  source 1..75: mol_type = other DNA
atttttcctggttcgcagtgcttttatcactgtggtacatggggaaagtgataaaaatgatgatcaacgcttttg

SEQ ID NO: 399147 - DNA, 75 bp, synthetic construct
  source 1..75: mol_type = other DNA
taaaagtgggcaaattcagctatagcgatgccggacagatgaatatgtatctcaactacgccaaagagcactgga

SEQ ID NO: 399148 - DNA, 75 bp, synthetic construct
  source 1..75: mol_type = other DNA
cgatacgcgatccctttgtgctcgaatttctggaattgaaagatgaatactcagaatccgattttgaggaggcgc

SEQ ID NO: 399149 - DNA, 75 bp, synthetic construct
  source 1..75: mol_type = other DNA
gaaagaggtcgcggtggttaacccaacgccgacgccactctcactcgaagaacgtaacgatttgctggattatgg

SEQ ID NO: 399150 - DNA, 75 bp, synthetic construct
  source 1..75: mol_type = other DNA
acgcagaacaacaggagacaacgaagcatgatgtcgtgcacattaaccagcgatatctggaaacggcatccctgc

SEQ ID NO: 399151 - DNA, 75 bp, synthetic construct
  source 1..75: mol_type = other DNA
cacctttgaaactatagggatgcttactccacctcgttgctatcctcgtgacaggcgcggctaccagatatggtt

SEQ ID NO: 399152 - DNA, 75 bp, synthetic construct
  source 1..75: mol_type = other DNA
gtctccaggcgcagcaggaaatgaaaaaaaatgcgactgctgtacctgatatcgaacatgtcattgtaaacaaac

SEQ ID NO: 399153 - DNA, 75 bp, synthetic construct
  source 1..75: mol_type = other DNA
ctatcgtcacttttttacctgtcttgttactgctgtttttagaacgcatcagcgttaaaaaattgatgattgcct

SEQ ID NO: 399154 - DNA, 75 bp, synthetic construct
  source 1..75: mol_type = other DNA
gctgggatggcctgctgatgcactgaatcaggcaacgaaccgggtgctttatctttcaggtatgctggataaccg

SEQ ID NO: 399155 - DNA, 75 bp, synthetic construct
  source 1..75: mol_type = other DNA
gtatgctggataaccggagtgatgcagatcctgaacaaaccgggaaagcaggcacaactgagccggtaacatcaa

SEQ ID NO: 399156 - DNA, 75 bp, synthetic construct
  source 1..75: mol_type = other DNA
cagcaggctaccagcaaatccacgacggtattattcatctggtcgatagcgcccggacggaaacggtacgtagcg

SEQ ID NO: 399157 - DNA, 75 bp, synthetic construct
  source 1..75: mol_type = other DNA
gtctcctggcgactggataacgggctggcgcatattggggtggtgtcagatggctttgcccgcgacggtacgccg

SEQ ID NO: 399158 - DNA, 75 bp, synthetic construct
  source 1..75: mol_type = other DNA
gtctcctggcgactggataacgggctggcacatattggggtggtttcagatgcttcgcccgcgacggtacgccgc

SEQ ID NO: 399159 - DNA, 75 bp, synthetic construct
  source 1..75: mol_type = other DNA
tgccagacagcaaatcggcagcacgctattttacgatccggcgtatgtgcagcttacctatcctggcggtgatgt

SEQ ID NO: 399160 - DNA, 75 bp, synthetic construct
  source 1..75: mol_type = other DNA
cagtgactatcaagcgggcgatattgtctcctggcgattagataacgggctggcgcatattggggtggtgtcaga

SEQ ID NO: 399161 - DNA, 75 bp, synthetic construct
  source 1..75: mol_type = other DNA
cagtgactatcaagcgggcgatattgtctcctggcgactggataacgggctggcacatattggggtggtttcaga

SEQ ID NO: 399162 - DNA, 75 bp, synthetic construct
  source 1..75: mol_type = other DNA
tggcttcgcccgcgacggtacgccgctggtgatacataacattggcgcaggcgcgcaggaagaagatgtgctgtt

SEQ ID NO: 399163 - DNA, 75 bp, synthetic construct
  source 1..75: mol_type = other DNA
agcatacaaaaatgccgcatctaattatctagataataaactagatgtatttggtctgtctatgatgaatgaaca

SEQ ID NO: 399164 - DNA, 75 bp, synthetic construct
  source 1..75: mol_type = other DNA
tcaactataaagataacagctatgttttcgtgcttgaacgtggtggtgcctggtgctacgactacactgtctcgg

SEQ ID NO: 399165 - DNA, 75 bp, synthetic construct
  source 1..75: mol_type = other DNA
tgtcatggcggtgcttttatcgtcctagactcgcttgatactattgcgaaaaatgaaatcgcttatgcgcttgaa

SEQ ID NO: 399166 - DNA, 75 bp, synthetic construct
  source 1..75: mol_type = other DNA
tgcaagccgccgtattgcgtgtgggggatgccgtagctttgcgcttcgacgaagtgattaacggagagatagaca

SEQ ID NO: 399167 - DNA, 75 bp, synthetic construct
  source 1..75: mol_type = other DNA
agtctctagaaagtctttagctggcttaaaagctgttataataacgggtactaatcatatagaccgttctccttc

SEQ ID NO: 399168 - DNA, 75 bp, synthetic construct
  source 1..75: mol_type = other DNA
aaatggaaatatatattttgattatatgggcgcaaactataaaagtagtatccgatttaaatcactagaagaact

SEQ ID NO: 399169 - DNA, 75 bp, synthetic construct
  source 1..75: mol_type = other DNA
atgaccgcgcgccagaagaagaagggtatgtgtgggtgaaactggaaattggtgagatttcagttgaggcatctg

SEQ ID NO: 399170 - DNA, 75 bp, synthetic construct
  source 1..75: mol_type = other DNA
gtggtaagggatacgctttttcggtgatcaatatggcaaatatcgttacgtgcaaaacaaaggacggcgaaacag

SEQ ID NO: 399171 - DNA, 75 bp, synthetic construct
  source 1..75: mol_type = other DNA
caaaggacggcgaaacagtccagtatgttgacgaggtaattggttcgggctcgatgaaggatgtttacttctcgc

SEQ ID NO: 399172 - DNA, 75 bp, synthetic construct
  source 1..75: mol_type = other DNA
tcgctgaccacgctggcgcgctgcatttcttccgtaatgtcagtgaattactggatgttttcgagcgcggcgaag

SEQ ID NO: 399173 - DNA, 75 bp, synthetic construct
  source 1..75: mol_type = other DNA
tggcgacggttgctaactccggcgctcggcggactggcggcggggttgttgctgatgggctggcagaaatttacc

SEQ ID NO: 399174 - DNA, 75 bp, synthetic construct
  source 1..75: mol_type = other DNA
actaaaacacgcttcagatgcaggggttgataaaaaggaaatcccactggataccgcgtggctgatgaatatgtt

SEQ ID NO: 399175 - DNA, 75 bp, synthetic construct
  source 1..75: mol_type = other DNA
tagggattggtgcgggactcacggcgtttaactatctgtttggtcagtcgctggatgccagtaaatacgtcactt

SEQ ID NO: 399176 - DNA, 75 bp, synthetic construct
  source 1..75: mol_type = other DNA
aatgaaggtgaatgtaagccttgacgattttatctctctggtgagcgatttagagctatcagaggacgatgcaaa

SEQ ID NO: 399177 - DNA, 75 bp, synthetic construct
  source 1..75: mol_type = other DNA
actcatgtagggttaattcggactgcgattgctaattctatgggggcttcttatattagaaatcagaccgaagga

SEQ ID NO: 399178 - DNA, 75 bp, synthetic construct
  source 1..75: mol_type = other DNA
tgcagcactggtctacaaaattttttgcatttcagaaagtaatgacgcccgcgagtgtgcagctccgggcgccgt

SEQ ID NO: 399179 - DNA, 75 bp, synthetic construct
  source 1..75: mol_type = other DNA
attatcatttagcccgaccaaagcgcagaattatcagcgttataacgaacggataaaaggaaaacgtcaggagtg

SEQ ID NO: 399180 - DNA, 75 bp, synthetic construct
  source 1..75: mol_type = other DNA
tacacctcggaagaagccgacgcgccgcagtatatggaacatctggggatcgaaacggtattggtcgatccgaaa

SEQ ID NO: 399181 - DNA, 75 bp, synthetic construct
  source 1..75: mol_type = other DNA
gaaagactggccggaacaggggggaatatcgatgtgatgatcatgatggtgactggtcagacgcatgagaatttt

SEQ ID NO: 399182 - DNA, 75 bp, synthetic construct
  source 1..75: mol_type = other DNA
gaaagactggccggatcgggtggtcatgctgacgtggttatcatgatggtcactggccagacgcaggaaaatttc

SEQ ID NO: 399183 - DNA, 75 bp, synthetic construct
  source 1..75: mol_type = other DNA
ataacgcccaaccactgactcaggatcaatgcttacgcgcaatacatcacttacgaattcagtccatcagcaagg

SEQ ID NO: 399184 - DNA, 75 bp, synthetic construct
  source 1..75: mol_type = other DNA
atggaatcgctctcagaaggaaccacagcaggctaccagcaaatccacgacggtattattcatctggtcgatagc

SEQ ID NO: 399185 - DNA, 75 bp, synthetic construct
  source 1..75: mol_type = other DNA
gcgcattatgcactggctggtttgcctaacaccgttctggcgagtgaatataagatgcaactacctgatgaaaaa

SEQ ID NO: 399186 - DNA, 75 bp, synthetic construct
  source 1..75: mol_type = other DNA
atctaaaagtgggcaaatttagctatagcgatgccggacagatgaatatgtatctcaactacgccaaagagcact

SEQ ID NO: 399187 - DNA, 75 bp, synthetic construct
  source 1..75: mol_type = other DNA
ccgacaaggtgaaattgatgcgatcagaaaacaagccagtcagcagcttgctggcgtgcaggctgatgccgatcg

SEQ ID NO: 399188 - DNA, 75 bp, synthetic construct
  source 1..75: mol_type = other DNA
agccatgctgcaacaacacgctcctgccgagacgcatattcttccgcaacaggcgatacgcgatcctagactggc

SEQ ID NO: 399189 - DNA, 75 bp, synthetic construct
  source 1..75: mol_type = other DNA
gcaggccatcgaactgatggccgacgaggggcgtgcgtggccgctgattgacggaaccggcatgatccacgggat

SEQ ID NO: 399190 - DNA, 75 bp, synthetic construct
  source 1..75: mol_type = other DNA
accctgtcggggacgctttaccctgaaatcaccggcggccgtctgtcgttgcaggccatcgaactgatggccgac

SEQ ID NO: 399191 - DNA, 75 bp, synthetic construct
  source 1..75: mol_type = other DNA
tttttatgcgccagacgttgccacaccagaccatgcagcgtgaatcagattatcgctggccgtcaaattcccgta

SEQ ID NO: 399192 - DNA, 75 bp, synthetic construct
  source 1..75: mol_type = other DNA
aaaggtagtcaggccttcggaaaagtggccttggccactggggagaatgccattgcgctgggtaatacaagtcag

SEQ ID NO: 399193 - DNA, 75 bp, synthetic construct
  source 1..75: mol_type = other DNA
ctcagtcgcactccgactcggaggtggtgctggcgtaaatgaagatggaagtataaatgcgccaagctacaggct

SEQ ID NO: 399194 - DNA, 75 bp, synthetic construct
  source 1..75: mol_type = other DNA
ataatgggggaactgacggagttgctatggcaataggattgaaagccaaagcactcggggcgggaagtacagcat

SEQ ID NO: 399195 - DNA, 75 bp, synthetic construct
  source 1..75: mol_type = other DNA
aatcggcagttgctttaggtgtatcgatggtgagcgccaatggtcgttgggtctacaaattacaaggtagtacca

SEQ ID NO: 399196 - DNA, 75 bp, synthetic construct
  source 1..75: mol_type = other DNA
tgatgcgatcaacggtattgctatcggcagtaacgcacgcgcaaaccatgcaaacagtattgcaatgggtaacgg

SEQ ID NO: 399197 - DNA, 75 bp, synthetic construct
  source 1..75: mol_type = other DNA
gcggggggtcatcggtaaacgttgacgacggtactgttaaagcaccaacctacaatttaaaaaatggtaacaaaa

SEQ ID NO: 399198 - DNA, 75 bp, synthetic construct
  source 1..75: mol_type = other DNA
ccacggcgttagcagttccgtcgctgaggctcttggtggtggtgcggcggtgaattctgacggcagcatcagcgc

SEQ ID NO: 399199 - DNA, 75 bp, synthetic construct
  source 1..75: mol_type = other DNA
atacttccatgctaattcaacggaagaagattcactggctgtcggtgaagactcactggcaatgggtgcgaaaac

SEQ ID NO: 399200 - DNA, 75 bp, synthetic construct
  source 1..75: mol_type = other DNA
cggttctaccgccagcgtaatcactaacgtcgcagacggtgcagtctctgactctagctctgatgctgtgaatgg

SEQ ID NO: 399201 - DNA, 75 bp, synthetic construct
  source 1..75: mol_type = other DNA
tttctgcaaccagcaccgatgtagtaaacggctctcaattgtacgacctgcagcaggatgctctgttgtggaacg

SEQ ID NO: 399202 - DNA, 75 bp, synthetic construct
  source 1..75: mol_type = other DNA
cgggcatagcagcggcacatggctgattgcgccggagggcgactggacgctgtgcctgaacgttacgcccaccag

SEQ ID NO: 399203 - DNA, 75 bp, synthetic construct
  source 1..75: mol_type = other DNA
tgtatggtcgcagctgcgcctttggtgagaactggcttaattccattattcgccagacaggatttaacccgttcg

SEQ ID NO: 399204 - DNA, 75 bp, synthetic construct
  source 1..75: mol_type = other DNA
gtcgcctcgttaagcgcattaaaaaaacaggcgcgggtatggctaaaatcacaaccggttaatactcagcttgat

SEQ ID NO: 399205 - DNA, 75 bp, synthetic construct
  source 1..75: mol_type = other DNA
aagcgtctgtagacagggaactgaacttaaacgggcagaaaatcagagacgctatcagcgcacacacagcagcgg

SEQ ID NO: 399206 - DNA, 75 bp, synthetic construct
  source 1..75: mol_type = other DNA
aaaacttttcttggtctaatgaagcggaaaatgtgatcagtttattttatgatgctgatattatggtctatgttg

SEQ ID NO: 399207 - DNA, 75 bp, synthetic construct
  source 1..75: mol_type = other DNA
ttgaccgctctgccaacgctataggattgagtctgtataacttcctcaacatcctcaatattaatcagatttggt

SEQ ID NO: 399208 - DNA, 75 bp, synthetic construct
  source 1..75: mol_type = other DNA
atcgccgaacgtagcccgacaatgagagcggatatttttacccgcatggaattactgattgaagatgatgaacgc

SEQ ID NO: 399209 - DNA, 75 bp, synthetic construct
  source 1..75: mol_type = other DNA
ctgattgcggagaacagccccacactcagggccgacctgttcacgcaaatggtgatactcctggaggaggatgaa

SEQ ID NO: 399210 - DNA, 75 bp, synthetic construct
  source 1..75: mol_type = other DNA
catcattgagagcggactggcaacgcgcctgctggctgaaaaaagcccgacacttcgtgccgacatcatgatgca

SEQ ID NO: 399211 - DNA, 75 bp, synthetic construct
  source 1..75: mol_type = other DNA
aaacgatgccgcaagcaccgtggaaaacgccagttgaggtgaaatatttactggaagaaaagctgggcattcggg

SEQ ID NO: 399212 - DNA, 75 bp, synthetic construct
  source 1..75: mol_type = other DNA
tgagcactggcttaataccattattcgccagacgggatttaacccgttcgaccgcgacgaaggaccgagcgtgaa

SEQ ID NO: 399213 - DNA, 75 bp, synthetic construct
  source 1..75: mol_type = other DNA
aaacatcgaatcaatcgatagttcgattaataatttgaaagacgaacttactgaattgaaaaatagcaaatcatt

SEQ ID NO: 399214 - DNA, 75 bp, synthetic construct
  source 1..75: mol_type = other DNA
cgaccaacaccagcaatattgcaggtaacactgccaacattgctaccaataccactaatatcgcggctaacacca

SEQ ID NO: 399215 - DNA, 75 bp, synthetic construct
  source 1..75: mol_type = other DNA
tctttaatgcaaatggctcagttaaaagcacctcggcgaaaaacatcattaccgacgtcgctgatggcacgattt

SEQ ID NO: 399216 - DNA, 75 bp, synthetic construct
  source 1..75: mol_type = other DNA
atgagcatcgccctgggtgattcagctaatgcgtcgaaagaatattctatggcgctgggagcaagtagcaaagct

SEQ ID NO: 399217 - DNA, 75 bp, synthetic construct
  source 1..75: mol_type = other DNA
cagagcgaatacatggatatttgccttgcaatggtgcgttcggctaatgcggtctatttgctcaaggggtgggag

SEQ ID NO: 399218 - DNA, 75 bp, synthetic construct
  source 1..75: mol_type = other DNA
aaaacggtgcgggtattaactatgtacgtaccaacgacaacggcttagcgttcaacgatgccagcgcctcaggta

SEQ ID NO: 399219 - DNA, 75 bp, synthetic construct
  source 1..75: mol_type = other DNA
tctctccacaaccagtaccgatgctgttaacggttcccagttaaacgcaaccaatattctggttacgcaaaatag

SEQ ID NO: 399220 - DNA, 75 bp, synthetic construct
  source 1..75: mol_type = other DNA
gcacggtaccgaagctaccagcaagatcaccaacttactggctggcaagatatcttctaacagcactgatgccat

SEQ ID NO: 399221 - DNA, 75 bp, synthetic construct
  source 1..75: mol_type = other DNA
cgtattcaatggcgctgggtgcaagtagcgtcgcatccgcagaaaacgcaattgccctggggcgtagcagtgtag

SEQ ID NO: 399222 - DNA, 75 bp, synthetic construct
  source 1..75: mol_type = other DNA
tgatggcaatgccagcaaaattaccaacgttgcggctggtgatctctccacaaccagtaccgatgctgttaacgg

SEQ ID NO: 399223 - DNA, 75 bp, synthetic construct
  source 1..75: mol_type = other DNA
acaccaatatgctgatccagcagaacagcgaagtcatcaatcagcttgccggtaacaccagtgaaacctacatcg

SEQ ID NO: 399224 - DNA, 75 bp, synthetic construct
  source 1..75: mol_type = other DNA
cagcaacgtctccgctggcgtcaacaacaacgacgtggtgaattacgcgcagttgaagcaaagcgtgcaggaaac

SEQ ID NO: 399225 - DNA, 75 bp, synthetic construct
  source 1..75: mol_type = other DNA
cttccatgctaattcaacggaagaagattcactggctgtcggtgaagactcgctggcaatgggtgcgaaaaccat

SEQ ID NO: 399226 - DNA, 75 bp, synthetic construct
  source 1..75: mol_type = other DNA
ggcaatagttcattaaaacgcaagatcgttaatgtgaaaaatggcgcgatcaagtctgacagttacgatgccatt

SEQ ID NO: 399227 - DNA, 75 bp, synthetic construct
  source 1..75: mol_type = other DNA
acggtaaataccgtcaaatcatcaacgtcgcggatggttctgaagcccatgacgctgttactgttcgccagttgc

SEQ ID NO: 399228 - DNA, 75 bp, synthetic construct
  source 1..75: mol_type = other DNA
gccattaatggctcacagctctatagcaccaataagtacatcgctgatgcgctgggtggtgatgcagaagtcaac

SEQ ID NO: 399229 - DNA, 75 bp, synthetic construct
  source 1..75: mol_type = other DNA
gctgccgctgacaacagcgtcgcactgggcacgggttccgtagcagacgaagaaaatacgatctctgtgggttct

SEQ ID NO: 399230 - DNA, 75 bp, synthetic construct
  source 1..75: mol_type = other DNA
ctggatgcgcttgataataacgcgctgctgtgggatgaagacgcaggtgcctacaacgccagccatgatggcaat

SEQ ID NO: 399231 - DNA, 75 bp, synthetic construct
  source 1..75: mol_type = other DNA
gtctttgaggatgccagtgctacgggtgtgggcgctacagctgtaggttataactccgtcgcatcaggcgatagc

SEQ ID NO: 399232 - DNA, 75 bp, synthetic construct
  source 1..75: mol_type = other DNA
tcggcgaacaggcaaaatcactgattggcaaggcgggaaatatggcctcgtcagtggctggcatggtggggatta

SEQ ID NO: 399233 - DNA, 75 bp, synthetic construct
  source 1..75: mol_type = other DNA
tttttatgcgtcagacgctgccccaccagacgctacaacgcgatgccgaatatcgatggccgtcaaattcacgtg

SEQ ID NO: 399234 - DNA, 75 bp, synthetic construct
  source 1..75: mol_type = other DNA
aaacaggcggagtcgctcatcggtaaggccggcagtctggcgaccagattcacaggtatgacgggggcgggataa

SEQ ID NO: 399235 - DNA, 75 bp, synthetic construct
  source 1..75: mol_type = other DNA
acccctgttgctggggattatcggtaagataactgccagagcgctggtactggcaagcccggtgcttgcggtgtt

SEQ ID NO: 399236 - DNA, 75 bp, synthetic construct
  source 1..75: mol_type = other DNA
gctgtcgctcatccgcgttgatgaatcactggccgcgctttatggcgatatcggtaaacaggcggaatcgctcat

SEQ ID NO: 399237 - DNA, 75 bp, synthetic construct
  source 1..75: mol_type = other DNA
agcgacgccattaacggttcacaactttatggtgttagtgactacattgccgatgctctgggcgggaatgctgtg

SEQ ID NO: 399238 - DNA, 75 bp, synthetic construct
  source 1..75: mol_type = other DNA
gtcatatcttggtggtggtgctgatatcagcgatacgggtgtattaagtgggccaacctacactattggtggtac

SEQ ID NO: 399239 - DNA, 75 bp, synthetic construct
  source 1..75: mol_type = other DNA
ctacatcgaggaaaacggtgcgggtattaactatgtacgtaccaacgacagcggcttagcgttcaacgatgccag

SEQ ID NO: 399240 - DNA, 75 bp, synthetic construct
  source 1..75: mol_type = other DNA
aaaacggttttaaagttggtacttacgaagaactgatcccgcaggcggatctggtggttaacctgacgccggaca

SEQ ID NO: 399241 - DNA, 75 bp, synthetic construct
  source 1..75: mol_type = other DNA
ctgaacgggcgagtcatgcagttgagtcagcaggtgcagcacttgagcgagcggacagaacgcttgagccagtta

SEQ ID NO: 399242 - DNA, 75 bp, synthetic construct
  source 1..75: mol_type = other DNA
cgttgatacgggtatcgctctgggtagcagttctgtttccagccgtgtaatagttaaaggttctcgtgacaccag

SEQ ID NO: 399243 - DNA, 75 bp, synthetic construct
  source 1..75: mol_type = other DNA
aaggcgaaggcatggcgattgccaaagcgtgggcggcagccaccggtggtcaccgtgcgggcgtgctggaatcgt

SEQ ID NO: 399244 - DNA, 75 bp, synthetic construct
  source 1..75: mol_type = other DNA
cgcttgtgtgccgttgctgaaaccgtttatggcagagctgcaaccgggcgacctgggtaaagctattccggaagg

SEQ ID NO: 399245 - DNA, 75 bp, synthetic construct
  source 1..75: mol_type = other DNA
caccgtgcgggcgtgctggaatcgtccttcgttgcggaagtgaaatctgacctgatgggtgagcaaaccatcctg

SEQ ID NO: 399246 - DNA, 75 bp, synthetic construct
  source 1..75: mol_type = other DNA
cgcgaaagcagcgcgcagatgagcgtgaagcgtatggcaagtctgatcgagtacacaacagcatgggctattggt

SEQ ID NO: 399247 - DNA, 75 bp, synthetic construct
  source 1..75: mol_type = other DNA
tgaagcgtatggcaagcctgattgagtacacaacttcctgggctgtggataagggggtcagatttaccgacagga

SEQ ID NO: 399248 - DNA, 75 bp, synthetic construct
  source 1..75: mol_type = other DNA
ggtcatgcagtggcaacaaagcaggaagctgatgttttgcccgggcttgaaggcgaatacgtcaacattcgcgaa

SEQ ID NO: 399249 - DNA, 75 bp, synthetic construct
  source 1..75: mol_type = other DNA
cgatcgataccacgctggatgacgctctgttgtgggatgcaacagccaatggcggtaatggtgcatttagcgccg

SEQ ID NO: 399250 - DNA, 75 bp, synthetic construct
  source 1..75: mol_type = other DNA
gctcaaaaccaccaacgataatgtggcaaccaacaccaccaatatcgccacgaataccaccaacatcaccaacct

SEQ ID NO: 399251 - DNA, 75 bp, synthetic construct
  source 1..75: mol_type = other DNA
tgccggaaatgcgacggctattggcaataaagcggaggcaaatgggtcgaatagcatggcgatgggctctgggag

SEQ ID NO: 399252 - DNA, 75 bp, synthetic construct
  source 1..75: mol_type = other DNA
cgatctgggtaaagctattccagaaggtgcggtagataacgcgcaactgcgtgatgtaaatgatgcgattcgcag

SEQ ID NO: 399253 - DNA, 75 bp, synthetic construct
  source 1..75: mol_type = other DNA
gtagtcaggaaaaacaatgatgctacattcaattatctgaatgaaaataatgatgggatctatattcataaattc

SEQ ID NO: 399254 - DNA, 75 bp, synthetic construct
  source 1..75: mol_type = other DNA
attgcccgtaacgttcgctccctcatcctctggacagaacgcggagcagcccgtcacgccaaaatgctcgaaacc

SEQ ID NO: 399255 - DNA, 75 bp, synthetic construct
  source 1..75: mol_type = other DNA
gaaaccgatcaggcatgggatgtgttcgaaaaactggaagactgctatttcagccagtgcgagaaaaatactggc

SEQ ID NO: 399256 - DNA, 75 bp, synthetic construct
  source 1..75: mol_type = other DNA
aaagaaatgggctgggacccacagcttggttgtccaacccgcgaaacattgcagcgtctggggctggaagatatt

SEQ ID NO: 399257 - DNA, 75 bp, synthetic construct
  source 1..75: mol_type = other DNA
tctttcggggaaattaaagaatggagctacaacattacatacggtggtgaagttgcaggagctaatttaagtagt

SEQ ID NO: 399258 - DNA, 75 bp, synthetic construct
  source 1..75: mol_type = other DNA
gagtaatgggttaaatgatttgaagacgcagctcaaccaatggatggagatctttgatcaaaatttaaatgctgc

SEQ ID NO: 399259 - DNA, 75 bp, synthetic construct
  source 1..75: mol_type = other DNA
atcgcgctggcggacacgctgtcggattttggtatcgccaactcgattattcagcgtaaagccatcagccagatt

SEQ ID NO: 399260 - DNA, 75 bp, synthetic construct
  source 1..75: mol_type = other DNA
cgaactgccgctgattgctaacaccattgcccgtaagcgtctgtatgaaatgaacgtggttatctcggataccgc

SEQ ID NO: 399261 - DNA, 75 bp, synthetic construct
  source 1..75: mol_type = other DNA
aaccagggcctgaacatgcgtgattctggtctggatatctcctacgctctgcgtaaagaagcgattgccgagaag

SEQ ID NO: 399262 - DNA, 75 bp, synthetic construct
  source 1..75: mol_type = other DNA
gtttcatgccagaaaagttacgacacgcgagttctctgttatcagcaaggcggtgtcactgtttccacaattcag

SEQ ID NO: 399263 - DNA, 75 bp, synthetic construct
  source 1..75: mol_type = other DNA
ctggcacagctttaccgtaccgagatcaacaacatcaaagtaaattacacccgtaattccgagcgttttgttgag

SEQ ID NO: 399264 - DNA, 75 bp, synthetic construct
  source 1..75: mol_type = other DNA
tgatgcaaaaagagctggagtttaacaaaatcggctccattgagaccgcagcggtgctgtcgggctttaccttta

SEQ ID NO: 399265 - DNA, 75 bp, synthetic construct
  source 1..75: mol_type = other DNA
tggggcgcatggcgagcctcatagagtatacgactgcctgggctatcggtcagagcgtcaggttcactgacagga

SEQ ID NO: 399266 - DNA, 75 bp, synthetic construct
  source 1..75: mol_type = other DNA
atttattttatcctagtgaggccggaaacagtgataaggcgataatcacaccagcatcacttatcagagcgaact

SEQ ID NO: 399267 - DNA, 75 bp, synthetic construct
  source 1..75: mol_type = other DNA
aaaaggtaactttttctgttatctgaacgatcataacgagaacaccattgttgacccttcggtgatctatttcga

SEQ ID NO: 399268 - DNA, 75 bp, synthetic construct
  source 1..75: mol_type = other DNA
ggtgattcgctgctggtttcggcggtaaaacgcctgagcgatcgcctcggtatcactgtgcaacaggccgcccat

SEQ ID NO: 399269 - DNA, 75 bp, synthetic construct
  source 1..75: mol_type = other DNA
ggcgaacttcattttggttctctgatcgctgcgcttggcagctatctgcaagcacacgcccggcaaggtcgctgg

SEQ ID NO: 399270 - DNA, 75 bp, synthetic construct
  source 1..75: mol_type = other DNA
acgcattgaagatattgatccaccacgtgaagttcccggtgccgctgatactattctgcgccaactggaacatta

SEQ ID NO: 399271 - DNA, 75 bp, synthetic construct
  source 1..75: mol_type = other DNA
aaagaattgtttttggtggtagacttgctgaatatagatactatgatatgcatcaagtgattaggtcggcattta

SEQ ID NO: 399272 - DNA, 75 bp, synthetic construct
  source 1..75: mol_type = other DNA
agtgccccccgcagggctgactggagaaaagtaaaaaaattatgtgagattattttacgcaataagagtaaagat

SEQ ID NO: 399273 - DNA, 75 bp, synthetic construct
  source 1..75: mol_type = other DNA
ttggtgcaggcgtactcggcctgtccgtggcccgctccctggcgcaacagggagcaaaagtcactgtttttgagc

SEQ ID NO: 399274 - DNA, 75 bp, synthetic construct
  source 1..75: mol_type = other DNA
attgcggcgaacatcctggctatcagggaccaggaagagacgctggcgaaactccgggaaaaaacatggggtgtg

SEQ ID NO: 399275 - DNA, 75 bp, synthetic construct
  source 1..75: mol_type = other DNA
agactttgaatacgatacgtcaatgcatgatcaccagattacagagtggttgtctaaacctgaagagctggtgcg

SEQ ID NO: 399276 - DNA, 75 bp, synthetic construct
  source 1..75: mol_type = other DNA
atctttttacttttttcatactcatgaagatatacataatattttcgctaaaaccagacatgccattagtgaaat

SEQ ID NO: 399277 - DNA, 75 bp, synthetic construct
  source 1..75: mol_type = other DNA
ttgccggcggaacagcaggcgttttatgctgccttaaccccctcaacagataaagagatgacaagggagaaagcg

SEQ ID NO: 399278 - DNA, 75 bp, synthetic construct
  source 1..75: mol_type = other DNA
attactgcacctgtacgcgcgcacgtattcacagtattggcggtatctacgacggtcattgccgtgaattgcatc

SEQ ID NO: 399279 - DNA, 75 bp, synthetic construct
  source 1..75: mol_type = other DNA
gaagtaagcagcaacagcagtcagcaataaacgccatcctcgcatcaccactcgataacgaacgacccatcacca

SEQ ID NO: 399280 - DNA, 75 bp, synthetic construct
  source 1..75: mol_type = other DNA
ctggcgtacttagccaaaaccagaactaaggatgcccacagcggttaccgcaactttggcgcaagccagtgtcca

SEQ ID NO: 399281 - DNA, 75 bp, synthetic construct
  source 1..75: mol_type = other DNA
cttatggatggtgcagggaacgcgatacaagcgaacatccccattatcacctgatgttattgttcaacggagatg

SEQ ID NO: 399282 - DNA, 75 bp, synthetic construct
  source 1..75: mol_type = other DNA
atggtcgcagatatcgctaggcaagttcagtggcgcgataaatggttaaaaccagaacaatggaaggttttgttg

SEQ ID NO: 399283 - DNA, 75 bp, synthetic construct
  source 1..75: mol_type = other DNA
gtaagcagcaacagcagtcagcaataaacgccatcctcgcatcacccctcgacaccgacaaaccagtaaccatcc

SEQ ID NO: 399284 - DNA, 75 bp, synthetic construct
  source 1..75: mol_type = other DNA
tgaagcgtatggcaagtctgatcgagtacacaacagcatgggctattggtcagggtgtcagatttaccgacagga

SEQ ID NO: 399285 - DNA, 75 bp, synthetic construct
  source 1..75: mol_type = other DNA
tggcagcctgagttcacagataaaacactctccaggaaacccggggcggttcacaggatcatgcttcaggtgctc

SEQ ID NO: 399286 - DNA, 75 bp, synthetic construct
  source 1..75: mol_type = other DNA
cggcacttcattttctgggtcagcaggcagaagcacactggcaggatttcagcgtcgagcaaatccttcagtcag

SEQ ID NO: 399287 - DNA, 75 bp, synthetic construct
  source 1..75: mol_type = other DNA
attcatctaccgctggcgcttaatccacaaggcgctaaactttccaagcagaatcatgcgcctgcgttgccgaaa

SEQ ID NO: 399288 - DNA, 75 bp, synthetic construct
  source 1..75: mol_type = other DNA
cctatcgaccgcgatattctcatcccactacttaacatggtctacggtgcactggtgcagaataaccgaatacta

SEQ ID NO: 399289 - DNA, 75 bp, synthetic construct
  source 1..75: mol_type = other DNA
tactccttgcagttcgcaaaagtgaactaaccgaggctccttgggcagaattcgatttggatgagaaaaaatggt

SEQ ID NO: 399290 - DNA, 75 bp, synthetic construct
  source 1..75: mol_type = other DNA
tccccgctcgctattaagattcttgaagagctaaaggtcagagcttttggttctgattatgtattccctaaccgc

SEQ ID NO: 399291 - DNA, 75 bp, synthetic construct
  source 1..75: mol_type = other DNA
cgccgccagtatctgttttggcatcaatccctttctcggttatacgctggtgggcgttggtgcggcggcttattc

SEQ ID NO: 399292 - DNA, 75 bp, synthetic construct
  source 1..75: mol_type = other DNA
cttcgctatggtcgaaagggatgaaagcggttattgcggcgcagtttctctctgcgtttggcgataacgcgttgt

SEQ ID NO: 399293 - DNA, 75 bp, synthetic construct
  source 1..75: mol_type = other DNA
ttcgccaaaggccgggtgatgatgtttgccaacggcctgaagctgctgggcgcagccagtatctgctttggtatc

SEQ ID NO: 399294 - DNA, 75 bp, synthetic construct
  source 1..75: mol_type = other DNA
ggcttttttgtcgttccgctcaatgcgttgctacaggagcggggtaaaaaaagcgtcggggcggggaatgcgatt

SEQ ID NO: 399295 - DNA, 75 bp, synthetic construct
  source 1..75: mol_type = other DNA
gaattaaccacgggtagtaagttagtaaaagctaacggtttaatggaagcttctaccatagcggcgattttgctc

SEQ ID NO: 399296 - DNA, 75 bp, synthetic construct
  source 1..75: mol_type = other DNA
aacgcgtttttcgctggtaggcaccagtttgttctggggggcgggcgttacgttgcgtttcctgctggtgctgtg

SEQ ID NO: 399297 - DNA, 75 bp, synthetic construct
  source 1..75: mol_type = other DNA
ccaccacagaaattcgtaaggttccggcgctaggaaactgtgacaccatgagttttgtcagtgcgatcgttcagt

SEQ ID NO: 399298 - DNA, 75 bp, synthetic construct
  source 1..75: mol_type = other DNA
atgaacagcccacaaaattttacccttacgaacccggtaaaaaattttgcgttctgccccggacaggtgcgtcag

SEQ ID NO: 399299 - DNA, 75 bp, synthetic construct
  source 1..75: mol_type = other DNA
agaatggcaagagcttggaagcgtaaatgggatgtacctataagtggtttactcattgatacgcttgcgtatcaa

SEQ ID NO: 399300 - DNA, 75 bp, synthetic construct
  source 1..75: mol_type = other DNA
tggtggcgcttttggcttttctgcattagcaattgagttaccggtttcaacgacaattatgcttcgttcaattgc

SEQ ID NO: 399301 - DNA, 75 bp, synthetic construct
  source 1..75: mol_type = other DNA
gaatttggccttgatgaaaagttaatacaccgcccgggagaaaacgaagatgcaccagtgacccacgtctatgct

SEQ ID NO: 399302 - DNA, 75 bp, synthetic construct
  source 1..75: mol_type = other DNA
aaatccagcgtgcagtatcaatggatgaaaaggaaccactgacaatcgatcctgcagattcctctgtattaaccg

SEQ ID NO: 399303 - DNA, 75 bp, synthetic construct
  source 1..75: mol_type = other DNA
gcttatcctagctgtaaattgcccgatctgcgcggtgtttttatccgtggctgggataacgggaagggacttgat

SEQ ID NO: 399304 - DNA, 75 bp, synthetic construct
  source 1..75: mol_type = other DNA
tgaataacaacgacgcggtgaactatgcgcagttgaagcaaagtgtgcaggaaacgaagcaatacaccgatcagc

SEQ ID NO: 399305 - DNA, 75 bp, synthetic construct
  source 1..75: mol_type = other DNA
gaagccctggatgcgctcgataataacgcactgctgtgggatgcgaccgccaataacggcgcaggtgcttacagc

SEQ ID NO: 399306 - DNA, 75 bp, synthetic construct
  source 1..75: mol_type = other DNA
agttaaaggttctcgtaacaccagcgtatcggaagaaggtgttgtgattggttatgacaccacggatggcgaact

SEQ ID NO: 399307 - DNA, 75 bp, synthetic construct
  source 1..75: mol_type = other DNA
ggtacggtttctgcaaccagcaccgatgtagtaaacggctctcaattgtacgacctgcagcaggatgctctgttg

SEQ ID NO: 399308 - DNA, 75 bp, synthetic construct
  source 1..75: mol_type = other DNA
acggatggcgaactgcttggcgcgttgtcgattggtgatgacggtaaatatcgtcaaatcatcaacgtcgcggat

SEQ ID NO: 399309 - DNA, 75 bp, synthetic construct
  source 1..75: mol_type = other DNA
ggcgaaggtagtcaggccttcggaaaagtggccttggccactggggagaatgccattgccttgggtagtaacagc

SEQ ID NO: 399310 - DNA, 75 bp, synthetic construct
  source 1..75: mol_type = other DNA
gctatgacgcaacgttgggtgccctgctgggaggatatgtcacggacctgattgttgatgaaggaacggcagagt

SEQ ID NO: 399311 - DNA, 75 bp, synthetic construct
  source 1..75: mol_type = other DNA
cctatcccgtggccatctgccactcctccacaaggctatctgttgatgaacggccagtcgttttcctgttcccgg

SEQ ID NO: 399312 - DNA, 75 bp, synthetic construct
  source 1..75: mol_type = other DNA
cttactgggcccagggaagcacaacggaaatgcgccccaaaaacattgcctttaactacatcgtcaaagcaagct

SEQ ID NO: 399313 - DNA, 75 bp, synthetic construct
  source 1..75: mol_type = other DNA
aatggctcacagctctatagcactaataagtacatcgctgatgcgctgggtggtgatgcagaagtcaacgctgac

SEQ ID NO: 399314 - DNA, 75 bp, synthetic construct
  source 1..75: mol_type = other DNA
agccaactgattatggcgatggctcagcaggtgacggctgggttgctatcggtaaaggggcaaaagcaaatacct

SEQ ID NO: 399315 - DNA, 75 bp, synthetic construct
  source 1..75: mol_type = other DNA
gttgataccggtattgcgctgggtagcagctccgtttccagccgtgtgattgccaaaggttctcgtgacactagc

SEQ ID NO: 399316 - DNA, 75 bp, synthetic construct
  source 1..75: mol_type = other DNA
ggtggatgccacggcgctgccgtcgctggcagaacagttccacgttcaggggctggaaggctggctgtttgcccg

SEQ ID NO: 399317 - DNA, 75 bp, synthetic construct
  source 1..75: mol_type = other DNA
cagataagtacactcagccaggtatgggctgtggatattgcagatgctcgtacagagaatgggaagttgattttt

SEQ ID NO: 399318 - DNA, 75 bp, synthetic construct
  source 1..75: mol_type = other DNA
aaccctttctttctgccattatttcggtagccctgttttattcagcggcacctcatgcagatattcttgatggtg

SEQ ID NO: 399319 - DNA, 75 bp, synthetic construct
  source 1..75: mol_type = other DNA
ttgggggcagtgagtgtttgtctgcatgcaacagagaaaataatgatgaaaacagtatgtcactataaatttatt

SEQ ID NO: 399320 - DNA, 75 bp, synthetic construct
  source 1..75: mol_type = other DNA
gttgcatcaggattaattacttctggtaaggtagacataggttcttctgtttttgaacatgtttatttccttatg

SEQ ID NO: 399321 - DNA, 75 bp, synthetic construct
  source 1..75: mol_type = other DNA
atgcctctgaattgtctgattttatgttgagcttgcaggcagaggggacaccggcaacttggcaggcaggactaa

SEQ ID NO: 399322 - DNA, 75 bp, synthetic construct
  source 1..75: mol_type = other DNA
atgcctctgatgtttctgattttgagttgatgttgccggcagagggcacaccggcaacatggcaggcagggctaa

SEQ ID NO: 399323 - DNA, 75 bp, synthetic construct
  source 1..75: mol_type = other DNA
gcgtgataaaggggctctgccgtttctggaggggtatctgcatgaggtggctgagcgtggtggtcccggattcac

SEQ ID NO: 399324 - DNA, 75 bp, synthetic construct
  source 1..75: mol_type = other DNA
tcgtttatcttcgttgttattgatgaatcagaaatttggtggcggaatgagcgcagtggataacggacaggttat

SEQ ID NO: 399325 - DNA, 75 bp, synthetic construct
  source 1..75: mol_type = other DNA
tatccttttttattttgatatttataatcctgctttattcaggtatgtctcgtgcagatattcttgatggtggtg

SEQ ID NO: 399326 - DNA, 75 bp, synthetic construct
  source 1..75: mol_type = other DNA
atgcttcagcggtatcggattttgaactgcggttgccagcagagggtacacctgcagtatggcaggcggggctga

SEQ ID NO: 399327 - DNA, 75 bp, synthetic construct
  source 1..75: mol_type = other DNA
tagcgatttgtttttatttgtattgtccggataaaacagagaaaataaagatgaaaataacgcatcattataaat

SEQ ID NO: 399328 - DNA, 75 bp, synthetic construct
  source 1..75: mol_type = other DNA
gtgacccggagacggggaacgtgtcgggacagctttctttcaccctgaatcaggggatggcggtcagtacaggta

SEQ ID NO: 399329 - DNA, 75 bp, synthetic construct
  source 1..75: mol_type = other DNA
cagagcgtgacggatgtacagtcaggaacgctaccacaggggctgaaagcccgactctcttccctgttactgatg

SEQ ID NO: 399330 - DNA, 75 bp, synthetic construct
  source 1..75: mol_type = other DNA
attaagcaagccattgagctgcataaatataaaggaacgatttgggcggtacggcgggtactggaaatactttct

SEQ ID NO: 399331 - DNA, 75 bp, synthetic construct
  source 1..75: mol_type = other DNA
cgatgagcgggagaaacgcgagttaattaaacaagccattgaactgcataaatataaaggaacaatttgggcggt

SEQ ID NO: 399332 - DNA, 75 bp, synthetic construct
  source 1..75: mol_type = other DNA
aatataaaggaacaatttgggcggtgcggcgggtgctggaaatactctcattaccaggaactatttcagaatggt

SEQ ID NO: 399333 - DNA, 75 bp, synthetic construct
  source 1..75: mol_type = other DNA
gtgagattcgtgtacctcataaaggtgatattgttggaagggttatcgaaggtgcttacgaagttctgggaattt

SEQ ID NO: 399334 - DNA, 75 bp, synthetic construct
  source 1..75: mol_type = other DNA
taaaggaacagaagtacccgaaatcattcttcttaactcgcatgatggatcgtccagttatcaaatgatcccggg

SEQ ID NO: 399335 - DNA, 75 bp, synthetic construct
  source 1..75: mol_type = other DNA
ttaatgcacttatcgcattaattcacgaatataaaaatgttcgttcaaaacttgaaagcattaccatctggctta

SEQ ID NO: 399336 - DNA, 75 bp, synthetic construct
  source 1..75: mol_type = other DNA
ggattcaccccctttattaccttcagcagtaacggacagccttttactgtgacggaaggaaatggtacctcagca

SEQ ID NO: 399337 - DNA, 75 bp, synthetic construct
  source 1..75: mol_type = other DNA
cctgggtagtggatactgctgatgcgcgtacagataacgggcaactggtttttaatttgcgtgataaaggggctc

SEQ ID NO: 399338 - DNA, 75 bp, synthetic construct
  source 1..75: mol_type = other DNA
gtgccacagacaatggtcaggttatcagtcagggtattctggcggatggacgggtgatgaatcttgcagcgtcat

SEQ ID NO: 399339 - DNA, 75 bp, synthetic construct
  source 1..75: mol_type = other DNA
acaacggtaaacggtgcagtctggtctgccagaccgatagatacattacagaacatcctggtcgaggtactggca

SEQ ID NO: 399340 - DNA, 75 bp, synthetic construct
  source 1..75: mol_type = other DNA
ttatcgagaagaacaaacaaaaggcgctgcactggttgaacctgagctgtatggaagggtttgataccgggtgtg

SEQ ID NO: 399341 - DNA, 75 bp, synthetic construct
  source 1..75: mol_type = other DNA
gctgtataacgataatcctgaagttgtaacgctggcagcgcatttaatgttgctggcggcggtgtatcagatttc

SEQ ID NO: 399342 - DNA, 75 bp, synthetic construct
  source 1..75: mol_type = other DNA
gcaacacagccatttctactggtcaatttgcaacggcttttgggggggcggcaacagcagaaggggtagcttcta

SEQ ID NO: 399343 - DNA, 75 bp, synthetic construct
  source 1..75: mol_type = other DNA
gtgtctttaaagacctggcctctaatatggtgcaggctttcactgctcgtgcaaaagaggtttacagtgtccggt

SEQ ID NO: 399344 - DNA, 75 bp, synthetic construct
  source 1..75: mol_type = other DNA
ctacaccaacttatgccatcgctggcggcagttacaacaacgtcggtgacgcgctggaagcgatcgataccacgc

SEQ ID NO: 399345 - DNA, 75 bp, synthetic construct
  source 1..75: mol_type = other DNA
atcaggtgacgaatctggatactcgcgttaccaatatcgaaaacggtattggcgatatcgtaaccacaggtagca

SEQ ID NO: 399346 - DNA, 75 bp, synthetic construct
  source 1..75: mol_type = other DNA
gtggaggcgcatcggtaaacgttgacgacggtacagttaaagcccccgcctacaacttaaaaaatggtaacaaaa

SEQ ID NO: 399347 - DNA, 75 bp, synthetic construct
  source 1..75: mol_type = other DNA
caagtacttcaagaccaacaccgatggcgtagatgctaacgcccagggtaaagacagtgtggcgattggttctgg

SEQ ID NO: 399348 - DNA, 75 bp, synthetic construct
  source 1..75: mol_type = other DNA
gcgattggtagcctgtccaacgtaaccggtgttaactccgttgctctgggcacagagtctactgccgtggaagat

SEQ ID NO: 399349 - DNA, 75 bp, synthetic construct
  source 1..75: mol_type = other DNA
tcggcagtggagctagtgccattggcgactatacagttgcattagcggttggctccagtgctagcggtgagagtg

SEQ ID NO: 399350 - DNA, 75 bp, synthetic construct
  source 1..75: mol_type = other DNA
atgcgggtattggtatcggcctgaatactctggttctggcagatgccatcaacggtattgctatcggttctaacg

SEQ ID NO: 399351 - DNA, 75 bp, synthetic construct
  source 1..75: mol_type = other DNA
ttggtggcggtacttacaacggtgaatcggctgttgctttaggtgtgtcgatggtgagcgccaatggtcgttggg

SEQ ID NO: 399352 - DNA, 75 bp, synthetic construct
  source 1..75: mol_type = other DNA
gccctggatgcgctcgataataacgcgctgctgtgggatgaagacgcaggtgcctacaacgccagccatgatggc

SEQ ID NO: 399353 - DNA, 75 bp, synthetic construct
  source 1..75: mol_type = other DNA
accgatgccagcgcagcaggtattggctctaccgctgtggggtataacactgttgccaaaggcgatagcagcgtg

SEQ ID NO: 399354 - DNA, 75 bp, synthetic construct
  source 1..75: mol_type = other DNA
gccgtgtaatagttaaaggttctcgtgacaccagcgtatcggaagaaggtgttgtgattggttatgacacaactg

SEQ ID NO: 399355 - DNA, 75 bp, synthetic construct
  source 1..75: mol_type = other DNA
cactgacgccgttaacggctcccagctcaaaaccaccaacgagaacgtgacgaccaacaccaccaacatcgccac

SEQ ID NO: 399356 - DNA, 75 bp, synthetic construct
  source 1..75: mol_type = other DNA
cactgacgccgttaacggctcccagctcaaaaccaccaacgaaaacgtggcgaccaacaccaccaacatcgccac

SEQ ID NO: 399357 - DNA, 75 bp, synthetic construct
  source 1..75: mol_type = other DNA
cactgacgccgttaacggctctcagctcaaaaccaccaacgacaacgtgtcgaccaacaccaccaacatcgccac

SEQ ID NO: 399358 - DNA, 75 bp, synthetic construct
  source 1..75: mol_type = other DNA
ggatgcgacagccaatgacggtgctggtgcattcagcgccggtcgcggggtagataacaccgccagtaagattac

SEQ ID NO: 399359 - DNA, 75 bp, synthetic construct
  source 1..75: mol_type = other DNA
cactgacgccgttaacggctcgcagctcaaaaccaccaacgacaacgtgacgaccaacaccaccaacatcgccac

SEQ ID NO: 399360 - DNA, 75 bp, synthetic construct
  source 1..75: mol_type = other DNA
cactgacgccgttaacggctcgcagctcaaaaccaccaacgaaaacgtgccgaccaacaccaccaacatcgccac

SEQ ID NO: 399361 - DNA, 75 bp, synthetic construct
  source 1..75: mol_type = other DNA
gaagacgccctgaaatgggacgacgccgcaggcgcattcaccgctgcacacggcactaacgccaccaacaaaatc

SEQ ID NO: 399362 - DNA, 75 bp, synthetic construct
  source 1..75: mol_type = other DNA
gattcattcacgtcctatctgggtggtggtgctgatattagcgatacaggtgtattaaccgggccaacctatagt

SEQ ID NO: 399363 - DNA, 75 bp, synthetic construct
  source 1..75: mol_type = other DNA
gggtctacaaattacaaggtagtaccaatagccagggtgaatactccgccgcactcggtgccggtattcagtggt

SEQ ID NO: 399364 - DNA, 75 bp, synthetic construct
  source 1..75: mol_type = other DNA
cactgacgccgttaacggctcacagctcaaaaccaccaacgagaacgtgccgaccaacaccaccaacatcgccac

SEQ ID NO: 399365 - DNA, 75 bp, synthetic construct
  source 1..75: mol_type = other DNA
cactgacgccgttaacggctcacagctcaaaaccaccaacgacaacgtggcgaccaacaccaccaacatcgccac

SEQ ID NO: 399366 - DNA, 75 bp, synthetic construct
  source 1..75: mol_type = other DNA
aaaggcgatagcagcgtggccatgggttataactctgttgcttccaaagccagcagcgtagccatcggtcaggac

SEQ ID NO: 399367 - DNA, 75 bp, synthetic construct
  source 1..75: mol_type = other DNA
gttaatggtaatgcgggtattggtatcggcctgaacacgctggttctggctgatgcgatcaacggtattgctatc

SEQ ID NO: 399368 - DNA, 75 bp, synthetic construct
  source 1..75: mol_type = other DNA
cttgatgacgcggcagagcaaaaatgtattctggaatcaatccagcaactcaaagttaaaacgtcgtccccgacc

SEQ ID NO: 399369 - DNA, 75 bp, synthetic construct
  source 1..75: mol_type = other DNA
acattaccaaaaccttcggcaccgtgaaggcgatagataacgtcagcttgcggctaaacgctggcgaaatcgtct

SEQ ID NO: 399370 - DNA, 75 bp, synthetic construct
  source 1..75: mol_type = other DNA
aaagctgatggctctatcgactacagcaacatcactcttggtggtggcaacggaggtacgactcgcatcagcaac

SEQ ID NO: 399371 - DNA, 75 bp, synthetic construct
  source 1..75: mol_type = other DNA
tgactggcgatgttgctaacaacaccaccaacatcactaatctgactgatacggtgaatagcctcggtgaagatg

SEQ ID NO: 399372 - DNA, 75 bp, synthetic construct
  source 1..75: mol_type = other DNA
ggcggcgtgcgctatgacaccaaagctgacggttctgttgattacagcaacatcactctcggcggtggtaatggc

SEQ ID NO: 399373 - DNA, 75 bp, synthetic construct
  source 1..75: mol_type = other DNA
gatgccctgctatgggatggcactgcgtttagcgccaaacatggcaccagcaatactgacagcaaaatcaccaac

SEQ ID NO: 399374 - DNA, 75 bp, synthetic construct
  source 1..75: mol_type = other DNA
agcagcgtggccatgggtcagggcagctacagcgacgttgatacgggtatcgctctgggtagcagttccgtttcc

SEQ ID NO: 399375 - DNA, 75 bp, synthetic construct
  source 1..75: mol_type = other DNA
actgtccaaaaccgaaagcaagttgagcggtggtatcgcttccgcaatggcaatgaccggtctgccgcaggctta

SEQ ID NO: 399376 - DNA, 75 bp, synthetic construct
  source 1..75: mol_type = other DNA
gcgggtattggtatcggcctgaacactttagttctggctgatgcgatcaacggtattgctatcggttctaacgca

SEQ ID NO: 399377 - DNA, 75 bp, synthetic construct
  source 1..75: mol_type = other DNA
gaaaactgtcgttaatggtaatgcaggtattggtatcggtttgaacactctggttctggctgatgcgatcaacgg

SEQ ID NO: 399378 - DNA, 75 bp, synthetic construct
  source 1..75: mol_type = other DNA
taaagctactgagattatgagtattgctcttggcgacaccgccaatgcgtcaaaagcgtattcaatggcgctggg

SEQ ID NO: 399379 - DNA, 75 bp, synthetic construct
  source 1..75: mol_type = other DNA
atcggtcagggcagctacagcggcgttgagacgagtattgcgctgggtagcgaatccgtctccagccgtgtgatt

SEQ ID NO: 399380 - DNA, 75 bp, synthetic construct
  source 1..75: mol_type = other DNA
acggtaactaaccttggtgcggatgcgctggcatgggatgacgcctcaggtgcattcaccgccaaacacggcacc

SEQ ID NO: 399381 - DNA, 75 bp, synthetic construct
  source 1..75: mol_type = other DNA
ccgcttacaatatggatgccccgcaaaactcggtgggtgaattctctgtaggcagcaccaatggtcagaggcaaa

SEQ ID NO: 399382 - DNA, 75 bp, synthetic construct
  source 1..75: mol_type = other DNA
gctcagcattcagcgcgaaacacggcaccaacgccaccagcaaaatcaccaacgtcaccgccggggacttaaccg

SEQ ID NO: 399383 - DNA, 75 bp, synthetic construct
  source 1..75: mol_type = other DNA
cgacgctgttaacggctcgcagttgtatgatctgaaacaggatgctctgttgtggaatggcacagcgttcagcgc

SEQ ID NO: 399384 - DNA, 75 bp, synthetic construct
  source 1..75: mol_type = other DNA
gtgggatgaagacgcaggtgcctacaacgccagccatgatggcaatgccagcaaaattaccaacgttgcggcagg

SEQ ID NO: 399385 - DNA, 75 bp, synthetic construct
  source 1..75: mol_type = other DNA
acgcgcaaatcatgccgacagcattgcaatgggtaatggttctcagactacccgtggcgcgcagaccaactacac

SEQ ID NO: 399386 - DNA, 75 bp, synthetic construct
  source 1..75: mol_type = other DNA
caggaaacaggagcattgcaatcggcagcggttctatggcaaaaggaggatattctattgcgatgggcctgtcat

SEQ ID NO: 399387 - DNA, 75 bp, synthetic construct
  source 1..75: mol_type = other DNA
accagtaccgatgctgttaacggttcccagttaaacgcaaccaatatcttggttacgcaaaatagccaaatgatt

SEQ ID NO: 399388 - DNA, 75 bp, synthetic construct
  source 1..75: mol_type = other DNA
gtgaagccctggatgcgctcgataataacgcgctgctgtgggatgaagacgcaggtgcctacaacgccagccatg

SEQ ID NO: 399389 - DNA, 75 bp, synthetic construct
  source 1..75: mol_type = other DNA
catcaggtactggcgctacagcggtgggttataacgctgtcgcttccggcgaaagcagtgtcgcaattggtcaga

SEQ ID NO: 399390 - DNA, 75 bp, synthetic construct
  source 1..75: mol_type = other DNA
tgatgacggtaaatatcgtcaaatcatcaacgtcgcggatggttctgaagcccatgatgcggtcactgttcgcca

SEQ ID NO: 399391 - DNA, 75 bp, synthetic construct
  source 1..75: mol_type = other DNA
tgggtggtgatgcagaagtcaacgctgacggtactatcactgcaccgacttacaccattgcaaataccgattaca

SEQ ID NO: 399392 - DNA, 75 bp, synthetic construct
  source 1..75: mol_type = other DNA
caggaatcgacaataataccctacaatggaataaaaccgcgggggcgttcagcgccaatcacggtgcaaatgcca

SEQ ID NO: 399393 - DNA, 75 bp, synthetic construct
  source 1..75: mol_type = other DNA
atggatgatcttatctggacgacgccaggagagcattccaagatgggtaacgttatccgtcgaccggtgttcgat

SEQ ID NO: 399394 - DNA, 75 bp, synthetic construct
  source 1..75: mol_type = other DNA
cgtagtcgtcggtgagatgcgcgaattgtacctcaagggactaaacccgaaaaattattttgccaaagaagatgg

SEQ ID NO: 399395 - DNA, 75 bp, synthetic construct
  source 1..75: mol_type = other DNA
gaggcctctacggaaaaccctactctggccctgctgaaatcaccgatggtgacgggttaagtgtgcggattactc

SEQ ID NO: 399396 - DNA, 75 bp, synthetic construct
  source 1..75: mol_type = other DNA
cagtaacggacgatgacatacagcagcgtgtgctgtatgcagccggggaattaggctgggaagtgcactttcttg

SEQ ID NO: 399397 - DNA, 75 bp, synthetic construct
  source 1..75: mol_type = other DNA
atgatggtgctatctgccttgaggatgatgaaggacagcattactttgaacaatacaatttgcggggtaatgcca

SEQ ID NO: 399398 - DNA, 75 bp, synthetic construct
  source 1..75: mol_type = other DNA
gttcgcctctccattggccgctatcccgctatgtctctcaaggaggcgcgcgttgtcgtcggtgagatgcgcgaa

SEQ ID NO: 399399 - DNA, 75 bp, synthetic construct
  source 1..75: mol_type = other DNA
aaaagttctggtactgactgaacgtacagatcatctggatgagatagcatcagtgatgaattcactgaaattgtc

SEQ ID NO: 399400 - DNA, 75 bp, synthetic construct
  source 1..75: mol_type = other DNA
gggatgtatccgttgctggaagatgattcctgttattttctggctgttgattttgatgaagctgaatggcagaag

SEQ ID NO: 399401 - DNA, 75 bp, synthetic construct
  source 1..75: mol_type = other DNA
actggtgctctgcgtgcgtgaaacgccgctgcacttaggacacttgcgtttaatgactcaggctgcggaaattgg

SEQ ID NO: 399402 - DNA, 75 bp, synthetic construct
  source 1..75: mol_type = other DNA
aatcagtcatcgaagcctgcaagcgcagcgaaatcatgaagcgaattctgtttatctacggcgctgcattccgtt

SEQ ID NO: 399403 - DNA, 75 bp, synthetic construct
  source 1..75: mol_type = other DNA
aatcagtcatcgaagcctgcaagcgcagcgaaatcatgaagcgaattctgtttatctacggcgctggtggagatc

SEQ ID NO: 399404 - DNA, 75 bp, synthetic construct
  source 1..75: mol_type = other DNA
tctggatattttttgcctcacgagtttcggcccgcgaagctcgccgtctggggactgctattattagctatacgt

SEQ ID NO: 399405 - DNA, 75 bp, synthetic construct
  source 1..75: mol_type = other DNA
gcgaaacagcccatcatcacagggaaaagacactgtttctgaaatgtggcctgagagaacgctggaaatgacgtg

SEQ ID NO: 399406 - DNA, 75 bp, synthetic construct
  source 1..75: mol_type = other DNA
cgcagaggaaatgataaggttttacaacaactttcaattgatatattacatgcagcaacaacccaaaccttagct

SEQ ID NO: 399407 - DNA, 75 bp, synthetic construct
  source 1..75: mol_type = other DNA
gctggcgattttacaaaatcgcttaactctctctgacgcgcaagacgctaactatctgttacaacgccatttacg

SEQ ID NO: 399408 - DNA, 75 bp, synthetic construct
  source 1..75: mol_type = other DNA
gacggactctgttttattcgtgacggcgaacctgtcacgcttgactggaaaggatatgatcattttgccacgcca

SEQ ID NO: 399409 - DNA, 75 bp, synthetic construct
  source 1..75: mol_type = other DNA
ctgaacagaccggtcggagcacgggccgatcttgaggcagtgcgcgtgttggtgaagctgaatggcgatcttggc

SEQ ID NO: 399410 - DNA, 75 bp, synthetic construct
  source 1..75: mol_type = other DNA
gaccttggccgggtggccgggttgttgaaattgtggcttgcggagaagcgtgggcagagtgcccggtctatggac

SEQ ID NO: 399411 - DNA, 75 bp, synthetic construct
  source 1..75: mol_type = other DNA
atggaaagagtctttcgcagccttaaaagtgaatggcttccgaaaggtggttatggtgattttatccatgcggta

SEQ ID NO: 399412 - DNA, 75 bp, synthetic construct
  source 1..75: mol_type = other DNA
gttgatatgaatttccagccttattctgatcaatgggcttttcttgcatcggtgatcccgatgaatgtgcagaat

SEQ ID NO: 399413 - DNA, 75 bp, synthetic construct
  source 1..75: mol_type = other DNA
cataaaccctgtggcaatattgatattgcggtggtgcagtccatatccagacaaggagaagttgaacctctggtc

SEQ ID NO: 399414 - DNA, 75 bp, synthetic construct
  source 1..75: mol_type = other DNA
gattttgggagcctgcatctggatattgaggacagcagcttcattaacaacattacgtttgggatgaaaacggtg

SEQ ID NO: 399415 - DNA, 75 bp, synthetic construct
  source 1..75: mol_type = other DNA
atgatgaaaaaaaaacatctactgactattgaaattcggccaccaatggatgcttgcattgccagcgcggacaat

SEQ ID NO: 399416 - DNA, 75 bp, synthetic construct
  source 1..75: mol_type = other DNA
atttgggccggtgcaatgatgctggatttcctcggtaatggcgatgaacgattccagcaagcacataatggtatt

SEQ ID NO: 399417 - DNA, 75 bp, synthetic construct
  source 1..75: mol_type = other DNA
agctgcagccgacaaaaaagcagcagaaaaagcggctgctgaaaaggcagcagctgataagaaagcagcggcaga

SEQ ID NO: 399418 - DNA, 75 bp, synthetic construct
  source 1..75: mol_type = other DNA
atgcaagcgtagatctaaatcctcatcaaattgaggcggctctttttgctattgaaaatccgctaagcaaaggtg

SEQ ID NO: 399419 - DNA, 75 bp, synthetic construct
  source 1..75: mol_type = other DNA
taccatgcagggacgtcgttggtccgatggcctgcatcaggcagtggaagcgaaagaaggtgtacagatccagaa

SEQ ID NO: 399420 - DNA, 75 bp, synthetic construct
  source 1..75: mol_type = other DNA
cgaaatgcgtaccggtgaaggaaaaaccctgaccgcaacgctgcctgcttacctgaacgcactaaccggtaaagg

SEQ ID NO: 399421 - DNA, 75 bp, synthetic construct
  source 1..75: mol_type = other DNA
tcaggcgtttcaaccgctaccgcgatttggtgatagctacacgctgattggtagctgggttgtcgatgatgaagc

SEQ ID NO: 399422 - DNA, 75 bp, synthetic construct
  source 1..75: mol_type = other DNA
aactgggtatgaaacctggtgaagcgattgaacacccttgggtaaccaaagcaattgccaacgcccagcgtaaag

SEQ ID NO: 399423 - DNA, 75 bp, synthetic construct
  source 1..75: mol_type = other DNA
tgccctgtttacccgcgacgttgattacatcgttaaagatggtgaagttatcatcgttgacgaacatactggtcg

SEQ ID NO: 399424 - DNA, 75 bp, synthetic construct
  source 1..75: mol_type = other DNA
tgctggaaaatctgatcccggaagctttcgccgtggtgcgtgaggcaagtaagcgcgtctttggcatgcgtcact

SEQ ID NO: 399425 - DNA, 75 bp, synthetic construct
  source 1..75: mol_type = other DNA
aatatgccgggcagtcttccgatagcgttttatatttcctgaaacgcgcaggcggcatcgactccgaccgcggca

SEQ ID NO: 399426 - DNA, 75 bp, synthetic construct
  source 1..75: mol_type = other DNA
ccagttataccgaaccggaatctaaactcatactgtctgatgaaccatctgtttccgttttcaaggacggctcag

SEQ ID NO: 399427 - DNA, 75 bp, synthetic construct
  source 1..75: mol_type = other DNA
tcctgatgttctgttctgtgttcagtgctttttcaaacgcagaatcgataatggtttccggtaccctggaaacgt

SEQ ID NO: 399428 - DNA, 75 bp, synthetic construct
  source 1..75: mol_type = other DNA
tgcgtattgaaaatgcaatggttgactcaggtaaatgtatggctcccataaattatttaatacatcagttcctgg

SEQ ID NO: 399429 - DNA, 75 bp, synthetic construct
  source 1..75: mol_type = other DNA
caaaaccaggaattatttcaggtctggttacaaaaattagcgcaatggcaacagaccaccacgccttatcttttc

SEQ ID NO: 399430 - DNA, 75 bp, synthetic construct
  source 1..75: mol_type = other DNA
acagttaccgtcgaaggtaaagatgaagtgttcgcgctgagtaatatccagaaggcgaacttggttccccacttt

SEQ ID NO: 399431 - DNA, 75 bp, synthetic construct
  source 1..75: mol_type = other DNA
caataatcgatatcaaaacagaaaaatgtatcggcgctgaagcgttgttacgttggcttggtgagcaggggcaaa

SEQ ID NO: 399432 - DNA, 75 bp, synthetic construct
  source 1..75: mol_type = other DNA
atgattggtacaacaccttatcatgcgaaatattttgcgcatgaactttccattcttcattcaaacaatggggtg

SEQ ID NO: 399433 - DNA, 75 bp, synthetic construct
  source 1..75: mol_type = other DNA
cgtggggatttctcgttattttcatgtttccgtcccgttaaacgatactagcgattatactggaacaaatggaga

SEQ ID NO: 399434 - DNA, 75 bp, synthetic construct
  source 1..75: mol_type = other DNA
atccagctaccgctgtatctacatggagcgggtacgtttaccaaggaaaagttgcgctctaccactgcctcaagc

SEQ ID NO: 399435 - DNA, 75 bp, synthetic construct
  source 1..75: mol_type = other DNA
tgaaaggttgcagaaagagctggaagatgaaatcaatctcaagatgcagaagacgcaagaacagttgcttgagca

SEQ ID NO: 399436 - DNA, 75 bp, synthetic construct
  source 1..75: mol_type = other DNA
tttgatggcgtgtttggcgcatcggatagtgtgcttggcagcatagaaaatggtgtggattttgaaaaaaggatc

SEQ ID NO: 399437 - DNA, 75 bp, synthetic construct
  source 1..75: mol_type = other DNA
ggatcttctcgtattaccgggtcggcgcaaattgataaacgctcggctttgatcgaccacttcaaagatcatgct

SEQ ID NO: 399438 - DNA, 75 bp, synthetic construct
  source 1..75: mol_type = other DNA
ggacacgaaccaaagtacacatattgtcgtatctacagcttcgactaccagaacttttacgcgcgagagtttgct

SEQ ID NO: 399439 - DNA, 75 bp, synthetic construct
  source 1..75: mol_type = other DNA
attctccgatcccattcatcattgaggacaccaatcaaagcacgcatgttgttgtgcaaagcgctacaacaacac

SEQ ID NO: 399440 - DNA, 75 bp, synthetic construct
  source 1..75: mol_type = other DNA
tcgcagaatggaaagcctttgttgacttgtgccgtaatgctgacggcaaagcgtctaacattgttgagtctgtat

SEQ ID NO: 399441 - DNA, 75 bp, synthetic construct
  source 1..75: mol_type = other DNA
cgctgtagatttgaaggctagacttcaagcccacctagaaagcaggcttgactcatctcttcctgggatgagtga

SEQ ID NO: 399442 - DNA, 75 bp, synthetic construct
  source 1..75: mol_type = other DNA
ggcaggccgtaaacaaatccgcattcgtggctggatttgcccctatatttccagacatctgttatcacttaaccc

SEQ ID NO: 399443 - DNA, 75 bp, synthetic construct
  source 1..75: mol_type = other DNA
aacaccctgtctcgcttaagagtgggtgcgcacggggcgctggtgttctcacgcaataaagaattgaagatccct

SEQ ID NO: 399444 - DNA, 75 bp, synthetic construct
  source 1..75: mol_type = other DNA
attgatgcactctcaccgcaaggtgaagtgacaacacaagccaataacgatctgctttccgcaggcatggaactg

SEQ ID NO: 399445 - DNA, 75 bp, synthetic construct
  source 1..75: mol_type = other DNA
tcattgctatcgatatggatggcacccttctgctgcccgatcacaccatttcacccgccgttaaaaatgcgattg

SEQ ID NO: 399446 - DNA, 75 bp, synthetic construct
  source 1..75: mol_type = other DNA
atcggcgctcggcacaaatgcggtgtccgatctcgggcaaaaacttggcgtggataccagtacagcttccagttt

SEQ ID NO: 399447 - DNA, 75 bp, synthetic construct
  source 1..75: mol_type = other DNA
caggacatgatcaacgccggaaaattcccgaaaggcttcaaaatcggtctgcgtcgtgttggctggtatgaagat

SEQ ID NO: 399448 - DNA, 75 bp, synthetic construct
  source 1..75: mol_type = other DNA
attgatgcgctctcaccgcagggtgaagtgtctccgcaagccaataacgacctgctttccgcaggtatggaactg

SEQ ID NO: 399449 - DNA, 75 bp, synthetic construct
  source 1..75: mol_type = other DNA
attgatgccctctcgccgcagggcgaagtttcgccgcaagccaataacgatttgctttccgcagggatggaactg

SEQ ID NO: 399450 - DNA, 75 bp, synthetic construct
  source 1..75: mol_type = other DNA
ctgtttaaaccatgggcgctgtttaagcgtcaggatctgaaaattgccgttattggtctgacgacggatgacaca

SEQ ID NO: 399451 - DNA, 75 bp, synthetic construct
  source 1..75: mol_type = other DNA
ccagcaaatgatctcgctgttatcaccgttccagaacaaaggcaaagcgcagttggaagtgaaaataggcgaaac

SEQ ID NO: 399452 - DNA, 75 bp, synthetic construct
  source 1..75: mol_type = other DNA
cattagcactattagccgcatttacactggcgagtgaaaccgcccaggcttatgagcaggataaaacctacaaaa

SEQ ID NO: 399453 - DNA, 75 bp, synthetic construct
  source 1..75: mol_type = other DNA
acaatctcgcccgcttcatagccgttgggaatcgtcaggatctgaaaattgccgttattggcctgacgacggatg

SEQ ID NO: 399454 - DNA, 75 bp, synthetic construct
  source 1..75: mol_type = other DNA
aaaatcaaaggcgaaccggtcgatccggcgaaaacttaccgtatggcgacattaaacttcaatgccaccggcggt

SEQ ID NO: 399455 - DNA, 75 bp, synthetic construct
  source 1..75: mol_type = other DNA
aagccggatcaacaaaacggcatctggattgtccaggcgcatgagtggggcaagtatgtgggacgagccgatttt

SEQ ID NO: 399456 - DNA, 75 bp, synthetic construct
  source 1..75: mol_type = other DNA
gcgtcgcgttggctggtttgaggatgaggtgaaatcatggcttgagaagaaagtagaggagcgttatcagcagga

SEQ ID NO: 399457 - DNA, 75 bp, synthetic construct
  source 1..75: mol_type = other DNA
cgatggtgcgatggatattaccgtcgggccgctggtgaatctgtggggctttggcccggaacaacagccggttca

SEQ ID NO: 399458 - DNA, 75 bp, synthetic construct
  source 1..75: mol_type = other DNA
tgttggttgcgatcaaaaaccacaacccgccaaaacccacgctactgaagttaccgttcttgaaggcaaaaccat

SEQ ID NO: 399459 - DNA, 75 bp, synthetic construct
  source 1..75: mol_type = other DNA
caccgccggacgatggcggcaatgtcacaccaccggacgatggcggcaatgtcacaccaccggacgatggcggaa

SEQ ID NO: 399460 - DNA, 75 bp, synthetic construct
  source 1..75: mol_type = other DNA
ggctgtggtggatatcaacggtcatggcattagcacctctggcagctaccgtaactattacgaactggacggcaa

SEQ ID NO: 399461 - DNA, 75 bp, synthetic construct
  source 1..75: mol_type = other DNA
atctggtgtccgtgacggtaattgccccgacggcgctggaagccgatgcctgggacaccgggttaatggttctcg

SEQ ID NO: 399462 - DNA, 75 bp, synthetic construct
  source 1..75: mol_type = other DNA
ccgtggcgggtagcgattcaaaaaccaaccgataaagaaaacgcggttcaggccgtggtggatatcaacggtcat

SEQ ID NO: 399463 - DNA, 75 bp, synthetic construct
  source 1..75: mol_type = other DNA
tctgaaaacaacgcatttatctcagttcgtccctgactacgttgagtctctgaaagattgtccggtttcgtatga

SEQ ID NO: 399464 - DNA, 75 bp, synthetic construct
  source 1..75: mol_type = other DNA
ctacttcagatgcagaatatgaacgaatgaaaaatattcgtacagtcaaaaaggtgttttcagagatgttagtca

SEQ ID NO: 399465 - DNA, 75 bp, synthetic construct
  source 1..75: mol_type = other DNA
gcagatcaatgtaccgggtcgaaaatatacagtgacagagaatcatttctcatctacaacgcagagcaatgatat

SEQ ID NO: 399466 - DNA, 75 bp, synthetic construct
  source 1..75: mol_type = other DNA
gaacaattagcaaaattaccaccagagtgcactaccactcaggaacgaattattacgccatggactgctgtgggc

SEQ ID NO: 399467 - DNA, 75 bp, synthetic construct
  source 1..75: mol_type = other DNA
aaaacgtcaggtctggttgtgattggcgatggcaataccgttaatatgaatggtggacttgaactgattggagag

SEQ ID NO: 399468 - DNA, 75 bp, synthetic construct
  source 1..75: mol_type = other DNA
aaaagtggtcgggcagaaagcgacgggcataaacgtttctggcgatgcgaatacagtgaatatcactggtaacgt

SEQ ID NO: 399469 - DNA, 75 bp, synthetic construct
  source 1..75: mol_type = other DNA
gaacctgaagaagaaagtgacctgggagacgggaaaagcgagcgcgtgctttacactcctgaaatcgctgaaaac

SEQ ID NO: 399470 - DNA, 75 bp, synthetic construct
  source 1..75: mol_type = other DNA
cgaaaatggagcatggaaagacgctgttgactgggtactcaaagaggcttgcaaggctgtaaacattagcatcaa

SEQ ID NO: 399471 - DNA, 75 bp, synthetic construct
  source 1..75: mol_type = other DNA
cgacaatccactagcatccagtaatcaggttggcgaattaacaatgtgggttaaacgactggtcagtcaactgaa

SEQ ID NO: 399472 - DNA, 75 bp, synthetic construct
  source 1..75: mol_type = other DNA
aaaagccaagccggactgcaaattaccggagaaggcgatggactacctgaagcgaaacggactgataagcgtgga

SEQ ID NO: 399473 - DNA, 75 bp, synthetic construct
  source 1..75: mol_type = other DNA
gtgaaaaaaggcattacggactcacagggggagccgtgggttggtgactggaaatatgtaccgacaaaagaggat

SEQ ID NO: 399474 - DNA, 75 bp, synthetic construct
  source 1..75: mol_type = other DNA
tgagaatccgccagtcgaaaccggagcatggaaagacgctgttgactgggtgctcaaagaggcttgccagtctgt

SEQ ID NO: 399475 - DNA, 75 bp, synthetic construct
  source 1..75: mol_type = other DNA
aaaaatagcgattacgaaatgccaccccaattcagggatggcgcgagtagagggcgagttattcaaaattgcact

SEQ ID NO: 399476 - DNA, 75 bp, synthetic construct
  source 1..75: mol_type = other DNA
gagtccctctcgatgcgaatcaccgcgaccaacgggcagcttccgcgcagggcgctggaaagtacgctcctggac

SEQ ID NO: 399477 - DNA, 75 bp, synthetic construct
  source 1..75: mol_type = other DNA
cacaccgaaatttacagcgtcgataacattcacggctcggtgaagaacggcagcacccttatgtcccgttcacca

SEQ ID NO: 399478 - DNA, 75 bp, synthetic construct
  source 1..75: mol_type = other DNA
cagcttgctccaggccttagccacttcggcgcttgctagagaaccttggccagctattgaaccgcaggatctggc

SEQ ID NO: 399479 - DNA, 75 bp, synthetic construct
  source 1..75: mol_type = other DNA
atgagcgagattaattatcaggaagggcatgaaaaggtagggcaggcaaaaccagtggcatggcgatatcgctac

SEQ ID NO: 399480 - DNA, 75 bp, synthetic construct
  source 1..75: mol_type = other DNA
acgacctgccgtttgacagcgataatatccgtctgcactgcgtgccggtcatcaacctgttcccgctggaagccg

SEQ ID NO: 399481 - DNA, 75 bp, synthetic construct
  source 1..75: mol_type = other DNA
tgttggcgagcgcagaacccgctgtttctacagcgccacgcgggatatcacgctgcatccgctggcgttgccgga

SEQ ID NO: 399482 - DNA, 75 bp, synthetic construct
  source 1..75: mol_type = other DNA
agtataaaacattatctttattatccgtgtgtttatcctctattcgtgtctttttggggccaataacattacttg

SEQ ID NO: 399483 - DNA, 75 bp, synthetic construct
  source 1..75: mol_type = other DNA
tcgtgacagcgcgccggacgagcaggagcaatttgaagcctaccagcaggtgctactggcagcgggcgacaagcc

SEQ ID NO: 399484 - DNA, 75 bp, synthetic construct
  source 1..75: mol_type = other DNA
gggcggcgatcatcagcaatatggagcaggtttgcgccaaactttctgcctctgccagcgattatctgcgcgaac

SEQ ID NO: 399485 - DNA, 75 bp, synthetic construct
  source 1..75: mol_type = other DNA
ttaatgacagttgcagcctgaacattagcggcagcgataaagagcaggcgcggcgcgtgctggaagagtacatcc

SEQ ID NO: 399486 - DNA, 75 bp, synthetic construct
  source 1..75: mol_type = other DNA
ttgataacaaaccgggctatgtgaataccggctttattgctgaaagcgtatatccagaaaagctcgccgctggat

SEQ ID NO: 399487 - DNA, 75 bp, synthetic construct
  source 1..75: mol_type = other DNA
ctttgtggcgaaagacggcaaactgaacgacctgaaaatcaacggcgaaccggtcgatccggcgaaaacttaccg

SEQ ID NO: 399488 - DNA, 75 bp, synthetic construct
  source 1..75: mol_type = other DNA
tgcgattgcccgttatgccgggcaaccggcggtgcttgacgccagtgcggcgtgctggcgattaacccgaatgac

SEQ ID NO: 399489 - DNA, 75 bp, synthetic construct
  source 1..75: mol_type = other DNA
aagataaatttggagacgatttgatgattaaggctgagaccactccgcaaggagcagataaggctgcgaggataa

SEQ ID NO: 399490 - DNA, 75 bp, synthetic construct
  source 1..75: mol_type = other DNA
taaaaaaaacttttcatttaaaacagtatttaatgagttgtggccgttattgaaaaaaactagtatcgtatggtt

SEQ ID NO: 399491 - DNA, 75 bp, synthetic construct
  source 1..75: mol_type = other DNA
attgatgaagcaagaagagtatttaagaaatattttatcatttcatttttgttattaatttctggttactcaata

SEQ ID NO: 399492 - DNA, 75 bp, synthetic construct
  source 1..75: mol_type = other DNA
gattccaccctactggagcacagtctggcaacgcttgccgagcaactgaaccagcaattgcgtgagcgtgacggc

SEQ ID NO: 399493 - DNA, 75 bp, synthetic construct
  source 1..75: mol_type = other DNA
ctttgcctaacggtctacatgctcgtccggcgtgggaacttaaagagcagtgcagccagtggcaaagcgaaatca

SEQ ID NO: 399494 - DNA, 75 bp, synthetic construct
  source 1..75: mol_type = other DNA
attctggcccgcgcctcggcgatcccggtactgagcggcctgccgctggatgcgattgcccgttatgccgggcaa

SEQ ID NO: 399495 - DNA, 75 bp, synthetic construct
  source 1..75: mol_type = other DNA
tactctgatatgcaaaggctggtgataaatcgcccggattacgctgatatgttcaaagtcatggatggtctggag

SEQ ID NO: 399496 - DNA, 75 bp, synthetic construct
  source 1..75: mol_type = other DNA
caaagcatctactgattatgttattgaatctcatacagagtttgatagatttttgtcttcactgattcaaaccgt

SEQ ID NO: 399497 - DNA, 75 bp, synthetic construct
  source 1..75: mol_type = other DNA
gcaatgagccgcgttctggttaacggtggtaacgaccagcaggatctctccggattcttcaataatcccatcatg

SEQ ID NO: 399498 - DNA, 75 bp, synthetic construct
  source 1..75: mol_type = other DNA
tgcagggcatgcaaatcatgtcggtggaaaaaggaatggcctggatccgctggcagggtagcgcctgggcagtac

SEQ ID NO: 399499 - DNA, 75 bp, synthetic construct
  source 1..75: mol_type = other DNA
ccatacccactccactcatgccaccgcgtgggcgcaggcggggctggcgatcccagcgttaggcaccacgcacgc

SEQ ID NO: 399500 - DNA, 75 bp, synthetic construct
  source 1..75: mol_type = other DNA
atgatttataagatatctggcaatcagagattaatatggagattttataaaactgatgacaataaatggaggtgg

SEQ ID NO: 399501 - DNA, 75 bp, synthetic construct
  source 1..75: mol_type = other DNA
agacgcgaagaatatggtcaagaaggcgaaagccactcttgggcggatcttcgaattcaacaagctcgctatcta

SEQ ID NO: 399502 - DNA, 75 bp, synthetic construct
  source 1..75: mol_type = other DNA
tccagcgcgtactggagaaggtgaacgcactgccgcaggataagcgcctgtctgccatgacaatgttgtttggta

SEQ ID NO: 399503 - DNA, 75 bp, synthetic construct
  source 1..75: mol_type = other DNA
acgaaggatgcgatgggaactatccagcgcgtgctggagaaggtgaatgcgctgccacaggataagcgcctgtct

SEQ ID NO: 399504 - DNA, 75 bp, synthetic construct
  source 1..75: mol_type = other DNA
ttgaattcaataaactggcgatctaccaggagcagacagcatccaagtttgaaccgctttcttctgatgccaaca

SEQ ID NO: 399505 - DNA, 75 bp, synthetic construct
  source 1..75: mol_type = other DNA
tctctgcgcgggtgaatttttttaccaaacacatgaatgtgtgggtaacagcagagtctgcctggatggacatga

SEQ ID NO: 399506 - DNA, 75 bp, synthetic construct
  source 1..75: mol_type = other DNA
tcgtacagcagatgttgaggtagcccgtaaaaatgccaaatcaacgctttgctccggcgtggggctttatatggc

SEQ ID NO: 399507 - DNA, 75 bp, synthetic construct
  source 1..75: mol_type = other DNA
cagcaacttgcccgtgatctgaaagcagagctggacagacgggatgaggaaatccggcgcaccctgaccatgctg

SEQ ID NO: 399508 - DNA, 75 bp, synthetic construct
  source 1..75: mol_type = other DNA
agcggctgcctgaactgcttgaacgtattggggcatatcatcagggccgtgaactgacccggcatgccgttctgc

SEQ ID NO: 399509 - DNA, 75 bp, synthetic construct
  source 1..75: mol_type = other DNA
agcatctggaagccagaaaggcaatgatgcagtggtggtcggattatctggatacttgccgcaaaacctatatac

SEQ ID NO: 399510 - DNA, 75 bp, synthetic construct
  source 1..75: mol_type = other DNA
gccctggtggagtcggatctgtggtcacgcgatacagtggagcggcaaatgagccaccaggagcgcaacagcgtg

SEQ ID NO: 399511 - DNA, 75 bp, synthetic construct
  source 1..75: mol_type = other DNA
accttccggcgtcgattacagcatcatgaccgctgacgatatggtcgtggtcagcatcgaaaccggtgaagtggt

SEQ ID NO: 399512 - DNA, 75 bp, synthetic construct
  source 1..75: mol_type = other DNA
ggtctgcggggatgacattaccgcaggcgatggcgcagggaacggcgtgcgcggcacaaactattcagtaccacg

SEQ ID NO: 399513 - DNA, 75 bp, synthetic construct
  source 1..75: mol_type = other DNA
cactgttgtatgggctgatcggcacctgccgtctgaacggtatcgatccggaagcgtatctgcgccatatcctga

SEQ ID NO: 399514 - DNA, 75 bp, synthetic construct
  source 1..75: mol_type = other DNA
cgtaagggcgcagataaaatttcagcgagtgaacggaaaacccactttggcgaaatctattgcgggctggatcca

SEQ ID NO: 399515 - DNA, 75 bp, synthetic construct
  source 1..75: mol_type = other DNA
ttttttcttgttcgtcgtttttgttttttctggatggttctggctgttttcatcatttgtgtattgcactgtgta

SEQ ID NO: 399516 - DNA, 75 bp, synthetic construct
  source 1..75: mol_type = other DNA
catgtaaaaggggcgctggcaggccagcccattgaactgatggactggcatgtatttatcctcattaatattttt

SEQ ID NO: 399517 - DNA, 75 bp, synthetic construct
  source 1..75: mol_type = other DNA
agcgcatggcagagaaatccgcctgctcccctgaaaagtgttttaaggcggtggcgctggcctggcacaaaacca

SEQ ID NO: 399518 - DNA, 75 bp, synthetic construct
  source 1..75: mol_type = other DNA
atgtctttaaacgattctaaaatccgcaagttaaaaccttcttcccgtccggtaaaactctccgacgctcacggt

SEQ ID NO: 399519 - DNA, 75 bp, synthetic construct
  source 1..75: mol_type = other DNA
gtgagtctaccaaccgagcgatggctaaacctgctcgatccgaagctcgaagaagaacgatccgagataacagag

SEQ ID NO: 399520 - DNA, 75 bp, synthetic construct
  source 1..75: mol_type = other DNA
taacgccatgtcgaaaggggcggacatcattgatgtgatgcaacgtctgggcggtgtggctgatcgtctggatta

SEQ ID NO: 399521 - DNA, 75 bp, synthetic construct
  source 1..75: mol_type = other DNA
taaagcggcggcgctgggttccaccttcctgacactgggcgctgcgccggaggttgctgccagtgcagcaaacgc

SEQ ID NO: 399522 - DNA, 75 bp, synthetic construct
  source 1..75: mol_type = other DNA
aggtcattcttaatgcggttgacaaactcacccgcccattccgtgctgcacaggccagttcgaaagagctggctg

SEQ ID NO: 399523 - DNA, 75 bp, synthetic construct
  source 1..75: mol_type = other DNA
tcatcgccattttacgcggtattaaaccggatgaagcgcacgcccacgttgaggcagtgattgccgcgggttttg

SEQ ID NO: 399524 - DNA, 75 bp, synthetic construct
  source 1..75: mol_type = other DNA
gcactcagcggcggcggggatgatgacggtggcggtatcctggatgcgttccgcgacggggcgctggataaaatc

SEQ ID NO: 399525 - DNA, 75 bp, synthetic construct
  source 1..75: mol_type = other DNA
gccaggcgttcacttcatttgcacccggtttgttccagtccggcgatgcactgaaaaaactattcgggctgtttt

SEQ ID NO: 399526 - DNA, 75 bp, synthetic construct
  source 1..75: mol_type = other DNA
ctgacgggcacactgatgaaagtagcagcggttgtggctgcggttaccgtaggcctcggcaccttagcggtggcg

SEQ ID NO: 399527 - DNA, 75 bp, synthetic construct
  source 1..75: mol_type = other DNA
gacggtgaaatgcgacaaaccggtggtgatggtcggcgcaatgcgcccgtccacgtccatgagcgcagacggtcc

SEQ ID NO: 399528 - DNA, 75 bp, synthetic construct
  source 1..75: mol_type = other DNA
accgcagctgataaagcctccgctaatcgtggcgtactggtagtaatgaacgacactgttctggatggccgtgac

SEQ ID NO: 399529 - DNA, 75 bp, synthetic construct
  source 1..75: mol_type = other DNA
tgattaccaccttcattctggggttaatgtggtctgccccactccgggcacaggatcaacgttacatcagtatac

SEQ ID NO: 399530 - DNA, 75 bp, synthetic construct
  source 1..75: mol_type = other DNA
catcattactatccatcccccggacaggtggaccgtattatctctgtgctgagggagacaaaattccggctggtc

SEQ ID NO: 399531 - DNA, 75 bp, synthetic construct
  source 1..75: mol_type = other DNA
cgtgaaaaaaccgacagacaggaacttgtggaagagatccagcagaaactgaacacgctgaaagatatccgtcat

SEQ ID NO: 399532 - DNA, 75 bp, synthetic construct
  source 1..75: mol_type = other DNA
taatgacccgcagggcttccagcatttcgcaggtaatctggcgctgttttctctcggtcatgagaagtatttcga

SEQ ID NO: 399533 - DNA, 75 bp, synthetic construct
  source 1..75: mol_type = other DNA
tgcaggcgctgtggggctggtttactgatttgctgacgcccgttaagtcgacttctgccgaactgcagagcgcag

SEQ ID NO: 399534 - DNA, 75 bp, synthetic construct
  source 1..75: mol_type = other DNA
cgccatgtcgaaaggggcggacattattgatgtcatgcaacgcctgggtggtgtggctgaccgtctggattatcg

SEQ ID NO: 399535 - DNA, 75 bp, synthetic construct
  source 1..75: mol_type = other DNA
gccagcgaacagctgccgatggaaaacggtgcggtggacttcgccgcactggttgaaggtggggcgcgcatgaac

SEQ ID NO: 399536 - DNA, 75 bp, synthetic construct
  source 1..75: mol_type = other DNA
tgatctgctgacgcctgttaagtcgacctctgctgaactgcagagcgcagcggcaatggggcgacgattcgggga

SEQ ID NO: 399537 - DNA, 75 bp, synthetic construct
  source 1..75: mol_type = other DNA
aggtgattcttaatgcggttgacaaactcacccgcccatttcgatccgcgcaggccagttcaagagaactggctg

SEQ ID NO: 399538 - DNA, 75 bp, synthetic construct
  source 1..75: mol_type = other DNA
ggcaaacgtgaccagccggagaaataccgctgcactggctgcggttgtcgccggaatgatgggcgttgctgccgc

SEQ ID NO: 399539 - DNA, 75 bp, synthetic construct
  source 1..75: mol_type = other DNA
ctgtaccgggcgggaatttctgcgaaagacgatgcaggagcaaccgcccgtttagcccgtgaaacatcccgttat

SEQ ID NO: 399540 - DNA, 75 bp, synthetic construct
  source 1..75: mol_type = other DNA
tactaatctgctgacgcccgttaggtcgacctctgccgaactgcagagtgcagcggcaatggggcggcgattcgg

SEQ ID NO: 399541 - DNA, 75 bp, synthetic construct
  source 1..75: mol_type = other DNA
tgccgcaggcacggtgctgcgagtactggcatctggtccactggcgatgttgcgcgttgccctgtatgccgtatc

SEQ ID NO: 399542 - DNA, 75 bp, synthetic construct
  source 1..75: mol_type = other DNA
ctgacaggcacactgatgaaagtagcggctgttgtggctgcggttaccgtaggcctcggcaccttagctgtggcg

SEQ ID NO: 399543 - DNA, 75 bp, synthetic construct
  source 1..75: mol_type = other DNA
cagtggttgctggttaaaaccggagcgcagaataccttcagcagcctgggcgaaacgctgcaccagccgctgatg

SEQ ID NO: 399544 - DNA, 75 bp, synthetic construct
  source 1..75: mol_type = other DNA
agacgcagccaggacaaagtgcgcaggatattgcgcgggaggtggcacgccagcttgatgaacgtgaacgcagac

SEQ ID NO: 399545 - DNA, 75 bp, synthetic construct
  source 1..75: mol_type = other DNA
tccgttacggcagcagtaacacgaaccagcagcgcgttgtcctggttagctggcgctccactggcactgctgcga

SEQ ID NO: 399546 - DNA, 75 bp, synthetic construct
  source 1..75: mol_type = other DNA
atggagtttttcaaaaagacggcacttgccgcactggttatgggttttagtggtgcagcattggcattacccaat

SEQ ID NO: 399547 - DNA, 75 bp, synthetic construct
  source 1..75: mol_type = other DNA
ctcacgattgagttttataccgataccgactttaacccgacaacgaatcaacgggtaacattgcccaaaacagat

SEQ ID NO: 399548 - DNA, 75 bp, synthetic construct
  source 1..75: mol_type = other DNA
aacccatcaggcatgtatattggcgattctacagaacaatattttaactggcgtggcgaaagcgagcaaacacta

SEQ ID NO: 399549 - DNA, 75 bp, synthetic construct
  source 1..75: mol_type = other DNA
acggtaccgacacgatggaagaaaccgcttacttcctggacctgacggtgaaatgggacaaaccggtggtgatgg

SEQ ID NO: 399550 - DNA, 75 bp, synthetic construct
  source 1..75: mol_type = other DNA
acggtaccgacacgatggaagaaaccgcttacttcctagacctgacggtgaaatgagacaaaccggtggtgatgg

SEQ ID NO: 399551 - DNA, 75 bp, synthetic construct
  source 1..75: mol_type = other DNA
acggtaccgacacgatggaagaaacagcttacttcctcgacctgacggtgaaatgagacaaaccggtggtgatgg

SEQ ID NO: 399552 - DNA, 75 bp, synthetic construct
  source 1..75: mol_type = other DNA
actgattgaaggtttaaaaaacactaaaagtgcacaaatggtactgaaaccaaatgatgcaacgtctatttataa

SEQ ID NO: 399553 - DNA, 75 bp, synthetic construct
  source 1..75: mol_type = other DNA
ttattttcttaaaatcgactttgacctgacagatatcgtattaaccaaccccacctgctttactgctgtacttac

SEQ ID NO: 399554 - DNA, 75 bp, synthetic construct
  source 1..75: mol_type = other DNA
acatcaacagcaagcaacctggttttttataaacccacgcaactcggcccgacaggggtaaaaatgtactggtca

SEQ ID NO: 399555 - DNA, 75 bp, synthetic construct
  source 1..75: mol_type = other DNA
ggtatggctcaggcaccaataatttagttttttataaaccaacccaacttagcccaaccggggtgtcattaaaat

SEQ ID NO: 399556 - DNA, 75 bp, synthetic construct
  source 1..75: mol_type = other DNA
tttgacctgacagatatcgtattaacaaaccctacctgttttactgcggcgcttagtggcccatcggtaagtggt

SEQ ID NO: 399557 - DNA, 75 bp, synthetic construct
  source 1..75: mol_type = other DNA
gacagataaaaaatggcgcgactccggttccttttgatatttctctcaaaaactgtgttcgcgttggcgatatag

SEQ ID NO: 399558 - DNA, 75 bp, synthetic construct
  source 1..75: mol_type = other DNA
acggtaccgacacgatggaagaaacggcttacttcctcgacctgacggtgaaatgggacaaaccggtggtgatgg

SEQ ID NO: 399559 - DNA, 75 bp, synthetic construct
  source 1..75: mol_type = other DNA
tgccagtactgctaactctgacgcacttgcccccacgaatggcagcagtcctctgataatggtcaaacctggaat

SEQ ID NO: 399560 - DNA, 75 bp, synthetic construct
  source 1..75: mol_type = other DNA
tcttgtcattcctgtttcctctgtgagatgcctgacagatatcaggcaaaccatccgccgtggagcgtggctgtt

SEQ ID NO: 399561 - DNA, 75 bp, synthetic construct
  source 1..75: mol_type = other DNA
ttacttctgttcttactggaacatctgttagtggttctacggtaaaaatgggagaatacacctctgagcaaatta

SEQ ID NO: 399562 - DNA, 75 bp, synthetic construct
  source 1..75: mol_type = other DNA
tgattttgaaatgaaacgtgagaccagtgctgtaggcattcgaatctataaaggtgaggaactggagggtaacct

SEQ ID NO: 399563 - DNA, 75 bp, synthetic construct
  source 1..75: mol_type = other DNA
actccacacgtaaaagtgcatttgaccgtaaaacaatgggagaatgggacgtcacgatatactctcaaaaaagtg

SEQ ID NO: 399564 - DNA, 75 bp, synthetic construct
  source 1..75: mol_type = other DNA
aatcgttcctcaaacaacgatgcaacgacctttgtacaaagggtcaaggttgctgctgcaccattgtggacaaag

SEQ ID NO: 399565 - DNA, 75 bp, synthetic construct
  source 1..75: mol_type = other DNA
tgacgccgggttcgacgcggttgaaatcccgctgaattccccacaatgggagcaaagcattcccgccatcgttga

SEQ ID NO: 399566 - DNA, 75 bp, synthetic construct
  source 1..75: mol_type = other DNA
cgctaacgcatccgatcttccggctaaagccttggtagatgcgggttatgacggcatcgttagcgctggtgtggg

SEQ ID NO: 399567 - DNA, 75 bp, synthetic construct
  source 1..75: mol_type = other DNA
ctgtataacgcggtagtcaccgcagctgataaagcctccgctaatcgtggcgtactggtagtaatgaacgacact

SEQ ID NO: 399568 - DNA, 75 bp, synthetic construct
  source 1..75: mol_type = other DNA
ggtctctattacacactaaaaatatcaagagtctggtctgcctggaatactacaaccaatataaatgaagtttac

SEQ ID NO: 399569 - DNA, 75 bp, synthetic construct
  source 1..75: mol_type = other DNA
tggaggtcgggcgacatttcgttattcggcgggtgctaacaatcttgtgttttataagccaacccaactcggccc

SEQ ID NO: 399570 - DNA, 75 bp, synthetic construct
  source 1..75: mol_type = other DNA
ccaggcctctattacacactaaaaatatcgaaaatctggacggcctggaatacagtggcctctatcaatgagttt

SEQ ID NO: 399571 - DNA, 75 bp, synthetic construct
  source 1..75: mol_type = other DNA
tgacattcaatcgccaggaatctatatcggagatccttccaaccaagaatttttcttttccgtcacagacagcga

SEQ ID NO: 399572 - DNA, 75 bp, synthetic construct
  source 1..75: mol_type = other DNA
atgcagcgcaaatgcccggcgtgctggtccattctcacggcccatttgcatggggaaaaaacgccgaagatgcgg

SEQ ID NO: 399573 - DNA, 75 bp, synthetic construct
  source 1..75: mol_type = other DNA
tggggcaaaaatgccgaagatgcagtgcataacgccatcgtgctggaagaggtcgcttatatggggatattctgc

SEQ ID NO: 399574 - DNA, 75 bp, synthetic construct
  source 1..75: mol_type = other DNA
ccgagggggaatactctggcaacggcggccgtgcacaccgtggcttaccggaagaagtcggcaccgaggtggcaa

SEQ ID NO: 399575 - DNA, 75 bp, synthetic construct
  source 1..75: mol_type = other DNA
tgaaggccgtattcaatccgcgccgattctggcggctgccgtcgatattgtgacgactaacgccaccggcatgat

SEQ ID NO: 399576 - DNA, 75 bp, synthetic construct
  source 1..75: mol_type = other DNA
gcttatccgtgctggcttataccgttgaaagccgtatccagtctgcgcctgttctggccgcagcggtggatctgg

SEQ ID NO: 399577 - DNA, 75 bp, synthetic construct
  source 1..75: mol_type = other DNA
atgattagttacgaaattattatttccacaactgaatacagaaacgatgtatcagttcgcacggatacgtctgtc

SEQ ID NO: 399578 - DNA, 75 bp, synthetic construct
  source 1..75: mol_type = other DNA
ccggatatgcaacaaacgttgctggataagcactatctgcgtaagcatggcgcaaaagcctattacggccagtaa

SEQ ID NO: 399579 - DNA, 75 bp, synthetic construct
  source 1..75: mol_type = other DNA
gcgagcgcggcgtctttgtgatcaaaccttccggcgtcgattacagcatcatgaccgccgacgatatggtcgtgg

SEQ ID NO: 399580 - DNA, 75 bp, synthetic construct
  source 1..75: mol_type = other DNA
cgccagttagcgccacggttaccggatatgcagcaaacgctgctggacaagcactacctgcgtaaacatggtgcg

SEQ ID NO: 399581 - DNA, 75 bp, synthetic construct
  source 1..75: mol_type = other DNA
atgttagaagatctcaaacgtcaggttttagaagccaacctggcgctgccaaaacacaacctggtcacgctgacc

SEQ ID NO: 399582 - DNA, 75 bp, synthetic construct
  source 1..75: mol_type = other DNA
gaaaccttcgaaaaacaggctatcgatgcggcgcaaatgcctggcgtgctggtgcattctcacggtccgtttgcg

SEQ ID NO: 399583 - DNA, 75 bp, synthetic construct
  source 1..75: mol_type = other DNA
gacacgccaactcaccggctgctctatcaggcattcccgtccattggcggcattgtgcatacgcactcgcgccac

SEQ ID NO: 399584 - DNA, 75 bp, synthetic construct
  source 1..75: mol_type = other DNA
cctggcggaaacgcgagactggataagcaattgctcccgtcatttcagttatctactcgagaagcaggatcctga

SEQ ID NO: 399585 - DNA, 75 bp, synthetic construct
  source 1..75: mol_type = other DNA
cagaactgtgttcgtgtgcgtaatattgaaacaaaactagtgactggaaaagtaggtactgaaaacaaacaactg

SEQ ID NO: 399586 - DNA, 75 bp, synthetic construct
  source 1..75: mol_type = other DNA
acagcggacctatctatatcaactttaatttaagtaatgtaaaactatcgcttcctacatgtttttcttcagttg

SEQ ID NO: 399587 - DNA, 75 bp, synthetic construct
  source 1..75: mol_type = other DNA
ttgactgatggcaccgaactacacgacaccaactttgcccgaattgccgaagcctgcggcattacgggtattcgt

SEQ ID NO: 399588 - DNA, 75 bp, synthetic construct
  source 1..75: mol_type = other DNA
tctggtctgcatacgatacaataactgacattcaatcgccaggaatctatatcggagatccttccaaccaagaat

SEQ ID NO: 399589 - DNA, 75 bp, synthetic construct
  source 1..75: mol_type = other DNA
attgatttcacaaaccgagtctggacgatacccgcgacgcgagaacccattattggcgtgcgttattccggccgc

SEQ ID NO: 399590 - DNA, 75 bp, synthetic construct
  source 1..75: mol_type = other DNA
tggcaattgaaaatcaaatggttgattcgggtaaacgttatggcgggcataaactatttgaaacatctgtcccag

SEQ ID NO: 399591 - DNA, 75 bp, synthetic construct
  source 1..75: mol_type = other DNA
cttctgtacgtatccgtcttggtgcatcggtgatgaaggatggtaaagagaagatcggccaggacgtaggcgcag

SEQ ID NO: 399592 - DNA, 75 bp, synthetic construct
  source 1..75: mol_type = other DNA
ttctacttcgacccgactcgcgggctggacgtcgtcgagtctctggttgaatacatgctggaggaaggatacctg

SEQ ID NO: 399593 - DNA, 75 bp, synthetic construct
  source 1..75: mol_type = other DNA
atgcatttaaaccctgatgaagtcattgctcaaggagcggctattcaggcagcgcttaaagcgcggcacagcgaa

SEQ ID NO: 399594 - DNA, 75 bp, synthetic construct
  source 1..75: mol_type = other DNA
caggtggtcgccatgtgcggcgatggcggtttcagtatgttgatgggcgatttcctctcagtaatgcagatgaaa

SEQ ID NO: 399595 - DNA, 75 bp, synthetic construct
  source 1..75: mol_type = other DNA
acgggattaatcggcttctcgtcaggttttcataccatgatgaacgccgacacgttagtgctgctcggcacccag

SEQ ID NO: 399596 - DNA, 75 bp, synthetic construct
  source 1..75: mol_type = other DNA
acgggattaatcggcttttcgtcaggtttccataccatgatgaacgccgacacgttagtgctactcggtactcag

SEQ ID NO: 399597 - DNA, 75 bp, synthetic construct
  source 1..75: mol_type = other DNA
agagatttacccggcacgcattccaaaagcccctgatttctggcatccgcaaatgtggtccaggccgcgccttat

SEQ ID NO: 399598 - DNA, 75 bp, synthetic construct
  source 1..75: mol_type = other DNA
cagaaatcgccaatgagttgataggccttgaatgcccacggactcattatcattctaaggagtggctaaaagttg

SEQ ID NO: 399599 - DNA, 75 bp, synthetic construct
  source 1..75: mol_type = other DNA
tggaacgaaaaagtagtcgggttgtactacaggagctgggttttggggatgatgtatggctgttcctgaattata

SEQ ID NO: 399600 - DNA, 75 bp, synthetic construct
  source 1..75: mol_type = other DNA
gcgcagggtgtggagatgctggcaaaaaatcatcagagtatcgtcaatgcacttaagggagattctctcttttct

SEQ ID NO: 399601 - DNA, 75 bp, synthetic construct
  source 1..75: mol_type = other DNA
aaaactcgaacgctactggagccaggatatatttagcgatcgagaagccagctacatgtcgcatgaaaaccgctt

SEQ ID NO: 399602 - DNA, 75 bp, synthetic construct
  source 1..75: mol_type = other DNA
taaaaacttcccccatgcgacgctcgccgcactggcagaactgctggcgttaaaagaaccaccagcccgccctgg

SEQ ID NO: 399603 - DNA, 75 bp, synthetic construct
  source 1..75: mol_type = other DNA
tacaaacgctgatggcatcgcagccacaactggcagaagaggtgatgccgtggttaagtacacaagcccaggcag

SEQ ID NO: 399604 - DNA, 75 bp, synthetic construct
  source 1..75: mol_type = other DNA
gaaatcgccaatgagttggtaggccttgaatgcccgcggactcattttcattctaaggagtggttaaaagttgtt

SEQ ID NO: 399605 - DNA, 75 bp, synthetic construct
  source 1..75: mol_type = other DNA
cctgcgcgccctggttatccagtcatcgaagacaaaaagctgcctgcacagcaaaaagcacgtgatgaatactgg

SEQ ID NO: 399606 - DNA, 75 bp, synthetic construct
  source 1..75: mol_type = other DNA
gtctttaccaaacccagcgataatagcgaagccgcattacttgccctgcgtttactgtacgaacagggacatggc

SEQ ID NO: 399607 - DNA, 75 bp, synthetic construct
  source 1..75: mol_type = other DNA
atgaattgctacaaaaagctgagaagaaaaaaaaacattgtctggcgttatgagaatttttcactggagtggcag

SEQ ID NO: 399608 - DNA, 75 bp, synthetic construct
  source 1..75: mol_type = other DNA
atgagcaaggaattaccgtggctggcggacgacgcgcaactggaactgaaatttaaaaaaggcaaaacaccgctc

SEQ ID NO: 399609 - DNA, 75 bp, synthetic construct
  source 1..75: mol_type = other DNA
tggcgaccattttcctggagcgcgacctggcgttgatcgaaatcaacccgctggtcatcaccaaacagggcgatc

SEQ ID NO: 399610 - DNA, 75 bp, synthetic construct
  source 1..75: mol_type = other DNA
ctccctgtatctcaatatgataaggggacgggagggattatttcatctacaagcattaatatgggagatggtaac

SEQ ID NO: 399611 - DNA, 75 bp, synthetic construct
  source 1..75: mol_type = other DNA
acgtgacggatgcgaacggtaacggcaaggcagacacagccgagcaggcagtggccgatgcaaaagctcatttgg

SEQ ID NO: 399612 - DNA, 75 bp, synthetic construct
  source 1..75: mol_type = other DNA
cggaagaggcgaaagccgtggaagatgcgaatgtggcgctggaagcagcgaagcaggcagctcaggaagcggtga

SEQ ID NO: 399613 - DNA, 75 bp, synthetic construct
  source 1..75: mol_type = other DNA
aggtgcaggaaatgacactattcatgttaatggtgatgtgaaagcggtaagtattaaaggtggctctggtatgga

SEQ ID NO: 399614 - DNA, 75 bp, synthetic construct
  source 1..75: mol_type = other DNA
ggtaatccagaagaaagcactactacatggcgtgaagttcttaatcaaaatggtgtttctggcttcagtgttgat

SEQ ID NO: 399615 - DNA, 75 bp, synthetic construct
  source 1..75: mol_type = other DNA
gcactgccagaacaatgataagtcgtaatgacatggttattaatactaacggtggcgatgatattattgctgttg

SEQ ID NO: 399616 - DNA, 75 bp, synthetic construct
  source 1..75: mol_type = other DNA
ggacgcgacggttgtcgggctggacgatggcgacatcgttacggtgaaagaagcgacggacgccctgctgcattg

SEQ ID NO: 399617 - DNA, 75 bp, synthetic construct
  source 1..75: mol_type = other DNA
atacaagaagcataaagagcagttggaaaaattatcgattgaacttgataccgtaaaacagcgcattgcagagtt

SEQ ID NO: 399618 - DNA, 75 bp, synthetic construct
  source 1..75: mol_type = other DNA
ccttgcgcttatcgaaatcaacccgctggttattaccaaacagggcgatctgattttgcctcgacggcaaactgg

SEQ ID NO: 399619 - DNA, 75 bp, synthetic construct
  source 1..75: mol_type = other DNA
gcgaaggacaaattcgccagtcggaacagtatctcggtgcagattatttcccggtgaaaaccacgctcatcaagg

SEQ ID NO: 399620 - DNA, 75 bp, synthetic construct
  source 1..75: mol_type = other DNA
actctccggtaactacggatggttggataagctgtagtgagcgaatgccggataccaaaacagccgttcttgttg

SEQ ID NO: 399621 - DNA, 75 bp, synthetic construct
  source 1..75: mol_type = other DNA
gaggagaactcgtggctgaagatgctcatagaagatcatgctggttgtactgaaccgccccggaaatcctggaga

SEQ ID NO: 399622 - DNA, 75 bp, synthetic construct
  source 1..75: mol_type = other DNA
tgatagcaccgataacagccaaatgcctgaaatcctcgtttcaccaccgtggcgtagtaagaaaaaaatgacagt

SEQ ID NO: 399623 - DNA, 75 bp, synthetic construct
  source 1..75: mol_type = other DNA
atggcgaaattgtcggtgaaggttaccatcaccgtgctggtgaaccacacgccgaagtacatgcgttgcgtatgg

SEQ ID NO: 399624 - DNA, 75 bp, synthetic construct
  source 1..75: mol_type = other DNA
gcgcgacgtgatgtgcaacgtctgcgtgcgcaaagtcatgccattttaaccagtagtgccacggtactggctgac

SEQ ID NO: 399625 - DNA, 75 bp, synthetic construct
  source 1..75: mol_type = other DNA
gccgaagtacatgcgttgcgcatggctgaagagaaagccaaaggcgcgactgcgtatgtgacactcgaaccttgc

SEQ ID NO: 399626 - DNA, 75 bp, synthetic construct
  source 1..75: mol_type = other DNA
cgcccgttacgctaccggtgataataatcatgaaggcgcgctgaatgtgattcaggctgtgttggataataaagc

SEQ ID NO: 399627 - DNA, 75 bp, synthetic construct
  source 1..75: mol_type = other DNA
atatggacggtacttttcttaacgacgccaaaacgtacaatcggacacgttttatggcgcagtatcaggaactga

SEQ ID NO: 399628 - DNA, 75 bp, synthetic construct
  source 1..75: mol_type = other DNA
cttatttcgttctttcctgagctaaaggatgagatctcttttgtcgcggaaaacggcgcactggtttacgaacat

SEQ ID NO: 399629 - DNA, 75 bp, synthetic construct
  source 1..75: mol_type = other DNA
aaaatagcggacatgattcgtggacaggaagcgttgccgaggagcacggcaagatattttgtggcaaatgggatg

SEQ ID NO: 399630 - DNA, 75 bp, synthetic construct
  source 1..75: mol_type = other DNA
cagcctgatctgcgcgaaatgcgtgaccagtcgcaggaagatccacgtgaagcacaggctgcacagtgggaactg

SEQ ID NO: 399631 - DNA, 75 bp, synthetic construct
  source 1..75: mol_type = other DNA
aaaaagtggcggaagaaactccgcacctgatccataaagttgcgcttgatccgctgactggcccgatgccgtatc

SEQ ID NO: 399632 - DNA, 75 bp, synthetic construct
  source 1..75: mol_type = other DNA
cgcagattatcaccggcaatctgaacgccacgaccattatgattggcgagaaaatggcggatatgattcgcggac

SEQ ID NO: 399633 - DNA, 75 bp, synthetic construct
  source 1..75: mol_type = other DNA
gcctgaaccgtttatgaataaccgccgcatggagtgcggacgcggtaaaggcctgggtggatcgtcgctgatcaa

SEQ ID NO: 399634 - DNA, 75 bp, synthetic construct
  source 1..75: mol_type = other DNA
cgccgaaaccgcgtttcatccgtgcggtacctgcaaaatgggttatgacgagatggcagtggttgacgccgaagg

SEQ ID NO: 399635 - DNA, 75 bp, synthetic construct
  source 1..75: mol_type = other DNA
ccttgccgaaggcgaagaagctctcagcttcagtgagtttaaacaggcgctttccagttcggcaaaatctaacga

SEQ ID NO: 399636 - DNA, 75 bp, synthetic construct
  source 1..75: mol_type = other DNA
taatcaacctgttaccgatgacgctctggaaattatcggcgaaatgctgcgctttacccaggggggacgttttta

SEQ ID NO: 399637 - DNA, 75 bp, synthetic construct
  source 1..75: mol_type = other DNA
gttgccgcgtgagatagctttgactttctggctacgtatcaatgagaaaaagcatctgtctgcgggtgaggacta

SEQ ID NO: 399638 - DNA, 75 bp, synthetic construct
  source 1..75: mol_type = other DNA
gtggaatgactatcgcgcaaagtctctgcaatcagacaccccagccaccgatgctttcctggctgaagtgaagac

SEQ ID NO: 399639 - DNA, 75 bp, synthetic construct
  source 1..75: mol_type = other DNA
cgttcgccagaaaagcgttccccggttgcgcgccgatgacgatcaactgaaagcgcccgaggcactggcccgact

SEQ ID NO: 399640 - DNA, 75 bp, synthetic construct
  source 1..75: mol_type = other DNA
ccgaaatcgccaacgagctggtaagccttgaatgttcgcaaactcattttcgctcaaaagagtggttaaaagttg

SEQ ID NO: 399641 - DNA, 75 bp, synthetic construct
  source 1..75: mol_type = other DNA
ctctgtttgttaatcatccctttacccgtctggttacccagcgattaatatggggggtttatccggcaaatgaac

SEQ ID NO: 399642 - DNA, 75 bp, synthetic construct
  source 1..75: mol_type = other DNA
acagaacgccccgcgtcacagccagcaccaaccgcacagataaccagtcagatgaccggaaatatccgggcgcta

SEQ ID NO: 399643 - DNA, 75 bp, synthetic construct
  source 1..75: mol_type = other DNA
atgatggcccggcgatgaccaatccctatacccagtcggagagaaacaccgccgagcaacaggcaaattccagga

SEQ ID NO: 399644 - DNA, 75 bp, synthetic construct
  source 1..75: mol_type = other DNA
gcgctggatctcgataactgggcacaagaacctggtctggagaactggagttatctcgactgcctgccctactac

SEQ ID NO: 399645 - DNA, 75 bp, synthetic construct
  source 1..75: mol_type = other DNA
gcgctggctgcggagaatgcggggatgaagtctggcgctatggacgaaatcaaggttatcaaccgtggagggcag

SEQ ID NO: 399646 - DNA, 75 bp, synthetic construct
  source 1..75: mol_type = other DNA
gatatcacggatagtgtgcgcaaaggtcagtcttggcacgcatatcaggaatacaagaagcataaagagcagttg

SEQ ID NO: 399647 - DNA, 75 bp, synthetic construct
  source 1..75: mol_type = other DNA
aaagccagatgcgcggcgctggctgcggagaatgcgatgttgaagcaacggacacagcaacttatcgacatcatt

SEQ ID NO: 399648 - DNA, 75 bp, synthetic construct
  source 1..75: mol_type = other DNA
atgttaaataaccttcccggattgctgaatgtggcgtcatgtacggttatcgtgctgacgctctttttttatcgt

SEQ ID NO: 399649 - DNA, 75 bp, synthetic construct
  source 1..75: mol_type = other DNA
ttttaatctgctgttctgcgtgctggtgatacgtgcacgcgggaacgtcacaagaatctttccattgttgaggtg

SEQ ID NO: 399650 - DNA, 75 bp, synthetic construct
  source 1..75: mol_type = other DNA
gctgaacctggtatttggtgtcatggtagtgcgtgcgcgcggtaatgtttcaaaaatttttgctttcctgagtgg

SEQ ID NO: 399651 - DNA, 75 bp, synthetic construct
  source 1..75: mol_type = other DNA
cgtttcgtgccccatgagttaagccatgaagagatcctgcaactgatcgacaatttcgcccgctgcgcgcaactg

SEQ ID NO: 399652 - DNA, 75 bp, synthetic construct
  source 1..75: mol_type = other DNA
cgcaaccgctgattgatagcgggaaaactgtgcatttaattggcggctgcgatgtagctatggagctggacgcac

SEQ ID NO: 399653 - DNA, 75 bp, synthetic construct
  source 1..75: mol_type = other DNA
gacgatgacgggctgcatgtggtgatcaacggcgaaacgcaggtattagcagtggacaatgtggtgatctgcgca

SEQ ID NO: 399654 - DNA, 75 bp, synthetic construct
  source 1..75: mol_type = other DNA
tcagcgacaaaaatgtccggggcacgaaatacgcggatggcgcagagttcagctataaccgtgcgacccatacgc

SEQ ID NO: 399655 - DNA, 75 bp, synthetic construct
  source 1..75: mol_type = other DNA
atcagcctcatctctgaaacgctgtcgcttcccactaaaggtgcccggcttcgggttgctctgggattcaatgat

SEQ ID NO: 399656 - DNA, 75 bp, synthetic construct
  source 1..75: mol_type = other DNA
gtattatcagcgatatcgacgaagtgaaggtgtgtgtgcgcgtcaccctgccggaatgcgacgatctgcgtacca

SEQ ID NO: 399657 - DNA, 75 bp, synthetic construct
  source 1..75: mol_type = other DNA
agaaaagagtcacgacacaaaccgctgatatcgtggtgcgcctggtgtctgatgctgttgtatgcgataacgccg

SEQ ID NO: 399658 - DNA, 75 bp, synthetic construct
  source 1..75: mol_type = other DNA
gcttaatctgctgttctgcgtgctggtgatacgtgcacgcgggaacgtttcaaaaatcctttcattacggaggtg

SEQ ID NO: 399659 - DNA, 75 bp, synthetic construct
  source 1..75: mol_type = other DNA
tagaaacagactggttccaggtgttttttaatctgctgttctgcgtgctggtgatacgcgcacgtgggaacgtca

SEQ ID NO: 399660 - DNA, 75 bp, synthetic construct
  source 1..75: mol_type = other DNA
gacgatgacgggctgcatgtggtgatcaacggcgaaccgcaaattttggcggtagatcatgtggtgatctgcgcg

SEQ ID NO: 399661 - DNA, 75 bp, synthetic construct
  source 1..75: mol_type = other DNA
tcgttatgtcggtggttatcacgacgcacgcggtcagcaagaacagcatgtggcgctgaaacaacctgcggtgaa

SEQ ID NO: 399662 - DNA, 75 bp, synthetic construct
  source 1..75: mol_type = other DNA
aggacgcgcgctggtgagcaatccgcgcgtattgctgctcgacgaaccgactaaccacctggatatcgaaaccat

SEQ ID NO: 399663 - DNA, 75 bp, synthetic construct
  source 1..75: mol_type = other DNA
ccatcgccactcccgtgccgcgcggcgcattcagttgggtcacgcgcaaactgaaaggccatgtatcactgccgc

SEQ ID NO: 399664 - DNA, 75 bp, synthetic construct
  source 1..75: mol_type = other DNA
tctcccacgaccgttcgtttatccgcaatatggcgacgcgtattgttgatctcgatcgcggcaagctggtgacct

SEQ ID NO: 399665 - DNA, 75 bp, synthetic construct
  source 1..75: mol_type = other DNA
aagaggtgatggttaacggtaaaccacgccacgtgctgggctatttgcaggacttcctgttccatccgaaacggg

SEQ ID NO: 399666 - DNA, 75 bp, synthetic construct
  source 1..75: mol_type = other DNA
cgcgtgttactgctcgacgaaccgaccaaccatctggatatcgaaactatcgactggttggaaggtttccttaaa

SEQ ID NO: 399667 - DNA, 75 bp, synthetic construct
  source 1..75: mol_type = other DNA
gcggtgcgcgaacgcgtcggcaacgacttcattattatctaccgcctgtcgatgctcgacctggtcgaaggtggc

SEQ ID NO: 399668 - DNA, 75 bp, synthetic construct
  source 1..75: mol_type = other DNA
atcgcaccattactgaagcggtgcatcaggaaggcggcaaaattgccctacaaattttgcataccgggcgctaca

SEQ ID NO: 399669 - DNA, 75 bp, synthetic construct
  source 1..75: mol_type = other DNA
cgcttgatttaggcttcaccacgttaaaaaaccgcgtgttaatgggctcaatgcacaccgggctggaagaatacc

SEQ ID NO: 399670 - DNA, 75 bp, synthetic construct
  source 1..75: mol_type = other DNA
gccggtgggtaaaaaggtggccatcatcggttgtggcgggattggttttgatacggcgatgtatttgagtcagcc

SEQ ID NO: 399671 - DNA, 75 bp, synthetic construct
  source 1..75: mol_type = other DNA
cgtttcgttcctcacgaactcacccatgaagagatcctgcaactgatcgacgatttcgcccactgcgcgcaactg

SEQ ID NO: 399672 - DNA, 75 bp, synthetic construct
  source 1..75: mol_type = other DNA
gcggcggcgcgtgggcatcaggtaacattgtttgatgcgcacagcgagatcggcgggcagtttaatatcgccaaa

SEQ ID NO: 399673 - DNA, 75 bp, synthetic construct
  source 1..75: mol_type = other DNA
tggagcagagttgaaattcgattcagatgtggatttctggaaagatattgagaactcgataaaactgatactggg

SEQ ID NO: 399674 - DNA, 75 bp, synthetic construct
  source 1..75: mol_type = other DNA
cagcggacgcaatccgaactggaccagctatgaaaaactgcgcacggttatcgagaagaaaatgttctccaatac

SEQ ID NO: 399675 - DNA, 75 bp, synthetic construct
  source 1..75: mol_type = other DNA
acgcggatttctggattcaggatcaggagtatcgcgatccggataccgggcagctgtttgaccgcgagtctctta

SEQ ID NO: 399676 - DNA, 75 bp, synthetic construct
  source 1..75: mol_type = other DNA
tctggagttcctgaaaggttatctgatcccgaaatatgccgagtttatcggcaaagagatccagacggcctacct

SEQ ID NO: 399677 - DNA, 75 bp, synthetic construct
  source 1..75: mol_type = other DNA
tgcatgaatttggtggcgatattactaagttccgggtggtaaaggtctggccgtcaattctgcaacaaattgcta

SEQ ID NO: 399678 - DNA, 75 bp, synthetic construct
  source 1..75: mol_type = other DNA
gagcgaataacagcggacgcaatccgaactggaccagctatgaaaaactgcgcacggttatcgagaagaaaatgt

SEQ ID NO: 399679 - DNA, 75 bp, synthetic construct
  source 1..75: mol_type = other DNA
cagttgtttgaccgcgaatctcttaacgccgagctggagaaaatcgaaaaaccggcggggatcagcaatccgaaa

SEQ ID NO: 399680 - DNA, 75 bp, synthetic construct
  source 1..75: mol_type = other DNA
gatgatgcaagtttacgtattagtgatagagatgatgtgattagtgatggagaactgttattaccatcaagttca

SEQ ID NO: 399681 - DNA, 75 bp, synthetic construct
  source 1..75: mol_type = other DNA
taatggattggagggcagcgatatcatatcaacaggctattctattggtggcactgccagaacaatgataagtcg

SEQ ID NO: 399682 - DNA, 75 bp, synthetic construct
  source 1..75: mol_type = other DNA
ctgaacgggcgtctggctaaagttgacggtatcgatgtaccggcagtggatgaaaacggcaacggcaagccggat

SEQ ID NO: 399683 - DNA, 75 bp, synthetic construct
  source 1..75: mol_type = other DNA
gaacaaccaggacatctccgcgctggttgggaaagtcgatattcgtaaactcgaacactacgcgcagaatgaccc

SEQ ID NO: 399684 - DNA, 75 bp, synthetic construct
  source 1..75: mol_type = other DNA
caatctcaacgctgcttttgggcctttctgtgatgcctgctttcgcagatgaagacgtaaccgcatggcgtctgt

SEQ ID NO: 399685 - DNA, 75 bp, synthetic construct
  source 1..75: mol_type = other DNA
taagtacggcagattttcgcaagatagctggcgagttatacctggtaaacattctgtggatgagcagccgattgt

SEQ ID NO: 399686 - DNA, 75 bp, synthetic construct
  source 1..75: mol_type = other DNA
gaacaaccaggatatctcagcgctggtagggaaagtcgatattcgtaagctcgaacactacgcgcagaacgatcc

SEQ ID NO: 399687 - DNA, 75 bp, synthetic construct
  source 1..75: mol_type = other DNA
ctgattttaccatcgctgcatgtggctaaccgcgagctgcgccgggcaaaaggtcaggttcagaagtgggagcga

SEQ ID NO: 399688 - DNA, 75 bp, synthetic construct
  source 1..75: mol_type = other DNA
aagcactgaaaaaagcctcttcacaggtagtggcatcgcgccttggaatcagccgcgaagatgctgtcaacgaac

SEQ ID NO: 399689 - DNA, 75 bp, synthetic construct
  source 1..75: mol_type = other DNA
attcatcgctggccatggcaatcagcaaagggcgtctgattcgcgtgaatcagggcggtaaatttcgttactgca

SEQ ID NO: 399690 - DNA, 75 bp, synthetic construct
  source 1..75: mol_type = other DNA
gcaatgtctctggaagctttgctaaagcataacggaggtgttctgggctctgtttcaacctcaaattttgcggca

SEQ ID NO: 399691 - DNA, 75 bp, synthetic construct
  source 1..75: mol_type = other DNA
gaacatcttctgcaaacatgaagaagataaacgaatatattaatacactgaatgcacagcttgaaagacaggtta

SEQ ID NO: 399692 - DNA, 75 bp, synthetic construct
  source 1..75: mol_type = other DNA
tcttattgtgtccgctcctggcatcttgctcgggtaatggattttataaagataatcttggcgtaatcgataaaa

SEQ ID NO: 399693 - DNA, 75 bp, synthetic construct
  source 1..75: mol_type = other DNA
caaccgatacaattttgcgtacttgcttcataagcatcacgcaaaagctgcaaaacagcatctttcccggaacca

SEQ ID NO: 399694 - DNA, 75 bp, synthetic construct
  source 1..75: mol_type = other DNA
ctggctgaagttggagattcaccctgacgcccgctggttgttgcccgatcccatcgaaaccctgaaagccgccga

SEQ ID NO: 399695 - DNA, 75 bp, synthetic construct
  source 1..75: mol_type = other DNA
tttaacgccaaaacgtcaaccgacgagcaaaagaaacatgacgactttgtcgaccgtatgatggaaaaaggctac

SEQ ID NO: 399696 - DNA, 75 bp, synthetic construct
  source 1..75: mol_type = other DNA
tcacagtgcggtcacagccgtcgttcaccagaaagcatcaggatggtctgattttaccatcgctgcatgtggcta

SEQ ID NO: 399697 - DNA, 75 bp, synthetic construct
  source 1..75: mol_type = other DNA
ttactgcataccgggcgctgatttaccggcagagccggaagctgcatccgtagcggaaacggatggtaaagcctt

SEQ ID NO: 399698 - DNA, 75 bp, synthetic construct
  source 1..75: mol_type = other DNA
ttactgcataccgggcgctgatttaccggcagagccgaaagctgcatcggtaacggaaaccgatggtaaagcctt

SEQ ID NO: 399699 - DNA, 75 bp, synthetic construct
  source 1..75: mol_type = other DNA
gaaaatctatacagtggatgttgatgggtacattcatgacggatggtgtaagctgcctatggcaggcatcgttag

SEQ ID NO: 399700 - DNA, 75 bp, synthetic construct
  source 1..75: mol_type = other DNA
accgacgccatgctacttggcggtctgatgaaagccctgttcgctcgcggaataacgttggtcgcaacgtcaaat

SEQ ID NO: 399701 - DNA, 75 bp, synthetic construct
  source 1..75: mol_type = other DNA
tctgctggcatcaggcattgcaatcacccttacccgccatttgcataacggactggtggaagcgctaaaaaacat

SEQ ID NO: 399702 - DNA, 75 bp, synthetic construct
  source 1..75: mol_type = other DNA
atgatctggaaacgccatttaacgctcgacgaactgaacgccaccagcgataacacaatggtggcgcatctggga

SEQ ID NO: 399703 - DNA, 75 bp, synthetic construct
  source 1..75: mol_type = other DNA
ttattgtcttgctggtagcctgtggtgtgcttagtctggggctgaatcattaccgcgataacgccattacctaca

SEQ ID NO: 399704 - DNA, 75 bp, synthetic construct
  source 1..75: mol_type = other DNA
atctcgattttgcctttgcctccgcgccgcaagaagacgaagctctacgtctgaagatgaaggcgattgttgccc

SEQ ID NO: 399705 - DNA, 75 bp, synthetic construct
  source 1..75: mol_type = other DNA
tgatgaattttttgtttctgatattaccgacgccatgctgctgggtggcctgatgaaagcattgtttgctcgcgg

SEQ ID NO: 399706 - DNA, 75 bp, synthetic construct
  source 1..75: mol_type = other DNA
gcctgcaatcgatgccattaaacagcattgtgatgtaatgaacgtggacgctggtgttgattatcgactgcgtac

SEQ ID NO: 399707 - DNA, 75 bp, synthetic construct
  source 1..75: mol_type = other DNA
gcatacgccagtgcgtggcttatatatgtggggcggtgtaggacgcgggaaaacctggctgatggaccttttcta

SEQ ID NO: 399708 - DNA, 75 bp, synthetic construct
  source 1..75: mol_type = other DNA
gcccgaaaaacgtcggcgttactatttcttgatggcgataatttcaaatacatcaatgatacctggggtcatgcg

SEQ ID NO: 399709 - DNA, 75 bp, synthetic construct
  source 1..75: mol_type = other DNA
aatgaatcttgtacatgccggatttaccgcaatgaccgaaatcatccgatctgcgttaccgactggatggatgaa

SEQ ID NO: 399710 - DNA, 75 bp, synthetic construct
  source 1..75: mol_type = other DNA
attgccattaacgacgcgcaggccgcagcatgggcggagtttcaggcgctggatggcgatataaccgatatggtc

SEQ ID NO: 399711 - DNA, 75 bp, synthetic construct
  source 1..75: mol_type = other DNA
ccaccaaagttatgtatcttttcatcttcacgttttagtaccgccttacaagaaaatgctgctacatctttacct

SEQ ID NO: 399712 - DNA, 75 bp, synthetic construct
  source 1..75: mol_type = other DNA
gccctgactcgtgaacacgattctgccgaaaaattacaagagctggccgatcgtaatatgtatcaggccaagcac

SEQ ID NO: 399713 - DNA, 75 bp, synthetic construct
  source 1..75: mol_type = other DNA
tttcggaagaacgaatcgcagaatttcaccgctttgctctcgacttcaatagcttgctggatgaaatggaagagt

SEQ ID NO: 399714 - DNA, 75 bp, synthetic construct
  source 1..75: mol_type = other DNA
catcgtcagaactgacacaagccgaagcagtgaaagctcttggattcctgaaacaaaaagccactgaacagaagg

SEQ ID NO: 399715 - DNA, 75 bp, synthetic construct
  source 1..75: mol_type = other DNA
atgccatcatcaaacaggaaggcgacttatacgttagcggcggtgcgcacggtattgacgttgtcggcaacaaca

SEQ ID NO: 399716 - DNA, 75 bp, synthetic construct
  source 1..75: mol_type = other DNA
ggttcggtcgttggtatccttactggtgacgatatcactatcaataacaacggcgagacggaagttgacggcggt

SEQ ID NO: 399717 - DNA, 75 bp, synthetic construct
  source 1..75: mol_type = other DNA
gggtaattaacttcgataaagacaacgccagcgcggttaaattcacccacaacaactatgttgctctcaacgatg

SEQ ID NO: 399718 - DNA, 75 bp, synthetic construct
  source 1..75: mol_type = other DNA
ggtgatacgccggttccaccagatgacggcggtgatacgccggttccaccagatgatggcggtgatacgccagtt

SEQ ID NO: 399719 - DNA, 75 bp, synthetic construct
  source 1..75: mol_type = other DNA
cgggcgataaagccaatatttcactcgcgggcgggttagacgttggggatttctccaccggtcttgatgtctctg

SEQ ID NO: 399720 - DNA, 75 bp, synthetic construct
  source 1..75: mol_type = other DNA
gaagcgcgtgtgttaagcaaccgcttcagcatgctggcggatgccgcgccgaaggtgggtaacggtctggcgttc

SEQ ID NO: 399721 - DNA, 75 bp, synthetic construct
  source 1..75: mol_type = other DNA
catatttttaaccgtgccagtgcgcacggcaaacccagcggtatcctcgcgccggtcgaagccgatgcgcgtcgt

SEQ ID NO: 399722 - DNA, 75 bp, synthetic construct
  source 1..75: mol_type = other DNA
gaataccggagtgagtttggtggcttttttccggtacaggttcgcttcacgccatcacacggcaacgtccatatc

SEQ ID NO: 399723 - DNA, 75 bp, synthetic construct
  source 1..75: mol_type = other DNA
tgggatactggcttgatggtactggggccggagaaagccaaagaggttgttcgccgggaagggctggcggtttat

SEQ ID NO: 399724 - DNA, 75 bp, synthetic construct
  source 1..75: mol_type = other DNA
gaggaaattttgatcaagattgaactcctgtccggatcatgccgacagatcacagcaacaaggccactaaaaatc

SEQ ID NO: 399725 - DNA, 75 bp, synthetic construct
  source 1..75: mol_type = other DNA
gaataccgggccgaatttggggggttctttcctgtccagctccggtttagcccgtctcatgaccatttcgatgta

SEQ ID NO: 399726 - DNA, 75 bp, synthetic construct
  source 1..75: mol_type = other DNA
tatctggaatggggtgccacatttgtcgctgtcggcagcgacctcggtattttccgctccgccacgcagaaactg

SEQ ID NO: 399727 - DNA, 75 bp, synthetic construct
  source 1..75: mol_type = other DNA
ggtattccgtgaagcgcgtgtgttaagcaaccgcttcagcatgctggcggatgccgcgccgaaggtgggcaatgg

SEQ ID NO: 399728 - DNA, 75 bp, synthetic construct
  source 1..75: mol_type = other DNA
gcggggcatatcgggcatacgcttgccgatccgcatggtccagtctgcggctgtggacgcacaggttgcgtggaa

SEQ ID NO: 399729 - DNA, 75 bp, synthetic construct
  source 1..75: mol_type = other DNA
actgctcaccggccctggcggtctggcggggcacatcgggcatacgctggctgatcctcatggtccagtctgcgg

SEQ ID NO: 399730 - DNA, 75 bp, synthetic construct
  source 1..75: mol_type = other DNA
cgacatcaccccggttaacgaagaaaccatgtcggaaattaacgcccttcttacttccatggaaaaaacgtggga

SEQ ID NO: 399731 - DNA, 75 bp, synthetic construct
  source 1..75: mol_type = other DNA
cctcggcttcgacgctgctaccgaagcgcgttatctcggttatgtacggtttatggtcaatgttgaaggacgtta

SEQ ID NO: 399732 - DNA, 75 bp, synthetic construct
  source 1..75: mol_type = other DNA
ttattttgtctaaccagtacaaaatgatgactatgctcgatccggcaaatgctgaacgttaccgtcgcctgcaaa

SEQ ID NO: 399733 - DNA, 75 bp, synthetic construct
  source 1..75: mol_type = other DNA
ggttttaacgcccagacgccaatgtgggaaaaatatcagcgcatgcttaatgtgtggcatgcctgcccgcgtcag

SEQ ID NO: 399734 - DNA, 75 bp, synthetic construct
  source 1..75: mol_type = other DNA
taactgcattacccgtctgcgtttgtctgtgaaagatatgtcgcttgttaatgtgcaggcactgaaggacaatcg

SEQ ID NO: 399735 - DNA, 75 bp, synthetic construct
  source 1..75: mol_type = other DNA
taaccggcctcggctttaccgtgatgtctattctcggcgtcactatcggtaacactgacggcaatatcatcgact

SEQ ID NO: 399736 - DNA, 75 bp, synthetic construct
  source 1..75: mol_type = other DNA
gcttatcggactggttattccgttggtctggccgattttcgccatgggtattagcggcttaggccatatgatcaa

SEQ ID NO: 399737 - DNA, 75 bp, synthetic construct
  source 1..75: mol_type = other DNA
tggcgtgaagccgctcgatttttgcaaactgagtgcgttgacattttccgcaccggattatgaacgttatccatg

SEQ ID NO: 399738 - DNA, 75 bp, synthetic construct
  source 1..75: mol_type = other DNA
atccgctttacggatatcgctgcgttgaatttatccgtactggaaaaaatggatatgcgcgaaccacaatgtgtg

SEQ ID NO: 399739 - DNA, 75 bp, synthetic construct
  source 1..75: mol_type = other DNA
acatggtgccagtggtggcggcaatctggtttgtcgtttactacgtcatcttccgtttcgctatcacccgcttca

SEQ ID NO: 399740 - DNA, 75 bp, synthetic construct
  source 1..75: mol_type = other DNA
gttttatgctggttcatgcaagggaggctttccttcgcggacagggcaggctggccacaatccctgctctgggca

SEQ ID NO: 399741 - DNA, 75 bp, synthetic construct
  source 1..75: mol_type = other DNA
gccgcggctgaataccatatttcccctggtcctgcgcgggctggactggactacagacaaagccacagccctcgc

SEQ ID NO: 399742 - DNA, 75 bp, synthetic construct
  source 1..75: mol_type = other DNA
aggggattttccgcctggccgggaaaaactggacagaagagtttgaagccttccgggcagcgctgcgccccgtgg

SEQ ID NO: 399743 - DNA, 75 bp, synthetic construct
  source 1..75: mol_type = other DNA
aaagggtatcagattacctgggaccaggaagaaatgtggcaggacgcccatgcccgcgcctttaccgtcgctaaa

SEQ ID NO: 399744 - DNA, 75 bp, synthetic construct
  source 1..75: mol_type = other DNA
gcaggagctgcgcccggtggttccggccgtgacggaaaccctgtcggccgggaccctgcgcctggacttccgcac

SEQ ID NO: 399745 - DNA, 75 bp, synthetic construct
  source 1..75: mol_type = other DNA
gctggcctggcagatagagcatgagcgtccggtggatggccactacctgaaggggatcttccgcctggcaggaaa

SEQ ID NO: 399746 - DNA, 75 bp, synthetic construct
  source 1..75: mol_type = other DNA
taattcaacagatgcaaagttttggcgcatttcttcttaaccatcagcaaactgaaaaattgcgcgccgtttgtc

SEQ ID NO: 399747 - DNA, 75 bp, synthetic construct
  source 1..75: mol_type = other DNA
tgggaaataaagaagataagtacctaaagaacaaagcagcactcaataatacgccaggaattgaagatttaacca

SEQ ID NO: 399748 - DNA, 75 bp, synthetic construct
  source 1..75: mol_type = other DNA
cgaaaaaacctatacggctgaactttcgtccattccaggtacccccatcgaggctggccccttcgatacagtggt

SEQ ID NO: 399749 - DNA, 75 bp, synthetic construct
  source 1..75: mol_type = other DNA
tcccgaaaaaactgatcgagcggctcaagaaccgcgcagccaccgaaaacacctccgtgaacgccctcgccgaac

SEQ ID NO: 399750 - DNA, 75 bp, synthetic construct
  source 1..75: mol_type = other DNA
gcagaacgtctcacgactcaaccttgctgcgcgcgttatgcaaacctcaatctttgtcaaaaacggcccctcctg

SEQ ID NO: 399751 - DNA, 75 bp, synthetic construct
  source 1..75: mol_type = other DNA
tgcaccacacggcaattatgcactcgcagaatgtctcacggctcaaccttgccgcgcgcgttatgcaaacctcaa

SEQ ID NO: 399752 - DNA, 75 bp, synthetic construct
  source 1..75: mol_type = other DNA
aaatataggggcaaatccatagagcaaacggtcctctcttttgtcgatacccgccacacccgcaaagtagcgatg

SEQ ID NO: 399753 - DNA, 75 bp, synthetic construct
  source 1..75: mol_type = other DNA
tcatggaaaaggcttacgaagaatacttcgaaggtcttgccgaaggcgaagaagctctcagcttcaacgaattta

SEQ ID NO: 399754 - DNA, 75 bp, synthetic construct
  source 1..75: mol_type = other DNA
gagtcgcacggtgtaacggtagacaaatggggccgcatcatcgcggatgtggaaagccagtaccgttatcagacc

SEQ ID NO: 399755 - DNA, 75 bp, synthetic construct
  source 1..75: mol_type = other DNA
ttaccgcaatggcagaaggacgtcatgcggcacaggggatcattgactggctgggggtaaaatcagtcaaatctc

SEQ ID NO: 399756 - DNA, 75 bp, synthetic construct
  source 1..75: mol_type = other DNA
ttcccgtcgcgtggtctttatggcctccaccgaaggcggcgtggaaatcgaaaaagtggcggaagaaaccccgca

SEQ ID NO: 399757 - DNA, 75 bp, synthetic construct
  source 1..75: mol_type = other DNA
ccgttgccagcgaaaaaatcaaaaagcaggccacaccgggtgatgaattaacaataaaaatggttaaaaaccccg

SEQ ID NO: 399758 - DNA, 75 bp, synthetic construct
  source 1..75: mol_type = other DNA
gcatgaatcttgatgtaaatggcgtgactgtgaagccttatctgacagcggcagtgagtcatgagttttcggaca

SEQ ID NO: 399759 - DNA, 75 bp, synthetic construct
  source 1..75: mol_type = other DNA
tgatgagtacggcgcggtgacgattggcaacattgagcgctacatttcggatcaagcgctggcgaaaggctggcg

SEQ ID NO: 399760 - DNA, 75 bp, synthetic construct
  source 1..75: mol_type = other DNA
gtccggtgccggtggaaggcagtgaatttgtcatgccagccgacgcggtgattatggcgtttggttttaatccgc

SEQ ID NO: 399761 - DNA, 75 bp, synthetic construct
  source 1..75: mol_type = other DNA
ttggcaataacacaatagcagacagtggtaagattgtaagtgatgagataacactttcaattacaaacaacggac

SEQ ID NO: 399762 - DNA, 75 bp, synthetic construct
  source 1..75: mol_type = other DNA
cgtgatgaagctaacatgcccggttcgaaaaaagaggtgaagaacgcccgcgaagagggggctaacttcgaattt

SEQ ID NO: 399763 - DNA, 75 bp, synthetic construct
  source 1..75: mol_type = other DNA
gggcgtgtctgcccgcaagaccgcctgtgtgaaggtgcctgcaccattcgcgatgaacacggcgcggtaaccatc

SEQ ID NO: 399764 - DNA, 75 bp, synthetic construct
  source 1..75: mol_type = other DNA
tgtacgtttcttacgtactcgtcttggcgaaccggacgctcaggggcgccgacgccctgttcctgttgagggcag

SEQ ID NO: 399765 - DNA, 75 bp, synthetic construct
  source 1..75: mol_type = other DNA
gacgaactcaacctgctctatgtggcggccacgcgggcccggaagacgcttgttctgaacagtgtacttcgccag

SEQ ID NO: 399766 - DNA, 75 bp, synthetic construct
  source 1..75: mol_type = other DNA
tgaccagccaggcctctatttccacgaagaatatgtcgatatgtgccgcggtccgcatgtaccgaacatgcgttt

SEQ ID NO: 399767 - DNA, 75 bp, synthetic construct
  source 1..75: mol_type = other DNA
ccgtttgaatatcaactgggtgaaggcgctttctacggtccgaaaattgagtttaccctgtatgactgcctcgat

SEQ ID NO: 399768 - DNA, 75 bp, synthetic construct
  source 1..75: mol_type = other DNA
gttcaccacgtcttctgagaaccgtgaatactgcattaagccgatgaactgcccgggtcacgtacaaattttcaa

SEQ ID NO: 399769 - DNA, 75 bp, synthetic construct
  source 1..75: mol_type = other DNA
aaaaaagccctcaacgcttacctgcagcgcctggaagaagccgctaaacgcgaccaccgtaaaatcggtaaacag

SEQ ID NO: 399770 - DNA, 75 bp, synthetic construct
  source 1..75: mol_type = other DNA
gtacgtggttttacccaggatgacgcgcatatcttctgtactgaagaacaaattcgcgatgaagttaacggatgt

SEQ ID NO: 399771 - DNA, 75 bp, synthetic construct
  source 1..75: mol_type = other DNA
cgaactggttgatgcttgcgatctgattgaaaacgacgcacaactgtcgatcattaccgccaaagacgaagaagg

SEQ ID NO: 399772 - DNA, 75 bp, synthetic construct
  source 1..75: mol_type = other DNA
aatgaatcgtgtacatgccggatttaccgcaacgaccgcaatcatccgatctgcgttaccgactggatggatgaa

SEQ ID NO: 399773 - DNA, 75 bp, synthetic construct
  source 1..75: mol_type = other DNA
aatgaatcgtgtacatgccggatttaccgcaaagaccgaaatcatccgatctgcgttaccgactggatggatgaa

SEQ ID NO: 399774 - DNA, 75 bp, synthetic construct
  source 1..75: mol_type = other DNA
agcgcctggaagaagccgcgaaacgcgaccaccgtaaaatcggtaaacagctcgacctgtaccatatgcaggaag

SEQ ID NO: 399775 - DNA, 75 bp, synthetic construct
  source 1..75: mol_type = other DNA
gtacagtacagctggacttctccttgccgtctcgtctgagcgcctcctatgtgggcgaagacaacgagcgtaagg

SEQ ID NO: 399776 - DNA, 75 bp, synthetic construct
  source 1..75: mol_type = other DNA
aaagatctgttcccggaatatcaccagttgtggccgaataaattccataacgtcaccaacggtattactccgcgt

SEQ ID NO: 399777 - DNA, 75 bp, synthetic construct
  source 1..75: mol_type = other DNA
gtcatcaggtaaaaaagcgattggtgcaggcgcaggtaacccgccagctgtggtagatgaaacggcggatatcga

SEQ ID NO: 399778 - DNA, 75 bp, synthetic construct
  source 1..75: mol_type = other DNA
cagtaccggagaagccataccgatggatatgcggactctgttaccgaccagccttgcggctgaattacacggttt

SEQ ID NO: 399779 - DNA, 75 bp, synthetic construct
  source 1..75: mol_type = other DNA
ggcaggcgtttgcccccggtaacagtacatatcacctttatcagtgtcgttatggtgtgaaatggccgaacggca

SEQ ID NO: 399780 - DNA, 75 bp, synthetic construct
  source 1..75: mol_type = other DNA
tgccggacggtggctggcgtgattggtgctgcgcttcacgcggcccggaagaagaaaaaacatactggatcaacg

SEQ ID NO: 399781 - DNA, 75 bp, synthetic construct
  source 1..75: mol_type = other DNA
gatgaactcaacctgctctatgtggctgccacacgggctcggcggacgctgatcctcaacagtgtgctgcgccag

SEQ ID NO: 399782 - DNA, 75 bp, synthetic construct
  source 1..75: mol_type = other DNA
tccgtcacgctccgaccgctgaacaacaggctgtcattaactggcagggacagcgactggttgtcagggcttttg

SEQ ID NO: 399783 - DNA, 75 bp, synthetic construct
  source 1..75: mol_type = other DNA
atatggcttgttccgccagtcatttgtcgatggcaaacaggttgaagcgccggatgactggcatcgcggtaacta

SEQ ID NO: 399784 - DNA, 75 bp, synthetic construct
  source 1..75: mol_type = other DNA
ggcggcggaaaaactgatcccggcggcggatatctccgaacaaatttcgactgcaggtaaagaagcttccggtac

SEQ ID NO: 399785 - DNA, 75 bp, synthetic construct
  source 1..75: mol_type = other DNA
tcccggaatatcaccagctatggccgaacaaattccataacgtcaccaacggtattaccccacgtcgctggatca

SEQ ID NO: 399786 - DNA, 75 bp, synthetic construct
  source 1..75: mol_type = other DNA
tgcgcgtttccgctgtcaggtccgtcatgtctatgccgaagaaggctgtggtttctgcggatacagcgagtatga

SEQ ID NO: 399787 - DNA, 75 bp, synthetic construct
  source 1..75: mol_type = other DNA
agtgtgggccaaactggcggtggtacacgacaaacaagtgcatatggcgaacctgtgtgtggttggcggtttcgc

SEQ ID NO: 399788 - DNA, 75 bp, synthetic construct
  source 1..75: mol_type = other DNA
agggcggcgatccgtatctggtgatggcggatttcgcagcctatgtagaggcacaaaagcaggtggatgtgctgt

SEQ ID NO: 399789 - DNA, 75 bp, synthetic construct
  source 1..75: mol_type = other DNA
ttgaaaccaacatgcgtccgtcagggggggtgggttatacccttcacagcggtgtgaaccttcctgggttatttg

SEQ ID NO: 399790 - DNA, 75 bp, synthetic construct
  source 1..75: mol_type = other DNA
tgcgcaacttggcgtgacctttgaacgtattgttacgggcattgaggaacagcgccatccgcaggagagcgcgca

SEQ ID NO: 399791 - DNA, 75 bp, synthetic construct
  source 1..75: mol_type = other DNA
catcaggtgatgacggcagtggcgttggccgacagccagcacattctcgattgcctggtggtcaccgatgtgact

SEQ ID NO: 399792 - DNA, 75 bp, synthetic construct
  source 1..75: mol_type = other DNA
ttcagctatctctaaaaaattcagtgctaaagggctgaatgaagcgctggccgatacctcatggcaggactgtat

SEQ ID NO: 399793 - DNA, 75 bp, synthetic construct
  source 1..75: mol_type = other DNA
ttgaaaccaacatgcgtccgtcagaggggggtgggttatacccttcacagcggtgtgaaccttcctgggttattt

SEQ ID NO: 399794 - DNA, 75 bp, synthetic construct
  source 1..75: mol_type = other DNA
ttgaaaccaacatgcgtccgtcaggcggggtgggttatacccttcacagcggggtgaaccttcccgggttgtttg

SEQ ID NO: 399795 - DNA, 75 bp, synthetic construct
  source 1..75: mol_type = other DNA
aactaacaaaagacaatataaaacctttttcgtccgagaattctggcgaatcctctgaccagccagaaaacgacc

SEQ ID NO: 399796 - DNA, 75 bp, synthetic construct
  source 1..75: mol_type = other DNA
gacaggaagcggtaaaacctggatcgccaatgttcttggcgaacaggcttgtcgccagaaaaacaatgttcagta

SEQ ID NO: 399797 - DNA, 75 bp, synthetic construct
  source 1..75: mol_type = other DNA
agcaacaggctggcgtgacagccggaaaaccaaaactcgacctgacaaacactgactggatttacggggtggatc

SEQ ID NO: 399798 - DNA, 75 bp, synthetic construct
  source 1..75: mol_type = other DNA
gccgaactatctgcatcgccgttgttaccagattcagaaaaaactgcatcgcagatacccccttctgttttacct

SEQ ID NO: 399799 - DNA, 75 bp, synthetic construct
  source 1..75: mol_type = other DNA
ctgccgaactatctgcattgccgttaccagattcagaaaaggcaacatcgcagatacaaccttcgattttgtctt

SEQ ID NO: 399800 - DNA, 75 bp, synthetic construct
  source 1..75: mol_type = other DNA
aagctatgataaaagctatggcaacaaggttgaaatcccatgaagacatcaatcctgtcactggcgctgagatat

SEQ ID NO: 399801 - DNA, 75 bp, synthetic construct
  source 1..75: mol_type = other DNA
acatcagtgccatggagtttgaactcaatactcaaaataccgcaggtgaagtgctcacactgacctgcacaagcg

SEQ ID NO: 399802 - DNA, 75 bp, synthetic construct
  source 1..75: mol_type = other DNA
tccgttcgagtgcctgaaagacgcgtttgttggtccgaccctgattgcatcctctatggaacacccgggcgctgc

SEQ ID NO: 399803 - DNA, 75 bp, synthetic construct
  source 1..75: mol_type = other DNA
atggctttaaatcttcaagacaaacaagcgattgttgctgaagtcagcgaagtagccaaaggcgcgctgtctgca

SEQ ID NO: 399804 - DNA, 75 bp, synthetic construct
  source 1..75: mol_type = other DNA
gccatgatttaagtattcaggagctgtgctggtgggctttcatgcgcaacatgatgcacctgatgccggaagaag

SEQ ID NO: 399805 - DNA, 75 bp, synthetic construct
  source 1..75: mol_type = other DNA
ggtagcgataaaggttgcacaggacggcggtgatgcgcagggagcagtgacgcaatattatgcttcgatgggact

SEQ ID NO: 399806 - DNA, 75 bp, synthetic construct
  source 1..75: mol_type = other DNA
agttgggcgggggatgatccggataagcaggcatttgccagagaagtggcctcccgtcagccagaaatgctggag

SEQ ID NO: 399807 - DNA, 75 bp, synthetic construct
  source 1..75: mol_type = other DNA
attcaaagtggatcaggaagtcagaaagctggtggaggctggccgtaaatttattatggagccggtgccgcgtga

SEQ ID NO: 399808 - DNA, 75 bp, synthetic construct
  source 1..75: mol_type = other DNA
ggagaattataaagataagtccacccaacagattaacaatccatttggaggaaaattaaaagtggctgctgtaaa

SEQ ID NO: 399809 - DNA, 75 bp, synthetic construct
  source 1..75: mol_type = other DNA
aggtgatgagtgttatgtctgctattaacggtttgtatgtaggtcaggcatcatatactggtctgactgatgctg

SEQ ID NO: 399810 - DNA, 75 bp, synthetic construct
  source 1..75: mol_type = other DNA
ttgataaaaaagcgcagaagcgtaagagccccctcctttttcagaagggcttgtcattaatcgaggcctctatgg

SEQ ID NO: 399811 - DNA, 75 bp, synthetic construct
  source 1..75: mol_type = other DNA
gacctactaaagagcgtattcgtcgatatgtttagtgatccggtaaaaaatgcaaaaggatgggaactaacaaca

SEQ ID NO: 399812 - DNA, 75 bp, synthetic construct
  source 1..75: mol_type = other DNA
ttgataaaaaagcgcagaagcgtaagagttccctcctttttcagaagggcttgtcattaatcgaggcctctatgg

SEQ ID NO: 399813 - DNA, 75 bp, synthetic construct
  source 1..75: mol_type = other DNA
tatattgaactggctaatattcctaagagtgcctgtgtgaacctctcgtcaatgaacttcgggacctcactgggt

SEQ ID NO: 399814 - DNA, 75 bp, synthetic construct
  source 1..75: mol_type = other DNA
attacccgaatcaggtaagaaaaataaagtttacctgaaagaggtaaatttacctgaatcaggtaagaaaagttt

SEQ ID NO: 399815 - DNA, 75 bp, synthetic construct
  source 1..75: mol_type = other DNA
tttggctcgatttcaagcatcaaatgcctagtcagcaattaacatgtaacccttatctcgtaattacgaataatt

SEQ ID NO: 399816 - DNA, 75 bp, synthetic construct
  source 1..75: mol_type = other DNA
caggctggcgtgatagccggcaaaccaaaactcgacctgacgaacactgactggatttacggggtggagctatga

SEQ ID NO: 399817 - DNA, 75 bp, synthetic construct
  source 1..75: mol_type = other DNA
gagaattctggcgaatcctctgtgaaccgccccgggtttcctggagagtgttttatctgtgaactcaggctgcca

SEQ ID NO: 399818 - DNA, 75 bp, synthetic construct
  source 1..75: mol_type = other DNA
tttatgtatcgccagggattttccgatgtgttccaccgcgtggcgcaaatcccggaaaatgtaccgatgaatctg

SEQ ID NO: 399819 - DNA, 75 bp, synthetic construct
  source 1..75: mol_type = other DNA
ggacaggcgcgatatcgtttaatgcggcggcgggccagcaatgagcaacgaagctggcgctatctggacatcatc

SEQ ID NO: 399820 - DNA, 75 bp, synthetic construct
  source 1..75: mol_type = other DNA
gaatagatgaaaaatttagtatatcaaagctttcatttaatgaattatacaaaatgacaataagcttagatatat

SEQ ID NO: 399821 - DNA, 75 bp, synthetic construct
  source 1..75: mol_type = other DNA
gtcgttcgtatcgggttattttgcttgggctatttgcgactttgctacaggcaaaaggcacattgcggctggata

SEQ ID NO: 399822 - DNA, 75 bp, synthetic construct
  source 1..75: mol_type = other DNA
cattcgttttaatcgtccgtcatcgctgtttgctcgctgctggttgctggtggaaggggaaacggaaacctgggt

SEQ ID NO: 399823 - DNA, 75 bp, synthetic construct
  source 1..75: mol_type = other DNA
ttcgttaactccagtggaacatgtttgccgcctggtgcgtgaatcttctcgtgttgccgcctggcgtctggggcc

SEQ ID NO: 399824 - DNA, 75 bp, synthetic construct
  source 1..75: mol_type = other DNA
tcttttcttctcatcgcaacgagaggaaagagatcttgtctgtttccgatttttcaatgatcgaacctaacaacg

SEQ ID NO: 399825 - DNA, 75 bp, synthetic construct
  source 1..75: mol_type = other DNA
tccggccaaactccgcgacaagtggacccagctcgaaatcaaccgaaacaagcaacaggctggcgtgacagccgg

SEQ ID NO: 399826 - DNA, 75 bp, synthetic construct
  source 1..75: mol_type = other DNA
gcggtgaagaagatcgctacagccacaccgatctgtgggatttccaggctaacgttgaaggctcgcagaaaattg

SEQ ID NO: 399827 - DNA, 75 bp, synthetic construct
  source 1..75: mol_type = other DNA
gtttcctgcattgctttgaagcttcaagttatatcgacaaacgcaccatcaacgaaattaaacttggtgactatg

SEQ ID NO: 399828 - DNA, 75 bp, synthetic construct
  source 1..75: mol_type = other DNA
ttaagcccagagcaactattgaagttgaatgtattcttgacctatcagaatgaattaaacccttacagcgaggtg

SEQ ID NO: 399829 - DNA, 75 bp, synthetic construct
  source 1..75: mol_type = other DNA
tacaatcaacgaaattaaacttggtgactttgttcacaaactggaagtaacagacccagactacaagagatttat

SEQ ID NO: 399830 - DNA, 75 bp, synthetic construct
  source 1..75: mol_type = other DNA
agtagccaaaggcgcgctgtctgcagtagttgcggattcccgtggcgtaactgtagataaaatgactgaactgcg

SEQ ID NO: 399831 - DNA, 75 bp, synthetic construct
  source 1..75: mol_type = other DNA
aagcgattgttgctgaagtcagcgaagtagccaaaggcgcgctgtctgcagtagttgcggattcccgtggcgtaa

SEQ ID NO: 399832 - DNA, 75 bp, synthetic construct
  source 1..75: mol_type = other DNA
tttggcgacaacaccaccaaagggatggatcagtacgctgagcagctttataccgatgtggtcgatttgcaaaaa

SEQ ID NO: 399833 - DNA, 75 bp, synthetic construct
  source 1..75: mol_type = other DNA
cggaacgcgctgaaagggccgattactgcgctggcggaagatctggcgcaacttcgtggtgtgctgggactggat

SEQ ID NO: 399834 - DNA, 75 bp, synthetic construct
  source 1..75: mol_type = other DNA
accgatgaccattacggttaacgccgggaaaacacagttcattattcagaaccacagccagaaggcgctggagtg

SEQ ID NO: 399835 - DNA, 75 bp, synthetic construct
  source 1..75: mol_type = other DNA
cgggcgtatgacggcctgagtgttgctggcccgtcaggtgcatacgagtattttgcccgcagcgccagcggtctg

SEQ ID NO: 399836 - DNA, 75 bp, synthetic construct
  source 1..75: mol_type = other DNA
tttcttgaggcactgaaagccagcggtaagcagcgaattttgctcaccaatgcgcatccgcacaacctgtcggta

SEQ ID NO: 399837 - DNA, 75 bp, synthetic construct
  source 1..75: mol_type = other DNA
cgggcgtacgacggcctgagtgttgctggcccgtcaggtgcatacgagtattttgcccgcagcgccagtggtctg

SEQ ID NO: 399838 - DNA, 75 bp, synthetic construct
  source 1..75: mol_type = other DNA
aattggtaacccgtttggtctgggcgagacggtaacttccgggattgtctctgcgctggggcgtagcggcctgaa

SEQ ID NO: 399839 - DNA, 75 bp, synthetic construct
  source 1..75: mol_type = other DNA
ttttattattgaaaatcgcctgaccaaaccagagcaactgactggttttaatagtgaaggttacttcttcgatga

SEQ ID NO: 399840 - DNA, 75 bp, synthetic construct
  source 1..75: mol_type = other DNA
atgctgattcttatttcacctgcgaaaacgcttgattaccaaagcccgttgaccaccacgcgatatacgctgccg

SEQ ID NO: 399841 - DNA, 75 bp, synthetic construct
  source 1..75: mol_type = other DNA
ccattttcagctagcctaaaaaatttagacaaagttttgaatgaagtaggcatgcggcgggtccatttatttcaa

SEQ ID NO: 399842 - DNA, 75 bp, synthetic construct
  source 1..75: mol_type = other DNA
tcgctgagcggtatgggggccattgagaatgccggggatgatgagcatgaggcgctgacgccggaaaagtcctga

SEQ ID NO: 399843 - DNA, 75 bp, synthetic construct
  source 1..75: mol_type = other DNA
attgccttcagttcatggtcatcgtgggtatttggtacggtaataggggcattctccggcagcggcttgctgcaa

SEQ ID NO: 399844 - DNA, 75 bp, synthetic construct
  source 1..75: mol_type = other DNA
gacggtggccaactttggcttctcttccctgtggccgctggcgaagctggtactactggtgcatttcgccattct

SEQ ID NO: 399845 - DNA, 75 bp, synthetic construct
  source 1..75: mol_type = other DNA
tgtatggcattgacctgtccatctggcaggaaatcattctggtgctgacgctgatggtgacctcgaaagggattg

SEQ ID NO: 399846 - DNA, 75 bp, synthetic construct
  source 1..75: mol_type = other DNA
atgatgagtattattttactaatacacaaagtctgcttgcttatcatggtgtcgaatcaatggtggatctatatt

SEQ ID NO: 399847 - DNA, 75 bp, synthetic construct
  source 1..75: mol_type = other DNA
ttcggtgatgattctccgttctgccaggagggttctccgttccagagctctccgttctgccaggggggcctgggc

SEQ ID NO: 399848 - DNA, 75 bp, synthetic construct
  source 1..75: mol_type = other DNA
gaaaaactggcgcagcaggcgggtattgatcagtctcatccagcgctgcaacgctggtatgcctcaatccatgaa

SEQ ID NO: 399849 - DNA, 75 bp, synthetic construct
  source 1..75: mol_type = other DNA
gccgctggagcgagaactggatgatcggcattgccttcagttcatggtcatcgtgggtatttggtacggtaatag

SEQ ID NO: 399850 - DNA, 75 bp, synthetic construct
  source 1..75: mol_type = other DNA
aagaactattttctttttttatagcgattttaacatggatactgaataacagatttaaaagcaaggcaaagttat

SEQ ID NO: 399851 - DNA, 75 bp, synthetic construct
  source 1..75: mol_type = other DNA
aaacacagcctgatattcacctgtatggtgggcgtgattaccacgcttcaggcctacgtcttaacgtggatgatt

SEQ ID NO: 399852 - DNA, 75 bp, synthetic construct
  source 1..75: mol_type = other DNA
tgccgctctgcaagccacagcagcacaacaaattggcgtctctgacctgttgctggttgcagccaacactaccgg

SEQ ID NO: 399853 - DNA, 75 bp, synthetic construct
  source 1..75: mol_type = other DNA
ggtttacggggctgaagcggggatactgtctggcagagctggttatgatgcatgagccgctggcccgaatgcagt

SEQ ID NO: 399854 - DNA, 75 bp, synthetic construct
  source 1..75: mol_type = other DNA
ttgtggtgactgttatgaatgatgaaagtgaaatatttatggagatggctattaataactttaaaaagcatcttc

SEQ ID NO: 399855 - DNA, 75 bp, synthetic construct
  source 1..75: mol_type = other DNA
aattggtaacccgttcggcctgggcgagacagtaacttccgggattgtctctgcgctgggacgtagcggcctgaa

SEQ ID NO: 399856 - DNA, 75 bp, synthetic construct
  source 1..75: mol_type = other DNA
gctctgatatcgcgctgatccagatccagaacccgaaaaacctgaccgcaattaagatggcggattctgatgcgc

SEQ ID NO: 399857 - DNA, 75 bp, synthetic construct
  source 1..75: mol_type = other DNA
aaaacagtctacgttacacagacagcggcggcagcctgcaaatctccgccgagcagcgcgacaaaacggtacgtc

SEQ ID NO: 399858 - DNA, 75 bp, synthetic construct
  source 1..75: mol_type = other DNA
gcaattttccctgccagacagtattaccgtatttggcgatcgcgaccgtttaatgcagttattcaataacttact

SEQ ID NO: 399859 - DNA, 75 bp, synthetic construct
  source 1..75: mol_type = other DNA
gtggcgggcggcgcatttcgcgaacgattcgccagccgtggcctgaaactgcaattttccctgccagacagtatt

SEQ ID NO: 399860 - DNA, 75 bp, synthetic construct
  source 1..75: mol_type = other DNA
ttgcaggcgtaacgctattttctattcccgtcgccattctggcaggcattgtctgtggctgcctcactgcgttaa

SEQ ID NO: 399861 - DNA, 75 bp, synthetic construct
  source 1..75: mol_type = other DNA
gaccagatgttcggtactgcaaccatctacaaacaaccccaccaacgtaactgcattcgcctctggatgcagttt

SEQ ID NO: 399862 - DNA, 75 bp, synthetic construct
  source 1..75: mol_type = other DNA
ttgccaccgtcctgagcggaatcaccttcacggcttttgccgcgcagcccctgagtagccaggacaccggacaac

SEQ ID NO: 399863 - DNA, 75 bp, synthetic construct
  source 1..75: mol_type = other DNA
aaacgcttgattaccaaagcccgttgaccaccacgcgctatacgctgccggagctgttagacaactcccagcagc

SEQ ID NO: 399864 - DNA, 75 bp, synthetic construct
  source 1..75: mol_type = other DNA
gtcagggggtgcagtggacgatgaatgcctggcaaacccaggactgggtggcgctgggcggttgtgccgctgggg

SEQ ID NO: 399865 - DNA, 75 bp, synthetic construct
  source 1..75: mol_type = other DNA
ttttgagtttgcgcagtcgcagtttgaacataataaaaacgttgatcagcgtgactttgattacaaagccaaagt

SEQ ID NO: 399866 - DNA, 75 bp, synthetic construct
  source 1..75: mol_type = other DNA
ctacaaataaccccaccaacgtaactgcattcgcctctggatgcagttttcgcctgttttgtaatcaaaaaacat

SEQ ID NO: 399867 - DNA, 75 bp, synthetic construct
  source 1..75: mol_type = other DNA
ttaacaaacgagctgaggctgagcgtatcgctaaagagcaacgacttcaggctgagcgtatgcgtgaagagaaca

SEQ ID NO: 399868 - DNA, 75 bp, synthetic construct
  source 1..75: mol_type = other DNA
agctggctgaagctggcgtgacaatcggtaacttcttcagtaatgacctgatgaacgcctaccaacgccgccagc

SEQ ID NO: 399869 - DNA, 75 bp, synthetic construct
  source 1..75: mol_type = other DNA
catatcaagtctcaaacaaaagttaataaaacagtaataacatcagatattctccaacttgaaagagcaatcgaa

SEQ ID NO: 399870 - DNA, 75 bp, synthetic construct
  source 1..75: mol_type = other DNA
gatcgcagcaaatttgcagagatatcgaaaaattatggttattttatgccgaagcagcagggactttctctgaaa

SEQ ID NO: 399871 - DNA, 75 bp, synthetic construct
  source 1..75: mol_type = other DNA
ctctggctgaagctggcgtgaccatcggcaacttcttcagtaatgacctgatgatcgcctaccaacgtcgccagc

SEQ ID NO: 399872 - DNA, 75 bp, synthetic construct
  source 1..75: mol_type = other DNA
tgaacaaacgggctgaggctgagcgtatcgctaaagagcaacgcattcaggcggagcgtatgcgtgaagaaaaca

SEQ ID NO: 399873 - DNA, 75 bp, synthetic construct
  source 1..75: mol_type = other DNA
attgttgccgaccggcttagccatgcctccttgctggaggctgccagtttaagcccggcacagcttcgccgtttt

SEQ ID NO: 399874 - DNA, 75 bp, synthetic construct
  source 1..75: mol_type = other DNA
cccaagcgagatagctgatcgtgacggtctgtcagccaggataagtccaaaagggaaaattactttccagtaccg

SEQ ID NO: 399875 - DNA, 75 bp, synthetic construct
  source 1..75: mol_type = other DNA
tgagcgtggcaaattaacaataagcgccattgtgagcgactatttatccctgccgaacgttattaagctggttgc

SEQ ID NO: 399876 - DNA, 75 bp, synthetic construct
  source 1..75: mol_type = other DNA
aaacctcgcctcggggatttccgtcgccagcttattggtcaggtgaaagagacgctgcaaaaaggcaaaactcct

SEQ ID NO: 399877 - DNA, 75 bp, synthetic construct
  source 1..75: mol_type = other DNA
atggggatcagttttcaacaggcattgggagtacatccgcaggcagtgaagttacgtcttgagaggaccgagcta

SEQ ID NO: 399878 - DNA, 75 bp, synthetic construct
  source 1..75: mol_type = other DNA
gcaatctgcgtttaattaatcgcatcgccacgctgtatggcattgaactgggatattacagccgtttgcacctgt

SEQ ID NO: 399879 - DNA, 75 bp, synthetic construct
  source 1..75: mol_type = other DNA
cgataaatatgattatcttgatgaacaaaaggaggcactaaataagtttgcggattatgtattatctttggctga

SEQ ID NO: 399880 - DNA, 75 bp, synthetic construct
  source 1..75: mol_type = other DNA
catgaggaggccgggtccatgttctttaacttcctgcaattcgtagaagctcttaacccagccgttgtgctgatt

SEQ ID NO: 399881 - DNA, 75 bp, synthetic construct
  source 1..75: mol_type = other DNA
cccgttttcagaacgcgatattgatgtggcgcggcaaaattatctggcgcaggaagcctccgtaaagtcatcggc

SEQ ID NO: 399882 - DNA, 75 bp, synthetic construct
  source 1..75: mol_type = other DNA
cgaaaaactggcggcactcattacgcgttttcgtgccggagtgcaggatttgccgtttacgcttgctgactcatg

SEQ ID NO: 399883 - DNA, 75 bp, synthetic construct
  source 1..75: mol_type = other DNA
gaattatcggtgatgggcctctttttgatgaaattctggcacctatttcacagttagaaaatgttattatcgaac

SEQ ID NO: 399884 - DNA, 75 bp, synthetic construct
  source 1..75: mol_type = other DNA
gaacataaagatgaccttgaggtaatgaaacgatgctgtgatgctgaactaataacaatgaaaaaatgtggttta

SEQ ID NO: 399885 - DNA, 75 bp, synthetic construct
  source 1..75: mol_type = other DNA
gctgctggcaagggattttctcgtcagcttctgactggtgacgatgagttttgcggcaccatagggaaggactat

SEQ ID NO: 399886 - DNA, 75 bp, synthetic construct
  source 1..75: mol_type = other DNA
gttttggagcacctgtggccataacagcagcactgctcgtggtgcttgggttcagaccactttacgcggccgggt

SEQ ID NO: 399887 - DNA, 75 bp, synthetic construct
  source 1..75: mol_type = other DNA
tgccagaattcattattgctgagagactaaatgaacagaatatacctgcagaaaatggaacattatggactcgtg

SEQ ID NO: 399888 - DNA, 75 bp, synthetic construct
  source 1..75: mol_type = other DNA
tacagctatctccaaataaatgaagcactaagatcattttactcagagataattgaggattttaagggcgaaata

SEQ ID NO: 399889 - DNA, 75 bp, synthetic construct
  source 1..75: mol_type = other DNA
tggtataacgagaaaataaatccgaaggaaaaagaaaataaacctgtacctgcagccccccgtcaggagccggat

SEQ ID NO: 399890 - DNA, 75 bp, synthetic construct
  source 1..75: mol_type = other DNA
atgagaccggttgttttactgcttattacctcgctggggctgctgatatccggtcatgggcgagcgcaacgtgaa

SEQ ID NO: 399891 - DNA, 75 bp, synthetic construct
  source 1..75: mol_type = other DNA
gcggtcaggctcagcggctgggcgtgacgcatctcccggcacttttcctggttgaaccgggggcagagcgttacc

SEQ ID NO: 399892 - DNA, 75 bp, synthetic construct
  source 1..75: mol_type = other DNA
atgggcaaaaccgaccgcagcgccaacccttcgccgggcaacaaaaaaggcggtctcgcaaacgtggtaaagaaa

SEQ ID NO: 399893 - DNA, 75 bp, synthetic construct
  source 1..75: mol_type = other DNA
acccttcgccgggcaacaaaaagggcggcctcgccaacgtggtaaagaaggcactcggctccattgctaaatcgg

SEQ ID NO: 399894 - DNA, 75 bp, synthetic construct
  source 1..75: mol_type = other DNA
atgagtgaaaacaccatcaacaaggcgctgcgtaagatgggctatgacaccacgcaggacatctgcggtcatggt

SEQ ID NO: 399895 - DNA, 75 bp, synthetic construct
  source 1..75: mol_type = other DNA
catgcggtagggcggctggaagtgatcctcgtcggcattaaaatgatgatcctgttattgctgattattgccggt

SEQ ID NO: 399896 - DNA, 75 bp, synthetic construct
  source 1..75: mol_type = other DNA
atgggcaaaaccgaccgcagcgccaacccttcgccgggcaacaaaaacggcggactcgctaacgtggtaaagaaa

SEQ ID NO: 399897 - DNA, 75 bp, synthetic construct
  source 1..75: mol_type = other DNA
atgggcaaaaccgaccgcagcgccaacccttcgccgggcaacaaaaatggcggactcgccaacgtggtaaagaaa

SEQ ID NO: 399898 - DNA, 75 bp, synthetic construct
  source 1..75: mol_type = other DNA
cagtgttcgtccgttatcatacggttttatttcgcaggacgacctggcaaaacagttcctgaacgtttctgaaga

SEQ ID NO: 399899 - DNA, 75 bp, synthetic construct
  source 1..75: mol_type = other DNA
aggtctacgccacattcagtgagctaccactggaaatcgttgttgatgttcgctcttactctgtttaccagcttc

SEQ ID NO: 399900 - DNA, 75 bp, synthetic construct
  source 1..75: mol_type = other DNA
tattcccgtagaactcaacaatgatgacaagaaaaaattggttgccgaatactgccagaagaactttgttgataa

SEQ ID NO: 399901 - DNA, 75 bp, synthetic construct
  source 1..75: mol_type = other DNA
aacgtttcacaactcttgtcatagatttcttcaaagaaaaatttgtatgggctagatcaagcagagttaagcatg

SEQ ID NO: 399902 - DNA, 75 bp, synthetic construct
  source 1..75: mol_type = other DNA
ttctgattctggaacaaatactattctgaaaacatcctcttctcaaaacccaaacagggcatccagaagcgcccc

SEQ ID NO: 399903 - DNA, 75 bp, synthetic construct
  source 1..75: mol_type = other DNA
ggaatgacaccgagtcacaggaacaacgagctgccgaacaagctcaacgtgatcagcaaatagaggaagcgaaga

SEQ ID NO: 399904 - DNA, 75 bp, synthetic construct
  source 1..75: mol_type = other DNA
aacgtatcgatcaccgttctctcaggacacaatgtgctgatgcccttgctcacgcagaagaagcattcagtgccg

SEQ ID NO: 399905 - DNA, 75 bp, synthetic construct
  source 1..75: mol_type = other DNA
aatgctggacgtggcggcgctgggactggacacaggacgcgcacttggcattaatccgcatgtgctcgcagggag

SEQ ID NO: 399906 - DNA, 75 bp, synthetic construct
  source 1..75: mol_type = other DNA
ttgttatgggaatatctttgcgttctatttccaaaggaaaaggttgttctgaaggcacgataaggaagaatttgc

SEQ ID NO: 399907 - DNA, 75 bp, synthetic construct
  source 1..75: mol_type = other DNA
tttagctaagataaacgaatgttcagatggtaaaataaggaaaaaaatgcaaatggcaatgggatttattgcagg

SEQ ID NO: 399908 - DNA, 75 bp, synthetic construct
  source 1..75: mol_type = other DNA
aagtctacaagactttcagcgaacttgatcttgaaatcgtcgttgatgtcagaagcttcaccgtggctgctcttg

SEQ ID NO: 399909 - DNA, 75 bp, synthetic construct
  source 1..75: mol_type = other DNA
aggtgaagtgcatgatgaggttcgccgggaaatccgtaacgcggatgtgggccagcttgcccgcagtattaaccg

SEQ ID NO: 399910 - DNA, 75 bp, synthetic construct
  source 1..75: mol_type = other DNA
ggaataacaccgagtctcaggaacagcgagctacagaacaagctcaacgcgaccagcaaattgaagaggccaaga

SEQ ID NO: 399911 - DNA, 75 bp, synthetic construct
  source 1..75: mol_type = other DNA
tcgttccgtgtcgtcgccagaagctggtttgccaccaaaacaaaatggtcagaagattacgccgatacggtatgg

SEQ ID NO: 399912 - DNA, 75 bp, synthetic construct
  source 1..75: mol_type = other DNA
aagataagtttggctcctggccagaagtgatgaaaacccactttaccagcggcggtgagttagacaagctgttgg

SEQ ID NO: 399913 - DNA, 75 bp, synthetic construct
  source 1..75: mol_type = other DNA
acggaactgctgaacagttcttatgacgtctcccgcgagctgtttgccgccctgaacccgccgtttgagcaacaa

SEQ ID NO: 399914 - DNA, 75 bp, synthetic construct
  source 1..75: mol_type = other DNA
ccgcagaccgagctgttccgcgtggaagacaaatttggctcctggccggaagtgatgaaaacccacttcaccagc

SEQ ID NO: 399915 - DNA, 75 bp, synthetic construct
  source 1..75: mol_type = other DNA
ttgtcacttataaccaggtgaccgacgtacaaatcctgcacgacaaaggcaagctgatcccggctgactggcagt

SEQ ID NO: 399916 - DNA, 75 bp, synthetic construct
  source 1..75: mol_type = other DNA
aagacaaatttggctcctggccggaagtgatgaaaacccactttaccagcggcggcgagttagacaagctgttag

SEQ ID NO: 399917 - DNA, 75 bp, synthetic construct
  source 1..75: mol_type = other DNA
aaacagtatgaagcgcagggctttgaagtggtgattccgaaaaccaatattctggcggaattcccggtggcgtgg

SEQ ID NO: 399918 - DNA, 75 bp, synthetic construct
  source 1..75: mol_type = other DNA
atgaatttacaatccggacaaaacataccccttcagcaatctacgatcaggctgaatcttcagtaccctgccaaa

SEQ ID NO: 399919 - DNA, 75 bp, synthetic construct
  source 1..75: mol_type = other DNA
acttatatatatatatcttataacaaaaaacaacgaagggtattatttcctagcgtcagataagatgctatacgc

SEQ ID NO: 399920 - DNA, 75 bp, synthetic construct
  source 1..75: mol_type = other DNA
atgttgataacagcatcagtgactatcaaacggcgatcacctttgctggtacgcaattattggaaaaaggctaca

SEQ ID NO: 399921 - DNA, 75 bp, synthetic construct
  source 1..75: mol_type = other DNA
aagtggtgatcccgaaaaccaacattctggcggaattcccggtggcgtgggtcgataaaaacgtgcaggccaacg

SEQ ID NO: 399922 - DNA, 75 bp, synthetic construct
  source 1..75: mol_type = other DNA
acggaactgctgaacagttcttatgacgtctcccgcgagctgtttgccgccctgaacccgccgtttgaacagcaa

SEQ ID NO: 399923 - DNA, 75 bp, synthetic construct
  source 1..75: mol_type = other DNA
gcaaggtagaggcaccgtcggcgttcgcccggaagccatcaccttaagcaatcacggcgaagagagtcagcgttg

SEQ ID NO: 399924 - DNA, 75 bp, synthetic construct
  source 1..75: mol_type = other DNA
ctgcggcaaaaccactattttgcgcctggttgccgggctggaaaaaccgagcgaagggcaaattttcattgatgg

SEQ ID NO: 399925 - DNA, 75 bp, synthetic construct
  source 1..75: mol_type = other DNA
tgatgattatggtgatgccgtatggaagcgccttgaaacttatgtcttcccggtaatcggtgacaaagatgttgc

SEQ ID NO: 399926 - DNA, 75 bp, synthetic construct
  source 1..75: mol_type = other DNA
tctccgtgagctaaactctcttgttaactatatcgatagcaatcaagaaaaggcagaagagatatattctattgt

SEQ ID NO: 399927 - DNA, 75 bp, synthetic construct
  source 1..75: mol_type = other DNA
aattacatagataacaatcaagaaaaagcagaggaaatctatgctactgtcagggcacaatatgaagttaaggtt

SEQ ID NO: 399928 - DNA, 75 bp, synthetic construct
  source 1..75: mol_type = other DNA
ctgcctatacccacaaagctaagcatcttgaccaacgccgcctgatgcttcagtggtgggctgattttcttgatg

SEQ ID NO: 399929 - DNA, 75 bp, synthetic construct
  source 1..75: mol_type = other DNA
gatcaagcaatacatcactgccatcctgcgtcacgccgtccagcaaaaacttatgcgccataatccggcctatga

SEQ ID NO: 399930 - DNA, 75 bp, synthetic construct
  source 1..75: mol_type = other DNA
agttatgggtgatacccgaacagcgtgaagcaattgaaaacgtcaaacattcgactcgtggtgccaaaatgaagc

SEQ ID NO: 399931 - DNA, 75 bp, synthetic construct
  source 1..75: mol_type = other DNA
atcgtgaagccgggagaagtccacgccgtaaggccgcacccgttaccatcaggacagcaaattatgtggatgtga

SEQ ID NO: 399932 - DNA, 75 bp, synthetic construct
  source 1..75: mol_type = other DNA
gcaagtcaacgccacccgtttacagcccgatattggtgagcactattacctcgaaatccatccttacgggatgtt

SEQ ID NO: 399933 - DNA, 75 bp, synthetic construct
  source 1..75: mol_type = other DNA
ttgatcctcaaaccgaaggtactgctgtttgatgagccgttaagtaacctcgatgccaacctgcgccgcagtatg

SEQ ID NO: 399934 - DNA, 75 bp, synthetic construct
  source 1..75: mol_type = other DNA
cattatcatcgataagtatatctcaaaaagataccagccaggcgataaaagtttctcataccaactatatctact

SEQ ID NO: 399935 - DNA, 75 bp, synthetic construct
  source 1..75: mol_type = other DNA
taaagctcaatacgaaatgagagttattgaaaaagaaattattcaagaggtggttaaagtaaggaatgttagatt

SEQ ID NO: 399936 - DNA, 75 bp, synthetic construct
  source 1..75: mol_type = other DNA
gtcggtcaatgtggccggaacgttcagatattccgtgggtgaaatcgagcgtgaaacgctcacggggatgagcgg

SEQ ID NO: 399937 - DNA, 75 bp, synthetic construct
  source 1..75: mol_type = other DNA
gtcagtggtggtgcttccgctctaaaagcagcatttgaatctgcacaagcggcgatggccgaagaatctggttct

SEQ ID NO: 399938 - DNA, 75 bp, synthetic construct
  source 1..75: mol_type = other DNA
taagctaccactgttgttatcaggtgttgtaggaggggcttctttacaagggattggtggatttggggcgggtat

SEQ ID NO: 399939 - DNA, 75 bp, synthetic construct
  source 1..75: mol_type = other DNA
gtcaattagatagtagcggattacttgatacgttattagataagtttcagcaagtagccagcacatggtcattag

SEQ ID NO: 399940 - DNA, 75 bp, synthetic construct
  source 1..75: mol_type = other DNA
gaagtcaggggtttgcttcattctcacgagctggccgcatggcaagccatatgggaagcagtatgattaacggag

SEQ ID NO: 399941 - DNA, 75 bp, synthetic construct
  source 1..75: mol_type = other DNA
cagacttttggaggggagttggcgactcagatacgtaaacaaacagctactcgtcgggataaccgcgaacatgat

SEQ ID NO: 399942 - DNA, 75 bp, synthetic construct
  source 1..75: mol_type = other DNA
agcagttcaggtagcgccagtggaggaagtcaggggtttgcttcattctcgcgtgctggccgcatggcaagccat

SEQ ID NO: 399943 - DNA, 75 bp, synthetic construct
  source 1..75: mol_type = other DNA
cacaaacagcagggggtcagctggcagcacagattcgcgcgcagactgcagctcgtcaatctggcccgatggttt

SEQ ID NO: 399944 - DNA, 75 bp, synthetic construct
  source 1..75: mol_type = other DNA
atgggcggcggtggcgaagacaccggcaacgttgatgctaccgggggaaatcagtcaggttctggcggtggttct

SEQ ID NO: 399945 - DNA, 75 bp, synthetic construct
  source 1..75: mol_type = other DNA
agggttgggtttacaggtattcacgatgattttgatcgtgggtataggccagtcattcattgaccagtattacac

SEQ ID NO: 399946 - DNA, 75 bp, synthetic construct
  source 1..75: mol_type = other DNA
aatgcagggcgaaggattatcagcagctcttgcagaaatcgttcgtttttttgctgtattaggctttttcttcta

SEQ ID NO: 399947 - DNA, 75 bp, synthetic construct
  source 1..75: mol_type = other DNA
tcgcaaactattgaacgtcaatcgaataacacagaagaatcttttggctacgggagcataacaacaagtaacaag

SEQ ID NO: 399948 - DNA, 75 bp, synthetic construct
  source 1..75: mol_type = other DNA
ccgatattgccattacatacttcaaaacagttctaggaattgccctgcagctgttcacaatggttctaattgttg

SEQ ID NO: 399949 - DNA, 75 bp, synthetic construct
  source 1..75: mol_type = other DNA
tggtgattgcctggcaggaacttgaagcgatgggcggacgaaccctacttgcgccgcgtttgctgcaagcgggaa

SEQ ID NO: 399950 - DNA, 75 bp, synthetic construct
  source 1..75: mol_type = other DNA
aaacagaagtaactctggaagagtactgctcgttaatctggaaaacgaacatcattagtccgttaaaaatcccca

SEQ ID NO: 399951 - DNA, 75 bp, synthetic construct
  source 1..75: mol_type = other DNA
ccagatataaaagaaatctatacgggtaagaaaggtgatgttgctatagatatgtttatcatggaagataatcaa

SEQ ID NO: 399952 - DNA, 75 bp, synthetic construct
  source 1..75: mol_type = other DNA
ctgcccagtgtatcagaaattctcttgaaggaaaaagaatatagacttccatcaatatattctataatggattca

SEQ ID NO: 399953 - DNA, 75 bp, synthetic construct
  source 1..75: mol_type = other DNA
agaacccctgaatatattagaaaataacagtcttttttctttaaggataatgttagtgaatttgactttggtaat

SEQ ID NO: 399954 - DNA, 75 bp, synthetic construct
  source 1..75: mol_type = other DNA
gaatcaaaaatggcgctgatccaaaaaaatataaataccattattggttctgaccatgggattaatgtttttatt

SEQ ID NO: 399955 - DNA, 75 bp, synthetic construct
  source 1..75: mol_type = other DNA
gattgatatttaccatgtcaatgatatgacagttatgctgccagtgctccgcaaaacagatgcttcctaccgtgt

SEQ ID NO: 399956 - DNA, 75 bp, synthetic construct
  source 1..75: mol_type = other DNA
gaatctgccggataatgcccgggagataatcaccacgttaatgcattgtcagtattctgactggtttggtctggt

SEQ ID NO: 399957 - DNA, 75 bp, synthetic construct
  source 1..75: mol_type = other DNA
cagtttggtgttgagtgccctatggggcagaacgttcgctggaaacgaaccggtctgagtacgctgattctggaa

SEQ ID NO: 399958 - DNA, 75 bp, synthetic construct
  source 1..75: mol_type = other DNA
agctgaagcattggaaaagattgaagcgcaaaagaacgcaaaacgagtatcagatttagctgttgagtattactc

SEQ ID NO: 399959 - DNA, 75 bp, synthetic construct
  source 1..75: mol_type = other DNA
ctgatattactaactttttaagtaaatcaaaacaatatgaacatatatctttaagtgctcttagtgaaggattaa

SEQ ID NO: 399960 - DNA, 75 bp, synthetic construct
  source 1..75: mol_type = other DNA
tattcggtatcgaagagattgtcagagattccagtaagcaaagcaaaattcatcatgagatcattgctggaatat

SEQ ID NO: 399961 - DNA, 75 bp, synthetic construct
  source 1..75: mol_type = other DNA
ggtgattcaataatagctactgctcttaagtttggtgggtatagcaatggttcagaaagaatgaaacgcatcgga

SEQ ID NO: 399962 - DNA, 75 bp, synthetic construct
  source 1..75: mol_type = other DNA
cgctgtcctggggtttttctttttcctggttgataacggtcccaaaatagcaagtgacctgctgttgtcgttacg

SEQ ID NO: 399963 - DNA, 75 bp, synthetic construct
  source 1..75: mol_type = other DNA
gcggaccgtaagcagctgttcctcaatgctggtaaacgcattgttgaattgaccaaacgttactacgagcaaaac

SEQ ID NO: 399964 - DNA, 75 bp, synthetic construct
  source 1..75: mol_type = other DNA
aaggcggtccggggatgcaggaaatgctctacccaaccagcttcctgaaatcgatgggcctcggcaaagcctgtg

SEQ ID NO: 399965 - DNA, 75 bp, synthetic construct
  source 1..75: mol_type = other DNA
gacctgggggctggtttccgctgcaatgatgttcgcccacactgagaccgtatttattttcctgcgcttcttgct

SEQ ID NO: 399966 - DNA, 75 bp, synthetic construct
  source 1..75: mol_type = other DNA
tggcggcacctctggcctttctatcggccacgtctcaccggaagcggcaagcggcggcagcattggcctgattga

SEQ ID NO: 399967 - DNA, 75 bp, synthetic construct
  source 1..75: mol_type = other DNA
acgcccactgcgccgacgccatggtctgcatctctaactgtgacaaaatcaccccggggatgctgatggcttccc

SEQ ID NO: 399968 - DNA, 75 bp, synthetic construct
  source 1..75: mol_type = other DNA
cacccaaaaataccatatggaagatgttcaccgtgctggtggtgttatcggtattctcggcgaactggatcgcgc

SEQ ID NO: 399969 - DNA, 75 bp, synthetic construct
  source 1..75: mol_type = other DNA
agccgctgaaacaaaccgtcctccaatgaagcgtatccacagtgccaaatggcgtagtaaagcagctcaagagca

SEQ ID NO: 399970 - DNA, 75 bp, synthetic construct
  source 1..75: mol_type = other DNA
gacaagaaaagacttgtccttgagtattgtcagaaaaatttcgttgataaaggcatgattgccgacatcgctttt

SEQ ID NO: 399971 - DNA, 75 bp, synthetic construct
  source 1..75: mol_type = other DNA
aagaaaaagcgttatcgcttgctaaggccgctgaaacaaatcgtcctgcaatgaaacgtatccacagcgctaaat

SEQ ID NO: 399972 - DNA, 75 bp, synthetic construct
  source 1..75: mol_type = other DNA
agccgctgaaacaaaccgtcctgcaatgaaacgtatccatagtgccaaatggcgtagtaaggctgctcaggaaca

SEQ ID NO: 399973 - DNA, 75 bp, synthetic construct
  source 1..75: mol_type = other DNA
aagtctacaaaacattcagtgaacttgaccttgaaatcgtcgttgatgtcagaagctttacgattacacatcttg

SEQ ID NO: 399974 - DNA, 75 bp, synthetic construct
  source 1..75: mol_type = other DNA
gatgcagctaagcaggaagcggttgaagtctacaaaacattcagtgaacttgatcttgaaatcattgttgatgtc

SEQ ID NO: 399975 - DNA, 75 bp, synthetic construct
  source 1..75: mol_type = other DNA
tgcattgcccgttttgaaaaactgatggcggcagagacgctggagcgttatctgcatacccgttatgtcgggcag

SEQ ID NO: 399976 - DNA, 75 bp, synthetic construct
  source 1..75: mol_type = other DNA
ttttcaaatgcaaatgacatttgataacggtgcacccgatctcaatatcaagccaggccagaaagttgtatttga

SEQ ID NO: 399977 - DNA, 75 bp, synthetic construct
  source 1..75: mol_type = other DNA
cgaaagataaatcgcccgtcgaagcatcattgcgattcgcatttggtggctcattctctacgatattagatgttg

SEQ ID NO: 399978 - DNA, 75 bp, synthetic construct
  source 1..75: mol_type = other DNA
gagatgacggcaagctatgaaaactttggaaaaggtttttttaattcccattttcaaatgctaattacatttgat

SEQ ID NO: 399979 - DNA, 75 bp, synthetic construct
  source 1..75: mol_type = other DNA
atttcgaggatggggtcacatttggttataacgacgcaattagtgaatgcgaaggacggattcgcgctgctggag

SEQ ID NO: 399980 - DNA, 75 bp, synthetic construct
  source 1..75: mol_type = other DNA
ggaatgatggcgttaggtaagatgtttcagttaatcaccattgataacaatatcgcctcactgcaactgcgttat

SEQ ID NO: 399981 - DNA, 75 bp, synthetic construct
  source 1..75: mol_type = other DNA
aaagcgggctgataaacaaatcagcgggatgatgacattaggtcagatgtttcagttaatcacgattgacaacaa

SEQ ID NO: 399982 - DNA, 75 bp, synthetic construct
  source 1..75: mol_type = other DNA
atgctcgacagccttgcccgctacccggaagtggcaaaagaggattttgcgaacattgttgctgccctcagtcag

SEQ ID NO: 399983 - DNA, 75 bp, synthetic construct
  source 1..75: mol_type = other DNA
gctggatacagacccgtccgggcatcaccacggcacgccagcgcctgttattgcgactgctgatggcgcgggtgg

SEQ ID NO: 399984 - DNA, 75 bp, synthetic construct
  source 1..75: mol_type = other DNA
gctggagtggctggcaggggaaaagatgctcgacagccttgcccgctacccggaagtggcaaaagaggattttgc

SEQ ID NO: 399985 - DNA, 75 bp, synthetic construct
  source 1..75: mol_type = other DNA
tcgcgagcagctattgaaataaccgcgccaaagtttatcgacagcagagaagcattagccaaagggtttactgtt

SEQ ID NO: 399986 - DNA, 75 bp, synthetic construct
  source 1..75: mol_type = other DNA
gatgaaacccgtcctgaactgaatgcgctgtacggcgcactggaaaaccgcctgcagaaagcgggtggtgtggat

SEQ ID NO: 399987 - DNA, 75 bp, synthetic construct
  source 1..75: mol_type = other DNA
aaggcttatagagatgcaggcgtggcatgtgatgttttcagatttaaagctgattcttctatttcttaccatgaa

SEQ ID NO: 399988 - DNA, 75 bp, synthetic construct
  source 1..75: mol_type = other DNA
gagtgacccttgcttacagagaattaaatgacactcaaaaagctgtagctgatggtatcgcaaatggcctgttaa

SEQ ID NO: 399989 - DNA, 75 bp, synthetic construct
  source 1..75: mol_type = other DNA
cgaaaggcgaaactcatcgctacatttttaccgttcacgcgctggatatagaacgtattgatgtcggcatcacag

SEQ ID NO: 399990 - DNA, 75 bp, synthetic construct
  source 1..75: mol_type = other DNA
atgaaactcatcagtaatgatctgcgcgatggcgataagttgccgcatcgtcatgtctttaacggcatgggttac

SEQ ID NO: 399991 - DNA, 75 bp, synthetic construct
  source 1..75: mol_type = other DNA
atggcacagtttaaagttgatgattttctgattgagctaaaacttgactctcagaaagttttaaaaggcttggaa

SEQ ID NO: 399992 - DNA, 75 bp, synthetic construct
  source 1..75: mol_type = other DNA
cgaattagcggaaacagagcaatcacagcagcgcatagcgtgaatatgtctaagcttggtgatattaatccgctg

SEQ ID NO: 399993 - DNA, 75 bp, synthetic construct
  source 1..75: mol_type = other DNA
tggtctgaaaaaagaagcatcacaacgagcggcacaattcgttttaggtgatgaaggtgctaaacgagctacaga

SEQ ID NO: 399994 - DNA, 75 bp, synthetic construct
  source 1..75: mol_type = other DNA
gaaaggcgaccttgcgcgtcgtaaattgctgccttccctgtatcaactggaaaaagccggtcagctcaacccgaa

SEQ ID NO: 399995 - DNA, 75 bp, synthetic construct
  source 1..75: mol_type = other DNA
atcaccaagctggatctgagctattcagaaacctttaatcagacgcatctggcagatgcctatgaacgtctgctg

SEQ ID NO: 399996 - DNA, 75 bp, synthetic construct
  source 1..75: mol_type = other DNA
cgtctcggcgcgatgctggatcaaaaaaatcgtatcaccattaactactttgccatgccgcccagcacttttggc

SEQ ID NO: 399997 - DNA, 75 bp, synthetic construct
  source 1..75: mol_type = other DNA
tacgacccggatgcgccaaccggctccggctggtggcactgggtagttgttaatttacccgctgatacccgcgta

SEQ ID NO: 399998 - DNA, 75 bp, synthetic construct
  source 1..75: mol_type = other DNA
gatattaatcttcttatcgtgccattggttggagttttgactatgtgggggatttttattatttgtgcagtaacc

SEQ ID NO: 399999 - DNA, 75 bp, synthetic construct
  source 1..75: mol_type = other DNA
acctgcgtactggtaaacgtctgccgaccaaatgctctgaagtcgtggtctatttcaaaacacctgaactgaatc

SEQ ID NO: 400000 - DNA, 75 bp, synthetic construct
  source 1..75: mol_type = other DNA
ttctgattgagctaggttttaactctcagagggttttaaaaggtctggaaaaagccgagaaacaaacgatgcagg

SEQ ID NO: 400001 - DNA, 75 bp, synthetic construct
  source 1..75: mol_type = other DNA
aactcctgggtaaactcccggtaccaagcgcagagatcatgaggctggcgcaggagctgcgggactttgatgaag

SEQ ID NO: 400002 - DNA, 75 bp, synthetic construct
  source 1..75: mol_type = other DNA
ccgtattgcacgggatctgttcccgactgggggcaccagaaagaaaggccagtatcattgttgaccagcagtcac

SEQ ID NO: 400003 - DNA, 75 bp, synthetic construct
  source 1..75: mol_type = other DNA
tggttaccattgatccggggaatatttcggtaactccatacagacggacgccggtgccagcaaccgaatttgcag

SEQ ID NO: 400004 - DNA, 75 bp, synthetic construct
  source 1..75: mol_type = other DNA
attcgccatttcaagagaagcatcctacatcgctgactgatctcatgaagaccagacctgatgagtattttatca

SEQ ID NO: 400005 - DNA, 75 bp, synthetic construct
  source 1..75: mol_type = other DNA
atggacgggggtgacgaaaagcatgaaaagacacatcgccgtccgtctgaaaaaacgcgctccgtttgcacttcg

SEQ ID NO: 400006 - DNA, 75 bp, synthetic construct
  source 1..75: mol_type = other DNA
aagcacaccgtatattattaaaatcacacattctaaagtaattcttccttctaactcgattgtactgttgtgttt

SEQ ID NO: 400007 - DNA, 75 bp, synthetic construct
  source 1..75: mol_type = other DNA
ggtcaaaaggaagtcaagatccccgccctggacaagaacggcattcaacaaggatggaaaaccgctcatcgtaat

SEQ ID NO: 400008 - DNA, 75 bp, synthetic construct
  source 1..75: mol_type = other DNA
tttggtaatgcaacggctatgagtcgcttaatggggcttagtaatgatgagctaaacggcattttgaaagctttt

SEQ ID NO: 400009 - DNA, 75 bp, synthetic construct
  source 1..75: mol_type = other DNA
tcacaggatgagctaaacggcttcttatccagcctgagtaacctgcttagtgaaatgggtatgagttcttctatc

SEQ ID NO: 400010 - DNA, 75 bp, synthetic construct
  source 1..75: mol_type = other DNA
agaagaccgtcatcctcaatgaaggggactttgtcgtgttctatccgggtgaagtgcacaagccactgtgcgcag

SEQ ID NO: 400011 - DNA, 75 bp, synthetic construct
  source 1..75: mol_type = other DNA
tggctggaagactgcccacaggaatgagtggcagttagagaacctggggattaaaggcatagacagaaccacttc

SEQ ID NO: 400012 - DNA, 75 bp, synthetic construct
  source 1..75: mol_type = other DNA
atgcagaaaaaatatcctaatcaccgttttgttcttggatatcattgtgacaagaaagaacatcctcacgttcat

SEQ ID NO: 400013 - DNA, 75 bp, synthetic construct
  source 1..75: mol_type = other DNA
tgctaactccctgtttgtgaacaactgggacaatcgcaccattgatcatgttgagatcacggtggcagaagaagt

SEQ ID NO: 400014 - DNA, 75 bp, synthetic construct
  source 1..75: mol_type = other DNA
tgtctaccgagattgcacgtctcaaacgccagctggcagaacgggatgaagagctggctatcctccaaaaggccg

SEQ ID NO: 400015 - DNA, 75 bp, synthetic construct
  source 1..75: mol_type = other DNA
tacgaattcatcaaacgcgaaattagctggcaaagcccggtgttctttacccctgtcgataaacctgtctcttga

SEQ ID NO: 400016 - DNA, 75 bp, synthetic construct
  source 1..75: mol_type = other DNA
ggggcgaactgacagagcgcagggaccagcaactggagtggaacgcgcagggccagttaacgcgggtcatcagca

SEQ ID NO: 400017 - DNA, 75 bp, synthetic construct
  source 1..75: mol_type = other DNA
gctaactatccgccatcgatggactctaatccaaaacgcgcgttttacgataattttggtcaagatgaagtgctg

SEQ ID NO: 400018 - DNA, 75 bp, synthetic construct
  source 1..75: mol_type = other DNA
cttcaatataattgctcttttttcaggctatcctgaagaggatggaaaaccagcgaccgccttaattcaaagctt

SEQ ID NO: 400019 - DNA, 75 bp, synthetic construct
  source 1..75: mol_type = other DNA
atgatcccgttaccttccgggaccaaaatttggctggttaccggtatcaccgatatgagaaatggcttcaacggc

SEQ ID NO: 400020 - DNA, 75 bp, synthetic construct
  source 1..75: mol_type = other DNA
acgatacctattgcgctggttgccatgcccctattgccgccgaccattacaccgtcaatgcctggccgtccattg

SEQ ID NO: 400021 - DNA, 75 bp, synthetic construct
  source 1..75: mol_type = other DNA
cgatctcaccgtcgttgatgccagtggtaaacagccaattgttcggttgcagggttatcaaatgcagggcagtga

SEQ ID NO: 400022 - DNA, 75 bp, synthetic construct
  source 1..75: mol_type = other DNA
catgtggggttgtcgggttgtcgtcggttatgtgctgggaatcatgcttggctggggtgtggttggtgtctggat

SEQ ID NO: 400023 - DNA, 75 bp, synthetic construct
  source 1..75: mol_type = other DNA
gcaatcccaccggcattaccctgccggacgggcagcacctcagccatctttactacggcagcggacatctgctcc

SEQ ID NO: 400024 - DNA, 75 bp, synthetic construct
  source 1..75: mol_type = other DNA
tggatagacgtaagcgcggatgagcgtagcgcaacgcagctaacccaacatttcgcacggcaggcaggcgtggtc

SEQ ID NO: 400025 - DNA, 75 bp, synthetic construct
  source 1..75: mol_type = other DNA
tgaaactggcgaaacgctacgatctgccggtgatcctgcattcacggcgcacgcacgacaaactggcgatgcatc

SEQ ID NO: 400026 - DNA, 75 bp, synthetic construct
  source 1..75: mol_type = other DNA
atgattgttggcaacatccatcacttacaatcctggctgtcggaagaacttcgcgaagcaattgagtacatcaaa

SEQ ID NO: 400027 - DNA, 75 bp, synthetic construct
  source 1..75: mol_type = other DNA
catcaggggaaaatagaagaagaggggacgccggaacagttatttggcaacccgcaaagcccgcgtctgcaacag

SEQ ID NO: 400028 - DNA, 75 bp, synthetic construct
  source 1..75: mol_type = other DNA
atgaaactcatcagtaatgatctgcgcgatggcgataatatttcaccgcatctggcgtgggatgatgttcctgcg

SEQ ID NO: 400029 - DNA, 75 bp, synthetic construct
  source 1..75: mol_type = other DNA
ttaatagccatttcaacaatcccgctggttatttggtttatgaagaaacagtaccaaaaagttgaaattggtaag

SEQ ID NO: 400030 - DNA, 75 bp, synthetic construct
  source 1..75: mol_type = other DNA
tcgtagaactactgcaaaaagccagcaatggaatagacgcggctgtttcatttagccaggcacagattcctgatg

SEQ ID NO: 400031 - DNA, 75 bp, synthetic construct
  source 1..75: mol_type = other DNA
aatcattgagggtaaagccggtaacgcctccggtgaagcgcgtcgtaatggtgccaccgaaaccttcaaaaaagc

SEQ ID NO: 400032 - DNA, 75 bp, synthetic construct
  source 1..75: mol_type = other DNA
atgtccgagaataaattaaacgttatcgatttgcacaaacgctacggcaaacatgaagtgctgaaaggggtctca

SEQ ID NO: 400033 - DNA, 75 bp, synthetic construct
  source 1..75: mol_type = other DNA
tcgctgcaacgaaaccttttattcagcgcaatgaaggcggcatcatctggcatacccagggcagcggtaaaagtc

SEQ ID NO: 400034 - DNA, 75 bp, synthetic construct
  source 1..75: mol_type = other DNA
aagctgctctccagcaagtcgcggctggagcagatcgttaacgacattttgctggatatggatacccgtccacgc

SEQ ID NO: 400035 - DNA, 75 bp, synthetic construct
  source 1..75: mol_type = other DNA
gcgccacacagcagcgtctgattcagttttttgttgaagatttaggttaccgccatctgagtcaccgcaccgggt

SEQ ID NO: 400036 - DNA, 75 bp, synthetic construct
  source 1..75: mol_type = other DNA
caagggttaaaggctggcagctatccaacgatcctgaggtgaaaaagtatcttaaggctgtaacttctgatgtaa

SEQ ID NO: 400037 - DNA, 75 bp, synthetic construct
  source 1..75: mol_type = other DNA
gtaaaaggttttacgccccaggcgatggatctgctgattcactacgactggccgggaaatattcgcgagctggaa

SEQ ID NO: 400038 - DNA, 75 bp, synthetic construct
  source 1..75: mol_type = other DNA
agagtgctgatcataaccgaccgcacagagctagatgaacaaatcgaaaaagtcttcaacggcgtggaagaggaa

SEQ ID NO: 400039 - DNA, 75 bp, synthetic construct
  source 1..75: mol_type = other DNA
ggatggtgaccgggcgctggctatggaaatatcctcgcactgaacatgaaaagtgtgaaaaaaagccagtcgtgt

SEQ ID NO: 400040 - DNA, 75 bp, synthetic construct
  source 1..75: mol_type = other DNA
gttgaaggtaactcaatgaccgcaccaacaggttccaaacccagctttcctgacgggatgttaattctggttgac

SEQ ID NO: 400041 - DNA, 75 bp, synthetic construct
  source 1..75: mol_type = other DNA
aacatggttaattaaactactgactattcgctggcgcgaatggttaaggaaggtgcgaataagcggggaaattct

SEQ ID NO: 400042 - DNA, 75 bp, synthetic construct
  source 1..75: mol_type = other DNA
cccgagcatccggtttgagcgatatgccgatgacatcgtaatccactgtaaaagtctcgcgcaggcaactatggt

SEQ ID NO: 400043 - DNA, 75 bp, synthetic construct
  source 1..75: mol_type = other DNA
gtacaaatgccggatgggacgctactggcaagagacaaaggaacgccgcaaggtggggtcattagcccgctgctg

SEQ ID NO: 400044 - DNA, 75 bp, synthetic construct
  source 1..75: mol_type = other DNA
tcgctggcgcgaatggttaacagattactaccttaatcggtggtttgcagataaaaactactacttcacgcagat

SEQ ID NO: 400045 - DNA, 75 bp, synthetic construct
  source 1..75: mol_type = other DNA
acattctcttactgatcagcaaaacgctcagcctttcatttggcttcatccagtcacttagggaaggtgcgaaca

SEQ ID NO: 400046 - DNA, 75 bp, synthetic construct
  source 1..75: mol_type = other DNA
cacgacagaggttaaagcactggcgttgacttatctggaactgacggtgctcagttatccagccgctgccatcac

SEQ ID NO: 400047 - DNA, 75 bp, synthetic construct
  source 1..75: mol_type = other DNA
cgcgatgccttacgaccgcccgtttaccgtgatggcggcgtttccgctgtgtccggcctgtgacaaagagtaccg

SEQ ID NO: 400048 - DNA, 75 bp, synthetic construct
  source 1..75: mol_type = other DNA
ctcgcctgcgatgcgcgtaacagtaacgcggtggcaacactccgggggcgtaagcatcgtccggcgaaaccgctg

SEQ ID NO: 400049 - DNA, 75 bp, synthetic construct
  source 1..75: mol_type = other DNA
cagccacgttaagttatgaaggtgaagcggcttgtgctctggaggcgctcgcagcctcatgcgacggagtgacgc

SEQ ID NO: 400050 - DNA, 75 bp, synthetic construct
  source 1..75: mol_type = other DNA
aaaagagacttgaggaaagcttgaaatatattcctttaccaaaaatgtgtgatacagatgataatctatggataa

SEQ ID NO: 400051 - DNA, 75 bp, synthetic construct
  source 1..75: mol_type = other DNA
cgatctgcgtcgcggtttgccgacctgccatgtgaagtttggcgaagcaaacgcgattctcgctggcgacgcttt

SEQ ID NO: 400052 - DNA, 75 bp, synthetic construct
  source 1..75: mol_type = other DNA
caaacatcgcccggcgaaaccgctggcggttatgttgccaacggcagaagtcttaccagacgctgcgcgccagtt

SEQ ID NO: 400053 - DNA, 75 bp, synthetic construct
  source 1..75: mol_type = other DNA
ggaacaagcggcgcacgcattgaaaggtagcgaacgttcctggcaacgggcagggcatgaatacacgctgtggat

SEQ ID NO: 400054 - DNA, 75 bp, synthetic construct
  source 1..75: mol_type = other DNA
tccaactgcgtattcgtggcaaagtgcagggcgtcggttttcgtccgtttgtctggcaactggcacagcaattaa

SEQ ID NO: 400055 - DNA, 75 bp, synthetic construct
  source 1..75: mol_type = other DNA
gtttaccagacgctgcgcgccagttgcttaccacgcccgccgcgccgattgtgctggtggataaaaaatacgttc

SEQ ID NO: 400056 - DNA, 75 bp, synthetic construct
  source 1..75: mol_type = other DNA
atggcaaaaaacacatcttgcggtgtccaactgcgtattcgtggcaaagtgcagggcgtcggttttcgtccgttt

SEQ ID NO: 400057 - DNA, 75 bp, synthetic construct
  source 1..75: mol_type = other DNA
tactggacgtggacatcaaggggttcttcgataacctcgatcacaaacttctgatgaaggcggtatgcaagcaca

SEQ ID NO: 400058 - DNA, 75 bp, synthetic construct
  source 1..75: mol_type = other DNA
caatcctgcgcgtaatacccgtgaaaaattattgctgccgctgggtgatatcaaaccgcttcagcaggcgggcgt

SEQ ID NO: 400059 - DNA, 75 bp, synthetic construct
  source 1..75: mol_type = other DNA
aaagcgccgaatgaagcggtcagtagtgtgcgtttctgggctggctatagctggcaggacaacagcgacgggagc

SEQ ID NO: 400060 - DNA, 75 bp, synthetic construct
  source 1..75: mol_type = other DNA
ttcttaaatctgatgaacttagtgatctttatgataggggcttttatatctggaaaataaaatggaaggttaaag

SEQ ID NO: 400061 - DNA, 75 bp, synthetic construct
  source 1..75: mol_type = other DNA
ggcgatgaactgaaacgtggtggtaagccaccggtcaatcacgtcaatattgtcgcgcaacaggcacagccggta

SEQ ID NO: 400062 - DNA, 75 bp, synthetic construct
  source 1..75: mol_type = other DNA
gcgcctgattcgcgaacgccgcgattactactggaactggtcggaatatgaaggctggcagtcacagtttgatca

SEQ ID NO: 400063 - DNA, 75 bp, synthetic construct
  source 1..75: mol_type = other DNA
gttacactgccgattggcgattttaacggtgaattacgcgtcatggcgcaagcctggacggcagatgacttcggt

SEQ ID NO: 400064 - DNA, 75 bp, synthetic construct
  source 1..75: mol_type = other DNA
ggtcttgagtatctagttgatgcaaaaaaacaactgcttattataacttccaaaaaaatcaatggtaggttaact

SEQ ID NO: 400065 - DNA, 75 bp, synthetic construct
  source 1..75: mol_type = other DNA
acatctgcaactatatgtgcagaggatctttataaaggtgggcactgggcgacggctaaagccatcttagatgat

SEQ ID NO: 400066 - DNA, 75 bp, synthetic construct
  source 1..75: mol_type = other DNA
gtgagcaacatcaacttaataaccacatgtacaaacggcaaacactacggtagtagggatatattgagtctgagt

SEQ ID NO: 400067 - DNA, 75 bp, synthetic construct
  source 1..75: mol_type = other DNA
aaacctcaaaagctttcagctagagaaaccgatagatttaataaattaattgaaaatagagcttattctattata

SEQ ID NO: 400068 - DNA, 75 bp, synthetic construct
  source 1..75: mol_type = other DNA
aatcaataccattgtattcacaagaatatataggaaaaagttttcacagaacatggtggaaagaaataactaata

SEQ ID NO: 400069 - DNA, 75 bp, synthetic construct
  source 1..75: mol_type = other DNA
aagtgaaaaaaggaattcgtcgtagtccggaggaagttaagtctttcattttaaagattatggagaaaaatcctg

SEQ ID NO: 400070 - DNA, 75 bp, synthetic construct
  source 1..75: mol_type = other DNA
gcagtggaaaattggcgtccgtccggcattcccggcacaaacagtcaattatggtacggtgttgcagcctggtga

SEQ ID NO: 400071 - DNA, 75 bp, synthetic construct
  source 1..75: mol_type = other DNA
agcatcgtgcagatgccgcttctggtttaccgctgctgcaacttggcgttgcgctgaaaaccatgggtgatgcaa

SEQ ID NO: 400072 - DNA, 75 bp, synthetic construct
  source 1..75: mol_type = other DNA
gagcaaatcgctggactcgttacgtagcggcgatctggtgctggtgtggttgcaggtaaaagccagtaacagcgt

SEQ ID NO: 400073 - DNA, 75 bp, synthetic construct
  source 1..75: mol_type = other DNA
ttctcgcctgttacgctggaagggcaattgttgttgagcggcaaaccaccgctgaacatcgcacgttatatcaaa

SEQ ID NO: 400074 - DNA, 75 bp, synthetic construct
  source 1..75: mol_type = other DNA
atgacaagttttactacgctgcttagcgttcatctcatcagtgtcgcgctttctgttgggctactaaccttacgt

SEQ ID NO: 400075 - DNA, 75 bp, synthetic construct
  source 1..75: mol_type = other DNA
acgttcatcttattagcatcgtgctttctgttggacttctggccctgcgcttctggctacgttattctgagcatc

SEQ ID NO: 400076 - DNA, 75 bp, synthetic construct
  source 1..75: mol_type = other DNA
gcgttcatctcattagcattgcgctttctgtagggctattaaccttacgtttctggctacgttatcagaagcatc

SEQ ID NO: 400077 - DNA, 75 bp, synthetic construct
  source 1..75: mol_type = other DNA
gtttacgattatcgcactgacagcacggtgaaacagcccattgttgatgaaggcagtaacgccgcttttgacatc

SEQ ID NO: 400078 - DNA, 75 bp, synthetic construct
  source 1..75: mol_type = other DNA
atttacaagatccgggcatgatgtcgatcccgtacgcggataatctcaaagccagtaaattcgccgtacagtctt

SEQ ID NO: 400079 - DNA, 75 bp, synthetic construct
  source 1..75: mol_type = other DNA
gaaaacgccgcgtaataatgatgagcggatatggcttggcgattacggtagcccactgcgcgacaacgcgttgat

SEQ ID NO: 400080 - DNA, 75 bp, synthetic construct
  source 1..75: mol_type = other DNA
ggctgccggtaatggcgctcaacgttaacaatgtcgatgttaacttcttccgtgtgaagcccgaatctctgcctg

SEQ ID NO: 400081 - DNA, 75 bp, synthetic construct
  source 1..75: mol_type = other DNA
acagcggtgaaaaaagatgcgccttctgaagttactaaagcggcctcttcagaaaacgtgagttcagcaaaactc

SEQ ID NO: 400082 - DNA, 75 bp, synthetic construct
  source 1..75: mol_type = other DNA
ttgccgatcagcataagcagtggaaaatcggcgtccgtccggcgttcccggcacaaacggttaattacggtacgg

SEQ ID NO: 400083 - DNA, 75 bp, synthetic construct
  source 1..75: mol_type = other DNA
tgagtggcaaatgaaacgagaaatgctttcccctgcgtacacaacgcgctggaatgatcttccggtggcaatgat

SEQ ID NO: 400084 - DNA, 75 bp, synthetic construct
  source 1..75: mol_type = other DNA
caatcggcgtcgggatggggccaaccaaaacgctggctaaaagcgcacaatgggcgtcgaaggaatggcggcagt

SEQ ID NO: 400085 - DNA, 75 bp, synthetic construct
  source 1..75: mol_type = other DNA
tggagcactgtatggagcttgaggacttcggccggcagctgcgtcagcacgtgtatgactgtaccctcctgacca

SEQ ID NO: 400086 - DNA, 75 bp, synthetic construct
  source 1..75: mol_type = other DNA
atgggcgtcccctggttccagctgaagacggcacaattcccggagccgatcatcacgttctcgagcaattacgag

SEQ ID NO: 400087 - DNA, 75 bp, synthetic construct
  source 1..75: mol_type = other DNA
gctgtatttccctggaggaagcacctccccccaaacagcagatagtctgcagcaggagctttggggagcgtgtca

SEQ ID NO: 400088 - DNA, 75 bp, synthetic construct
  source 1..75: mol_type = other DNA
tctgggtgaatggccatcgctatgcaaaggcaggctgcatgctgaacgatttcacgccaaccggggtatcacagc

SEQ ID NO: 400089 - DNA, 75 bp, synthetic construct
  source 1..75: mol_type = other DNA
atgaaatcagggcacgctttaaggctgatgagattaaccgagcactgcgtgccaggtcagataaaacaaattttg

SEQ ID NO: 400090 - DNA, 75 bp, synthetic construct
  source 1..75: mol_type = other DNA
accacttgtcggcaagatcgcagtgcttatgccaacgcggctgagcggctattgatggctatcggtgactgtcat

SEQ ID NO: 400091 - DNA, 75 bp, synthetic construct
  source 1..75: mol_type = other DNA
aacaccctgatgtatgtcattccgattatgttatatgcgcttgcagctggttttcttgctgcggcttctctgtcg

SEQ ID NO: 400092 - DNA, 75 bp, synthetic construct
  source 1..75: mol_type = other DNA
tgagctgaacggcgagagttgcatttcgctggaggaagcgccgccgccgaaacagcagattgtctgcagtcgcag

SEQ ID NO: 400093 - DNA, 75 bp, synthetic construct
  source 1..75: mol_type = other DNA
ccgtaaaaacagtgaaaagttaatgaaaacactcgatgaactgaacctgtcgggaaaagggaaagtgtggtttac

SEQ ID NO: 400094 - DNA, 75 bp, synthetic construct
  source 1..75: mol_type = other DNA
atgccgattggttattggtgtcccgctcgggtcatgacaacgtgccgcttaccgagctattcgcccaacagccct

SEQ ID NO: 400095 - DNA, 75 bp, synthetic construct
  source 1..75: mol_type = other DNA
gctctgtatttatgaacgctgcgcgttattcggcgttctgggtgctgcgctgattggcgcgatcgccccgaaaac

SEQ ID NO: 400096 - DNA, 75 bp, synthetic construct
  source 1..75: mol_type = other DNA
ctgttggtgtggggatcgcccagaccaaaacgctggctaagcttgccaatcatgcggcaaaaaaatggcagcggc

SEQ ID NO: 400097 - DNA, 75 bp, synthetic construct
  source 1..75: mol_type = other DNA
atgggcgctccctggttcaaacaaaaagatctgtttcgtcgctgtggcgtggtttgctttagcagcaattatgag

SEQ ID NO: 400098 - DNA, 75 bp, synthetic construct
  source 1..75: mol_type = other DNA
tgaaaggggaagcgtttgtggtggtcgtggcgtcaggtgatgaaatcccagatctgtcaacgctgcgggcgttta

SEQ ID NO: 400099 - DNA, 75 bp, synthetic construct
  source 1..75: mol_type = other DNA
ccaggatgcttcttttcatctcaatcagagggggccacgcagcaggatgcgcagggacgctggcaatttgagtat

SEQ ID NO: 400100 - DNA, 75 bp, synthetic construct
  source 1..75: mol_type = other DNA
aacgaagccacgtttgctggagcaacagcagttacgcgaacagcgttcgcaacggcagcgccagcgacaatttac

SEQ ID NO: 400101 - DNA, 75 bp, synthetic construct
  source 1..75: mol_type = other DNA
tcgggattacgctaatactgcgtctgacaagcaacgccgaagcacgcgtaaacgccgttttgcttcaggcggaac

SEQ ID NO: 400102 - DNA, 75 bp, synthetic construct
  source 1..75: mol_type = other DNA
gcgtcattcttgagcgtacggtacgcgaactcaacggcgagtcctgcatatccctggaagaagcaccaccggcaa

SEQ ID NO: 400103 - DNA, 75 bp, synthetic construct
  source 1..75: mol_type = other DNA
agcgggttgcatactcaacgatttcactcctaccgggctttcgcatttgaacctcttcgatgatactcagccccg

SEQ ID NO: 400104 - DNA, 75 bp, synthetic construct
  source 1..75: mol_type = other DNA
cgttctataccagctgcgaaaaggtttttcgccctgacctgcgaaacaaacccgttgtcgttctctcaaataatg

SEQ ID NO: 400105 - DNA, 75 bp, synthetic construct
  source 1..75: mol_type = other DNA
tcaccaacggtgagcagggggtgaattaccatcgtaatgtctggcatcacccgcttttcgcctggcagcgagtca

SEQ ID NO: 400106 - DNA, 75 bp, synthetic construct
  source 1..75: mol_type = other DNA
tggtggagcgttaccacgatttggcgctggttgagattcttgagcaagaccgtacgctcatcagcattaaccgcg

SEQ ID NO: 400107 - DNA, 75 bp, synthetic construct
  source 1..75: mol_type = other DNA
gggaaagtgtggtttgcggggcgaggaaccgcccctgaatggcaaatgaaacgggaaatgctctcgccttcgtat

SEQ ID NO: 400108 - DNA, 75 bp, synthetic construct
  source 1..75: mol_type = other DNA
ttgattcgtggaaagctgacccggaattaaataattttcgttatatgtggaacaccctgatgtatgtcattccga

SEQ ID NO: 400109 - DNA, 75 bp, synthetic construct
  source 1..75: mol_type = other DNA
atgaatcaaactgtcgcggtgacgggcgctaccgggtttatcggtaaatatattatcgataacctgctcgcccgc

SEQ ID NO: 400110 - DNA, 75 bp, synthetic construct
  source 1..75: mol_type = other DNA
gaatggttggtattcctctgccggtactcacctgccttgcggatatcagtaccgcgttgagtcgcctggcaggta

SEQ ID NO: 400111 - DNA, 75 bp, synthetic construct
  source 1..75: mol_type = other DNA
ctccaactaggtttcttgagctttttgaatctggatctcgaaaatctaaagctggggtgctagagttagcgacag

SEQ ID NO: 400112 - DNA, 75 bp, synthetic construct
  source 1..75: mol_type = other DNA
gtaaatcggcttttaatcataaagtcagacatggtgcggacaagaaagcatatacctggacacctacaaaagaag

SEQ ID NO: 400113 - DNA, 75 bp, synthetic construct
  source 1..75: mol_type = other DNA
gtggtgttgatggatatccgcatgccagagatggacggcatcaaggcactaaaggagatgcgcagccatgagtgt

SEQ ID NO: 400114 - DNA, 75 bp, synthetic construct
  source 1..75: mol_type = other DNA
tattatcgataacctgctcgttcgcggctttcatgttcgcgcgttgacgcgtactgcccgcgctcacgtcagcga

SEQ ID NO: 400115 - DNA, 75 bp, synthetic construct
  source 1..75: mol_type = other DNA
cgccgcgctgcaagccactgccgcacaacaaattggcgtttccgatctgcttctggttgccgccaacactaccgg

SEQ ID NO: 400116 - DNA, 75 bp, synthetic construct
  source 1..75: mol_type = other DNA
ggatcatggcgattatggacggctggcgcggtatcaaagaaacctggcctgcggtcgtggttgcgggcggttcgt

SEQ ID NO: 400117 - DNA, 75 bp, synthetic construct
  source 1..75: mol_type = other DNA
cgccgcattgctggtcggtctgggctttaaaccgttatacgccgccgggctgtgcctgattgttaacaccgcgcc

SEQ ID NO: 400118 - DNA, 75 bp, synthetic construct
  source 1..75: mol_type = other DNA
aaggcgtgaaaatctttcaaaaattaatagactaagcgttgaagatattgctgaactaatcaataccgattctgg

SEQ ID NO: 400119 - DNA, 75 bp, synthetic construct
  source 1..75: mol_type = other DNA
ccgctacatgagactgctgagcagatatcattctcgcttaaaaaatatggctataaaacatacgacatacgcttg

SEQ ID NO: 400120 - DNA, 75 bp, synthetic construct
  source 1..75: mol_type = other DNA
cggcggtaggactggtagggaaagagtcagatctgttccgttttactgtcaaacacagcctgattttcacctgta

SEQ ID NO: 400121 - DNA, 75 bp, synthetic construct
  source 1..75: mol_type = other DNA
gaaaccaggaagttcagaaacggttttcatagaaaactgaaaggtatgggatatgatgttaccgctacatggaaa

SEQ ID NO: 400122 - DNA, 75 bp, synthetic construct
  source 1..75: mol_type = other DNA
ttacgtgcgtcgctggcggtcattcgcagtgaagagggggatgctcggcgcgaaaaactggcggcactcattacg

SEQ ID NO: 400123 - DNA, 75 bp, synthetic construct
  source 1..75: mol_type = other DNA
gttacaactggcagaaaaactgcgccagcaaggctgctgggtcacggcgattcgcccgccaaccgtacccgctgg

SEQ ID NO: 400124 - DNA, 75 bp, synthetic construct
  source 1..75: mol_type = other DNA
cccgccaccttatctacagcaccagtatgccgcccgctcaggcgcaggcattacgtgcgtcgctggcggtcattc

SEQ ID NO: 400125 - DNA, 75 bp, synthetic construct
  source 1..75: mol_type = other DNA
ggttcttcctaaaggaaaaggaaacagctcacagcaaatgaaaaaacatggtagaacagaattgagaaaatgcgt

SEQ ID NO: 400126 - DNA, 75 bp, synthetic construct
  source 1..75: mol_type = other DNA
tccgtgcctggcagcagggggcggagcaatttggcatcggtagcggcggttccggtcacgtcagcggttatagcg

SEQ ID NO: 400127 - DNA, 75 bp, synthetic construct
  source 1..75: mol_type = other DNA
cggcagctgctggctgcaaaaggtaaaaccagaattgctggtggtgacttttggcaaaggatttggcgtcagcgg

SEQ ID NO: 400128 - DNA, 75 bp, synthetic construct
  source 1..75: mol_type = other DNA
gagtgacgcatccggtgacgatgccgctggtggataatcaactggatctcgccactttctggcagcagtggctga

SEQ ID NO: 400129 - DNA, 75 bp, synthetic construct
  source 1..75: mol_type = other DNA
gcgaccgctgggtgctggccgttgccggtacacacggcaaaaccaccaccgcgggaatggcgacctggattctgg

SEQ ID NO: 400130 - DNA, 75 bp, synthetic construct
  source 1..75: mol_type = other DNA
ttcatagaaaactgaaaggtatgggatatgatgttaccgctacctggaaaaaagatcccgaacgtaaacgggaga

SEQ ID NO: 400131 - DNA, 75 bp, synthetic construct
  source 1..75: mol_type = other DNA
agcgtgctggcgcgggctattgagcgtggaattaacgcgccgctggcatcatcgtgtggacgtttgttcgatgcc

SEQ ID NO: 400132 - DNA, 75 bp, synthetic construct
  source 1..75: mol_type = other DNA
catgacgcgcatccgggctatgtctccagccagtgggcacgcgaaatgaatctgccgacgcaaacggtgctgcat

SEQ ID NO: 400133 - DNA, 75 bp, synthetic construct
  source 1..75: mol_type = other DNA
ggcgatggcgggttgtctctggggcagggggttattgctgcggcgcgttggttagcgggtgaagtccagaacgga

SEQ ID NO: 400134 - DNA, 75 bp, synthetic construct
  source 1..75: mol_type = other DNA
gctttttgacggctgcagctgcgggaatgtggtttgcggatgcacaagggctgacatcgccatggtttatcgtgc

SEQ ID NO: 400135 - DNA, 75 bp, synthetic construct
  source 1..75: mol_type = other DNA
gccgcgttcttgctgggcggctatgtggcaacatttaccgcagtgccggacaacattaccgatccgcttgagacg

SEQ ID NO: 400136 - DNA, 75 bp, synthetic construct
  source 1..75: mol_type = other DNA
taacaaaggcaaagacctctcgatgccgatgaaatttactctcggcatgtttatgtgctcactgggctttttgac

SEQ ID NO: 400137 - DNA, 75 bp, synthetic construct
  source 1..75: mol_type = other DNA
attatcttcttccgtcaggcattcaaactggataaaaccgggcgcaataaaatgttcgtcgcctttgtgctgatg

SEQ ID NO: 400138 - DNA, 75 bp, synthetic construct
  source 1..75: mol_type = other DNA
taacccgttctgggtggtgctcgccagcccggtactggcaggtatctacacccatctggggaataaaggcaaaga

SEQ ID NO: 400139 - DNA, 75 bp, synthetic construct
  source 1..75: mol_type = other DNA
gccgcgttcttgctcggaggctatgtggcaacatttaccgcagtgccagacaacattaccgatccgcttgagacg

SEQ ID NO: 400140 - DNA, 75 bp, synthetic construct
  source 1..75: mol_type = other DNA
aactgtggggggaagagcaggcctttgattatctcaaacaactgaacgccaatatctcccagtacaccaaatcag

SEQ ID NO: 400141 - DNA, 75 bp, synthetic construct
  source 1..75: mol_type = other DNA
ggacagccgtagctttcctattttccctgctgtatccggccttactggcagatctgagttcatgattaacattga

SEQ ID NO: 400142 - DNA, 75 bp, synthetic construct
  source 1..75: mol_type = other DNA
gatccgtcttgtcattaaacgaagtaatggttctgtggtctccgacaataacctgagttatgacacagccaataa

SEQ ID NO: 400143 - DNA, 75 bp, synthetic construct
  source 1..75: mol_type = other DNA
gagcgattcggctactacggcgtgcaaggcgtgctggcggttttcttcgttaaacagctcggattctcacaagag

SEQ ID NO: 400144 - DNA, 75 bp, synthetic construct
  source 1..75: mol_type = other DNA
gtgaaagtcatcattgttgaagacgaattcctggcacaacaggaactgagctggctgattaaagagcacagccag

SEQ ID NO: 400145 - DNA, 75 bp, synthetic construct
  source 1..75: mol_type = other DNA
cattttgcggctgaaagatctggattttgaagtgccagttagtcgcagcaaagtaaaagagttcaggcagttaat

SEQ ID NO: 400146 - DNA, 75 bp, synthetic construct
  source 1..75: mol_type = other DNA
tcaatcaacatcggctcgttgatagcattatcgctggcaccagttatcgctgacagatttggttattccgtcacc

SEQ ID NO: 400147 - DNA, 75 bp, synthetic construct
  source 1..75: mol_type = other DNA
ttgggcacctgaagatggaagatgtcgaaccaatggttctgctgaaggtgatcaggcttttcgaagacaggggcg

SEQ ID NO: 400148 - DNA, 75 bp, synthetic construct
  source 1..75: mol_type = other DNA
ctgcgggcattacgctgctgcgctgtagcgttaacgctgcgcacagccgcgaacaaatcgatgccatcattcagg

SEQ ID NO: 400149 - DNA, 75 bp, synthetic construct
  source 1..75: mol_type = other DNA
aataattatctcggtttaacctttaatcatgatgctatccgcgaaggtcaggcagcgttagcggcccaaggcacc

SEQ ID NO: 400150 - DNA, 75 bp, synthetic construct
  source 1..75: mol_type = other DNA
ggttatgtgctgggcatcatgcttggctggggtgtggttggtgtctggatgggaatgtttgccgactgggctgtg

SEQ ID NO: 400151 - DNA, 75 bp, synthetic construct
  source 1..75: mol_type = other DNA
ttttcaattgcggctcttatcaacttacccggaagtgcgctcggttctgcttctacgatcattacaggccgaagg

SEQ ID NO: 400152 - DNA, 75 bp, synthetic construct
  source 1..75: mol_type = other DNA
tgttattgccggaaattttatcgcgttttcaattgcggctcttatcaacttacccggaagtgcgctcggttctgc

SEQ ID NO: 400153 - DNA, 75 bp, synthetic construct
  source 1..75: mol_type = other DNA
gccgcccgtgtgtttgccgtgctgtgcgagttacgcccggaacccgcggatgagattgccgaagtgttgcttaat

SEQ ID NO: 400154 - DNA, 75 bp, synthetic construct
  source 1..75: mol_type = other DNA
ggcggcaaattttgcccgcgtgcaggcgttagcggaaaattatcaaccgctgtatgctgccttagggttgcatcc

SEQ ID NO: 400155 - DNA, 75 bp, synthetic construct
  source 1..75: mol_type = other DNA
caacgcgcggcacaagcgggcgtaggcaagatcattgtaccggcaactgaggcggcaaattttgcccgcgtgcag

SEQ ID NO: 400156 - DNA, 75 bp, synthetic construct
  source 1..75: mol_type = other DNA
tggaagtgctgcgttatggcagtcgtccgtatatcttcaccgcttcgccttctccctcatgcattgctaccgttc

SEQ ID NO: 400157 - DNA, 75 bp, synthetic construct
  source 1..75: mol_type = other DNA
tctccgtcctgcattgcgaccgtgcgctcgtcgttaagaaccattgccacacaaccagagctgcggcaaaagctg

SEQ ID NO: 400158 - DNA, 75 bp, synthetic construct
  source 1..75: mol_type = other DNA
gcgagttgcgctcggaaccggcggatgagattgccgaagtgttgcttaataatacgtatgcggtgtttagcgtta

SEQ ID NO: 400159 - DNA, 75 bp, synthetic construct
  source 1..75: mol_type = other DNA
tgttgccgcagacggcacggaatattacggaaaggacttggcgttacccgcactcggtgaaggggccttcaccgt

SEQ ID NO: 400160 - DNA, 75 bp, synthetic construct
  source 1..75: mol_type = other DNA
aaaattttgattattttgactttttatctgcacctgaaaaaacgttggttcttaatagtgtagccatcggtaaca

SEQ ID NO: 400161 - DNA, 75 bp, synthetic construct
  source 1..75: mol_type = other DNA
gaaaatattaaaaatattaaacaagttattgatgacatggcgaccgatgccaccatgtttgacgttaacaaaaag

SEQ ID NO: 400162 - DNA, 75 bp, synthetic construct
  source 1..75: mol_type = other DNA
tagtctgattttccgtggggccattaccggtgtagataccagcaaagaagggctgcaattctatgaagtggttcc

SEQ ID NO: 400163 - DNA, 75 bp, synthetic construct
  source 1..75: mol_type = other DNA
aattctttgcatgattgcgatgtctccgccgtctgacctgagtgcagacagcatccgcgatgaaaaagtgaaagt

SEQ ID NO: 400164 - DNA, 75 bp, synthetic construct
  source 1..75: mol_type = other DNA
taaatatgaatatgatgaaagaagccattgatgttttgataaactctgaaaaacatattctgattataggcgaaa

SEQ ID NO: 400165 - DNA, 75 bp, synthetic construct
  source 1..75: mol_type = other DNA
atctgcacctgaaaaaacgttggttcttaatagtgtagccatcggtaacaacttacgggaatcaaaagttgttca

SEQ ID NO: 400166 - DNA, 75 bp, synthetic construct
  source 1..75: mol_type = other DNA
ccacctacggagaaatgcgccaggccgtctgccagtatgccgagcgcgcggcggaaaagttgcgcggtgagcgac

SEQ ID NO: 400167 - DNA, 75 bp, synthetic construct
  source 1..75: mol_type = other DNA
gaaggcaggagtcatgctggctgatttcacaccatcgggtatagcgcagccgggattatttgatgaaatccagcc

SEQ ID NO: 400168 - DNA, 75 bp, synthetic construct
  source 1..75: mol_type = other DNA
acatcaccctttgcagtaaaagaaccctgttacagcaatgccgctgtggaaaagcttccattgcccacacaggac

SEQ ID NO: 400169 - DNA, 75 bp, synthetic construct
  source 1..75: mol_type = other DNA
agtattgccggcaggtgacgacatttgtacggacatcaccctttgcagtaaaagaaccctgttacagcaatgccg

SEQ ID NO: 400170 - DNA, 75 bp, synthetic construct
  source 1..75: mol_type = other DNA
aaacttcagcgtcattcttgagcgtacggtacgcgaactcaacggcgagtcctgcatatccctggaagaagcccc

SEQ ID NO: 400171 - DNA, 75 bp, synthetic construct
  source 1..75: mol_type = other DNA
agctgcgtctgataaaagccggaatgaataaggatcagatatatcagttggcaggccgtcctcattttggtgaag

SEQ ID NO: 400172 - DNA, 75 bp, synthetic construct
  source 1..75: mol_type = other DNA
gtacggggagaaaggaaattccttccggcaatagaacgaaacgaatattgataaatgttccaggtatttatagtg

SEQ ID NO: 400173 - DNA, 75 bp, synthetic construct
  source 1..75: mol_type = other DNA
cccaacctgcaacgcggcgaaggcgaagcgatgctcaccgccctcacccatctcagccgttcaccgctggagcaa

SEQ ID NO: 400174 - DNA, 75 bp, synthetic construct
  source 1..75: mol_type = other DNA
actggacgttggctgtggaaataccctcgatccgagccgcaaaagtgtgaaaaaaagccagttgtgtcggaataa

SEQ ID NO: 400175 - DNA, 75 bp, synthetic construct
  source 1..75: mol_type = other DNA
accagtggtcggttattaacccaaatgttcgttgccgggatggggaccagcgttattgccggaaattttatcgcg

SEQ ID NO: 400176 - DNA, 75 bp, synthetic construct
  source 1..75: mol_type = other DNA
tcacgcccaatcatctgtcaaaactgtttgctcagcatggaacaatgcgttttatcgaatatgtgcgttgggtgc

SEQ ID NO: 400177 - DNA, 75 bp, synthetic construct
  source 1..75: mol_type = other DNA
atttaccggtcaacaacaaaccggtaatgctgttaagcctggtgttcgcaccgacctggcttgggttatcgtttt

SEQ ID NO: 400178 - DNA, 75 bp, synthetic construct
  source 1..75: mol_type = other DNA
gcagttgtttttctgtattcataaagtttttcctttaaatcagattgttatgaatgaacgaatgctgtccgtacc

SEQ ID NO: 400179 - DNA, 75 bp, synthetic construct
  source 1..75: mol_type = other DNA
caatgacagcaactgaagccggattttacgatgttcatctttgggagttcccaatcatgacaatgctcaaattac

SEQ ID NO: 400180 - DNA, 75 bp, synthetic construct
  source 1..75: mol_type = other DNA
gtcagccggaaatacaggaacgcacgctggatggcccttcgctgggatggtgaaaccatgaaaaatggcagcttc

SEQ ID NO: 400181 - DNA, 75 bp, synthetic construct
  source 1..75: mol_type = other DNA
taagatcgatgaagtcgtcaaaggtagtcctgcggctcaggctggtttacaaaaagacgatatgatcattggcgt

SEQ ID NO: 400182 - DNA, 75 bp, synthetic construct
  source 1..75: mol_type = other DNA
gccgagttgcgttcgcgcatcgcgaccaccgagccgggcacgaaagtgaagctcggtctgctgcgtaacggcaag

SEQ ID NO: 400183 - DNA, 75 bp, synthetic construct
  source 1..75: mol_type = other DNA
atgaaaaaacaaacccagctgttgagtgcgttagcgttaagtgtcgggttaactctctcggcgccatttcaggcc

SEQ ID NO: 400184 - DNA, 75 bp, synthetic construct
  source 1..75: mol_type = other DNA
ccagcccgacatttaccggaacccccaaagcgccaacgccagcggcgggaaataataccacgcaggttgcgacca

SEQ ID NO: 400185 - DNA, 75 bp, synthetic construct
  source 1..75: mol_type = other DNA
cgcttaccaatttgagtggaaaggatgtggctggtcttctcgcataccttggtttgggagaagcggcaacgagga

SEQ ID NO: 400186 - DNA, 75 bp, synthetic construct
  source 1..75: mol_type = other DNA
taggtgtccctgttccgtggccttcttccactccgccgacaggctggttgaaatgcaatggtgctgcctttgata

SEQ ID NO: 400187 - DNA, 75 bp, synthetic construct
  source 1..75: mol_type = other DNA
cgcttaccaatttgagtggaaaggatgtagctggtcttctcacataccttggtttgggagaagcggccaaattgc

SEQ ID NO: 400188 - DNA, 75 bp, synthetic construct
  source 1..75: mol_type = other DNA
tcttcaggatttggtcttgctgcaagaatttctctcacttttggcggcgcaaagtgcgattctatcggagtttcg

SEQ ID NO: 400189 - DNA, 75 bp, synthetic construct
  source 1..75: mol_type = other DNA
ctgcgccatgcttactcattctggtgatggcggtgcgcctttaggcgctgggcgagggttcgtgatgacggcaga

SEQ ID NO: 400190 - DNA, 75 bp, synthetic construct
  source 1..75: mol_type = other DNA
ccggaatacatcattccaaaaccgttcgatccacggttgatcgttaagatcgctccagcggtagcgaaagcggcg

SEQ ID NO: 400191 - DNA, 75 bp, synthetic construct
  source 1..75: mol_type = other DNA
tatcagggccgtgagccaaacatggcggaaaccaaagccgcatatgcggtggtggatgacggcaaacgtaccctc

SEQ ID NO: 400192 - DNA, 75 bp, synthetic construct
  source 1..75: mol_type = other DNA
ccgagtttgttcaggcggcactgacggctcttattaatggtgcgccagccacgctggatacgctgaaagaaatag

SEQ ID NO: 400193 - DNA, 75 bp, synthetic construct
  source 1..75: mol_type = other DNA
tatgtggatgacaaggtactggagctgaaggtgtacgtggatgacctgatggcaaaacatcttgctgcacaggac

SEQ ID NO: 400194 - DNA, 75 bp, synthetic construct
  source 1..75: mol_type = other DNA
taaccaatgtgggcgcggcgaaactggcaaatgccacggcattgggtgcgcaggttgaaatcaccaagatggctg

SEQ ID NO: 400195 - DNA, 75 bp, synthetic construct
  source 1..75: mol_type = other DNA
agaaaccgtccgtcgtttcgggattgagccgcgagttgctctgttgtcgcactctaactttggttcttctgactg

SEQ ID NO: 400196 - DNA, 75 bp, synthetic construct
  source 1..75: mol_type = other DNA
gacgccggacgcaaagcagacggcactggtaaatgagaaacgccgggctgcgctgaatatgctctatatcgaccc

SEQ ID NO: 400197 - DNA, 75 bp, synthetic construct
  source 1..75: mol_type = other DNA
cgctgacgaatctaagcgggaaaagtgtttcggcccttctacaataccttcaattgggagaagcggcgaaacggg

SEQ ID NO: 400198 - DNA, 75 bp, synthetic construct
  source 1..75: mol_type = other DNA
cctaaggaagattatgatttttggcttcagattttaaaaaatgaacatatagcttataaggttcctggctgtatg

SEQ ID NO: 400199 - DNA, 75 bp, synthetic construct
  source 1..75: mol_type = other DNA
taaatacgatttatgaagtgcctgaaaaattgtcgtataaagatcttctaaaatattgtccaattggctgtctta

SEQ ID NO: 400200 - DNA, 75 bp, synthetic construct
  source 1..75: mol_type = other DNA
actaaatcagtaagttggcagcattacccctatgatgatgcagtcggtgtaaccagcagcatgttaaaaattagc

SEQ ID NO: 400201 - DNA, 75 bp, synthetic construct
  source 1..75: mol_type = other DNA
ttgcctgatttacgcggtgaatttattcgtggatgggatgatgggcgcggggtggattcctctcgtggtttgttg

SEQ ID NO: 400202 - DNA, 75 bp, synthetic construct
  source 1..75: mol_type = other DNA
cggcttttaatgtaccaggcggcaccgaaacacgcccacgtaacattgcattcaactttttagtaagggctaaat

SEQ ID NO: 400203 - DNA, 75 bp, synthetic construct
  source 1..75: mol_type = other DNA
aatggtgggttctgcacctgcggcactggatacattgaacgaactggcggcggcgctggggaatgacccgaactt

SEQ ID NO: 400204 - DNA, 75 bp, synthetic construct
  source 1..75: mol_type = other DNA
cgcttaccaatttgagtgggaaggatgttgccggtcttcttgcataccttcaattgggagaagcggcgaaacggg

SEQ ID NO: 400205 - DNA, 75 bp, synthetic construct
  source 1..75: mol_type = other DNA
gatttgagttctacagccgcatatagcttagcggtgggccgatcatactatacgacggtaacaagaactcagatt

SEQ ID NO: 400206 - DNA, 75 bp, synthetic construct
  source 1..75: mol_type = other DNA
gcggttggtggatacgtgaagtgggcttgtttgatgagtccggggcattgattgccgtgggcaactgcccggaaa

SEQ ID NO: 400207 - DNA, 75 bp, synthetic construct
  source 1..75: mol_type = other DNA
tgccacgacaatgcttaatgcgctggcaggtaaacaaccgctggacagtacgcttaccaatttgagtggaaagga

SEQ ID NO: 400208 - DNA, 75 bp, synthetic construct
  source 1..75: mol_type = other DNA
aacaatacacagattgccactacagcttttgtgaaatcagcgattgcagcaatggtggggtctgcacctgcggca

SEQ ID NO: 400209 - DNA, 75 bp, synthetic construct
  source 1..75: mol_type = other DNA
cgctgactaatttgagtggaaaggatgttgccggtcttctcgcataccttggtttgggagaagcggcaaaacgaa

SEQ ID NO: 400210 - DNA, 75 bp, synthetic construct
  source 1..75: mol_type = other DNA
caaatcagacttggttactcacaggtattgtcctgtctgcgatggccgtgcttgtggctgtggttactgttatta

SEQ ID NO: 400211 - DNA, 75 bp, synthetic construct
  source 1..75: mol_type = other DNA
acgctttgaggatgacggctatttttgcaccattgaagtcaccgcaacctcaaccgtaacgctggatactctcac

SEQ ID NO: 400212 - DNA, 75 bp, synthetic construct
  source 1..75: mol_type = other DNA
atgaccctgcctgaactgaaaaaggttattgctgacatctatcccggccagacacagttttatgtgattgaattt

SEQ ID NO: 400213 - DNA, 75 bp, synthetic construct
  source 1..75: mol_type = other DNA
cgtctctgccgccagaaaagattcaggttcctttcatgtataacgccaccagtagtgaaagtagcggccaattct

SEQ ID NO: 400214 - DNA, 75 bp, synthetic construct
  source 1..75: mol_type = other DNA
atgactacttccatgttcaacgcaaaactactaccaactgcgctatccgccgcagtggtcgtcgtgcgtgtggtg

SEQ ID NO: 400215 - DNA, 75 bp, synthetic construct
  source 1..75: mol_type = other DNA
gacagagcaagcaagacagattggtaatgcagttccccctatgttaggcacaatattaataaatgcattacttaa

SEQ ID NO: 400216 - DNA, 75 bp, synthetic construct
  source 1..75: mol_type = other DNA
aatacctgctcaacacagaacgtgatcttgccgctcgcgtgcgtgatcgttatgacatgtacctgaaatccctgc

SEQ ID NO: 400217 - DNA, 75 bp, synthetic construct
  source 1..75: mol_type = other DNA
tgctacacgatggcgtggcaaaaaaaacagccagcaaaatgacgtttattgaatttggtgacccggaaccagtcg

SEQ ID NO: 400218 - DNA, 75 bp, synthetic construct
  source 1..75: mol_type = other DNA
tagcgatgctgtgaacacagataaggaaatacccgcaaacttgcgcattaattttgcacaatcaaagccgaacga

SEQ ID NO: 400219 - DNA, 75 bp, synthetic construct
  source 1..75: mol_type = other DNA
gtggtaaatgcaggtattggcgtctttggcgatgccctggaattaaatgccgacgatattgatcgccttttcaaa

SEQ ID NO: 400220 - DNA, 75 bp, synthetic construct
  source 1..75: mol_type = other DNA
aaaagacatgggcaaccggaagaggtcgctggtatggtcgcatggttagcagggccagaagccagttttgttacc

SEQ ID NO: 400221 - DNA, 75 bp, synthetic construct
  source 1..75: mol_type = other DNA
ggctggcccgtgattttggaccgcgtgggatcaccatcaacgtcgtccagccagggccaattgataccgacgcta

SEQ ID NO: 400222 - DNA, 75 bp, synthetic construct
  source 1..75: mol_type = other DNA
tgatgagtccggggcattgattgccgtgggaaactgcccggaaagctataagccgcaactggctgaaggcagcgg

SEQ ID NO: 400223 - DNA, 75 bp, synthetic construct
  source 1..75: mol_type = other DNA
ggatgcggggcgagccttgctaagtcttcaggatgactcttttgaagctcacaggcatgagtcctttttttacgc

SEQ ID NO: 400224 - DNA, 75 bp, synthetic construct
  source 1..75: mol_type = other DNA
cgctgactaatttgagtggaaaggatgtagctggtcttctcacataccttggtttgggagaagcggcaaaacggg

SEQ ID NO: 400225 - DNA, 75 bp, synthetic construct
  source 1..75: mol_type = other DNA
ttgaaatgcaatggcgctgcctttgataaggttaaatatccccgtcttgctacagcatatccatcagggaaacta

SEQ ID NO: 400226 - DNA, 75 bp, synthetic construct
  source 1..75: mol_type = other DNA
ttgaaatgcaacggtgcgccatttatcgcctcccaatatccgaagcttgctctcgcttaccccggtcttttgctg

SEQ ID NO: 400227 - DNA, 75 bp, synthetic construct
  source 1..75: mol_type = other DNA
tgacggatattggtgcggcgaaacttgccagcgccgccgcgctcggtgtgcctttaaaaattacccatatggcgg

SEQ ID NO: 400228 - DNA, 75 bp, synthetic construct
  source 1..75: mol_type = other DNA
agaggatgtgcaacaaaaagtaattgatttgatgtcaaaaatgaatgatgaaaactttacttctgtaggtgatta

SEQ ID NO: 400229 - DNA, 75 bp, synthetic construct
  source 1..75: mol_type = other DNA
tggatacgtgaagtgggcctgtttgatgagtccggggtattgattgccgtgggaaactgcccggaaagctataag

SEQ ID NO: 400230 - DNA, 75 bp, synthetic construct
  source 1..75: mol_type = other DNA
attcagcaccaccattaacaatgcgctggaactaaaagcgtcactgtcaagtccggcacttaccgggacgccaac

SEQ ID NO: 400231 - DNA, 75 bp, synthetic construct
  source 1..75: mol_type = other DNA
catcaacgtatctatgacatacgctaatgaccgaaaaatccgacaagatgttcacttctcggcggcaaatgttgt

SEQ ID NO: 400232 - DNA, 75 bp, synthetic construct
  source 1..75: mol_type = other DNA
cttctgaaaagtacccaaatctggcaaaggcttacccaacattaaaattaccagatttacgcggtgaatttattc

SEQ ID NO: 400233 - DNA, 75 bp, synthetic construct
  source 1..75: mol_type = other DNA
tcgaattgccaccaactggagcaggcgcaggggctggttttagggttcgaccaaggaatattgcatttaactata

SEQ ID NO: 400234 - DNA, 75 bp, synthetic construct
  source 1..75: mol_type = other DNA
agaagcggcaaaacgggatgtgggaacaggggaaaatcagataccggatatggcttcttttgccagtggtgatgg

SEQ ID NO: 400235 - DNA, 75 bp, synthetic construct
  source 1..75: mol_type = other DNA
tgaaaggtgcggcggcctatatggaacacgcgcatgttctcggtcaatacgacaacgatatttatgcccagtacc

SEQ ID NO: 400236 - DNA, 75 bp, synthetic construct
  source 1..75: mol_type = other DNA
acacgctcacgttctcggtcaatacgacaacgatatttacgcccagtaccataaaatcatggcatggctgggtac

SEQ ID NO: 400237 - DNA, 75 bp, synthetic construct
  source 1..75: mol_type = other DNA
ctcaaagatctctacaatctgctggaacaaaccgaaggcacgggcgttaacgtctacactcacggtgaaatgctg

SEQ ID NO: 400238 - DNA, 75 bp, synthetic construct
  source 1..75: mol_type = other DNA
atgagcatgaaactaatggcaaaagcaatggaaattaaagtgggtaatccattgcgtaagctggttctgattaag

SEQ ID NO: 400239 - DNA, 75 bp, synthetic construct
  source 1..75: mol_type = other DNA
tggcgggcttcccgtacagcgaaattccgcacctgatcaccgtgggctttggccgccagacgctgcttggcgcag

SEQ ID NO: 400240 - DNA, 75 bp, synthetic construct
  source 1..75: mol_type = other DNA
ccgatacgctgattgatctggttagccgtgaaaaactgcgtcatatcttcctgcttggtggctgtgacggcgcac

SEQ ID NO: 400241 - DNA, 75 bp, synthetic construct
  source 1..75: mol_type = other DNA
gggcacatctaataacgttcacgtttcaatgatcgtggatgaccaggtcactaataccggtttttatgtccgctg

SEQ ID NO: 400242 - DNA, 75 bp, synthetic construct
  source 1..75: mol_type = other DNA
ggtttgggagaagcggcaaaacggaacgtgggaacaggggaaaatcagataccagatatgtctgcatttccatct

SEQ ID NO: 400243 - DNA, 75 bp, synthetic construct
  source 1..75: mol_type = other DNA
aatggtgggttctgcacctgcggcactggatacattgaacgaactggcgtcggcactggggaatgatccgaactt

SEQ ID NO: 400244 - DNA, 75 bp, synthetic construct
  source 1..75: mol_type = other DNA
ttgaccgggaccatcacgcgtgattacgttccgggcggcgctcgggcaaataaagtctggttccagcgtgaaaac

SEQ ID NO: 400245 - DNA, 75 bp, synthetic construct
  source 1..75: mol_type = other DNA
gtgctcgttatcagtgcacaattcccactctggcactggcgtggatattaaaacagagtgatttaatctccattc

SEQ ID NO: 400246 - DNA, 75 bp, synthetic construct
  source 1..75: mol_type = other DNA
gggcaaataaagtctggttccagcgtgaaaacatgctgaaagtgattgatatgcttgaacagtggcagccacttt

SEQ ID NO: 400247 - DNA, 75 bp, synthetic construct
  source 1..75: mol_type = other DNA
ggttcatcccgccatcagcaggcttagcgcaacaaacgcggctactttcttcattgtggttctcaattacagttt

SEQ ID NO: 400248 - DNA, 75 bp, synthetic construct
  source 1..75: mol_type = other DNA
gtgctggcctgtcggcgtgaccatccattggccaaaaagcagcttgtagaatggcaggagttagtgggttacaaa

SEQ ID NO: 400249 - DNA, 75 bp, synthetic construct
  source 1..75: mol_type = other DNA
atgattggcgtacgttcctccagcggcaaccgattgttgatagaacaacagctagccgacaagccctggaagctg

SEQ ID NO: 400250 - DNA, 75 bp, synthetic construct
  source 1..75: mol_type = other DNA
gtccctatccaaacgtacggcgcaggtgatgatgcaagcatccctcaaatatttgtctcccaagcttgaaccaaa

SEQ ID NO: 400251 - DNA, 75 bp, synthetic construct
  source 1..75: mol_type = other DNA
tcttagtccaaaaggagattcaaacgtaaaattttatgaagggtatataaaccaatacttatcatttgcaaatga

SEQ ID NO: 400252 - DNA, 75 bp, synthetic construct
  source 1..75: mol_type = other DNA
agattattttctccggcggcgatccgttgatggcgaaagatcacgagctggactggctgctgacgcaactggaag

SEQ ID NO: 400253 - DNA, 75 bp, synthetic construct
  source 1..75: mol_type = other DNA
tccactggaagagcagcacagtgtggtaccaggattgttgcacaaataccataaccgggcgctactgctggtcaa

SEQ ID NO: 400254 - DNA, 75 bp, synthetic construct
  source 1..75: mol_type = other DNA
aagccggtttcctgaatattctcgacactgcatggccgcgctaccgttacacgctgccaaacttccccggcctcc

SEQ ID NO: 400255 - DNA, 75 bp, synthetic construct
  source 1..75: mol_type = other DNA
tgctggcactggggctgtgtatagccggtactgccatcgcggctcctgatgtgctcaatgacgacgcaaagctca

SEQ ID NO: 400256 - DNA, 75 bp, synthetic construct
  source 1..75: mol_type = other DNA
agcaagaagaaaatataatagataagctagtggttaaatatgatgggccagcgctagcagatcataaaatagatt

SEQ ID NO: 400257 - DNA, 75 bp, synthetic construct
  source 1..75: mol_type = other DNA
atggctgatccgtaaagacggttgtatgcactgtgaagatccgggctgtctgaaggcgtgcccgtctgctggtgc

SEQ ID NO: 400258 - DNA, 75 bp, synthetic construct
  source 1..75: mol_type = other DNA
gaaatcagccacgctgacattccggcggtacatttcatccgatctgtctgctccggcatcatcaccgtatacgct

SEQ ID NO: 400259 - DNA, 75 bp, synthetic construct
  source 1..75: mol_type = other DNA
gctatatgaatgtcctcgatatggcctggccgcgttaccgctacacgctccctgtcttccccggactacgttata

SEQ ID NO: 400260 - DNA, 75 bp, synthetic construct
  source 1..75: mol_type = other DNA
aatccgagttctaatcgctggagaaaattgcctgatggaaccatcattcaaatgggaatatcagcatcaggacca

SEQ ID NO: 400261 - DNA, 75 bp, synthetic construct
  source 1..75: mol_type = other DNA
ttcgtggctgggatgacggacgtggtatggatacggggagggcaatattatcagctcagggcgatgccatacgta

SEQ ID NO: 400262 - DNA, 75 bp, synthetic construct
  source 1..75: mol_type = other DNA
gcacgcaaattgataaagacgagttgctgcctggtgacctggtctttttcaaaacggggtccggacaaaatggtt

SEQ ID NO: 400263 - DNA, 75 bp, synthetic construct
  source 1..75: mol_type = other DNA
gatctggttttcttcaaaaccggctctgggcaaaatggtttacatgtgggtatttatgataccaacaaccaattt

SEQ ID NO: 400264 - DNA, 75 bp, synthetic construct
  source 1..75: mol_type = other DNA
ccgttcttctggccctccgcggcaatgccaaatactgtaatcgacagctggtccggtatggtgtttttgaagttc

SEQ ID NO: 400265 - DNA, 75 bp, synthetic construct
  source 1..75: mol_type = other DNA
aatttgagtggaaaagatgttgctggtcttctcgcataccttggtttgggagaaggtgctccagctattggcgtt

SEQ ID NO: 400266 - DNA, 75 bp, synthetic construct
  source 1..75: mol_type = other DNA
ctggcacaaaaagcgccgctgttgagtcctgcactcaccggaacgccaacagcacctactgcggcacagtcggtc

SEQ ID NO: 400267 - DNA, 75 bp, synthetic construct
  source 1..75: mol_type = other DNA
cgccttttaatattgagagttataaaacagcggatggtcagtatgcgattccgtttaaagcaaaatacctgaaac

SEQ ID NO: 400268 - DNA, 75 bp, synthetic construct
  source 1..75: mol_type = other DNA
aacagcggaaggtcaatatgctattccgtttaaagcaaaatacctgaaactgacagataactcagtgaattcagg

SEQ ID NO: 400269 - DNA, 75 bp, synthetic construct
  source 1..75: mol_type = other DNA
ccgtttaaagcaaaatacctgaaactgacagataactcagtgaattcaggtgatgtgttatcttccctgattatg

SEQ ID NO: 400270 - DNA, 75 bp, synthetic construct
  source 1..75: mol_type = other DNA
tgtagctggtcttctcacataccttggtttgggagaaggttcagcattacctattggtgcgcctgttccgtggcc

SEQ ID NO: 400271 - DNA, 75 bp, synthetic construct
  source 1..75: mol_type = other DNA
aacaatacacagattgccactacagcttttgtgaaatcagcgattgcggcaatggtgggttctgcacctgctgca

SEQ ID NO: 400272 - DNA, 75 bp, synthetic construct
  source 1..75: mol_type = other DNA
atctctatttaggtgataacagcgatgtcctggatgtttctgcaccttttaacattgagagttataaaacagcgg

SEQ ID NO: 400273 - DNA, 75 bp, synthetic construct
  source 1..75: mol_type = other DNA
attgccgtgggaaactgcccggaaagctataaaccgcaactggctgaaggcagcgggcgcacccagaccgtgcgc

SEQ ID NO: 400274 - DNA, 75 bp, synthetic construct
  source 1..75: mol_type = other DNA
tttattgacggcaaaatgtggctcaccgaaattgccgacgggtgtgatttagccaccgtgcgtgccaaaaccgaa

SEQ ID NO: 400275 - DNA, 75 bp, synthetic construct
  source 1..75: mol_type = other DNA
catttgcgctaatccgcggcggtcatattgatgcctgcgtgctcggcggtttgcaagtagacgaagaagcaaacc

SEQ ID NO: 400276 - DNA, 75 bp, synthetic construct
  source 1..75: mol_type = other DNA
tggtgacatcgttaacttagggatcggtttacccacaatggtcgccaattatttaccggagggtattcatatcac

SEQ ID NO: 400277 - DNA, 75 bp, synthetic construct
  source 1..75: mol_type = other DNA
tacctgttggtgtgcccgttccatggccttcagccacaccgccaacaggctggctgaaatgcaacggtgcggctt

SEQ ID NO: 400278 - DNA, 75 bp, synthetic construct
  source 1..75: mol_type = other DNA
gcaaccatgcggcattttacccggcgcagcgatgttcgacagcgcaatgtcgtttgcgctgattcgtggtggtca

SEQ ID NO: 400279 - DNA, 75 bp, synthetic construct
  source 1..75: mol_type = other DNA
atccagatctggtgaacgctggcggacaaccgtgcggtattttacccggtgcagccatgtttgatagcgccatgt

SEQ ID NO: 400280 - DNA, 75 bp, synthetic construct
  source 1..75: mol_type = other DNA
tcggcgatggcggcggaacattgccgacaccggacgcaaagcagactgcactggtaaatgagaaacgccgggctg

SEQ ID NO: 400281 - DNA, 75 bp, synthetic construct
  source 1..75: mol_type = other DNA
tgaaggtgtatgtggatgatctgatggcaaaacaccttgccgcaccagatccgcattcacagtacgcgccaaaag

SEQ ID NO: 400282 - DNA, 75 bp, synthetic construct
  source 1..75: mol_type = other DNA
tgggggatggcggcggagcattgccgacgccggacgcaaagcagactgcactggtaaatgagaaacgccgggctg

SEQ ID NO: 400283 - DNA, 75 bp, synthetic construct
  source 1..75: mol_type = other DNA
cgcttaccaatttgagtggaaaggatgtagctggtcttctcacataccttggtttgggagaagcggcaacgagga

SEQ ID NO: 400284 - DNA, 75 bp, synthetic construct
  source 1..75: mol_type = other DNA
aacaatacacagattgccactacagcttttgtgaaatcggcaattgcagcaatggtggggtctgcacctgcggca

SEQ ID NO: 400285 - DNA, 75 bp, synthetic construct
  source 1..75: mol_type = other DNA
atggtgctgattaccagcagcacggaaaatatcaccctgaaaatcgatcctgctgtagtgctggcaacccgcaag

SEQ ID NO: 400286 - DNA, 75 bp, synthetic construct
  source 1..75: mol_type = other DNA
tatttctgaggcaagtgacaatgacatagaagccgcgaacttaattagttcaaaggctatagatgaacatgggct

SEQ ID NO: 400287 - DNA, 75 bp, synthetic construct
  source 1..75: mol_type = other DNA
gttatttccggcattcgccaaaattcaggacgacaccgaaaagttgcgcgtgaacttctacaagctgctgtcggt

SEQ ID NO: 400288 - DNA, 75 bp, synthetic construct
  source 1..75: mol_type = other DNA
gatatcagctttaaattcaacgtattcaaaacatttctgtttattccggcgattgttattggtgggcagatggcg

SEQ ID NO: 400289 - DNA, 75 bp, synthetic construct
  source 1..75: mol_type = other DNA
tccgaccatatcgcgctgcaggtagagatcgaaaaacgcgaagagaaagacggcgaaaccgttatctcctgggag

SEQ ID NO: 400290 - DNA, 75 bp, synthetic construct
  source 1..75: mol_type = other DNA
caccgtgggatatgtggaaccgcgatcacaaacatggcctgaaactgtacgtacaacgcgtgttcatcatggacg

SEQ ID NO: 400291 - DNA, 75 bp, synthetic construct
  source 1..75: mol_type = other DNA
gcaacaactggcagattcagagggcggagattttatctcgcaatccagatatggcaatgacaattgataacctgg

SEQ ID NO: 400292 - DNA, 75 bp, synthetic construct
  source 1..75: mol_type = other DNA
gccaagagctttacagaccggaccgacttacagttactgacgtaccgttatcagagtaaagggtatgtggaattt

SEQ ID NO: 400293 - DNA, 75 bp, synthetic construct
  source 1..75: mol_type = other DNA
ctgctggtctggggggcacacagatgctgggtggcctgggggcattatcgctcagtgcgaacatgtcaaaggcca

SEQ ID NO: 400294 - DNA, 75 bp, synthetic construct
  source 1..75: mol_type = other DNA
ggggctatgctccgcttatttctggggtggccaactccagttcccggatcaccattacccagagtggatacacta

SEQ ID NO: 400295 - DNA, 75 bp, synthetic construct
  source 1..75: mol_type = other DNA
cccaagcgtatttactgagtaaaacagaccctgctcgttgggattatggtgtaaatggtggacgcctgaaatatt

SEQ ID NO: 400296 - DNA, 75 bp, synthetic construct
  source 1..75: mol_type = other DNA
ttcctcaggcgtatttactgagtaaaacagaccccgcgcgctgggattatggcgtgaatggcgggcgcctgaaat

SEQ ID NO: 400297 - DNA, 75 bp, synthetic construct
  source 1..75: mol_type = other DNA
ttaccgcaaattcggcttcgaaaatgtcttgcgttatatcctgcgtgtgaagaatgcacaaggcaactatctgac

SEQ ID NO: 400298 - DNA, 75 bp, synthetic construct
  source 1..75: mol_type = other DNA
gtccgtctgactcaccgtctgaccgatacgccagcgattgtgtctactgatgcggacgaaatgagcactcagatg

SEQ ID NO: 400299 - DNA, 75 bp, synthetic construct
  source 1..75: mol_type = other DNA
tcagcgaaaagaaatcagccaccttgaactcaccacgctgtactggctgaacgtcgggctggggatcgtggtgtg

SEQ ID NO: 400300 - DNA, 75 bp, synthetic construct
  source 1..75: mol_type = other DNA
ataactttgtaccactggtctttggtgagaagtggaacagcattattccggtgctgcaattgctgtgtgtggtgg

SEQ ID NO: 400301 - DNA, 75 bp, synthetic construct
  source 1..75: mol_type = other DNA
cagatggcgggcgcaatcggcgtcacgctgggcttcctgctggtgcagattatcaacactgtgctgagttacttc

SEQ ID NO: 400302 - DNA, 75 bp, synthetic construct
  source 1..75: mol_type = other DNA
gtgcaggttgccgcgggcgcactggcgtttggggtgatgattgtgctgtcacgcaatgcgctggtggtggagatg

SEQ ID NO: 400303 - DNA, 75 bp, synthetic construct
  source 1..75: mol_type = other DNA
ggtcggcattattaacttcccggtactgctgggtctgatggtggtgtcgagcaactttgtgccgctggtgtttgg

SEQ ID NO: 400304 - DNA, 75 bp, synthetic construct
  source 1..75: mol_type = other DNA
cgtattcaaaacatttctgtttattccggcgattgttattggtgggcagatggcgggcgcaatcggcgtcacgct

SEQ ID NO: 400305 - DNA, 75 bp, synthetic construct
  source 1..75: mol_type = other DNA
ggattatcgacaaccaccagttcggtttgcttaccgtgtcgctggtgattatcgcgctggcagatacgctttctg

SEQ ID NO: 400306 - DNA, 75 bp, synthetic construct
  source 1..75: mol_type = other DNA
tgctgatggcgaaagcgcgggtcgatatcagctttaaattcaacgtattcaaaacctttctgtttattccggcga

SEQ ID NO: 400307 - DNA, 75 bp, synthetic construct
  source 1..75: mol_type = other DNA
gtgctgcaattgctgtgtgtggtggggctactgcgctccgtgggtaacccgattggttcgctgctgatggcgaaa

SEQ ID NO: 400308 - DNA, 75 bp, synthetic construct
  source 1..75: mol_type = other DNA
cgctcggtttcctgctggtgcagattatcaacaccattctgagttacttcgtgatgattaaaccggtgctcggtt

SEQ ID NO: 400309 - DNA, 75 bp, synthetic construct
  source 1..75: mol_type = other DNA
atgggcgcgctaaatatatccaccgtcaaaatcaagacagtggcgatcccctttcacatccggctgaaaagccat

SEQ ID NO: 400310 - DNA, 75 bp, synthetic construct
  source 1..75: mol_type = other DNA
atgagcttacgtgaaaaaaccatcagtggcgcgaagtggtcggcgattgccacggtgatcatcatcggcctcggg

SEQ ID NO: 400311 - DNA, 75 bp, synthetic construct
  source 1..75: mol_type = other DNA
catcagtaagattcagggggatttgttgctggggaaatcccagacccggaactcactttttactgattttggttt

SEQ ID NO: 400312 - DNA, 75 bp, synthetic construct
  source 1..75: mol_type = other DNA
ttcggcgactctggaaatattgccattaaaggtaatttttcaccaattattgataacagcaaatctcttggtgca

SEQ ID NO: 400313 - DNA, 75 bp, synthetic construct
  source 1..75: mol_type = other DNA
ggttataacaattccggaaggaatatgcatcatcaagaagaatattaacattcctgaggggtgttcactggttgg

SEQ ID NO: 400314 - DNA, 75 bp, synthetic construct
  source 1..75: mol_type = other DNA
gtagagaacgaagacggctctcacgttcctgtttcgcaaccaatcatcattaacgctgctggttaccctgtatat

SEQ ID NO: 400315 - DNA, 75 bp, synthetic construct
  source 1..75: mol_type = other DNA
tcggagccggacgttacaagaaaatctccgcctcgttctatctgcctgactcccctaataacccaaagcccggcg

SEQ ID NO: 400316 - DNA, 75 bp, synthetic construct
  source 1..75: mol_type = other DNA
tttgtgagaaagaaggtacaacacctgagtaccaaaaatacaggtcctatggaactaaaacaaagtgctctaaga

SEQ ID NO: 400317 - DNA, 75 bp, synthetic construct
  source 1..75: mol_type = other DNA
ttattgttaatgccagcgaatgtggcgttgaatatccgttgcgccggtccgggtcccgatcatgatgatcgggac

SEQ ID NO: 400318 - DNA, 75 bp, synthetic construct
  source 1..75: mol_type = other DNA
gtgattggctatgacgatatcgaactggcaagctttatgacgccaccattaaccacgatccatcaaccaaaagat

SEQ ID NO: 400319 - DNA, 75 bp, synthetic construct
  source 1..75: mol_type = other DNA
acacgccaatcaatgacgcaaaaattaaatatgctaagtggtcgctgttgcgggtctgtttgcataacgccgtca

SEQ ID NO: 400320 - DNA, 75 bp, synthetic construct
  source 1..75: mol_type = other DNA
ggttgtccgacccgcgaaacattgcagcgtctggggctggaagatattgccgccgatctggcagcacacaatcta

SEQ ID NO: 400321 - DNA, 75 bp, synthetic construct
  source 1..75: mol_type = other DNA
ctggattgctcctttcggggataacggtgccctgtacaaatatatgcgaaaaaaattccctaatgaactattcag

SEQ ID NO: 400322 - DNA, 75 bp, synthetic construct
  source 1..75: mol_type = other DNA
attgattttgaaattgttggtaaagccgcctggctttgggggtgttctgcacttcataaaagctggcctatatct

SEQ ID NO: 400323 - DNA, 75 bp, synthetic construct
  source 1..75: mol_type = other DNA
atggctggccagactgcatgtcgtaaaattaagaaaccaaattatttgaaatttacttatatggacagatacgac

SEQ ID NO: 400324 - DNA, 75 bp, synthetic construct
  source 1..75: mol_type = other DNA
aaaggcttaaagcccgtcgagttcagcgagcaggaggaaggcgtggtcgagttcgccgactggggactttcaacc

SEQ ID NO: 400325 - DNA, 75 bp, synthetic construct
  source 1..75: mol_type = other DNA
gtttaccgcaaattcggcttcgaaaatgtcctgcgttacatcctgcgagtgaaggatgcacaaggcaactatctg

SEQ ID NO: 400326 - DNA, 75 bp, synthetic construct
  source 1..75: mol_type = other DNA
gaatggcagctcaacattctgcgcgaagaggcgtaccgcgacacacagtcgcaggatgcagcaggtgcacaattc

SEQ ID NO: 400327 - DNA, 75 bp, synthetic construct
  source 1..75: mol_type = other DNA
gtaacgctggcggcacatttgatgttgctggcggcggtgtatcagatttctgattccatacaggttatcggcagt

SEQ ID NO: 400328 - DNA, 75 bp, synthetic construct
  source 1..75: mol_type = other DNA
acgggagccggtaaacagtgtcgtttctccatggcaggactgaaagcaaataccaacaaagttcaggaggttcgt

SEQ ID NO: 400329 - DNA, 75 bp, synthetic construct
  source 1..75: mol_type = other DNA
aaaacagggttatagccagaccagcttctccggcagtgtttccggttctgtgctgggtacgacagaaacgggtcc

SEQ ID NO: 400330 - DNA, 75 bp, synthetic construct
  source 1..75: mol_type = other DNA
gcaggcggtacggtgtcaatgagtacatctgtttttgattcggtgtccctgttcctgaacggggcttactcaaag

SEQ ID NO: 400331 - DNA, 75 bp, synthetic construct
  source 1..75: mol_type = other DNA
atgcgcgatattcgtaacgaaaaaggcaccgcaaaacccgatcctgcggttatgaaacgactgattcaactcggt

SEQ ID NO: 400332 - DNA, 75 bp, synthetic construct
  source 1..75: mol_type = other DNA
gacgacccggcatggggctgggtgaaatccctgtcactgaacggcggtgatctgttagccgaacccgctcagctt

SEQ ID NO: 400333 - DNA, 75 bp, synthetic construct
  source 1..75: mol_type = other DNA
tttgccgaggaactggtgaccggcggcaagctgacgcctgcggctaaaggcgtggttgtcgcgctgctggatgaa

SEQ ID NO: 400334 - DNA, 75 bp, synthetic construct
  source 1..75: mol_type = other DNA
gaatgcctgaactcggtggcgtcggttgtggtgtagcgacggcggctgtgtattgggtgatgttcctcgccatgg

SEQ ID NO: 400335 - DNA, 75 bp, synthetic construct
  source 1..75: mol_type = other DNA
acatctatctggctcccggctattcttttcggtcacggactgctgcttgcgttgacgccagtgatcgcgcaattg

SEQ ID NO: 400336 - DNA, 75 bp, synthetic construct
  source 1..75: mol_type = other DNA
gccggttatcgcgcaattaaatggttccggtcgacgtgagcgcattgcgcatcaggtgcgacaaggtttctggct

SEQ ID NO: 400337 - DNA, 75 bp, synthetic construct
  source 1..75: mol_type = other DNA
gtgattccggcgttcaacgccttcaaaattcccgacaatatctccgacgacctggcttccatttttgatcccttc

SEQ ID NO: 400338 - DNA, 75 bp, synthetic construct
  source 1..75: mol_type = other DNA
gtgatcccggcattcaacgccttcaaaattcccgacaatatctccgacgacttagctgcgattttcgatccgttc

SEQ ID NO: 400339 - DNA, 75 bp, synthetic construct
  source 1..75: mol_type = other DNA
cggaagagggcatctggatgactgacgttcctgtaccggaactcgggcataacgatctgctgattaaaatccgta

SEQ ID NO: 400340 - DNA, 75 bp, synthetic construct
  source 1..75: mol_type = other DNA
cgatcttgtcctctgtatttatgagtgttggtgcatttgctgccgaagtcgatactgggactttaaccattaaag

SEQ ID NO: 400341 - DNA, 75 bp, synthetic construct
  source 1..75: mol_type = other DNA
acagtaagctgcgaatcgtcgtgcccgcttactaccctggcggttttgatgttgacgactacgcagctgataaca

SEQ ID NO: 400342 - DNA, 75 bp, synthetic construct
  source 1..75: mol_type = other DNA
atcgatgatttccagaagggctttgacgccatgcgttcaggccagtccgggaaagttatcctgagctgggattaa

SEQ ID NO: 400343 - DNA, 75 bp, synthetic construct
  source 1..75: mol_type = other DNA
aagcttggtcataaagtccggttgtgtagtggtcaacaaaaactggccaccgctttagagtttttccagtattga

SEQ ID NO: 400344 - DNA, 75 bp, synthetic construct
  source 1..75: mol_type = other DNA
tgaaagggacccgtaattttgcgaataaagtctcggtaattgtagccttacaggataaagaacgttttgccggtg

SEQ ID NO: 400345 - DNA, 75 bp, synthetic construct
  source 1..75: mol_type = other DNA
atgtacagcgaaaaaagcctcacctggaacggtatcacccagcaaaaccgtaacggattattgtgggataagacc

SEQ ID NO: 400346 - DNA, 75 bp, synthetic construct
  source 1..75: mol_type = other DNA
ccgcgcggtgctggttatacgcaactatggctaagccgcggaacaggcgcttacacctatgactggacgccagaa

SEQ ID NO: 400347 - DNA, 75 bp, synthetic construct
  source 1..75: mol_type = other DNA
caactgatggcgcgttatttacaaggtgataaaccgactattgtcggtatcggttctggcttaaccctaaagaaa

SEQ ID NO: 400348 - DNA, 75 bp, synthetic construct
  source 1..75: mol_type = other DNA
gacaggattttctgacgttcttcggcaaccgtgagccatgcatgattggtgccatggaacgtagttctcaccaat

SEQ ID NO: 400349 - DNA, 75 bp, synthetic construct
  source 1..75: mol_type = other DNA
taacgcccagcacggtggggtgctgtatgcccgccgtaacatggtggcggggggctataccggtggtggtctcac

SEQ ID NO: 400350 - DNA, 75 bp, synthetic construct
  source 1..75: mol_type = other DNA
tgccaacatcaaagggatcaccgcgcaggatacctttaccgctcaccgtttccccgcagggctggcaggtatcat

SEQ ID NO: 400351 - DNA, 75 bp, synthetic construct
  source 1..75: mol_type = other DNA
tgccaacatcaaagggatcaccgcacaggacatctttaccgcccaccgtttccccgctggcctggcgggtatcat

SEQ ID NO: 400352 - DNA, 75 bp, synthetic construct
  source 1..75: mol_type = other DNA
ggactgcccgactatatcggcggcgtacactcggcattgcttaacagcgaagccgtaatttttcgccgccgctac

SEQ ID NO: 400353 - DNA, 75 bp, synthetic construct
  source 1..75: mol_type = other DNA
acccgcgacgcataccagcgtgatgaagtgatcccggtgcaaaaactcattagcgatgctgtgaacacagataag

SEQ ID NO: 400354 - DNA, 75 bp, synthetic construct
  source 1..75: mol_type = other DNA
cgaaagcgccctggcactggcggtaaacttcgtgacgttcggtgacgtggcgctactcaagatccgcaacggctt

SEQ ID NO: 400355 - DNA, 75 bp, synthetic construct
  source 1..75: mol_type = other DNA
cggcatcaaatttatcccgattggggatatcagcgccaaagatgagtttcagaacatcaagagcatcagcgccca

SEQ ID NO: 400356 - DNA, 75 bp, synthetic construct
  source 1..75: mol_type = other DNA
tatcgtcagaactggcgagaagatgattatcgacggcctggagtttgacttcctgatgaccccaggtagcgaagc

SEQ ID NO: 400357 - DNA, 75 bp, synthetic construct
  source 1..75: mol_type = other DNA
gcaatctgtacatcaacatccccaaaggttcgccggatggagtgaaaattattccgattggtgaggtgagcgcca

SEQ ID NO: 400358 - DNA, 75 bp, synthetic construct
  source 1..75: mol_type = other DNA
ataccggaacacctttatcttcgttttgatgcagacgccgggcatgtggcggaagaaaaagtggtgccggtcggg

SEQ ID NO: 400359 - DNA, 75 bp, synthetic construct
  source 1..75: mol_type = other DNA
aggaagatatcatttttatcaagatgtacgacccgcaacagcatatttacgggctgcccgactatatcggcggtg

SEQ ID NO: 400360 - DNA, 75 bp, synthetic construct
  source 1..75: mol_type = other DNA
ccaactggaagccgcagcgtttgactatacaaccttcggggatattgcgattggcaaaatccgcaacggatgggg

SEQ ID NO: 400361 - DNA, 75 bp, synthetic construct
  source 1..75: mol_type = other DNA
acccagccgattgaccggctggcactggcacagcttatcaatctgaacggtcagcatggcggcatcatccacgcc

SEQ ID NO: 400362 - DNA, 75 bp, synthetic construct
  source 1..75: mol_type = other DNA
tcaccgcgggtaatgagcatcaacagcgcaatcccgccagcctgacaaagctgatgacgggctatgtcgtggatc

SEQ ID NO: 400363 - DNA, 75 bp, synthetic construct
  source 1..75: mol_type = other DNA
ctgggaattgccagaaggcgatgtgatcgatccactgccgatctacacgccgggctttgaaagttatcaggatcc

SEQ ID NO: 400364 - DNA, 75 bp, synthetic construct
  source 1..75: mol_type = other DNA
tggtatgacccggatgcaaaacgtgtcgataagggcggttgtattaacgtactgaccactcaacgtccgtctcct

SEQ ID NO: 400365 - DNA, 75 bp, synthetic construct
  source 1..75: mol_type = other DNA
atgacccgctcctggccgccgggaaataccctggtcgcgcggctgatgaactgctgcggcggttatctgaaccat

SEQ ID NO: 400366 - DNA, 75 bp, synthetic construct
  source 1..75: mol_type = other DNA
atattgcgttggctatgacgagaaaaccctgccagccagtgcgccgaaaaatggtcactataaagcttatattct

SEQ ID NO: 400367 - DNA, 75 bp, synthetic construct
  source 1..75: mol_type = other DNA
gaagtgcgagctgattgtggttatcgactgccacatgacctcatcggcgaaatatgctgacatcctgctgcctga

SEQ ID NO: 400368 - DNA, 75 bp, synthetic construct
  source 1..75: mol_type = other DNA
atggtcactataaagcgtatattctgggtgaaggcaaagacgggattgcgaaaacgccggaatgggcttcgcaaa

SEQ ID NO: 400369 - DNA, 75 bp, synthetic construct
  source 1..75: mol_type = other DNA
actggtgatgcaggaacggcaaccagtgttgataatttatgggattcattaagcaaatcactggatggttttctg

SEQ ID NO: 400370 - DNA, 75 bp, synthetic construct
  source 1..75: mol_type = other DNA
gtgaagctggcactggacggtgatttaattcgttacgacagtaaagaacccgggaaaaccgaactggcaacgcgc

SEQ ID NO: 400371 - DNA, 75 bp, synthetic construct
  source 1..75: mol_type = other DNA
ttgccccgtcatcagcactaaaactgtattcaagacctattcagaaattaattaacggcacctggtataatgcgt

SEQ ID NO: 400372 - DNA, 75 bp, synthetic construct
  source 1..75: mol_type = other DNA
agcaaaatgccaaatccaatctttaatgcaggaagtcgttctgcatcagcattagttcagggattaaaccgtgga

SEQ ID NO: 400373 - DNA, 75 bp, synthetic construct
  source 1..75: mol_type = other DNA
caacggcgaaatcgcgactcgcgctatctcgatgctggcgattctgaccggtaacgtcggcattaacggcggtaa

SEQ ID NO: 400374 - DNA, 75 bp, synthetic construct
  source 1..75: mol_type = other DNA
atgatggagatattctggaccatgctggccagcctggacaggaagcgcattcgtgagaatattgcggagcagaac

SEQ ID NO: 400375 - DNA, 75 bp, synthetic construct
  source 1..75: mol_type = other DNA
ggattggttattcagccagcagcctggccgggcagccgtataaaggccgcaacggtcgtgtggaaggtgcccggg

SEQ ID NO: 400376 - DNA, 75 bp, synthetic construct
  source 1..75: mol_type = other DNA
taaccgccagcgctaactttgctccggaactctccgtcggcatctaccgcgcctggcgtgaaggcgatctggcga

SEQ ID NO: 400377 - DNA, 75 bp, synthetic construct
  source 1..75: mol_type = other DNA
tgatgcatgggcgaaagataacccggtgtttgttggttcctccctgatgtttctgaaagaaggcgatcgtgtatc

SEQ ID NO: 400378 - DNA, 75 bp, synthetic construct
  source 1..75: mol_type = other DNA
aacggtacatggtctggatgcgccgggtcagcatagttcggcctacgatttagccgtactttcgcgcgccatcat

SEQ ID NO: 400379 - DNA, 75 bp, synthetic construct
  source 1..75: mol_type = other DNA
gttgtatccggtgatgacgggaaaataactatctcagaaaatggaaaagtaacaccgccatcgcaccagcactgt

SEQ ID NO: 400380 - DNA, 75 bp, synthetic construct
  source 1..75: mol_type = other DNA
atggacttttaacagccatgacttctctttacgtcaatttgatcagggccagagtagcgtcacaaaactggcgtc

SEQ ID NO: 400381 - DNA, 75 bp, synthetic construct
  source 1..75: mol_type = other DNA
agcgagcatggctttaaagagctggcgttacgctatgcgctgaatctggcaaatggtcgttttttgtggcgcaac

SEQ ID NO: 400382 - DNA, 75 bp, synthetic construct
  source 1..75: mol_type = other DNA
taaatctgtaggaggtcaggttaaaatgcaggtaaatacaacagaacagaaaaatcaaaaaagcccagggcaaga

SEQ ID NO: 400383 - DNA, 75 bp, synthetic construct
  source 1..75: mol_type = other DNA
ggcggtcacggtattgatatcaccggcgacagcgcaacggtggataacaagggcaccatgaccgtcaccgatccg

SEQ ID NO: 400384 - DNA, 75 bp, synthetic construct
  source 1..75: mol_type = other DNA
cggcgacagcgcaacggtggataacaagggcaccatgaccgtcaccgatccggagtccatcggtatccagattga

SEQ ID NO: 400385 - DNA, 75 bp, synthetic construct
  source 1..75: mol_type = other DNA
tatgacaacgttgtgttagttggcatgtcttatgaagaagaagcaagcgaaagcctattgtttactcttgatttt

SEQ ID NO: 400386 - DNA, 75 bp, synthetic construct
  source 1..75: mol_type = other DNA
atgacagatttaatccaacgccctcgtcgcctgcgcaaatctcctgcgctgcgcgctatgtttgaagagacaaca

SEQ ID NO: 400387 - DNA, 75 bp, synthetic construct
  source 1..75: mol_type = other DNA
accaacgccgtatcaccaacgtagctgccggtgttaatgccaccgatgcggttaacgtgtcgcagctgaaatctt

SEQ ID NO: 400388 - DNA, 75 bp, synthetic construct
  source 1..75: mol_type = other DNA
tgggataaggacaatggtgtattcacggcagctcatggcaccgagaccaccagcaaaatcaccaacgttaaagat

SEQ ID NO: 400389 - DNA, 75 bp, synthetic construct
  source 1..75: mol_type = other DNA
tgccctgaatgctatcgataccactcttgacgacgctctgctctgggatgcggacgccggtgaaaatggtgcatt

SEQ ID NO: 400390 - DNA, 75 bp, synthetic construct
  source 1..75: mol_type = other DNA
tatcggccacgttgaccagggtaaaaccactctgaccgctgcaatcacaaccgtactggctaaaacctacggcgg

SEQ ID NO: 400391 - DNA, 75 bp, synthetic construct
  source 1..75: mol_type = other DNA
tatcggccacgttgaccagggtaaaacaactctgaccgctgcaatcaccaccgtactggctaaaacctacggcgg

SEQ ID NO: 400392 - DNA, 75 bp, synthetic construct
  source 1..75: mol_type = other DNA
caaaaccgcacgttaacgtcggtactatcggccacgttgaccaaggtaaaaccactctgaccgctgcaatcacga

SEQ ID NO: 400393 - DNA, 75 bp, synthetic construct
  source 1..75: mol_type = other DNA
gctttgcggtctggaaaagctggaatgaaaatggtgagtatgtagtttataccgtgccacccggtacaacaatga

SEQ ID NO: 400394 - DNA, 75 bp, synthetic construct
  source 1..75: mol_type = other DNA
aggaattcagcgaactttagataatatctacatagctttaacaaagaataaaccaaacaatcaaaaatcgacttt

SEQ ID NO: 400395 - DNA, 75 bp, synthetic construct
  source 1..75: mol_type = other DNA
ttactcgcgatattggatctcgccgttcgtgacgttcatttcctgctggaaggtggcgaaatgccagtaaaaacg

SEQ ID NO: 400396 - DNA, 75 bp, synthetic construct
  source 1..75: mol_type = other DNA
accttcaagacaatctttaagtagtcatgtcaaggtttcggattgttttaattcaaaaaagaagattctcaagct

SEQ ID NO: 400397 - DNA, 75 bp, synthetic construct
  source 1..75: mol_type = other DNA
ctaacttgggatgctttgtgcgacaggttagtaaggattattgggaaaagaccatcaagacaatccttaagtagt

SEQ ID NO: 400398 - DNA, 75 bp, synthetic construct
  source 1..75: mol_type = other DNA
aaagcgttaggtactgggtttatcggggttcctgcatccatggctcataactatcagcgagaagaaatggtcaga

SEQ ID NO: 400399 - DNA, 75 bp, synthetic construct
  source 1..75: mol_type = other DNA
gttctactccaccatgggcttcctggtgcgtaagggcaacccgaagaatatccacgactggaacgacctggtgcg

SEQ ID NO: 400400 - DNA, 75 bp, synthetic construct
  source 1..75: mol_type = other DNA
agatatggctttataattctcatttgaagcaaataacagttgaagagcttaatagccccttacctgtaaaagata

SEQ ID NO: 400401 - DNA, 75 bp, synthetic construct
  source 1..75: mol_type = other DNA
tatcggccacgttgaccaaggtaaaacaaccctgaccgctgcaatcactaccgtactggctaaaacctacggcgg

SEQ ID NO: 400402 - DNA, 75 bp, synthetic construct
  source 1..75: mol_type = other DNA
caaaaccgcacgttaacgtcggtactatcggccacgttgaccagggtaaaaccaccctgaccgctgcaatcacta

SEQ ID NO: 400403 - DNA, 75 bp, synthetic construct
  source 1..75: mol_type = other DNA
acgactctgaccgctgcaatcacaaccgtactggctaaaacctacggcggtgctgctcgtgcattcgaccagatc

SEQ ID NO: 400404 - DNA, 75 bp, synthetic construct
  source 1..75: mol_type = other DNA
accaccctgaccgctgcaatcactaccgtactggctaaaacctacggcggtgctgctcgtgcattcgaccagatc

SEQ ID NO: 400405 - DNA, 75 bp, synthetic construct
  source 1..75: mol_type = other DNA
actacactgaccgctgcaatcaccaccgtactggctaaaacctacggcggtgctgctcgtgcattcgaccagatc

SEQ ID NO: 400406 - DNA, 75 bp, synthetic construct
  source 1..75: mol_type = other DNA
atggtggctcaggcgggggcttcttcggaagcgccggtatccttcagagccggttacgccaaccctgtctgggct

SEQ ID NO: 400407 - DNA, 75 bp, synthetic construct
  source 1..75: mol_type = other DNA
gaaggcgacatatgacgcgccgagcgtctttttttatgtcgtaggtctgactcacccattttttgggcgttggtg

SEQ ID NO: 400408 - DNA, 75 bp, synthetic construct
  source 1..75: mol_type = other DNA
ttaagaacgttgctaagcagattaagagtgatgttgaagtcatcattgaccagaagattgataagtacaaaaaga

SEQ ID NO: 400409 - DNA, 75 bp, synthetic construct
  source 1..75: mol_type = other DNA
tggcacttcccgcaagagatgcgagctatgccgggttccaagagtattcgtccagattacagcgttccgctggtt

SEQ ID NO: 400410 - DNA, 75 bp, synthetic construct
  source 1..75: mol_type = other DNA
cgaaatgagcgcgatgtactgtgcttctggttcttccaatagcgagttttcggagtccataaaaaagagcttgcc

SEQ ID NO: 400411 - DNA, 75 bp, synthetic construct
  source 1..75: mol_type = other DNA
gattttcacgatttaatttcaccagtaactctgtgggtgatggtgtgaatttgttgctgtcagaccgcgaaatat

SEQ ID NO: 400412 - DNA, 75 bp, synthetic construct
  source 1..75: mol_type = other DNA
gatgatgggcgcgggattgatgtcggacgtaccctactttcagggcaatcacacacaattatggatcatgcacac

SEQ ID NO: 400413 - DNA, 75 bp, synthetic construct
  source 1..75: mol_type = other DNA
aggagtaaacccaggaatactggctacatacggtgacgggggaatagttaaaacggacgaacccggtcttaaggt

SEQ ID NO: 400414 - DNA, 75 bp, synthetic construct
  source 1..75: mol_type = other DNA
ttggtttgggagaaggctcagcgttacccgttggtgtacctgttccgtggcctttagcaactccgccaacaggct

SEQ ID NO: 400415 - DNA, 75 bp, synthetic construct
  source 1..75: mol_type = other DNA
atggtgtttttgaagttcaacggggcgaaattttctgcctctgattaccctgtgctggcaaaagtgtttccttcg

SEQ ID NO: 400416 - DNA, 75 bp, synthetic construct
  source 1..75: mol_type = other DNA
cgtggatgggacgacgggcgaaaagtggatacagggcgcgatctgctttcacggcaggatggtacaagtttttct

SEQ ID NO: 400417 - DNA, 75 bp, synthetic construct
  source 1..75: mol_type = other DNA
tgtaaaaaaatagaaaatatgtcaccggagattattaatacagaaacagcatcatcatcaaatcaaatcaaaaat

SEQ ID NO: 400418 - DNA, 75 bp, synthetic construct
  source 1..75: mol_type = other DNA
gttggtatcaaagagactcagaagtctacctgtactggcgttgaaatgttccgcaaaactgctggacgaaggccg

SEQ ID NO: 400419 - DNA, 75 bp, synthetic construct
  source 1..75: mol_type = other DNA
gtgctaaatggcgacaatacagacgaaaacaaacagccgaatctgggcaaagacgtagcgagcgctacggataag

SEQ ID NO: 400420 - DNA, 75 bp, synthetic construct
  source 1..75: mol_type = other DNA
atatgtaagctctggtggttcagaatttgatgctgaagtttacatccttgctactgatggaaaatcaattacaga

SEQ ID NO: 400421 - DNA, 75 bp, synthetic construct
  source 1..75: mol_type = other DNA
caaaaccgcacgttaacgtaggtactatcggccacgttgaccatggtaaaaccaccctgaccgctgcaatcacga

SEQ ID NO: 400422 - DNA, 75 bp, synthetic construct
  source 1..75: mol_type = other DNA
gcggtatcatcaaagtgggcgaagaagttgaaatcgttggtatcaaagagactcagaagtctacctgtactggcg

SEQ ID NO: 400423 - DNA, 75 bp, synthetic construct
  source 1..75: mol_type = other DNA
caaaaccgcacgttaacgtgggtactatcggccacgttgaccaaggtaaaacaacgctgaccgctgcaatcacta

SEQ ID NO: 400424 - DNA, 75 bp, synthetic construct
  source 1..75: mol_type = other DNA
caaaaccgcacgttaacgtaggtactatcggccacgttgaccaaggtaaaacaactctgaccgctgcaatcacca

SEQ ID NO: 400425 - DNA, 75 bp, synthetic construct
  source 1..75: mol_type = other DNA
tatcggccacgttgaccatggtaaaacgacactgaccgctgcaatcacgaccgtactggctaaaacctacggcgg

SEQ ID NO: 400426 - DNA, 75 bp, synthetic construct
  source 1..75: mol_type = other DNA
tatcggccacgttgaccatggtaaaaccacgctgaccgctgcaatcacaaccgtactggctaaaacctacggcgg

SEQ ID NO: 400427 - DNA, 75 bp, synthetic construct
  source 1..75: mol_type = other DNA
tatcggccacgttgaccatggtaaaacaacgctgaccgctgcaatcaccaccgtactggctaaaacctacggcgg

SEQ ID NO: 400428 - DNA, 75 bp, synthetic construct
  source 1..75: mol_type = other DNA
ttcctgaatcagaaactgaacataatggaatgcctgttttctggagattccaagcgacagttgaagaagatggaa

SEQ ID NO: 400429 - DNA, 75 bp, synthetic construct
  source 1..75: mol_type = other DNA
tgcttggggccaccgtgattggttttgtcgtatttgctttaaccagcttttactacaggtcagaatatataccaa

SEQ ID NO: 400430 - DNA, 75 bp, synthetic construct
  source 1..75: mol_type = other DNA
ggctaaagtaattgtggagactgagcgcctgttcaattctctgagtattcaggaaaaagaggttttagcatttgc

SEQ ID NO: 400431 - DNA, 75 bp, synthetic construct
  source 1..75: mol_type = other DNA
gcgcgtcgcacaatacatttccttccttgagctcaatcagatcgcgaaaaaagatatcagctcagcgaacttacg

SEQ ID NO: 400432 - DNA, 75 bp, synthetic construct
  source 1..75: mol_type = other DNA
cttgttgatggtatgaagaatattgatactgaaccgccccgggaatcctggagactaaactccctgagaaagagg

SEQ ID NO: 400433 - DNA, 75 bp, synthetic construct
  source 1..75: mol_type = other DNA
tcaaaatattcgcacttcaatatatagcttttcatcagacagagcattatgcatggttggttcctgcgcattgga

SEQ ID NO: 400434 - DNA, 75 bp, synthetic construct
  source 1..75: mol_type = other DNA
aggcgacgcagagtgggaagcgaaaatcctggaactggctggcttcctggattcttatattccggaaccagagcg

SEQ ID NO: 400435 - DNA, 75 bp, synthetic construct
  source 1..75: mol_type = other DNA
atggaagttcgtgaacttctgtctcagtatgacttcccgggcgacgacactccgatcgttcgtggttctgctctg

SEQ ID NO: 400436 - DNA, 75 bp, synthetic construct
  source 1..75: mol_type = other DNA
cattgtctgtcgcgcctgaagttaccgctatagcagagaaaataagactattagataaggaattacgaagggctt

SEQ ID NO: 400437 - DNA, 75 bp, synthetic construct
  source 1..75: mol_type = other DNA
tgatgggcttgctactgttggtggtgctggtagttctgcatggagcttactggataaacaatgggaggttacaca

SEQ ID NO: 400438 - DNA, 75 bp, synthetic construct
  source 1..75: mol_type = other DNA
aattgcatatggtagcggacgtatcggtagagcagctattcagaaagtgatagccagcaattcacgcagcgaacg

SEQ ID NO: 400439 - DNA, 75 bp, synthetic construct
  source 1..75: mol_type = other DNA
cgaaagggaagttgatcgtcaaaggtgaagcaacggcggatgcggcgcaaagtgatgcgctgttaagtcttggtg

SEQ ID NO: 400440 - DNA, 75 bp, synthetic construct
  source 1..75: mol_type = other DNA
gagctctcctgatgcagtgcaggctggcctggcagcgggtaaaggtggcatggtcagtgaaagccgggcaggtca

SEQ ID NO: 400441 - DNA, 75 bp, synthetic construct
  source 1..75: mol_type = other DNA
aatcacgttcacgatgcaccatcttctggcatggcaggacaatattactggcggtcagggctggagcgtggtcag

SEQ ID NO: 400442 - DNA, 75 bp, synthetic construct
  source 1..75: mol_type = other DNA
ctttcagaatgcatcatcttttagcatggcaggatatttcaacggctgataatggttggagtgttctcagtggag

SEQ ID NO: 400443 - DNA, 75 bp, synthetic construct
  source 1..75: mol_type = other DNA
agtcaacgatactcctactcagacgcttgttgtagagaactttggtaagagtgcgataagcacaaatatggtcac

SEQ ID NO: 400444 - DNA, 75 bp, synthetic construct
  source 1..75: mol_type = other DNA
ttaaggactcatcgactaaagcttttactgctatggcgaagaatctttatatcacaggaatacgtatatataaag

SEQ ID NO: 400445 - DNA, 75 bp, synthetic construct
  source 1..75: mol_type = other DNA
tatgccgaagctctcgtctcaacggtgatcactggtctgtcttacacggataaaaaaccgtcgatatatctcatc

SEQ ID NO: 400446 - DNA, 75 bp, synthetic construct
  source 1..75: mol_type = other DNA
tggattgttaattttaaaccagcaccaaatcagtggttacaggaatggaaacaaaggagaaatagatatgcaatt

SEQ ID NO: 400447 - DNA, 75 bp, synthetic construct
  source 1..75: mol_type = other DNA
ccgtctggaaaaagcattgtttggcgataacaccactaaagggatggataagtatgccgaccagctttataccga

SEQ ID NO: 400448 - DNA, 75 bp, synthetic construct
  source 1..75: mol_type = other DNA
gacaacaccaccaaaggaatggatcagtacgctgagcagctttataccgatgtggtcgatttgcaaaaacgcatc

SEQ ID NO: 400449 - DNA, 75 bp, synthetic construct
  source 1..75: mol_type = other DNA
ctgaataaaatattacgtcaggaaatacaaagtaaaattggtggagtagaattaactgatataaataaggaaggt

SEQ ID NO: 400450 - DNA, 75 bp, synthetic construct
  source 1..75: mol_type = other DNA
tggctaggtgatttaaccggtgtcaatcaggttagttttcggcgtttaagagaaagtagttctactcgtaatcaa

SEQ ID NO: 400451 - DNA, 75 bp, synthetic construct
  source 1..75: mol_type = other DNA
gaagcggcgaaaagggatgtgggtacaggagaaaatcagataccggatatgtcagcctggaaaagaaatccgagt

SEQ ID NO: 400452 - DNA, 75 bp, synthetic construct
  source 1..75: mol_type = other DNA
gcgtagagatggtaatgccgggcgacaacatcaaaatggttgttaccctgaaccacccgatcgcgatggacgacg

SEQ ID NO: 400453 - DNA, 75 bp, synthetic construct
  source 1..75: mol_type = other DNA
ggatgcagccgcaggtgtgggctgctgtattttccctatacaagtcgcttaaggcttgccaacgaaccattgccg

SEQ ID NO: 400454 - DNA, 75 bp, synthetic construct
  source 1..75: mol_type = other DNA
atattgcggtgtgatctccaaaagcccgacggtgaaagcggttaaatcgaagattgaagcggaagaagagaagtt

SEQ ID NO: 400455 - DNA, 75 bp, synthetic construct
  source 1..75: mol_type = other DNA
taacttcgaaccggtagtcggtgaaattcttgagaaaatcgacgacggtcagatgggcgtcattctcaaacgtat

SEQ ID NO: 400456 - DNA, 75 bp, synthetic construct
  source 1..75: mol_type = other DNA
tgagcacatcctgctgggtcgtcaggtaggcgttccgtacatcatcgtgttcctgacaaatgcgacatggttgat

SEQ ID NO: 400457 - DNA, 75 bp, synthetic construct
  source 1..75: mol_type = other DNA
gccgcacaccaagttcgaatctgaagtgtacattctgtccaaagatgaaggcggtcgtcatactccgttcttcaa

SEQ ID NO: 400458 - DNA, 75 bp, synthetic construct
  source 1..75: mol_type = other DNA
cgggcgacaacatcaaaatggttgttaccctgatccacccgatcgcgatggatgacggtctgcgtttcgcaatcc

SEQ ID NO: 400459 - DNA, 75 bp, synthetic construct
  source 1..75: mol_type = other DNA
ttcttacgacaaagagcacatcatcaacctggctcgccagattggcaccgaagactttgctcgcacgatgccgga

SEQ ID NO: 400460 - DNA, 75 bp, synthetic construct
  source 1..75: mol_type = other DNA
aacctggctcgccagattggcactgaagactttgcccgcacgatgccggaatattgcggcgtgatctccaaaagc

SEQ ID NO: 400461 - DNA, 75 bp, synthetic construct
  source 1..75: mol_type = other DNA
cagctggaaggcaaaaccttctgcgtacgcgtgaagcgccgtggcaaacatgattttagctcgattgatgtggaa

SEQ ID NO: 400462 - DNA, 75 bp, synthetic construct
  source 1..75: mol_type = other DNA
gatcaccggtgctgctcagatggacggcgcgatcctggtagttgctgcgactgtaggtaaggcgtcattaacgtt

SEQ ID NO: 400463 - DNA, 75 bp, synthetic construct
  source 1..75: mol_type = other DNA
caaaaccgcacgttaacgtgggtactatcggccacgttgaccagggtaaaactacactgaccgctgcaatcacga

SEQ ID NO: 400464 - DNA, 75 bp, synthetic construct
  source 1..75: mol_type = other DNA
acgtattctccatctccggtcgtggtaccgttgttactggtcgtgtagaacgcggtatcatcaaagttggtgaag

SEQ ID NO: 400465 - DNA, 75 bp, synthetic construct
  source 1..75: mol_type = other DNA
gtaatgacttttggcatctctcaccataccgatgaaaccggcagcgacgcctggcgggaagatggactggtggcg

SEQ ID NO: 400466 - DNA, 75 bp, synthetic construct
  source 1..75: mol_type = other DNA
ccgggcgtaatgcgcattccggagaaatatctggcacgtgagattgaacgcatcgccaacgcggggatccgctcg

SEQ ID NO: 400467 - DNA, 75 bp, synthetic construct
  source 1..75: mol_type = other DNA
tatcggccacgttgaccagggtaaaactacgctgaccgctgcaatcaccaccgtactggctaaaacctacggcgg

SEQ ID NO: 400468 - DNA, 75 bp, synthetic construct
  source 1..75: mol_type = other DNA
tatccgggcggaagatcctgcccaggcgtaccgtgattcgttggcctgttgcgtacctgctaagaggtctttgtg

SEQ ID NO: 400469 - DNA, 75 bp, synthetic construct
  source 1..75: mol_type = other DNA
ggcggtgctgctcgcgcattcgaccagatcgataacgcgccggaagaaaaagctcgtggtatcaccatcaacact

SEQ ID NO: 400470 - DNA, 75 bp, synthetic construct
  source 1..75: mol_type = other DNA
ggcgcgatcctggtagttgctgcgactgacggcccgatgccgcagactcgtgagcacatcctgcctgggtcgtcg

SEQ ID NO: 400471 - DNA, 75 bp, synthetic construct
  source 1..75: mol_type = other DNA
ctggttgaaatggaagttcgtgaacttctgtctcagtacgacttcccgggcgacgacactccgatcgttcgtggt

SEQ ID NO: 400472 - DNA, 75 bp, synthetic construct
  source 1..75: mol_type = other DNA
gcgtggggcatgtttaccttccgcttaccgccgatgacctcgccgaaaacgatcttaaacatgtacagattatcg

SEQ ID NO: 400473 - DNA, 75 bp, synthetic construct
  source 1..75: mol_type = other DNA
gcggcggctatgacggctggattggcgactttatcgaagagcgtcgtcttaatggcttaaagcagatcgaacgca

SEQ ID NO: 400474 - DNA, 75 bp, synthetic construct
  source 1..75: mol_type = other DNA
ttacgagattcatccagcaaaaatgaaacgagtaattaatggtgttgacgtccttgcgggcgttgctcgaatcct

SEQ ID NO: 400475 - DNA, 75 bp, synthetic construct
  source 1..75: mol_type = other DNA
tacctgacgctgggcctgcgtgagaacggcaggaacagcacggcccgcatcctgaatttccatctggcccgtaac

SEQ ID NO: 400476 - DNA, 75 bp, synthetic construct
  source 1..75: mol_type = other DNA
ttttgacctgaatgtccgggctgattacctgacgctgggcctgcgtgagaacggcaggaacagcacggcccgcat

SEQ ID NO: 400477 - DNA, 75 bp, synthetic construct
  source 1..75: mol_type = other DNA
tgcagatgatggtggccaccctgaaaattccgctggaaagacggaacaagcgcaccggcagaatggagaaggcgc

SEQ ID NO: 400478 - DNA, 75 bp, synthetic construct
  source 1..75: mol_type = other DNA
cattgccgcgctgatggagtacctgcgggcagatttgacggatattgcacacagttgcgcactgattgaaggagg

SEQ ID NO: 400479 - DNA, 75 bp, synthetic construct
  source 1..75: mol_type = other DNA
tcactgatgacgctcaggggactgattctaaatcgtcagtggggcaatcagtaacgattgcgccgagctattata

SEQ ID NO: 400480 - DNA, 75 bp, synthetic construct
  source 1..75: mol_type = other DNA
ttcaacgactggcggcaaaaagccaatcatcccttaaaagtacaggccgggttggatgagatatttacccgcgcc

SEQ ID NO: 400481 - DNA, 75 bp, synthetic construct
  source 1..75: mol_type = other DNA
ggacaggatctacgtcaaaaatgccagcgccagcgcgccaaccgcgttgccgctgcggacatggcgacacctttc

SEQ ID NO: 400482 - DNA, 75 bp, synthetic construct
  source 1..75: mol_type = other DNA
actattggcagtgtaactagtttcctcggcgcgtgggtcagttactttctggacggcgcgacaggtggaatcatc

SEQ ID NO: 400483 - DNA, 75 bp, synthetic construct
  source 1..75: mol_type = other DNA
tattggattgcatccgggcagattaaaactcctcttcttcaccctgctgtcggtttcgaccgttgcggcgctgca

SEQ ID NO: 400484 - DNA, 75 bp, synthetic construct
  source 1..75: mol_type = other DNA
acgcaccgaaagatccacgtattggcagtaaaacccctattccattgggcgtgactgaaaaagtcaccaaacagc

SEQ ID NO: 400485 - DNA, 75 bp, synthetic construct
  source 1..75: mol_type = other DNA
tgcatgtggaaaactggcccgatacctcgcactacgagtttctcgccgacaccatgtggagcgatttcgcctacg

SEQ ID NO: 400486 - DNA, 75 bp, synthetic construct
  source 1..75: mol_type = other DNA
tcgatgtcgcggcacggcaccgggtgcagttccagatgcctggcgatgaggcggtggcgctgctgaagggaaatg

SEQ ID NO: 400487 - DNA, 75 bp, synthetic construct
  source 1..75: mol_type = other DNA
aatacgtcagccaactgcagatgatggtggccacgctgaaaatcccactggagcgcagaaacaaacgaaccggaa

SEQ ID NO: 400488 - DNA, 75 bp, synthetic construct
  source 1..75: mol_type = other DNA
tgaccgtaatttgctgtgcggatatcaacaccgccaaaggcgcgctggatgtggcaaaagagtttaacggcgacg

SEQ ID NO: 400489 - DNA, 75 bp, synthetic construct
  source 1..75: mol_type = other DNA
agaataaatccatccgcctgcaggctgaagctgagacatggcaggacgcagtaaaaatcggcgttgacctgctgg

SEQ ID NO: 400490 - DNA, 75 bp, synthetic construct
  source 1..75: mol_type = other DNA
ctgggagcgcaggttgattttattggtcgcgtcggtgatgacgatattggcaacagcttactggtagagctggaa

SEQ ID NO: 400491 - DNA, 75 bp, synthetic construct
  source 1..75: mol_type = other DNA
aaaattcctctggaacggcgtaataaacgaacaggcaggacagagaaagcgcggatctgggaagtgacggacaga

SEQ ID NO: 400492 - DNA, 75 bp, synthetic construct
  source 1..75: mol_type = other DNA
gaatggagaaggcgcgcatctgggaaatcaccgaccgcacagttcgcacctggctgaatgaagctgtagaggccg

SEQ ID NO: 400493 - DNA, 75 bp, synthetic construct
  source 1..75: mol_type = other DNA
aggccatgcaggattctggccttgaaataacggaagagaacgcaacccgcattggtgccgcaattggctccggga

SEQ ID NO: 400494 - DNA, 75 bp, synthetic construct
  source 1..75: mol_type = other DNA
aaagctctgcttgccggtcagagtggcatcagcctaatcgaccatttcgatactagcgcctatgcaacgaaattt

SEQ ID NO: 400495 - DNA, 75 bp, synthetic construct
  source 1..75: mol_type = other DNA
gggacacaagtcggtcagctcgacggaggtgtacacgaaggtgtttgcgctcgatgtggcagcaaggcacagggt

SEQ ID NO: 400496 - DNA, 75 bp, synthetic construct
  source 1..75: mol_type = other DNA
gaccggcattgcattcgccggttcagcccgttcatctgccggtggccattgattatccggccgcgctggtcctgc

SEQ ID NO: 400497 - DNA, 75 bp, synthetic construct
  source 1..75: mol_type = other DNA
gatacacaatacgtcagccaactgcagatgatggtggtcacgctgaaaatcccactggagcgcagaaacaaacga

SEQ ID NO: 400498 - DNA, 75 bp, synthetic construct
  source 1..75: mol_type = other DNA
ggctgttaaaagcatcttcggtgaagctgccagccgtgtgttggtgagctccacgaaatctatgaccggtcacct

SEQ ID NO: 400499 - DNA, 75 bp, synthetic construct
  source 1..75: mol_type = other DNA
gccgaagaagtcgacattatcgaagtaggcaccattctgtgcgtgggcgaaggtgtgcgtgcggttcgcgatctg

SEQ ID NO: 400500 - DNA, 75 bp, synthetic construct
  source 1..75: mol_type = other DNA
atgcagtatggctatggtcaacctcaacagcattgtggtcagttaacgtataatgttgatacccgtcatcaggtt

SEQ ID NO: 400501 - DNA, 75 bp, synthetic construct
  source 1..75: mol_type = other DNA
cggcaccaaagcgccgccataccggtattgcggctgcacgacgcgaagtaaagaaacgcaggagagcaaaacgat

SEQ ID NO: 400502 - DNA, 75 bp, synthetic construct
  source 1..75: mol_type = other DNA
atgcgtgtggcatgtatcggcttgttaccgtacccgactcgtttttgggcttctgcgctaattgcaaagccgtat

SEQ ID NO: 400503 - DNA, 75 bp, synthetic construct
  source 1..75: mol_type = other DNA
cgggcgctattggtttgctcggcggtgtggttgggctggttgccggtgtcagcgtgatggcggtgcgtgaactgg

SEQ ID NO: 400504 - DNA, 75 bp, synthetic construct
  source 1..75: mol_type = other DNA
aacaaacataacgcacttgagaagtacaaagggcagtatgtgttggttgtggatggttccatcccattaaaagat

SEQ ID NO: 400505 - DNA, 75 bp, synthetic construct
  source 1..75: mol_type = other DNA
tcttcgccagttaaaggtgtaacgacggaagtgattgctgcagatagcgatagcaaacgtcgaatcgtgttaaat

SEQ ID NO: 400506 - DNA, 75 bp, synthetic construct
  source 1..75: mol_type = other DNA
acagatatatcatcaagctggacgcttggtgcgattgctctacagttgcatatgagtgagagcttgttaaagaaa

SEQ ID NO: 400507 - DNA, 75 bp, synthetic construct
  source 1..75: mol_type = other DNA
ataattttattctagctctagaaaagcttatcgttaaaaaacaagccattaaaaccgctactatgcagcgactac

SEQ ID NO: 400508 - DNA, 75 bp, synthetic construct
  source 1..75: mol_type = other DNA
aattaaaaaataatactcaacttccttttaaagaagttaaaagtggttttacttactttgaaaaaggggatgttt

SEQ ID NO: 400509 - DNA, 75 bp, synthetic construct
  source 1..75: mol_type = other DNA
ccgggtattagcaggacatcacaaacagatcccgaccaataatccctggctggaaccttgggtatttggtgtgcg

SEQ ID NO: 400510 - DNA, 75 bp, synthetic construct
  source 1..75: mol_type = other DNA
gagagatcacggatatgtttcttatgatggcctgcctgtcgctgtttgaatcagatgaacggatgtcattatttt

SEQ ID NO: 400511 - DNA, 75 bp, synthetic construct
  source 1..75: mol_type = other DNA
aagtaggtcctactttatctctgtatttcaccgctattatggcttcccgccagacagatatgtatctatgcaaag

SEQ ID NO: 400512 - DNA, 75 bp, synthetic construct
  source 1..75: mol_type = other DNA
gagcgccagctcaggcggctaaacagtaagcggctccggcagcaggcccttgcatcagcggctggcgtgaaagaa

SEQ ID NO: 400513 - DNA, 75 bp, synthetic construct
  source 1..75: mol_type = other DNA
ttataagaatggaaaaaccgacggcgttgccaaatcatggaataagtatggtaaattaacctattcaatcgaata

SEQ ID NO: 400514 - DNA, 75 bp, synthetic construct
  source 1..75: mol_type = other DNA
gacttccaggaagaagtggcgaaactcatcgacgttaccacctgtatcggctgtaaagcctgtcaggtggcgtgt

SEQ ID NO: 400515 - DNA, 75 bp, synthetic construct
  source 1..75: mol_type = other DNA
gggaaatatcaggcaaatcattatcttgagattggtggcggcccggcagcaacagccgctgttgcaatcgcaaag

SEQ ID NO: 400516 - DNA, 75 bp, synthetic construct
  source 1..75: mol_type = other DNA
tttccgatatgggcttcaaagtgaccgtcaccggtggcctggcgctggaagatctgccgctgttcaaaggcattc

SEQ ID NO: 400517 - DNA, 75 bp, synthetic construct
  source 1..75: mol_type = other DNA
aagatattatttttccttctgttaaccctctccaccgttgcggcattacagaccgtaggcgcgttcatggtgatc

SEQ ID NO: 400518 - DNA, 75 bp, synthetic construct
  source 1..75: mol_type = other DNA
tcatctatctaatgcagcagaaggtggaataaaacctgcgcttaaagcattaaatgaacttgaacatcaaacaaa

SEQ ID NO: 400519 - DNA, 75 bp, synthetic construct
  source 1..75: mol_type = other DNA
gggcgccagctcaggcggctaaacagcaagcggctccggcagcaggcccgtgcatcagcggctggcgtgaaagaa

SEQ ID NO: 400520 - DNA, 75 bp, synthetic construct
  source 1..75: mol_type = other DNA
gcgcgccagctcaggcggctaaacaggaagcggctccggcagcaggcccgtgcatcagcggctggcgtgaaagaa

SEQ ID NO: 400521 - DNA, 75 bp, synthetic construct
  source 1..75: mol_type = other DNA
gtgcgccagctcaggcggctaaacagtaagcggctccggcagcaggcccatgcatcagcggctggcgtgaaagaa

SEQ ID NO: 400522 - DNA, 75 bp, synthetic construct
  source 1..75: mol_type = other DNA
cctgacttactggggctgatattacgtgacgctaatttcttgtatatcaatgggcatcgcctcgcagatcccgat

SEQ ID NO: 400523 - DNA, 75 bp, synthetic construct
  source 1..75: mol_type = other DNA
tgttgtcttgttcgttgtttttatcgtcggcatggggatgtcggctttccgcgcctgaacataatatttaccaga

SEQ ID NO: 400524 - DNA, 75 bp, synthetic construct
  source 1..75: mol_type = other DNA
gggcgccagctcaggcggctaaacaggaagcggctccggcagcaggcccctgcatcagcggctggcgtgaaagaa

SEQ ID NO: 400525 - DNA, 75 bp, synthetic construct
  source 1..75: mol_type = other DNA
atttcgccgcctctgcccgtctggcggtcggtgaagcgttaaccaatattgccgcaacacagattggtgatatca

SEQ ID NO: 400526 - DNA, 75 bp, synthetic construct
  source 1..75: mol_type = other DNA
agtcgaaactcacaaccacccgacggcgatttctccgtggccgggcgcggcgaccggttccggcggcgaaattcg

SEQ ID NO: 400527 - DNA, 75 bp, synthetic construct
  source 1..75: mol_type = other DNA
gtggaagtgcgtgacgctgcgcatctggcggcactggaaagcaaagggctggtggcgctgcgctatgttgataac

SEQ ID NO: 400528 - DNA, 75 bp, synthetic construct
  source 1..75: mol_type = other DNA
aaccgatcatgctggcgggtgggatcggcaacattcgcgccgatcacgtacaaaaaggcgagatcaacgttggtg

SEQ ID NO: 400529 - DNA, 75 bp, synthetic construct
  source 1..75: mol_type = other DNA
caaaaaggcgagatcaacgtcggtgcgaaactggtcgttctcggcggcccggcaatgaacatcggtcttggcggc

SEQ ID NO: 400530 - DNA, 75 bp, synthetic construct
  source 1..75: mol_type = other DNA
tggcacccggaaaactggggcgaggatggcccgtggatgcgtattttccgcaatgcgcgtaagcagttggggtaa

SEQ ID NO: 400531 - DNA, 75 bp, synthetic construct
  source 1..75: mol_type = other DNA
gctgccaggctcccggttcacaatatttacgccgagtatgtccattttgctgacctcaatgcgccgttaaacgat

SEQ ID NO: 400532 - DNA, 75 bp, synthetic construct
  source 1..75: mol_type = other DNA
gaatgtgaaactgtcgttcgatatcaacgaagatgtggcagcaccgtatattgccactggcgcacgtccgaaagt

SEQ ID NO: 400533 - DNA, 75 bp, synthetic construct
  source 1..75: mol_type = other DNA
gaaagttgccgtactgcgtgagcagggcgtgaactcgcatgttgaaatggcggcagctttccaccgtgcgggctt

SEQ ID NO: 400534 - DNA, 75 bp, synthetic construct
  source 1..75: mol_type = other DNA
gaaagtcgaaactcacaaccacccgacggcgatttctccgtggccgggcgcggcgaccggttccggcggtgaaat

SEQ ID NO: 400535 - DNA, 75 bp, synthetic construct
  source 1..75: mol_type = other DNA
gttcgcctgcattgtcggcattccgaatcaacaaactgctggcacgttttcaggctgccaggctcccggttcaca

SEQ ID NO: 400536 - DNA, 75 bp, synthetic construct
  source 1..75: mol_type = other DNA
gaaagtcgcaccacgttgcgtgtctggtgggcagaaaccacctggcagatgcagcgtctgcgtgacaatccggag

SEQ ID NO: 400537 - DNA, 75 bp, synthetic construct
  source 1..75: mol_type = other DNA
ggagcggtgattcaggttcgtgccgctgaccgtgaagcggtcgaagcggtactggcacagcatggccttgctgag

SEQ ID NO: 400538 - DNA, 75 bp, synthetic construct
  source 1..75: mol_type = other DNA
gggaagaagcgttaaccattattgataaacggttgggcgtgcagttaccgaaagatgaagtgggctttattgcca

SEQ ID NO: 400539 - DNA, 75 bp, synthetic construct
  source 1..75: mol_type = other DNA
atgaaacaatcagtaaaaacgatggggcaaagcatgactaagctgactattaacagaaaaccgaaaggcatttac

SEQ ID NO: 400540 - DNA, 75 bp, synthetic construct
  source 1..75: mol_type = other DNA
ggggatattcaatgacctggtgcaggatatcgccgtcagggagctggcattcggtccaggggcattacgtgcgtc

SEQ ID NO: 400541 - DNA, 75 bp, synthetic construct
  source 1..75: mol_type = other DNA
tcagcgtaccggatgacaactggtacagaatcgccaacgaattacttagccgcgccggtatagccatcaacggtt

SEQ ID NO: 400542 - DNA, 75 bp, synthetic construct
  source 1..75: mol_type = other DNA
tatcggctcgaaaaaaaccgacctgaatgttgacccgtggataaataaatatatttttccgaacggttgtctgcc

SEQ ID NO: 400543 - DNA, 75 bp, synthetic construct
  source 1..75: mol_type = other DNA
ggatatgttttttagcaaagtcttacgcgcaggtctcgagaaccaactcccccatcatttcaaagacacgctgcg

SEQ ID NO: 400544 - DNA, 75 bp, synthetic construct
  source 1..75: mol_type = other DNA
gctgcaacaacagatccacggtgttgagaaaaaacagcttccgcacctgctggcgaccaccaatatgctgctaca

SEQ ID NO: 400545 - DNA, 75 bp, synthetic construct
  source 1..75: mol_type = other DNA
cggcattgaagtaccggtacaaattcgtcacgacaacaccctgaacaaaccgctttcctcctgggatgagcaact

SEQ ID NO: 400546 - DNA, 75 bp, synthetic construct
  source 1..75: mol_type = other DNA
cgcagtatgcaaagcagcaggcggagatccagacgctgcgtaatcaactgcgcgatattcttggcgctgcgctgt

SEQ ID NO: 400547 - DNA, 75 bp, synthetic construct
  source 1..75: mol_type = other DNA
aaagcgcagcagaagcccacaggggcgacaccgtggcggcatatgaccaaacgccagcgcaaaaaccgcaggcgc

SEQ ID NO: 400548 - DNA, 75 bp, synthetic construct
  source 1..75: mol_type = other DNA
ataaagtgatacccggcaatcagaacgcacagcagaagcccacaggggcgacaccgtggcggcatatgaccaaac

SEQ ID NO: 400549 - DNA, 75 bp, synthetic construct
  source 1..75: mol_type = other DNA
gagaaaaaacagcttccgcacctgctggcgaccaccaatatgctgctgcacggcattgaagtgcctgtacaaatt

SEQ ID NO: 400550 - DNA, 75 bp, synthetic construct
  source 1..75: mol_type = other DNA
cgacggcggacgcggcggtaaattcgaactgcgcgatattctgagcgacgaaccgggcatgagcccgctggaaat

SEQ ID NO: 400551 - DNA, 75 bp, synthetic construct
  source 1..75: mol_type = other DNA
tggcacttcccgcaagagatgcgagctatgccgggttccaagagtatccgtcctgattacagtgttccgcttgtt

SEQ ID NO: 400552 - DNA, 75 bp, synthetic construct
  source 1..75: mol_type = other DNA
cagcggacagaaaaagccgccaggacggcaggaaggatgcccgccggtcagcagactcaccggctggttccgctc

SEQ ID NO: 400553 - DNA, 75 bp, synthetic construct
  source 1..75: mol_type = other DNA
gctgcacggcaccgggtgcagtttttgatgcctgagtccgatgcggtcacaatgctgaaaaacagacacgcataa

SEQ ID NO: 400554 - DNA, 75 bp, synthetic construct
  source 1..75: mol_type = other DNA
gaagtgagtgccctgctccattacgtcccggatctgcgtcgcaagatgctgctggccacactgtggaacaccggc

SEQ ID NO: 400555 - DNA, 75 bp, synthetic construct
  source 1..75: mol_type = other DNA
tatacgaaggtgtttgcgcttgatttcgcagcacgccaccgggtgcagttccagatgccgggcgatgaggcggtg

SEQ ID NO: 400556 - DNA, 75 bp, synthetic construct
  source 1..75: mol_type = other DNA
cgaacaggcaggacagagaaagcgcggatctgggaagtgacggacagaacggtcaggacctggattggggaagcg

SEQ ID NO: 400557 - DNA, 75 bp, synthetic construct
  source 1..75: mol_type = other DNA
gacggttcatgatgaactgccgaaatatctgctggctcccgaggtgagtgccctgctccattacgtcccggatct

SEQ ID NO: 400558 - DNA, 75 bp, synthetic construct
  source 1..75: mol_type = other DNA
acaggcaggacagagaaagcgcggatctgggaagtgacggacagaacggtcaggacctggattggggaggcggtt

SEQ ID NO: 400559 - DNA, 75 bp, synthetic construct
  source 1..75: mol_type = other DNA
cagcggtgtggcggcgttaaaatgcacgcgtcccggtggacgagccgggatccctgactgtgatcaaacccgatc

SEQ ID NO: 400560 - DNA, 75 bp, synthetic construct
  source 1..75: mol_type = other DNA
agctggagatgatggtggccacgctgaaaattcccctcgaacgcaggaataaacgtactggcagaacagagaaag

SEQ ID NO: 400561 - DNA, 75 bp, synthetic construct
  source 1..75: mol_type = other DNA
gcactgccacccttgttgcggaagaattgcagcagctcggctattcactggcgctgggccgcgaagtagtgtact

SEQ ID NO: 400562 - DNA, 75 bp, synthetic construct
  source 1..75: mol_type = other DNA
atgtcaggctccgttatacacagccagtctgcagccatggtaccggcagtgtattctgccggacagtctgcacaa

SEQ ID NO: 400563 - DNA, 75 bp, synthetic construct
  source 1..75: mol_type = other DNA
acgtcagccagctgcagacgatggtggccacactgaaaatccccatggaacggcgtaataaacgaacaggcagga

SEQ ID NO: 400564 - DNA, 75 bp, synthetic construct
  source 1..75: mol_type = other DNA
cgacctgatgcaggatatcgccgtcagggggctggcattcgggccgggggtattacgtgcgacgctggcatccta

SEQ ID NO: 400565 - DNA, 75 bp, synthetic construct
  source 1..75: mol_type = other DNA
agccgaaaggcatttacggcacgccgcagaaaacgacgcaggcggcacaagagcaggataaaaccacatcggcgc

SEQ ID NO: 400566 - DNA, 75 bp, synthetic construct
  source 1..75: mol_type = other DNA
gggattctgttgcctgtattgcccgggagcacgatatcaatgataatcttctgttcaaatggctcaggctctggc

SEQ ID NO: 400567 - DNA, 75 bp, synthetic construct
  source 1..75: mol_type = other DNA
tggaggatttccacgccctggtcgcgtgcggtggtttctcctacggtgatgtgctgggtgccggtgaaggttggg

SEQ ID NO: 400568 - DNA, 75 bp, synthetic construct
  source 1..75: mol_type = other DNA
ggatatcgccactctgggtgacgatcgcctggcggcgttgtttaacgaagaactgggtgcggtgattcaggttcg

SEQ ID NO: 400569 - DNA, 75 bp, synthetic construct
  source 1..75: mol_type = other DNA
acaaccacccgacggcgatttctccgtggccgggcgcggcgaccggttccggcggtgaaatccgcgatgaaggtg

SEQ ID NO: 400570 - DNA, 75 bp, synthetic construct
  source 1..75: mol_type = other DNA
caccctgaaaattcccctcgaaagacgaaacaaacgcaccggcagaatggagaaggcgcgtatctgggagatcac

SEQ ID NO: 400571 - DNA, 75 bp, synthetic construct
  source 1..75: mol_type = other DNA
ccggtgcgcgcattaatgaagcactggcgctgacgcggggggatttttcgcttgcgcccccgtatccgtttgtgc

SEQ ID NO: 400572 - DNA, 75 bp, synthetic construct
  source 1..75: mol_type = other DNA
gtattctgccggacagtctgcacaacttcctgttgccattgattatccggcagctctggcactccgccagatgtc

SEQ ID NO: 400573 - DNA, 75 bp, synthetic construct
  source 1..75: mol_type = other DNA
tttggtggcacggaagaagacggtattgagaagaactttccggcagagatgcaaacccgcgaaacggcggatctg

SEQ ID NO: 400574 - DNA, 75 bp, synthetic construct
  source 1..75: mol_type = other DNA
gtggaacaccggtgcgcgcattaatgaagcactggcgctgacgcggggggatttttcgctcacgcccccgtgtcc

SEQ ID NO: 400575 - DNA, 75 bp, synthetic construct
  source 1..75: mol_type = other DNA
ggttaccccacatactttccgccattcctatgcgatgcatatgctgtatgccggtataccgctgaaggtcctgca

SEQ ID NO: 400576 - DNA, 75 bp, synthetic construct
  source 1..75: mol_type = other DNA
ctcagtttttggcacactgaaaaagctgggacattggtctgcacccaaccctctcgccggtctgccaactttcaa

SEQ ID NO: 400577 - DNA, 75 bp, synthetic construct
  source 1..75: mol_type = other DNA
ccgcgaatccgacaacgaaattacggctatcaaggtcgatgatcgcgatattgcgttgacacaaggggaagttaa

SEQ ID NO: 400578 - DNA, 75 bp, synthetic construct
  source 1..75: mol_type = other DNA
tggcataaccatccgcagaaaacggcatcaccgtcaatgaatgaggctgtgatgcagatcgaacaggaggtgctc

SEQ ID NO: 400579 - DNA, 75 bp, synthetic construct
  source 1..75: mol_type = other DNA
atgacgattacaccagaagaagaaggtatgcataagaaatacagcgaacacgggagtaaggctggcgaagtaatc

SEQ ID NO: 400580 - DNA, 75 bp, synthetic construct
  source 1..75: mol_type = other DNA
ttggtaatgtaacattattagagggtacaattaaccagtccgtcaataactgcaatgatttgagtgaagactggt

SEQ ID NO: 400581 - DNA, 75 bp, synthetic construct
  source 1..75: mol_type = other DNA
cgagacaaaacatccaaagccctcaacaaacgaggtgtgctgcccgttctagaaatgccagggccgaaaaacagc

SEQ ID NO: 400582 - DNA, 75 bp, synthetic construct
  source 1..75: mol_type = other DNA
cgttaaaatgttgaccgcaccaatacgcagccatcttacctatctacgggcaaaatcttttgctgattacctgcc

SEQ ID NO: 400583 - DNA, 75 bp, synthetic construct
  source 1..75: mol_type = other DNA
tggatcttcttagtagcgtttcatctccaggtgaccccaatacagctaactataaagggcggtgcgttagcctcc

SEQ ID NO: 400584 - DNA, 75 bp, synthetic construct
  source 1..75: mol_type = other DNA
gcctgccgatgctattgcccgggcggaagacgttgtgttgtgcctgtccgggatgatcgaagctgttcgtccgga

SEQ ID NO: 400585 - DNA, 75 bp, synthetic construct
  source 1..75: mol_type = other DNA
ggtaccactcactatttgaggtgaccgggcaaacccacccggtgtatctaaccacaagggtaattcaacggtcga

SEQ ID NO: 400586 - DNA, 75 bp, synthetic construct
  source 1..75: mol_type = other DNA
gcaacactgatgattttgaagcgctggtaccactcactatttgagttgaccgggcaaacccacccagtgtatcta

SEQ ID NO: 400587 - DNA, 75 bp, synthetic construct
  source 1..75: mol_type = other DNA
agagtgaacggcagtgatattgagcgattttattacaatgaaaacttcgtcgaaattgatagcaataacattgtt

SEQ ID NO: 400588 - DNA, 75 bp, synthetic construct
  source 1..75: mol_type = other DNA
tttagcggtgtcgataccgatataatgaagttcatgttccatagtgaaaccaaccttgcaaatacggattaccgg

SEQ ID NO: 400589 - DNA, 75 bp, synthetic construct
  source 1..75: mol_type = other DNA
gcccacagaggcaattgctcaggctgaaaatgtggtaatgcgtctgtccggtatgtctgagtttgtggtgaataa

SEQ ID NO: 400590 - DNA, 75 bp, synthetic construct
  source 1..75: mol_type = other DNA
aaaaaatgcgtaatgccagcctgttcaataaaggttatgagatgagcgaactgcttagcgccgcacttcttgata

SEQ ID NO: 400591 - DNA, 75 bp, synthetic construct
  source 1..75: mol_type = other DNA
cagcagggtgagttcagtgcccagccgtgggactgggcattttatgctgaacaggtgcggcgggagaaattctgt

SEQ ID NO: 400592 - DNA, 75 bp, synthetic construct
  source 1..75: mol_type = other DNA
cttggtttccctcattatgccgcatggaaaatcgccgatcagatggcaaaaacgccagaagcagcactcaacttt

SEQ ID NO: 400593 - DNA, 75 bp, synthetic construct
  source 1..75: mol_type = other DNA
caaccagtacgattattcctgataattatctggatatttcttttagacctgtaagcattcaggggtgcgaggcat

SEQ ID NO: 400594 - DNA, 75 bp, synthetic construct
  source 1..75: mol_type = other DNA
cgtgggactgggcattttatgccgaacaggtacggcgggagaaatttgatctttggaggaggcgcagaaaaagcc

SEQ ID NO: 400595 - DNA, 75 bp, synthetic construct
  source 1..75: mol_type = other DNA
ttcgagctgcgggcgctggtggcggaaaatatggatcttcccgccataccgccacgttatcgcagcagttatttc

SEQ ID NO: 400596 - DNA, 75 bp, synthetic construct
  source 1..75: mol_type = other DNA
caggaagagaaacaggccaagctggaagcattccgtcagaagttactggaagatggcatagacccggcagagttg

SEQ ID NO: 400597 - DNA, 75 bp, synthetic construct
  source 1..75: mol_type = other DNA
gcgccactgtttaccgcgatccaaaactgtccgctgctctcacgcgttaagctgattgcggaaccgtgggatatt

SEQ ID NO: 400598 - DNA, 75 bp, synthetic construct
  source 1..75: mol_type = other DNA
gcaaaacggcccgaggcagatgcaaatcctgctttcagaccgttttttgattgcaataaatgccacgcttgaggt

SEQ ID NO: 400599 - DNA, 75 bp, synthetic construct
  source 1..75: mol_type = other DNA
gtggatcgaaggcgtacttacagcagattccggccagtctgacgacgtgttaaccaccgtcatgatctggtgttg

SEQ ID NO: 400600 - DNA, 75 bp, synthetic construct
  source 1..75: mol_type = other DNA
gataaccactgacgatggttttttcagcagcactaccatcacggaaaagcgcctggctcgcagcattctgcgtaa

SEQ ID NO: 400601 - DNA, 75 bp, synthetic construct
  source 1..75: mol_type = other DNA
ttctatattcattgagcctacgatacagggtgaatctatcagaaaacgtagttgaaaaatttattgaaagcgata

SEQ ID NO: 400602 - DNA, 75 bp, synthetic construct
  source 1..75: mol_type = other DNA
gaatgaccatttccgcgatgcgacccgacgcttctggctccagcgtaatctctcgttgggtgagtttgccgggcg

SEQ ID NO: 400603 - DNA, 75 bp, synthetic construct
  source 1..75: mol_type = other DNA
agtggcagctatgaacagcttaaaaacgaccttgacctgaacagcggcgcgtggcgagctgaggccgatatgctg

SEQ ID NO: 400604 - DNA, 75 bp, synthetic construct
  source 1..75: mol_type = other DNA
agcgtcatttgccacactaccgaccattacgcttaatcgtctggtggtgtccggcttgatgccgttcgtttacca

SEQ ID NO: 400605 - DNA, 75 bp, synthetic construct
  source 1..75: mol_type = other DNA
gcattcaatatcgaagggccgggagccgaagaagggttaaccttaccgctactttttgaccagagtcgtttcaat

SEQ ID NO: 400606 - DNA, 75 bp, synthetic construct
  source 1..75: mol_type = other DNA
ggccttgtgggttttcagttatgtggcctcagcgtcgtgtgcgggctgtgccgtgcctccatcgtagccgggctt

SEQ ID NO: 400607 - DNA, 75 bp, synthetic construct
  source 1..75: mol_type = other DNA
ccctggcaaaaatcaggggctgatgatggcggggaaaatccccgcctttttcctgccggtcccggacagagcaca

SEQ ID NO: 400608 - DNA, 75 bp, synthetic construct
  source 1..75: mol_type = other DNA
gttacccaggtgctttgctctgctttacctgttgcttatcactactccccacgaaaggactgggctccttttgcg

SEQ ID NO: 400609 - DNA, 75 bp, synthetic construct
  source 1..75: mol_type = other DNA
cgccagtcgccggaaggctgtgagtccggcagttattactacattgctgatatgcagcagaaaacggtgcagccg

SEQ ID NO: 400610 - DNA, 75 bp, synthetic construct
  source 1..75: mol_type = other DNA
tcgatagataacactaaggaacaaaacccctcggttttcctcaatgcaacctattcctcgcatgtttgcagtgat

SEQ ID NO: 400611 - DNA, 75 bp, synthetic construct
  source 1..75: mol_type = other DNA
tatccggaagcggtgagaggcgaactaatgacgctgggggcttttatcgctgaacttacagggctttacgcagaa

SEQ ID NO: 400612 - DNA, 75 bp, synthetic construct
  source 1..75: mol_type = other DNA
gttgcgccagctgttacacaaaccgcacggcatctttctggtgacggggccgacgggttccggcaaaagcaccac

SEQ ID NO: 400613 - DNA, 75 bp, synthetic construct
  source 1..75: mol_type = other DNA
tcttacaggctgcgatcgtgttgagcctgggtacgttggcatcaaagtaaacaaattgggtgaagacaaaggtat

SEQ ID NO: 400614 - DNA, 75 bp, synthetic construct
  source 1..75: mol_type = other DNA
tacgacatatttctattggttgaggaactgcatgttctggatatcatccggaaaggatttggctctgtggatgaa

SEQ ID NO: 400615 - DNA, 75 bp, synthetic construct
  source 1..75: mol_type = other DNA
ttctacctgaagactggcacctgcgctttccgtcgggaagtgaaattattcagtatgcagccagccattatgtga

SEQ ID NO: 400616 - DNA, 75 bp, synthetic construct
  source 1..75: mol_type = other DNA
acactccgcaggtatccgcagtaacggcattgagaaagtactcgctggagaaacctctcttgatgaagttctgcg

SEQ ID NO: 400617 - DNA, 75 bp, synthetic construct
  source 1..75: mol_type = other DNA
gggcgtggagcctttcctgctctcttccagtctgacgggcgtgatggcgcagcgactggtccgcacgctgtgcac

SEQ ID NO: 400618 - DNA, 75 bp, synthetic construct
  source 1..75: mol_type = other DNA
tcgatcttctctcgctttcggaagagatgcccgcaaatgaagatctcctgaatgaagattcagcggcaccggtta

SEQ ID NO: 400619 - DNA, 75 bp, synthetic construct
  source 1..75: mol_type = other DNA
agctgatggaagatctcggttctgctgaggatttttttactctcgctgaagaactgccggaaacggaagatctgc

SEQ ID NO: 400620 - DNA, 75 bp, synthetic construct
  source 1..75: mol_type = other DNA
cgccaagctaaatcttgatatcgagatggaaacgggtactggcaagacctattgctacatcaagacagtcttcga

SEQ ID NO: 400621 - DNA, 75 bp, synthetic construct
  source 1..75: mol_type = other DNA
cgccaggctaaatcttgatatcgagatggaaacggggactggcaagacctattgctacatcaagacgattttcga

SEQ ID NO: 400622 - DNA, 75 bp, synthetic construct
  source 1..75: mol_type = other DNA
gtgtcttcaaaatttgaagatggatatctattatgtctcagcatatacaccatcaacaaaatcggtagatttact

SEQ ID NO: 400623 - DNA, 75 bp, synthetic construct
  source 1..75: mol_type = other DNA
tactacaccgaagccgaagcttctttagccaggggtagaatatctggtgcagaaaatatagtaaaaaatgatgca

SEQ ID NO: 400624 - DNA, 75 bp, synthetic construct
  source 1..75: mol_type = other DNA
acgatcgtactcagtcaaatattggttttggctggcgtcatttttcagaaaatgactggatggcgggggtgaata

SEQ ID NO: 400625 - DNA, 75 bp, synthetic construct
  source 1..75: mol_type = other DNA
aacggcagcgatattgagcgcttttattacaatgaagatttcggtaatgactccaacttattgatagtgttttat

SEQ ID NO: 400626 - DNA, 75 bp, synthetic construct
  source 1..75: mol_type = other DNA
agagtcaacggcagtgatattgagcgattttactacgataaaactttcgtagaaaaggatagcaattatgttgtt

SEQ ID NO: 400627 - DNA, 75 bp, synthetic construct
  source 1..75: mol_type = other DNA
tgagacacctatttttggcaactcatttaaatatgacattgaagtgtcgaataaatcaccggatgaagaagtcaa

SEQ ID NO: 400628 - DNA, 75 bp, synthetic construct
  source 1..75: mol_type = other DNA
tgcgcggcggcaatgttggtcattcaccctctggcgccagtgtggatgctgatggcagctccggtgtgggctgtg

SEQ ID NO: 400629 - DNA, 75 bp, synthetic construct
  source 1..75: mol_type = other DNA
tgagctggtggattttaaaatggactctctcgatattcaattgcaggcagtttttgaaaaggtgacaggtatttt

SEQ ID NO: 400630 - DNA, 75 bp, synthetic construct
  source 1..75: mol_type = other DNA
agacgttcaacttgatcaatgcgcttcagccggtctatcgcaacaatggtggcggtttgtttgagttcgaccgca

SEQ ID NO: 400631 - DNA, 75 bp, synthetic construct
  source 1..75: mol_type = other DNA
acgtaactttattaccggaatggccaccgctaaagctaaccaggaaattcaggagtggctcgggaaatacggtac

SEQ ID NO: 400632 - DNA, 75 bp, synthetic construct
  source 1..75: mol_type = other DNA
ggcttctggctggaaaaaatcgccggatgttgaggattatcaggaatccggtgacgggagaagccagccgcttgc

SEQ ID NO: 400633 - DNA, 75 bp, synthetic construct
  source 1..75: mol_type = other DNA
atataacgatactcgatttacagatcttacaaaatctcagatgaaaatcttgtgtgaatcaaaaaatgttaataa

SEQ ID NO: 400634 - DNA, 75 bp, synthetic construct
  source 1..75: mol_type = other DNA
gttatgccacgctttctggcaccaatacaccacgcgattttgtcgaatttccttcgcaaatcaacgagcattggg

SEQ ID NO: 400635 - DNA, 75 bp, synthetic construct
  source 1..75: mol_type = other DNA
ggcggcagaggcggctcgcgagaaaggtctggataacaaatggctgattccgctgctgaataccacccaacaacc

SEQ ID NO: 400636 - DNA, 75 bp, synthetic construct
  source 1..75: mol_type = other DNA
gacgatattaggagcagttttgataactgctgcagtctttgtttctggcggtattggcgctgctttcgctgctgg

SEQ ID NO: 400637 - DNA, 75 bp, synthetic construct
  source 1..75: mol_type = other DNA
ttattagctgcgaacaaatccggtggagtggtggttgacgatattcagcaactggcaggcatgagtgagcaagag

SEQ ID NO: 400638 - DNA, 75 bp, synthetic construct
  source 1..75: mol_type = other DNA
gatttacaacgtctgcaattatcagaaaccagccgtcggtgaacccgctttattactgtgggatgatgttattac

SEQ ID NO: 400639 - DNA, 75 bp, synthetic construct
  source 1..75: mol_type = other DNA
aattcgggcgcaacaggcgaaattacttggtttcccccattatgctgcgtggaaaattgccgaccagatggcaaa

SEQ ID NO: 400640 - DNA, 75 bp, synthetic construct
  source 1..75: mol_type = other DNA
ctttaaggggcatgtcacaccccgcgagaaggtctataaagtctggcagcagatgacagaagatgggtttattac

SEQ ID NO: 400641 - DNA, 75 bp, synthetic construct
  source 1..75: mol_type = other DNA
atgagtcgcacatccctgattaaattaatccatgtcgcccgtcgggaactacaactcgacgatgacacttaccgc

SEQ ID NO: 400642 - DNA, 75 bp, synthetic construct
  source 1..75: mol_type = other DNA
tgtaaaaaaatcactgcattacatgaacaaaaacttcgtctatcttttaatgataaaaaaccaatggatgatatt

SEQ ID NO: 400643 - DNA, 75 bp, synthetic construct
  source 1..75: mol_type = other DNA
ggattctgccagattacaaacttcttctcctgccgtaacatcaacagtcccgtctcagccaaatgaaaatggtaa

SEQ ID NO: 400644 - DNA, 75 bp, synthetic construct
  source 1..75: mol_type = other DNA
acgctgctgacagtcctcgaaacactcaagcagtggcacatccgctgtattcgtgaagccttttcccgtcacggg

SEQ ID NO: 400645 - DNA, 75 bp, synthetic construct
  source 1..75: mol_type = other DNA
gagaaggtatacaaagtctggcagcagatggcagaagacggttttattaccgatggcggtgatgtggcgctggat

SEQ ID NO: 400646 - DNA, 75 bp, synthetic construct
  source 1..75: mol_type = other DNA
tgattttacggggttatcattagcgatcagtcatagacatgatcatgttgtcaaattatacggaaagttatttaa

SEQ ID NO: 400647 - DNA, 75 bp, synthetic construct
  source 1..75: mol_type = other DNA
ggggctgaatatggcttctgtcgccggtatgaatctgctggcggatgatgcctgtgtgccattaaccacaatggt

SEQ ID NO: 400648 - DNA, 75 bp, synthetic construct
  source 1..75: mol_type = other DNA
accagcgaaacacacaatgtttgcataatcgtaagcttcgtttggctggtttttttgtccggctctctgttgcct

SEQ ID NO: 400649 - DNA, 75 bp, synthetic construct
  source 1..75: mol_type = other DNA
tgtgtcgccaattatcaactgccaccagagagtcagcagcagttattaacccagctatcagctgaatgtcgttaa

SEQ ID NO: 400650 - DNA, 75 bp, synthetic construct
  source 1..75: mol_type = other DNA
agtcgaaaaccagacgggggtgcgtaccgactggcgcggttatgccgtgctgccttatgccactgaatatcggga

SEQ ID NO: 400651 - DNA, 75 bp, synthetic construct
  source 1..75: mol_type = other DNA
ggaagacaacaacctcagctatagcgtgcaaaccggttatgccgggggaggcgatggtaatagcggaagtacagg

SEQ ID NO: 400652 - DNA, 75 bp, synthetic construct
  source 1..75: mol_type = other DNA
atccatggtattgcccgtggtactgcacaggtatctattaagcaaaatgggtatgacatttataatagtacggtg

SEQ ID NO: 400653 - DNA, 75 bp, synthetic construct
  source 1..75: mol_type = other DNA
caatgagtcaggtacgaattttcagttagtgggttaccgttactcgaccagcgggtattttaatttcgctgatac

SEQ ID NO: 400654 - DNA, 75 bp, synthetic construct
  source 1..75: mol_type = other DNA
tactgcaaccgcattcttgtccggtaattgccgcggggcagggaaaagaagtcattaaaaccttatttaatgagc

SEQ ID NO: 400655 - DNA, 75 bp, synthetic construct
  source 1..75: mol_type = other DNA
cctttcagccactggctgcgttctgacagtaaatctcagtggcgacatgccagtgccagctacagcatgtcacac

SEQ ID NO: 400656 - DNA, 75 bp, synthetic construct
  source 1..75: mol_type = other DNA
ggctacggcaatgccaacattggttacagccatagcgatgatattaagcagctctattacggaatcagcggtggg

SEQ ID NO: 400657 - DNA, 75 bp, synthetic construct
  source 1..75: mol_type = other DNA
ctccacggcctcccggctggctggacaatatacggcggtactcaactggcggatcgttatcgtgcttttaatttc

SEQ ID NO: 400658 - DNA, 75 bp, synthetic construct
  source 1..75: mol_type = other DNA
tggtgcgtggcgtttacgcgacaataccacctggagttataacagtagcggaaattcatcaggtagcaaaaataa

SEQ ID NO: 400659 - DNA, 75 bp, synthetic construct
  source 1..75: mol_type = other DNA
aacaccgactggatcgagaagtgccttgcgcacgaacagaagggcgttcgtgccatctacaacaaggccgagtac

SEQ ID NO: 400660 - DNA, 75 bp, synthetic construct
  source 1..75: mol_type = other DNA
gttgagaacccggccgatttggtgcgcccgtcgactattgcaaagtttgagccgcgagatcgagcgctgacgccc

SEQ ID NO: 400661 - DNA, 75 bp, synthetic construct
  source 1..75: mol_type = other DNA
tcaaatggcggcggtggcgtttgcaagcgtagcgcgccaggatgctgaaaatgcacggctaatgatcccctcgct

SEQ ID NO: 400662 - DNA, 75 bp, synthetic construct
  source 1..75: mol_type = other DNA
tcgtcatgctcttaactcttatagaattgtagaagcattaccttcagcacaaattatcatcgatgattacaatga

SEQ ID NO: 400663 - DNA, 75 bp, synthetic construct
  source 1..75: mol_type = other DNA
acgtcaaaggcgttgtttattcatcgtaataccctggagtatcggcttaatcgtatatcggaactgaccgggctt

SEQ ID NO: 400664 - DNA, 75 bp, synthetic construct
  source 1..75: mol_type = other DNA
ttgaataccgtctgcggcgtattgctgaactggctgggttgaatctggcgaattatgaagatcgttttctgttct

SEQ ID NO: 400665 - DNA, 75 bp, synthetic construct
  source 1..75: mol_type = other DNA
attactactatgcgaaatggaacaccgggcagagtgaagaagcctggcaaggggcgaaagagctgtggctaaccg

SEQ ID NO: 400666 - DNA, 75 bp, synthetic construct
  source 1..75: mol_type = other DNA
agctgccccgcaggcaatcactttaaacttctcggaaggcgttgaaacaggattcagtggtgcaaaaatcacggg

SEQ ID NO: 400667 - DNA, 75 bp, synthetic construct
  source 1..75: mol_type = other DNA
ttggcgaatatgggaatagatacgcgacttatccaggattatcttggacatcgcaatattcgtcatactgtctgg

SEQ ID NO: 400668 - DNA, 75 bp, synthetic construct
  source 1..75: mol_type = other DNA
atgcacggctgatgatcccgtcgcttgcccaggcacagcagcttaatgaagatcagattcaggagctgcgcgata

SEQ ID NO: 400669 - DNA, 75 bp, synthetic construct
  source 1..75: mol_type = other DNA
ccagggactaccgaagcgcaatgtaattattactatgcgaaatggaatatcgggcagagcgaagaagcctggcag

SEQ ID NO: 400670 - DNA, 75 bp, synthetic construct
  source 1..75: mol_type = other DNA
gaaacgaacatcaacatcggcaccagctacctgcaatatgtttatcagcagtttggcaataaccgcattttctcc

SEQ ID NO: 400671 - DNA, 75 bp, synthetic construct
  source 1..75: mol_type = other DNA
gataaagaagtacggtccggatccttccactaataaagaacagtcagatgctcaggccgagatccgtcgtctcca

SEQ ID NO: 400672 - DNA, 75 bp, synthetic construct
  source 1..75: mol_type = other DNA
ggtttcgaaccccttgatctactacaaggcgtggtcatgctggtggagcagaaaatagcggcccacagcaaggta

SEQ ID NO: 400673 - DNA, 75 bp, synthetic construct
  source 1..75: mol_type = other DNA
aaggcgtggtcatgctggtggagcagaaaatagctgctcatagcaaggtagaaaatcagtatcggcgggtagtgc

SEQ ID NO: 400674 - DNA, 75 bp, synthetic construct
  source 1..75: mol_type = other DNA
cgatctccggcaaaatccagacggtacgcagagaggcgaaatgtctgcactgtgcgaaatgtttgcgtgatgcgg

SEQ ID NO: 400675 - DNA, 75 bp, synthetic construct
  source 1..75: mol_type = other DNA
gctgaacgtcagcgtctgaaagaactggagcgtgaaaatcgtgaaccgcgccgcagtaacgatattcttcgctag

SEQ ID NO: 400676 - DNA, 75 bp, synthetic construct
  source 1..75: mol_type = other DNA
gctgttgtccgtgggggtaacggtgcagatgatggcggtatatttatagagtgtggtggctttggccattattgg

SEQ ID NO: 400677 - DNA, 75 bp, synthetic construct
  source 1..75: mol_type = other DNA
gccagcgttgcaacacgtctcgatatcaccacccacagcctttacgcctggataaagaagtacgatccggatcct

SEQ ID NO: 400678 - DNA, 75 bp, synthetic construct
  source 1..75: mol_type = other DNA
atgagcggtaagcgttatcccgaagagtttaaaactgaagcagtcaaacaggttgttgatctcggttattctgtt

SEQ ID NO: 400679 - DNA, 75 bp, synthetic construct
  source 1..75: mol_type = other DNA
ttgtagattcaatctgtcaatgcaacacccctttcaattatctctttcggtgttttgtgtcaacgacggatgaaa

SEQ ID NO: 400680 - DNA, 75 bp, synthetic construct
  source 1..75: mol_type = other DNA
agattgccagccatccggaagtgattttctgtacctttggcgacgccatgcgcgtacctggaaaacaggggtcac

SEQ ID NO: 400681 - DNA, 75 bp, synthetic construct
  source 1..75: mol_type = other DNA
ctgtaatcctcaaaccgcgttcggtgcactgatggtctcttctgaaggagcgtgcgctgcgtggtatcagtatcg

SEQ ID NO: 400682 - DNA, 75 bp, synthetic construct
  source 1..75: mol_type = other DNA
atgcgttttgttgatgaatatcgcgcgccggaacaggtgatgcagttaattgagcatctgcgcgaacgtgcttca

SEQ ID NO: 400683 - DNA, 75 bp, synthetic construct
  source 1..75: mol_type = other DNA
tgcgccctcgtcagccgatgtggcaacgatgcgcgaaatggcagaacgagccggatttgaggttaccgtgggggg

SEQ ID NO: 400684 - DNA, 75 bp, synthetic construct
  source 1..75: mol_type = other DNA
ttagtcgttcttagcgtttcaattgctttgattgtgacatttctttctgattatatcattggatttttctatact

SEQ ID NO: 400685 - DNA, 75 bp, synthetic construct
  source 1..75: mol_type = other DNA
gccgcagtaacaatatccttcgcctggcttccgcttattttgcaaaggcggagttcgaccgcctctggaaaaaat

SEQ ID NO: 400686 - DNA, 75 bp, synthetic construct
  source 1..75: mol_type = other DNA
tatggttctggaaagtcagggcgaatatgactcacaatgggcggcaatttttagccatgaaaacgtaatcaactc

SEQ ID NO: 400687 - DNA, 75 bp, synthetic construct
  source 1..75: mol_type = other DNA
gtggaatacccaggatgaaatcgatttcctcggcaaactcaattacaccaaacgtgatggcccggcacaggggcg

SEQ ID NO: 400688 - DNA, 75 bp, synthetic construct
  source 1..75: mol_type = other DNA
tggatcctccggcaaggggcacgagtatatgcagaaatatctgctgggtaccgaaagcggtattcagggtaaaga

SEQ ID NO: 400689 - DNA, 75 bp, synthetic construct
  source 1..75: mol_type = other DNA
ctgaggtccgtcagcaggccatccgtatggttctggcgagtcagaacgaatacgactcacagtgggctgcactca

SEQ ID NO: 400690 - DNA, 75 bp, synthetic construct
  source 1..75: mol_type = other DNA
atggttacgccagtaagcatcagcaattacatatctcttcctgatgattttcccgttcgtaatattgcacctcag

SEQ ID NO: 400691 - DNA, 75 bp, synthetic construct
  source 1..75: mol_type = other DNA
ggcaacgtcgtcagccgatgtggcattgatgcgtgaaatggctgaacaggctggttttcaggttacggttggggg

SEQ ID NO: 400692 - DNA, 75 bp, synthetic construct
  source 1..75: mol_type = other DNA
tgcgccgtcgtcagctgatgtggcaacgatgcgcgaaatggcagaacgggccggacttcaggttaccgtgggagg

SEQ ID NO: 400693 - DNA, 75 bp, synthetic construct
  source 1..75: mol_type = other DNA
cgaaatatggtttattaggttctgtttatgcaacgttgattgcttatgcatgtgctggatatttatttgatattt

SEQ ID NO: 400694 - DNA, 75 bp, synthetic construct
  source 1..75: mol_type = other DNA
atgactcacaatgggcggcaatttgttccattgccccaaagattggctgtacaccagagactctgcgtgtgtggg

SEQ ID NO: 400695 - DNA, 75 bp, synthetic construct
  source 1..75: mol_type = other DNA
aacatcagctcagccacaaaaaagatatttaataaccttgataacttatcatatattcagagaacctctttccgg

SEQ ID NO: 400696 - DNA, 75 bp, synthetic construct
  source 1..75: mol_type = other DNA
gataaagaagtacggtccggattcttccactaataaagaacagtcagatgctcaggccgagatccgccgtctcca

SEQ ID NO: 400697 - DNA, 75 bp, synthetic construct
  source 1..75: mol_type = other DNA
ttggtgttagtaaaaaactggcgcgcgtgttggtggatgtcaacaaagcccgcacgatgagccaacgactgaaac

SEQ ID NO: 400698 - DNA, 75 bp, synthetic construct
  source 1..75: mol_type = other DNA
cgcagcgaaattcccgccgaagtgattgaacaactggtctttggtcaggtcgttcagatgccggaagcccccaac

SEQ ID NO: 400699 - DNA, 75 bp, synthetic construct
  source 1..75: mol_type = other DNA
tgggcgacaccgcagagcaaatggcgaaaacctacggcatcacccgagaacagcaagatgcattagcgcaccgtt

SEQ ID NO: 400700 - DNA, 75 bp, synthetic construct
  source 1..75: mol_type = other DNA
ccgccttgcactgtgggaaaaactggggcaacccatcctgaccctggcgatgattttgctggctgtgccgtttac

SEQ ID NO: 400701 - DNA, 75 bp, synthetic construct
  source 1..75: mol_type = other DNA
gcacgaagcctttgccgcccaaacgctggcgaatatccagttactcggtagtgaacgttttgcccgcgatgtgtt

SEQ ID NO: 400702 - DNA, 75 bp, synthetic construct
  source 1..75: mol_type = other DNA
cgcagtgaaattcccgccgatgtgattgaacaactggtctttggtcaggttgtgcaaatgccggaagcccccaac

SEQ ID NO: 400703 - DNA, 75 bp, synthetic construct
  source 1..75: mol_type = other DNA
tatctggttttttgatgagagttgtccggggggagctgtctgggtgcttgaagatggctctctcgaatggacctg

SEQ ID NO: 400704 - DNA, 75 bp, synthetic construct
  source 1..75: mol_type = other DNA
gggtggtatcgttaactcaagcttcgataataacaatctggtcatccctgcgaccaacgacgaagccagaagcag

SEQ ID NO: 400705 - DNA, 75 bp, synthetic construct
  source 1..75: mol_type = other DNA
aaagaggctcttaccatcccgacaaacggcgacggggtacaggggtacaaacttcacattatttacaaacacaaa

SEQ ID NO: 400706 - DNA, 75 bp, synthetic construct
  source 1..75: mol_type = other DNA
gcagattcctcttcggtattgccaattggcgtcagtaaaaaactggcgcgcgtgctggttgatgtcaacaaagcc

SEQ ID NO: 400707 - DNA, 75 bp, synthetic construct
  source 1..75: mol_type = other DNA
cttaatgccggtgcctccggcagtggcggaatactctactggcttgcggatgggcgacaccgctgaacaaatggc

SEQ ID NO: 400708 - DNA, 75 bp, synthetic construct
  source 1..75: mol_type = other DNA
tcgcagaaagcctgatggcgggaactattcgcgcggggattgccggtggggccgattcctcttccgtattgccaa

SEQ ID NO: 400709 - DNA, 75 bp, synthetic construct
  source 1..75: mol_type = other DNA
agaccgggcaacccggcagtgaataccgtctggcattgtgggaaaaactggggcatcccatattaactttggcga

SEQ ID NO: 400710 - DNA, 75 bp, synthetic construct
  source 1..75: mol_type = other DNA
ggggcggttgtttttcttatagcttatccgttaggccaatataaatttaactctaaaaaggtcgctattgcaata

SEQ ID NO: 400711 - DNA, 75 bp, synthetic construct
  source 1..75: mol_type = other DNA
gagaactaatgcaaataagagcagggttagcatgtgctctatgtttattttcattgcggtacatagttaataaat

SEQ ID NO: 400712 - DNA, 75 bp, synthetic construct
  source 1..75: mol_type = other DNA
gtgcatcatccggtgtttgctaaaaatattggcactattgtaaaaatcgttacgatatacgattcaggatgtgtg

SEQ ID NO: 400713 - DNA, 75 bp, synthetic construct
  source 1..75: mol_type = other DNA
tgcgggcggcgaagccatgcctgccgcccgtgactatctggcaaatgctacttagtcgtctgctggaacagcatt

SEQ ID NO: 400714 - DNA, 75 bp, synthetic construct
  source 1..75: mol_type = other DNA
gaacatatcgatgccggtatatctttggccgatgccgtgaattttctggtggaaaagtatgagctggttcgtatt

SEQ ID NO: 400715 - DNA, 75 bp, synthetic construct
  source 1..75: mol_type = other DNA
cccggtcattggagtagtaaccaaagcagatttagccagcatggaacaaatatctttggtgaaaagttggttacg

SEQ ID NO: 400716 - DNA, 75 bp, synthetic construct
  source 1..75: mol_type = other DNA
tgtggacagtctcgttaggcgcgattgatgagtgggtagcgtcgccattgcagcaacaggcgctgcaaatcaaat

SEQ ID NO: 400717 - DNA, 75 bp, synthetic construct
  source 1..75: mol_type = other DNA
cagcaacaggcgctgcaaatcaaatcgaccgccaccgcgttgggggaggacgatgacattaccggcaatatgctg

SEQ ID NO: 400718 - DNA, 75 bp, synthetic construct
  source 1..75: mol_type = other DNA
cattacatcaattacttgcaggaaaccggacaaccgagcagtgagtatcgcctggcattgtgggaaaagctgggg

SEQ ID NO: 400719 - DNA, 75 bp, synthetic construct
  source 1..75: mol_type = other DNA
tggtgctcgatgtgaaatcgtgagtgtgcatcatccggtgtttgctaaaaatattggcactattgtaaaaatcgt

SEQ ID NO: 400720 - DNA, 75 bp, synthetic construct
  source 1..75: mol_type = other DNA
actctcgcgatcagcaaatggaagccattgcgcagcagctgccggacgaccatcgcattctggacgcggcgtact

SEQ ID NO: 400721 - DNA, 75 bp, synthetic construct
  source 1..75: mol_type = other DNA
ctgttatcgcgctcggtttaccggtagcgtttgtgttgatggcgttgagcctggtgtattggtatgacagacaac

SEQ ID NO: 400722 - DNA, 75 bp, synthetic construct
  source 1..75: mol_type = other DNA
tttagctatctggcaagcatattgtgtcagcatccggcagaggttattgccgggttaacaggatatgaggcattt

SEQ ID NO: 400723 - DNA, 75 bp, synthetic construct
  source 1..75: mol_type = other DNA
cgttgaacatagcggtctgtttcttggtgataatgctgtaagaaccctgacgggtttgatagagaaacagcatca

SEQ ID NO: 400724 - DNA, 75 bp, synthetic construct
  source 1..75: mol_type = other DNA
aaccaacaccgctggccgctgatgcagggtgattatctctccagcctgattctggcgatttacgccctgcgtaat

SEQ ID NO: 400725 - DNA, 75 bp, synthetic construct
  source 1..75: mol_type = other DNA
aggtgcagccggggaaatcaactgctgagctggagttccgttttcagggtagtgatcttcaggatcatcagataa

SEQ ID NO: 400726 - DNA, 75 bp, synthetic construct
  source 1..75: mol_type = other DNA
tggatgatggaaatctggatttctccgagcttcatttgtttaaagatgatgaactactgaactatagccggaagc

SEQ ID NO: 400727 - DNA, 75 bp, synthetic construct
  source 1..75: mol_type = other DNA
ttcagctatcttgccagcgtcctgtgtcagcatccggcggaaactattgccaggttaacagggtatgaggcgttt

SEQ ID NO: 400728 - DNA, 75 bp, synthetic construct
  source 1..75: mol_type = other DNA
gttccattgctccaaagaatggctgtacgcccgagactctgcgtgtctgggttcgccaggatgagcgggataccg

SEQ ID NO: 400729 - DNA, 75 bp, synthetic construct
  source 1..75: mol_type = other DNA
gttcgccagcatgagcgggatatcgggggcggtgatggtgggctcaccagcgctgaacgtcagcgtctgaaagag

SEQ ID NO: 400730 - DNA, 75 bp, synthetic construct
  source 1..75: mol_type = other DNA
gttccattgccccaaagattggctgtacaccggagactctgcgtgtctggggacgccagcatgagcgggataccg

SEQ ID NO: 400731 - DNA, 75 bp, synthetic construct
  source 1..75: mol_type = other DNA
cgctgaacgtcagcgtctgaaagagctggaacgtgaaaatcgtgaactgcgccgcagtaacgatatccttcgcta

SEQ ID NO: 400732 - DNA, 75 bp, synthetic construct
  source 1..75: mol_type = other DNA
cttcgccaggcttccgcttattttgcgaaggcggagttcgaccgcctctggaaaaataatgccactgctggataa

SEQ ID NO: 400733 - DNA, 75 bp, synthetic construct
  source 1..75: mol_type = other DNA
gttccattgctccaaagaatggctgtacgccggagactctgcgtgtctgggttcgccagcatgagcgggataccg

SEQ ID NO: 400734 - DNA, 75 bp, synthetic construct
  source 1..75: mol_type = other DNA
cgggcgggcggcaagacttcccgcattaaggcatcggtgccttttgacgggcatccctgcttctttagtctcgag

SEQ ID NO: 400735 - DNA, 75 bp, synthetic construct
  source 1..75: mol_type = other DNA
gacagcgttgaacgctacagtgggcaactggagaacgtattaactgaattcagcgccaaatttattcaggaacat

SEQ ID NO: 400736 - DNA, 75 bp, synthetic construct
  source 1..75: mol_type = other DNA
gatattctggagccgcatacactggcatcgcaactttatcgagcgctctttattcgacaggtgctgatgcaggta

SEQ ID NO: 400737 - DNA, 75 bp, synthetic construct
  source 1..75: mol_type = other DNA
gaagaacttatggcagaactggtcaggactgcgaatagtggtggaacagtccttgatccttttatgggatcggga

SEQ ID NO: 400738 - DNA, 75 bp, synthetic construct
  source 1..75: mol_type = other DNA
aacgtcatttgccacactaccgcctattacgcttgatcgtctggtggtatccggtttgatgccgttcgtttacca

SEQ ID NO: 400739 - DNA, 75 bp, synthetic construct
  source 1..75: mol_type = other DNA
gaaggctactggcggtaagaaatatcaattatcgttactaccttataaccctttgtcactgtttggtgatatgcc

SEQ ID NO: 400740 - DNA, 75 bp, synthetic construct
  source 1..75: mol_type = other DNA
aaaacgcaatttaccaaatcgctggtgacacaattaatgcgtaaccaatcctgtaacattgatggaaaatcgatt

SEQ ID NO: 400741 - DNA, 75 bp, synthetic construct
  source 1..75: mol_type = other DNA
aatgtcgatactgaatcgtcttgcgccctgcgtctcgcccgcttgttaggctgtctgtggcaaccggcacggcag

SEQ ID NO: 400742 - DNA, 75 bp, synthetic construct
  source 1..75: mol_type = other DNA
aaaacaacgcatgaagctggttacgttaataatggagtgctatgacttagcaggaatagtgcctcatgatcgatc

SEQ ID NO: 400743 - DNA, 75 bp, synthetic construct
  source 1..75: mol_type = other DNA
gaaagaacgattctggcgtactagccggctcggggggagaaactctaagatactggcatcagtgccttttgatgg

SEQ ID NO: 400744 - DNA, 75 bp, synthetic construct
  source 1..75: mol_type = other DNA
gaaaatgcacccgaccggaaagccagaagaacttatggcagagctggtcaggactgcgaatagtggtggaacagt

SEQ ID NO: 400745 - DNA, 75 bp, synthetic construct
  source 1..75: mol_type = other DNA
ggccgggcggttatgccctggtatttactgactggcggcaactgcctgctttaaccgatgcgtttcaggccagcg

SEQ ID NO: 400746 - DNA, 75 bp, synthetic construct
  source 1..75: mol_type = other DNA
ttatcgaccctaaggtcacactcgatttctttactagtcaaaaagatgtcgtactaattcattactctgaccagt

SEQ ID NO: 400747 - DNA, 75 bp, synthetic construct
  source 1..75: mol_type = other DNA
gagcagtacggggtcggaccgaaatgcagggagctggatattgcaccgtcaacgtattaccactgtcagcaacag

SEQ ID NO: 400748 - DNA, 75 bp, synthetic construct
  source 1..75: mol_type = other DNA
atatgctgatcttctgcggttgtgtcgggcaaagcggcggcggctgggcacactatgtcggtcaggaaaaactgc

SEQ ID NO: 400749 - DNA, 75 bp, synthetic construct
  source 1..75: mol_type = other DNA
atattgtggcggtggagcgcgactaccctgctacctacgaacgctttacctcactggggccgttgatggacgaac

SEQ ID NO: 400750 - DNA, 75 bp, synthetic construct
  source 1..75: mol_type = other DNA
tacaaaggtatcgccaaagcattctcgcaagtctgcgtggggcatcttggcaaagaaacagatattgtactgcaa

SEQ ID NO: 400751 - DNA, 75 bp, synthetic construct
  source 1..75: mol_type = other DNA
accactggtatcacatggatatgaactaccgtgggatgatcaatatgctgatcttctgcggttgtgtcgggcaaa

SEQ ID NO: 400752 - DNA, 75 bp, synthetic construct
  source 1..75: mol_type = other DNA
agccaacgtgtaccgccgggcatgaccatgatgtatcacgctcaggaacgcattatgaatattcctggttcggaa

SEQ ID NO: 400753 - DNA, 75 bp, synthetic construct
  source 1..75: mol_type = other DNA
ctgttcggtgacctgtaaaaacgtctggaccggacgcgaaggcatggagtacgcatggtttaacaacgtcgaaac

SEQ ID NO: 400754 - DNA, 75 bp, synthetic construct
  source 1..75: mol_type = other DNA
ccggaagaagtcgagtggcaaaccgccgcgatagagggcaagctcgacctgctggtgacgctcgacttccgcatg

SEQ ID NO: 400755 - DNA, 75 bp, synthetic construct
  source 1..75: mol_type = other DNA
gctggaaccgcgcgacgatggcagctacgtgcctggacgcatgatccgcgcgtctgacctggtggatggactggg

SEQ ID NO: 400756 - DNA, 75 bp, synthetic construct
  source 1..75: mol_type = other DNA
gctggaaccgcgcgacgatggcagctacgttcccggacggatgatacgggcatccgatctggttgacgggctggg

SEQ ID NO: 400757 - DNA, 75 bp, synthetic construct
  source 1..75: mol_type = other DNA
gagatcaccggacgcgaacatacccatctggcgctgcacaaagaggacgagaagattcgctttcgcgatattcag

SEQ ID NO: 400758 - DNA, 75 bp, synthetic construct
  source 1..75: mol_type = other DNA
agcgtgaaggcccggcacaggggcgtccgctgattgacaccgccattgacgcatcagaagtgattctggcgctgg

SEQ ID NO: 400759 - DNA, 75 bp, synthetic construct
  source 1..75: mol_type = other DNA
acatgctgatcttctgcggttgtgtcgggcaaagcggtggcggctgggcacactatgtcggtcaggaaaaactgc

SEQ ID NO: 400760 - DNA, 75 bp, synthetic construct
  source 1..75: mol_type = other DNA
tacaaaggtattgccaaagcattttcgcaagtgtgcgtgggtcatcttggcaaagaaaccgacgtggtattacaa

SEQ ID NO: 400761 - DNA, 75 bp, synthetic construct
  source 1..75: mol_type = other DNA
acgccggagactctgcgtgtctggggacgccagcatgagcgggataccggaggcggtgatggtggactcaccacc

SEQ ID NO: 400762 - DNA, 69 bp, synthetic construct
  source 1..69: mol_type = other DNA
atgactaaaaatactcgtttttcccctgaagtccgtcaacgggcagtccgtatggttctggaaagtcag

SEQ ID NO: 400763 - DNA, 75 bp, synthetic construct
  source 1..75: mol_type = other DNA
gggcagtccgtatggttctggaaagtcagagcgaatatgactcacaatgggcgacaatttgttccattgctccaa

SEQ ID NO: 400764 - DNA, 75 bp, synthetic construct
  source 1..75: mol_type = other DNA
tacgccagagactctgcgtgtctgggtcgccagcatgagcgggataccgggggcggtgatggtgggctcaccacc

SEQ ID NO: 400765 - DNA, 75 bp, synthetic construct
  source 1..75: mol_type = other DNA
tacaccggagactctgcgtgtctggtgtacaaccagcatgagtgggataccgggggcggtgatggtggactcacc

SEQ ID NO: 400766 - DNA, 75 bp, synthetic construct
  source 1..75: mol_type = other DNA
cgctgaacgtcagcgtctgaaagagctggaacgtgaaaatcgtgaactgcgcgttcagttcttccggctactgaa

SEQ ID NO: 400767 - DNA, 75 bp, synthetic construct
  source 1..75: mol_type = other DNA
actcggtcagcatgagcgggataccgggagtggtgatggtggactcaccaccgctgaacgtcagcgtctgaaaga

SEQ ID NO: 400768 - DNA, 75 bp, synthetic construct
  source 1..75: mol_type = other DNA
ccgggacagaaactgagttagcgttaagcttgctcggtcaacacgacactgttgcaggcgtggccttcccctact

SEQ ID NO: 400769 - DNA, 75 bp, synthetic construct
  source 1..75: mol_type = other DNA
tccgctccaactggcaggaactgaatcaactgattgccgccgccaacgtctggaccataaaaacctatggcccgg

SEQ ID NO: 400770 - DNA, 75 bp, synthetic construct
  source 1..75: mol_type = other DNA
gaagaccgcattattaaagatggttcttacaacatcgatcagggtgttggtgtgcgtgcaatcagcggtgaaaaa

SEQ ID NO: 400771 - DNA, 75 bp, synthetic construct
  source 1..75: mol_type = other DNA
cgcgtacaggaagtgactgccagcctcagtggcgtctatgaattaattctggttgcggcgactgacggcacgctg

SEQ ID NO: 400772 - DNA, 75 bp, synthetic construct
  source 1..75: mol_type = other DNA
gaagaccgtattattaaagatggttcttacaacatcgatcagggcgttggtgtgcgtgcaatcagcggtgaaaaa

SEQ ID NO: 400773 - DNA, 75 bp, synthetic construct
  source 1..75: mol_type = other DNA
cgcccaaatgcacaaacttacgggcagatgctgccgacgctggacaggacggcaatgacgccggagaaataccat

SEQ ID NO: 400774 - DNA, 75 bp, synthetic construct
  source 1..75: mol_type = other DNA
gcaagatccacgttatgcactgaatcctgtgaaaactgtgaaagcacaactggaagaggcacttacgcttcacca

SEQ ID NO: 400775 - DNA, 75 bp, synthetic construct
  source 1..75: mol_type = other DNA
atggggctggtacgcaaacccggagtggtaaccgcagacacacttaacatcctgggtcgtgatgcgctcaccctt

SEQ ID NO: 400776 - DNA, 75 bp, synthetic construct
  source 1..75: mol_type = other DNA
agtctttattagttatactttagctaccataacatatatgatagctgataaagcatctttctatgattctggtat

SEQ ID NO: 400777 - DNA, 75 bp, synthetic construct
  source 1..75: mol_type = other DNA
ttatcgatatcaggatgcagagaccaatcatagcaagaatagaagaagaaaatttaaatttgacattgcaaatgt

SEQ ID NO: 400778 - DNA, 75 bp, synthetic construct
  source 1..75: mol_type = other DNA
gcctgctggccgtgctgctcaacaacgccggaaaagtgctcacccagcgccagttactcaatcaggtgtggggac

SEQ ID NO: 400779 - DNA, 75 bp, synthetic construct
  source 1..75: mol_type = other DNA
cgcccggtttttgattcaatgaaagaagcgatgcgacaaacagaggccgatgccagcgtgatttatgtgcctgcg

SEQ ID NO: 400780 - DNA, 75 bp, synthetic construct
  source 1..75: mol_type = other DNA
tgccagcgtgatttatgtgcctgcgccgtttgtgctggattctgtcgttgaggctgttgagtctggcgtcaaatt

SEQ ID NO: 400781 - DNA, 75 bp, synthetic construct
  source 1..75: mol_type = other DNA
gctgaaagtattccggaagatgtgattgccggagcctcggcactggttctcacctcttatctggtgcgttgcaag

SEQ ID NO: 400782 - DNA, 75 bp, synthetic construct
  source 1..75: mol_type = other DNA
acgtctgaaccgccgcgagaaagaagagaaaataaacaccgcaattcaggctgtcggcctcaatacgcgagtact

SEQ ID NO: 400783 - DNA, 75 bp, synthetic construct
  source 1..75: mol_type = other DNA
attgtttcccgctccggtacattaacctacgaagctgtagcgcaaactaccgcgctggggcttgggcaatccacc

SEQ ID NO: 400784 - DNA, 75 bp, synthetic construct
  source 1..75: mol_type = other DNA
ccgacactggatatggtgagagtacgtcgactgcttgattgccacccggatgtgcggctgattggaccaaactgc

SEQ ID NO: 400785 - DNA, 75 bp, synthetic construct
  source 1..75: mol_type = other DNA
aacgcgtactgattgtgggcgccaaatttggcgaaatgtacctgaatgcctttatgcagcccccggaggggctgg

SEQ ID NO: 400786 - DNA, 75 bp, synthetic construct
  source 1..75: mol_type = other DNA
gtcgtgattgtggccggggaaaccggttcggggaaaaccactcagctaccgaaaatctgtatggaactggggcgt

SEQ ID NO: 400787 - DNA, 75 bp, synthetic construct
  source 1..75: mol_type = other DNA
gcttacggcacagcaattcagggactacgttccgccatgctggcacgtgtgggcgatgaacatatgggacgtttc

SEQ ID NO: 400788 - DNA, 75 bp, synthetic construct
  source 1..75: mol_type = other DNA
cgatgaacagctcatcgcaacggtgaaacaaaaataccgcatgcttattgactactggcgcgaataccgcccggc

SEQ ID NO: 400789 - DNA, 75 bp, synthetic construct
  source 1..75: mol_type = other DNA
gagaactgcctgtcacctgccacacctgtttctctatatggcaggatgtacaccggttcaaacctggtgactttg

SEQ ID NO: 400790 - DNA, 75 bp, synthetic construct
  source 1..75: mol_type = other DNA
ggaacggattgccacacatatcgtgacaggcgctcacgggtatgaaacgctttgcacaagtggttataacttaca

SEQ ID NO: 400791 - DNA, 75 bp, synthetic construct
  source 1..75: mol_type = other DNA
ggtcaacagcgaacccgcggagtatcgtgaaattcatatcgcgttactgaccggattgctgtcgcatattgggat

SEQ ID NO: 400792 - DNA, 75 bp, synthetic construct
  source 1..75: mol_type = other DNA
cagcctcactgatgagaacggacagatcattcagcccccatggaaagagtatgaccttcagatgcagaccacact

SEQ ID NO: 400793 - DNA, 75 bp, synthetic construct
  source 1..75: mol_type = other DNA
ggctggcgatattcactcgccgagtgtgctgccaccgggaacagcggcaatctgcgtgcatcatatacaaacatc

SEQ ID NO: 400794 - DNA, 75 bp, synthetic construct
  source 1..75: mol_type = other DNA
tggttgctacaccagttgcgcagcaatctggcgggcgaacatccaccagaggcctgccaaagcgtacatcagatc

SEQ ID NO: 400795 - DNA, 75 bp, synthetic construct
  source 1..75: mol_type = other DNA
cgttggcaagaaatcagccagcatattgagcgctacgatcccgaatgccgcggtattttaatacttggactggat

SEQ ID NO: 400796 - DNA, 75 bp, synthetic construct
  source 1..75: mol_type = other DNA
cgctggaattgccgttgctcgacagccttgaacgagagttacggcggatgactggcgtcaccgttgaccgcgaag

SEQ ID NO: 400797 - DNA, 75 bp, synthetic construct
  source 1..75: mol_type = other DNA
atgcccgctaatgctcgctctcacgctgtactgaccactgaatcaaaggtcacgatacgcggacaaacaactatc

SEQ ID NO: 400798 - DNA, 75 bp, synthetic construct
  source 1..75: mol_type = other DNA
tgtgcaccgccgggccaatcggcttgtatatggcgggctttaccgaagacgaagcgaaacgtaaaacccagcatc

SEQ ID NO: 400799 - DNA, 75 bp, synthetic construct
  source 1..75: mol_type = other DNA
gatacgcacacgccagaaattcaggctgcacgtggtcgcaagggcgggaaaattggaggtgctaagtctaagcgt

SEQ ID NO: 400800 - DNA, 75 bp, synthetic construct
  source 1..75: mol_type = other DNA
gaatcagcctcatgcgcagttctggctggtttttgatgttgaccgcgagggcgctgcgattgactggagcgaccg

SEQ ID NO: 400801 - DNA, 75 bp, synthetic construct
  source 1..75: mol_type = other DNA
gcgccgaaatgcgtagtggtggttgatcactatgactgggaggatgatgccccgccgcgcacgccgtggggcagc

SEQ ID NO: 400802 - DNA, 75 bp, synthetic construct
  source 1..75: mol_type = other DNA
accaacgccatatctggcacccatacacatccatgacctccccgctgccggtttatccggtggcgagcgccgaag

SEQ ID NO: 400803 - DNA, 75 bp, synthetic construct
  source 1..75: mol_type = other DNA
cagcggttgaacgttcgctgtgtgagaaaatttgtgctgatgtgaactacagcggcctgatttgcaaaaatccgt

SEQ ID NO: 400804 - DNA, 75 bp, synthetic construct
  source 1..75: mol_type = other DNA
ctgcgattgaacgttcgctgtgtgagaaactttgtgctgatgtgaactacagcggactgatttgtaaaaatccgt

SEQ ID NO: 400805 - DNA, 75 bp, synthetic construct
  source 1..75: mol_type = other DNA
ggatgcggcaatacgctcaatttgagccatccggcggtggtggaatatgcctgcgcctgcctgcgctactgggta

SEQ ID NO: 400806 - DNA, 75 bp, synthetic construct
  source 1..75: mol_type = other DNA
acgtctgcaacgcatggggctaagtaactactggggttacaacccggtggcgatgtttgcgctgcatccggcgta

SEQ ID NO: 400807 - DNA, 75 bp, synthetic construct
  source 1..75: mol_type = other DNA
ggaaactttcgcacagtatgtggctgatacgcacacgccagaaattcaggcagcacgcggtcgcaagggcgggaa

SEQ ID NO: 400808 - DNA, 75 bp, synthetic construct
  source 1..75: mol_type = other DNA
ctactggggttacaacccggtggcgctgtttgcactgcatccggcgtatgcatgctcgcccgacacggcgttgga

SEQ ID NO: 400809 - DNA, 75 bp, synthetic construct
  source 1..75: mol_type = other DNA
aacaatgcctattgccaggataaccaactaacgtggttagactggtcgcaggcaagcagtggcttaaccgcgttt

SEQ ID NO: 400810 - DNA, 75 bp, synthetic construct
  source 1..75: mol_type = other DNA
aattaacctggttggactggtcgcaggcaagcagtggtttaaccgcatttaccgccgcgttaatccatctgcgca

SEQ ID NO: 400811 - DNA, 75 bp, synthetic construct
  source 1..75: mol_type = other DNA
agcaggtggcggctattgaagtgcagctgcgcgagcaactggcaccagcccgtgatgccgaaatggttgccgatg

SEQ ID NO: 400812 - DNA, 75 bp, synthetic construct
  source 1..75: mol_type = other DNA
catcgacattaatcctccacttcaatatgaatacggggagctgccctgctgtacagttccgcgtgaattacagga

SEQ ID NO: 400813 - DNA, 75 bp, synthetic construct
  source 1..75: mol_type = other DNA
tcgttcagcgcgtgatggttatggctttgaagataactggtcagcgttttacaccacaacctacaagccctctgc

SEQ ID NO: 400814 - DNA, 75 bp, synthetic construct
  source 1..75: mol_type = other DNA
acggtaaatcaggcttctggtgcgttgcagaaaaaccagaacggcgcagatattccaaacaaagataaatttacg

SEQ ID NO: 400815 - DNA, 75 bp, synthetic construct
  source 1..75: mol_type = other DNA
acctgattacccatcagtttgcgggcggcactattggtaacaccatgcacaactactccgtgctggcggatgacc

SEQ ID NO: 400816 - DNA, 75 bp, synthetic construct
  source 1..75: mol_type = other DNA
aacattcaacattcaacattcaacattcaacattcaacattcaacattcaacattcaacattcaacattcaacat

SEQ ID NO: 400817 - DNA, 75 bp, synthetic construct
  source 1..75: mol_type = other DNA
cagcagcctgcatttgctttagggcaaacaggaagcactgtcggaaatgataaagctgttggctggaactggaat

SEQ ID NO: 400818 - DNA, 75 bp, synthetic construct
  source 1..75: mol_type = other DNA
aaacaggcgggaaagccggctgcgggcggactgccttccctggttaatctcccggccacttctgcggcggtgctt

SEQ ID NO: 400819 - DNA, 75 bp, synthetic construct
  source 1..75: mol_type = other DNA
tcgaacagggggtatggatccggccatttggcaaacttatctacctgatgccaccctatattattcgcccggaac

SEQ ID NO: 400820 - DNA, 75 bp, synthetic construct
  source 1..75: mol_type = other DNA
actacgcgagcaactcacacccgcccgtgacgccgaaatggttgccgatgtccgcttgctgggggcaattggtgt

SEQ ID NO: 400821 - DNA, 75 bp, synthetic construct
  source 1..75: mol_type = other DNA
gctgaccgcccctttatccacccccgtgtattctcccgtaaaaattttcagttttgcaaatagagtttatcgctg

SEQ ID NO: 400822 - DNA, 75 bp, synthetic construct
  source 1..75: mol_type = other DNA
gctatctccggatattttctgaaccaggtcgccagcgcacgctgatcgcagccgggaagcaggacgaggggactg

SEQ ID NO: 400823 - DNA, 75 bp, synthetic construct
  source 1..75: mol_type = other DNA
cttgaaaatgcgttacgccgtgctgggattaacgatgtacgtgtgcctgatgacgttatcaggatgcagcgggaa

SEQ ID NO: 400824 - DNA, 75 bp, synthetic construct
  source 1..75: mol_type = other DNA
agttcattcgcctgtggcaatgctgcgagggtaaatcgcaggacacgacgctcaatgaactggcggagttattga

SEQ ID NO: 400825 - DNA, 75 bp, synthetic construct
  source 1..75: mol_type = other DNA
ctgctcccccgttggcaccatgcccgcaccataaagagcgaaaaaccggctggtctggaaagcctcaccctgacc

SEQ ID NO: 400826 - DNA, 75 bp, synthetic construct
  source 1..75: mol_type = other DNA
tgcctggcagcgcattacgccgttccgaaacgcatatcgcccggcaaatcttcagcgcgttaacccgcataaatg

SEQ ID NO: 400827 - DNA, 75 bp, synthetic construct
  source 1..75: mol_type = other DNA
tacaaaaacagggaggtgattatttattcgctgtaaaaggaaaccaggggcggctaaataaagccttcgaggaaa

SEQ ID NO: 400828 - DNA, 75 bp, synthetic construct
  source 1..75: mol_type = other DNA
gccgcagaattattttcagggatacggcacatcgctattaatattttgacgaatgataaggtattcaaggcaggg

SEQ ID NO: 400829 - DNA, 75 bp, synthetic construct
  source 1..75: mol_type = other DNA
gcaagggccgcaaggtgaagaaaaagagattgaaagccgactggaagaaggttgctactatttactgtttgacag

SEQ ID NO: 400830 - DNA, 75 bp, synthetic construct
  source 1..75: mol_type = other DNA
agtattgtcaggactttaccagtgatgaaggcaaagagggcgtcggaccagattcgttgccagggcgaggacgtc

SEQ ID NO: 400831 - DNA, 75 bp, synthetic construct
  source 1..75: mol_type = other DNA
cacgatgcgcagcctgacggaaggcaacgcattgttgagcaaagcagtggttgattcactggatgatcagagtaa

SEQ ID NO: 400832 - DNA, 75 bp, synthetic construct
  source 1..75: mol_type = other DNA
ctttaaaatctggctggaacgtccggttcttgatatcgacacggcgctggaacggctggtgaaaggtacggcgtt

SEQ ID NO: 400833 - DNA, 75 bp, synthetic construct
  source 1..75: mol_type = other DNA
tcgggcgcggcaaacgctcgcgtttaacgtttctctataccgggctggcgctacaacaacagcgggcggaagacc

SEQ ID NO: 400834 - DNA, 75 bp, synthetic construct
  source 1..75: mol_type = other DNA
gacattcctctataccgggctggcgcttcagcaacagcgggcggaagacctgctggagcaggatcgtatcgacca

SEQ ID NO: 400835 - DNA, 75 bp, synthetic construct
  source 1..75: mol_type = other DNA
gatcaagacggataagaaatccaatgagatcacagctatccctgaacttcttaacatgctggatattaaaggaaa

SEQ ID NO: 400836 - DNA, 75 bp, synthetic construct
  source 1..75: mol_type = other DNA
gagaagatacaaaaacagggaggtgattatttattcgctgtaaaaggaaaccaggggcggctaaataaagccttc

SEQ ID NO: 400837 - DNA, 75 bp, synthetic construct
  source 1..75: mol_type = other DNA
ttccgctgaaagaattaaataatccagagcatgacagttacgcaatcagtgaaaagagtcacggcagagaagaaa

SEQ ID NO: 400838 - DNA, 75 bp, synthetic construct
  source 1..75: mol_type = other DNA
cagggctaagacgtaagatgagaaaagcagccatggacagaaactacctcgcgtcagtccttgcggggtgcgggc

SEQ ID NO: 400839 - DNA, 75 bp, synthetic construct
  source 1..75: mol_type = other DNA
atccgaaaccactggcacgtggagaataagctgcactggcgtctggacgtggtaatgaatgaagacgactgcaaa

SEQ ID NO: 400840 - DNA, 75 bp, synthetic construct
  source 1..75: mol_type = other DNA
caaaggtcgcaacaactactggaaagtgcgtcaggcggtcgagacggcaaaagagacgctctacagctttgacca

SEQ ID NO: 400841 - DNA, 75 bp, synthetic construct
  source 1..75: mol_type = other DNA
gtgcggaaggttgggaagatatagaggattttggggaaacacatctcgattttttaaaacaatacggtgattttg

SEQ ID NO: 400842 - DNA, 75 bp, synthetic construct
  source 1..75: mol_type = other DNA
tgtcattagtgcgttctcaacaatgcacattctggtcctggggcagatcaggacggatgagaaatccaatgaaat

SEQ ID NO: 400843 - DNA, 75 bp, synthetic construct
  source 1..75: mol_type = other DNA
tgcagagaagatacaaaaacagggaggtgattatttattcgcggtaaaaggaaaccaggggcggctaaataaagc

SEQ ID NO: 400844 - DNA, 75 bp, synthetic construct
  source 1..75: mol_type = other DNA
ttttattaggtttatacgcattgcttacccaaatacatttgtcggtggctcgcggcattagcgcgcagtctgaac

SEQ ID NO: 400845 - DNA, 75 bp, synthetic construct
  source 1..75: mol_type = other DNA
tccctgaacttcttaacatgttggatattaaaggaaaaattatcacaactgatgcgatgggttgccagaaagata

SEQ ID NO: 400846 - DNA, 75 bp, synthetic construct
  source 1..75: mol_type = other DNA
agagaagttcgccacagcgatccgaaatcactggcacgtggaaaataagctgcactggcgcctggacgtggtaat

SEQ ID NO: 400847 - DNA, 75 bp, synthetic construct
  source 1..75: mol_type = other DNA
ccagaacacagcaacatgaaatgttaaaaaccgctgaccacccggtgactcaggggatcaccttagggctgaagg

SEQ ID NO: 400848 - DNA, 75 bp, synthetic construct
  source 1..75: mol_type = other DNA
gcctggcgaccggagccacgccattactgacgtatcattatctggtagaaaaaatccaccagcagcaggttgatg

SEQ ID NO: 400849 - DNA, 75 bp, synthetic construct
  source 1..75: mol_type = other DNA
aaacgtctggacagacattaacgatcgtgtcgttgaaggcggcttctactaccgtacagccgagcactcagccca

SEQ ID NO: 400850 - DNA, 75 bp, synthetic construct
  source 1..75: mol_type = other DNA
cggcacgaacggtggcgaaccgtattgcggaagagctgaaaacggagccgggcggttgcatcggttacaaagtgc

SEQ ID NO: 400851 - DNA, 75 bp, synthetic construct
  source 1..75: mol_type = other DNA
gctatcgaccgattgttgaagaagccgatgacaccgagcgcgatcagctgcaggcgatttttgacgccgtagacg

SEQ ID NO: 400852 - DNA, 75 bp, synthetic construct
  source 1..75: mol_type = other DNA
gatttgctcaactttgaaaagagcatgttgatcaaagaaggggcggaaaagatcagcaagctggattacccgaac

SEQ ID NO: 400853 - DNA, 75 bp, synthetic construct
  source 1..75: mol_type = other DNA
tggatgcgtgactgccattcttcagatgataaagacgttattgcaattgatggaaaaacgctccggcattcttat

SEQ ID NO: 400854 - DNA, 75 bp, synthetic construct
  source 1..75: mol_type = other DNA
caagcagcaggcatcggacgaaaaacatcgtcgctttcacgataaagaatccgacttcctggcgtttgtaaatct

SEQ ID NO: 400855 - DNA, 75 bp, synthetic construct
  source 1..75: mol_type = other DNA
atgacagaacaacaaaaattgacctttactgccttgcagcagcggctggattcgctgatgctacgtgacagactg

SEQ ID NO: 400856 - DNA, 75 bp, synthetic construct
  source 1..75: mol_type = other DNA
gatatgacagtggtaagtgttggactgcacggcgtaagcgtgtcagcaatcaatcatgagccgtacattgcgtta

SEQ ID NO: 400857 - DNA, 75 bp, synthetic construct
  source 1..75: mol_type = other DNA
tccgtgcggataacgccattgccgcggcctgctactttgctggtcacttcctcatcgtccgctcgctgtatctct

SEQ ID NO: 400858 - DNA, 75 bp, synthetic construct
  source 1..75: mol_type = other DNA
gctaaccctgttgccacgtcaacgtctgatgtacgccatcggcgcgtttttcctctcgcacctgctgtacaccat

SEQ ID NO: 400859 - DNA, 75 bp, synthetic construct
  source 1..75: mol_type = other DNA
ctgggtctctactttaacccgtacggtaaagtgctggatctcattgacgactgcatctcctgcggtgttgataag

SEQ ID NO: 400860 - DNA, 75 bp, synthetic construct
  source 1..75: mol_type = other DNA
aggcagggttaagacgtaagatgcgaaaagcagccatggacagaaactacctggcgtcagtccttgcggggagcg

SEQ ID NO: 400861 - DNA, 75 bp, synthetic construct
  source 1..75: mol_type = other DNA
caaaattttacgagtgctttattaactggatgcgtgactgtcattcttcagatgataaagacatcatcgcaattg

SEQ ID NO: 400862 - DNA, 75 bp, synthetic construct
  source 1..75: mol_type = other DNA
ctgccgcctgcacgtcgtgaggatgaagacgtgaaagaggtccgctggatgatagaagagctgcgcgttagttac

SEQ ID NO: 400863 - DNA, 75 bp, synthetic construct
  source 1..75: mol_type = other DNA
atgactacacgctatttttcgtcacttattgaacaatcgttgtctcgttcaactgaagcaacgctcagtatcatg

SEQ ID NO: 400864 - DNA, 75 bp, synthetic construct
  source 1..75: mol_type = other DNA
gtgactgccattcttcagatgataaagacgtcattgcaattgatggaaaaacgctccggcactcttatgacaaga

SEQ ID NO: 400865 - DNA, 75 bp, synthetic construct
  source 1..75: mol_type = other DNA
aaggcagggttaagacgtaagatgcgaaaagcagccatggacagaaactacctggcgtcagtccttgcagggagc

SEQ ID NO: 400866 - DNA, 75 bp, synthetic construct
  source 1..75: mol_type = other DNA
aaagtcgtgataaaaaggaccgtgaagataacgtctcccgttataaaggattaccttcccgtaacctcggtgttg

SEQ ID NO: 400867 - DNA, 75 bp, synthetic construct
  source 1..75: mol_type = other DNA
cttgatatcgacacggcgctggaacggctggtgaaaggtacggcgttgcatggcgcaagagccgaacatctgcgg

SEQ ID NO: 400868 - DNA, 75 bp, synthetic construct
  source 1..75: mol_type = other DNA
tctttaccgggaactgcatgaaaatggcaacaatccgttggtcggtgtccgagccctttttctctatccattgaa

SEQ ID NO: 400869 - DNA, 75 bp, synthetic construct
  source 1..75: mol_type = other DNA
cgaaaaacatcgtcgcttccacgacaaagagtctgacttcctcgcgtttgtgaatctgtggaattatcttggcga

SEQ ID NO: 400870 - DNA, 75 bp, synthetic construct
  source 1..75: mol_type = other DNA
ctaaatattccctcgccaatcaaatatttgcatgagaagttgccaaacaaagccaagctgggctgtactttaacc

SEQ ID NO: 400871 - DNA, 75 bp, synthetic construct
  source 1..75: mol_type = other DNA
cgtttctccatcttccccggttccggcttattcaaaaaaccgccgaaatgggtaatggtggcggaactggtagaa

SEQ ID NO: 400872 - DNA, 75 bp, synthetic construct
  source 1..75: mol_type = other DNA
atatgtgcacgatctgcaatcccatccggcggcgctggcaacccgtcaggtcagccagaaatgcctcaatccgcg

SEQ ID NO: 400873 - DNA, 75 bp, synthetic construct
  source 1..75: mol_type = other DNA
ctaacctgactcgccatcagaaatcggttgatttcaccggggaaaatccggcggggaattacatctcctatggcg

SEQ ID NO: 400874 - DNA, 75 bp, synthetic construct
  source 1..75: mol_type = other DNA
tcacctgaaaatcactttccgcgtggtggatgacaaaaacaagaagctaaaagaagggcgctcattacaggatct

SEQ ID NO: 400875 - DNA, 75 bp, synthetic construct
  source 1..75: mol_type = other DNA
gtgacctccatcgtatcgcggatgccctgcaggcggttcagaaacgtaacttctggcagttacaggctgaaatca

SEQ ID NO: 400876 - DNA, 75 bp, synthetic construct
  source 1..75: mol_type = other DNA
gtgatctacatcgtatcgcggatgccctgcaggcggtccagaaacgtaacttctggcagttacaggctgaaatca

SEQ ID NO: 400877 - DNA, 75 bp, synthetic construct
  source 1..75: mol_type = other DNA
cctgcaggcggtgcagaagcgtaacttctggcaattacaggctgaaatcagtcaccggggacgttactgccatcc

SEQ ID NO: 400878 - DNA, 75 bp, synthetic construct
  source 1..75: mol_type = other DNA
agcaaggggaaaaaccattcagtgagactctaattatgaatgatgtggcaggacgtttatggatctaccatgatg

SEQ ID NO: 400879 - DNA, 75 bp, synthetic construct
  source 1..75: mol_type = other DNA
ttctggctgtaccgtcaactggaaaacgagtacgactggctgacctcagatgccgctgtggatgaggccctgctc

SEQ ID NO: 400880 - DNA, 75 bp, synthetic construct
  source 1..75: mol_type = other DNA
gtgagcttcatcgtatcgcggatgccctgcaggcggtacagaaacgtaacttctggcagttacaggctgaaatca

SEQ ID NO: 400881 - DNA, 75 bp, synthetic construct
  source 1..75: mol_type = other DNA
ttattggtattacaatagcaatattaggggcgtggtatacgctggactgagtcgtgatattagaaaagaactggt

SEQ ID NO: 400882 - DNA, 75 bp, synthetic construct
  source 1..75: mol_type = other DNA
gccgccattgacggtttaattgataagctggcacgtcagttgaccaagcataaagataaattgaaacaacactaa

SEQ ID NO: 400883 - DNA, 75 bp, synthetic construct
  source 1..75: mol_type = other DNA
aaaacaaagataggtggtgtatctggaagctcggaaggaaaaagcttaagagatgcaactgaatttataatttta

SEQ ID NO: 400884 - DNA, 75 bp, synthetic construct
  source 1..75: mol_type = other DNA
acgagtacgactggctgagctcagatgccgctgtggatgaggccctgctcatcaacgaatacacctttaccgaag

SEQ ID NO: 400885 - DNA, 75 bp, synthetic construct
  source 1..75: mol_type = other DNA
tcagcacagtaattaacaaatcagctaaagccgatttatccggcgtaattatccacgccgttcatgaaattaagg

SEQ ID NO: 400886 - DNA, 75 bp, synthetic construct
  source 1..75: mol_type = other DNA
gaactggcctatgtgattaatggcaggttcctgagaaaagatattaagaaagataaaatcactgaccgggaaatg

SEQ ID NO: 400887 - DNA, 75 bp, synthetic construct
  source 1..75: mol_type = other DNA
aaccccgctaacctgaaacttatcggcgcattgctggaagatatggtgcaacatgtggaactttgcgatagcggg

SEQ ID NO: 400888 - DNA, 75 bp, synthetic construct
  source 1..75: mol_type = other DNA
cgctggaagttctacaaataaaaggagataagaagcgtccactctggcaggtctatcaggattgcttaaattttt

SEQ ID NO: 400889 - DNA, 75 bp, synthetic construct
  source 1..75: mol_type = other DNA
tttactttttcacgcccagtttaatggtgaaaaaataagtgcgggttcaatggcagataaacgacttggcacgtt

SEQ ID NO: 400890 - DNA, 75 bp, synthetic construct
  source 1..75: mol_type = other DNA
aaataagaactacgttaaggagctggaaagccagatttgcactgacttcattcaggtccgtggtcggtcagggaa

SEQ ID NO: 400891 - DNA, 75 bp, synthetic construct
  source 1..75: mol_type = other DNA
gtgcgcgccatgtatccgtacattgagcgtgaactcagccaggggacgtatctcggccatattacccggcatatg

SEQ ID NO: 400892 - DNA, 75 bp, synthetic construct
  source 1..75: mol_type = other DNA
ggatatgatgagatcaacctgaatgtcggctgcccgtctgaccgggtgcagaacggcatgtttggtgcgtgtctg

SEQ ID NO: 400893 - DNA, 75 bp, synthetic construct
  source 1..75: mol_type = other DNA
atatgacgaccgccgtcgccagtttgaagatcgtcgcagcagctggacgatcgccagcaccagcttaatcaggag

SEQ ID NO: 400894 - DNA, 75 bp, synthetic construct
  source 1..75: mol_type = other DNA
gcgcgttgctggaagatatggtgcaacatgtggagctttgcgatagcgggcatcaggccgttgaacgagcaaaac

SEQ ID NO: 400895 - DNA, 75 bp, synthetic construct
  source 1..75: mol_type = other DNA
gaaaacccggaaggcctggttgatttgatccataaactgcatggcagttgcggttatagcggcgtaccgcgaatg

SEQ ID NO: 400896 - DNA, 75 bp, synthetic construct
  source 1..75: mol_type = other DNA
tcgcgtcgtgacgcccgaagtcaacgaaattgtggtgaacccgaatgcgaccctcgactggcaactggcactacg

SEQ ID NO: 400897 - DNA, 75 bp, synthetic construct
  source 1..75: mol_type = other DNA
tttggctatatgtattcacgctcgttatttgtttggtttgtggttggtggcttttttggggacggtttatatttt

SEQ ID NO: 400898 - DNA, 75 bp, synthetic construct
  source 1..75: mol_type = other DNA
ggatgcttgagtcgggagacaatatttgcagtataccttccgtttcaggcgaagatcgtatattgcaagcaatga

SEQ ID NO: 400899 - DNA, 75 bp, synthetic construct
  source 1..75: mol_type = other DNA
ggggaatgcgattaaattcaccgagaatggcaacattgatattctggtagaaaaacgtgcgctgagtaataccaa

SEQ ID NO: 400900 - DNA, 75 bp, synthetic construct
  source 1..75: mol_type = other DNA
tctggttcagcggattctgccgccagggggacggagcctgttttgaaggacgctggcactggcagtcagcaacag

SEQ ID NO: 400901 - DNA, 75 bp, synthetic construct
  source 1..75: mol_type = other DNA
ctgggacggcaaaacagtcaagttgccgccgctgaagatgtgtgtttttgccgggaccaacccgttccaccgcca

SEQ ID NO: 400902 - DNA, 75 bp, synthetic construct
  source 1..75: mol_type = other DNA
tcatctgccagcgtttgatgacttctggaataacaaagagtacgtcgagtttgaccatccgcagatgtttgttcg

SEQ ID NO: 400903 - DNA, 75 bp, synthetic construct
  source 1..75: mol_type = other DNA
aataaagcagacgcgcgcagcagtttacttttgcaaaaagccctcactaaccggcaggaaaagatacgtgcaaat

SEQ ID NO: 400904 - DNA, 75 bp, synthetic construct
  source 1..75: mol_type = other DNA
cgggggctgaacgcgccctttacgctgcggcaaatcgacgaggccgaatttgaacagcggctgaatgcggtctgg

SEQ ID NO: 400905 - DNA, 75 bp, synthetic construct
  source 1..75: mol_type = other DNA
agctgatggaagatctcggttctgccgaggacttttttaccctcgccgaagaactgccggaaacggaagatctgc

SEQ ID NO: 400906 - DNA, 75 bp, synthetic construct
  source 1..75: mol_type = other DNA
gaattcacgaaggggcatggtacgatccggacaaaggcggcgagccaggggcgctgtgcaaatacggtaacccca

SEQ ID NO: 400907 - DNA, 75 bp, synthetic construct
  source 1..75: mol_type = other DNA
tcgacgccgccacgtccggcgggccagtacaggccaccacgacgctgatttataagatctaccgcgaaggcttta

SEQ ID NO: 400908 - DNA, 75 bp, synthetic construct
  source 1..75: mol_type = other DNA
aaatcagctacaactttctgttcttctatgccgcgctgcaatccattccccgttcgttgatcgaagccgcagcca

SEQ ID NO: 400909 - DNA, 75 bp, synthetic construct
  source 1..75: mol_type = other DNA
cggcgggttactacgcgtatctgtggacacaaatgctggcagacgatggttatcagtggtttgttgagcagggcg

SEQ ID NO: 400910 - DNA, 75 bp, synthetic construct
  source 1..75: mol_type = other DNA
atatcacgccatataagaaagatgcaaaaaaactaaaacatacgtctgtgtctgattttatttattatttaatga

SEQ ID NO: 400911 - DNA, 75 bp, synthetic construct
  source 1..75: mol_type = other DNA
ggagctttgcatgtgttgttatatttctgtgtctgaaatcatcaataaacaaccaggaaaaaatgcagtcattat

SEQ ID NO: 400912 - DNA, 75 bp, synthetic construct
  source 1..75: mol_type = other DNA
gaaaatgcgactttcactttcattgcaaaacctgttctcatagataaaggaaaacagacgtctggagcattcagc

SEQ ID NO: 400913 - DNA, 75 bp, synthetic construct
  source 1..75: mol_type = other DNA
accgcacggtatctttctggtgacggggccgacgggttccggcaaaagcaccacgctgtacgccggattgcagga

SEQ ID NO: 400914 - DNA, 75 bp, synthetic construct
  source 1..75: mol_type = other DNA
acgagtacgacaggctgacctctgatgccgctgtggatgaggcccttctcatcaacgaatacaccttcaccgaag

SEQ ID NO: 400915 - DNA, 75 bp, synthetic construct
  source 1..75: mol_type = other DNA
gcacctcatcgatatcgatccgattgacggcaccgatccggttgaaaacgcgcgtattattatcagcgagctgga

SEQ ID NO: 400916 - DNA, 75 bp, synthetic construct
  source 1..75: mol_type = other DNA
atgaagtttgttgatgaggcatcgattctggtcgttgcaggtgatggcggtaatggttgcgtgagcttccgccgc

SEQ ID NO: 400917 - DNA, 75 bp, synthetic construct
  source 1..75: mol_type = other DNA
gtgaacttcatcgtatcgcggatgccctgcaggcggtacagaagcgtaacttctggcagttacaggctgaaatca

SEQ ID NO: 400918 - DNA, 75 bp, synthetic construct
  source 1..75: mol_type = other DNA
ccgatgcggaagccgcagtcagcgaagccctgcgcgacctggccttctggttgtaccgtcaactggaaaacgagt

SEQ ID NO: 400919 - DNA, 75 bp, synthetic construct
  source 1..75: mol_type = other DNA
tgacaaccgatgcggaagccgcagtcagcgaagccctgcgcgacctggccttctggttgtaccgtcaaacaactg

SEQ ID NO: 400920 - DNA, 75 bp, synthetic construct
  source 1..75: mol_type = other DNA
ctcacggcaatgccggaaatatgtccgcccactggccgctggtcagttggttacccgagcgtaatttcaacgttt

SEQ ID NO: 400921 - DNA, 75 bp, synthetic construct
  source 1..75: mol_type = other DNA
agaattgaaaattgtagtgtgaagacagtgtatacccatcggcggaatgcagaggccaagctgtactcaaaatta

SEQ ID NO: 400922 - DNA, 75 bp, synthetic construct
  source 1..75: mol_type = other DNA
atggcacggctggatatcgccgaaaagcgcgtaccgcaggatggacgtattgcgctgctgctgggcggtcgggcg

SEQ ID NO: 400923 - DNA, 75 bp, synthetic construct
  source 1..75: mol_type = other DNA
atagtagcgaataaacgcattaataagaacgcagcaatcaatatattaacagtgattcgcacccagatgaatgtg

SEQ ID NO: 400924 - DNA, 75 bp, synthetic construct
  source 1..75: mol_type = other DNA
aatgggaacataaacaagtagcatataatcgcaagatgaaccgcgaatttgacttcggtgtcgcagagcgtgatt

SEQ ID NO: 400925 - DNA, 75 bp, synthetic construct
  source 1..75: mol_type = other DNA
cgcccactggccgctggtcagttggttacccgaacgtaatttcaatgtttttatgtttgattatcgtggattcgg

SEQ ID NO: 400926 - DNA, 75 bp, synthetic construct
  source 1..75: mol_type = other DNA
ggtaaggcgaaaggcgcaaccggtcgcccggtggcgttgctggcacagttcctgctaaaccgcgccgggtttaac

SEQ ID NO: 400927 - DNA, 75 bp, synthetic construct
  source 1..75: mol_type = other DNA
tatggtggtgatcattcattggttaagaagccaatatcagttataaaagaggactatttttttactgtctgcagg

SEQ ID NO: 400928 - DNA, 75 bp, synthetic construct
  source 1..75: mol_type = other DNA
gtgattcagcgtgtcgaaatgtacaacgcatcgcttcccgttccgctttcaccggctgaatgtcgggctattggc

SEQ ID NO: 400929 - DNA, 75 bp, synthetic construct
  source 1..75: mol_type = other DNA
atacgccgccgccatcgagaatgcgctgcgtaaaaaattgggcgcagatgcggggtattcagggctaatttgcaa

SEQ ID NO: 400930 - DNA, 75 bp, synthetic construct
  source 1..75: mol_type = other DNA
cagaaggcatggatgagatgaagtacgatatgtgcggtgcggcagcggtttacggcgtgatgcggatggtcgcgg

SEQ ID NO: 400931 - DNA, 75 bp, synthetic construct
  source 1..75: mol_type = other DNA
ttcgcaaaacgaatcgctgatgtcggtgattgagtacaaaggcaacgcgtcggaagatgcacgcccaatcgtgct

SEQ ID NO: 400932 - DNA, 75 bp, synthetic construct
  source 1..75: mol_type = other DNA
acgaacttagcccggcagtgtataacgcactggtgcaggccaaaacggcactggaaaatagcacgctggatacca

SEQ ID NO: 400933 - DNA, 75 bp, synthetic construct
  source 1..75: mol_type = other DNA
ctggggctgatccgcgcggtagagaagtttgacccggaacgtggtttccgcttctcaacatacgcaacctggtag

SEQ ID NO: 400934 - DNA, 75 bp, synthetic construct
  source 1..75: mol_type = other DNA
caataatgatccgcttatgtaaactcatgcagcatggaaacctgattgccagtatatctcagtcggcactcgcag

SEQ ID NO: 400935 - DNA, 75 bp, synthetic construct
  source 1..75: mol_type = other DNA
aactgccacctgttcgaaatgacgcgcaaatgggcttacagggcgattcgtcagggctggccagcattctcacag

SEQ ID NO: 400936 - DNA, 75 bp, synthetic construct
  source 1..75: mol_type = other DNA
aatgataatccttactcagaatctttgttccggactctcaaatattgtccctggtggcctgagaacggttttcgc

SEQ ID NO: 400937 - DNA, 75 bp, synthetic construct
  source 1..75: mol_type = other DNA
atgttcatccaacaatctgtactccattctgataacgatggtcccatgcgcagttatacgttgttggcgaaaatg

SEQ ID NO: 400938 - DNA, 75 bp, synthetic construct
  source 1..75: mol_type = other DNA
gaacgcccccgcgccgaacatcaccgtaaaaaatcccgtgaacggtcacgcacacctgctctacgcactcaatat

SEQ ID NO: 400939 - DNA, 75 bp, synthetic construct
  source 1..75: mol_type = other DNA
cacaaacgccaccagcatttcatactctgcgcgggtcagtttaatcggctctccatcccgctccagcgtatggcg

SEQ ID NO: 400940 - DNA, 75 bp, synthetic construct
  source 1..75: mol_type = other DNA
tgcaatggagcaacggaaaacctctcaatgtattgttgatgcccggcccggacaacgccgggggtagtaaggaga

SEQ ID NO: 400941 - DNA, 75 bp, synthetic construct
  source 1..75: mol_type = other DNA
atgaaaataatacttctgtttttggcgttttttgcaagcttcactactcaagcccaatcatcctcgctgactgta

SEQ ID NO: 400942 - DNA, 75 bp, synthetic construct
  source 1..75: mol_type = other DNA
gatcaaatggtctggcagggggaactggcggttgggagcaggctatcaggcaattacaggggcaatcggtgtctg

SEQ ID NO: 400943 - DNA, 75 bp, synthetic construct
  source 1..75: mol_type = other DNA
gggaagagtgattatggccgccagcgatcaaatggtctggcagggggaactggccgtcgaacaggcaatcagaca

SEQ ID NO: 400944 - DNA, 75 bp, synthetic construct
  source 1..75: mol_type = other DNA
accgtggtatcgttttatctgtcgcatcaggtataccgaggcctgaagcgagggagagtcattatggctgccagc

SEQ ID NO: 400945 - DNA, 75 bp, synthetic construct
  source 1..75: mol_type = other DNA
tggcttgatgccgtgattcagcgtgtcgaaatgtacaacgcatcgcttctcgttccgctttcaccggctgaatgt

SEQ ID NO: 400946 - DNA, 75 bp, synthetic construct
  source 1..75: mol_type = other DNA
atcatttcagataatcaagcaatagctgattatgtggaaaataagtacaataaaaaaagtgtagttatagcttat

SEQ ID NO: 400947 - DNA, 75 bp, synthetic construct
  source 1..75: mol_type = other DNA
agccaaaggggctggctatgaggataagcgcagcaccgcgctggaaatgttggtgaatgggtgtactcaaaaggc

SEQ ID NO: 400948 - DNA, 75 bp, synthetic construct
  source 1..75: mol_type = other DNA
agtgaactatttgagcatattgccgattatagctggccctggacatgggttgtttccgacacttatcgtcaggcc

SEQ ID NO: 400949 - DNA, 75 bp, synthetic construct
  source 1..75: mol_type = other DNA
actgacgccgatcatgccgatgccgttgtgcgctttcgtatctttaaagatgataaagaaaagaccacgcagaca

SEQ ID NO: 400950 - DNA, 75 bp, synthetic construct
  source 1..75: mol_type = other DNA
atgagcgccgcgcttcaatacttcgacgaaaatttaccccatcgtccctatcacacggatgatctcgctttcggc

SEQ ID NO: 400951 - DNA, 75 bp, synthetic construct
  source 1..75: mol_type = other DNA
catgcagcatgggaatctgatagccagtatatctcagtcagcactcgcagaagagcttggtatgagcaaatctaa

SEQ ID NO: 400952 - DNA, 75 bp, synthetic construct
  source 1..75: mol_type = other DNA
gcatacgatgcaggttatagcggaaccagtatgacgggcgggaaaggtgctgatggggtttgtattatcgaggag

SEQ ID NO: 400953 - DNA, 75 bp, synthetic construct
  source 1..75: mol_type = other DNA
gaaacaaaacggatcagggtcacaataacgggcggcggtggcggaggggggggctgccaggctatatccagtaac

SEQ ID NO: 400954 - DNA, 75 bp, synthetic construct
  source 1..75: mol_type = other DNA
aaacacaaacggtggttacggaggcgtaccgaatattggcgatatccgcatcactggtggagatggaggcgacgg

SEQ ID NO: 400955 - DNA, 75 bp, synthetic construct
  source 1..75: mol_type = other DNA
agaaatgcagatttaatgcaagaaaaaaacattacagaaagagttttatccatatttaaaataaaacgagatttt

SEQ ID NO: 400956 - DNA, 75 bp, synthetic construct
  source 1..75: mol_type = other DNA
atgcgctggactctgtagagataggactagaatatttcagaaaatcccgggaaagccagaaccgacgtgattaca

SEQ ID NO: 400957 - DNA, 75 bp, synthetic construct
  source 1..75: mol_type = other DNA
tcccatctggctcaggattttgaagtcaatcgtaaaaatggttccggaaaaaagaccattaaagccccgactggc

SEQ ID NO: 400958 - DNA, 75 bp, synthetic construct
  source 1..75: mol_type = other DNA
acagtaaagttgctggctgtttaatcgcggtttctgaactcacaaaaaagaagaataaaaaaaagatcagggtac

SEQ ID NO: 400959 - DNA, 75 bp, synthetic construct
  source 1..75: mol_type = other DNA
tctcggtttagcattgctcctatgctcgactggacggacagacattgccgttatttcctgcgtctgctttcccgc

SEQ ID NO: 400960 - DNA, 75 bp, synthetic construct
  source 1..75: mol_type = other DNA
atgcacgataatcatgaaacacaaaaaattaatcaaaccagcgtgatgcctgaaaaaactgacgttcactggagt

SEQ ID NO: 400961 - DNA, 75 bp, synthetic construct
  source 1..75: mol_type = other DNA
gggcggtaaacttgacctcaatggtacaagtgcgactttccacaagttaaaggccgccgattacggtgcagtgct

SEQ ID NO: 400962 - DNA, 75 bp, synthetic construct
  source 1..75: mol_type = other DNA
cgggcggtagagcaaacaactgggctgttataccactgagttttgttcatcaaaaaatgactgaagatgatggtc

SEQ ID NO: 400963 - DNA, 75 bp, synthetic construct
  source 1..75: mol_type = other DNA
gttagtggtgcgtacttagataaagtgcgataccctgttttttatcgcctgggctcgggtaatcaatacattaaa

SEQ ID NO: 400964 - DNA, 75 bp, synthetic construct
  source 1..75: mol_type = other DNA
aattcagggtcataaagacactgtcgcaaaagtcatggactggtataacccacaaaaaacgcatttggtatcatg

SEQ ID NO: 400965 - DNA, 75 bp, synthetic construct
  source 1..75: mol_type = other DNA
gtgtacctctcgtgccattagcgccgctttaccgctggtgccgcaggtcagtttcgccgatcttgacggaccgac

SEQ ID NO: 400966 - DNA, 75 bp, synthetic construct
  source 1..75: mol_type = other DNA
atccccgatggcgaacacattgacgctttttccgatcgtcatggtgatgtttatcgcgaacaagcggtagatttt

SEQ ID NO: 400967 - DNA, 75 bp, synthetic construct
  source 1..75: mol_type = other DNA
gggcgaatattcttgctgttattggtcagggtgatcatgaaggcactccacatttgcctcttatgcaaccatcgc

SEQ ID NO: 400968 - DNA, 75 bp, synthetic construct
  source 1..75: mol_type = other DNA
tcatccgttaccgatttgtgctgatgaaagttgtcatactcgtagcaatctgaaggcgctgaaagggcgctatga

SEQ ID NO: 400969 - DNA, 75 bp, synthetic construct
  source 1..75: mol_type = other DNA
aggctggcgagtagtaagccgcgtgcaggttaaaagtaaccctcagcgtctgttaaggcgttcagtgaaaaaagg

SEQ ID NO: 400970 - DNA, 75 bp, synthetic construct
  source 1..75: mol_type = other DNA
ctaacggactattgccaatgttcacctgtcactcccgttccagaaataaaaggctggcgagtagtaagccgcgtg

SEQ ID NO: 400971 - DNA, 75 bp, synthetic construct
  source 1..75: mol_type = other DNA
ctatctgccagaaaacttgtttgctcccgccccgcaaagccgcatggatggtgaatgggatgagcgcgatatggt

SEQ ID NO: 400972 - DNA, 75 bp, synthetic construct
  source 1..75: mol_type = other DNA
atagaaaaataactccagaaaatactcctccaatgttgttatcatacagaaatgcagatttaacgcaagaaaaaa

SEQ ID NO: 400973 - DNA, 75 bp, synthetic construct
  source 1..75: mol_type = other DNA
actgcttatcatcaattaacaatgcattaaacatacaaaaaacatcatattctctgaccaaaatggatcagacag

SEQ ID NO: 400974 - DNA, 75 bp, synthetic construct
  source 1..75: mol_type = other DNA
aattcaaggccatcaaaacacagttgccagtgtcatggattggtataatccccaaaaaaatgctttgggtataac

SEQ ID NO: 400975 - DNA, 75 bp, synthetic construct
  source 1..75: mol_type = other DNA
tgcagaaaccatcagtaacggcgaagccggctgctttatgcatgggccaacttttatgggcaatccgctggcctg

SEQ ID NO: 400976 - DNA, 75 bp, synthetic construct
  source 1..75: mol_type = other DNA
cgcagcagcaaacgccagcctggcgattcttgaatctggcgactggcagcatcaggtggcggctattgaagcgca

SEQ ID NO: 400977 - DNA, 75 bp, synthetic construct
  source 1..75: mol_type = other DNA
cggtatgaataaagaaagtgaaatcattgatgaattaatcgaagatgagcgccatgattgcgatgcgccggaagt

SEQ ID NO: 400978 - DNA, 75 bp, synthetic construct
  source 1..75: mol_type = other DNA
acaacgttttcgagctattacgattttggtacggagtattacgcaggatctaaggttggcggcgaatcttatacg

SEQ ID NO: 400979 - DNA, 75 bp, synthetic construct
  source 1..75: mol_type = other DNA
gcgcgattggcgcaatatggcaaaagccattattaatggcgatattccttttactaattacaatggtgatgagta

SEQ ID NO: 400980 - DNA, 75 bp, synthetic construct
  source 1..75: mol_type = other DNA
aaaaaggcagtatacagaaagaaaatgctattgaatggggcttttataattattatttatacgttgatccgaaag

SEQ ID NO: 400981 - DNA, 75 bp, synthetic construct
  source 1..75: mol_type = other DNA
ctggagatgcagaagaaaaatgccgagaaacaggcgatggaagataataaatccgacatcggctggggcagccag

SEQ ID NO: 400982 - DNA, 75 bp, synthetic construct
  source 1..75: mol_type = other DNA
gtaccgaatctgcggtgcgtattacccacatcccgacagggattgtgactcagtgccagaacgaccgttcccagc

SEQ ID NO: 400983 - DNA, 75 bp, synthetic construct
  source 1..75: mol_type = other DNA
ggcgaaatgccggtggcaattgtcgaaaacggaacggcagtcacgcagcgcgtgattgacggtacgctcacgcag

SEQ ID NO: 400984 - DNA, 75 bp, synthetic construct
  source 1..75: mol_type = other DNA
cgtgattgacggtacgctcatgcaattagctgaacttgcgcaacaaatgaatagcccatcgctgattattattgg

SEQ ID NO: 400985 - DNA, 75 bp, synthetic construct
  source 1..75: mol_type = other DNA
ccggttgctctgcttattcaggtattccgctaacgcatcgcgattatgcccagagcgtacgtttgatcaccgggc

SEQ ID NO: 400986 - DNA, 75 bp, synthetic construct
  source 1..75: mol_type = other DNA
gaagatgcggcaaaagaaattaattttaaccgcgacaacgaattttcatgcgattatcgcaacatggcgcaagct

SEQ ID NO: 400987 - DNA, 75 bp, synthetic construct
  source 1..75: mol_type = other DNA
ggcgcttggcttacagcgggcgcagaaggcattgtgttatgtaccaatacgatgcacaaagtggcggatgctata

SEQ ID NO: 400988 - DNA, 75 bp, synthetic construct
  source 1..75: mol_type = other DNA
ctgggatgtgcatattgaccttcggggggataagattggctgtaaatccttagggagtgacacaagctcagtaca

SEQ ID NO: 400989 - DNA, 75 bp, synthetic construct
  source 1..75: mol_type = other DNA
ttgatggctaatacgtggcgctttatacgtttctctgaaaaggatgatgacggtatgaataaagaaagtgaagtt

SEQ ID NO: 400990 - DNA, 75 bp, synthetic construct
  source 1..75: mol_type = other DNA
aagcaggtccggaagatgacttcagtcttctgcttccgtccgttggtgggcaattgtccgatccgggtaatatca

SEQ ID NO: 400991 - DNA, 75 bp, synthetic construct
  source 1..75: mol_type = other DNA
aatgatctcgcattacagatccgatattataaagaaaaaaacattggttttaatgatggtgctgttactcgcgag

SEQ ID NO: 400992 - DNA, 75 bp, synthetic construct
  source 1..75: mol_type = other DNA
agttcagttaaaaagtttattacttttcagccacaacaatataaatattctactattattaaaacatttgttaag

SEQ ID NO: 400993 - DNA, 75 bp, synthetic construct
  source 1..75: mol_type = other DNA
acaaagccgatgacattcaggacgactgggatgccttcgaccgcgcggtcgacagcaattacggtgttgaccagg

SEQ ID NO: 400994 - DNA, 75 bp, synthetic construct
  source 1..75: mol_type = other DNA
atgcagaaaaaatatatttcgcgcacgctgattgcttccgccgttttattttcttttaatgcgatggcagcaacg

SEQ ID NO: 400995 - DNA, 75 bp, synthetic construct
  source 1..75: mol_type = other DNA
tggaaaccgccggacagaaatggtcactgggcttcacgcccaaataccagcgcgtggatctgttcaactacaacg

SEQ ID NO: 400996 - DNA, 75 bp, synthetic construct
  source 1..75: mol_type = other DNA
cgatttggcgcaggccatgagtccgggtttgtttatcatcacgccaggcgtatgatcggctctagcctggcggga

SEQ ID NO: 400997 - DNA, 75 bp, synthetic construct
  source 1..75: mol_type = other DNA
gtaggtgataagcctcctgttaatgtgtggcttgattgcgtaggtttgacaagtggaactattcttgatgtcgtc

SEQ ID NO: 400998 - DNA, 75 bp, synthetic construct
  source 1..75: mol_type = other DNA
tactgaatggaagccaggagaaaagcctccgtgcggcgtgtggcttgattgttattatcctgatggctatcacat

SEQ ID NO: 400999 - DNA, 75 bp, synthetic construct
  source 1..75: mol_type = other DNA
ggcgtttcgattctggtgccgctgatcccggcgatcattatgatctccaccaccatcgccaatatctggctggta

SEQ ID NO: 401000 - DNA, 75 bp, synthetic construct
  source 1..75: mol_type = other DNA
atgaaattacggatagtgatgccactggtactgtctgctgccgcactaacaggatgccagcagctcaacgacggc

SEQ ID NO: 401001 - DNA, 75 bp, synthetic construct
  source 1..75: mol_type = other DNA
tgaaatacttcttacgtaaagaaattgccaggcttgaagatgcagactcacaatcatcagaaattccgttcggaa

SEQ ID NO: 401002 - DNA, 75 bp, synthetic construct
  source 1..75: mol_type = other DNA
gtgcaacgcaaacattccgttctcagtggttccgggcattaccgccgcttccggttgctctgcttattcaggtat

SEQ ID NO: 401003 - DNA, 75 bp, synthetic construct
  source 1..75: mol_type = other DNA
tgtcgaatgctgggccagcgatgtaccggatggcaaagtgaccgattttcgtatggcggtgaaagcggaagagaa

SEQ ID NO: 401004 - DNA, 75 bp, synthetic construct
  source 1..75: mol_type = other DNA
ctgggaagcgaaaagcgactgggaaatctacaaagccatcgcgaagaaattctccgaagtgtgcgtcggccatct

SEQ ID NO: 401005 - DNA, 75 bp, synthetic construct
  source 1..75: mol_type = other DNA
ctcgatatgaactatcgtggtctgatcaacatgctgattttctgcggctgtgtcggtcagagcgggggcggctgg

SEQ ID NO: 401006 - DNA, 75 bp, synthetic construct
  source 1..75: mol_type = other DNA
ttgcatttgccgctctgttggcgctctcctcccccgtacttgctggcaaacttgccatcgtcattgatgattttg

SEQ ID NO: 401007 - DNA, 75 bp, synthetic construct
  source 1..75: mol_type = other DNA
atgaaactgacaacacatcatctacgggcgggggccgcattattactggcaggttgcgaccagagcagcagcgat

SEQ ID NO: 401008 - DNA, 75 bp, synthetic construct
  source 1..75: mol_type = other DNA
ctgcggcggtcgatccggcctgggaagcgaaaagcgactgggaaatctacaaagccatcgcgaagaaattctccg

SEQ ID NO: 401009 - DNA, 75 bp, synthetic construct
  source 1..75: mol_type = other DNA
ccaatgtattccagcatcgcccttttcttgaacaggataatcaggcgcacggttataaactggtggcggtgggaa

SEQ ID NO: 401010 - DNA, 75 bp, synthetic construct
  source 1..75: mol_type = other DNA
aggatctgcttaagcacgatccgcaggcgcagaagctgcgtcggcagaaaatccagattgtcttccagaaccctt

SEQ ID NO: 401011 - DNA, 75 bp, synthetic construct
  source 1..75: mol_type = other DNA
aggcgctactttccgcgacgccgcgcctgaatccggacgatcgccgcgagcgcatcaagctcaccggtgaactgc

SEQ ID NO: 401012 - DNA, 75 bp, synthetic construct
  source 1..75: mol_type = other DNA
aagctggatctggtggttacgctggacttccgtctgtcgagcacctgtctctattccgacatcattttgccgacg

SEQ ID NO: 401013 - DNA, 75 bp, synthetic construct
  source 1..75: mol_type = other DNA
tgattggcggtacttgcttaagcttctacgactggtactgcgacttgcctcctgcgtctccgcaaacctggggcg

SEQ ID NO: 401014 - DNA, 75 bp, synthetic construct
  source 1..75: mol_type = other DNA
tcacgtcgctttataaccaaggatgtttaggggagtttgtcaatgcgcttgtggaaaaggaggacatttatctga

SEQ ID NO: 401015 - DNA, 75 bp, synthetic construct
  source 1..75: mol_type = other DNA
gtttatgctaatcgcttctttgaagtattaagcgaaagcatcagccagagcacgctgatcgtttacttccagcat

SEQ ID NO: 401016 - DNA, 75 bp, synthetic construct
  source 1..75: mol_type = other DNA
ctgaggcaccaaataaaaaaattaattggaaaatcatccggctcagcaaccggtgttggtgtaaaagtctactca

SEQ ID NO: 401017 - DNA, 75 bp, synthetic construct
  source 1..75: mol_type = other DNA
aaaaaccaccgttccgggtattgcttatactgttgaattaatttgtgatacctgtcctgaagtagtcgacttacg

SEQ ID NO: 401018 - DNA, 75 bp, synthetic construct
  source 1..75: mol_type = other DNA
atgcgtccggttccgccattgtactcgtgcaagagtctgcggctgatggctattgtttacaaattatggtcaaag

SEQ ID NO: 401019 - DNA, 75 bp, synthetic construct
  source 1..75: mol_type = other DNA
cagacgctggtgttctatatggggttgaatcaggccgcgactattcagcaaaagctgattgaacacggaatgcca

SEQ ID NO: 401020 - DNA, 75 bp, synthetic construct
  source 1..75: mol_type = other DNA
ggtacctatagtgttccaacacgcctcaactctacagtgacagaactagccgatgcaacctgggacgttcccatt

SEQ ID NO: 401021 - DNA, 75 bp, synthetic construct
  source 1..75: mol_type = other DNA
aaagatggtagtaatggcacaattagcccgggggattttaccggtaatgcgacattctctttttcctatgaataa

SEQ ID NO: 401022 - DNA, 75 bp, synthetic construct
  source 1..75: mol_type = other DNA
cacgctgatcgtttacttccagcatcagtggcaaggctggggcaaacagcccgaagcggcaaaacttaacgctag

SEQ ID NO: 401023 - DNA, 75 bp, synthetic construct
  source 1..75: mol_type = other DNA
aagcggacattcgcgtgcagtttaatcgcgccattgatctggcccgtcgtaacggttcaaccatcgccattggtc

SEQ ID NO: 401024 - DNA, 75 bp, synthetic construct
  source 1..75: mol_type = other DNA
cgcacgccagagagatggcgaccaaagcgcataacagcggtcacgaagtgttgattcatctaccgatggcaccac

SEQ ID NO: 401025 - DNA, 75 bp, synthetic construct
  source 1..75: mol_type = other DNA
ccgcgccgtcgacacggtttctggttactggtaaccaccgcgattgccaccagcctggatgccatggctgtgggt

SEQ ID NO: 401026 - DNA, 75 bp, synthetic construct
  source 1..75: mol_type = other DNA
ggttgtgcaaccttgattatgtcgacattagggatgatggttggtcgctttatcggctcaattattgggaaaaaa

SEQ ID NO: 401027 - DNA, 75 bp, synthetic construct
  source 1..75: mol_type = other DNA
gctcaattattgggaaaaaagcggaaattctcggcgggctggtgctgatcggcatcggcgtccagatcctctgga

SEQ ID NO: 401028 - DNA, 75 bp, synthetic construct
  source 1..75: mol_type = other DNA
gagaaaaacgagagcaggtaaaggagagctttcgccgcaatgaagacctgaccccgcttgtacgccttgcccagg

SEQ ID NO: 401029 - DNA, 75 bp, synthetic construct
  source 1..75: mol_type = other DNA
gcgaaaactgacttttagtattgaaacggtggttgacgacacacctggcgaagtcgcgttcgtgcacactcctgt

SEQ ID NO: 401030 - DNA, 75 bp, synthetic construct
  source 1..75: mol_type = other DNA
ttttaattttcctaaattagagcctttattctcatatattaataacataatgactcatactatcgtttacgcaag

SEQ ID NO: 401031 - DNA, 75 bp, synthetic construct
  source 1..75: mol_type = other DNA
tcgctccattgaagaagcggcgatggatctcggcgcgacgccgctgaaggtgtttttcgtcattacactaccgat

SEQ ID NO: 401032 - DNA, 75 bp, synthetic construct
  source 1..75: mol_type = other DNA
ggtgtgggccggctggtcaacgcgctggtatggtgagttattgcgcgatgacgcgatgatgagtgcggttggttt

SEQ ID NO: 401033 - DNA, 75 bp, synthetic construct
  source 1..75: mol_type = other DNA
atgaaggaaattacattacacgaagccgctgaacgtgcgcaccagacagaaattatttgccgccttcttgaggta

SEQ ID NO: 401034 - DNA, 75 bp, synthetic construct
  source 1..75: mol_type = other DNA
gaagactcatacagcggtgattgcggagaggatgcgaccggtgcgtcaactgatattccgataatgcaggaagat

SEQ ID NO: 401035 - DNA, 75 bp, synthetic construct
  source 1..75: mol_type = other DNA
gctacgcgctggcgatggtgcggcaaagtgataactcgtttgtattgctggcgacacaacgtaatttgctgatgt

SEQ ID NO: 401036 - DNA, 75 bp, synthetic construct
  source 1..75: mol_type = other DNA
ctggcgataaactcccgaaccgggcgtacgcaaaaccatttccatattcatatttcttgtattcgtcctgatgtg

SEQ ID NO: 401037 - DNA, 75 bp, synthetic construct
  source 1..75: mol_type = other DNA
atggtcattaattacaagcagttaagagaaaaacgggagcaggtaaaggagagctttcgccgcaatgaagatctg

SEQ ID NO: 401038 - DNA, 75 bp, synthetic construct
  source 1..75: mol_type = other DNA
gtgagagcggggatggcagcgggctggttaacctctccgatgggtacggagaagaggacaatggggaggatggcc

SEQ ID NO: 401039 - DNA, 75 bp, synthetic construct
  source 1..75: mol_type = other DNA
ctcttgagatgtttcgcgatgaatttatcggtgatttactgcaggcgttaccccatccggaactggactatgacc

SEQ ID NO: 401040 - DNA, 75 bp, synthetic construct
  source 1..75: mol_type = other DNA
ctttggcaggtttcgcggatcaaatggttttgcctttatgatcaccgcgccgctggtaatgccagatgtcatcac

SEQ ID NO: 401041 - DNA, 75 bp, synthetic construct
  source 1..75: mol_type = other DNA
gaaattctcgcggcgctggaaagcgttggcgaaaccaaatgtatctgtcgtaatgaatatgctgttcatgagcaa

SEQ ID NO: 401042 - DNA, 75 bp, synthetic construct
  source 1..75: mol_type = other DNA
atgaatattagcgaagcagaactggcatttgcacgcgtcacgcacgatgcgtggcggatgcgcggcgatatccgt

SEQ ID NO: 401043 - DNA, 75 bp, synthetic construct
  source 1..75: mol_type = other DNA
cagattttcactggtgtggttgaaaaggtggtgccgatgaaaggctggctgaatattttcaacccaacatttact

SEQ ID NO: 401044 - DNA, 75 bp, synthetic construct
  source 1..75: mol_type = other DNA
ccgaatcggttgcgttcggtgatccggcgatcttccccgccctggaagctttgcgacagatcggtgtgcgcttcg

SEQ ID NO: 401045 - DNA, 75 bp, synthetic construct
  source 1..75: mol_type = other DNA
gctggattttcagtaagtctctgggggttgatgaatccaccgtggcaatcgttgttatggcgaccatgctgctgc

SEQ ID NO: 401046 - DNA, 75 bp, synthetic construct
  source 1..75: mol_type = other DNA
tgctttttggtatttacctggcggccattgtggggctggttatcaagcctttcccggaacctgtcgtactgttaa

SEQ ID NO: 401047 - DNA, 75 bp, synthetic construct
  source 1..75: mol_type = other DNA
gtggcggatgcgtggcaatattcgtgaaattctggcggcactggaaagcgttggcgaaaccaaatgcatttgccg

SEQ ID NO: 401048 - DNA, 75 bp, synthetic construct
  source 1..75: mol_type = other DNA
ttagtcaaagcctttgccaaaaccgataaagattcgcttttttggggcgaacagaccatcgaacgtaaaaacgtt

SEQ ID NO: 401049 - DNA, 75 bp, synthetic construct
  source 1..75: mol_type = other DNA
atcacgtgggtgaatgggcatctctgcgcaatacgtcgccggaaatagccgaggccatttttgaagtcgccgggt

SEQ ID NO: 401050 - DNA, 75 bp, synthetic construct
  source 1..75: mol_type = other DNA
cttttaatctggtggcagatgatttggcctgcaaagtctccaacagcgcactggcgcagattctggattctgccc

SEQ ID NO: 401051 - DNA, 75 bp, synthetic construct
  source 1..75: mol_type = other DNA
aagtggtgccaatgaaaggttggctgaatattttcaacccgacgtttactcttcatctattagaagagagcattg

SEQ ID NO: 401052 - DNA, 75 bp, synthetic construct
  source 1..75: mol_type = other DNA
ggcctgcaaagtatctggtagtgcgctggcgcagattctggaatctgcacagcaggatggcaatgaaatcatggt

SEQ ID NO: 401053 - DNA, 75 bp, synthetic construct
  source 1..75: mol_type = other DNA
tttgcccaaccagcaggaaaaccaaaacccgtcgccatgtgcggaagtcaaacccaacgccggatacgtggtttt

SEQ ID NO: 401054 - DNA, 75 bp, synthetic construct
  source 1..75: mol_type = other DNA
ggtgttaactgtacaggctcctgcagctggaaaatctacgttaaaaatggtctggtgacctgggaaaaccaacag

SEQ ID NO: 401055 - DNA, 75 bp, synthetic construct
  source 1..75: mol_type = other DNA
ggtgttaactgtacaggctcctgcagctggaaaatctacgttaaaaatggtctggtaacctgggaaagccaacag

SEQ ID NO: 401056 - DNA, 75 bp, synthetic construct
  source 1..75: mol_type = other DNA
ggtgttaactgtacaggctcctgcagctggaaaatctacgttaaaaaaggtctggtgacctgggaaatccaacag

SEQ ID NO: 401057 - DNA, 75 bp, synthetic construct
  source 1..75: mol_type = other DNA
cgttggcgctgctgtatggttctgcgtcggtagtctcgttcctgtacgcgctggactgtttcctgccgctttatc

SEQ ID NO: 401058 - DNA, 75 bp, synthetic construct
  source 1..75: mol_type = other DNA
ggcctttgcgctcgactggaaccgaccaccgcgccagatgaacagcacctcgtttttctacaatcactccagcca

SEQ ID NO: 401059 - DNA, 75 bp, synthetic construct
  source 1..75: mol_type = other DNA
ggtgttaactgtacaggctcctgcagctggaaaatctacgttaaaaagggtctggtaacctgggaaatccaacag

SEQ ID NO: 401060 - DNA, 75 bp, synthetic construct
  source 1..75: mol_type = other DNA
ccggaacttgttgaacgggaacagcctgaacacctgcgcgaatatttccatgaacggctccgcgtacatcgactg

SEQ ID NO: 401061 - DNA, 75 bp, synthetic construct
  source 1..75: mol_type = other DNA
gaaacagaagaaagttacggtcccagatacaggcttctgaaactgaagatgtcactgccggccaggaaaggaatt

SEQ ID NO: 401062 - DNA, 75 bp, synthetic construct
  source 1..75: mol_type = other DNA
ctaacaaagccgatgacattcaggatgactgggatgccttcgaccgcgcggtcgacagcaattacggtgttgacc

SEQ ID NO: 401063 - DNA, 75 bp, synthetic construct
  source 1..75: mol_type = other DNA
tccgcaaaagtgcctgagctacaaacaagtgcgtggacgcggcggctttatccgctccaactggcaggagctaaa

SEQ ID NO: 401064 - DNA, 75 bp, synthetic construct
  source 1..75: mol_type = other DNA
tccagcacctgcctgttctccgatatcgttctgcccaccgccacctggtacgaaaaagacgatatgaatacctcg

SEQ ID NO: 401065 - DNA, 75 bp, synthetic construct
  source 1..75: mol_type = other DNA
cttcgccagtatttccgtgaacggcttgacgttcatcggcagaacagtcagcagctgccgcgcgcaaatgcgccc

SEQ ID NO: 401066 - DNA, 75 bp, synthetic construct
  source 1..75: mol_type = other DNA
tcgagattagctgccctatagactttgaacggcgaaaacggctggggcagtacttcacgggtaccggccttggtc

SEQ ID NO: 401067 - DNA, 75 bp, synthetic construct
  source 1..75: mol_type = other DNA
ggctggcatgggaactggctgagtctgccggctgtgctgaagaaattgccatggacagggaaagtgacctgtcgg

SEQ ID NO: 401068 - DNA, 75 bp, synthetic construct
  source 1..75: mol_type = other DNA
agctacggggcgaactgacttttattgagaaggcgcagggaattcacaaggctcgacttatttatgaggaatctc

SEQ ID NO: 401069 - DNA, 75 bp, synthetic construct
  source 1..75: mol_type = other DNA
atatctgtacccctggatccccgacctgatggagtcggggctgggaggtccgcaggtcagaaacctgcttgcgtt

SEQ ID NO: 401070 - DNA, 75 bp, synthetic construct
  source 1..75: mol_type = other DNA
cctgaggcgcgggaacatatgggaagctacgggctggcgatggtacggcagagtgataactcatttgtattgctg

SEQ ID NO: 401071 - DNA, 75 bp, synthetic construct
  source 1..75: mol_type = other DNA
actgccaggtggtttgcgtgggcatgaatacctggcgcgtcgggtaacggaaagcgaactggtacaacgcagccc

SEQ ID NO: 401072 - DNA, 75 bp, synthetic construct
  source 1..75: mol_type = other DNA
ttggcgatcaactcccgcaccgggcgtacgcaaaaccattttcatattcatatttcttgtattcgtcctgatgtg

SEQ ID NO: 401073 - DNA, 75 bp, synthetic construct
  source 1..75: mol_type = other DNA
tattagtccacaagcgatggcgattcatcgcatcaccgaagccatggtcgccgataaaccgtggattgaagatgt

SEQ ID NO: 401074 - DNA, 75 bp, synthetic construct
  source 1..75: mol_type = other DNA
cctatggtgggatctggagacctacttgcctcttgtatagagattgatgctaaacctgctgtaatggcaggtatc

SEQ ID NO: 401075 - DNA, 75 bp, synthetic construct
  source 1..75: mol_type = other DNA
caaatctggctccgagatgcgtctaaacatgaaacgggccttgttagcactcgtccaatttctctaaatcactct

SEQ ID NO: 401076 - DNA, 75 bp, synthetic construct
  source 1..75: mol_type = other DNA
tttaccgtattcatgtgctgttcaaaccctggccgggacggcttcagtgtgtgattggtcatctggcggaaaatg

SEQ ID NO: 401077 - DNA, 75 bp, synthetic construct
  source 1..75: mol_type = other DNA
ccgttatcagatactgacggaactgtggcaggaaacgggggaagagcggtttttccgcatccatgtgctcgtgaa

SEQ ID NO: 401078 - DNA, 75 bp, synthetic construct
  source 1..75: mol_type = other DNA
gggctatctgcgctggttgtttaataacctcgacagtatgagcccggaactgcgtttaaccttgaagcactattt

SEQ ID NO: 401079 - DNA, 75 bp, synthetic construct
  source 1..75: mol_type = other DNA
ccgcgtctgggcaacaagatgggcgtaataaccaaaatcttcgccaacccggtggtgccgcagattgatgattac

SEQ ID NO: 401080 - DNA, 75 bp, synthetic construct
  source 1..75: mol_type = other DNA
aagaaaacacgttcgacgttatctacatcaatggcgatcataacttacctaccgcctttaccgttgatgaagaag

SEQ ID NO: 401081 - DNA, 75 bp, synthetic construct
  source 1..75: mol_type = other DNA
ttcaacaattctggcagataaaacagttcaacagcattgggttgatcttgctaaacgtgcgccaacagaaaagaa

SEQ ID NO: 401082 - DNA, 75 bp, synthetic construct
  source 1..75: mol_type = other DNA
gacgagctggaacaatataatttatggctggattatctggacgcactggaactggttgatatctccagtgctcca

SEQ ID NO: 401083 - DNA, 75 bp, synthetic construct
  source 1..75: mol_type = other DNA
tactacgaacctttcaccttcgactacgaacatttgcatagcacaccggaaggcaaacatatccctactgctcgc

SEQ ID NO: 401084 - DNA, 75 bp, synthetic construct
  source 1..75: mol_type = other DNA
caaacatattcctactgctcgcccgcgttcactgattgacggcaaacggatggacaaagtgatctgggggccaaa

SEQ ID NO: 401085 - DNA, 75 bp, synthetic construct
  source 1..75: mol_type = other DNA
aattgtcgttgttggattttcaagagaacacatacctttcctttcatcagatggaaacgacaatccgctttttta

SEQ ID NO: 401086 - DNA, 75 bp, synthetic construct
  source 1..75: mol_type = other DNA
cgagcatttcgggaaaaccaataacctttcagatttcggcccgaaacaggtagttgagttcggcggcggtactgg

SEQ ID NO: 401087 - DNA, 75 bp, synthetic construct
  source 1..75: mol_type = other DNA
ttgcgcaaggcattcgaagatccaaacaacgctgacgatatttataaagagattgtagaaggttacaaaacatga

SEQ ID NO: 401088 - DNA, 75 bp, synthetic construct
  source 1..75: mol_type = other DNA
gtgttgatgaaacaactcaacctaggcagaaagcatatttatatgctgacgctaaaaagcaaataacatcaataa

SEQ ID NO: 401089 - DNA, 75 bp, synthetic construct
  source 1..75: mol_type = other DNA
tgttaacgctggcagcagttaatacgctgggtattccggtggatctgccaacggcgctgctgttgagcgttgtcg

SEQ ID NO: 401090 - DNA, 75 bp, synthetic construct
  source 1..75: mol_type = other DNA
tattgacgctggcagcggtcaatacgctgggtattccggtggatctgcccacggctctgctgttgagcgtggttg

SEQ ID NO: 401091 - DNA, 75 bp, synthetic construct
  source 1..75: mol_type = other DNA
gctaaagatggctttctcttcgcgctggaactggctccgtcagtgattctctctctgggaattatctcgattacc

SEQ ID NO: 401092 - DNA, 75 bp, synthetic construct
  source 1..75: mol_type = other DNA
gcaaagctggcgcggcgtgctgccgtgtgctgattgcgaaggtatcgaaacctctctgttcctcgaaaaagatgg

SEQ ID NO: 401093 - DNA, 75 bp, synthetic construct
  source 1..75: mol_type = other DNA
accggtgttactgtcagtagaaggtcactttacgcttgaggctaatccggataccggtgcgccgaccaaagtatt

SEQ ID NO: 401094 - DNA, 75 bp, synthetic construct
  source 1..75: mol_type = other DNA
atggtgaaaaaagcgatagtgacagcgatggctgtaatcagcctctttactctgatgggatgtaataatcgggcc

SEQ ID NO: 401095 - DNA, 75 bp, synthetic construct
  source 1..75: mol_type = other DNA
tgtgttcatatgaatatcacaatgttgcacgacggtacgttggttgctctctttcgcgccgttgggcagacaaca

SEQ ID NO: 401096 - DNA, 75 bp, synthetic construct
  source 1..75: mol_type = other DNA
tggctgctcgcggtaacagtgaaaaacccgtgttactgtctgtagaaggtcactttacgcttgaggctaacccgg

SEQ ID NO: 401097 - DNA, 75 bp, synthetic construct
  source 1..75: mol_type = other DNA
atatcggggcaccgactaaggtattagcgcccgatacggctggtaaatttttcccgaaccaggattgcagtagtt

SEQ ID NO: 401098 - DNA, 75 bp, synthetic construct
  source 1..75: mol_type = other DNA
atgaaaggtgcaagagatatcagtccattggggattaggattccagactatttaaagaaacgcattcagcaagaa

SEQ ID NO: 401099 - DNA, 75 bp, synthetic construct
  source 1..75: mol_type = other DNA
gaccagagggcaatggatggtttattggttcaatacatgacaccgaagatggcccggtttgtgtatggctgagaa

SEQ ID NO: 401100 - DNA, 75 bp, synthetic construct
  source 1..75: mol_type = other DNA
gatggtcttggcggattgcgcgccgcgcagcagttaatgacgcccgtgctaaaaccgttgttgggcattccaggg

SEQ ID NO: 401101 - DNA, 75 bp, synthetic construct
  source 1..75: mol_type = other DNA
attatcgggcgaaaggcgatgcgctggagatgctcgatcgtgaaggcaatccgattgaatcgcagttcaactata

SEQ ID NO: 401102 - DNA, 75 bp, synthetic construct
  source 1..75: mol_type = other DNA
tcgactggaacgatgttctccagttaacagggcaggatggattcccgattcactgggctcctgaatgtcttaatc

SEQ ID NO: 401103 - DNA, 75 bp, synthetic construct
  source 1..75: mol_type = other DNA
tgatgttctggcgaaatattatgaattaagtaaaacgcagacttgcaaaaagattctctcagattttttcgggat

SEQ ID NO: 401104 - DNA, 75 bp, synthetic construct
  source 1..75: mol_type = other DNA
cctcacggccaagacacgtggactgttttgtcgggaatggctgattactttcagggcaatgggattgttcgtgcc

SEQ ID NO: 401105 - DNA, 75 bp, synthetic construct
  source 1..75: mol_type = other DNA
aatcacaaatgacaacggtcagaatcccgcatgaggtaatgaccgatattgagcaacttaaagaacctggcgaaa

SEQ ID NO: 401106 - DNA, 75 bp, synthetic construct
  source 1..75: mol_type = other DNA
ggggtgcatatccccgcgatgacaaatgccgcctacgggcaggtgctccgcactcttgaactgaaacgcgcattt

SEQ ID NO: 401107 - DNA, 75 bp, synthetic construct
  source 1..75: mol_type = other DNA
ggtgtacacatccccgccatgaaaaacacggctttcgggcaggtgctccgtacacttgaactgaaacgcgctttt

SEQ ID NO: 401108 - DNA, 75 bp, synthetic construct
  source 1..75: mol_type = other DNA
tctatcgactacagcaacatcactctcggtggcggcaatagcggtacgactcgcatcagcaacgtttctgctggc

SEQ ID NO: 401109 - DNA, 75 bp, synthetic construct
  source 1..75: mol_type = other DNA
caccactgacggtgagttgctcggtgcattgtcaattggtgatgacggtaaataccgtcaaatcatcaacgtcgc

SEQ ID NO: 401110 - DNA, 75 bp, synthetic construct
  source 1..75: mol_type = other DNA
cagacgcgcaatttatcgttactgccatgcgcggcgaaatcaaacgccgccagcgtaaaaaaaacaaagaggctg

SEQ ID NO: 401111 - DNA, 75 bp, synthetic construct
  source 1..75: mol_type = other DNA
atggcaacgaaagcagttaatggaaaatccaaaaaacttgaggcacgagtaccccatgcaatagctgacgctgta

SEQ ID NO: 401112 - DNA, 75 bp, synthetic construct
  source 1..75: mol_type = other DNA
aatcacagaaattacaggctcgcgccccgcatgaagttgttgaggctatggagcaagtaaaagaaacaggctgcc

SEQ ID NO: 401113 - DNA, 75 bp, synthetic construct
  source 1..75: mol_type = other DNA
acattggagcgctagagggttgtctgaaaaatttggagaacgtgtaaagtgtgcgcaccattatccggatgattt

SEQ ID NO: 401114 - DNA, 75 bp, synthetic construct
  source 1..75: mol_type = other DNA
ggtgtacacacccccgccatgaaaaacacggccttcgggcaggtgctccgcacactcgaactgaaacgcgctttt

SEQ ID NO: 401115 - DNA, 75 bp, synthetic construct
  source 1..75: mol_type = other DNA
aagcgcaggcggagtatgttcagtttgccgaacaacaacggcgcttaaaagaagccgaaggcgagaaggatatcg

SEQ ID NO: 401116 - DNA, 75 bp, synthetic construct
  source 1..75: mol_type = other DNA
ggcccgtcgtcgtcagcaagtctttttgcgcgactggcaggataagctggatcagttcctgcaatttaacgaccg

SEQ ID NO: 401117 - DNA, 75 bp, synthetic construct
  source 1..75: mol_type = other DNA
aaagctgatggctctatcgactacagcaacatcactctcggtggtggtaacggcggtacgactcgcatcagcaac

SEQ ID NO: 401118 - DNA, 75 bp, synthetic construct
  source 1..75: mol_type = other DNA
gcaacaccatctgtttatccaaaaatgcactggagcaggcttttgatactgacggtcatcagaccgcacacctac

SEQ ID NO: 401119 - DNA, 75 bp, synthetic construct
  source 1..75: mol_type = other DNA
ttgtcacctccggtagcaccaagtacttcaagaccaacaccgatggcgtagatgccaacgcccagggtaaagata

SEQ ID NO: 401120 - DNA, 75 bp, synthetic construct
  source 1..75: mol_type = other DNA
agttgaagcaaagcgtgcaggaaacgaagcaatacaccgatcagcggatggttgagatggataacaaactgtcta

SEQ ID NO: 401121 - DNA, 75 bp, synthetic construct
  source 1..75: mol_type = other DNA
gaacgctgctgaaaaactgtctgaggtggattttaaaggggttaagcaggcattagccaaaatgcattatacggt

SEQ ID NO: 401122 - DNA, 75 bp, synthetic construct
  source 1..75: mol_type = other DNA
tattgttggagtgattgctgtagtggtggttttttttaacttcgtattcaaacgaaacctaaataatgcaacatc

SEQ ID NO: 401123 - DNA, 75 bp, synthetic construct
  source 1..75: mol_type = other DNA
atcttctgaaaaaagcatggaaaaagaacgctgctgaaaaactgtctgaggtggattttaaaggggttaagcagg

SEQ ID NO: 401124 - DNA, 75 bp, synthetic construct
  source 1..75: mol_type = other DNA
gttacgacaccaaagctgatggctctgtagactacagcaacatcactctcggtggtggtaatggcggtacgactc

SEQ ID NO: 401125 - DNA, 75 bp, synthetic construct
  source 1..75: mol_type = other DNA
atcgctgatgcgctgggtggtgatgcagaagtcaacgctgacggtactatcactgcaccgacttacaccattgca

SEQ ID NO: 401126 - DNA, 75 bp, synthetic construct
  source 1..75: mol_type = other DNA
gcgtagcggattcatttacgtcatatcttggtggtggtgctgatatcagcgatacgggtgtattaagtgggccaa

SEQ ID NO: 401127 - DNA, 75 bp, synthetic construct
  source 1..75: mol_type = other DNA
tcaccaacgttgcggctggtgatctctccacaaccagtaccgatgctgttaacggttcccagttaaacgcaacca

SEQ ID NO: 401128 - DNA, 75 bp, synthetic construct
  source 1..75: mol_type = other DNA
ggaggtttttttttccaaacggcaagaaaacctgatttttattattcgtgggtcaaaaaatataacttgatgtgg

SEQ ID NO: 401129 - DNA, 75 bp, synthetic construct
  source 1..75: mol_type = other DNA
caccaaatgtaatcgatattatgggcgaaaactgctctaattctcgagtaattacatttgtaaacccattttcat

SEQ ID NO: 401130 - DNA, 75 bp, synthetic construct
  source 1..75: mol_type = other DNA
ccgggtgatgcaggcatttaccaccacgaggggcatcgtatcaggctgacaaaggacggacgctgcatcattacc

SEQ ID NO: 401131 - DNA, 75 bp, synthetic construct
  source 1..75: mol_type = other DNA
gccttctggcccccgtaatgcggggtgttcgtctgctgttcgggcgtggtgtactgaccggcacaacggacacgc

SEQ ID NO: 401132 - DNA, 75 bp, synthetic construct
  source 1..75: mol_type = other DNA
caacagtatgcagggtgatattcgctttgctgacgtactggaaaaaatgggggcgaccattagctggggcgatga

SEQ ID NO: 401133 - DNA, 75 bp, synthetic construct
  source 1..75: mol_type = other DNA
ctggctcaagcaacacacaaacacaaaaaaacaatggggattgttatgacacaacaaggggatgctgtagccggg

SEQ ID NO: 401134 - DNA, 75 bp, synthetic construct
  source 1..75: mol_type = other DNA
gccatgttgtatgtgccgcagttgctgctgcacgtcagccgcccggtacgctgggacagcgatcacgtcgtgctg

SEQ ID NO: 401135 - DNA, 75 bp, synthetic construct
  source 1..75: mol_type = other DNA
gcattgccgcgtgggtcattggcacgcgcaatatgaaaaaagccctgctacgtgcgttgttagaaccgacagccg

SEQ ID NO: 401136 - DNA, 75 bp, synthetic construct
  source 1..75: mol_type = other DNA
aaaaaagcacataagttgaaaatgaaaagattacaaagaatgcttgagaaaatggcatgtgaccgggtttcacca

SEQ ID NO: 401137 - DNA, 75 bp, synthetic construct
  source 1..75: mol_type = other DNA
ctggcggcaaactggctttgtgggctttctatacatggtgtggctattttgtctgggtgatggcgcgttacatct

SEQ ID NO: 401138 - DNA, 75 bp, synthetic construct
  source 1..75: mol_type = other DNA
aatgtgacttttatcacataatagtgctaagtctgaattttccgggttatctcaaaatggaatacggttcgacaa

SEQ ID NO: 401139 - DNA, 75 bp, synthetic construct
  source 1..75: mol_type = other DNA
cggaagatacggttattcgtattaaaggtgatctggtttctaaaccttatatcgacatcacgctcaacctgatga

SEQ ID NO: 401140 - DNA, 75 bp, synthetic construct
  source 1..75: mol_type = other DNA
gcctgggcggggcgaagatcacttacctggaacaagaaaattatccgccgttgcgtttacagggcggctttactg

SEQ ID NO: 401141 - DNA, 75 bp, synthetic construct
  source 1..75: mol_type = other DNA
cctggaacaagaaaactacccaccgctgcgtttacagggtggttttgtggggggcaacgtagaagttgatggctc

SEQ ID NO: 401142 - DNA, 75 bp, synthetic construct
  source 1..75: mol_type = other DNA
gggatgctgtagccggggagctggcgacagaaaaagtgggcattaaagggtatctggctttttttctcaccataa

SEQ ID NO: 401143 - DNA, 75 bp, synthetic construct
  source 1..75: mol_type = other DNA
gcgcaaataaaagaaggcgcgacagtggcgatccccaacgacccgaccaaccttggtcgcgcgcttttactgttg

SEQ ID NO: 401144 - DNA, 75 bp, synthetic construct
  source 1..75: mol_type = other DNA
tttgtcgaacaggaagttgattccagcattcgtgccagcgcgcaggggctctttatgaccatggtaaatggtgtc

SEQ ID NO: 401145 - DNA, 75 bp, synthetic construct
  source 1..75: mol_type = other DNA
tttcttcaatatttctggttcggtatttgtcgaacaggaagttgattccagcattcgtgccagcgcgcaggggct

SEQ ID NO: 401146 - DNA, 75 bp, synthetic construct
  source 1..75: mol_type = other DNA
acggttcgctgaatccgcgtaaaaaagttgggcaaattctcgaagagccgctgctgatcaacaccagcttaagca

SEQ ID NO: 401147 - DNA, 75 bp, synthetic construct
  source 1..75: mol_type = other DNA
caagcccgctgaatccaccgccgggttgcgccttcaacgcccgctgtcgtcggcgcttcggcccctgcacccagt

SEQ ID NO: 401148 - DNA, 75 bp, synthetic construct
  source 1..75: mol_type = other DNA
tatctcccacgacctgtcggtggtggagcacattgctgatgaagtgatggtgatgtacctgggccgctgcgtgga

SEQ ID NO: 401149 - DNA, 75 bp, synthetic construct
  source 1..75: mol_type = other DNA
gctgacggcagcacgcagatctttaccgtaccctattcgtcagtcccgcttttgcaacgtgaagggcatactcgt

SEQ ID NO: 401150 - DNA, 75 bp, synthetic construct
  source 1..75: mol_type = other DNA
cacaggtcactattaaacaaaatgggtatgacatttataatagtacggtgccgccggggccttttaccatcaacg

SEQ ID NO: 401151 - DNA, 75 bp, synthetic construct
  source 1..75: mol_type = other DNA
atagcgacgctggacggcatacagactaatagcggcattattgatgatgatggctcgctctatatgtccggtttg

SEQ ID NO: 401152 - DNA, 75 bp, synthetic construct
  source 1..75: mol_type = other DNA
tgccgtttggggcgatggtgacatcagagagtagccagagtagcggcattgttgcggataatggtcaggtttacc

SEQ ID NO: 401153 - DNA, 75 bp, synthetic construct
  source 1..75: mol_type = other DNA
gtactggctcatgccaatggcgtaacgctggggcagccgttaaacgatacggtggtgcttgttaaagcgcctggc

SEQ ID NO: 401154 - DNA, 75 bp, synthetic construct
  source 1..75: mol_type = other DNA
tgacacgcgcgcaactcgccagtatggggctgaatacggcttctgtcgccggtatgaatctgctggcggatgatg

SEQ ID NO: 401155 - DNA, 75 bp, synthetic construct
  source 1..75: mol_type = other DNA
ttatgtataaaaaaatccaagctgaagccgctactacagatatgaaaacactgaatcaactattgaagaggtttc

SEQ ID NO: 401156 - DNA, 75 bp, synthetic construct
  source 1..75: mol_type = other DNA
tccgctcagactacgacattgtcattcttcgcctgtcggttatctcaatatttatgctgtttgggacttataagt

SEQ ID NO: 401157 - DNA, 75 bp, synthetic construct
  source 1..75: mol_type = other DNA
tattatcgttattgttacaggaataaccacgctcagcctgttaccacaactggggaaagttgacagttttgttat

SEQ ID NO: 401158 - DNA, 75 bp, synthetic construct
  source 1..75: mol_type = other DNA
cttatccggcctacaaatccggaacgcgtaggcctgataagacgcgtcagcgtcgcatcaggcgttacatacctg

SEQ ID NO: 401159 - DNA, 75 bp, synthetic construct
  source 1..75: mol_type = other DNA
atgctgcaacagcttccgacgcgtgcttttcatattatggcgaagccgagcggttctgattgtaatctgaactgt

SEQ ID NO: 401160 - DNA, 75 bp, synthetic construct
  source 1..75: mol_type = other DNA
gcgcctggtgatattcagggtgagctaacggaatggtctgtgcgccccgatgaatttggtgaatttctggtggcg

SEQ ID NO: 401161 - DNA, 75 bp, synthetic construct
  source 1..75: mol_type = other DNA
ttcaatcaaattacgacatggttattcttcgtttatcggttattataatatttatgctttttgggacttataaat

SEQ ID NO: 401162 - DNA, 75 bp, synthetic construct
  source 1..75: mol_type = other DNA
cttaagaaagcacgtgcgcgcttaaagaaaattaaaggaagtgggaggttaaataaggtagagtcaaaaggtata

SEQ ID NO: 401163 - DNA, 75 bp, synthetic construct
  source 1..75: mol_type = other DNA
caccgcacaggaaaaagcccgcgactggtaccgtcagcatcatgctgacagcaactggtatgaaaacgtgtatat

SEQ ID NO: 401164 - DNA, 75 bp, synthetic construct
  source 1..75: mol_type = other DNA
tggcggcgcaatctcgatgaaggcgatggctactgcatgaccaacaattcgctggaaaagctaaatcgcgagttc

SEQ ID NO: 401165 - DNA, 75 bp, synthetic construct
  source 1..75: mol_type = other DNA
gctaaggctgacgcgccaatagcggttgggaaccgccagagcgatgaaacccaatcaactgctgccaaggcggcc

SEQ ID NO: 401166 - DNA, 75 bp, synthetic construct
  source 1..75: mol_type = other DNA
tattgggatgttgtcatatggtaaagaaaattttattgccatgagtcatacgaaaagcgagttgattgggattca

SEQ ID NO: 401167 - DNA, 75 bp, synthetic construct
  source 1..75: mol_type = other DNA
ctaaatattatgatttcactcagattaacagtgattcagatgcagagagaaatgagcatgccgtctcctttatca

SEQ ID NO: 401168 - DNA, 75 bp, synthetic construct
  source 1..75: mol_type = other DNA
tttatgactttttgcgtgatgcgggcgtggagttcatccagtttattcctgtagtggagcggctggcggatgaaa

SEQ ID NO: 401169 - DNA, 75 bp, synthetic construct
  source 1..75: mol_type = other DNA
cgttacggcgagcgtctgaaaacgccggggctgaacctgttaagcgcgccgggtaacgatgccgtagcgaccagc

SEQ ID NO: 401170 - DNA, 75 bp, synthetic construct
  source 1..75: mol_type = other DNA
cccatgaccagccgatctacgaaaacccatcaccggggaacaaagcaggcggtatcaccacgctggaagataaat

SEQ ID NO: 401171 - DNA, 75 bp, synthetic construct
  source 1..75: mol_type = other DNA
atgcaatacatcaagatccatgcgctggataacgtcgcggttgctttagcagatttggcggaaggcacagaagtc

SEQ ID NO: 401172 - DNA, 75 bp, synthetic construct
  source 1..75: mol_type = other DNA
cggttgcacatcggttatcgatcaccatgcgtccccggcgtatatcagcggatcactctcgacgttgcgcaacgc

SEQ ID NO: 401173 - DNA, 75 bp, synthetic construct
  source 1..75: mol_type = other DNA
ctcaatcaacgcgatgcgttcctggtgcataacgcccgttcaaacatgaacaaccatgtcggctacaaccatcac

SEQ ID NO: 401174 - DNA, 75 bp, synthetic construct
  source 1..75: mol_type = other DNA
aatcagtcataatgctatagcaagaatattaaacatatccatctccacatcaaagaaacacgcatctctgatatg

SEQ ID NO: 401175 - DNA, 75 bp, synthetic construct
  source 1..75: mol_type = other DNA
gagctaacggaatggtcggtgcgccccgaggagttcggtgaatttctggtggcgatattcgaccactggatcaaa

SEQ ID NO: 401176 - DNA, 75 bp, synthetic construct
  source 1..75: mol_type = other DNA
gcaacagcaggtgtttggtgaagataaatttaagcaattaccggcgcagtgtcgcagttgtaacgtgttaaaagc

SEQ ID NO: 401177 - DNA, 75 bp, synthetic construct
  source 1..75: mol_type = other DNA
ccgccagcgaaccccaaaacgaagtggcttttacctggcagggcggcgaaccaacgttactcgggctggattttt

SEQ ID NO: 401178 - DNA, 75 bp, synthetic construct
  source 1..75: mol_type = other DNA
aacccgatgctggggcgtttctctgactacgtgattgctaacggcggtactaccgtactgaccgaagtgccggag

SEQ ID NO: 401179 - DNA, 75 bp, synthetic construct
  source 1..75: mol_type = other DNA
acttgtcatcaccctgggaacattatacctgttcggtggcagcgcgctgctactgtcgggggtggcgggagcgac

SEQ ID NO: 401180 - DNA, 75 bp, synthetic construct
  source 1..75: mol_type = other DNA
atgactcgcttacatcgttacggttgggaactgacgctcgcagcactgctggttattgaaattctgggatttggc

SEQ ID NO: 401181 - DNA, 75 bp, synthetic construct
  source 1..75: mol_type = other DNA
tcattgatgagacagaagagaaacgcgttatcttgctggcgaacttgctgcgcaaagatccgtttttaattccgc

SEQ ID NO: 401182 - DNA, 75 bp, synthetic construct
  source 1..75: mol_type = other DNA
tgtggttgccgaacctgaagttgtcgctcaacctgccgcacctgtggtcgctgaagtcgcagcagaagttgaaac

SEQ ID NO: 401183 - DNA, 75 bp, synthetic construct
  source 1..75: mol_type = other DNA
gaagtcgcagcagaagttgaaacggtagctgcggttgaacctgaggtcaccgttgagcataaccacgctaccgcg

SEQ ID NO: 401184 - DNA, 75 bp, synthetic construct
  source 1..75: mol_type = other DNA
tccccgtgcgcagctcgcctcggcgcttaatttgccagaaacgtgggtcgcagagcgtctgccacgattaaagca

SEQ ID NO: 401185 - DNA, 75 bp, synthetic construct
  source 1..75: mol_type = other DNA
gcgcacgcctggtgagctggcgcaacagactggcgtttctggcaggaccatactgcgtgatattgactatctcaa

SEQ ID NO: 401186 - DNA, 75 bp, synthetic construct
  source 1..75: mol_type = other DNA
gccagtcgcccgggtttgggtcatttcattgatgagtgcgaagagaaacgcgttattctgctggcgaacttgcta

SEQ ID NO: 401187 - DNA, 75 bp, synthetic construct
  source 1..75: mol_type = other DNA
atcagccatatttctcgctttggcctgctggaaatgtcccgtcagcgcctgagcccatcactgggtgaatccagc

SEQ ID NO: 401188 - DNA, 75 bp, synthetic construct
  source 1..75: mol_type = other DNA
atgccgttgaccgtagcgtgcgcgtctccggaactggcctctggcaaagtctggatccgctatccaattgtacgt

SEQ ID NO: 401189 - DNA, 75 bp, synthetic construct
  source 1..75: mol_type = other DNA
attgcccaaccgcaaccggaagttatcgaaacgacgcattctgaagtgattgccgccgaagtaactgaacaaccg

SEQ ID NO: 401190 - DNA, 75 bp, synthetic construct
  source 1..75: mol_type = other DNA
acgccagtacgccaccagcgtgccgtagaaaaccgtctgcgtgaagcagtgcgtcaggatcgtgcgcgtattcaa

SEQ ID NO: 401191 - DNA, 75 bp, synthetic construct
  source 1..75: mol_type = other DNA
cccagctgaacctgccgcgcctgttgtagccccagcacctaaagctgcaacggcaacaccagcatctcctgcaca

SEQ ID NO: 401192 - DNA, 75 bp, synthetic construct
  source 1..75: mol_type = other DNA
cggtgttcgctgcgtgattgtgccaaacgatcagatggaaaccccgcactaccacgtgttgcgcgtgcgcaaagg

SEQ ID NO: 401193 - DNA, 75 bp, synthetic construct
  source 1..75: mol_type = other DNA
ttgccgcgccggtgtggattggtgagcaccgccaaagcagcatgaataacctgaaagccgcctggcctgcggcct

SEQ ID NO: 401194 - DNA, 75 bp, synthetic construct
  source 1..75: mol_type = other DNA
ggcgatgcgttacccactgaatcagcgctacaaacagagtttggcgtcagccgggttacggtgcgtcaggctttg

SEQ ID NO: 401195 - DNA, 75 bp, synthetic construct
  source 1..75: mol_type = other DNA
gaaaatgctatcgagttttatggcgcgatctcgcataacaaactgcatggtttgtcagtgcaggttgagaccaat

SEQ ID NO: 401196 - DNA, 75 bp, synthetic construct
  source 1..75: mol_type = other DNA
ctgggccgcctcgctgggcgtggaagtcagcttcttcctgattgatgaaaaccgtttccgccataatgaaagtgg

SEQ ID NO: 401197 - DNA, 75 bp, synthetic construct
  source 1..75: mol_type = other DNA
atgggacacaaacccttataccggcagattgccgatcgcattcgtgagcagattacgtgcggcgagctaaaacct

SEQ ID NO: 401198 - DNA, 75 bp, synthetic construct
  source 1..75: mol_type = other DNA
atttagttgatggccgggtgtttgaatatagccgcaacgcttttaataccgatgactataaatttaccctgatag

SEQ ID NO: 401199 - DNA, 75 bp, synthetic construct
  source 1..75: mol_type = other DNA
caaccatgtggaaaccgacagcccttcgccattcctgtagagggaagcggcgagggctatttcttattacagata

SEQ ID NO: 401200 - DNA, 75 bp, synthetic construct
  source 1..75: mol_type = other DNA
aaacctggggcttgttcttcgaacgcctgaatgtatcggtacagaaactggaaaacgccatcgagttttatggcg

SEQ ID NO: 401201 - DNA, 75 bp, synthetic construct
  source 1..75: mol_type = other DNA
ccaatcgttccggttggtatctgtataaccgtgcgccaacgattgagtcgatcatcagccatcaaccgctggaat

SEQ ID NO: 401202 - DNA, 75 bp, synthetic construct
  source 1..75: mol_type = other DNA
ccaaatgaatggctggatcttggtggcttaagctcgctttctgctgaagagtactttggtgccagcctttggcag

SEQ ID NO: 401203 - DNA, 75 bp, synthetic construct
  source 1..75: mol_type = other DNA
ccaaatgaatggctggatctcggtggtttaagctcactttctgctgaagagtactttggtgccagcctttggcag

SEQ ID NO: 401204 - DNA, 75 bp, synthetic construct
  source 1..75: mol_type = other DNA
ctttggagagaatcaaaattgtctggtgggtagcgttgacctgctgtatcgcaactcgtggaatgaagtgcgtac

SEQ ID NO: 401205 - DNA, 75 bp, synthetic construct
  source 1..75: mol_type = other DNA
ccgtgtgaaccgctctggttggtatctgtataaccgcgcgccaaatattgaatcgatcatcagccatcagccgct

SEQ ID NO: 401206 - DNA, 75 bp, synthetic construct
  source 1..75: mol_type = other DNA
gtggtgaagaaaccaaaccgaccgagcaaccagcaccgaaagcagaagcgaaaccggaacgtcaacaggatcgtc

SEQ ID NO: 401207 - DNA, 75 bp, synthetic construct
  source 1..75: mol_type = other DNA
caagaaattattgatgcctgccgggtgtgggctaacgaatgggacaagaagaatgggggcgtagaagatctttat

SEQ ID NO: 401208 - DNA, 75 bp, synthetic construct
  source 1..75: mol_type = other DNA
aattaaaaatgcgtccggagacgctggaggcaatcaagcagacggagtttgatactgtattcagtgtggcctgca

SEQ ID NO: 401209 - DNA, 75 bp, synthetic construct
  source 1..75: mol_type = other DNA
cttcgaaaaggactggaataccgacatagacgaatgtctcgcagataaaattatggcgtacctggagacggattt

SEQ ID NO: 401210 - DNA, 75 bp, synthetic construct
  source 1..75: mol_type = other DNA
ttgccttcaacgtggggacaggcaatgcctgcagctccacgctggtgaaattgctcaatcagcggcgctgggcgg

SEQ ID NO: 401211 - DNA, 75 bp, synthetic construct
  source 1..75: mol_type = other DNA
tgctgccacgctgccgggttttcagcagcttcacacctccgtggaagggctgaaactgattgccgattacgaagg

SEQ ID NO: 401212 - DNA, 75 bp, synthetic construct
  source 1..75: mol_type = other DNA
acgtgctacgagtggagcgggcgctggaaaggtgtgtgaagcaacagccgccgcagaaggtgtatgacgctacgg

SEQ ID NO: 401213 - DNA, 75 bp, synthetic construct
  source 1..75: mol_type = other DNA
cctcccagcggatcgccgacgcccgcatctcctatgccggacgcggcgcgttaagcgacgccaacgccgcaggct

SEQ ID NO: 401214 - DNA, 75 bp, synthetic construct
  source 1..75: mol_type = other DNA
caacaccgtcgatatcggtgcgccgacgatttttggtcacaccaaagataagctttccggctccattgacgccaa

SEQ ID NO: 401215 - DNA, 75 bp, synthetic construct
  source 1..75: mol_type = other DNA
tcaaccagggcgatgagtacatccgcttaagcggcctggtgcgcgccgacgacatccagaacgacaactcggttt

SEQ ID NO: 401216 - DNA, 75 bp, synthetic construct
  source 1..75: mol_type = other DNA
tcgatttgagtcgttacaaaaaagactatccgccaagcctgacaaaacgactggatgttgcggagaaagataacc

SEQ ID NO: 401217 - DNA, 75 bp, synthetic construct
  source 1..75: mol_type = other DNA
cagatgcgtgccgacagttgccgcgctgggtgtatgtaaaaggtgtttttaatcaggggctggataaccgccgtg

SEQ ID NO: 401218 - DNA, 75 bp, synthetic construct
  source 1..75: mol_type = other DNA
ggaaaaatggtcaatcaatcactcttgaattactgaatgcaaagattggatttgcagcttcaggaaatggcccgc

SEQ ID NO: 401219 - DNA, 75 bp, synthetic construct
  source 1..75: mol_type = other DNA
gggaaccactggtacagcataaatttgggggacgcgactccgaaatggacagaaattgctgcctggccggatgtt

SEQ ID NO: 401220 - DNA, 75 bp, synthetic construct
  source 1..75: mol_type = other DNA
tctgaacataaaacactatcaataagttggagtcattacccgcaaaccaataatattgcccgggcggcagaaaaa

SEQ ID NO: 401221 - DNA, 75 bp, synthetic construct
  source 1..75: mol_type = other DNA
atcagttgattagtctcggagataagtatgaaggcgtgaccgcccagccagttgagttcagcgaaaacggcgtta

SEQ ID NO: 401222 - DNA, 75 bp, synthetic construct
  source 1..75: mol_type = other DNA
catccatccacggtcgtggcccttaaccgtcgttcattacaggaagttttcagtaatgataagttccgggtccgg

SEQ ID NO: 401223 - DNA, 75 bp, synthetic construct
  source 1..75: mol_type = other DNA
tatcgaaggcgacgaccgtaccgaattaaaagaagcactggcaagccttgaactgccggaaggcatggggcttat

SEQ ID NO: 401224 - DNA, 75 bp, synthetic construct
  source 1..75: mol_type = other DNA
atgtgccaattgctacgtcgttcacgagaaattgtcattggcatcgataatacttatccgacgattatttttgat

SEQ ID NO: 401225 - DNA, 75 bp, synthetic construct
  source 1..75: mol_type = other DNA
attgagttcagtgaaaatggcgttatcgacaacctttttgatcgccagcttgattttattatctccccacagcac

SEQ ID NO: 401226 - DNA, 75 bp, synthetic construct
  source 1..75: mol_type = other DNA
acaaatcgacgcaataaaaattgttcgctgccggaaggtaaaaggcgggcgattgtttattaaagttcgcgaacg

SEQ ID NO: 401227 - DNA, 75 bp, synthetic construct
  source 1..75: mol_type = other DNA
cgctgccggaaggcaaaaggcgggcgattgtttattaaggtacgcgagcgcgaagacctgttaccggatattgac

SEQ ID NO: 401228 - DNA, 75 bp, synthetic construct
  source 1..75: mol_type = other DNA
cggcgacctactaccggatattgacgaatacgcgactaatatgtggggtgacaatggagacaataaacattgttg

SEQ ID NO: 401229 - DNA, 75 bp, synthetic construct
  source 1..75: mol_type = other DNA
cggcacagcgtaaaacactgcgggagaagatggacggggtggcgctcattctgctgccagattcgtttcctgaca

SEQ ID NO: 401230 - DNA, 75 bp, synthetic construct
  source 1..75: mol_type = other DNA
atggaagacgcgctttacgcttttaattacacacagaaccgggacaagttatttgctaacttgattagcatcatt

SEQ ID NO: 401231 - DNA, 75 bp, synthetic construct
  source 1..75: mol_type = other DNA
gattgtttattaaggtatgcgaacgcggcgacctgctaccggatattaacgaatatgcgactaatatgtggggtg

SEQ ID NO: 401232 - DNA, 75 bp, synthetic construct
  source 1..75: mol_type = other DNA
agccggagagacatgggacgaatggttcgacggacacaacgtcagcgccgattttatggataacagggaacagcc

SEQ ID NO: 401233 - DNA, 75 bp, synthetic construct
  source 1..75: mol_type = other DNA
cgagaaattaatccaaatcgagtacgaaaatttttaaattatctcactaacgcagactcaagaaatgagcctttt

SEQ ID NO: 401234 - DNA, 75 bp, synthetic construct
  source 1..75: mol_type = other DNA
aagtactacctgaagtttgcatctgctttttatcgcttttatcaaacaaagaaatacctcactttcagagtctat

SEQ ID NO: 401235 - DNA, 75 bp, synthetic construct
  source 1..75: mol_type = other DNA
gttaagaaagtagaaattattgcgattggtcgtacaagaatcatcactcccgccggtgagtcctgggacagttgg

SEQ ID NO: 401236 - DNA, 75 bp, synthetic construct
  source 1..75: mol_type = other DNA
atggaaaaggaaacaaatagcaaattcatccatcattttatgaatatattctgtgtgctcattcagttgataaat

SEQ ID NO: 401237 - DNA, 75 bp, synthetic construct
  source 1..75: mol_type = other DNA
ttcgacggacacaacgtcagcgccgattttatggataacagggaacagcccggcatgcaggaaagggagtcattc

SEQ ID NO: 401238 - DNA, 75 bp, synthetic construct
  source 1..75: mol_type = other DNA
ttattgtaccggtagaagaactgttgcacgttcaggcgcaaaaatggcaaatcctgcaaaaaccccccttgcttt

SEQ ID NO: 401239 - DNA, 75 bp, synthetic construct
  source 1..75: mol_type = other DNA
aacattagtagtatgactgcgcgtaatacgatctttcttgagccgtcgcgaatattgcctccgctggtttcctct

SEQ ID NO: 401240 - DNA, 75 bp, synthetic construct
  source 1..75: mol_type = other DNA
atttaaccaacgtcatcgcgatttactgcaaaaacagctcgatgttcctgtcttgctctctaacgtattgattgc

SEQ ID NO: 401241 - DNA, 75 bp, synthetic construct
  source 1..75: mol_type = other DNA
cgaagacctggtgaaaaacaggcctcgctcccctgtcagaccacctatacccgcaaccgccaaaacgccagacct

SEQ ID NO: 401242 - DNA, 75 bp, synthetic construct
  source 1..75: mol_type = other DNA
gcggcgaaaaaatggagttcatcaagtataaaccagtgcaaatttatattaatggcgcatggcgcactatctctg

SEQ ID NO: 401243 - DNA, 75 bp, synthetic construct
  source 1..75: mol_type = other DNA
tgggttgttggtgatgaccgtattcccttagaagatatcttacggaagcattggggagagtttacgtatttatgt

SEQ ID NO: 401244 - DNA, 75 bp, synthetic construct
  source 1..75: mol_type = other DNA
tctctaataccgctgtacgtcaaagaatctttgctactggctgttccgctatggaagcagtgcaatattacgtag

SEQ ID NO: 401245 - DNA, 75 bp, synthetic construct
  source 1..75: mol_type = other DNA
attcgaagggaccataccctggctttatcgcgagggtgggaatgccacgattaactcggatgatgcggatcacat

SEQ ID NO: 401246 - DNA, 75 bp, synthetic construct
  source 1..75: mol_type = other DNA
cggtaatcccttccagggaacgtcgctgactctgctggatatttcaacggccagcggtggcggcagcgatacgga

SEQ ID NO: 401247 - DNA, 75 bp, synthetic construct
  source 1..75: mol_type = other DNA
aaagaggatatgattaccctgtcgactttcctcgcctaattcaggagaagcgtaaggagtgggagcagattgcag

SEQ ID NO: 401248 - DNA, 75 bp, synthetic construct
  source 1..75: mol_type = other DNA
aaagaggcacttaccatcccggccaacggcgacggggtacagggttacaaacttcacattatttacaaacacaga

SEQ ID NO: 401249 - DNA, 75 bp, synthetic construct
  source 1..75: mol_type = other DNA
gggtcgacagcggcgaaaccaatattttccaggggaccattccgtggctctattcggaagggggaagtgctacga

SEQ ID NO: 401250 - DNA, 75 bp, synthetic construct
  source 1..75: mol_type = other DNA
aatggcaagtttgatgcgggtaccgatgctgacgtcaccgccaattatgacttccgttgggtactttctggcagc

SEQ ID NO: 401251 - DNA, 75 bp, synthetic construct
  source 1..75: mol_type = other DNA
gttcatattctacagaagttaatttaaacggtttaattgaggtgcttagtaagcatctttactccactcccgtag

SEQ ID NO: 401252 - DNA, 75 bp, synthetic construct
  source 1..75: mol_type = other DNA
ggctacagtgggcgtgggttatacccgaatgctgcgccagcaggatgacaataccggtttaattggtatgttcgg

SEQ ID NO: 401253 - DNA, 75 bp, synthetic construct
  source 1..75: mol_type = other DNA
tttcccacagatgatccggtatcgggttaaagagtgggaaaaagttgccggtgttcctgttgcagaagtattttg

SEQ ID NO: 401254 - DNA, 75 bp, synthetic construct
  source 1..75: mol_type = other DNA
tttttattcacctgacaaagaatatgagggactgtcttttactcagggcgtctattttggcgtggatacccaaaa

SEQ ID NO: 401255 - DNA, 75 bp, synthetic construct
  source 1..75: mol_type = other DNA
ggcaagtcgaggatatgattaccctgtcgactttcctcgcctgattcaggaaaagcgtaaggagtgggagcagat

SEQ ID NO: 401256 - DNA, 75 bp, synthetic construct
  source 1..75: mol_type = other DNA
cgtctgtttgatttgctcaaagatcgcttgcaggtgccaacgtcaaaaggggcgctgctggcgaaggatttacgc

SEQ ID NO: 401257 - DNA, 75 bp, synthetic construct
  source 1..75: mol_type = other DNA
tgatcgtaccggttgaagagctgttggaagcgcaggcacaaaaatggcaaatcttacaaaaaacgccgttgttct

SEQ ID NO: 401258 - DNA, 75 bp, synthetic construct
  source 1..75: mol_type = other DNA
atggacacaacgcaggtcacattgatacacaaaattctagctgcggcagatgagcgaaatctgccgctctggatc

SEQ ID NO: 401259 - DNA, 75 bp, synthetic construct
  source 1..75: mol_type = other DNA
tggtcgcctgggcgatgctcgcagcactggacgttcgctttgcttttgtctggggattgctggcctttgcgctta

SEQ ID NO: 401260 - DNA, 75 bp, synthetic construct
  source 1..75: mol_type = other DNA
tcgtcccctttatcctcgccctatttatcgcagtcattcttaacccgctggtacaacgcatggttcgctggcgag

SEQ ID NO: 401261 - DNA, 75 bp, synthetic construct
  source 1..75: mol_type = other DNA
tttatcgtcagctggatgaatcagccgctcttgatcaaacgatctgtaaaaatatggaggctttagggtatggta

SEQ ID NO: 401262 - DNA, 75 bp, synthetic construct
  source 1..75: mol_type = other DNA
ttcgaataccagcggtgagggagagattcgccaaaagttgattgaagatgatcgtatcgaatgcatgattgccct

SEQ ID NO: 401263 - DNA, 75 bp, synthetic construct
  source 1..75: mol_type = other DNA
gaagccaagcgcaagcagttaatcgacaacggccaagaagcctttgtcgatatggatgttttctatcaacaggat

SEQ ID NO: 401264 - DNA, 75 bp, synthetic construct
  source 1..75: mol_type = other DNA
atttaattaaagtattacaatcttgtcagggaaaagttgtttttattggtgttggtaagtccggtattattgcca

SEQ ID NO: 401265 - DNA, 75 bp, synthetic construct
  source 1..75: mol_type = other DNA
ggtgagacggcggaaatcctggcgacactgcctagtttgaaaaaaatgggtaattatttgatctcttttacccgc

SEQ ID NO: 401266 - DNA, 75 bp, synthetic construct
  source 1..75: mol_type = other DNA
gtgttcgccatatctgggctgagcacgagcaggaactggttaagctgggatatgcgaccgttaatgatgtggctc

SEQ ID NO: 401267 - DNA, 75 bp, synthetic construct
  source 1..75: mol_type = other DNA
aatctggtcttcggcaatattctggagccgcgcatcatgggacgtgggctggggctttccacattggtggtattt

SEQ ID NO: 401268 - DNA, 75 bp, synthetic construct
  source 1..75: mol_type = other DNA
ggcaatattctggagccgcgcatcatgggacgtgggctggggctttccacattggtggtatttttgtcgttgatt

SEQ ID NO: 401269 - DNA, 75 bp, synthetic construct
  source 1..75: mol_type = other DNA
atgaataacacggatcttatccatctcattaaacattttatgcataacgaacttaaagcagtagaagaggttatt

SEQ ID NO: 401270 - DNA, 75 bp, synthetic construct
  source 1..75: mol_type = other DNA
gatgagcgaaatctgccgctctggatcggtgggggctgggcgatcgatgcacggctagggcgtgtaacacgcaag

SEQ ID NO: 401271 - DNA, 75 bp, synthetic construct
  source 1..75: mol_type = other DNA
atgaacaactaatggcagcgcgcgaggaaggggcaaccgtcctcgaccatagcggtgcgccactggatgaaaaac

SEQ ID NO: 401272 - DNA, 75 bp, synthetic construct
  source 1..75: mol_type = other DNA
tggtgcgccactggatgaaaaacagaaaatgggcacagtgggggccgtggcgttggatttaaatggcaatctggc

SEQ ID NO: 401273 - DNA, 75 bp, synthetic construct
  source 1..75: mol_type = other DNA
cgcgcagatgagtctgcaacaggaattacgctacattgaggcgttgtctgccattgttgaaaccgggcagaaaat

SEQ ID NO: 401274 - DNA, 75 bp, synthetic construct
  source 1..75: mol_type = other DNA
aaggggcaacagtcctcgaccatagcggtgcgccactggatgaaaacagaaaatgggcaccgtgggggccgtggc

SEQ ID NO: 401275 - DNA, 75 bp, synthetic construct
  source 1..75: mol_type = other DNA
aagtcttcattcgcgcgctggcggcgtatgacatcgccgcgttgatggattacggcggcttaagcctcgcacaag

SEQ ID NO: 401276 - DNA, 75 bp, synthetic construct
  source 1..75: mol_type = other DNA
atggtggcgcaggtgcaatttagccgcgcgcagatgagtctgcaacaggaattacgctacatcgaggcgttgtct

SEQ ID NO: 401277 - DNA, 75 bp, synthetic construct
  source 1..75: mol_type = other DNA
gtgagcttaccgccattcgcagcacggggttttctatcttccgtattgcactggtggcgctggttgccgggatat

SEQ ID NO: 401278 - DNA, 75 bp, synthetic construct
  source 1..75: mol_type = other DNA
tgccaccattgaagacgataaaacgtggatcctgcatggtgtgaattataaaaaatggttgaatggcaaagaaac

SEQ ID NO: 401279 - DNA, 75 bp, synthetic construct
  source 1..75: mol_type = other DNA
cggaggctccgcagggctcgtgcccagaggcggctgagggcgtcatcgccgggcggccagtccgttgtaacagct

SEQ ID NO: 401280 - DNA, 75 bp, synthetic construct
  source 1..75: mol_type = other DNA
gcaaaaatgaacctcgccattcgcggtctttcagctaacctcggcgaacgaccggcagacaccttctttagcgac

SEQ ID NO: 401281 - DNA, 75 bp, synthetic construct
  source 1..75: mol_type = other DNA
ccttgagatggaagtgttctaccagcaggacaacattttctacctgccggaagaggcgcgctggtcatttatcaa

SEQ ID NO: 401282 - DNA, 75 bp, synthetic construct
  source 1..75: mol_type = other DNA
ttgcgttgagcgcacctgttaccgcgctcggtttaccggtagcgtttgtgctggtggcgttgagcctggtgtatt

SEQ ID NO: 401283 - DNA, 75 bp, synthetic construct
  source 1..75: mol_type = other DNA
ggttttgggctgcgttttgatgacctgatgttgtccaatgatgctctggaatttaaagccagctactttgatacc

SEQ ID NO: 401284 - DNA, 75 bp, synthetic construct
  source 1..75: mol_type = other DNA
gagaaccgctccacgctgtttgccgatagttttgcttctcacctgctgacatatggcggtgagtattatcgtcag

SEQ ID NO: 401285 - DNA, 75 bp, synthetic construct
  source 1..75: mol_type = other DNA
tctggatggtattgtggcctggtccagtcgcgatcggggtgatttacgccagagcaatggtgaaaccgcgccgaa

SEQ ID NO: 401286 - DNA, 75 bp, synthetic construct
  source 1..75: mol_type = other DNA
tgatataccggcactttccggactcatcgacaccctgatcccactcggttttaacgtaagcgtcgtctcagcacc

SEQ ID NO: 401287 - DNA, 75 bp, synthetic construct
  source 1..75: mol_type = other DNA
actggcattcgcatcaggttgccgctgacgacaaagcgcagcaacgcgtcgtgccctccccggtcttctatgcgc

SEQ ID NO: 401288 - DNA, 75 bp, synthetic construct
  source 1..75: mol_type = other DNA
aagcgtgttgagattgttcgcggaccttcagcattactgtatggcagtggcgcgctgggtggagtgatctcctac

SEQ ID NO: 401289 - DNA, 75 bp, synthetic construct
  source 1..75: mol_type = other DNA
gagcttgatcagtggatggaaagccggatttatccggcgatgagtgcgatcccggcactggctggactgattacc

SEQ ID NO: 401290 - DNA, 75 bp, synthetic construct
  source 1..75: mol_type = other DNA
agcgttatcgactcttctactcccgaaaaccaaactgcgacttcagccaccgatttattgcgctctgtccccggg

SEQ ID NO: 401291 - DNA, 75 bp, synthetic construct
  source 1..75: mol_type = other DNA
atggtactttatcttgatccggcgctgatcaagcgtgttgagattgttcgcggaccttcagcattactgtatggc

SEQ ID NO: 401292 - DNA, 75 bp, synthetic construct
  source 1..75: mol_type = other DNA
agatccggatgcgtcacagcctgaaatcatgctgtacgttgcgggtaaagcgttccaggttggcgcgctgatctt

SEQ ID NO: 401293 - DNA, 75 bp, synthetic construct
  source 1..75: mol_type = other DNA
gcctgttcgaatctggcgcgttatctggcaatgtcagtagagccgtttgttgggatgacggaactggaaaaatct

SEQ ID NO: 401294 - DNA, 75 bp, synthetic construct
  source 1..75: mol_type = other DNA
ataatatcccggtgttgttctttgtcgatgaaggcttaaagcgtagccagcagatgttcgccgatctgaataaat

SEQ ID NO: 401295 - DNA, 75 bp, synthetic construct
  source 1..75: mol_type = other DNA
catagcatcaacattgacgttgctatatcaggcttacgataataacatcacacacaaattgtactgtaaaaatat

SEQ ID NO: 401296 - DNA, 75 bp, synthetic construct
  source 1..75: mol_type = other DNA
cgtattcagtatcaacaatctttagaagattataaccgtcgtgtgcctttagcgaagcagggggttatttcaaaa

SEQ ID NO: 401297 - DNA, 75 bp, synthetic construct
  source 1..75: mol_type = other DNA
taatattccggtgttgttctttgttgatgaaggcttaaaacgtagccagcagatgttcgccgatctgaataaata

SEQ ID NO: 401298 - DNA, 75 bp, synthetic construct
  source 1..75: mol_type = other DNA
ggctacccgcgcattgttgggcaaagatcccaaagaggataactttgaggaatgcacccacattgctacccaata

SEQ ID NO: 401299 - DNA, 75 bp, synthetic construct
  source 1..75: mol_type = other DNA
tctgtcgccaactttaacaccgtgatcgtggtgttccaggtggtactgattgccgtgatcctaggtatggtgatt

SEQ ID NO: 401300 - DNA, 75 bp, synthetic construct
  source 1..75: mol_type = other DNA
attctgggcatggttgtttatggcgtatttgaaggtgaaggcgctggtacgctggcgagcactcgtccgttctgg

SEQ ID NO: 401301 - DNA, 75 bp, synthetic construct
  source 1..75: mol_type = other DNA
tttcctgaccgcgctgatcggcggcatgatcttcatctttgcaacttacttcctgcagctgtacttcccggatat

SEQ ID NO: 401302 - DNA, 75 bp, synthetic construct
  source 1..75: mol_type = other DNA
atgaaagatgtacttaagaacctccctccccttgtcgatactgtgaccgttaaagttgctaacgtaaccaagtat

SEQ ID NO: 401303 - DNA, 75 bp, synthetic construct
  source 1..75: mol_type = other DNA
ctccccttttggatactgtgactgtcaaggtttctaatataaccaaatatgatgatcatcaggtcgaaattcgtg

SEQ ID NO: 401304 - DNA, 75 bp, synthetic construct
  source 1..75: mol_type = other DNA
ggtcgccccgttgtttttgacgaagaggattttcctgcgatcgcggtttatctgacggatgcagagtataccggt

SEQ ID NO: 401305 - DNA, 75 bp, synthetic construct
  source 1..75: mol_type = other DNA
gcattcgtactctttggcaccgcgcgtggtcatgacatgcagtgggtgatgaacgcttttgaaagcgcggtgaaa

SEQ ID NO: 401306 - DNA, 75 bp, synthetic construct
  source 1..75: mol_type = other DNA
aaggcgccaaagtggaagtagtcgaaggccagaaagcgaccacgccggaagaaaaagccgccagccgcgaagaca

SEQ ID NO: 401307 - DNA, 75 bp, synthetic construct
  source 1..75: mol_type = other DNA
gtgcgggcggtgatccagctcgcgcacgggctgggcatggaggtggtagccgagggtgtggaaacacccgactgc

SEQ ID NO: 401308 - DNA, 75 bp, synthetic construct
  source 1..75: mol_type = other DNA
caacgttcgacgacgaggtaaagcgggtgctggccgatatggccctgcccgccgagcttctggagatcgaactga

SEQ ID NO: 401309 - DNA, 75 bp, synthetic construct
  source 1..75: mol_type = other DNA
ccgattcccatcatccgtccggtaccggaaatcaacgctacccgggtagccatttcacttgggtaaaaatgtcgg

SEQ ID NO: 401310 - DNA, 75 bp, synthetic construct
  source 1..75: mol_type = other DNA
tagcgaaaacaaagtcagcaaacatctggtgacgccgggcattcaggacagtcagaaagtggtgatccgcgcggg

SEQ ID NO: 401311 - DNA, 75 bp, synthetic construct
  source 1..75: mol_type = other DNA
agcgcagcaatcgccagcgggtggtcgccgtggtatgcgtgccggcccattagccccggttcaggcggcgaccgc

SEQ ID NO: 401312 - DNA, 75 bp, synthetic construct
  source 1..75: mol_type = other DNA
cggtcgtgcagaaattgaaggccgcgagtttatctgtattgataccggcggtattgacggtacagaagacggtgt

SEQ ID NO: 401313 - DNA, 75 bp, synthetic construct
  source 1..75: mol_type = other DNA
acgccgattcgtattcagttcaaagaaggggaaaacccgtatgcgaacaagcgtaacaccctgacgccgacccag

SEQ ID NO: 401314 - DNA, 75 bp, synthetic construct
  source 1..75: mol_type = other DNA
tgctgccgtggatggaagatctcgcaccgcaagaagaagtcgacgaagacgctgaatactgggcgcaatttgaag

SEQ ID NO: 401315 - DNA, 75 bp, synthetic construct
  source 1..75: mol_type = other DNA
ctggacttccgtctgggctttatcgattttgctcgtgtgcattttatctcagccttgcacggcagtggtgttggt

SEQ ID NO: 401316 - DNA, 75 bp, synthetic construct
  source 1..75: mol_type = other DNA
aagtcgacgaagacgctgaatactgggcgcaatttgaagcagaagaaaacggcgaagaagaagaggaagatgact

SEQ ID NO: 401317 - DNA, 75 bp, synthetic construct
  source 1..75: mol_type = other DNA
caggcacgacgcgtgacagcatctacattccaatggaacgtgacggacgtgagtatgtgctcattgacaccgctg

SEQ ID NO: 401318 - DNA, 75 bp, synthetic construct
  source 1..75: mol_type = other DNA
ctggctcaacactatcattggtggacgaggcactgggaaatcgacttcgttggaattcctgcggattgctcttaa

SEQ ID NO: 401319 - DNA, 75 bp, synthetic construct
  source 1..75: mol_type = other DNA
aaatgcttatggcgcggatatggggatggtttatatctatggcgtgctggtgacgatcccaagcgtaatctgcgc

SEQ ID NO: 401320 - DNA, 75 bp, synthetic construct
  source 1..75: mol_type = other DNA
gtcctaactttacccctaaatatagtggagtaggcaaagagcttatccaatatacaattaattatgcctgttcaa

SEQ ID NO: 401321 - DNA, 75 bp, synthetic construct
  source 1..75: mol_type = other DNA
tgcgatgtttatcgcgatggtggttgcgttcgtactctttggcaccgcacgcggccacgacatgcagtgggtgat

SEQ ID NO: 401322 - DNA, 75 bp, synthetic construct
  source 1..75: mol_type = other DNA
gctggtactgaatttgaagttcaaaatcaattcaatggtggccttgttggtggcggcgctgtccgtcgggatgct

SEQ ID NO: 401323 - DNA, 75 bp, synthetic construct
  source 1..75: mol_type = other DNA
tcggtgcgggcggcgtgctgaaacaaaccatcattgacaccggcattggcgacaccatcggtatgctgatgtcgc

SEQ ID NO: 401324 - DNA, 75 bp, synthetic construct
  source 1..75: mol_type = other DNA
aagcatcagcgtttaaatcggggcgagagttcgccgcatatgtcggtctggttccaaaacaagccggctccggag

SEQ ID NO: 401325 - DNA, 75 bp, synthetic construct
  source 1..75: mol_type = other DNA
gaatcctgcaaagatcgacgttttgtatccctcattcaggggctaactccggaacagatagatcgaattcagtga

SEQ ID NO: 401326 - DNA, 75 bp, synthetic construct
  source 1..75: mol_type = other DNA
tgggtaacgacttgggaggattccgccgaacaggtccgagatatttctggaagcctactgccagcagaattggat

SEQ ID NO: 401327 - DNA, 75 bp, synthetic construct
  source 1..75: mol_type = other DNA
ccagctggcttaaaagaaagccaggtacgccggaattaagtctggaaaggcccctgtttgatacagaagtttatg

SEQ ID NO: 401328 - DNA, 75 bp, synthetic construct
  source 1..75: mol_type = other DNA
acattttatattttgcaggataacaaatctccttatagatttaatcaactttcatcaggctatcagtctatttta

SEQ ID NO: 401329 - DNA, 75 bp, synthetic construct
  source 1..75: mol_type = other DNA
cttacagcctttgtcgcccaggcgctgacgcagaacatccgagtttatctcgcaggagaggcccattcgctcgtg

SEQ ID NO: 401330 - DNA, 75 bp, synthetic construct
  source 1..75: mol_type = other DNA
atgtctgatcccttttcccggttggcagcgcgtatggatgcgatcacggtcagaaagatgggaaagacagcctcg

SEQ ID NO: 401331 - DNA, 75 bp, synthetic construct
  source 1..75: mol_type = other DNA
gggggcgctttcgggcagccagttgtcactggtggtgttttcagcccggtaccgtccggcccgtcatgatgttgt

SEQ ID NO: 401332 - DNA, 75 bp, synthetic construct
  source 1..75: mol_type = other DNA
gtccgatggtggcggtgaatgcgggcgatcgttttgaagcccatatcgaaggcataggttcagttgctgcgacat

SEQ ID NO: 401333 - DNA, 75 bp, synthetic construct
  source 1..75: mol_type = other DNA
atgggttccaccagaaaggggatgctgaacgttctaattgccgccgtattgtggggaagttcaggtgtctgcgca

SEQ ID NO: 401334 - DNA, 75 bp, synthetic construct
  source 1..75: mol_type = other DNA
tgacgtcgcttatcggtacttttttgctggtgactcacggaaatcccacctcactctcgatttctcccgcagcac

SEQ ID NO: 401335 - DNA, 75 bp, synthetic construct
  source 1..75: mol_type = other DNA
cacccgacagggcgtcctgtaaacgggtttcatcataaaaaaaccaaccgtccggactgggacggaatgtactga

SEQ ID NO: 401336 - DNA, 75 bp, synthetic construct
  source 1..75: mol_type = other DNA
tgttgtgcatggcgggctgcctgaccagccttgagcgcaactactcccgcctgtggtcggaaacctttgaagacg

SEQ ID NO: 401337 - DNA, 75 bp, synthetic construct
  source 1..75: mol_type = other DNA
tgtttgcgtgaatggtcatgttatttcagcaatcagaacagaaacggcaactgtttttgattatctctgcatgat

SEQ ID NO: 401338 - DNA, 75 bp, synthetic construct
  source 1..75: mol_type = other DNA
gacccggcatacaccaaaaaagaaaccatcgataatatgattcgtaatgtgcgcaatgctttttcagggctatat

SEQ ID NO: 401339 - DNA, 75 bp, synthetic construct
  source 1..75: mol_type = other DNA
tgtttatgacggacaacaatggacggtcacacggcatgaacgttttaacggtaagccaatgatctttattgagta

SEQ ID NO: 401340 - DNA, 75 bp, synthetic construct
  source 1..75: mol_type = other DNA
acgagaaattgtgataggcatagataatacttatccgacaattatttttgatcagttgattagtctcggagataa

SEQ ID NO: 401341 - DNA, 75 bp, synthetic construct
  source 1..75: mol_type = other DNA
cacgccggacatgccgggcggtgaggcggcgatggttgaactgctggggcgcaacctacaactaaccgctgtatt

SEQ ID NO: 401342 - DNA, 75 bp, synthetic construct
  source 1..75: mol_type = other DNA
gctaataggcaatagctatcatgaagcggaaaaagagcgtcacgccattgaggtgttaattcgccagcgttgtaa

SEQ ID NO: 401343 - DNA, 75 bp, synthetic construct
  source 1..75: mol_type = other DNA
cgcggcgcgttaagcgacgccaacgccgcaggctggctgacgcggttgtttaaccatcctctgttcccgatttaa

SEQ ID NO: 401344 - DNA, 75 bp, synthetic construct
  source 1..75: mol_type = other DNA
atgtgcacacgcttgttgtcggatgcgacgctgacgcgtcttatccgacctacaaaagcgcataactcactgtat

SEQ ID NO: 401345 - DNA, 75 bp, synthetic construct
  source 1..75: mol_type = other DNA
ctggtgaatccggcaacgctgaaatattttgatgcgccgcacaggccgatgtatatgcaggaatatctttattca

SEQ ID NO: 401346 - DNA, 75 bp, synthetic construct
  source 1..75: mol_type = other DNA
atgcgcaaatggtgtgctgagcacatggcttcacttcatgttaagcgattttatgacagctggctggaaaccatc

SEQ ID NO: 401347 - DNA, 75 bp, synthetic construct
  source 1..75: mol_type = other DNA
ctattcgctggggtattgcacccagcaccattgccagtgacgttacccgtaacccgagcaagctccctccgttca

SEQ ID NO: 401348 - DNA, 75 bp, synthetic construct
  source 1..75: mol_type = other DNA
gacgactctggctgcatcaatatcaaatgttacccctgagttaataatgtcaacagtaacaccctccccctctgc

SEQ ID NO: 401349 - DNA, 75 bp, synthetic construct
  source 1..75: mol_type = other DNA
aagcaaaacgtgagaatttggctatcacgctggaaaacggcccggacaatactctgacaattcatcctgtcacag

SEQ ID NO: 401350 - DNA, 75 bp, synthetic construct
  source 1..75: mol_type = other DNA
ggattgtattacgctgaccacattaccgcggttagtccgacctacgctcgtgagattactgaacctcagtttgcc

SEQ ID NO: 401351 - DNA, 75 bp, synthetic construct
  source 1..75: mol_type = other DNA
ttttctgcaaataaacgacgcagttcaaggtgtttgtgttctttaccatccaaaagaaagtcgatttgataataa

SEQ ID NO: 401352 - DNA, 75 bp, synthetic construct
  source 1..75: mol_type = other DNA
ttccaccggacaatacccccccgacagggcgttctgtaaacggatttcatcataaaaaaaccaaccgcccgaact

SEQ ID NO: 401353 - DNA, 75 bp, synthetic construct
  source 1..75: mol_type = other DNA
ctgaaaattgccagagaatataaatcaacatggtcgaaaaactccacccgcactgaggatgaagtgatccgacag

SEQ ID NO: 401354 - DNA, 75 bp, synthetic construct
  source 1..75: mol_type = other DNA
aagaaagaaaatccggcgcaacccgagaagagtttaacgaagcgtggaggcgattaagtgagagagggtatcaat

SEQ ID NO: 401355 - DNA, 75 bp, synthetic construct
  source 1..75: mol_type = other DNA
tcattcttgccggagcttcgctggttgctggctttatcctgctgaaaaagcataaagaccgtgatcaaaaagtcg

SEQ ID NO: 401356 - DNA, 75 bp, synthetic construct
  source 1..75: mol_type = other DNA
tcggcagacgccgtggtcttctcgccggacggtaaatggctggcgtggatggaagcaggtcagctgtggatcacc

SEQ ID NO: 401357 - DNA, 75 bp, synthetic construct
  source 1..75: mol_type = other DNA
ttaacccataacaaaacggatatccagtctgcatttaactggcatccatcaggagagtggctgggagttgtgctg

SEQ ID NO: 401358 - DNA, 75 bp, synthetic construct
  source 1..75: mol_type = other DNA
tatgttttcatccatggcccggaaaatcctgatgaaacatggcattacgacttccatcatcgacgcggagtcatt

SEQ ID NO: 401359 - DNA, 75 bp, synthetic construct
  source 1..75: mol_type = other DNA
caaactttgtcgttaacggcagtttgattctggcgttttttttatttggtggtcattggtacgtccctgacattt

SEQ ID NO: 401360 - DNA, 75 bp, synthetic construct
  source 1..75: mol_type = other DNA
atggctgcatttaatattcctgatatttacggacgcttttacctggtgaatgtcgataacgtgaaagtgatttca

SEQ ID NO: 401361 - DNA, 75 bp, synthetic construct
  source 1..75: mol_type = other DNA
caccattaaatcgccagccacaagttgttgaagctgcggatgcaaccaaagaagcctggttagcgcttaagcgta

SEQ ID NO: 401362 - DNA, 75 bp, synthetic construct
  source 1..75: mol_type = other DNA
cgccaataggagtttggtacatatttttgttactcatggtgaaagtcataaattaacttcaattaaaccaattat

SEQ ID NO: 401363 - DNA, 75 bp, synthetic construct
  source 1..75: mol_type = other DNA
attaaattaggaaatactttcattggacataattattttcagtttgatgtaaattctcgttctgctgtatatgct

SEQ ID NO: 401364 - DNA, 75 bp, synthetic construct
  source 1..75: mol_type = other DNA
caagggacaaattttgtcgttaacggaagtttgattctggcgttttttatttggtggtcattggtacgtccctga

SEQ ID NO: 401365 - DNA, 75 bp, synthetic construct
  source 1..75: mol_type = other DNA
atgaaacagataacctttgctccccgtaatcacctgctcaccaatacctggacgcccgacagccagtggctggta

SEQ ID NO: 401366 - DNA, 75 bp, synthetic construct
  source 1..75: mol_type = other DNA
ccgctgccattgtctggaaaattatccgggcgttgtggcgctggttgcgtaaacctcaacaaccccgtaaggagc

SEQ ID NO: 401367 - DNA, 75 bp, synthetic construct
  source 1..75: mol_type = other DNA
atgcttattgcgagtgatataaataatttacatacctgttttgttaacgctactattgcaaatagtctgaaacca

SEQ ID NO: 401368 - DNA, 75 bp, synthetic construct
  source 1..75: mol_type = other DNA
aatggagatgtatgggagggggttggtaaatatcattccaaaacccctacctataagtataagtatatagaaaaa

SEQ ID NO: 401369 - DNA, 75 bp, synthetic construct
  source 1..75: mol_type = other DNA
gaagaggcgctttcccccctgaaaaactatctgcaggagctgcccggcttcaacatggcacatgtcaggacaccg

SEQ ID NO: 401370 - DNA, 75 bp, synthetic construct
  source 1..75: mol_type = other DNA
gcctcctcagctgtcgtccggggatggggagtgcgatattatacctttcagtctgtccggcacccggccttcccc

SEQ ID NO: 401371 - DNA, 75 bp, synthetic construct
  source 1..75: mol_type = other DNA
gtaagaaagacaccgcgtattcctgccgttccgctcacggaacttaaccgcgagcagaagtggcagatgatgttg

SEQ ID NO: 401372 - DNA, 75 bp, synthetic construct
  source 1..75: mol_type = other DNA
gagccgcgccagttaacccataacaaaacggatattcagtctgcatttaactggcatccgtcaggagaatggttg

SEQ ID NO: 401373 - DNA, 75 bp, synthetic construct
  source 1..75: mol_type = other DNA
ggcagtcatgtacatgtctttagcccgaacggtgaaatggtgagttttacctataacgaccatgtactacatgaa

SEQ ID NO: 401374 - DNA, 75 bp, synthetic construct
  source 1..75: mol_type = other DNA
tgagcgtgtgaatatccataccggcgaggttgaagttatttaccgggcgtcacagggtgcacacgttggcgtggt

SEQ ID NO: 401375 - DNA, 75 bp, synthetic construct
  source 1..75: mol_type = other DNA
tcatcgaccgcatgaacgacggtggcggctgcacgatttcgtttacctgggatagctatcgggagaacaggtcat

SEQ ID NO: 401376 - DNA, 75 bp, synthetic construct
  source 1..75: mol_type = other DNA
agcagcctgatcaagctgccgtcaccgccgactcgttgtcctggctgccttcgcgatgagctgaccttcctgtat

SEQ ID NO: 401377 - DNA, 75 bp, synthetic construct
  source 1..75: mol_type = other DNA
tcggcagacgccgtggtcttctcgccagatggtcaatggctggcgtggatggaagctggccagttgtgggtcacc

SEQ ID NO: 401378 - DNA, 75 bp, synthetic construct
  source 1..75: mol_type = other DNA
ttcacctaaaggttctgctgcaatccttcgtctttgcttacaaaaattgatggtgcatctcggtttagagggaga

SEQ ID NO: 401379 - DNA, 75 bp, synthetic construct
  source 1..75: mol_type = other DNA
ttgctgatgacatggataatctggtgctgcccgcgtcacttaaaccgctacagcataaactgttcgggctgacca

SEQ ID NO: 401380 - DNA, 75 bp, synthetic construct
  source 1..75: mol_type = other DNA
ttgccgacgatatggacaatctggtgctacccgcgtcgctcaaaccgcttcagcataaattgttcggcctgacta

SEQ ID NO: 401381 - DNA, 75 bp, synthetic construct
  source 1..75: mol_type = other DNA
ggctgatggcggaatgggctaccgacgccgtatgccgcaaactgggcaacacgcgcccctgcactaccgccgacc

SEQ ID NO: 401382 - DNA, 75 bp, synthetic construct
  source 1..75: mol_type = other DNA
gacgaaattgacgacaatcgggtgacggcagaagaagtcgatattttattgcgcgaaggggaaaaactggcgccg

SEQ ID NO: 401383 - DNA, 75 bp, synthetic construct
  source 1..75: mol_type = other DNA
ccgactacatggaagccagaagcatcattaatctgtcacctaagggcgctgccgcactcctgcgcttaagtcttc

SEQ ID NO: 401384 - DNA, 75 bp, synthetic construct
  source 1..75: mol_type = other DNA
atccgggcggcaaactacccctttattgccgacgatatggacaatctggtcctgcctgcgtcactcaaaccgctg

SEQ ID NO: 401385 - DNA, 75 bp, synthetic construct
  source 1..75: mol_type = other DNA
gaaatccttggccctgtcgatgatatcgacctgtttaccgccttctggaacgaaacgggaaccctgctctggcat

SEQ ID NO: 401386 - DNA, 75 bp, synthetic construct
  source 1..75: mol_type = other DNA
atgtttaaactcactacccccaccagtcttccccttctcaacctgcccacctccgcgctggaagccctcagaaat

SEQ ID NO: 401387 - DNA, 75 bp, synthetic construct
  source 1..75: mol_type = other DNA
cctttacctcgcgatgcagtttggcattcgcgcagcaaactacccctttattgccgatgatatggacaacctggt

SEQ ID NO: 401388 - DNA, 75 bp, synthetic construct
  source 1..75: mol_type = other DNA
gctacccgcgtcgctcaaaccgcttcagcacaaattgttcggcctgactatcgacccggaacgtctggcggcgat

SEQ ID NO: 401389 - DNA, 75 bp, synthetic construct
  source 1..75: mol_type = other DNA
gaatggaagtagctgaagtagaagcgctgtaccgcaaaaatcaaatcccgtggatcaacagtaccaattattcgg

SEQ ID NO: 401390 - DNA, 75 bp, synthetic construct
  source 1..75: mol_type = other DNA
ggacgtaacgtcagccgtggcatcgtgctgctcgaccatgctgaacgcgatggtctggacgggtttatcaccatc

SEQ ID NO: 401391 - DNA, 75 bp, synthetic construct
  source 1..75: mol_type = other DNA
tgccgccatcggacgttaccgtcacgctggaaaaacagcagcaggacaaatggaccccaattgccagcggcaaaa

SEQ ID NO: 401392 - DNA, 75 bp, synthetic construct
  source 1..75: mol_type = other DNA
ggtaaccttgcacggtgaaggtgcgttaaatgagcatctactaaaaacctatgagcaaagcccacaatatatgta

SEQ ID NO: 401393 - DNA, 75 bp, synthetic construct
  source 1..75: mol_type = other DNA
cagggaagacattgatcctctatcatcgctgtcaggaattagcgaaaaaaaatgacagcgaaaagccaatacttg

SEQ ID NO: 401394 - DNA, 75 bp, synthetic construct
  source 1..75: mol_type = other DNA
actggcgcaacagcagggtttgcagatttattatcaatatcagttacagaatttatcccgtaaggatgactgttg

SEQ ID NO: 401395 - DNA, 75 bp, synthetic construct
  source 1..75: mol_type = other DNA
ttattgcgcggatgaggcccccgcactgggtgcttccggcaatcgccagggggcgctgtatccgttattaagcaa

SEQ ID NO: 401396 - DNA, 75 bp, synthetic construct
  source 1..75: mol_type = other DNA
gtggcgaacttgagcaggcaattacagcgtttgagccagtagtgcagcggcatgaaatggcggtggccgccgaac

SEQ ID NO: 401397 - DNA, 75 bp, synthetic construct
  source 1..75: mol_type = other DNA
atgagccacatcgaaagacttatgtacacgattattatttttggcctcactctctggttgatgccgaaagagttt

SEQ ID NO: 401398 - DNA, 75 bp, synthetic construct
  source 1..75: mol_type = other DNA
tgcctgtgcgtatccaacaagctgctgacatttgtcgtatcgttggtaatcaggccgtgcatcccggagagatta

SEQ ID NO: 401399 - DNA, 75 bp, synthetic construct
  source 1..75: mol_type = other DNA
actgtgtcgaaccaaccaacggcctgtttatcaccctgccggaagatgatctctccttccaggcgacttttattc

SEQ ID NO: 401400 - DNA, 75 bp, synthetic construct
  source 1..75: mol_type = other DNA
cccgaacaaactgcgaccacgggcgattatcgtgtcatatttaaaaccggggactatttcaagcaacaaaatctt

SEQ ID NO: 401401 - DNA, 75 bp, synthetic construct
  source 1..75: mol_type = other DNA
atgtcgttatttacaaccggaggcgcactccaccatttaaatttaacagacaagaccgactctttatggatatcg

SEQ ID NO: 401402 - DNA, 75 bp, synthetic construct
  source 1..75: mol_type = other DNA
cgagtattgcttcgtttatctgagaaagaaatcgctgtatttaaagatttccttaaaacaggaaatcttattatc

SEQ ID NO: 401403 - DNA, 75 bp, synthetic construct
  source 1..75: mol_type = other DNA
atgattctgactctgaatgataagcgtgaaatatcgcaaatcatcgcaagttttactgatgaagattacgaacga

SEQ ID NO: 401404 - DNA, 75 bp, synthetic construct
  source 1..75: mol_type = other DNA
tgccattgatgcaggaaaatgaaaagttgtatcagttgccggggagtgaattgctgctggtattgaccgggccgg

SEQ ID NO: 401405 - DNA, 75 bp, synthetic construct
  source 1..75: mol_type = other DNA
agccaattcgcaacaaagagggtgaaggttatgatgagatcctcgcgcgactgaaatatgacggcggcattatga

SEQ ID NO: 401406 - DNA, 75 bp, synthetic construct
  source 1..75: mol_type = other DNA
tttaccctcggggtcggtaagcttcgctatccgtttttaaatctcacctgggctgtttcaacgctttgcctgctg

SEQ ID NO: 401407 - DNA, 75 bp, synthetic construct
  source 1..75: mol_type = other DNA
aattataaccagaactttttgcaaggggtactaaccgaatattcgctggcatttattctcgcagtactgatttcc

SEQ ID NO: 401408 - DNA, 75 bp, synthetic construct
  source 1..75: mol_type = other DNA
gtgcttttgccgttacgcaccacgccttcagtagcggagcaagaggcgggcaagagtttttgctgcctgcgcatt

SEQ ID NO: 401409 - DNA, 75 bp, synthetic construct
  source 1..75: mol_type = other DNA
gctatccgtttttaaatctcacctgggctgtctcgactcttttcctcctgaattacaaccagaactttttacaag

SEQ ID NO: 401410 - DNA, 75 bp, synthetic construct
  source 1..75: mol_type = other DNA
aagtttattctgcccgcgattgatggctccacggtgaagcagaaactgttcctcgtggcgctgctggtgcttgcg

SEQ ID NO: 401411 - DNA, 75 bp, synthetic construct
  source 1..75: mol_type = other DNA
tttggcctgaaatacgatccctccgatcgcgtcatcttcctctatctggtggccttgctgctggtggtgctaagt

SEQ ID NO: 401412 - DNA, 75 bp, synthetic construct
  source 1..75: mol_type = other DNA
gtcagcccggaatccttcacctttgctgaatcggcgtttgtactggcgatagtggtgctcggcggtatgggatcg

SEQ ID NO: 401413 - DNA, 75 bp, synthetic construct
  source 1..75: mol_type = other DNA
taagcaatatgccattccctcaacccttggctggcgtaacggcgataacgcctggtatgacttcattatggatat

SEQ ID NO: 401414 - DNA, 75 bp, synthetic construct
  source 1..75: mol_type = other DNA
gataatactcaataatgatgatctcgagcaaatcgcatttattgttgagaattttattagaactttgaataatac

SEQ ID NO: 401415 - DNA, 75 bp, synthetic construct
  source 1..75: mol_type = other DNA
cgcgagttgatgcgtgatttcaacgaatacagcatgttaatgctcggtggcttgatggtgctgatgatgatctgg

SEQ ID NO: 401416 - DNA, 75 bp, synthetic construct
  source 1..75: mol_type = other DNA
ttatgctggcgggtgtactgctcgccagctttaatgtctctgcgatcccggggctctggcagcagggttacggtc

SEQ ID NO: 401417 - DNA, 75 bp, synthetic construct
  source 1..75: mol_type = other DNA
attgcccgctcacaccacggctccgtctctaaagaacaacgagcaatcaccgagcaggcgctgaaatcgggtgag

SEQ ID NO: 401418 - DNA, 75 bp, synthetic construct
  source 1..75: mol_type = other DNA
tacgagaaagaagcgcagcagctgcttgcgctggaaaatccgctgccgttgccagcttacgagcgtattctgaaa

SEQ ID NO: 401419 - DNA, 75 bp, synthetic construct
  source 1..75: mol_type = other DNA
actccttggtgggtgaattacttctcaattggcgggaatttagaacaagaaagtaagggagcgttaatttttctt

SEQ ID NO: 401420 - DNA, 75 bp, synthetic construct
  source 1..75: mol_type = other DNA
tgggatgcaataaccgaaagagttaaggctgaatatgccttcgcaatattcaaacgcagacacatttatggagaa

SEQ ID NO: 401421 - DNA, 75 bp, synthetic construct
  source 1..75: mol_type = other DNA
ccgtgtacaaagtagcgacgtttttattgcccgctcacaccacggctccgtctctaaagaacaccgagcaggcgc

SEQ ID NO: 401422 - DNA, 75 bp, synthetic construct
  source 1..75: mol_type = other DNA
gcaacgccgctttctgttgccagtgggttacaacgcattggtcgcgccggacatcaggttggcggtgtatctaaa

SEQ ID NO: 401423 - DNA, 75 bp, synthetic construct
  source 1..75: mol_type = other DNA
cgtaatccctggctgtcactctgggggcgtctctccgctgaagacaatgcacgagttaatgtcgccatgaaccag

SEQ ID NO: 401424 - DNA, 75 bp, synthetic construct
  source 1..75: mol_type = other DNA
cattagctatgctggcttctgtatcaacagcacaggctattcccaatatgtggacgagtggttttgggatgggtg

SEQ ID NO: 401425 - DNA, 75 bp, synthetic construct
  source 1..75: mol_type = other DNA
gttcccattaccttcatccctcggctggaggaatggcgataatgcctgggtgtcatttattgacgcactggggca

SEQ ID NO: 401426 - DNA, 75 bp, synthetic construct
  source 1..75: mol_type = other DNA
acaacatcgtgacttagatagtttcaagcgagtaatcgatggaaatgactataaagttgagttcggcataattac

SEQ ID NO: 401427 - DNA, 75 bp, synthetic construct
  source 1..75: mol_type = other DNA
tccggactcaggggaaaacggtggtcgctgtgctgcacgaccttaatcaggctagccggtactgcgatcaactgg

SEQ ID NO: 401428 - DNA, 75 bp, synthetic construct
  source 1..75: mol_type = other DNA
tcagcgccagcgcgcatttctggcaatggtcctggcccagaatacgcccgttgtattacttgatgagccaaccac

SEQ ID NO: 401429 - DNA, 75 bp, synthetic construct
  source 1..75: mol_type = other DNA
atgaataaaaaatttcttatattagcaccagtattattaacgttgattatctctcaactcccggtgccgctggga

SEQ ID NO: 401430 - DNA, 75 bp, synthetic construct
  source 1..75: mol_type = other DNA
tactttcttctggtttgccacgctggttgccctggcttctggtttatctgaagtggggtttgttcgctgggcagg

SEQ ID NO: 401431 - DNA, 75 bp, synthetic construct
  source 1..75: mol_type = other DNA
tgcgcagtgggttgggcaaacagtattttcccccatgctgaatacggatacgcctgaggacatcctgccgctgtt

SEQ ID NO: 401432 - DNA, 75 bp, synthetic construct
  source 1..75: mol_type = other DNA
agtttaaggaagaagctgtccgtcaggtcactgaacggggctattccgttgccgatgtttctgaacgcctcggcg

SEQ ID NO: 401433 - DNA, 75 bp, synthetic construct
  source 1..75: mol_type = other DNA
tgtcttcccggcactggaaccaaaacacaaaggtgctgcaatctcggtttacaacctctctgcgggtatgtctaa

SEQ ID NO: 401434 - DNA, 75 bp, synthetic construct
  source 1..75: mol_type = other DNA
tgttattcgctggtttggttgcctcgggatggcagcatcaagtttagcgttttactacatgccgcaatactttgg

SEQ ID NO: 401435 - DNA, 75 bp, synthetic construct
  source 1..75: mol_type = other DNA
tgtgctgtttctggtcttcggtctggggcaggcgaactatgcattaattctgctgttctatggcattcgtggtct

SEQ ID NO: 401436 - DNA, 75 bp, synthetic construct
  source 1..75: mol_type = other DNA
cctgtatgtgatagcgtttattatttgcccgtttattcgcgtcgaacaaccgggattctcaaatcagcaagtgtg

SEQ ID NO: 401437 - DNA, 75 bp, synthetic construct
  source 1..75: mol_type = other DNA
agaaaaataccaaagccagttataaaaccaaggtcaattatgtgcgttatgcggacgattttatcattacttgca

SEQ ID NO: 401438 - DNA, 75 bp, synthetic construct
  source 1..75: mol_type = other DNA
agtttggcgaaactgcgggatgctgacatgtcttttacccctatcaatatggaaactaccttggtgttcctatat

SEQ ID NO: 401439 - DNA, 75 bp, synthetic construct
  source 1..75: mol_type = other DNA
atcacgctctggcgacctatgcggaagcagataaagatcgtatcgcctatactctcgcgcaacgccgggcacatt

SEQ ID NO: 401440 - DNA, 75 bp, synthetic construct
  source 1..75: mol_type = other DNA
gctcactggatattgccattattggcatgagcgggcgtttttccggtgcggaatcggtgcccgagtggtgggata

SEQ ID NO: 401441 - DNA, 75 bp, synthetic construct
  source 1..75: mol_type = other DNA
agcgaacagcatgcccgggatttactggaagccaaaagcgagatcctgaaactacgggcgcagctaaaacgcacc

SEQ ID NO: 401442 - DNA, 75 bp, synthetic construct
  source 1..75: mol_type = other DNA
atgcgatcaagctggggatgattgaggttaaccccgctgctgcctttgatatgagtgacgcgggcggtaaggaaa

SEQ ID NO: 401443 - DNA, 75 bp, synthetic construct
  source 1..75: mol_type = other DNA
ggtatggcatttgccggaagaacgcagcaaaaacggagaccctattgatatacctctaccttctccagccgttga

SEQ ID NO: 401444 - DNA, 75 bp, synthetic construct
  source 1..75: mol_type = other DNA
gcgccagatacttccgagatggaaacatcccgatatccttcgccggagaattgataaggatattaacccctgcat

SEQ ID NO: 401445 - DNA, 75 bp, synthetic construct
  source 1..75: mol_type = other DNA
gcgctgaaatgccggacgtgccgaacttcactattcacgacttccgacgcaccgcacgtactcatttagcagcgc

SEQ ID NO: 401446 - DNA, 75 bp, synthetic construct
  source 1..75: mol_type = other DNA
tactgctagggtttattctcgcgctgatgcgcctttcgccaatctggcccgtgcgctggctggcgcgtttttata

SEQ ID NO: 401447 - DNA, 75 bp, synthetic construct
  source 1..75: mol_type = other DNA
tccgcgcatggataaaggcgggaaacagatttgatggcaaggcagacggcaacggcctttatatttgctacccca

SEQ ID NO: 401448 - DNA, 75 bp, synthetic construct
  source 1..75: mol_type = other DNA
ggctatgacgttgcaggagagaagcagaagcgcaaaaccgaagcactggcgaagatggaagcagagaagaacgct

SEQ ID NO: 401449 - DNA, 75 bp, synthetic construct
  source 1..75: mol_type = other DNA
atggttgagagagctacacaccttttcatgtaatagcgcatgggtgcttccagccaggaagatgcaaaacagaat

SEQ ID NO: 401450 - DNA, 75 bp, synthetic construct
  source 1..75: mol_type = other DNA
gatcacggaacgcggctattccgttgccaaagtatttgaccgtctgggcgtttctgcacacagcctctacaagtg

SEQ ID NO: 401451 - DNA, 75 bp, synthetic construct
  source 1..75: mol_type = other DNA
ttgataaagacataaatccagccataggccacatgaaggttgaagatgtaaaaccacgccatattgatgctatgc

SEQ ID NO: 401452 - DNA, 75 bp, synthetic construct
  source 1..75: mol_type = other DNA
cccatagatattccacttgttccccccgttattgaatggctgaaagaactgcgcgtcttgtcatgcaatagcgcg

SEQ ID NO: 401453 - DNA, 75 bp, synthetic construct
  source 1..75: mol_type = other DNA
caaaggtaaaaacgatcaccaccgtgtagagagcctgttcaaagcctttggtcgcaccctgcgccaggccatccg

SEQ ID NO: 401454 - DNA, 75 bp, synthetic construct
  source 1..75: mol_type = other DNA
tattcagagataatgatgattgggatattcatcacatcatcagacgggtagatggaggcggtgacgaaatcgata

SEQ ID NO: 401455 - DNA, 75 bp, synthetic construct
  source 1..75: mol_type = other DNA
acgcaacgctcacggaatatgcctctctggcggaacagaaagatgaagcggtaagcgcaccgatttatgccgatc

SEQ ID NO: 401456 - DNA, 75 bp, synthetic construct
  source 1..75: mol_type = other DNA
ccggggtttgcaggaagccggattcaccatgcaaaagcgcaaaggatttgggcgtaaacgggaaatgctttgtgg

SEQ ID NO: 401457 - DNA, 75 bp, synthetic construct
  source 1..75: mol_type = other DNA
ccttgcccggttgccatcgtttattgctcgatgaaggccgcgtaacgctggatttatggtttggcgatataaacg

SEQ ID NO: 401458 - DNA, 75 bp, synthetic construct
  source 1..75: mol_type = other DNA
aaactgaacgcgaagacatggggcgtggagtttgtgcaggacgggagaaggaaatttctggtcatcccgcagggg

SEQ ID NO: 401459 - DNA, 75 bp, synthetic construct
  source 1..75: mol_type = other DNA
cggcaccggattaaacttcctgacgctatggcaggcatttgatcagtttcgcgaagcgcatccacaggcgcaatt

SEQ ID NO: 401460 - DNA, 75 bp, synthetic construct
  source 1..75: mol_type = other DNA
attcattatcaatatcagttacaggatttatcccgtaaggatgactgttggttgttgaattttgcaggagatcag

SEQ ID NO: 401461 - DNA, 75 bp, synthetic construct
  source 1..75: mol_type = other DNA
gcctggtttctggacggctttgcgccagcgaaaaacccggatatgtggacgcaaaatctgtttaacgccatggca

SEQ ID NO: 401462 - DNA, 75 bp, synthetic construct
  source 1..75: mol_type = other DNA
gtgaaacactactccatacaacctgccaacctcgaatttaatgctgagggtacacctgtttcccgagattatgac

SEQ ID NO: 401463 - DNA, 75 bp, synthetic construct
  source 1..75: mol_type = other DNA
gatgtctatttttccaacgataacggactggaagagacacgctatgtttttctcggaggtaaccaattagaggca

SEQ ID NO: 401464 - DNA, 75 bp, synthetic construct
  source 1..75: mol_type = other DNA
ccttgcccggttgccatcgtttattgctcgatgaaggccacgtgacgctggatttatggtttggcgatataaacg

SEQ ID NO: 401465 - DNA, 75 bp, synthetic construct
  source 1..75: mol_type = other DNA
ctgggtgcttccggcaatcgccagggggcgctgtatccgctcttaagtaaacacgatgaggcgttgaatcgcttt

SEQ ID NO: 401466 - DNA, 75 bp, synthetic construct
  source 1..75: mol_type = other DNA
gcgcggtttgtgctctgccccgctgtgcgccgagattctggcggcacagatgagtgaagaacctgttccgatgga

SEQ ID NO: 401467 - DNA, 75 bp, synthetic construct
  source 1..75: mol_type = other DNA
accgtgctgaaaatgagcgtgaaacgctggctgtggctgattatcgtctcagtactgatgtttgccacgaccggg

SEQ ID NO: 401468 - DNA, 75 bp, synthetic construct
  source 1..75: mol_type = other DNA
ttaagggtgttgataagaaagttgcagctttatctttttccgctgcttctgctcttgctgtatctccgtcttttg

SEQ ID NO: 401469 - DNA, 75 bp, synthetic construct
  source 1..75: mol_type = other DNA
gcagcatgggaatgaagcgaattgtggtacaggtagtgaatcgctttggttatcgtcgggtactggtggcgacca

SEQ ID NO: 401470 - DNA, 75 bp, synthetic construct
  source 1..75: mol_type = other DNA
tttgatcaacattccggtggggattattggcgcgatcgccacactgatgttaatgccgaactacaccatgcagac

SEQ ID NO: 401471 - DNA, 75 bp, synthetic construct
  source 1..75: mol_type = other DNA
ttaataaacgtaaattagcgcttgaattattacgtgattggataagacaatttaatcctgcaagttataatgatt

SEQ ID NO: 401472 - DNA, 75 bp, synthetic construct
  source 1..75: mol_type = other DNA
gcgcggatagaggaagtggtgaaacaggaattcggaaacagcgtcattgtcgacgccgcagacgtggacggtgag

SEQ ID NO: 401473 - DNA, 75 bp, synthetic construct
  source 1..75: mol_type = other DNA
gtgtttttcaatgaaaaggtatcccctgcctatggtgaaggccttcaactggccttaatggcaaatcgtgaattc

SEQ ID NO: 401474 - DNA, 75 bp, synthetic construct
  source 1..75: mol_type = other DNA
caacgttgccggcggcgccatcgccctcggccatccgctcggcgccaccggcgcgatgctgctcggcacggtgct

SEQ ID NO: 401475 - DNA, 75 bp, synthetic construct
  source 1..75: mol_type = other DNA
ctgaatgccatcgagctccggcagagggagaatgagtatcagaaaacactggagctggagcgccagccgcagaaa

SEQ ID NO: 401476 - DNA, 75 bp, synthetic construct
  source 1..75: mol_type = other DNA
aagaaatacacgtccggtgttctgtcgttcgcggagaaggaactgccgccgggaggacgtgaaaaagtgatggag

SEQ ID NO: 401477 - DNA, 75 bp, synthetic construct
  source 1..75: mol_type = other DNA
aatccccgactccatcgttgacaccgaatacaacggtaacggagaagaagtctaccgggtgaactggcaggatat

SEQ ID NO: 401478 - DNA, 75 bp, synthetic construct
  source 1..75: mol_type = other DNA
taccgccaaaacagataaggatggacgaattaaggcactgtggcccgagcaaactgcaactacgggcgattaccg

SEQ ID NO: 401479 - DNA, 75 bp, synthetic construct
  source 1..75: mol_type = other DNA
atggatggcggaacagccgctttccccgggccagagttacgacatcaaaattgccggtaagaagacgcgtgctcg

SEQ ID NO: 401480 - DNA, 75 bp, synthetic construct
  source 1..75: mol_type = other DNA
agcgccgggaactggcagcaaggttacgcctggtgaaaccgaaacggcgtaaagactacaaacagcgaattacag

SEQ ID NO: 401481 - DNA, 75 bp, synthetic construct
  source 1..75: mol_type = other DNA
ggcggcagtattccgtcaggagcaggcttgcgtatcttctatcggaaccagcgtttgtgggaagatgataagtgg

SEQ ID NO: 401482 - DNA, 75 bp, synthetic construct
  source 1..75: mol_type = other DNA
ccggtactggatgatccgcgtcttgatgccattctggctgctgctgatgctggctgttttgccacctacattatg

SEQ ID NO: 401483 - DNA, 75 bp, synthetic construct
  source 1..75: mol_type = other DNA
atgagtcatgccgatatgaacaactgctgcggctttaacgaagctgccgcatcgttctcatggaacagctcgaaa

SEQ ID NO: 401484 - DNA, 75 bp, synthetic construct
  source 1..75: mol_type = other DNA
cattcgtgaagaccgcgaggagctgggtaataacacggggccacgctttaagtctgagctgataaacccgcgcaa

SEQ ID NO: 401485 - DNA, 75 bp, synthetic construct
  source 1..75: mol_type = other DNA
gaatcccgtgatcctgtccaacgtaaaatggagcaggataagctcattagccgggcaaagatggcgcatgagcag

SEQ ID NO: 401486 - DNA, 75 bp, synthetic construct
  source 1..75: mol_type = other DNA
ttaaaccgaaacggcgtaaagactacaaacagcgaattacagatcatcagcgacagcagctcgtctatgaactga

SEQ ID NO: 401487 - DNA, 75 bp, synthetic construct
  source 1..75: mol_type = other DNA
caaggaaacggggaaatccctgcgtgataatgctgaatacgttaatgcctgggcgtctttgcatcgtgttcagca

SEQ ID NO: 401488 - DNA, 75 bp, synthetic construct
  source 1..75: mol_type = other DNA
tatcgcaagctgtggcagatgcgctgtgaatggcgggaggaacaactgcgtgcagtatgcctggttaacaagaaa

SEQ ID NO: 401489 - DNA, 75 bp, synthetic construct
  source 1..75: mol_type = other DNA
cagcgttttaatccggatatggtcattctggcggacgtcaacgcccagccttctcatatcagcaagccgctgatg

SEQ ID NO: 401490 - DNA, 75 bp, synthetic construct
  source 1..75: mol_type = other DNA
tgtctggagcgactggattgtgtacgtgacagtcagctatctgtttctttccgttttatggcaagccatcaaggg

SEQ ID NO: 401491 - DNA, 75 bp, synthetic construct
  source 1..75: mol_type = other DNA
gcgcggcggcagtattccgtctggtgccgggctacgtattttttaccgcaaccaccgcctgcaggaagatgataa

SEQ ID NO: 401492 - DNA, 75 bp, synthetic construct
  source 1..75: mol_type = other DNA
cgaccagggcgcttgcgccccttggactcgtggcaataactgtccccttgctgaaaatttgaaccaacaagcgaa

SEQ ID NO: 401493 - DNA, 75 bp, synthetic construct
  source 1..75: mol_type = other DNA
tgggcgcggcgacgctgtgcgtggcgctgaaaacccaaaatagcaacctgcgccagttggcctcatcatcgggct

SEQ ID NO: 401494 - DNA, 75 bp, synthetic construct
  source 1..75: mol_type = other DNA
ccgctaactccgcgtcaggatattaaagcctttgtcgaactgcatatcgaacagggctgtgtgctggaaagtaat

SEQ ID NO: 401495 - DNA, 75 bp, synthetic construct
  source 1..75: mol_type = other DNA
tttcctcttttggcgctgacccaacgggtgggatgacccgtttactttattcgccggaatggctggaaacccagc

SEQ ID NO: 401496 - DNA, 75 bp, synthetic construct
  source 1..75: mol_type = other DNA
aatttacctaccagcgcgtgggcgatctcagcaccgagatgatcgagcacttcttccgttcgctttcatacacca

SEQ ID NO: 401497 - DNA, 75 bp, synthetic construct
  source 1..75: mol_type = other DNA
aatgacctggcctgaggcattcaccacggtaggaattgcgatggcggtggcgctggtggtgtattcgatttgccg

SEQ ID NO: 401498 - DNA, 75 bp, synthetic construct
  source 1..75: mol_type = other DNA
tccctgcgccttaccaccgccgcgcaggtcgattacggcgaacaactgatggtgcaatccgctaaggaggtgcag

SEQ ID NO: 401499 - DNA, 75 bp, synthetic construct
  source 1..75: mol_type = other DNA
ttggcaccacctctttacgtattgattacaacgagattgacgataatcgagtgacggcagaagaagttgatattc

SEQ ID NO: 401500 - DNA, 75 bp, synthetic construct
  source 1..75: mol_type = other DNA
gtttatcaccctgccggaagatgacctctccttccaggccacttttatccgcgcctgcgaagaagcagggatcag

SEQ ID NO: 401501 - DNA, 75 bp, synthetic construct
  source 1..75: mol_type = other DNA
atgaactcataccgggttcgctggcacgtatgctttgcgccgactggtggtatcgaaaattgtggaagatgcgtt

SEQ ID NO: 401502 - DNA, 75 bp, synthetic construct
  source 1..75: mol_type = other DNA
ccattgattgtcgtcataccgacgccgccgtgctgcgtgatttcacccaacagttagggaaggtgcgaataagcg

SEQ ID NO: 401503 - DNA, 75 bp, synthetic construct
  source 1..75: mol_type = other DNA
ccattgattgtcgtcataccgacgctgccgtgctgcgtgatttcacccaacagttagaaaacgacatgcgggcga

SEQ ID NO: 401504 - DNA, 75 bp, synthetic construct
  source 1..75: mol_type = other DNA
cggcggaacgcaccaatattaccgaccttgccgaaggggtcaaaacgttggcactcatgctttatcaacttgcct

SEQ ID NO: 401505 - DNA, 75 bp, synthetic construct
  source 1..75: mol_type = other DNA
ctgcgtggtggcagcattccatccggggccggtttacgtattttttaccgtaaccagcggctgcaggaagatgac

SEQ ID NO: 401506 - DNA, 75 bp, synthetic construct
  source 1..75: mol_type = other DNA
atatttatcaacaagtgagcaaaggcacattgcctgccgggatcgagtactggcaaccgctgttcttcagcgaac

SEQ ID NO: 401507 - DNA, 75 bp, synthetic construct
  source 1..75: mol_type = other DNA
tcgcgtcgggcgttcttcaccaccaggcatatgcatggctactgacgccgcatccaaaagcgatgactaccgatg

SEQ ID NO: 401508 - DNA, 75 bp, synthetic construct
  source 1..75: mol_type = other DNA
atacactgatccgcaacctcgcggagctgcatattggtcagccggtggtccatctggagcacggcgtcgggcgct

SEQ ID NO: 401509 - DNA, 75 bp, synthetic construct
  source 1..75: mol_type = other DNA
atacagactatcgcaaggctgctactgataaggtgtcgctggaggccgatcgtcttcgccgtgatgcaggtattg

SEQ ID NO: 401510 - DNA, 75 bp, synthetic construct
  source 1..75: mol_type = other DNA
caccggatacgaaaccgatacgcggaatgcgtaccgatcccccgactaacccattccaacccggtaaccagcagg

SEQ ID NO: 401511 - DNA, 75 bp, synthetic construct
  source 1..75: mol_type = other DNA
gcgtatttgacgttgacagccagcgtacgctggaagaagtagaagcgatcaatctgttgcccgcgcacgaatttc

SEQ ID NO: 401512 - DNA, 75 bp, synthetic construct
  source 1..75: mol_type = other DNA
aaagtgcgtgatgtggcggcagaattgctggatatctacgcgcaacgcgccgccaaagagggcttcgcgtttaaa

SEQ ID NO: 401513 - DNA, 75 bp, synthetic construct
  source 1..75: mol_type = other DNA
ccgatgcgtccactgttgccaccacaatcgctctggctgcgggtagacgagctcttttcagagctgaaaaactgg

SEQ ID NO: 401514 - DNA, 75 bp, synthetic construct
  source 1..75: mol_type = other DNA
gcgttttgagaatcgcggcgtcgatccgatgcgtccactgttgccaccacaatcgctctggctgcgggtagacga

SEQ ID NO: 401515 - DNA, 75 bp, synthetic construct
  source 1..75: mol_type = other DNA
cagcgtttcaacgtgctggtttgtaccacgattatcgaaaccgggatcgacatcccaaccgctaacaccattatt

SEQ ID NO: 401516 - DNA, 75 bp, synthetic construct
  source 1..75: mol_type = other DNA
acgatagtctggtggtacgggaggcgatcctgcgcgaaattctgcgcggggggcaggtttattatctctacaatg

SEQ ID NO: 401517 - DNA, 75 bp, synthetic construct
  source 1..75: mol_type = other DNA
gccgaacgtcacgccggaccggtggtgcttattgcgccagatatgcaaaatgccctgcgtttgcatgatgaaatc

SEQ ID NO: 401518 - DNA, 75 bp, synthetic construct
  source 1..75: mol_type = other DNA
gagcgtcgatttttgtgatgctcgtcaggggggcggagcctatggaaaaacgcctgcggcgttggcttcttccgg

SEQ ID NO: 401519 - DNA, 75 bp, synthetic construct
  source 1..75: mol_type = other DNA
acttcaactcgcaaatcgcccaggaatataaagccattgagaaaatcgctcagcaaaaacttgtcgatatggttc

SEQ ID NO: 401520 - DNA, 75 bp, synthetic construct
  source 1..75: mol_type = other DNA
ccacgatgcctctgaagtgctcactggcgatcttcctactccggtgaaatacttcaactcgcaaatcgcccagga

SEQ ID NO: 401521 - DNA, 75 bp, synthetic construct
  source 1..75: mol_type = other DNA
cggacggaaaatgtgtccgaacacagtttgcaggtagcgatggtcgcccatgcgctggcagccatcaagaatcgc

SEQ ID NO: 401522 - DNA, 75 bp, synthetic construct
  source 1..75: mol_type = other DNA
aaagcggcccgatcgaggccgccgtggcctttccatggaataccccaaaaaaagcggttaatccgtatctggacc

SEQ ID NO: 401523 - DNA, 75 bp, synthetic construct
  source 1..75: mol_type = other DNA
catacaaacagagcatttcagaacagcaacgactgcagctcgaggcagaactgagttccagaggatttgatgcaa

SEQ ID NO: 401524 - DNA, 75 bp, synthetic construct
  source 1..75: mol_type = other DNA
ggaggaacagctgcgtgctgtctgcctggtcaacaaaaaagcgtccccgtatgtcagctatgaagccgtgatcca

SEQ ID NO: 401525 - DNA, 75 bp, synthetic construct
  source 1..75: mol_type = other DNA
accggcgtattactactaccattggtttacgttatgaagatgccgcaaaagttggggctattgtcgaagccgtac

SEQ ID NO: 401526 - DNA, 75 bp, synthetic construct
  source 1..75: mol_type = other DNA
aaactcgcttttctcgtctattagcgtagaaaacccagggcgaatgactaaccgacgcattaccacaaccattgg

SEQ ID NO: 401527 - DNA, 75 bp, synthetic construct
  source 1..75: mol_type = other DNA
ttgataatcgcccactgtacgtaccaaactcgcttttttcgtccattagcgtagaaaacccggggcgaatgacca

SEQ ID NO: 401528 - DNA, 75 bp, synthetic construct
  source 1..75: mol_type = other DNA
ggtaaacgccagcgccagcaatccggcgcaccgccgtaacgaaatgatggcctgtgttaaagggctggagcttat

SEQ ID NO: 401529 - DNA, 75 bp, synthetic construct
  source 1..75: mol_type = other DNA
acagtcacacggcgcggatttcgcgttcccaagccagacgctgtatatggataacattacaccaccagaccaggg

SEQ ID NO: 401530 - DNA, 75 bp, synthetic construct
  source 1..75: mol_type = other DNA
attggtggtctggctgtcggtatggccggtaaagatattctgagtaacttcttttccgggattatgctctatttc

SEQ ID NO: 401531 - DNA, 75 bp, synthetic construct
  source 1..75: mol_type = other DNA
tgctgcatactaccggcggttatctggtgtacgcggcgctgacctttaaatatgtctttgattatcatccgggtg

SEQ ID NO: 401532 - DNA, 75 bp, synthetic construct
  source 1..75: mol_type = other DNA
tgtttattctctatacctccggttctaccggtaagccgaaaggcgtgctgcacactaccggcggttatctggtgt

SEQ ID NO: 401533 - DNA, 75 bp, synthetic construct
  source 1..75: mol_type = other DNA
gcaagcgagcgatcagcaccaggcggaagagatgaacgccgaagatccgctgtttattctctatacctccggttc

SEQ ID NO: 401534 - DNA, 75 bp, synthetic construct
  source 1..75: mol_type = other DNA
tgaaagggcgcggcggtgcaggcttttctaccggcctgaaatggagcctgatgccgaaagacgaatccatgaaca

SEQ ID NO: 401535 - DNA, 75 bp, synthetic construct
  source 1..75: mol_type = other DNA
tgaaatggagccaggcacctataaagaccgcctgttgatggagcaactgccgcacctgctggtggaaggtatgct

SEQ ID NO: 401536 - DNA, 75 bp, synthetic construct
  source 1..75: mol_type = other DNA
ccatgtcacacttaacggctcggaagaaagcattattactgacgatgaacgcccttttgtggctcatcgaccgtc

SEQ ID NO: 401537 - DNA, 75 bp, synthetic construct
  source 1..75: mol_type = other DNA
ctgccgaaggcagtctggtgatcaccgattcctggccgggtcaggcacgtacgctgtttggcgatcatgaacgct

SEQ ID NO: 401538 - DNA, 75 bp, synthetic construct
  source 1..75: mol_type = other DNA
gaagaaagcattattactgacgatgaacgcccttttgtggcacatcgaccgtcagcggtgcagagggaagtaaga

SEQ ID NO: 401539 - DNA, 75 bp, synthetic construct
  source 1..75: mol_type = other DNA
attgatacaaatgttattatttgtactgagtttaaataccagtatcgtttaaatcctgaatttttcagttttctt

SEQ ID NO: 401540 - DNA, 75 bp, synthetic construct
  source 1..75: mol_type = other DNA
aatctggcggcaaactgccttgaccgccatctgcaagaaaacggcgatcgcaccgccatcatctgggaaggcgac

SEQ ID NO: 401541 - DNA, 75 bp, synthetic construct
  source 1..75: mol_type = other DNA
attcggtgattttcggcggcttctcgccggaagccgttgccgggcgcattattgattctaactcacggttggtga

SEQ ID NO: 401542 - DNA, 75 bp, synthetic construct
  source 1..75: mol_type = other DNA
cgattcctggccgggtcaggcacgtacgctgtttggcgatcatgaacgctttgaacagacctatttctccacctt

SEQ ID NO: 401543 - DNA, 75 bp, synthetic construct
  source 1..75: mol_type = other DNA
tgaaatggagccgggcacttataaagaccgcctgctgatggagcaactaccgcacctgctggtggaaggtatgct

SEQ ID NO: 401544 - DNA, 75 bp, synthetic construct
  source 1..75: mol_type = other DNA
tgctcaataacaccgaaattaccggcggtccgaacggcatcagtcagatcccgaaaccgactttcttcggcctcg

SEQ ID NO: 401545 - DNA, 75 bp, synthetic construct
  source 1..75: mol_type = other DNA
ggtggagtactaaagagcaagactcaggagactccttaagacgacaaacaaacctcattgatgctttctactcta

SEQ ID NO: 401546 - DNA, 75 bp, synthetic construct
  source 1..75: mol_type = other DNA
tacacagctttgcagtcgtctgtttagcaaactatcacagctacacgatgaagctaccgatacagctaaattaga

SEQ ID NO: 401547 - DNA, 75 bp, synthetic construct
  source 1..75: mol_type = other DNA
ggcacggcggtggtctttttctttcagattttgcgacctgctttccagaaagggttgaaaagcgtttccgggccg

SEQ ID NO: 401548 - DNA, 75 bp, synthetic construct
  source 1..75: mol_type = other DNA
gttgctgctggtggtgttaagcctgtttgtcattaaccgcctgctgcggatgccgctggggcgtgcgtgggaagc

SEQ ID NO: 401549 - DNA, 75 bp, synthetic construct
  source 1..75: mol_type = other DNA
tctcgtggcgctgctggtgcttgcggtggcgtggccgtttatggtttcacgcgggacggtggatatcgccaccct

SEQ ID NO: 401550 - DNA, 75 bp, synthetic construct
  source 1..75: mol_type = other DNA
gccgcagtaacgatatccttcgccaggcttccgcttattttgtgaaggcggagttcgaccgcctctggaaaaaat

SEQ ID NO: 401551 - DNA, 75 bp, synthetic construct
  source 1..75: mol_type = other DNA
tccagttgcaggcgcttgaagcgctgctgcgtgaacatcagcactggcgcaatgatgaaccccagccgcatctat

SEQ ID NO: 401552 - DNA, 75 bp, synthetic construct
  source 1..75: mol_type = other DNA
gagatgcagtcattagatgatatgcttatttttggtgaaccagtaacaaggatttatcctgctggtgatatggaa

SEQ ID NO: 401553 - DNA, 75 bp, synthetic construct
  source 1..75: mol_type = other DNA
cagattattattaagcgtctggtgaaagagattgttgtttctggtaatgaaaagctggtggatatatatcttcac

SEQ ID NO: 401554 - DNA, 75 bp, synthetic construct
  source 1..75: mol_type = other DNA
ccatgctataacgttgtgtcgcgtaagcgacgccgtttcctcaatcgctggattaaatcgctggcgacggtcgca

SEQ ID NO: 401555 - DNA, 75 bp, synthetic construct
  source 1..75: mol_type = other DNA
gtgataaaaaaactggcggattatctgctgctacaacctgatacggcgcgccatttaagctctcagcaactggcc

SEQ ID NO: 401556 - DNA, 75 bp, synthetic construct
  source 1..75: mol_type = other DNA
aaaaataggaccaagatgcgtcgcctttgttgaaagtgagattgatgaatggattgaaactactattcgtaactc

SEQ ID NO: 401557 - DNA, 75 bp, synthetic construct
  source 1..75: mol_type = other DNA
aaaaccgtaatcggatcttgaagctactggggctgcagccagttggtgaggtctggggagtaggacgcagactga

SEQ ID NO: 401558 - DNA, 75 bp, synthetic construct
  source 1..75: mol_type = other DNA
gcggtattggcgcaattgcccccggcgcagggagttgcagggcgaagatctccagcagatcgcccgtcagcttgc

SEQ ID NO: 401559 - DNA, 75 bp, synthetic construct
  source 1..75: mol_type = other DNA
aaatggagcaggataagctcattagccgggcaaagctggcgcatgagcagcagcgttttaattcagacatggtca

SEQ ID NO: 401560 - DNA, 75 bp, synthetic construct
  source 1..75: mol_type = other DNA
ggggagaacgttggggcatcaaacttgctcatggaaccaaatggggaatacgtggcgttaaaaaactggatcgct

SEQ ID NO: 401561 - DNA, 75 bp, synthetic construct
  source 1..75: mol_type = other DNA
ggtagctttctggcaaaagccagctctaactgcgttatcggtcacaacaacactgacgcgattgcggattttctt

SEQ ID NO: 401562 - DNA, 75 bp, synthetic construct
  source 1..75: mol_type = other DNA
aggagccgcatcagtgccggtgccgtgggctgggttcaccacaacggcgcagaaatccgggtcagtgctgacagc

SEQ ID NO: 401563 - DNA, 75 bp, synthetic construct
  source 1..75: mol_type = other DNA
gggcaccccggaaacgcggcaaggggaaaatgttcagaaagctgccgcgtcttctggcggtccgtgagatgcccg

SEQ ID NO: 401564 - DNA, 75 bp, synthetic construct
  source 1..75: mol_type = other DNA
ctggcgtgatcccggagctgctgaagctgcaaaaagcgggctacaagctggtgatgatcactaatcaggatggtc

SEQ ID NO: 401565 - DNA, 75 bp, synthetic construct
  source 1..75: mol_type = other DNA
gtggtattggcgcgattgctccctggcgcagggagttgcaaggtgaagatctccagcaaatcgcccaccagctgc

SEQ ID NO: 401566 - DNA, 75 bp, synthetic construct
  source 1..75: mol_type = other DNA
gtagagagcctgttcaaagcgtttggtcgcaccctgcgccaggccatccgcgtggaaggcgacaccctgccctcg

SEQ ID NO: 401567 - DNA, 75 bp, synthetic construct
  source 1..75: mol_type = other DNA
gctgcaaaaagcgggctacaagctggtgatgatcactaatcaggatggtcttggaacacaaagtttcccgcaggc

SEQ ID NO: 401568 - DNA, 75 bp, synthetic construct
  source 1..75: mol_type = other DNA
tacccacatcagcaagccgctgatgcaacgtatcgaatacttcagtagcctgggcaggccaaaggcttattcccg

SEQ ID NO: 401569 - DNA, 75 bp, synthetic construct
  source 1..75: mol_type = other DNA
cagcgttttaattcagacatggtcattctggcggacgtcaacgcccagccttcctatatcagcaagccgctgatg

SEQ ID NO: 401570 - DNA, 75 bp, synthetic construct
  source 1..75: mol_type = other DNA
gggcgtctctgcatcgtgttcagcagttccgcttctttggtattccggggcgccaggcttaccgtgaacttcgct

SEQ ID NO: 401571 - DNA, 75 bp, synthetic construct
  source 1..75: mol_type = other DNA
gctgccgataacgagcaggaacagctgcgccgcgaggcactgagtgctcaggtctgggagcgttatttctttaat

SEQ ID NO: 401572 - DNA, 75 bp, synthetic construct
  source 1..75: mol_type = other DNA
gccgttgttggcgggttcggcagacgaacatttcgactggatgaagatcggcatgaaggtgctggcgtttgtcgg

SEQ ID NO: 401573 - DNA, 75 bp, synthetic construct
  source 1..75: mol_type = other DNA
gcgcatcgccgcaacgagatgatggcctgtgttaaaggcctggagcttatcgcggaaatgcgtggtgactgcgcc

SEQ ID NO: 401574 - DNA, 75 bp, synthetic construct
  source 1..75: mol_type = other DNA
ctgaaaatttgaaccaacaagggaaagataaatcagctgatggggataccaggacggacattacccgcatggatg

SEQ ID NO: 401575 - DNA, 75 bp, synthetic construct
  source 1..75: mol_type = other DNA
agataaatcagctgatggggacaccagaacggacattacccgcatggatgacaaggagttgcacgattacctgca

SEQ ID NO: 401576 - DNA, 75 bp, synthetic construct
  source 1..75: mol_type = other DNA
ctatttgcgtgagacgattaagtcatgtctggagcgactggagtatgtacgcgacagtcagctatccgcttcttt

SEQ ID NO: 401577 - DNA, 75 bp, synthetic construct
  source 1..75: mol_type = other DNA
ctatttgcgtgagacgattaagccatgtctggagcgactggattgtgtacgtgacagtcagctgtctgcttcttt

SEQ ID NO: 401578 - DNA, 75 bp, synthetic construct
  source 1..75: mol_type = other DNA
attatctggtcggtatgtttgctgcatttcgtaaggctatgcacaaagccgggttgcgctggtatggcgtgcggg

SEQ ID NO: 401579 - DNA, 75 bp, synthetic construct
  source 1..75: mol_type = other DNA
ggttccccgcaaatatcacctgatcagaaccgcttatgaaatcaacgaagagccgaccgcctatggcgatcacgg

SEQ ID NO: 401580 - DNA, 75 bp, synthetic construct
  source 1..75: mol_type = other DNA
ggcaataacacggagccacgctttaagtctgagccgataaacccgcgcaaaggaacgccgacaagctacatcgcg

SEQ ID NO: 401581 - DNA, 75 bp, synthetic construct
  source 1..75: mol_type = other DNA
aaattatcaggtaataagatactgacgccactgaatatacctgattataaagaaatgataagcggtggtagtacg

SEQ ID NO: 401582 - DNA, 75 bp, synthetic construct
  source 1..75: mol_type = other DNA
tggtcacgaaatggaagtcgcggcgggggaattggtggtaatatcgttacagcgattggggtttttaaagtaaat

SEQ ID NO: 401583 - DNA, 75 bp, synthetic construct
  source 1..75: mol_type = other DNA
gatctatatgcaaggtcggttgctgtcgaaaacgatgtatgtgcaatgatatggttatctcgagtgaaatttcat

SEQ ID NO: 401584 - DNA, 75 bp, synthetic construct
  source 1..75: mol_type = other DNA
cgcctcacacggcacgcaatggcttggttttaccggcagcgatggtacggcgatattcaatgttgaacagcctga

SEQ ID NO: 401585 - DNA, 75 bp, synthetic construct
  source 1..75: mol_type = other DNA
actgggtacaacaacgtggtcttatcagactgtcagcctgagaacaggagctatcgcgaagaattctgcaaccaa

SEQ ID NO: 401586 - DNA, 75 bp, synthetic construct
  source 1..75: mol_type = other DNA
taagggagagcatgcctggcaatgggatggctacagtaatcaaggcatactggatacaactaagctaaaaagcaa

SEQ ID NO: 401587 - DNA, 75 bp, synthetic construct
  source 1..75: mol_type = other DNA
aaccaatgggataacgttggtacatcgttaaaccgggcgattattccactcaagtcacagataacattgggtgat

SEQ ID NO: 401588 - DNA, 75 bp, synthetic construct
  source 1..75: mol_type = other DNA
ggaatacctgcgctgttactggactacagctttagtggcagcaatggtcgcaacgaaggttccggttcatctcca

SEQ ID NO: 401589 - DNA, 75 bp, synthetic construct
  source 1..75: mol_type = other DNA
atgaaatcattccccaggccaccagtcgttttgattttaatactcagacgttgcatcttacctttccacaggcag

SEQ ID NO: 401590 - DNA, 75 bp, synthetic construct
  source 1..75: mol_type = other DNA
ggatgacgggggaagtgaagcggaacaacatgcgcagtcggcgaaaaaggatctgacttctggttctgattcatc

SEQ ID NO: 401591 - DNA, 75 bp, synthetic construct
  source 1..75: mol_type = other DNA
gcaccggcgttggcggcgtaatggcgcgtactttgccgcgtgatttatatgaacggacacagttgcgccacgcta

SEQ ID NO: 401592 - DNA, 75 bp, synthetic construct
  source 1..75: mol_type = other DNA
ccgcaacgctgattcgcgacatcgttgacggcatcaatgccaaattccgtgagctgaaaacaaacggctatatcg

SEQ ID NO: 401593 - DNA, 75 bp, synthetic construct
  source 1..75: mol_type = other DNA
tgacgcagccacattcggcaccagcaagccttacgctgtcatcgactgcctatgatgagggccgaactgccagca

SEQ ID NO: 401594 - DNA, 75 bp, synthetic construct
  source 1..75: mol_type = other DNA
aagaaggcatatcaggtttagataattatgcagatattttagtctatgatctactttatgtcggaatagcaaaaa

SEQ ID NO: 401595 - DNA, 75 bp, synthetic construct
  source 1..75: mol_type = other DNA
gggtaatgattttggtgttggttgcgggggtgaagcaatagagtttttctacaaaaaagatggcgaaaaattcct

SEQ ID NO: 401596 - DNA, 75 bp, synthetic construct
  source 1..75: mol_type = other DNA
ctgaagcgccagccaggaagaagaaaaagaaaaaacaccgtttcccacgtccctcccactggacccgagagtata

SEQ ID NO: 401597 - DNA, 75 bp, synthetic construct
  source 1..75: mol_type = other DNA
aagggaacgaaccgttgccggaaaagcgccccataattttagaggcgcaggatgtgttgataacctacaaaggaa

SEQ ID NO: 401598 - DNA, 75 bp, synthetic construct
  source 1..75: mol_type = other DNA
cggccatcctttgttgtatccggtgatgacgggaaaatcaccatatcagaaaatggaaaagtaacactgccatcg

SEQ ID NO: 401599 - DNA, 75 bp, synthetic construct
  source 1..75: mol_type = other DNA
atgaagcatgaagaaatgaatcagcgattcaatcacctggaaaatgaaatcactgagcttaataaaaaattgtcg

SEQ ID NO: 401600 - DNA, 75 bp, synthetic construct
  source 1..75: mol_type = other DNA
atggctacaaaccgagcggcgtcactaataaaggctttcttaccgtcgatgaaattcgccgggttacgcgcgcct

SEQ ID NO: 401601 - DNA, 75 bp, synthetic construct
  source 1..75: mol_type = other DNA
tcgctgccgtgcgggaaaacgacgctattcgtcagattgcggttaccaccaatggttaccgcctggaacgcgacg

SEQ ID NO: 401602 - DNA, 75 bp, synthetic construct
  source 1..75: mol_type = other DNA
gacggaattgccgtccggggctaatcccgtatcctcaccgattattaactacgaaaactgggtaatgctgccaac

SEQ ID NO: 401603 - DNA, 75 bp, synthetic construct
  source 1..75: mol_type = other DNA
gattttgcccggcgactggcggcgaaacttggcttaccttttattgatgccattgaaaaagtcgtggacaatcca

SEQ ID NO: 401604 - DNA, 75 bp, synthetic construct
  source 1..75: mol_type = other DNA
tgctgttacagcggatgttaagtaacaccaccgctactttcagggaagggcaatgggaagctatagatgcagtgg

SEQ ID NO: 401605 - DNA, 75 bp, synthetic construct
  source 1..75: mol_type = other DNA
cctgtaaccgcctgcgcgtctcctcgattggcaaactccatctctgcctgtttggcgaaggcggcgttaacctgc

SEQ ID NO: 401606 - DNA, 75 bp, synthetic construct
  source 1..75: mol_type = other DNA
atcactacagagcgcatttttctttctcactgttggcattaactattgccagcgcgttacctgcgtacggcggaa

SEQ ID NO: 401607 - DNA, 75 bp, synthetic construct
  source 1..75: mol_type = other DNA
ggttacactgctgcttctattcgtgagttctgcaaacgcattggcgtgaccaagcaggacaacaccattgagatg

SEQ ID NO: 401608 - DNA, 75 bp, synthetic construct
  source 1..75: mol_type = other DNA
tggcggctgaactggctaagggccttaaaaccgaagctgatcttaacccgttttcccgtatgctgactaagctga

SEQ ID NO: 401609 - DNA, 75 bp, synthetic construct
  source 1..75: mol_type = other DNA
ccgcgtttcgggcagcttgatctgatctacggtttaccgtgggggatgacggcctacggcggcgtattaatctct

SEQ ID NO: 401610 - DNA, 75 bp, synthetic construct
  source 1..75: mol_type = other DNA
aaacagcccgtaccgcgaccgcagcgttgaagagaacctggcgctgttcgagaaaatgcgtaccggcggttttga

SEQ ID NO: 401611 - DNA, 75 bp, synthetic construct
  source 1..75: mol_type = other DNA
cagaccggcaacaagtggtgcatctacccgatgtacgacttcacccactgcatcagcgatgcgctggaaggtatt

SEQ ID NO: 401612 - DNA, 75 bp, synthetic construct
  source 1..75: mol_type = other DNA
gttgaagagaacctggcgctgttcgaaaaaatgcgtaccggtggttttgaagaaggtaaagcctgcctgcgtgcg

SEQ ID NO: 401613 - DNA, 75 bp, synthetic construct
  source 1..75: mol_type = other DNA
agccagcgaggctttgcacccatcgttcgagggatcgccaaaagcaacgccgaagtcagtgttgaacaaaacggc

SEQ ID NO: 401614 - DNA, 75 bp, synthetic construct
  source 1..75: mol_type = other DNA
gctacatgccagaaacaatcaccgcgcgctgttcagtctgaaactgttccacactcgtaccttttcactgggcct

SEQ ID NO: 401615 - DNA, 75 bp, synthetic construct
  source 1..75: mol_type = other DNA
gtactcgtactttttcgctgggtctggcggggagttttgccggacgtatcggtagcggcatgttgccctttatga

SEQ ID NO: 401616 - DNA, 75 bp, synthetic construct
  source 1..75: mol_type = other DNA
ctttttcttccttttctatctccgtggtggcggtcgcagttgccagtgcgttttctgcacatgccggaaagttta

SEQ ID NO: 401617 - DNA, 75 bp, synthetic construct
  source 1..75: mol_type = other DNA
cctgcgttgctgctggattacagttttagcgggagcaacagtgaatatgactcctcgggttcttccagcagttat

SEQ ID NO: 401618 - DNA, 75 bp, synthetic construct
  source 1..75: mol_type = other DNA
cactgcggagcgattcgttgggcgataacgttgatgtagaaaatgcgatccagaaagtggtaccgactcgcggag

SEQ ID NO: 401619 - DNA, 75 bp, synthetic construct
  source 1..75: mol_type = other DNA
ctcttgtttccgatttattcttcacttcttactccgttattaattccttaaaatctattgatagaactaattatg

SEQ ID NO: 401620 - DNA, 75 bp, synthetic construct
  source 1..75: mol_type = other DNA
gggttataccagtaatggggttggcaacagtggtagtgtcaacatgggttatatgggaggttctggcaacattga

SEQ ID NO: 401621 - DNA, 75 bp, synthetic construct
  source 1..75: mol_type = other DNA
atgaccactatcattatcaacctggaactgttcggcgcgccggattgtagtgcacagaccgaagcctttgccgag

SEQ ID NO: 401622 - DNA, 75 bp, synthetic construct
  source 1..75: mol_type = other DNA
gcttgcgccgcaatcgccagctctgcgccctgcaattaaatgaaaagcgcgtcgatgtggtgtatgccaaagagg

SEQ ID NO: 401623 - DNA, 75 bp, synthetic construct
  source 1..75: mol_type = other DNA
atatgggtggctctggtaacattgacgtaggctataactattctaaagataaccaacaggttaactatggcgtgc

SEQ ID NO: 401624 - DNA, 75 bp, synthetic construct
  source 1..75: mol_type = other DNA
aggaaaactccttaagcgccggttatcacggtcacattggtcgggtgaattacagcgtggcctatacctggacga

SEQ ID NO: 401625 - DNA, 75 bp, synthetic construct
  source 1..75: mol_type = other DNA
acgttgccgcgtgccattccgcttgccagagaaaaaggataattcgggtatcgtgatggttaatgcggtatgcga

SEQ ID NO: 401626 - DNA, 75 bp, synthetic construct
  source 1..75: mol_type = other DNA
ggacgttacctattccacctcagtctgccacgttctggctgtacgaaaaagtatactgctgcaaatcgacacact

SEQ ID NO: 401627 - DNA, 75 bp, synthetic construct
  source 1..75: mol_type = other DNA
attggttatgtggtcttactgatctccttcccggtgcagatgaccagctggttaccgccacatgaaattgcggtc

SEQ ID NO: 401628 - DNA, 75 bp, synthetic construct
  source 1..75: mol_type = other DNA
cggcttgggagttcagctgtaggctggcgggcatctgccattgatgagtggttaactttacatacaacaccaacc

SEQ ID NO: 401629 - DNA, 75 bp, synthetic construct
  source 1..75: mol_type = other DNA
ttggccgtggcgaggtgcggtggcgctgaaagaacagcatccggaaatgacccaatatcatattattcataactg

SEQ ID NO: 401630 - DNA, 75 bp, synthetic construct
  source 1..75: mol_type = other DNA
gaacatgcgctacgcttgcgccagtctctggagcgtttgcgggtggtgtgttggccttggcaaggtgcggtggca

SEQ ID NO: 401631 - DNA, 75 bp, synthetic construct
  source 1..75: mol_type = other DNA
gtcgatgtggtgtatgccaaagaggtggatttttcacgagcccccaacctgtttggcctgtttgccaataggcgc

SEQ ID NO: 401632 - DNA, 75 bp, synthetic construct
  source 1..75: mol_type = other DNA
acgcacgcgcctactgaccagttataaaactcttttcggtaacggcggttttaactgctatttactgatgcttat

SEQ ID NO: 401633 - DNA, 75 bp, synthetic construct
  source 1..75: mol_type = other DNA
atgaaaacgcatagaaacatcaatttattattgatgttggtattactcgtggctgtcggtcagatggcacaaact

SEQ ID NO: 401634 - DNA, 75 bp, synthetic construct
  source 1..75: mol_type = other DNA
tctttttcggtgccgggatgctgtttccgctggcaactagcggcgcgatggagcctttccccttcctggcgggca

SEQ ID NO: 401635 - DNA, 75 bp, synthetic construct
  source 1..75: mol_type = other DNA
ctcctggtgccggaaggcaagcgccgcgttgtgcgctgccgctgcgggagtaatgactggaatgaggatggccgc

SEQ ID NO: 401636 - DNA, 75 bp, synthetic construct
  source 1..75: mol_type = other DNA
tcgataccgctgcgatgtctatcggcgcgttaagcccagaggcccacgaggcgctggcggaagcgatgaacagca

SEQ ID NO: 401637 - DNA, 75 bp, synthetic construct
  source 1..75: mol_type = other DNA
agaagagactcaacaaatcagtgatgaagatgccgcacatcttgagcgtattttaagcatcagcacttttgagtg

SEQ ID NO: 401638 - DNA, 75 bp, synthetic construct
  source 1..75: mol_type = other DNA
tggatgggacagtaagtaaaggcgtggaatttgaacttaacggcgcaattaccgacaactggcaactgacgtttg

SEQ ID NO: 401639 - DNA, 75 bp, synthetic construct
  source 1..75: mol_type = other DNA
gtaacaactacgaactgggtctgaaatcagactggatgaatagccgtctgaccaccacgttagccatcttccgta

SEQ ID NO: 401640 - DNA, 75 bp, synthetic construct
  source 1..75: mol_type = other DNA
gctatggccccggatttgattatgtgggcggcactggctggaacagtggcaaacgtaaagttgacgcgctggatc

SEQ ID NO: 401641 - DNA, 75 bp, synthetic construct
  source 1..75: mol_type = other DNA
ctaaaactggcgtatcagaattttatgatggcgacattccttggttgagaactcaagaagtaggtgatgctgcca

SEQ ID NO: 401642 - DNA, 75 bp, synthetic construct
  source 1..75: mol_type = other DNA
atggatgacatacgtgaaaatggtagaattctagggaattcacttcaaaaaaatttcatcctgcgccgtaaaagg

SEQ ID NO: 401643 - DNA, 75 bp, synthetic construct
  source 1..75: mol_type = other DNA
tgagcgtgtcatttattatgaaagtgcagccgcattagaaggtgggaagtttgctcctcggcctgaaatattatg

SEQ ID NO: 401644 - DNA, 75 bp, synthetic construct
  source 1..75: mol_type = other DNA
tggcggcctcagccttacaggccgcaggcggaatggattatctggtacgcgtcgctggtaattttatgcggcgta

SEQ ID NO: 401645 - DNA, 75 bp, synthetic construct
  source 1..75: mol_type = other DNA
atctgcactggtggacaaaaactacactaacgttggtctggggtttatccgttcttttggctggtttggcgcagt

SEQ ID NO: 401646 - DNA, 75 bp, synthetic construct
  source 1..75: mol_type = other DNA
caggttttatcgataccaaaaaagaaggtggcccttgggattatggcactcctggtttcaaacttgcttatgatc

SEQ ID NO: 401647 - DNA, 75 bp, synthetic construct
  source 1..75: mol_type = other DNA
gtcgcgcagtgccagcaatcgcccaatgaacgcacccagctggcgacacttgcgcgtcagcatcatttatgggca

SEQ ID NO: 401648 - DNA, 75 bp, synthetic construct
  source 1..75: mol_type = other DNA
ccctgtttggctgtggcgaccaggaagattacgccgaatatttctgtgatgcattaggcactatccgtgacatca

SEQ ID NO: 401649 - DNA, 75 bp, synthetic construct
  source 1..75: mol_type = other DNA
ctgctgggtatcccaacctggtattacggcgaagcgcagtgtgactgggacgacttcttcccgactctcgaagag

SEQ ID NO: 401650 - DNA, 75 bp, synthetic construct
  source 1..75: mol_type = other DNA
tgacttcttcccgactctggaagagattgattttaatggtaaactggttgcgctgtttggttgtggcgaccagga

SEQ ID NO: 401651 - DNA, 75 bp, synthetic construct
  source 1..75: mol_type = other DNA
gatgagttcgctggcggtaattctcggcattgtaaccttaggcaccacttttattgatgcgcatttaactgagat

SEQ ID NO: 401652 - DNA, 75 bp, synthetic construct
  source 1..75: mol_type = other DNA
tggccgcctcagcgttacaggccgcaggcggaatggattatctggtacgcgtcgccggtaactttatgcggcgta

SEQ ID NO: 401653 - DNA, 75 bp, synthetic construct
  source 1..75: mol_type = other DNA
tgcaaaaatacgagaataatagcagcatcaagccaggtgcgacgctctccgtcggattgttcctgctggcgacgg

SEQ ID NO: 401654 - DNA, 75 bp, synthetic construct
  source 1..75: mol_type = other DNA
cacgttcgggactggcgctgaatcttatacccggcgtggaaatttccacggtctgggaaaatcatgaaattcata

SEQ ID NO: 401655 - DNA, 75 bp, synthetic construct
  source 1..75: mol_type = other DNA
atctcgccagcaagagaagaaatttcacgttcgggactggcactgaatcttattcctggcgtggaaatttccacc

SEQ ID NO: 401656 - DNA, 75 bp, synthetic construct
  source 1..75: mol_type = other DNA
tcctgattattatgaccgttgttgtggcggcctcagccttacaggccgcaggcggaatggattatctggtacgcg

SEQ ID NO: 401657 - DNA, 75 bp, synthetic construct
  source 1..75: mol_type = other DNA
ggcgaagtgatggaaaacactctgggaataagcaaaagccaggccgactccgaccgcaccctctattattcgcgt

SEQ ID NO: 401658 - DNA, 75 bp, synthetic construct
  source 1..75: mol_type = other DNA
cctggggaacaaacttccatcagatcattatggataccatttcgacgccgctggcatcgttgggtagcgtcgtcg

SEQ ID NO: 401659 - DNA, 75 bp, synthetic construct
  source 1..75: mol_type = other DNA
cggcattatgacgccgtgggcgctggaaaatatcgcgacctatcagcaatatggttccgtcgaagcggcgctggc

SEQ ID NO: 401660 - DNA, 75 bp, synthetic construct
  source 1..75: mol_type = other DNA
ggctatgtttgtattaattaataatgtttttcttagttttggggagggggcgtttttttattccttaggtattcg

SEQ ID NO: 401661 - DNA, 75 bp, synthetic construct
  source 1..75: mol_type = other DNA
tgagtaacccggttaaagcctttcagcgtatcgtgcgtcgggcgggaattttcgacaaagaagtgtgtattcata

SEQ ID NO: 401662 - DNA, 75 bp, synthetic construct
  source 1..75: mol_type = other DNA
ggatgaatatgatgatctcatatcaggaacttgttcgcaccttccctaacacatcagattcacgcagcaccgatg

SEQ ID NO: 401663 - DNA, 75 bp, synthetic construct
  source 1..75: mol_type = other DNA
tcatgtcttcaacacgtatgccagcattgtttttaggtcacggtagtccgatgaacgtgctggaagataatttgt

SEQ ID NO: 401664 - DNA, 75 bp, synthetic construct
  source 1..75: mol_type = other DNA
atctggatattctgcgcaggccgcccgctggcggtaataaatatgattacaaacgctgggcgctggaagtggatg

SEQ ID NO: 401665 - DNA, 75 bp, synthetic construct
  source 1..75: mol_type = other DNA
gtcaggtgtttcctgacacggcagaccctgaatatctggagctgcactgccgcacgcgcaatgtttttcgtaaaa

SEQ ID NO: 401666 - DNA, 75 bp, synthetic construct
  source 1..75: mol_type = other DNA
agaagatgacactaccggaggaatttacccggataaaggaaacggtacctcacaacctcttcatttccaggctac

SEQ ID NO: 401667 - DNA, 75 bp, synthetic construct
  source 1..75: mol_type = other DNA
ccgccgcaattgggtcattaaattgcccgatagcgtacctgcttcagtatcgcgttccttctcggcattaattcc

SEQ ID NO: 401668 - DNA, 75 bp, synthetic construct
  source 1..75: mol_type = other DNA
ggccagtgccgagaaatataactctgaaaacgcgattgtgatgtgggacgcgccagaactggccgggcagtacct

SEQ ID NO: 401669 - DNA, 75 bp, synthetic construct
  source 1..75: mol_type = other DNA
atctggacattctgcgcaggccgcccgccggtggtaacaaatatgattacaaacgctgggcgctggaagtggatg

SEQ ID NO: 401670 - DNA, 75 bp, synthetic construct
  source 1..75: mol_type = other DNA
ccggctacgggttattcccgtctgaacaggcgcgtaaggactggcaaaacgcccgcaaaaaactatcgagggcaa

SEQ ID NO: 401671 - DNA, 75 bp, synthetic construct
  source 1..75: mol_type = other DNA
gacattaatgacaactggtcgacctatgccagctacacatctattttccagccgcaaaatgatcgtgacagttca

SEQ ID NO: 401672 - DNA, 75 bp, synthetic construct
  source 1..75: mol_type = other DNA
gatatggcgctgtttgaacgcgtagaagtggtgagaggcgcgacgggattgatgaccggcacgggtaatccatcc

SEQ ID NO: 401673 - DNA, 75 bp, synthetic construct
  source 1..75: mol_type = other DNA
tcagcagttacaaacgctgggagaagtgatggaaaacactctggggatcagcaaaagccaggctgattccgatcg

SEQ ID NO: 401674 - DNA, 75 bp, synthetic construct
  source 1..75: mol_type = other DNA
agccgcgccgtcgctgctcgcagcctgcattgctctggctttatttccttccgctacactggccgtgccaaccgc

SEQ ID NO: 401675 - DNA, 75 bp, synthetic construct
  source 1..75: mol_type = other DNA
ggaatttgaactcaacggtgcaattaccgacaactggcaactgacgtttggtgcaacacgctatattgcagaaga

SEQ ID NO: 401676 - DNA, 75 bp, synthetic construct
  source 1..75: mol_type = other DNA
tgctctttattattcccgcggattccagatcgataactatatggttgatggtatccccacctattttgaatcgcg

SEQ ID NO: 401677 - DNA, 75 bp, synthetic construct
  source 1..75: mol_type = other DNA
atttgggtattggcaatatcatatgcggttatttatgttattcgtacaggaatcaatgactggggaaatttgtat

SEQ ID NO: 401678 - DNA, 75 bp, synthetic construct
  source 1..75: mol_type = other DNA
tggggcagctttgcgaaacctttccgggcattgcggtttgcgtagaaccggaatcggtcgaggcgctggtggcgg

SEQ ID NO: 401679 - DNA, 75 bp, synthetic construct
  source 1..75: mol_type = other DNA
gatgggcgattgccatctggtggtgcaaaaacgcggcgcggcagatgccgtattgccgtcgaaactgaccaatat

SEQ ID NO: 401680 - DNA, 75 bp, synthetic construct
  source 1..75: mol_type = other DNA
atgccacccactccgaagtcgaatttgacagcaaaatgatgtatgtcgatgcctatgtaaacaaagcggatggta

SEQ ID NO: 401681 - DNA, 75 bp, synthetic construct
  source 1..75: mol_type = other DNA
cagttacaaacgctgggcgaagtgatggaaaacacgctggggatcagcaaaagtcaggcggattccgatcgtgct

SEQ ID NO: 401682 - DNA, 75 bp, synthetic construct
  source 1..75: mol_type = other DNA
agcaggataatgtcgctcagtccaccggtacacctatccccggcagcaacggcgaaaccgcctataaagcagtgg

SEQ ID NO: 401683 - DNA, 75 bp, synthetic construct
  source 1..75: mol_type = other DNA
agtatgacaaatacaagacgacccataccacgttctctatcaactttgatgacagcgttgataagactgccgaaa

SEQ ID NO: 401684 - DNA, 75 bp, synthetic construct
  source 1..75: mol_type = other DNA
tccaggacaaccgccgtctgtacgactgggtactggacaacatcaccattcctgttcacccgcgccagtacgaat

SEQ ID NO: 401685 - DNA, 75 bp, synthetic construct
  source 1..75: mol_type = other DNA
tcaaacaattattaggttagagtttctgttaaatgatgatgaggtaactgagtttaagaacgaaatcaagtcaaa

SEQ ID NO: 401686 - DNA, 75 bp, synthetic construct
  source 1..75: mol_type = other DNA
gtagtgctggtactgatttcgtttttactggtgctgacgctgaatacgatgaccattctgttgtcgattgccgcg

SEQ ID NO: 401687 - DNA, 75 bp, synthetic construct
  source 1..75: mol_type = other DNA
aatacgataaattgattattggtattttgcagattggcgtactggcgctgatggcgatcatcggtgagttaaatg

SEQ ID NO: 401688 - DNA, 75 bp, synthetic construct
  source 1..75: mol_type = other DNA
aagttgaaaacctgccactgaatgggatcggcctcgtggatctcacttttgacgagccgctggtgttagatcgtt

SEQ ID NO: 401689 - DNA, 75 bp, synthetic construct
  source 1..75: mol_type = other DNA
ctgttgcgcgaagcctggcgtcgtattcaggcgaaaggttatgccctcggcaacgtcgatgtcactatcatcgct

SEQ ID NO: 401690 - DNA, 75 bp, synthetic construct
  source 1..75: mol_type = other DNA
ttcccggataccgatccggcatttaaaggtgccgacagccgcgagctgctacgcgaagcctggcgtcgtattcag

SEQ ID NO: 401691 - DNA, 75 bp, synthetic construct
  source 1..75: mol_type = other DNA
atgcgaattggacacggatttgacgtacacgcctttggcggcgaaggcccaattatcattggtggtgtgcgcatc

SEQ ID NO: 401692 - DNA, 75 bp, synthetic construct
  source 1..75: mol_type = other DNA
catccagcagccatccaccagcttctaaaagtaataaaatcattaggagaagagaatcaagtaatcttgtctaca

SEQ ID NO: 401693 - DNA, 75 bp, synthetic construct
  source 1..75: mol_type = other DNA
ggaataaagcgtacaacctgacttcggtccgcgatcctaatgagatgctggtacgccatattctcgatagcattg

SEQ ID NO: 401694 - DNA, 75 bp, synthetic construct
  source 1..75: mol_type = other DNA
tctcgttcatcaggtaaaaatgaagaaggtattcagacagacccttttcaaacgaggtatgagaaagaaggttta

SEQ ID NO: 401695 - DNA, 75 bp, synthetic construct
  source 1..75: mol_type = other DNA
tgagaaagaggcgcgcacactgtttgtggtgctggtgctaatttcgttcttactggtgctgacgctgaatacgat

SEQ ID NO: 401696 - DNA, 75 bp, synthetic construct
  source 1..75: mol_type = other DNA
tggcagcaatcgcccttcctgttaaccgccagcaaaccggtgccggaagaggaagaaagcgagaaaaaagagtga

SEQ ID NO: 401697 - DNA, 75 bp, synthetic construct
  source 1..75: mol_type = other DNA
atccacttgataaacaaaatttaggtgcaagcgttgcggaagccttattgagcaaagatgctcatcctatggaag

SEQ ID NO: 401698 - DNA, 75 bp, synthetic construct
  source 1..75: mol_type = other DNA
tcgtgattctatacagtatcttcagaatttaccgccttgcttggctcagaaatttatcgaagctgaaggcgatta

SEQ ID NO: 401699 - DNA, 75 bp, synthetic construct
  source 1..75: mol_type = other DNA
tgtccctaacgggcgggctggttcacgttgtgcattgggagacgctatgccgagcactactaaaaactggtttac

SEQ ID NO: 401700 - DNA, 75 bp, synthetic construct
  source 1..75: mol_type = other DNA
gaaatagtcgtcacgcgttctcctgagcaggtattccatccggccacgctcgcctcattcgaagggatgagcatc

SEQ ID NO: 401701 - DNA, 75 bp, synthetic construct
  source 1..75: mol_type = other DNA
caaaatacgatgtcatgaatgatttgatgtcatttggtattcatcgtttgtggaagcgattcacgattgattgca

SEQ ID NO: 401702 - DNA, 75 bp, synthetic construct
  source 1..75: mol_type = other DNA
ccaaacgtggcgcggtaggtattttgctcgacaccattggcatcgcctcgatatgcgctctgctggttgtttcta

SEQ ID NO: 401703 - DNA, 75 bp, synthetic construct
  source 1..75: mol_type = other DNA
atttaactaagcaaattaacgaatatgcactcaggatatatgatagcaaagttcgttcattgaaagaggaacagg

SEQ ID NO: 401704 - DNA, 75 bp, synthetic construct
  source 1..75: mol_type = other DNA
gcttaggctggggatattactggtcaattctggtagcgggcgcgctgtttgtttatcaacaaaaactgattgcca

SEQ ID NO: 401705 - DNA, 75 bp, synthetic construct
  source 1..75: mol_type = other DNA
taccggtgaaagccaatgatgcggcgctcagcgacggaaccttttctgcctacgcaacactacaggtggattacc

SEQ ID NO: 401706 - DNA, 75 bp, synthetic construct
  source 1..75: mol_type = other DNA
attatcgacaacattaacggcgataatttccgtcaggatgtgccttacaccatcacatgtgaccccgatatgcgc

SEQ ID NO: 401707 - DNA, 75 bp, synthetic construct
  source 1..75: mol_type = other DNA
ccaaacgtggtgcggtgggtattttgctcgacaccattggcatagcctcgatttgtgctctgctggttgtctcta

SEQ ID NO: 401708 - DNA, 75 bp, synthetic construct
  source 1..75: mol_type = other DNA
acaagaacgcgcaagaaaagcttcggatggtatgcagaagtgatcaaaactcgggggctatcattaaaaaaataa

SEQ ID NO: 401709 - DNA, 75 bp, synthetic construct
  source 1..75: mol_type = other DNA
aagctaaattgcatctccgtattgatgacgactatggagatactgatcttaccttgaaaattaagggcggcagtg

SEQ ID NO: 401710 - DNA, 75 bp, synthetic construct
  source 1..75: mol_type = other DNA
gcccaatgtcgatattaacgctactttccggcagattattcaggaattgaccagcggctgtcagggtatggtcgt

SEQ ID NO: 401711 - DNA, 75 bp, synthetic construct
  source 1..75: mol_type = other DNA
taggctgttccgtcgctgaaattgaaagtgaccgcttacattgcgccaaacgtctggtacaacgttatggcggcg

SEQ ID NO: 401712 - DNA, 75 bp, synthetic construct
  source 1..75: mol_type = other DNA
ccgacggtgacctgcgtcgctttatggaaaaagaggattctctgacatccgccacggctgcgcagatgatgacac

SEQ ID NO: 401713 - DNA, 75 bp, synthetic construct
  source 1..75: mol_type = other DNA
cagcaatactttcctacattcagggaagtcgcgcgttagtcgtggatgattcaggaaagcttattgatggtgaac

SEQ ID NO: 401714 - DNA, 75 bp, synthetic construct
  source 1..75: mol_type = other DNA
cggcgatcctttcttacatccaggggagtcgcgcgctaatcgtgggtgattctggaaatcttatcgatggtgagc

SEQ ID NO: 401715 - DNA, 75 bp, synthetic construct
  source 1..75: mol_type = other DNA
attactcagtacccttttggcgtttgcgttatcgttttgcgggcaaacagcgatcactggtcataggcacgtaca

SEQ ID NO: 401716 - DNA, 75 bp, synthetic construct
  source 1..75: mol_type = other DNA
ggccgaggctatcaaaaagattgaagagcaaaaaaatgcgttgaaggtttcagatctggcccacgagtacttcga

SEQ ID NO: 401717 - DNA, 75 bp, synthetic construct
  source 1..75: mol_type = other DNA
ccccgcgccatgctgattggctcatatgccgagctatcactatcaaaggccagagagacagccaaagagctatcg

SEQ ID NO: 401718 - DNA, 75 bp, synthetic construct
  source 1..75: mol_type = other DNA
aagcgcttaaagcactccagtctggtcaggcattaagtggaaaagatggcatcttaacgccattaatcaaacagt

SEQ ID NO: 401719 - DNA, 75 bp, synthetic construct
  source 1..75: mol_type = other DNA
atatgccttcagtgtttccacggctaccatcagtgcggttaccgataaagtcattcctgagttaaaacagtggca

SEQ ID NO: 401720 - DNA, 75 bp, synthetic construct
  source 1..75: mol_type = other DNA
attgatgatgcaggtgggcaggaaaaaagcagggaacgctggctaagccgagaagagcttgcgcgattcttacag

SEQ ID NO: 401721 - DNA, 75 bp, synthetic construct
  source 1..75: mol_type = other DNA
atcagagcagtactattgatccatatttaattacttctgttcgtcagaccttggaagaacaaggtgcagcattac

SEQ ID NO: 401722 - DNA, 75 bp, synthetic construct
  source 1..75: mol_type = other DNA
ccgattttgcgcaagcagtgggtcagtggttaagcgccgaaactgtacagacgcaaacctatgaattatgcgatg

SEQ ID NO: 401723 - DNA, 75 bp, synthetic construct
  source 1..75: mol_type = other DNA
gccacggcggcgcagatgatgacgcgtgaaccgctgacgttgccagaagaaaccatgatcatcgaagcggaagaa

SEQ ID NO: 401724 - DNA, 75 bp, synthetic construct
  source 1..75: mol_type = other DNA
ggcaacctggtaagaggcgttctgtactttggtatagccttcacgaccgaggcgcaggaattcatagtactatgc

SEQ ID NO: 401725 - DNA, 75 bp, synthetic construct
  source 1..75: mol_type = other DNA
gcagtttatgccctccactagcgactggatcagccaactgcttcccgaactccgcgcccgagagccgtttaaccc

SEQ ID NO: 401726 - DNA, 75 bp, synthetic construct
  source 1..75: mol_type = other DNA
tcgcttgattaccagggcgctaacgtcaaagttatagcttctgatgcgggtgttgctgcttgccacaatggcgga

SEQ ID NO: 401727 - DNA, 75 bp, synthetic construct
  source 1..75: mol_type = other DNA
agtttatgcagattttatcgcacaacagagtaaaaacgtcagttctgtcattgctcttgaggctgatttaatgag

SEQ ID NO: 401728 - DNA, 75 bp, synthetic construct
  source 1..75: mol_type = other DNA
acggcagcgagcagcagacgtttgatgcacagaaactgtctattttcaccggcctgcgcgttgccatgcccggaa

SEQ ID NO: 401729 - DNA, 75 bp, synthetic construct
  source 1..75: mol_type = other DNA
cgtagtgatgacggcagcacctattttgagcttaatcctgataccaggaaaattaaaattgtcgctccaggtggt

SEQ ID NO: 401730 - DNA, 75 bp, synthetic construct
  source 1..75: mol_type = other DNA
aacaacgtccaccacgctgaccatggcgatcggagacgcgctggctattgccatgatccaccagcgtaaatttat

SEQ ID NO: 401731 - DNA, 75 bp, synthetic construct
  source 1..75: mol_type = other DNA
ataccctgcagtttcgggtgatcgctgagatatttcagggaggctttgtagtcttccagcaacagttcagcaaag

SEQ ID NO: 401732 - DNA, 75 bp, synthetic construct
  source 1..75: mol_type = other DNA
tagaacgacgcggtcgtatttatcgcattgtagaaataacccacacagtgaaggagattaaggatgatcgtatta

SEQ ID NO: 401733 - DNA, 75 bp, synthetic construct
  source 1..75: mol_type = other DNA
ttcgacgtgatttcccctgaatctaccttctcggagaaggtgacgatcaccgggctgttaacgtggatggggggc

SEQ ID NO: 401734 - DNA, 75 bp, synthetic construct
  source 1..75: mol_type = other DNA
gatctctctatgtacgagtccgaccgtggcgcacaattgcctggtacataccgtgtttctgtttttgtgaatgaa

SEQ ID NO: 401735 - DNA, 75 bp, synthetic construct
  source 1..75: mol_type = other DNA
tcaggtcgttgattatcgcgttgtgaagatgcccgttaccaagggtggaaagctggagctgaccatcactgaact

SEQ ID NO: 401736 - DNA, 75 bp, synthetic construct
  source 1..75: mol_type = other DNA
ctaccggcataatcgcgggcgcacgcacatcagcgcagaagggcaggcataccgcgataacgtcgcccgaatcat

SEQ ID NO: 401737 - DNA, 75 bp, synthetic construct
  source 1..75: mol_type = other DNA
gttacagctatggtaaagactaccagcagactaactacagcctgcgtggtggcattgtagcgcacagtgaaggaa

SEQ ID NO: 401738 - DNA, 75 bp, synthetic construct
  source 1..75: mol_type = other DNA
tagtgaaattcagggtaatttgacacagcaattgggcacctatgggtcggtttatttcaatatgacccagcagga

SEQ ID NO: 401739 - DNA, 75 bp, synthetic construct
  source 1..75: mol_type = other DNA
agcgcaactgacattgggtgatacagcaacaccttcagatatttttgacagtgtgcagatgcgcggggcattact

SEQ ID NO: 401740 - DNA, 75 bp, synthetic construct
  source 1..75: mol_type = other DNA
gtgaatacttaccacatcacaattccctggcccccgagcaataaccgctagtaccgccataatcgcgggcgcaca

SEQ ID NO: 401741 - DNA, 75 bp, synthetic construct
  source 1..75: mol_type = other DNA
gtgaatacttactacatcacaataccctggcccccgagcaataaccgctagtaccgccataatcgcgggcgcacg

SEQ ID NO: 401742 - DNA, 75 bp, synthetic construct
  source 1..75: mol_type = other DNA
tgaacagcttcagtgaaattgcgcataaaagcggcaaagaggcagggagtcagattatgaaatttgaagtgcagg

SEQ ID NO: 401743 - DNA, 75 bp, synthetic construct
  source 1..75: mol_type = other DNA
ttgagtgccacatgccggatcgccgtcgccgtgacctggataatctgcaaaaagccgcttttgacgcactcacta

SEQ ID NO: 401744 - DNA, 75 bp, synthetic construct
  source 1..75: mol_type = other DNA
gtgaatacttacgacatcacaatcccctggcccccgagcaataaccgctagtaccgccataatcgcgggcgcact

SEQ ID NO: 401745 - DNA, 75 bp, synthetic construct
  source 1..75: mol_type = other DNA
gtgaatacttaccacatcacaatgccctggcccccgagcaataaccgctagtaccgccataatcgcgggcgcact

SEQ ID NO: 401746 - DNA, 75 bp, synthetic construct
  source 1..75: mol_type = other DNA
gcaaggtaatgcggtcgttccttatctgagcatctaccgtgaaaatgatgtgtccattcgcagtgaaacgttgaa

SEQ ID NO: 401747 - DNA, 75 bp, synthetic construct
  source 1..75: mol_type = other DNA
cgctgggcctgtcgctggtcacactgctgtttatggccaccgcgctgcttggctggtactacgttttaccattcg

SEQ ID NO: 401748 - DNA, 75 bp, synthetic construct
  source 1..75: mol_type = other DNA
atcgtaccgcgcgagcaatatatggcggcgatgacctttgtcacactgcccggtcaggtcggtccgctgctgggt

SEQ ID NO: 401749 - DNA, 75 bp, synthetic construct
  source 1..75: mol_type = other DNA
agtacgcgtcgtggcactggatctttttgatcaacattccggtgggaattatcggcgcgatcgccacactaatgt

SEQ ID NO: 401750 - DNA, 75 bp, synthetic construct
  source 1..75: mol_type = other DNA
ctcctccatgaacaccctgacgctgaaagatctcccggacaatctggcgagcagcggcaacagcctgctgtcgat

SEQ ID NO: 401751 - DNA, 75 bp, synthetic construct
  source 1..75: mol_type = other DNA
ggttggcaggttgacggtgatgaaaattgtaccgcgcgagcaatatatggcggcgatgacctttgttacgctgcc

SEQ ID NO: 401752 - DNA, 75 bp, synthetic construct
  source 1..75: mol_type = other DNA
acacctggctaagcatggcgtttcttatcgcccttccggcgttcatctttgccagagttccgaacgatacacatc

SEQ ID NO: 401753 - DNA, 75 bp, synthetic construct
  source 1..75: mol_type = other DNA
tctgtggctggccttctcacgttatggcgatatcttgttaggtcagtcgggagaaaaacctgacttcagcttgtt

SEQ ID NO: 401754 - DNA, 75 bp, synthetic construct
  source 1..75: mol_type = other DNA
tggtgggtcgtgtatgccatcccattcggtttatttatcgcccgtatttcaaaaggaaggacgatccggcaattg

SEQ ID NO: 401755 - DNA, 75 bp, synthetic construct
  source 1..75: mol_type = other DNA
ttctggatatgttcagccaccgcctgacacagtttgtctggcatatctggcgcaagtaccgttatcacgtcagtt

SEQ ID NO: 401756 - DNA, 75 bp, synthetic construct
  source 1..75: mol_type = other DNA
ttgatgatgatcccgatggtgctcggcagcatggggatgaagcgaattgtagtacaggtagtgaatcggtttggt

SEQ ID NO: 401757 - DNA, 75 bp, synthetic construct
  source 1..75: mol_type = other DNA
tttgatcaacattccggtggggattatcggcgcgatcgccacgctgatgttgatgccgaactataccatgcagac

SEQ ID NO: 401758 - DNA, 75 bp, synthetic construct
  source 1..75: mol_type = other DNA
tgtttttggttgcttttggggctatagcattaatttcatatattaccggacactgtactgtgggttatgccctcg

SEQ ID NO: 401759 - DNA, 75 bp, synthetic construct
  source 1..75: mol_type = other DNA
atgaaatttgaagtgcaggatgcttcacccactattgcgactgagctgaatttagtgactggtgagcaggtttat

SEQ ID NO: 401760 - DNA, 75 bp, synthetic construct
  source 1..75: mol_type = other DNA
caatggcaaatcaaaagaaaaactggtggaaccgcatgcgtgcggccatcaagacaggagatgccgacaccatga

SEQ ID NO: 401761 - DNA, 75 bp, synthetic construct
  source 1..75: mol_type = other DNA
gtggaaccgcatgcgtgcggccatcaaaacgggtgacgctgacaccatgaacgaactggtggagtcggctcccgc

SEQ ID NO: 401762 - DNA, 75 bp, synthetic construct
  source 1..75: mol_type = other DNA
gcgacgggcgataacgacaataagcctgacgataatccgaccggtgacggcgaggacgatgaagaggaaaccacg

SEQ ID NO: 401763 - DNA, 75 bp, synthetic construct
  source 1..75: mol_type = other DNA
ttggttggcgcggtctacttcctgaaaatgaaagggttgagttcagcgcggcatccggtcaggatggtgagatga

SEQ ID NO: 401764 - DNA, 75 bp, synthetic construct
  source 1..75: mol_type = other DNA
cctgctggctaagctggaaggaaatgcgacgggcgataacgacaataagcctgacgatactccgaccggtgacgg

SEQ ID NO: 401765 - DNA, 75 bp, synthetic construct
  source 1..75: mol_type = other DNA
gctggctgaccttatcgtcaaagacgaaagcgctattcagcttatcgaagatggcctgcgtgaagtgtcgtgtgg

SEQ ID NO: 401766 - DNA, 75 bp, synthetic construct
  source 1..75: mol_type = other DNA
acccatggcctgcgtgctattttgcataacgccagcgcgtggatggcagaaaaaccaggtacaccactgaccgac

SEQ ID NO: 401767 - DNA, 75 bp, synthetic construct
  source 1..75: mol_type = other DNA
gtttgccgatgaagtactaaaaagcacccatggtctgcgtgctattttgcataacgccagtgcgtggatggcgga

SEQ ID NO: 401768 - DNA, 75 bp, synthetic construct
  source 1..75: mol_type = other DNA
tcccggcccggcattgcctggtaccggcgatggtgaggaagaaattcctgcatggggtaaggcgctgattgaggc

SEQ ID NO: 401769 - DNA, 75 bp, synthetic construct
  source 1..75: mol_type = other DNA
ctatgacgcggaatataaacaggctgagccgggtaaggctcagcaggtcgatattaccggaaaccatgtggctct

SEQ ID NO: 401770 - DNA, 75 bp, synthetic construct
  source 1..75: mol_type = other DNA
gctggctgaccttatcgtcaaagacgaaagcgccattcagcttatcgaagatggcctgcgtgaagtgtcgtgcgg

SEQ ID NO: 401771 - DNA, 75 bp, synthetic construct
  source 1..75: mol_type = other DNA
tgcctcattcgaaggaatgagtatcacggtgttgcatcccgaggatgaaaacggggatgtgcggctggtaaatcc

SEQ ID NO: 401772 - DNA, 75 bp, synthetic construct
  source 1..75: mol_type = other DNA
ccggcgatgtaacccccgcagacgtcacaacaaaccaggatgaaacgcaggcgttgcgcgatgcttgttatggta

SEQ ID NO: 401773 - DNA, 75 bp, synthetic construct
  source 1..75: mol_type = other DNA
gcctttttatggttggtagcactgaccaataaccgcgcctttgacggctgttcactgctggcgatgggaatgttg

SEQ ID NO: 401774 - DNA, 75 bp, synthetic construct
  source 1..75: mol_type = other DNA
ggccagcccgacattaacctttacagatattaaccgcgtcagcgaactgctacctgtacccacgaaagatgcatc

SEQ ID NO: 401775 - DNA, 75 bp, synthetic construct
  source 1..75: mol_type = other DNA
ggtggttgatgacgccattaagtgatcgattaatcaccttctttgacaaatcattgccaggaaaaagaaaacatt

SEQ ID NO: 401776 - DNA, 75 bp, synthetic construct
  source 1..75: mol_type = other DNA
aatatgagaagtatcgcggtggcggaatgccgggtgcagtggatgtggatctggggctggatgacggcgcactgg

SEQ ID NO: 401777 - DNA, 75 bp, synthetic construct
  source 1..75: mol_type = other DNA
gccgtggagcttgtggtgcgaggacgtcacaaagaagtggattccggtgagtggaagacgggcgaaagcaacacc

SEQ ID NO: 401778 - DNA, 75 bp, synthetic construct
  source 1..75: mol_type = other DNA
tggcctcgtcatgctattaactgcagtggtcttaaaccaactgggacaggcattaattcctgtaaaacgggccag

SEQ ID NO: 401779 - DNA, 75 bp, synthetic construct
  source 1..75: mol_type = other DNA
tcaccattgaacgctggcaactgcgtaaagtcgccattgatccggcacaccagaaccggctgggtgtacgtaatc

SEQ ID NO: 401780 - DNA, 75 bp, synthetic construct
  source 1..75: mol_type = other DNA
catgttcctttcctttattctgcgcgaccagtttgcctgggatttacggctgtgcctggcaccacagcaggctaa

SEQ ID NO: 401781 - DNA, 75 bp, synthetic construct
  source 1..75: mol_type = other DNA
ttaacagagcgggccagctgtttgacgcggcggcgcaggtctgccggattatcgatggtatccggcagtgttcac

SEQ ID NO: 401782 - DNA, 75 bp, synthetic construct
  source 1..75: mol_type = other DNA
ggactactgcgttcagttgaatatacggtgtgagcgtcgcaaaaatgagcttcagcatcgtcagaacctgctttt

SEQ ID NO: 401783 - DNA, 75 bp, synthetic construct
  source 1..75: mol_type = other DNA
atcgccaggccagtaaagggacacatcagtttaattactctcgcttccgacccggaaatgtacaatcaattagcc

SEQ ID NO: 401784 - DNA, 75 bp, synthetic construct
  source 1..75: mol_type = other DNA
ctggtgaagtacctagacgatgacagtatccagaatcgtattactcaagatttttacgatgtccctgtgcgggag

SEQ ID NO: 401785 - DNA, 75 bp, synthetic construct
  source 1..75: mol_type = other DNA
gtgcagccacaatcagcaccatgatgacacactatatgttcgagctgaccttgtgaatggcaactatccggtaac

SEQ ID NO: 401786 - DNA, 75 bp, synthetic construct
  source 1..75: mol_type = other DNA
gtaagaccctggatgaaatgagcgatgcggaatgggaatcgttatgtgatggttgcggtcagtgctgcctgcata

SEQ ID NO: 401787 - DNA, 75 bp, synthetic construct
  source 1..75: mol_type = other DNA
tgactggttcgaaagcggcaatgcacggtgagcgaatctctgtacgtcatattgcggtgaaagaatcagaagtga

SEQ ID NO: 401788 - DNA, 75 bp, synthetic construct
  source 1..75: mol_type = other DNA
aaatcccgcgaccaggagaacgaggaaattgcgctaacggtagggaagctgcgcgttgagctggaagcagcaaaa

SEQ ID NO: 401789 - DNA, 75 bp, synthetic construct
  source 1..75: mol_type = other DNA
atgagcaagattgactatcaggcactgcgtgaaaaggcagaaaaagcaacgtgtggtgagtggtcgctcgaatat

SEQ ID NO: 401790 - DNA, 75 bp, synthetic construct
  source 1..75: mol_type = other DNA
ggcaatcgctgggatgatggcaccgaatatccggatccgcactcagttacgcactggcgtgaaatgccagcagca

SEQ ID NO: 401791 - DNA, 75 bp, synthetic construct
  source 1..75: mol_type = other DNA
gtgtggtgtgtggtcgctcgaatatggagagagccgatttgatggtgatgatgcgctaattcatcgtgaagttgc

SEQ ID NO: 401792 - DNA, 75 bp, synthetic construct
  source 1..75: mol_type = other DNA
ctccggtaattccggatggttggataagctgtagtgagcgaatgccgaaaaagaatcagaacgtacttatttcgg

SEQ ID NO: 401793 - DNA, 75 bp, synthetic construct
  source 1..75: mol_type = other DNA
gtgaacgtatctctgtgcgtcatatcgcagtgaaagaatcagaagtgattgactggcaggatcatatcttaaata

SEQ ID NO: 401794 - DNA, 75 bp, synthetic construct
  source 1..75: mol_type = other DNA
actggttcgaaagcggcaatgcatggtgaacgtatctctgtgcgtcatatcgcagtgaaagaatcagaagtgatt

SEQ ID NO: 401795 - DNA, 75 bp, synthetic construct
  source 1..75: mol_type = other DNA
agtttgaacccgactgcattaaattaacccgtgaaaatctgccaacattcgaatggctgccaatgacctgcgctt

SEQ ID NO: 401796 - DNA, 75 bp, synthetic construct
  source 1..75: mol_type = other DNA
acatttgggcgtcagcggcaggcgttgctacaaatgtgcgtacgaaagacatatgactggttaagactacttaat

SEQ ID NO: 401797 - DNA, 75 bp, synthetic construct
  source 1..75: mol_type = other DNA
ctgacgcgtctcaaccaaaacagcaataccactattttgcttatcagccatgacttacaaatgcttagccaatgg

SEQ ID NO: 401798 - DNA, 75 bp, synthetic construct
  source 1..75: mol_type = other DNA
gatgattttccaggaaccgcagtcgtgtcttgacccttcagaacgtgtgggtcgccagttgatgcaaaacatccc

SEQ ID NO: 401799 - DNA, 75 bp, synthetic construct
  source 1..75: mol_type = other DNA
cagcaaactatgacctacgcacatttcgcgccggatttcctgcaagatgcagtgacactaaatccggtgtctaga

SEQ ID NO: 401800 - DNA, 75 bp, synthetic construct
  source 1..75: mol_type = other DNA
gaatggttacatcctcctggttcaggacgcagaaccaaacttcgatataaatggcaactctccggtaactccgga

SEQ ID NO: 401801 - DNA, 75 bp, synthetic construct
  source 1..75: mol_type = other DNA
gaacgggccgacgggcgcaggccgcaggtgatgtgccgctctggcttcttcagacggatgcactgaaagaccggg

SEQ ID NO: 401802 - DNA, 75 bp, synthetic construct
  source 1..75: mol_type = other DNA
gcgatgcgcagctttccttacgagttgaccgaaggtgaatgccagaaagtgatgattgctattgcactggcgaat

SEQ ID NO: 401803 - DNA, 75 bp, synthetic construct
  source 1..75: mol_type = other DNA
aggcaggctttttaatgccagttactacaaagtgcgcaacgctctcagggaagtaaaacccgatttacctgacgg

SEQ ID NO: 401804 - DNA, 75 bp, synthetic construct
  source 1..75: mol_type = other DNA
tacaagtgacccatgcgcatttcagattactaaatcattgattagccagtacggcacggtgcgccgttctcaggg

SEQ ID NO: 401805 - DNA, 75 bp, synthetic construct
  source 1..75: mol_type = other DNA
tcgcgcttttatgtctgagcactggaggaagatggacggaagttgccacgctaaaaccagcacagattacaaatt

SEQ ID NO: 401806 - DNA, 75 bp, synthetic construct
  source 1..75: mol_type = other DNA
atttcggctggcagtcactggtgttgtttctggtgagtctgataatggtgctgcttttcacccgaatgattattg

SEQ ID NO: 401807 - DNA, 75 bp, synthetic construct
  source 1..75: mol_type = other DNA
tagtttctgctcatagcctgcccgcacgggctaaaatgatgcataccgacgtcgatctcaaagcaacagcttgcc

SEQ ID NO: 401808 - DNA, 75 bp, synthetic construct
  source 1..75: mol_type = other DNA
aaggggaactgtatctggtcgacgagagcgggcaagacgtttgtttccgcattgaattaccgtcgtcgaaaaaca

SEQ ID NO: 401809 - DNA, 75 bp, synthetic construct
  source 1..75: mol_type = other DNA
ggccttgcgccgtttaccgtgctctcctgcgacaatattcctgacaatggccatgtggtgaaaaacgcggtactg

SEQ ID NO: 401810 - DNA, 75 bp, synthetic construct
  source 1..75: mol_type = other DNA
ccctgaaaccttcaacctcacctgccaaacgtaaaaaatcacgtaatgaagcgatgatggagaaaaggactggtg

SEQ ID NO: 401811 - DNA, 75 bp, synthetic construct
  source 1..75: mol_type = other DNA
tattcctggacggctttacaggacaaactcgattatcagccggaacgcgataatgctttcctgtttaaactgaaa

SEQ ID NO: 401812 - DNA, 75 bp, synthetic construct
  source 1..75: mol_type = other DNA
gaggaaagagttttgctggcgtcgtcctctatgcgttaaagccctgttctcatcataaaaaagaccctatcgtga

SEQ ID NO: 401813 - DNA, 75 bp, synthetic construct
  source 1..75: mol_type = other DNA
tggatatattcccatttgcagaattgaaggagcgcattctgaaagcggtttcgatgaagatttccaaatggaaca

SEQ ID NO: 401814 - DNA, 75 bp, synthetic construct
  source 1..75: mol_type = other DNA
ataccaaaacagccgttcttgttgccgtggagtttgacaggaaaggtgactggcgaatgaaatgggcgacttaca

SEQ ID NO: 401815 - DNA, 75 bp, synthetic construct
  source 1..75: mol_type = other DNA
ggacaggtgaacaatgcccaaaaaccatcatccagaacgctttagagacgttagtttctaaaagagtatcgacca

SEQ ID NO: 401816 - DNA, 75 bp, synthetic construct
  source 1..75: mol_type = other DNA
agattgctgatgattacatgtcccgaatgggcttctctgaaacgcacctcagatgctatgtccttcatgatgatg

SEQ ID NO: 401817 - DNA, 75 bp, synthetic construct
  source 1..75: mol_type = other DNA
gagatgatgatagaaaagagaactggtgagctatgcccaaaagcaatcatccaaaacgcccttaatgaactgctt

SEQ ID NO: 401818 - DNA, 75 bp, synthetic construct
  source 1..75: mol_type = other DNA
cctatctcgatatctttatgagaatattgaaaaagctaaaaatcccatttttgaaacccccagaaaagcacaaga

SEQ ID NO: 401819 - DNA, 75 bp, synthetic construct
  source 1..75: mol_type = other DNA
gatggcgataccgcacaatgtctggaagccctggcgcaggccgggcttgccggattcgaagatattccggtaaat

SEQ ID NO: 401820 - DNA, 75 bp, synthetic construct
  source 1..75: mol_type = other DNA
acaccgatggaagctgttagccgatgactatatgaagcgtatgggcttctctgatacgcatctacgcgcttatgt

SEQ ID NO: 401821 - DNA, 75 bp, synthetic construct
  source 1..75: mol_type = other DNA
gtcatagaaagcttcgcagaagcactaagtgcagagttcaacgctacgaagctcctacgctccgatgtcagtaaa

SEQ ID NO: 401822 - DNA, 75 bp, synthetic construct
  source 1..75: mol_type = other DNA
tgcgcgaggcggcagagaaagcaacgtgtggcgagtggtcgctcgaatatggagatggccgatttgatggtgatg

SEQ ID NO: 401823 - DNA, 75 bp, synthetic construct
  source 1..75: mol_type = other DNA
gcatctgggcgtgaatgatccctgtgcaattagctgcgagccgtttatccagtgggtggtggaagataacttcgt

SEQ ID NO: 401824 - DNA, 75 bp, synthetic construct
  source 1..75: mol_type = other DNA
ccatgtggtgaaaaacgcggtgctgggaatggcagaaaaacgttcaccagaactcgccgggtggataaaagaaca

SEQ ID NO: 401825 - DNA, 75 bp, synthetic construct
  source 1..75: mol_type = other DNA
aactcgccgggtggataaaagaacacgtcagttttccgggaaccatggtcgaccgcattgttccggctgcaaccg

SEQ ID NO: 401826 - DNA, 75 bp, synthetic construct
  source 1..75: mol_type = other DNA
gcgattagctgcgagccgtttatccaatgggtggtggaagataacttcgtcgcggggcgccctgcctgggaagtc

SEQ ID NO: 401827 - DNA, 75 bp, synthetic construct
  source 1..75: mol_type = other DNA
acccgcattttgtgcaggctatcgaacaagcctggcaacaaatcgcacaattcggcgcgcatcaggcgctattaa

SEQ ID NO: 401828 - DNA, 75 bp, synthetic construct
  source 1..75: mol_type = other DNA
ttgacccggccaccggtgcactcgacaccagcaatccgcggattattcacgatctacaaaaccctgaagaacctc

SEQ ID NO: 401829 - DNA, 75 bp, synthetic construct
  source 1..75: mol_type = other DNA
gtattacgtgcaatgctggtctgaaggtcaagggtggcttggtgatgataccagcatccctgaatgcgatgtaat

SEQ ID NO: 401830 - DNA, 75 bp, synthetic construct
  source 1..75: mol_type = other DNA
caggagaacgaggaaattgcgctaacggtagggaagctgcgtgttgagctggaagcagcaaataagcgcatagca

SEQ ID NO: 401831 - DNA, 75 bp, synthetic construct
  source 1..75: mol_type = other DNA
aagacaccaaaatgttactggcatttagtcaaggtgaaatcgtggccgcatattggaactgggttgtaaatccaa

SEQ ID NO: 401832 - DNA, 75 bp, synthetic construct
  source 1..75: mol_type = other DNA
tgcgtgaaaaggcagagaaagcaacgtgtggtgtatggtcgctcgaatatggagagggacgatttgatggtgatg

SEQ ID NO: 401833 - DNA, 75 bp, synthetic construct
  source 1..75: mol_type = other DNA
tgagtattacgaaggtgttatctcggatggaagtaagcgcatagcagaactggaagccgaacctgtaagccaagc

SEQ ID NO: 401834 - DNA, 75 bp, synthetic construct
  source 1..75: mol_type = other DNA
atgagtgctttattaactggatgcgtgactgccattcttcagatgataaagacgtcattgcaattgatggaaaaa

SEQ ID NO: 401835 - DNA, 75 bp, synthetic construct
  source 1..75: mol_type = other DNA
gccgatgcgcgccgtcgcgtgggcaataaagtcgcgttgcagggtaatatggatccgtcgatgctgtacgcgccg

SEQ ID NO: 401836 - DNA, 75 bp, synthetic construct
  source 1..75: mol_type = other DNA
gggcctcgactggacaacggatatcgccgatgcgcgccgtcgcgtgggcaataaagtcgcgctgcagggtaatat

SEQ ID NO: 401837 - DNA, 75 bp, synthetic construct
  source 1..75: mol_type = other DNA
cgattatcaacagttctcgctctattacatgcataaaattgttgatggtttagtgcgtgaaaacgacggtcgccg

SEQ ID NO: 401838 - DNA, 75 bp, synthetic construct
  source 1..75: mol_type = other DNA
ttacagcgattacgccagccaacaggcgaagcaggatatctccaccctgggcgtggcaacgctgctgggggtgat

SEQ ID NO: 401839 - DNA, 75 bp, synthetic construct
  source 1..75: mol_type = other DNA
gggcagagcgtcgatcaaaaatggttcgtggtttacggcgactccccacagcaaacattgcggcgactggagaaa

SEQ ID NO: 401840 - DNA, 75 bp, synthetic construct
  source 1..75: mol_type = other DNA
tgttaaccggcttgttgctggtggcgctggcagtaattgcctgcggcgcagtggcccgcctcggctggcgcaaag

SEQ ID NO: 401841 - DNA, 75 bp, synthetic construct
  source 1..75: mol_type = other DNA
gatgcgccatcaacaaggtcaatgctcaaacaggtggcagaagatcttggcgggatgaaaaaccttgaccctatt

SEQ ID NO: 401842 - DNA, 75 bp, synthetic construct
  source 1..75: mol_type = other DNA
aatgactggtgcattctgaaaggaataacgccgacgacgcacatcattaaattaccgattggggaaatcaggcag

SEQ ID NO: 401843 - DNA, 75 bp, synthetic construct
  source 1..75: mol_type = other DNA
tatccagaaaacaatcgtcagccctttttcgatatgttaagtgggaagttaacgcgaattgttgtaaaggttgag

SEQ ID NO: 401844 - DNA, 75 bp, synthetic construct
  source 1..75: mol_type = other DNA
aaagtagcagctgaacatgggatctcacttgcggaccataaagggcgtcaatatacgtcctctttaggtagacaa

SEQ ID NO: 401845 - DNA, 66 bp, synthetic construct
  source 1..66: mol_type = other DNA
atggcgacggacaccccacggattccagaacaaggcgtggccactctgcctgatgaggcttgggag

SEQ ID NO: 401846 - DNA, 75 bp, synthetic construct
  source 1..75: mol_type = other DNA
tagccattttttcggcaattgatcagctgggtatttcagaaatgggtcgcattgcaagagatcttacacatttca

SEQ ID NO: 401847 - DNA, 75 bp, synthetic construct
  source 1..75: mol_type = other DNA
ggtgccggttgaaggggttaaaagtagcgcgttgttgcaggaaatcgccagcgattaccctggcggcattgcctg

SEQ ID NO: 401848 - DNA, 75 bp, synthetic construct
  source 1..75: mol_type = other DNA
tggtcgggtacgtaaaagcaagatgggaccatcacataacccgtcagtctggatgtctcctcttgaggttgatca

SEQ ID NO: 401849 - DNA, 75 bp, synthetic construct
  source 1..75: mol_type = other DNA
attattactacaaacttctggagagcactgctgaccacgaagtgttttttggccctgatggacactctgggctgt

SEQ ID NO: 401850 - DNA, 75 bp, synthetic construct
  source 1..75: mol_type = other DNA
gcctatgccgagcaggtagcgtcgcaggtcaagggtgccagtgcggttgtcagcaaagcagaaaccaaaccaggt

SEQ ID NO: 401851 - DNA, 75 bp, synthetic construct
  source 1..75: mol_type = other DNA
ttgtatcgcgcccgattattggaataagaattggtaatgacgttttcttttcaacccatgcactggcaaaccggg

SEQ ID NO: 401852 - DNA, 75 bp, synthetic construct
  source 1..75: mol_type = other DNA
tttcgtacaccaggtatcccaatgaatgagtatatctggaatactggaacgaatagccgtccacagcagcttttt

SEQ ID NO: 401853 - DNA, 75 bp, synthetic construct
  source 1..75: mol_type = other DNA
cagtggcggcggcgtggatcagtaataagacagttgatttgctcgaaagattctatttcaagcgtccgctgagca

SEQ ID NO: 401854 - DNA, 75 bp, synthetic construct
  source 1..75: mol_type = other DNA
aacttctgcacgcaatgggatgcgaggtgacagcctttagttctaatccggcgaaagagcaggaagtgctggcga

SEQ ID NO: 401855 - DNA, 75 bp, synthetic construct
  source 1..75: mol_type = other DNA
tcgaactgttcccgatgtcaaaaattaacgatgccatacagcatgtacgcgacggtaaggcacgttatcgggtgg

SEQ ID NO: 401856 - DNA, 75 bp, synthetic construct
  source 1..75: mol_type = other DNA
ccgtcgcgctggcgctgttttcgctggcggggatgtcaatgctgcgcgtcgatgacgatatctcgcagttacagg

SEQ ID NO: 401857 - DNA, 75 bp, synthetic construct
  source 1..75: mol_type = other DNA
caggaaaagtgatgaagcatttgaatccgtatatcaattaattgaacggtcctgccaatcatgggcagagcggtt

SEQ ID NO: 401858 - DNA, 75 bp, synthetic construct
  source 1..75: mol_type = other DNA
caaaagaagcgggcggcgaactggaagtttatgagtacgatcccggtgagctgaagccacaagatgttgaagtgc

SEQ ID NO: 401859 - DNA, 75 bp, synthetic construct
  source 1..75: mol_type = other DNA
ttccgatctgtcgatgatcgacaacgaatggggattttcacagtatccactggttgccgggcatgaggtgattgg

SEQ ID NO: 401860 - DNA, 75 bp, synthetic construct
  source 1..75: mol_type = other DNA
gaaaagtgctggtatattctagttctctgactatgaatcctaatggaaaattggtttttaattttgataatgaag

SEQ ID NO: 401861 - DNA, 75 bp, synthetic construct
  source 1..75: mol_type = other DNA
acggtttaccggcattgaaatgactaaccagtattttgatatcgcctgcgcacgtatcgaaaaagcgcaggcaga

SEQ ID NO: 401862 - DNA, 75 bp, synthetic construct
  source 1..75: mol_type = other DNA
cattgcggagcgtgaagcgatcttgaagcttaagttcgacgacacactgtataaaactttgacagcagctaaacc

SEQ ID NO: 401863 - DNA, 75 bp, synthetic construct
  source 1..75: mol_type = other DNA
aaattgagcttattttccatatctacagtgggcgacttatccagaactaccagcgaggtcttggattgttcattg

SEQ ID NO: 401864 - DNA, 75 bp, synthetic construct
  source 1..75: mol_type = other DNA
ggcttcccatgtattaccccactctgtttctaacaactcaaatccgcaatagagaggatgctttttcaacgatgt

SEQ ID NO: 401865 - DNA, 75 bp, synthetic construct
  source 1..75: mol_type = other DNA
aaaagaactacagagttacaacatttgtcatggatagtggcgagcgctattgcatggtagtggatcgtgcttctg

SEQ ID NO: 401866 - DNA, 75 bp, synthetic construct
  source 1..75: mol_type = other DNA
ggtgaaactcgtctgattaggggaaacaaattttatgccgaggtgcggtttaaacaggttaagcctgaactcgag

SEQ ID NO: 401867 - DNA, 75 bp, synthetic construct
  source 1..75: mol_type = other DNA
tctcgaaacagcttacaagtaaaaagtagcgccaacacgaacgttgtagccgaattggaacgtctaaaaaggcag

SEQ ID NO: 401868 - DNA, 75 bp, synthetic construct
  source 1..75: mol_type = other DNA
ttgagcaggcggagaaactttatgacttctacgtcaagtatctccaagtaaaagaaaagacctctgtgaaccttg

SEQ ID NO: 401869 - DNA, 75 bp, synthetic construct
  source 1..75: mol_type = other DNA
cggcgctgaggattctaaggatgcgtggagtcgtcttctggcagccgcttggattaaatcgctgccagcagcgcc

SEQ ID NO: 401870 - DNA, 75 bp, synthetic construct
  source 1..75: mol_type = other DNA
acaggtcagatcaagaggattcatgacctcttttcaacactgatgacaaaaaataaaactaattatgacgataat

SEQ ID NO: 401871 - DNA, 75 bp, synthetic construct
  source 1..75: mol_type = other DNA
acgaggctcaaagttctaggctccaaacttgtattaaagatcttaatcttatcgaaaaagaaaccatggcagctc

SEQ ID NO: 401872 - DNA, 75 bp, synthetic construct
  source 1..75: mol_type = other DNA
aagctttatgagctgccagaattcgaatcatctgacttcactaagatcaatctgcgcgacaacagtttccttgac

SEQ ID NO: 401873 - DNA, 75 bp, synthetic construct
  source 1..75: mol_type = other DNA
atcaaccttgagcagcggtttttgaccaaagacttcttcaagccacacgaactggatgatctgcgagattttgct

SEQ ID NO: 401874 - DNA, 75 bp, synthetic construct
  source 1..75: mol_type = other DNA
ttataaagatggtaagttcacgtttcgtggtgatgacagttcgccgtcaaatatggaagtaactggatatctgaa

SEQ ID NO: 401875 - DNA, 75 bp, synthetic construct
  source 1..75: mol_type = other DNA
ctgcgcaatagctaacattgtggatacgaaacttcgctgtctggagattgcttcgctctgtttaaaaacggacga

SEQ ID NO: 401876 - DNA, 75 bp, synthetic construct
  source 1..75: mol_type = other DNA
gggatgaaccagtcgttgctcaacgctatctccagcactggcaaactcggtgggagatgggaaaagactggagtt

SEQ ID NO: 401877 - DNA, 75 bp, synthetic construct
  source 1..75: mol_type = other DNA
cattactaaaattaattcttttgcttcaacaataatatttgaacgcgctaaggataaaaaatatatcaatgctaa

SEQ ID NO: 401878 - DNA, 75 bp, synthetic construct
  source 1..75: mol_type = other DNA
agtttgatgagaatacggggtcattgcaaattcactatggacagggaaaagtaaattttaacggtaaagaaatga

SEQ ID NO: 401879 - DNA, 75 bp, synthetic construct
  source 1..75: mol_type = other DNA
aatcgggtcagaatattatactggatgtaaatattgatcatggaccatttccactgggtcagctttcaaagggta

SEQ ID NO: 401880 - DNA, 75 bp, synthetic construct
  source 1..75: mol_type = other DNA
ctagaaccaatgagcctaatgctaaaactagagaacggctcttaccgttggctgaatccttagctcaagaactgc

SEQ ID NO: 401881 - DNA, 75 bp, synthetic construct
  source 1..75: mol_type = other DNA
ttttccgcggtcaggactgtctcgccgcaattatatgcagcgacagggcattcgctccgtcatacctggaatcgc

SEQ ID NO: 401882 - DNA, 75 bp, synthetic construct
  source 1..75: mol_type = other DNA
acaagagcaaatccgtgcgtacttacaaggttggaaaccgggctcaggaaccgcagcgacttacaacaagcgttt

SEQ ID NO: 401883 - DNA, 75 bp, synthetic construct
  source 1..75: mol_type = other DNA
ggggggactgtgattctgactacccaccagccgctcaacgttgctgaaagtaaaattcgccgcatttcactgacg

SEQ ID NO: 401884 - DNA, 75 bp, synthetic construct
  source 1..75: mol_type = other DNA
cagacaggtttatcgacttagcccaaattccgcaacgcaggaacgcatccggatggcggaaacagcactgaaaca

SEQ ID NO: 401885 - DNA, 75 bp, synthetic construct
  source 1..75: mol_type = other DNA
cgatacggaccaccacgccggagatcctgccacaaccagtggctgaacagccggagagcaccaccatcgttcata

SEQ ID NO: 401886 - DNA, 75 bp, synthetic construct
  source 1..75: mol_type = other DNA
aaaaattatcacaactgatgcgatgggttgccagaaagatattgcagagaagatacaaaaacagggaggtgatta

SEQ ID NO: 401887 - DNA, 75 bp, synthetic construct
  source 1..75: mol_type = other DNA
tgtcctgcgaaatttcatgagagctttattaactggatgcttgactaccattcttcagatgataaagacgtcatc

SEQ ID NO: 401888 - DNA, 75 bp, synthetic construct
  source 1..75: mol_type = other DNA
caatgcacagtctggttttcgggcagattaagacggatgagaaatccaatgagattacagccattcctgaacttc

SEQ ID NO: 401889 - DNA, 75 bp, synthetic construct
  source 1..75: mol_type = other DNA
ttatttctggtgcagaaggctgggaagatatagaggattttggggaaacacatcccgattttttgaagcaatatg

SEQ ID NO: 401890 - DNA, 75 bp, synthetic construct
  source 1..75: mol_type = other DNA
atatttctattattcccgattacagacaagcctggaaagtggaacataaattatcgaatattctactgttgacta

SEQ ID NO: 401891 - DNA, 75 bp, synthetic construct
  source 1..75: mol_type = other DNA
tttttgaagcaatatggtgattttgaaaatggtattcctgttcacgataccattgccagagttgtatcctgtatc

SEQ ID NO: 401892 - DNA, 75 bp, synthetic construct
  source 1..75: mol_type = other DNA
cagggatacggcacatcgctattaatattttaacgaatgataaggtattcaaggcagggttaagacgtaagatgc

SEQ ID NO: 401893 - DNA, 75 bp, synthetic construct
  source 1..75: mol_type = other DNA
aaacgctccggcactcttatgacaagagtcgccgcaggggagcgattcatgtcattagtgcgttctcaacaatgc

SEQ ID NO: 401894 - DNA, 75 bp, synthetic construct
  source 1..75: mol_type = other DNA
gaaatccgtcttcatattgtttgcgatgtccctgatgaacttattgatttcacgtttgaatggaaaggtctgaag

SEQ ID NO: 401895 - DNA, 75 bp, synthetic construct
  source 1..75: mol_type = other DNA
ctcgatgggccgcgaaggtgcaggtgcctgcacgatggcatcgcactgagtacaggcatgtttttcccgtaccgt

SEQ ID NO: 401896 - DNA, 75 bp, synthetic construct
  source 1..75: mol_type = other DNA
gggttgggaagatatagaggattttggtgaaacacatctcgattttttgaagcaatatggtgattttgaaaatgg

SEQ ID NO: 401897 - DNA, 75 bp, synthetic construct
  source 1..75: mol_type = other DNA
ttcatgtcattagtgcgttctcaacaatgcacagtctggtcatcgggcagatcaagacggataagaaatccaatg

SEQ ID NO: 401898 - DNA, 75 bp, synthetic construct
  source 1..75: mol_type = other DNA
gatcaggacggatgagaaatctaatgagatcacagctatccctgaacttcttaacatgttggatattaaagggaa

SEQ ID NO: 401899 - DNA, 75 bp, synthetic construct
  source 1..75: mol_type = other DNA
acatttgaatggaaagggctgaagaaattatgcgtggcagtctcctttcggtcaataatagcagaacaaaagaaa

SEQ ID NO: 401900 - DNA, 75 bp, synthetic construct
  source 1..75: mol_type = other DNA
attcatgtcattagtgcgttctcaacaatgcacagtctggttctcgggcagattaagacggatgagaaatccaat

SEQ ID NO: 401901 - DNA, 75 bp, synthetic construct
  source 1..75: mol_type = other DNA
gctggcacagccagaccttggtacggtggtggtgctgtttgtgaccacgctggcgatgttgttcctggcgggggc

SEQ ID NO: 401902 - DNA, 75 bp, synthetic construct
  source 1..75: mol_type = other DNA
tgacaagagtcgccgcaggggagcgattcatgtcattagtgcgttctcaacgatgcacagtctggtcatcggaca

SEQ ID NO: 401903 - DNA, 75 bp, synthetic construct
  source 1..75: mol_type = other DNA
cgcaagggagcgattcatgtcattagtgcgttctcaacaatgcacagtctggttctcgggcagattaagacggat

SEQ ID NO: 401904 - DNA, 75 bp, synthetic construct
  source 1..75: mol_type = other DNA
tctcctttcggtcaataatagcagaacaaaagaaagagccagaaatgacggtcagatattatatcagttctgctg

SEQ ID NO: 401905 - DNA, 75 bp, synthetic construct
  source 1..75: mol_type = other DNA
ataaagacgtcattgcaattgatggaaaaacgctccggcactcttctgacaagagtcaccgcaggggagcgattc

SEQ ID NO: 401906 - DNA, 75 bp, synthetic construct
  source 1..75: mol_type = other DNA
agaattaaataatccagagcatgacagttacgcaattagtgaaaagagtcacggcagagaagaaatccgtcttca

SEQ ID NO: 401907 - DNA, 75 bp, synthetic construct
  source 1..75: mol_type = other DNA
cagatcaggacggatgagaaatccaatgaaattacagctatcccagaacttcttaacatgctggatattaaagga

SEQ ID NO: 401908 - DNA, 75 bp, synthetic construct
  source 1..75: mol_type = other DNA
ttatgcgtggcagtctcctttcggtctataatagcagaacaaaagaaagagccagaaattgacggtcagatatta

SEQ ID NO: 401909 - DNA, 75 bp, synthetic construct
  source 1..75: mol_type = other DNA
gcaattgatggaaaaacgctccggcattcttatgacaagagtcgccgcaggggagcgattcatgtcattagtgcg

SEQ ID NO: 401910 - DNA, 75 bp, synthetic construct
  source 1..75: mol_type = other DNA
aaaacagggatgtgattatttattcgcggtaaaaggaaaccaggggcggctaaataaagcctttgaggaaaaatt

SEQ ID NO: 401911 - DNA, 75 bp, synthetic construct
  source 1..75: mol_type = other DNA
gtcattagtgcgttctcaacaatgcacagtctggtcatcggacagatcgagacggatgagaaatctaatgagatt

SEQ ID NO: 401912 - DNA, 75 bp, synthetic construct
  source 1..75: mol_type = other DNA
tggaagaagagggtatcaaaggcaccggtgaatgcacgccgtatccgcgttatggggaaagcgatgcctcggtaa

SEQ ID NO: 401913 - DNA, 75 bp, synthetic construct
  source 1..75: mol_type = other DNA
gccttaatcttgtgcttgccagctcacttctggccgccagcattccggcatttgccgtaaccggagatactgatc

SEQ ID NO: 401914 - DNA, 75 bp, synthetic construct
  source 1..75: mol_type = other DNA
gaaatgacggtcagatattatatcagttctgctgatttaaccgcagaaaagttcgccacagcaatccgaaaccac

SEQ ID NO: 401915 - DNA, 75 bp, synthetic construct
  source 1..75: mol_type = other DNA
cagggttaagacgtaagatgcgaaaagcagctatggacagaaactatctggcgtcagtccttgcggagagcgggc

SEQ ID NO: 401916 - DNA, 75 bp, synthetic construct
  source 1..75: mol_type = other DNA
tatggggaaagtgatgcctcggtaatggcgcaaattatgagcgtcgtgccgcaattagagaaagggctgacacgg

SEQ ID NO: 401917 - DNA, 75 bp, synthetic construct
  source 1..75: mol_type = other DNA
atttgatcggcataacgcttcccgagacagttatcactgcacagacggttgtcatcggtacgcctgatcagatgg

SEQ ID NO: 401918 - DNA, 75 bp, synthetic construct
  source 1..75: mol_type = other DNA
taccggcctgatggcgaaccataacccactggcccatgagctgattgccgcgtctgaacaatccggtgaccgcgc

SEQ ID NO: 401919 - DNA, 75 bp, synthetic construct
  source 1..75: mol_type = other DNA
ggtaaagcaaaaggcgcaaccggtcgcccggtagcgttgctggcacagttcctgctgaaccgcgccgggtttaac

SEQ ID NO: 401920 - DNA, 75 bp, synthetic construct
  source 1..75: mol_type = other DNA
gaccagcggcgagcgtgcgatccaacacggtctggcgattgcggcaggcattaaagctgcgaaagatctcggcaa

SEQ ID NO: 401921 - DNA, 75 bp, synthetic construct
  source 1..75: mol_type = other DNA
gattatttattcgcggtaaaaggaaaccaggggcggctaaataaagcctttgaggaaaaatttccgctgaaagaa

SEQ ID NO: 401922 - DNA, 75 bp, synthetic construct
  source 1..75: mol_type = other DNA
ctcggggtgaagtggcacactgaatctgggcatctgaacagaggtgatatgctgaagtggcacactgaatttggc

SEQ ID NO: 401923 - DNA, 75 bp, synthetic construct
  source 1..75: mol_type = other DNA
gcgtcctggcggggcgattaccgcaggctgtttcctgtcgcgctttacgcgtaagtacaactgggcacacctgga

SEQ ID NO: 401924 - DNA, 75 bp, synthetic construct
  source 1..75: mol_type = other DNA
cgcaattagtgaaaagcgtcacggtagagaagaaatccttcttcatattgtttgcgatgtccctgatgaacttat

SEQ ID NO: 401925 - DNA, 75 bp, synthetic construct
  source 1..75: mol_type = other DNA
gggactgggatatgcaggaaaatttacaagtcttgctgactggatcgctgagtttggtaaggctgtccggacaga

SEQ ID NO: 401926 - DNA, 75 bp, synthetic construct
  source 1..75: mol_type = other DNA
gatgataaagacgtcattgcaattgatggaaaaacgctccggcattcttatgacaagagtcgccgcaggggagcg

SEQ ID NO: 401927 - DNA, 75 bp, synthetic construct
  source 1..75: mol_type = other DNA
atggaacttaaaaaattgatgggacatatttctattatccccgattacagacaagcctggaaagtggaacataaa

SEQ ID NO: 401928 - DNA, 75 bp, synthetic construct
  source 1..75: mol_type = other DNA
agattacagccattcctgaacttcttaacgtgctggatattaaaggaaaaatcatcacaactgatgcgatgggtt

SEQ ID NO: 401929 - DNA, 75 bp, synthetic construct
  source 1..75: mol_type = other DNA
cgaatgataaggtattcaaggcagggttaagacgtaagatgcgaaaagcagctatggacagaaactatctggcgt

SEQ ID NO: 401930 - DNA, 75 bp, synthetic construct
  source 1..75: mol_type = other DNA
gattttgaaaatggtattcctgttaacgttactattgccagagttgtgtcctgtatcagtccggcaaaagttcat

SEQ ID NO: 401931 - DNA, 75 bp, synthetic construct
  source 1..75: mol_type = other DNA
ttatgattttttcggcgggaataccctcaaggctgatgtctctatttcggtcaccgagcttggttcgttgctcga

SEQ ID NO: 401932 - DNA, 75 bp, synthetic construct
  source 1..75: mol_type = other DNA
tattcctgttcacgataccattgccagcgttgtatcctgtatcagtcctgcaaaatttcacgagtgctttattaa

SEQ ID NO: 401933 - DNA, 75 bp, synthetic construct
  source 1..75: mol_type = other DNA
ttgtcggatattctactgttgactatttgtgccgttatttctggtgcagaaggctgggaagatatagaggatttt

SEQ ID NO: 401934 - DNA, 75 bp, synthetic construct
  source 1..75: mol_type = other DNA
ttatatcagttctgctgatttaaccgctgagaaattcgccacagcgatccgaaatcactggcacgtggagaataa

SEQ ID NO: 401935 - DNA, 75 bp, synthetic construct
  source 1..75: mol_type = other DNA
cacagtctggtcatcggacagatcaagacggatgagaaatctaatgagattacagctatcccagaacttcttaac

SEQ ID NO: 401936 - DNA, 75 bp, synthetic construct
  source 1..75: mol_type = other DNA
atagcagaacaaaagaaagagccagaaatgacggtcagatattatatcagttctgctgatttaaccgcagaaaag

SEQ ID NO: 401937 - DNA, 75 bp, synthetic construct
  source 1..75: mol_type = other DNA
gttttagcgatcacgtcagtgataacacgatggtcaagctgatgactgacggtattctgctggcggaaatccagc

SEQ ID NO: 401938 - DNA, 75 bp, synthetic construct
  source 1..75: mol_type = other DNA
ccatcttccccggttctggtttattcaaaaaaccgccgaaatgggtaatggtggcggaactggtagaaaccagcc

SEQ ID NO: 401939 - DNA, 75 bp, synthetic construct
  source 1..75: mol_type = other DNA
ttttcgatgccgtagaagagctaagccaggaaagccctggtgatatactgatctttatgagcggcgagcgggaaa

SEQ ID NO: 401940 - DNA, 75 bp, synthetic construct
  source 1..75: mol_type = other DNA
cttctctcgccactttaacaatgcgccgattatcgaagtttcgggtcgaacttatccggtagaagtgcgttatcg

SEQ ID NO: 401941 - DNA, 75 bp, synthetic construct
  source 1..75: mol_type = other DNA
gtttgtaaatctgtggaattatcttggcgagcagcaaaaggcgctttcttccaacgccttccgtcgcctgtgtcg

SEQ ID NO: 401942 - DNA, 75 bp, synthetic construct
  source 1..75: mol_type = other DNA
atgacagaacaacaaaaattgacctttacttccttacagcagcggctggattcgctgatgctgcgcgacagactg

SEQ ID NO: 401943 - DNA, 75 bp, synthetic construct
  source 1..75: mol_type = other DNA
gtggcggaactggtagaaaccagccgcctgtgggggcgcattgcggcacgcatcgatccggaatgggtagagccg

SEQ ID NO: 401944 - DNA, 75 bp, synthetic construct
  source 1..75: mol_type = other DNA
ttaatcctaaaacaggcaagccgccagtggatagcaatggaaaacccattggaccttttgataccaatgaaacac

SEQ ID NO: 401945 - DNA, 75 bp, synthetic construct
  source 1..75: mol_type = other DNA
gaaaatcagaaagttgaattttctattgagcaggggcaacgtggccccgcggcagcgaacgttgttacgctctaa

SEQ ID NO: 401946 - DNA, 75 bp, synthetic construct
  source 1..75: mol_type = other DNA
atcgtgaccgtgcccaaatgctgaaagttgaaaacgtccagcaggcatggcaacaatggttcaacaaactgccgc

SEQ ID NO: 401947 - DNA, 75 bp, synthetic construct
  source 1..75: mol_type = other DNA
ttgctgcgctgcatgaaaaagtgcgtgctgaactgaacgacacggtggtggatattgcgaagcaggtcgagcaaa

SEQ ID NO: 401948 - DNA, 75 bp, synthetic construct
  source 1..75: mol_type = other DNA
gtcgccgcgatattctggttgatgacgaaacgttgtttgagttctacgaccagcgcatcagccacgatgtaatct

SEQ ID NO: 401949 - DNA, 75 bp, synthetic construct
  source 1..75: mol_type = other DNA
accaatagttgaagaagcggatgataccgagcgcgaccagttacaggcgattttcgatgccgtagacgaattgag

SEQ ID NO: 401950 - DNA, 75 bp, synthetic construct
  source 1..75: mol_type = other DNA
agaagagcgagagtatttgttattaaaagttagagatttaaccatcagtaatggtgaggtagtgaaatacttaat

SEQ ID NO: 401951 - DNA, 75 bp, synthetic construct
  source 1..75: mol_type = other DNA
aaggatcaacctgcccaggcgatgctggaacatgtcgagagctttcttctggaaagtaacagcggggaaagccag

SEQ ID NO: 401952 - DNA, 75 bp, synthetic construct
  source 1..75: mol_type = other DNA
agtttatgagtacgatcccggtgagctgaggccacaagatgttgaagtgcaggtggattattgcgggatctgcca

SEQ ID NO: 401953 - DNA, 75 bp, synthetic construct
  source 1..75: mol_type = other DNA
cttaggtaaaaatgagaaccttatcagcacacgtatcatccaggatcttgaaaaagactaccagctaacacaaac

SEQ ID NO: 401954 - DNA, 75 bp, synthetic construct
  source 1..75: mol_type = other DNA
gaggtaagagcttctcaggtgtggttctctatgtgttaaagccaggctcacaccatagaaccgttccagaagtaa

SEQ ID NO: 401955 - DNA, 75 bp, synthetic construct
  source 1..75: mol_type = other DNA
aacgaacaaatgctatcggaacgaactggggtgctttcaccaagagaagctctgcagcagatacttgataaaaat

SEQ ID NO: 401956 - DNA, 75 bp, synthetic construct
  source 1..75: mol_type = other DNA
ttaatacagatagcgatgcgctggccgtattgctgaccgatgccaaaaaagaagaacgtaaagaccgcgcgctcg

SEQ ID NO: 401957 - DNA, 75 bp, synthetic construct
  source 1..75: mol_type = other DNA
atgcgtaataccgaaccccgtagttttaatactgatagtgacacgctggccgtgctgctgacagatgcaaaaaaa

SEQ ID NO: 401958 - DNA, 75 bp, synthetic construct
  source 1..75: mol_type = other DNA
gcgcgttagttacttcgctcaacaacttggtacgccttatccgatttcagataagcgtattttgcaggcgatgga

SEQ ID NO: 401959 - DNA, 75 bp, synthetic construct
  source 1..75: mol_type = other DNA
cgacattgaatctgctgggccgctgttgtgcggcggtatcacggtctttaaaccactgttgatgcaccatatcac

SEQ ID NO: 401960 - DNA, 75 bp, synthetic construct
  source 1..75: mol_type = other DNA
gcctgtattagcggtaatcagatcaactgtgagcaaggtgcggtgccgacgattatgaatcgcggtggctttgcc

SEQ ID NO: 401961 - DNA, 75 bp, synthetic construct
  source 1..75: mol_type = other DNA
tttcaaaacgttaactgagaatcaggaagtcgaatttggtattgagaacggacctaaaggcccgcggctgttcat

SEQ ID NO: 401962 - DNA, 75 bp, synthetic construct
  source 1..75: mol_type = other DNA
taaaatggtttaactctgataaaggctttggctttatttctcctgctgatggcagtaaagatgtttttgtacatt

SEQ ID NO: 401963 - DNA, 75 bp, synthetic construct
  source 1..75: mol_type = other DNA
cggatgagaaatctaatgagattacagctatcccagaacttcttaacatgctggatattaaaggaaaaatcatca

SEQ ID NO: 401964 - DNA, 75 bp, synthetic construct
  source 1..75: mol_type = other DNA
gaaacgcagcagaattattttcagggatacggcacattgctattagtcttttgacgaatgagcaggtattccagg

SEQ ID NO: 401965 - DNA, 75 bp, synthetic construct
  source 1..75: mol_type = other DNA
gaaaccggttccggtaaaacgactcagctaccgaaaatctgtatggagctggggcgcggtattaaagggctgatc

SEQ ID NO: 401966 - DNA, 75 bp, synthetic construct
  source 1..75: mol_type = other DNA
cgtcttctctggtcagtgttcccgccacatggtcgttatgcgaaagcggcaatcattcacgactggctgtatgac

SEQ ID NO: 401967 - DNA, 75 bp, synthetic construct
  source 1..75: mol_type = other DNA
gcagaggaaatggcagacgccgcacagagcgcaatgcttgccgtcaccggctttgatgctgatctgttgctgcag

SEQ ID NO: 401968 - DNA, 75 bp, synthetic construct
  source 1..75: mol_type = other DNA
cgcagggtgctgatgtatgctgccgtcaggctgtttggtcggggtaattacggagaggtacggtataagccactg

SEQ ID NO: 401969 - DNA, 75 bp, synthetic construct
  source 1..75: mol_type = other DNA
ggtcgtgtgtccgaagggatctgtattcgtctctattccgaagacgatttcctctcgcgcccggagtttaccgat

SEQ ID NO: 401970 - DNA, 75 bp, synthetic construct
  source 1..75: mol_type = other DNA
tcagcagaccgtgcgagccatttcagctcatgggcacgcagggggattatttctgaccgtcttgcctcagcgatt

SEQ ID NO: 401971 - DNA, 75 bp, synthetic construct
  source 1..75: mol_type = other DNA
agagcgcaatgcttgccgccaccggctttgatgctgatctgttgctgcagacgctggagctgacagacggtctgg

SEQ ID NO: 401972 - DNA, 75 bp, synthetic construct
  source 1..75: mol_type = other DNA
ccgtatggcaaagtgctggagctgatcgacgactgtatctcctgcggtgtggataaattgatcgacgccaatggt

SEQ ID NO: 401973 - DNA, 75 bp, synthetic construct
  source 1..75: mol_type = other DNA
gtaactacaaagtgaaggcgtggccggcactggtggatgagcgcgacagtgtggcgatcaaactgtttgataacc

SEQ ID NO: 401974 - DNA, 75 bp, synthetic construct
  source 1..75: mol_type = other DNA
ggagtatcgcgaaattcacatcgccttactgaccggtttgctttcccatatcggcatgaaagatgccgataaaca

SEQ ID NO: 401975 - DNA, 75 bp, synthetic construct
  source 1..75: mol_type = other DNA
cggcttctgtgggcactgttcccgccgcatggtcgttatgcgaaagccgcgattattcatgactggctgtatgac

SEQ ID NO: 401976 - DNA, 75 bp, synthetic construct
  source 1..75: mol_type = other DNA
ctttgaaagatacattgataattataataaatggcgagatggtggtatcgataaagcgatagaagttatagaaaa

SEQ ID NO: 401977 - DNA, 75 bp, synthetic construct
  source 1..75: mol_type = other DNA
acattaactttaatgagtggctaaataaaattgatgttgaattattaccaaaaaaaattgatagccatttggata

SEQ ID NO: 401978 - DNA, 75 bp, synthetic construct
  source 1..75: mol_type = other DNA
gcagaggaaatggcagacgcggcgcagagcgcaatgcttgccgccaccggcttcgatgtcgatctgttgctgcag

SEQ ID NO: 401979 - DNA, 75 bp, synthetic construct
  source 1..75: mol_type = other DNA
aaggttcagtcggttatgggagaaagttctatcgtatacattaattacaagaaaatatggattttcaatcgcctt

SEQ ID NO: 401980 - DNA, 75 bp, synthetic construct
  source 1..75: mol_type = other DNA
aatagaaaaagtggttgatttttttgaaaataataatgacattaactttaatgagtggctaaataaaattgatgt

SEQ ID NO: 401981 - DNA, 75 bp, synthetic construct
  source 1..75: mol_type = other DNA
caatatcgttcattcagaattaactccgatactattaaacacaatcctccagggtttgactataatgctctatta

SEQ ID NO: 401982 - DNA, 75 bp, synthetic construct
  source 1..75: mol_type = other DNA
gcagaggaaatggcagacgcggcacagagcgcaatgcttgccactaccggctttgatgtcgatctgttgctgcag

SEQ ID NO: 401983 - DNA, 75 bp, synthetic construct
  source 1..75: mol_type = other DNA
gttctggatgaaggtgttcaacgacctcaagacgcgcggcgtcaacgacatcctgatcggcgtggctgacggcct

SEQ ID NO: 401984 - DNA, 75 bp, synthetic construct
  source 1..75: mol_type = other DNA
agatgtacagcgtcgaggtgtcgccggagttcatcagcaaggtcaccgacgaggtgatggccgaggtcaccgcat

SEQ ID NO: 401985 - DNA, 75 bp, synthetic construct
  source 1..75: mol_type = other DNA
ccctgaatcacctcacccatgcgctgcaactggactcccgttgcggcgtgaaaaaagaaaagcagcagctggagc

SEQ ID NO: 401986 - DNA, 75 bp, synthetic construct
  source 1..75: mol_type = other DNA
aaagcgctctgcttaccgctgccggttttgatgctgatctgcttctgcagacgctggacctgaccaccgatcttg

SEQ ID NO: 401987 - DNA, 75 bp, synthetic construct
  source 1..75: mol_type = other DNA
acggtcaaaaaagcggaaatcaaggtggagttgctgccgaaatacgtcgcctgggcagagggtgtcctggctgcc

SEQ ID NO: 401988 - DNA, 75 bp, synthetic construct
  source 1..75: mol_type = other DNA
ctctgaaactgtccggaaaaatccacaaacagcatgaaagtattgcccgaagtcgtggcgaccccccccccaaaa

SEQ ID NO: 401989 - DNA, 75 bp, synthetic construct
  source 1..75: mol_type = other DNA
cactgaaactgtccggaaaaatccacaaacagcttgaaagtattgcccgaagtcgtggcgaccccccccccaaaa

SEQ ID NO: 401990 - DNA, 75 bp, synthetic construct
  source 1..75: mol_type = other DNA
actgggaaggctggaatgagcaacaggtacagtttttactggaaagtaatcccagacggaacagagcgaagttta

SEQ ID NO: 401991 - DNA, 75 bp, synthetic construct
  source 1..75: mol_type = other DNA
cgtggacgtcctgtctatgcgcaacccgtctcgccgctggtatcttacaacacaccaaatctggctggacgctgg

SEQ ID NO: 401992 - DNA, 75 bp, synthetic construct
  source 1..75: mol_type = other DNA
tcaactcttccgcgaaggcggagaacatgcaagcgaagcgcataagcgtaaaacctcgcgcatcctctatatttc

SEQ ID NO: 401993 - DNA, 75 bp, synthetic construct
  source 1..75: mol_type = other DNA
cgctgaaactgtccggaaaaatccacaaacagcgtgaaagtattgcccgaagtcgtggcgacccccctcccaaaa

SEQ ID NO: 401994 - DNA, 75 bp, synthetic construct
  source 1..75: mol_type = other DNA
gtccgcaagcggagattcgcgctaaagatatgtcggtcttcagttccttaatccgcgaaaataaactcgacgcca

SEQ ID NO: 401995 - DNA, 75 bp, synthetic construct
  source 1..75: mol_type = other DNA
aaggttacgaactggacgcggaagagcgtgagattctcgcgcatccgctggtcggagggctgattctctttacgc

SEQ ID NO: 401996 - DNA, 75 bp, synthetic construct
  source 1..75: mol_type = other DNA
aacgttcgagcctgccgttctggatcacgatcttgcgattttgctgaccaaggcgaggcaacacagccttgctct

SEQ ID NO: 401997 - DNA, 75 bp, synthetic construct
  source 1..75: mol_type = other DNA
ttcatctttaccactgtgaccaccgtgggctgccgctggcgcttatcagcccggaaggggaaacggcgtggcagg

SEQ ID NO: 401998 - DNA, 75 bp, synthetic construct
  source 1..75: mol_type = other DNA
ttatgcctgcgcatgtgatctacagtgatgttgatccgcgtccggcgagcggatctccccactggcttaagaccg

SEQ ID NO: 401999 - DNA, 75 bp, synthetic construct
  source 1..75: mol_type = other DNA
cctcgcaatcgccagccgatttattgatggtatgcatgaagccggaatgaaaaccaccggtaaacactttcctgg

SEQ ID NO: 402000 - DNA, 75 bp, synthetic construct
  source 1..75: mol_type = other DNA
gtctggcaggaaaaagaggaattactcgccccagaggttttccacgcgctgactaccgcactgcgtcgcgaacca

SEQ ID NO: 402001 - DNA, 75 bp, synthetic construct
  source 1..75: mol_type = other DNA
gtgatctcgttgtcttgccagcatatcgtagtgatctcgggctggtcgtactgaataaaacatgtagcgacattc

SEQ ID NO: 402002 - DNA, 75 bp, synthetic construct
  source 1..75: mol_type = other DNA
aactggcgagagtagctggtttggtttctcatttatcataaaaaaagattctggtgtcattaggaaacaacttgt

SEQ ID NO: 402003 - DNA, 75 bp, synthetic construct
  source 1..75: mol_type = other DNA
aagtgcccgggagcaacaaaaaaggcgtgatgagcgtgctgatggttccgtcccgctgaaactgtccggaaaaat

SEQ ID NO: 402004 - DNA, 75 bp, synthetic construct
  source 1..75: mol_type = other DNA
agccaggcgcgggactatttgctctatttacgtgaagatgccaactggcataaccgcgaccacagtatcagcgtt

SEQ ID NO: 402005 - DNA, 75 bp, synthetic construct
  source 1..75: mol_type = other DNA
atgaaaacatgggatgcaaagtctggtgatcttgtcgtgttgcctgaatatcgtgatgaccctggcctggttgta

SEQ ID NO: 402006 - DNA, 75 bp, synthetic construct
  source 1..75: mol_type = other DNA
ctgaataagatgtataacgatctcgagcgcccgctagtggttaaatacctggacggaacaatcatcgaaccgcgc

SEQ ID NO: 402007 - DNA, 75 bp, synthetic construct
  source 1..75: mol_type = other DNA
ttttccacgcgctgactaccgcactgcgtcgcgaaccacggctgcgctttacgctaacagaagtgaatgatctac

SEQ ID NO: 402008 - DNA, 75 bp, synthetic construct
  source 1..75: mol_type = other DNA
atgttcgcaggcaggctggaaaacctgacaccaccgcataatccactcgacgtccttgcgcagcaaaccgttgcc

SEQ ID NO: 402009 - DNA, 75 bp, synthetic construct
  source 1..75: mol_type = other DNA
actattcccccgtggttggcagaagaaaatacgatcgccaatattcaggggttgattgacgagcagcgcaacgcg

SEQ ID NO: 402010 - DNA, 75 bp, synthetic construct
  source 1..75: mol_type = other DNA
ctgcgcccggacgctccgccagacttcccttctggcgcggtgaaggtagcggacgtcccgctgaattaggcgaga

SEQ ID NO: 402011 - DNA, 75 bp, synthetic construct
  source 1..75: mol_type = other DNA
gtttatgatcttcccgcactggaacgtttgatgcgtcgcctgaacggtggcgaaattcaaatatccgatgtaacg

SEQ ID NO: 402012 - DNA, 75 bp, synthetic construct
  source 1..75: mol_type = other DNA
gatcgaacagcttgccggagtcggtttacccgcctcactctgggaaagccagatccttgcctgcccgcgtacgcg

SEQ ID NO: 402013 - DNA, 75 bp, synthetic construct
  source 1..75: mol_type = other DNA
tgctgttaatgtcgacaccgcgcgccaggtaacggaagcagcggacatcatttttattatggtgccggacacacc

SEQ ID NO: 402014 - DNA, 75 bp, synthetic construct
  source 1..75: mol_type = other DNA
aggaatgttctaaacaaactgatgataaggttttcgatatgcgtgccgatgcaattacgcgtgcttttgatcgag

SEQ ID NO: 402015 - DNA, 75 bp, synthetic construct
  source 1..75: mol_type = other DNA
gaatctttccttaaagatttaagatttcatgaccttcgacatgaagcaacttctcgacttgctgaaattttccct

SEQ ID NO: 402016 - DNA, 75 bp, synthetic construct
  source 1..75: mol_type = other DNA
aggaacattctgagcaaactgctgataaggttttcaatatgcgtgcagacgcgattaccagagcttttgaccggg

SEQ ID NO: 402017 - DNA, 75 bp, synthetic construct
  source 1..75: mol_type = other DNA
aggtatggtctggcagggctgggggggtaaggtgaaatctatcaatcagtaccggctgacgccgggcttcggcgg

SEQ ID NO: 402018 - DNA, 75 bp, synthetic construct
  source 1..75: mol_type = other DNA
atacgccccgacttcgggtaaaccctcgtcgggaccactccgaccgcgcacagaagttctctcatggctgaaaac

SEQ ID NO: 402019 - DNA, 75 bp, synthetic construct
  source 1..75: mol_type = other DNA
atgcacctcccaccgcaagcggcgggccccgaccggagccactttagttacaacactcagatacaaccaccagaa

SEQ ID NO: 402020 - DNA, 75 bp, synthetic construct
  source 1..75: mol_type = other DNA
ctgcaggcgtacggtatccacaccctctcggcgctgaccgtgcgcattccccgccggcgtggctggtggaaagcc

SEQ ID NO: 402021 - DNA, 75 bp, synthetic construct
  source 1..75: mol_type = other DNA
cacgcaatgagaaagagcagcagattgttcaacaggcgcaaatggcagcacaaagccagccaaatcctgaaatgg

SEQ ID NO: 402022 - DNA, 75 bp, synthetic construct
  source 1..75: mol_type = other DNA
gtaatggctattctatatagcaatataagaactgttacaaaaaaaggggggcaattacaggtagttatggatgat

SEQ ID NO: 402023 - DNA, 75 bp, synthetic construct
  source 1..75: mol_type = other DNA
ccgtgatgtccccttatcaacgaaggctgtcacgctactatcccatctaaaggaatgttctaaacaaactgatga

SEQ ID NO: 402024 - DNA, 75 bp, synthetic construct
  source 1..75: mol_type = other DNA
gccattacgatactgtccagtctcaaggaacattctaagccagctgctgataaggtttttgatatgcgtgcagac

SEQ ID NO: 402025 - DNA, 75 bp, synthetic construct
  source 1..75: mol_type = other DNA
agacagccatgcgccgtagcgaaatcgcagagcttcgatggcgctttatcgatcttgatcggcgagttgcacatc

SEQ ID NO: 402026 - DNA, 75 bp, synthetic construct
  source 1..75: mol_type = other DNA
accggctgacgccgggcttcggcggttttactccagtatcacatgtaaccacagcgtgccgccttacatgccgct

SEQ ID NO: 402027 - DNA, 75 bp, synthetic construct
  source 1..75: mol_type = other DNA
aacgcaccaatggaagccttcaccgaaaaagatcagttcttccacggcgttggtgttgacggtgtgtacctgccg

SEQ ID NO: 402028 - DNA, 75 bp, synthetic construct
  source 1..75: mol_type = other DNA
agtttcaaccagtgccagaggcattggcaatcctgaacgacatggatattgctccctttgaaataaccgaaaaac

SEQ ID NO: 402029 - DNA, 75 bp, synthetic construct
  source 1..75: mol_type = other DNA
aattttttaaaaagaaagaagaggtgactgattcatcatcttctttcgaagaaaagaatcaaaatcttcaagaga

SEQ ID NO: 402030 - DNA, 75 bp, synthetic construct
  source 1..75: mol_type = other DNA
gcattatgggtacaccgatggccattaatctggcgcgtgccggtcatcaactgcatgtcacgaccattggaccgg

SEQ ID NO: 402031 - DNA, 75 bp, synthetic construct
  source 1..75: mol_type = other DNA
atgagcaacatcctgattatcaacggcgcgaaaaaattcgcccactccaatggtcaactgaacgacaccctgacc

SEQ ID NO: 402032 - DNA, 75 bp, synthetic construct
  source 1..75: mol_type = other DNA
aacaaaaccttgaggcatttgaggtctggaaagccacacagacggaagatgagtttaaacaaatcgtattcaaag

SEQ ID NO: 402033 - DNA, 75 bp, synthetic construct
  source 1..75: mol_type = other DNA
cgcccgattgtggtcgcgaatggcaaagcgcgaattggtcgtccaccggagcaggtgctggaaatcgtgggttaa

SEQ ID NO: 402034 - DNA, 75 bp, synthetic construct
  source 1..75: mol_type = other DNA
aattaaaataatgacgacagaaccgcatactgccactcctgttgtgacgcaacaatgtgcaagctgttttcgtaa

SEQ ID NO: 402035 - DNA, 75 bp, synthetic construct
  source 1..75: mol_type = other DNA
ggttgtttatataggaaacacgattacaccatccgaactggcaaaaaaactaaatattcctgcattcgatgccgg

SEQ ID NO: 402036 - DNA, 75 bp, synthetic construct
  source 1..75: mol_type = other DNA
ataaagatagcacaattgccagaaacgactctgttttccctgttaacaatttctttgtcgttttaactaccgtgt

SEQ ID NO: 402037 - DNA, 75 bp, synthetic construct
  source 1..75: mol_type = other DNA
cccattaaaaatgtgtttccgcttttgttgttggttcttgtcttaattactaattataatatttacttccgataa

SEQ ID NO: 402038 - DNA, 75 bp, synthetic construct
  source 1..75: mol_type = other DNA
tctaccttgagacccccgccgatgcggcaacgctgcatgcattgctgaaaatgctgggtatgaaaagcgcccgtg

SEQ ID NO: 402039 - DNA, 75 bp, synthetic construct
  source 1..75: mol_type = other DNA
atgaagaaattatctctttcactgatgctgaacgtgtcgctggcgctgatgctggcactgtccctgatttacccg

SEQ ID NO: 402040 - DNA, 75 bp, synthetic construct
  source 1..75: mol_type = other DNA
ggcgtcggtgttcttccggctgatacgtaaggcctgccgtcagcgtcttgaggggcgggaaccatgtcaaagctg

SEQ ID NO: 402041 - DNA, 75 bp, synthetic construct
  source 1..75: mol_type = other DNA
tatctgtgtggttgccggtggtgtcggcgtgtatgccacggagtatgtgctggaacgctacgggcgggagctgcc

SEQ ID NO: 402042 - DNA, 75 bp, synthetic construct
  source 1..75: mol_type = other DNA
gcttcccacagcggatgcagaaagattatcgcgatgccatcgacgcgctgtttgatgccaaccgctttggtcaga

SEQ ID NO: 402043 - DNA, 75 bp, synthetic construct
  source 1..75: mol_type = other DNA
ggcgtgatctccacaatccacccaacgctcgactacgccgggtttgaccgcgtggatgttgtggtagaagcggtt

SEQ ID NO: 402044 - DNA, 75 bp, synthetic construct
  source 1..75: mol_type = other DNA
tcgactggaaagcaaaacgtcagccgaagctggaaccgctaaaactgagcaagattgaagccaccatgagcttca

SEQ ID NO: 402045 - DNA, 75 bp, synthetic construct
  source 1..75: mol_type = other DNA
tttttaccgcgctgatttatctcgtggcgtcgctgttcttccggctgatacgtacggcctgtcgtcagcgtcttg

SEQ ID NO: 402046 - DNA, 75 bp, synthetic construct
  source 1..75: mol_type = other DNA
ggcatcggtgttcttccggctgatacgtacggcctgtcgtcagcgtcttgaggggcgggaactatgtcaaagctg

SEQ ID NO: 402047 - DNA, 75 bp, synthetic construct
  source 1..75: mol_type = other DNA
gtgaaagatccgtcgaatcatccggtggcgggaataacggtgaccttcaccatgccacaggacgttgcggcaaac

SEQ ID NO: 402048 - DNA, 75 bp, synthetic construct
  source 1..75: mol_type = other DNA
ggtatcggtgttcttccggctgatacgtacggcctgccgtcagcgttttgaggggcgggaaccatgtcaaggctg

SEQ ID NO: 402049 - DNA, 75 bp, synthetic construct
  source 1..75: mol_type = other DNA
gcgtcgctgtttttccggctgatacgcacggcctgccgtcagcgtcttgaggggcgggaaccatgtcaaggctga

SEQ ID NO: 402050 - DNA, 75 bp, synthetic construct
  source 1..75: mol_type = other DNA
tctggtggtgatggtggcgacatttatctcgctggtcgctgccgggtggatttttactgcgctgatttacctcgt

SEQ ID NO: 402051 - DNA, 75 bp, synthetic construct
  source 1..75: mol_type = other DNA
cccggaaaacttctgcgggatgcacttctttaacccggtgcaccggatgccgttggtggaaattattcgcggtga

SEQ ID NO: 402052 - DNA, 75 bp, synthetic construct
  source 1..75: mol_type = other DNA
aaacatcaaccgggcactcaacaccctcattgaagaagggctggctctgaaactggagaacggacgttttgcacc

SEQ ID NO: 402053 - DNA, 75 bp, synthetic construct
  source 1..75: mol_type = other DNA
atgcgcgaagctgtaccggcgcatttgcccgtcagcgtaaaagtgcgtctgggctgggacagcggtgagaagaaa

SEQ ID NO: 402054 - DNA, 75 bp, synthetic construct
  source 1..75: mol_type = other DNA
tggttgagttatttgcgtaaagaatacgatgaagcaacggaattatttcagcatgttcgggtgttgaataattcc

SEQ ID NO: 402055 - DNA, 75 bp, synthetic construct
  source 1..75: mol_type = other DNA
tgaatacgcttatgcagcgcgtttgcccgcacagttttctccacggtcatgcgctggtgatgaaaaaaggtcagc

SEQ ID NO: 402056 - DNA, 75 bp, synthetic construct
  source 1..75: mol_type = other DNA
tgaacgtgttgcccgccgtcgtcaggattctcgccgcaccatcaaccccgatacactgatccgcaaccttgcgga

SEQ ID NO: 402057 - DNA, 75 bp, synthetic construct
  source 1..75: mol_type = other DNA
aaagtgcgtgatgtggcagcggaactgctggatatctacgcccaacgcgctgccaaagaaggcttcgcgtttaaa

SEQ ID NO: 402058 - DNA, 75 bp, synthetic construct
  source 1..75: mol_type = other DNA
gccggaatcgctggccgtgaagattgtcacgtcgctgtttttgcagccggtgccgtggcgcagacgggcagcggc

SEQ ID NO: 402059 - DNA, 75 bp, synthetic construct
  source 1..75: mol_type = other DNA
tgctgaacaagcagcttgagcgcggcaagattgacggtctgaaactggctggcgtgatctctacaatccacccaa

SEQ ID NO: 402060 - DNA, 75 bp, synthetic construct
  source 1..75: mol_type = other DNA
gagattatcgcccgcatgatgatcccgatggtcaacgaagtggtccgctgtctggaagaaggcattatcgccact

SEQ ID NO: 402061 - DNA, 75 bp, synthetic construct
  source 1..75: mol_type = other DNA
aggctggggctacggaactggtcgttcatgggcggacaaaggagcagggttaccgtgcggagcatatcgactggc

SEQ ID NO: 402062 - DNA, 75 bp, synthetic construct
  source 1..75: mol_type = other DNA
atggcgcctcatttttttgcgggtgaagatatgcgtgtgttactggctccgatggagggtgtgcttgctccgatg

SEQ ID NO: 402063 - DNA, 75 bp, synthetic construct
  source 1..75: mol_type = other DNA
tttttaccgcactgatttatctcgtggcatcgctgtttttccggctgatacgtacggcctgccgtcagcgtcttg

SEQ ID NO: 402064 - DNA, 75 bp, synthetic construct
  source 1..75: mol_type = other DNA
gcgaatggagcctcacttgagaaacaactggaggctattgatgaaaaactgacactcacggcgtccagtccgctt

SEQ ID NO: 402065 - DNA, 75 bp, synthetic construct
  source 1..75: mol_type = other DNA
gtagaaaatcctggacgaatgaccaaccggcgcattaccacgaccattggtttacgttatgaggatgcggcaaaa

SEQ ID NO: 402066 - DNA, 75 bp, synthetic construct
  source 1..75: mol_type = other DNA
ggatccgttcaccggacagaaatatcgaaggtacagtagcggaaattggctggcgaattaccaaaattaagacct

SEQ ID NO: 402067 - DNA, 75 bp, synthetic construct
  source 1..75: mol_type = other DNA
gtcccgcaggagctactgaacaacgcaacagaagtcgccctctggctgaaactgaacgacaacaccacgaagtcc

SEQ ID NO: 402068 - DNA, 75 bp, synthetic construct
  source 1..75: mol_type = other DNA
catgtacatgatgaccaaaaacgtgaagttcctgtttggcttcgcgattatttccacctttatcaccatcggtat

SEQ ID NO: 402069 - DNA, 75 bp, synthetic construct
  source 1..75: mol_type = other DNA
gcgatggccaccaccacggcaaccgacctgatgaagtccggggatgcgaccgttaaaggcacgtttggtaagcaa

SEQ ID NO: 402070 - DNA, 75 bp, synthetic construct
  source 1..75: mol_type = other DNA
gtgggcgttattgtcgaagccgtacgtgagatgctgaaaaatcacccggccatcgaccagcgacaaaccttactg

SEQ ID NO: 402071 - DNA, 75 bp, synthetic construct
  source 1..75: mol_type = other DNA
tccgtaccgggcagctggatgatgaagactgggcgcgtatttccggcaccatgggtattttgctcgaaaaacgca

SEQ ID NO: 402072 - DNA, 75 bp, synthetic construct
  source 1..75: mol_type = other DNA
tgtcaaaaaatacgccaagtgcagcgaacatcagtgcctatgccgacatcgtgcgcgaacgtgccgttgtccgtg

SEQ ID NO: 402073 - DNA, 75 bp, synthetic construct
  source 1..75: mol_type = other DNA
cggggaagtggtgacgtcgctggttatcgcgcgtcctcacaacgacatcaacaaaatcgttactaaacataaagc

SEQ ID NO: 402074 - DNA, 75 bp, synthetic construct
  source 1..75: mol_type = other DNA
taccgtacagatatgacgccacagtatgtcggggaggacaagccggagccggtgcacactgctcatgaacgcccc

SEQ ID NO: 402075 - DNA, 75 bp, synthetic construct
  source 1..75: mol_type = other DNA
ctttttaatagcactgatcgtcttgtacaaacgaacgtagccagtaatgagaaaaaaaatgaaggtatcgctgcg

SEQ ID NO: 402076 - DNA, 75 bp, synthetic construct
  source 1..75: mol_type = other DNA
atggcaggaaataaacccttcaacaaacagcaggctgaaccccgcgaacgcgatccacaagttgccgggctaaaa

SEQ ID NO: 402077 - DNA, 75 bp, synthetic construct
  source 1..75: mol_type = other DNA
accgtcttttatgtcccgcgttttcaataaaaagaaagccctgaaagtcgctaaagttgcgctgccggttgctgc

SEQ ID NO: 402078 - DNA, 75 bp, synthetic construct
  source 1..75: mol_type = other DNA
gcggcaaaaattatcgagttgacgcctgtcccagacagcataatcgccggtaccccgcagaacagctccggcagc

SEQ ID NO: 402079 - DNA, 75 bp, synthetic construct
  source 1..75: mol_type = other DNA
gctcaaaggtaaaaaagcgggtacgcatacggttaccgcaacgctgagtaataacaataccagtgattcacagcc

SEQ ID NO: 402080 - DNA, 75 bp, synthetic construct
  source 1..75: mol_type = other DNA
agaacaaaatctgccgaaatgacgaacggcggccaagccgtgacgaacgaacagggtaaagctaccgttacttat

SEQ ID NO: 402081 - DNA, 75 bp, synthetic construct
  source 1..75: mol_type = other DNA
agtttccctggcaacaggtgatcaaagcgtatttgaaaagcttgggtttgcttatgcgacatgttataaaaacct

SEQ ID NO: 402082 - DNA, 75 bp, synthetic construct
  source 1..75: mol_type = other DNA
gataaagaccgttatctctccggcaatcctatcgaggtgacggtagaactgagagatgaaaatgacaaacctgtt

SEQ ID NO: 402083 - DNA, 75 bp, synthetic construct
  source 1..75: mol_type = other DNA
cactgcatcactggctaataatggtgccagcgaccaaaaaactgtgcattttattggcgacacagcggcggcaaa

SEQ ID NO: 402084 - DNA, 75 bp, synthetic construct
  source 1..75: mol_type = other DNA
aatcgacgactaccgtaccgctgtatggaactttatcgataacataagaatggttacgccagatggcgaactaca

SEQ ID NO: 402085 - DNA, 75 bp, synthetic construct
  source 1..75: mol_type = other DNA
ttacgcccggacatcttgcaggcgctgaaccgcctttccagcacggtctacgtgatgatgatcctgagcgtaacg

SEQ ID NO: 402086 - DNA, 75 bp, synthetic construct
  source 1..75: mol_type = other DNA
cagcaccattgcgctggcagtgtggctgcaaattgaactggcggaaccgtggcagccgtggctggcggacatccg

SEQ ID NO: 402087 - DNA, 75 bp, synthetic construct
  source 1..75: mol_type = other DNA
tcaatgttaattcagcagcagcgaaactgagccaaaccgaagtgaatagccacgacgggatcgccacagctacgc

SEQ ID NO: 402088 - DNA, 75 bp, synthetic construct
  source 1..75: mol_type = other DNA
cgggactgcgtgctgtataaacaagagatggcgaactggcaccgacaccacaatctcattcttaccctggatgaa

SEQ ID NO: 402089 - DNA, 75 bp, synthetic construct
  source 1..75: mol_type = other DNA
ggtgaagcagatgagcgttaccagataggtcgggtaaccgatcgtctcgcagaattaacactccgccggacagac

SEQ ID NO: 402090 - DNA, 75 bp, synthetic construct
  source 1..75: mol_type = other DNA
gttgtggaagtggtttaggacctacagagatcaactcagttttaggaatagtcaaagcttacactactcgagtag

SEQ ID NO: 402091 - DNA, 75 bp, synthetic construct
  source 1..75: mol_type = other DNA
atgaaaatacgcaaaaatgatgatgtcagataccacactctcccgcccggaggtggtcagcgggcatacggacgt

SEQ ID NO: 402092 - DNA, 75 bp, synthetic construct
  source 1..75: mol_type = other DNA
cgtactttaacgaactggatagctatgcagaaagtttgggtctgaatacgcgtcagattatcgaaggtgtttgtc

SEQ ID NO: 402093 - DNA, 75 bp, synthetic construct
  source 1..75: mol_type = other DNA
tcgcaaaagccgggaaacgtttacagcggtgtacacattacttgaacggtctgcccgccagtgggcgcaggcatt

SEQ ID NO: 402094 - DNA, 75 bp, synthetic construct
  source 1..75: mol_type = other DNA
tctggcttctgcctgaccaagctggacgttctggatggcctgaaagaggttaaactctgcgtggcttaccgtatg

SEQ ID NO: 402095 - DNA, 75 bp, synthetic construct
  source 1..75: mol_type = other DNA
ttcctggatgggaagaagacattagccagataaaaaatttcgatgcgcttccggaagcgactaaaaactacatta

SEQ ID NO: 402096 - DNA, 75 bp, synthetic construct
  source 1..75: mol_type = other DNA
tgagagctttgctgccctactgcaggaaggagcaattaagaaagatattccggtactgtttaccgactccactga

SEQ ID NO: 402097 - DNA, 75 bp, synthetic construct
  source 1..75: mol_type = other DNA
agcaattattggcaaattatagcaatgttcctaacaatctgatccgagctattgttgattcgaataccacacgta

SEQ ID NO: 402098 - DNA, 75 bp, synthetic construct
  source 1..75: mol_type = other DNA
aagattttattgctgatgccattttggcgagaaaaccccgagtggtgggtatttaccggctgataatgaaaacgg

SEQ ID NO: 402099 - DNA, 75 bp, synthetic construct
  source 1..75: mol_type = other DNA
agcagttgctggccaactacaacaaggtgcccaacaatctgatccgcgccattgttgatgccaataccactcgca

SEQ ID NO: 402100 - DNA, 75 bp, synthetic construct
  source 1..75: mol_type = other DNA
tgctcagttgcatgacttggacagtcgtcagattatcgaaggggtcggcttggatccgcgtatcggtagccatta

SEQ ID NO: 402101 - DNA, 75 bp, synthetic construct
  source 1..75: mol_type = other DNA
aaaatctgattttctcacctgagtttctgcgtgaagggcgtgctttgtatgacaaccttcatccatcacgcattg

SEQ ID NO: 402102 - DNA, 75 bp, synthetic construct
  source 1..75: mol_type = other DNA
gtttaaagcgtcttgcggcggcggcaaaaagcggtggcgcaccggcaatcttacaaattttccatgcaggtgtga

SEQ ID NO: 402103 - DNA, 75 bp, synthetic construct
  source 1..75: mol_type = other DNA
gagtgatgttgggtcatggtctgcattgtgggaaataagttcaaaagaccaaagcggcaatgccattcgtggtga

SEQ ID NO: 402104 - DNA, 75 bp, synthetic construct
  source 1..75: mol_type = other DNA
ccgccaggggccaagcccacgctggtatcagcaggattgcgcgggcctggtgcgatttgcggcgaacgaggcgct

SEQ ID NO: 402105 - DNA, 75 bp, synthetic construct
  source 1..75: mol_type = other DNA
attggccaggacataaaccaggcgctgcctggcgatatgatttttttcgatcagggcgatgcccagcacttaatg

SEQ ID NO: 402106 - DNA, 75 bp, synthetic construct
  source 1..75: mol_type = other DNA
gaaacaggttacggatatatcaaaattggcgaaactcttataaataacgcttatttaattgaaagttttaaagaa

SEQ ID NO: 402107 - DNA, 75 bp, synthetic construct
  source 1..75: mol_type = other DNA
ttgtgttacctatggatgcaggatggagcgatgttgggtcatggtctgcattatgggctattaatgccaaagacg

SEQ ID NO: 402108 - DNA, 75 bp, synthetic construct
  source 1..75: mol_type = other DNA
agttatatttatgctcaaaatagattagtaacagccgtgggtgtagataatttagtgattgttgagacaaaagat

SEQ ID NO: 402109 - DNA, 75 bp, synthetic construct
  source 1..75: mol_type = other DNA
tggtcaaaagcttgattgattcagggtatacccaaaaccaaattgccgaaattgcaggcgtgaagcagtcttcta

SEQ ID NO: 402110 - DNA, 75 bp, synthetic construct
  source 1..75: mol_type = other DNA
ggtccttacgcggtgatccaccgggttgatattcacgcctcggtgtgggaagcggtactgacgcatccggacgtg

SEQ ID NO: 402111 - DNA, 75 bp, synthetic construct
  source 1..75: mol_type = other DNA
attccaaccgaagagtcgatcaatggggcggctctcttaaaaaccgtatgcgttttcctctcggcgtcatcgaga

SEQ ID NO: 402112 - DNA, 75 bp, synthetic construct
  source 1..75: mol_type = other DNA
ttattaatcaaaataaaaccattatcatatttcaattttgtcccactcccgcccgcgactgtccctgtaacgcgc

SEQ ID NO: 402113 - DNA, 75 bp, synthetic construct
  source 1..75: mol_type = other DNA
tctgctgtggaaagggaaatcgcaggcagaattttatcgcggcatggagtggttgtacggctggaaagaagataa

SEQ ID NO: 402114 - DNA, 75 bp, synthetic construct
  source 1..75: mol_type = other DNA
ccttccccccgccagatgaaaaatatcaccgagaagaaagagtacatcagccagtatcttggttttcctgaacat

SEQ ID NO: 402115 - DNA, 75 bp, synthetic construct
  source 1..75: mol_type = other DNA
atttatcgtctgattatgaagagcgggtcagataacttccgcgcgtcttccattcaggggattatgaagcgtatc

SEQ ID NO: 402116 - DNA, 75 bp, synthetic construct
  source 1..75: mol_type = other DNA
ttatcgagaatacctgcgtctccgttccgaccgctccgcatatcaaacgccggatttatacatttacccggagag

SEQ ID NO: 402117 - DNA, 75 bp, synthetic construct
  source 1..75: mol_type = other DNA
gccggacagatagccccggctctctctcttgatggctcctgcaatttggagggcaatcaggactcaaccgaaaca

SEQ ID NO: 402118 - DNA, 75 bp, synthetic construct
  source 1..75: mol_type = other DNA
ttatcgaatccacaaacgtatccgtaccgactgccccgcatattaaacgtcgaatttacaccttcaccaaaagag

SEQ ID NO: 402119 - DNA, 75 bp, synthetic construct
  source 1..75: mol_type = other DNA
attatgatccagtttcgaattattttaatacaagctcagtagaggaagttatccgtgatgttatagaagtaaatt

SEQ ID NO: 402120 - DNA, 75 bp, synthetic construct
  source 1..75: mol_type = other DNA
tacagtccccgtcggctttactgaacgactcaaacgcgatctaaacacgaataatattatcttttccccagaatt

SEQ ID NO: 402121 - DNA, 75 bp, synthetic construct
  source 1..75: mol_type = other DNA
attgttacccgtcttcctatccagaattatccgggaagctgttagctctattagctaaagcacctacggaatggt

SEQ ID NO: 402122 - DNA, 75 bp, synthetic construct
  source 1..75: mol_type = other DNA
ggcataatgcagctggaataaccggaaatggacactttgtaatcagccgcccggatgtggatttacatcgtcagc

SEQ ID NO: 402123 - DNA, 75 bp, synthetic construct
  source 1..75: mol_type = other DNA
ggatagcctgcaaaaaaccgcagataaagcctgtcagcaatatgggaagtctaaagcagtatatcagcatagcgc

SEQ ID NO: 402124 - DNA, 75 bp, synthetic construct
  source 1..75: mol_type = other DNA
atgttgcatagagttttatggaaaagcgttattgtcggcgcgatgttggctatgtctgggtgtgcgatggtgcaa

SEQ ID NO: 402125 - DNA, 75 bp, synthetic construct
  source 1..75: mol_type = other DNA
gacttacgttacggagaacggttacgggaaattcatgctgcctgccgtcggcgcaaggcgtatatccgtgtgcag

SEQ ID NO: 402126 - DNA, 75 bp, synthetic construct
  source 1..75: mol_type = other DNA
tatcaggcaacagaaaagcatatccggggggaatgacacatcttatactccagttcaggataatgagtggacgcc

SEQ ID NO: 402127 - DNA, 75 bp, synthetic construct
  source 1..75: mol_type = other DNA
atgaagtggagcccggcttccggcgcgatcctgtactgcgtcgtgaacgccgtgaagcccgtgcagctgcgcggg

SEQ ID NO: 402128 - DNA, 75 bp, synthetic construct
  source 1..75: mol_type = other DNA
gtgttgatgttatagtagccaatcgccgcacgtcagaattagaagatgtaagtgaaaaagtttatacgcgagatt

SEQ ID NO: 402129 - DNA, 75 bp, synthetic construct
  source 1..75: mol_type = other DNA
tgctgaaagccaggggctgaacagcaagcagattatcgaaggggtatgcctggatcagcgtatcggcaaccacta

SEQ ID NO: 402130 - DNA, 75 bp, synthetic construct
  source 1..75: mol_type = other DNA
cgaacgtttcgcagacctgctgaaggaaggcgcgattaagcaggatatcccgaccctgtttaccgattccaccga

SEQ ID NO: 402131 - DNA, 75 bp, synthetic construct
  source 1..75: mol_type = other DNA
attgtggacgccaaccgtacccgtaaggactttatttctgattccatcctcgctcgtaagccgaaagtggtgggt

SEQ ID NO: 402132 - DNA, 75 bp, synthetic construct
  source 1..75: mol_type = other DNA
aagccgacgtcattatctccaaccgtatggcagaagagcttaaggatgtggcagataaggtatacacccgcgatc

SEQ ID NO: 402133 - DNA, 75 bp, synthetic construct
  source 1..75: mol_type = other DNA
ctcattcttcaactctcgcctggaacgtgatctcgcgaccttcaaacaacaagccgacgttattatctccaaccg

SEQ ID NO: 402134 - DNA, 75 bp, synthetic construct
  source 1..75: mol_type = other DNA
agcagaagcgattaaacttttcgctaatacctatctggcgatgcgcgtagcatactttaatgaactggatagcta

SEQ ID NO: 402135 - DNA, 75 bp, synthetic construct
  source 1..75: mol_type = other DNA
aagcggatgttatcgtttctaatcgtatggccggagagttaacggacgtagcagagaaagtctacacgcgcgatc

SEQ ID NO: 402136 - DNA, 75 bp, synthetic construct
  source 1..75: mol_type = other DNA
agcggaagcgatcaaactgttcgctaacacctatctggcgctacgcgttgcttatttcaacgagcttgacagcta

SEQ ID NO: 402137 - DNA, 75 bp, synthetic construct
  source 1..75: mol_type = other DNA
cgctgaagccctgggattgaattcccgtcagataattgaaggcgtctgccttgacccgcgtatcggtaatcacta

SEQ ID NO: 402138 - DNA, 75 bp, synthetic construct
  source 1..75: mol_type = other DNA
gcacgatgcataccgtaatgccgactacgtgatcattgccacaccgaccgattacgatcccaaaaccaactactt

SEQ ID NO: 402139 - DNA, 75 bp, synthetic construct
  source 1..75: mol_type = other DNA
gaaggtgctattaagcaagacattccaacgttgtttactgactcaacggaagctgaggcgattaaactttttgcc

SEQ ID NO: 402140 - DNA, 75 bp, synthetic construct
  source 1..75: mol_type = other DNA
tatcgttccaacgaaggtcgagatgctgaatcagaaaaaatcgccgatcgttgataaggaaatcgaagaatatct

SEQ ID NO: 402141 - DNA, 75 bp, synthetic construct
  source 1..75: mol_type = other DNA
tccagaacacgtctgatgatgtcattatgaatctggtgatggggacgatgtttttggtgttgccggcgttgtgga

SEQ ID NO: 402142 - DNA, 75 bp, synthetic construct
  source 1..75: mol_type = other DNA
gtaccgggggtacgggggaaatgcggatttaacggtgattaacgggataaccaggatgggagcaatgaccggtac

SEQ ID NO: 402143 - DNA, 75 bp, synthetic construct
  source 1..75: mol_type = other DNA
attttctgaccctgctgggctggctgattaataatggcctgtgggatgtgctgctggggaccgggctgtttgcac

SEQ ID NO: 402144 - DNA, 75 bp, synthetic construct
  source 1..75: mol_type = other DNA
agttctttcctgagttaacagaggagcgtttaaccattatagctgaggagttgctcaggatacaggatattactc

SEQ ID NO: 402145 - DNA, 75 bp, synthetic construct
  source 1..75: mol_type = other DNA
cctgagccggtattatccttcgttgcagtccaaactgccccgggctgcgttcccgtggaccgacagccgggacag

SEQ ID NO: 402146 - DNA, 75 bp, synthetic construct
  source 1..75: mol_type = other DNA
gatatgacggtgatgaatgagctggccagaatgggaggggtagccgggacttcgctggcgtcactgggggcattc

SEQ ID NO: 402147 - DNA, 75 bp, synthetic construct
  source 1..75: mol_type = other DNA
ctgcaatgaagatgattggcagtagtcaggtggattataaggaggaggtgatcaagcgtctggtgagtccggcaa

SEQ ID NO: 402148 - DNA, 75 bp, synthetic construct
  source 1..75: mol_type = other DNA
aggcatcgcagtcggcacataatgctggaaatattgttcaaaatgggattggcagtttttcaaaaggtgtagata

SEQ ID NO: 402149 - DNA, 75 bp, synthetic construct
  source 1..75: mol_type = other DNA
ggagaagatgaaggtaacaagggcatgctgtcgttacctcgtatcgagaatgcgctttatggtgcgttcttcgtg

SEQ ID NO: 402150 - DNA, 75 bp, synthetic construct
  source 1..75: mol_type = other DNA
tgatcacgctgacgtttgtggtgtttgcgctgaactttctgacgttctggtgggaactggcgcggtggctggaca

SEQ ID NO: 402151 - DNA, 75 bp, synthetic construct
  source 1..75: mol_type = other DNA
ttgcacggtggcttgacagctggatgctgacggcgctgtacagttcggatacacatacccggttcaatatgatgg

SEQ ID NO: 402152 - DNA, 75 bp, synthetic construct
  source 1..75: mol_type = other DNA
gcagatatgacgaccatgaatgcggtggcccggattgcgggaacggcgggcagtgcggtagcagcactgggtgcg

SEQ ID NO: 402153 - DNA, 75 bp, synthetic construct
  source 1..75: mol_type = other DNA
aaggcgaaaggcgttgaagtcatcatttacgaaccggtgatgaaagaagactcattcttcaactctcgcctggaa

SEQ ID NO: 402154 - DNA, 75 bp, synthetic construct
  source 1..75: mol_type = other DNA
cgcccagttcggcgttacggttgccggagttacggtccagcctggtgaaactaaatcgctgtcactggatcttgg

SEQ ID NO: 402155 - DNA, 75 bp, synthetic construct
  source 1..75: mol_type = other DNA
cgtgaccgcgattaatttgattcagtacaacagccagtttattggccaggacataaaccaggcgctgcctggcga

SEQ ID NO: 402156 - DNA, 75 bp, synthetic construct
  source 1..75: mol_type = other DNA
tctgttggctgtgttgttttgttgcccatagcgaaaggctgaatgtcgaacaatcggggctatttcgcgcctggt

SEQ ID NO: 402157 - DNA, 75 bp, synthetic construct
  source 1..75: mol_type = other DNA
gcgaaaacagtgaatggttgtacatacccactgaatatatgggtaaaggagagcgactgtggcatttcaacgtca

SEQ ID NO: 402158 - DNA, 75 bp, synthetic construct
  source 1..75: mol_type = other DNA
atttttattgatgactcaagcgccctgacacctacagagcttcgttcccgcgctcgtcgtgtttataaagaaaat

SEQ ID NO: 402159 - DNA, 75 bp, synthetic construct
  source 1..75: mol_type = other DNA
aaatgataaaagttgccaacgaaataaccgaggccggttacaacccggaaggtaggacaagtgacgaattgcttg

SEQ ID NO: 402160 - DNA, 75 bp, synthetic construct
  source 1..75: mol_type = other DNA
actatgatcctaaaactaattatttcaatacatccagcgtagaatcagtaattaaagatgtaacagagataaatc

SEQ ID NO: 402161 - DNA, 75 bp, synthetic construct
  source 1..75: mol_type = other DNA
atctcctattgttgacaaggagattcagcagtatttgcaatcagataaaatatgctttaatgccactttagataa

SEQ ID NO: 402162 - DNA, 75 bp, synthetic construct
  source 1..75: mol_type = other DNA
agcagaagcgattaaactgtttgctaatacctatctggcgatgcgcgtggcgtactttaatgaactggatagcta

SEQ ID NO: 402163 - DNA, 75 bp, synthetic construct
  source 1..75: mol_type = other DNA
cttatgcggttatggtgatcaagtcaacgattcccgttggttttaccgcagcgatgcataagaaatattgcactg

SEQ ID NO: 402164 - DNA, 75 bp, synthetic construct
  source 1..75: mol_type = other DNA
gataaccttcatccgtcacgtattgtcatcggtgagcgttcagaacgcgcagaacgttttgctgctttattacag

SEQ ID NO: 402165 - DNA, 75 bp, synthetic construct
  source 1..75: mol_type = other DNA
aagccgacgtcattatttccaaccgaatggcagaagagcttaaggatgtggcagacaaggtctacacccgcgatt

SEQ ID NO: 402166 - DNA, 75 bp, synthetic construct
  source 1..75: mol_type = other DNA
ctcctggaccggctaatttcatccggtatttcgtatatacatacctcgctggtcagtgttaacgatagctacccc

SEQ ID NO: 402167 - DNA, 75 bp, synthetic construct
  source 1..75: mol_type = other DNA
caggctcgtgtgctggctgaaaaagcggatctcggtattgccttcgacggcgacggcgatcgcgtgattatggtt

SEQ ID NO: 402168 - DNA, 75 bp, synthetic construct
  source 1..75: mol_type = other DNA
gggggcaactgatgttcgagcattacaggcgcgtgtactggctgaaaaagcggatctcggcattgcctttgacgg

SEQ ID NO: 402169 - DNA, 75 bp, synthetic construct
  source 1..75: mol_type = other DNA
gtacgttacaccgcaggtagcggcgatccacttgagcatgagtcagttaaagccgtgaccgcagaggttgaagct

SEQ ID NO: 402170 - DNA, 75 bp, synthetic construct
  source 1..75: mol_type = other DNA
gacaggcagaaaatccacatgatcagcagacagaacgcattctccgggagctgaatgagctgaaacaatgcctga

SEQ ID NO: 402171 - DNA, 75 bp, synthetic construct
  source 1..75: mol_type = other DNA
gtgcgttacaccgcaggtagtggcgatccgctggagcatgaatcagtcaaagccgtgaccgcagaagttgaagcg

SEQ ID NO: 402172 - DNA, 75 bp, synthetic construct
  source 1..75: mol_type = other DNA
cggatctcggtattgcctttgacggcgacggcgatcgcgtgattatggttgaccatgaaggcaataaagtcgatg

SEQ ID NO: 402173 - DNA, 75 bp, synthetic construct
  source 1..75: mol_type = other DNA
gaggtagcggtactcgcctttggcctctctctcgctcattttatccaaagcaatttctcgagctgttctctgagg

SEQ ID NO: 402174 - DNA, 75 bp, synthetic construct
  source 1..75: mol_type = other DNA
gatcccattattatatgtaatgaagagcatcgtttcattgttgcagagcaactgagggaaaaggaatataagcat

SEQ ID NO: 402175 - DNA, 75 bp, synthetic construct
  source 1..75: mol_type = other DNA
ttcgagtcgataaagacaaatttgaattatgcccaagcgattcaatagactatgcggtaatggaaaaaacacgag

SEQ ID NO: 402176 - DNA, 75 bp, synthetic construct
  source 1..75: mol_type = other DNA
caaggcaaatgcctaccacaaactcgtcgcggcgcaaaagaagaatggcgttttcgctctgaacgtgctgaagac

SEQ ID NO: 402177 - DNA, 75 bp, synthetic construct
  source 1..75: mol_type = other DNA
cagataaaggtgttgttgtccccattgatataggatggagtgacattggttcgtggtcagctctttgggatgttt

SEQ ID NO: 402178 - DNA, 75 bp, synthetic construct
  source 1..75: mol_type = other DNA
tatttatgatgcttgctttgatgccatgaattcctcaagttttgattttgattttgttcatgtaaataaagaaaa

SEQ ID NO: 402179 - DNA, 75 bp, synthetic construct
  source 1..75: mol_type = other DNA
gaagcagaacgggaacagctacagaatgagatagcccagctcaggcaggcgctggagcaggaaaagaaacgggga

SEQ ID NO: 402180 - DNA, 75 bp, synthetic construct
  source 1..75: mol_type = other DNA
acgggtaatcgccgcagaaaaatacacacaccggctcaggctcaagaagcaatttcccgctggactgccacttgt

SEQ ID NO: 402181 - DNA, 75 bp, synthetic construct
  source 1..75: mol_type = other DNA
cgcagcaaaatacacacaccgtctcaggctcaagaagcaattacccgctgggctgccacttgttgcgatccgaca

SEQ ID NO: 402182 - DNA, 75 bp, synthetic construct
  source 1..75: mol_type = other DNA
cgcagcaaaatacacacaccgtctcaggctcaagaagcaattacccgctggactgccacttgttgcgatccggca

SEQ ID NO: 402183 - DNA, 75 bp, synthetic construct
  source 1..75: mol_type = other DNA
ggcgcacatgggtttctgcttcagaatttcttttctcctctatttaaccagcgtactgaccgttggggcggagat

SEQ ID NO: 402184 - DNA, 75 bp, synthetic construct
  source 1..75: mol_type = other DNA
acgggtaatcgccgcaggaaaatacacacaccgactcaggctcaagaagcaatttcccgctggactgccacttgt

SEQ ID NO: 402185 - DNA, 75 bp, synthetic construct
  source 1..75: mol_type = other DNA
acgggtaatcgccgcagtaaaatacacacaccgtctcaggctcaagaagcaatttcccgctggactgccacttgt

SEQ ID NO: 402186 - DNA, 75 bp, synthetic construct
  source 1..75: mol_type = other DNA
acaactacagaatgagatagcccagctcaggcaggcgctggagcaggaaaggaaacggggattctggtcccggtt

SEQ ID NO: 402187 - DNA, 75 bp, synthetic construct
  source 1..75: mol_type = other DNA
atgggactctgtcactttatggcatggcacacactccgggacgcaatgaaaatgacaggcaaatcgcgttcacag

SEQ ID NO: 402188 - DNA, 75 bp, synthetic construct
  source 1..75: mol_type = other DNA
tcaggcaggcactggagcaggaaaaaaacggggattctgggccagactgttcagccggtgagcatcggctgcaag

SEQ ID NO: 402189 - DNA, 75 bp, synthetic construct
  source 1..75: mol_type = other DNA
cgcagaaaaatacacacaccgtctcaggctcaagaagcaattacccgctggcctgccacttgttgcgatccgcca

SEQ ID NO: 402190 - DNA, 75 bp, synthetic construct
  source 1..75: mol_type = other DNA
gtatttcgtatatacatacctcgctggtcagtattaccatagctaccctgttgagcctgccaaatggcccccgaa

SEQ ID NO: 402191 - DNA, 75 bp, synthetic construct
  source 1..75: mol_type = other DNA
taatccacaacgcgttcctgaattaaccattccggataaactatgggatcaaattcaggcatcgaaaggaactgg

SEQ ID NO: 402192 - DNA, 75 bp, synthetic construct
  source 1..75: mol_type = other DNA
ccacaccccgcgcggtcttagatcttggtgtcaagcaggaaggggtttttaatgatatcgaaatgggcgttttgg

SEQ ID NO: 402193 - DNA, 75 bp, synthetic construct
  source 1..75: mol_type = other DNA
tgggcttcgagtcttgaagggatgaacatgctgttcctgactcataccctgcgtcctctcctggtcaatattgag

SEQ ID NO: 402194 - DNA, 75 bp, synthetic construct
  source 1..75: mol_type = other DNA
aggctctggctttgcgagagctgcataaccacgtattccccgacatttcctttgaacaatctccgctgaaacagg

SEQ ID NO: 402195 - DNA, 75 bp, synthetic construct
  source 1..75: mol_type = other DNA
atgccgatggtgtcaggccacccggaaaaattcaccattttcgtggagagcggcaacattgaaacgaccggagaa

SEQ ID NO: 402196 - DNA, 75 bp, synthetic construct
  source 1..75: mol_type = other DNA
tatggttctggaaagtcaggacgaatatgactcacaatgggcgtcaatttgttccattgctccaaagagtggctg

SEQ ID NO: 402197 - DNA, 75 bp, synthetic construct
  source 1..75: mol_type = other DNA
agcgcctttcagagaaaaagcgcttaaggtatatcagcaatttccagaatggacaccaggactctatgacactat

SEQ ID NO: 402198 - DNA, 75 bp, synthetic construct
  source 1..75: mol_type = other DNA
tatttcttttcgctttattcagtccgcagctatacgctgcaccggttaccattaaagtcgcctatgaaagtaacc

SEQ ID NO: 402199 - DNA, 75 bp, synthetic construct
  source 1..75: mol_type = other DNA
ggcagcctgagttcacagataaaacactctccaggaaacccggggcggttcagttggaatggctggacgatattc

SEQ ID NO: 402200 - DNA, 75 bp, synthetic construct
  source 1..75: mol_type = other DNA
gcagcattcgtttcgcccgttgtgattgtattgaaggcacactttgcgaacatgtcgtactggctgtgcaggcct

SEQ ID NO: 402201 - DNA, 75 bp, synthetic construct
  source 1..75: mol_type = other DNA
cacctgcaggagccaaaaccccgtctgccatcttccgaaggcgactggtcgcatgtattccaggatgtgacgtgg

SEQ ID NO: 402202 - DNA, 75 bp, synthetic construct
  source 1..75: mol_type = other DNA
ttgaaacgaccggagaaacgccctcgtttgtttaccgctatcagatggtgatgtttgtcatggattacgccgggg

SEQ ID NO: 402203 - DNA, 75 bp, synthetic construct
  source 1..75: mol_type = other DNA
ccgataccgcagagcgtctgaacgaatttcctgaacagtttgagccgttatttggtctgcgagaggttgatggta

SEQ ID NO: 402204 - DNA, 75 bp, synthetic construct
  source 1..75: mol_type = other DNA
ttaatgcaaggttttgacgctgaagtgctgttacgtaatgacgaaggcaccgaggctgaagccaacagcgttatt

SEQ ID NO: 402205 - DNA, 75 bp, synthetic construct
  source 1..75: mol_type = other DNA
tcgaaatggcgtgcgctgaccttgcaggaaaaagcggccggtattcaggacgtcacttaccagaccgatcaacaa

SEQ ID NO: 402206 - DNA, 75 bp, synthetic construct
  source 1..75: mol_type = other DNA
atgggccagaacaaagtcggcctgagtttctcgctgccgatttatcagggcgggatggttaactcgcaggtgaaa

SEQ ID NO: 402207 - DNA, 75 bp, synthetic construct
  source 1..75: mol_type = other DNA
accttgatcctcaacaccgcgaccgcttatttcaacgtgttgaatgctattgacgttctttcctatacacaggcg

SEQ ID NO: 402208 - DNA, 75 bp, synthetic construct
  source 1..75: mol_type = other DNA
ggtgcctcaggcgcgcgagatttctcgcttcccggcgaaccgtcgtgacatcgcggtggtggtcgcagaaaacgt

SEQ ID NO: 402209 - DNA, 75 bp, synthetic construct
  source 1..75: mol_type = other DNA
aggatattgcgctaacggtagggaagctgagagttgagcttgaggagacaaaatcaaaactcaacgagcagagtg

SEQ ID NO: 402210 - DNA, 75 bp, synthetic construct
  source 1..75: mol_type = other DNA
ttcataccggtctttaatgcaggaaacgagatctcattcgaaatcgcggaaaatgcctgcaggaagatgaaaggt

SEQ ID NO: 402211 - DNA, 75 bp, synthetic construct
  source 1..75: mol_type = other DNA
gttcgccagcatgaacgggataccggaggcggtgacaatggtgggcttaccaccgctgaacgtcagcgtctgaaa

SEQ ID NO: 402212 - DNA, 75 bp, synthetic construct
  source 1..75: mol_type = other DNA
tgcaattctctgatgtgaccgttgatgaaagcactggctccataaccctacgtgccgtcttccctaacccgcaac

SEQ ID NO: 402213 - DNA, 75 bp, synthetic construct
  source 1..75: mol_type = other DNA
aaggacgacagattgaagtcgaagcgacaggcccacaggaagtcgaagcgctggctgcggttattgctctcttta

SEQ ID NO: 402214 - DNA, 75 bp, synthetic construct
  source 1..75: mol_type = other DNA
ttcgccaggcgcaggacggtcacttaccgactctggatttgacggcctctaccggaatttctgacacctcttaca

SEQ ID NO: 402215 - DNA, 75 bp, synthetic construct
  source 1..75: mol_type = other DNA
cctgtcggcgtgagtgtgtcagaacagacgctcccacagtgtgatcagcaggtggataatgcggtcccgggcttt

SEQ ID NO: 402216 - DNA, 75 bp, synthetic construct
  source 1..75: mol_type = other DNA
atgcagcagaaaaaatattcctttaattatctgatttttaatgatgatttcataaaaagaagaatactcattaat

SEQ ID NO: 402217 - DNA, 75 bp, synthetic construct
  source 1..75: mol_type = other DNA
gaagaagagtgggatccggcaatctggctggaagaactggctaccctgcccgatgccacccgcaaacgcgcacag

SEQ ID NO: 402218 - DNA, 75 bp, synthetic construct
  source 1..75: mol_type = other DNA
ttgaccaacagcgtttaaatacactaaatcctccggaaaatttacgtatagcgatagagaaatttggctggaaga

SEQ ID NO: 402219 - DNA, 75 bp, synthetic construct
  source 1..75: mol_type = other DNA
agagtgcggaagatgcaaaggtgtcggctattcaagaatgccagcaagcgctgcatatcgcgctgtaacgatgct

SEQ ID NO: 402220 - DNA, 75 bp, synthetic construct
  source 1..75: mol_type = other DNA
agagttatgagggtgaaaagatttattttgataatttaaaatatgatttaaatgataatgataaggaatctaata

SEQ ID NO: 402221 - DNA, 75 bp, synthetic construct
  source 1..75: mol_type = other DNA
caaaggctatttgataatgttgaatctatatttaataaagtacctgtcagcattttagtgaatgatatttttatg

SEQ ID NO: 402222 - DNA, 75 bp, synthetic construct
  source 1..75: mol_type = other DNA
ggcgaccatgcacgccctgttaaatgagccactcaccgccggtatcagcaccccgctgacatccaccattctgga

SEQ ID NO: 402223 - DNA, 75 bp, synthetic construct
  source 1..75: mol_type = other DNA
ttggaaaaattaaatccaccgcaagatttacgttctgcaatagaaaaaattgggtggaagaatagacctatcact

SEQ ID NO: 402224 - DNA, 75 bp, synthetic construct
  source 1..75: mol_type = other DNA
attctcaggagttaaatgattctcaggagttaaataactcgcaggagttaaataattctcaggacttaaataact

SEQ ID NO: 402225 - DNA, 75 bp, synthetic construct
  source 1..75: mol_type = other DNA
attttagtgaatgatatttttttgaaggattttttcatgaagcaacctgattttgctaagtggtacttctatcaa

SEQ ID NO: 402226 - DNA, 75 bp, synthetic construct
  source 1..75: mol_type = other DNA
aatccctgcttgggcaaagcagttcttcctcttcgtctacggatcagggattggacaaacttttagtacccggcg

SEQ ID NO: 402227 - DNA, 75 bp, synthetic construct
  source 1..75: mol_type = other DNA
gtcatcatctaagcaatgactcccctgtttcgcttgcatccccggtgagttttgccacccttataagatgtttca

SEQ ID NO: 402228 - DNA, 75 bp, synthetic construct
  source 1..75: mol_type = other DNA
aatcctaagacatttttggagtttttggtaaaaatatttaccctgggttatgtggattttagcaaacgctccaac

SEQ ID NO: 402229 - DNA, 75 bp, synthetic construct
  source 1..75: mol_type = other DNA
agcgttttgcctgtgccgtctactgctcatcagttgctgatgcgctgccaggcgttacttattcaactgctccat

SEQ ID NO: 402230 - DNA, 75 bp, synthetic construct
  source 1..75: mol_type = other DNA
acggcaactgcgtgccagcgttgatgcgttccacgcccgcgccagccactatcacgcaggagaatgtttgcgcca

SEQ ID NO: 402231 - DNA, 75 bp, synthetic construct
  source 1..75: mol_type = other DNA
cagcaattaagttacgcgttatggctgggggggatcagccagccgttaattcattacgaggcagcattcagccac

SEQ ID NO: 402232 - DNA, 75 bp, synthetic construct
  source 1..75: mol_type = other DNA
aacggctggcgctatcagcaacagagcgccattagtcaggctgatttgctggcgaacgaactcaccgtagtaggt

SEQ ID NO: 402233 - DNA, 75 bp, synthetic construct
  source 1..75: mol_type = other DNA
agaagcgaacaagaaaaggcgcctgcagctacgcgtcggctgtttacctttcaggctgccgcgctggcgggtggg

SEQ ID NO: 402234 - DNA, 75 bp, synthetic construct
  source 1..75: mol_type = other DNA
ttgatcatctgcggctggtatcgttaggtatgcgttgctggcaggacttccaacagtatggtttgcggatctggt

SEQ ID NO: 402235 - DNA, 75 bp, synthetic construct
  source 1..75: mol_type = other DNA
attgaataatgcattattagcaataaggaacgaacatctgctattaatgcctcatgtatgtaatgaatcgatttc

SEQ ID NO: 402236 - DNA, 75 bp, synthetic construct
  source 1..75: mol_type = other DNA
taattttaaaccaaaaaatgaagtcttaaatacctggtgtgtgggaatgaatgattttgcccgtattgccggggg

SEQ ID NO: 402237 - DNA, 75 bp, synthetic construct
  source 1..75: mol_type = other DNA
tctaataaagaaattttgaagaatcaaccagataatgttatcaaagaaaaactgaataatgaatacaaacttaga

SEQ ID NO: 402238 - DNA, 75 bp, synthetic construct
  source 1..75: mol_type = other DNA
cacccccagataaccgccaggatacaactgccgggcggacaaactgctgatgtaaaagaagggcaacacattccc

SEQ ID NO: 402239 - DNA, 75 bp, synthetic construct
  source 1..75: mol_type = other DNA
aggaaatataaaaaaaggggttttttattcacatgtttatgcgaaatgtaggttattagattcgggttcttcagc

SEQ ID NO: 402240 - DNA, 75 bp, synthetic construct
  source 1..75: mol_type = other DNA
agaaaaattaaatccaccgcaagatttacgttctgcaatagaaaaaattgggtggaagaatagacctatcactgc

SEQ ID NO: 402241 - DNA, 75 bp, synthetic construct
  source 1..75: mol_type = other DNA
gcaccgttgatagtcgtaatgtcaccgtggatctcccggactttcctggaagcgcagaaataccccttggcgtat

SEQ ID NO: 402242 - DNA, 75 bp, synthetic construct
  source 1..75: mol_type = other DNA
tagcggatatcatgatcagggctgactgctatctgacggtcaccgaaatcaccagccgtgcaaaagcacaatatc

SEQ ID NO: 402243 - DNA, 75 bp, synthetic construct
  source 1..75: mol_type = other DNA
gtgcggtcaagccgagctatttgtgagcttgatgatcgtgtttacccacggaaatactggttgcatggcctgaac

SEQ ID NO: 402244 - DNA, 75 bp, synthetic construct
  source 1..75: mol_type = other DNA
gccgatctccagaatccaccagaagaaatcccccacctggtggaaaaagccgatgaaggttacgacgtggtaggg

SEQ ID NO: 402245 - DNA, 75 bp, synthetic construct
  source 1..75: mol_type = other DNA
gatcctgctgattgatgacggcagtagcgataattccgcacaaatgctggtcgatgcctcacaggcggaaggaag

SEQ ID NO: 402246 - DNA, 75 bp, synthetic construct
  source 1..75: mol_type = other DNA
cactgccatgaacgcagcacctttatcccgattctggcgaatatcttcgcccgccgtgccattgaaattccagtg

SEQ ID NO: 402247 - DNA, 75 bp, synthetic construct
  source 1..75: mol_type = other DNA
taaatgatatttttttgaaggattttttcatgaagcaacctgattttgctaagtggtacttctatcaattactta

SEQ ID NO: 402248 - DNA, 75 bp, synthetic construct
  source 1..75: mol_type = other DNA
acccgctgaagtgcgagctgtgcggaggtcagatgcggtttacgggactgaagatgggttaccgtctggcagagc

SEQ ID NO: 402249 - DNA, 75 bp, synthetic construct
  source 1..75: mol_type = other DNA
gccccgctgaagtgcatcctgtgcgggagtcagatgcattttacggggctgaagcggggttaccgtctggcagat

SEQ ID NO: 402250 - DNA, 75 bp, synthetic construct
  source 1..75: mol_type = other DNA
atgagagttcattacacctgattactaacaaggttctggcgtgttatcaacgtgaagctaacaaggaagtggcgc

SEQ ID NO: 402251 - DNA, 75 bp, synthetic construct
  source 1..75: mol_type = other DNA
cgttgagatttttgaagaaaagatgggtaatgaattaaaaattagaacaagaatgatggaaatcctccgggatgg

SEQ ID NO: 402252 - DNA, 75 bp, synthetic construct
  source 1..75: mol_type = other DNA
agacttttttaaaattcccatatattaatgatgtaagaatactggattggtgttttaataaaagaatgcaatatt

SEQ ID NO: 402253 - DNA, 75 bp, synthetic construct
  source 1..75: mol_type = other DNA
aaggcgatacgctgttctacatcgcctggattaccggcaacgatttccgcgatctcgcccagcgcaacaatattc

SEQ ID NO: 402254 - DNA, 75 bp, synthetic construct
  source 1..75: mol_type = other DNA
gtcgaagagtgcagggcgatcaaggcagagtatcaacagaaacttaaagacctgcgaaacagcagaagtgaggcc

SEQ ID NO: 402255 - DNA, 75 bp, synthetic construct
  source 1..75: mol_type = other DNA
ttctttagaaatggcgcgctttggtgccaaacatcccgcttcaacgctactcgtagccggggtgagatttatggg

SEQ ID NO: 402256 - DNA, 75 bp, synthetic construct
  source 1..75: mol_type = other DNA
aggaagcaatcacgaggttcatgttgatgaaaggctgcgagagagggcgctggtgccgctcaatcgtatgctgga

SEQ ID NO: 402257 - DNA, 75 bp, synthetic construct
  source 1..75: mol_type = other DNA
gcaaatggcaggtcagccacggcccgttcgaaagctacgatcatctcggtgaaactaactggtcattgttagtgc

SEQ ID NO: 402258 - DNA, 75 bp, synthetic construct
  source 1..75: mol_type = other DNA
gcaaatggcaggtcagccacggcccgttcgaaagctacgatcatctcggtgaaaccaactggtcattactggtac

SEQ ID NO: 402259 - DNA, 75 bp, synthetic construct
  source 1..75: mol_type = other DNA
gtcgaagagtgcagggccatcaaggcggagtatcaacagaaacttaaaaaactgcgaaacagcagaagtgaggtt

SEQ ID NO: 402260 - DNA, 75 bp, synthetic construct
  source 1..75: mol_type = other DNA
cgcctgtaacggtaccaacagcaagcacaaccgagccaactgtcagcagtacatcaaccagtacgcctatctcca

SEQ ID NO: 402261 - DNA, 75 bp, synthetic construct
  source 1..75: mol_type = other DNA
atgctaattacgccgccaccaaaaatggggtcaaccagcaccgggatacaacagccccaaattcagtcggtacaa

SEQ ID NO: 402262 - DNA, 75 bp, synthetic construct
  source 1..75: mol_type = other DNA
aaaaaaggcgacacacttttctatatcgcctggattactggcaacgatttccgtgaccttgctcagcgcaacaat

SEQ ID NO: 402263 - DNA, 75 bp, synthetic construct
  source 1..75: mol_type = other DNA
tattttatgctggcaaggcgcctgcattgtgcatgatgagtttaagactcaggcgttaacccgcttacaaaaaca

SEQ ID NO: 402264 - DNA, 75 bp, synthetic construct
  source 1..75: mol_type = other DNA
aacgacacaatgctggtccgggaacaacaagaagtgaaggcggggcaaaaaatagcaaccatgggtagcaccgga

SEQ ID NO: 402265 - DNA, 75 bp, synthetic construct
  source 1..75: mol_type = other DNA
ggcggggcaaaaaatagcaaccatgggtagcaccggaaccagttcaacacgcttgcattttgaaattcgttacaa

SEQ ID NO: 402266 - DNA, 75 bp, synthetic construct
  source 1..75: mol_type = other DNA
agctccggaaccagttcaacacgcttgcattttgaaattcgttacaaggggaaatccgtaaacccgctgcgttat

SEQ ID NO: 402267 - DNA, 75 bp, synthetic construct
  source 1..75: mol_type = other DNA
gctgcgtgttgagctggaagccgcagagaacaaccttattgatagtgagtgccatgttgctgaactggaagaagc

SEQ ID NO: 402268 - DNA, 75 bp, synthetic construct
  source 1..75: mol_type = other DNA
atgagcacaccatgctgttccagaaccgctttctcacctatatgcaacgtaatttgttgaaagatattgagattg

SEQ ID NO: 402269 - DNA, 75 bp, synthetic construct
  source 1..75: mol_type = other DNA
gcggcggtgaagcgggcccggttatcgatatcaccaatgaagccatgttgccgaagcgtgcgaccattactctgc

SEQ ID NO: 402270 - DNA, 75 bp, synthetic construct
  source 1..75: mol_type = other DNA
tggggacgcttgccacaaaaaacagtcttggtcccggtgacgttaatgccctggcgaaggatcagaatctcgccg

SEQ ID NO: 402271 - DNA, 75 bp, synthetic construct
  source 1..75: mol_type = other DNA
atgccagcaacagcaagtaagccatttaccgccatttgtcacgaactggcagacattgagaagatcaacggcaag

SEQ ID NO: 402272 - DNA, 75 bp, synthetic construct
  source 1..75: mol_type = other DNA
agtttatcggtgagcagtggtttacatggttaattgaacaagacatcaacttctgcattcgtgttaaaaaaactt

SEQ ID NO: 402273 - DNA, 75 bp, synthetic construct
  source 1..75: mol_type = other DNA
gacatcgtctgcggtgcgccaaactgccgtcagggcctgcgtgtggcggtagcgaccattggtgctgttctgccg

SEQ ID NO: 402274 - DNA, 75 bp, synthetic construct
  source 1..75: mol_type = other DNA
agcaatgcgtctttccctgtggaccggcctgctggcaaccgtggtgtacaaccagaaccgtcagcagaaccgtgt

SEQ ID NO: 402275 - DNA, 75 bp, synthetic construct
  source 1..75: mol_type = other DNA
gttgagtgcgcacagcatccaaacgctgacaaactgcgagtgacgaaagtcaacgttggtggtgatcgcctgctg

SEQ ID NO: 402276 - DNA, 75 bp, synthetic construct
  source 1..75: mol_type = other DNA
gcgcgtgacgttgctgtgctgaaccagttgccgttagttgaaccggaaattgttccggttggcgcaaccatcgac

SEQ ID NO: 402277 - DNA, 75 bp, synthetic construct
  source 1..75: mol_type = other DNA
aattgcgtggtgagccatctgaagggatgctgtgctctttctccgagctgggcatttctgatgatcacaacggca

SEQ ID NO: 402278 - DNA, 75 bp, synthetic construct
  source 1..75: mol_type = other DNA
tggagattgaagaagatctggtcgaagaagtcgcgcgtgtttacggctacaacaacatcccggatgagccggtac

SEQ ID NO: 402279 - DNA, 75 bp, synthetic construct
  source 1..75: mol_type = other DNA
ggacggcaccgctgcggcagcaaacagactcgccaccccagtaaatattaatggtgttcctttcgacgggacgcg

SEQ ID NO: 402280 - DNA, 75 bp, synthetic construct
  source 1..75: mol_type = other DNA
gactctgccgataacgtcaacggagtatattatcgtgcaatacaaatttatattaatgggtactggcgaacagta

SEQ ID NO: 402281 - DNA, 75 bp, synthetic construct
  source 1..75: mol_type = other DNA
gcgtacttacagggcttgatgttgctggtgatggtaatgcaacggtaaccgcatattatcgcccggttcagtttc

SEQ ID NO: 402282 - DNA, 75 bp, synthetic construct
  source 1..75: mol_type = other DNA
gggaaagtggcgtttgggctttccgttgagcacgtcgaacacgcgattccgatgctgattaaccatctgaaataa

SEQ ID NO: 402283 - DNA, 75 bp, synthetic construct
  source 1..75: mol_type = other DNA
atgttgattacgccaccgccgaaaatggggacgacgtctaaaacgcagcaaccgcaaattcagccggtacagcag

SEQ ID NO: 402284 - DNA, 75 bp, synthetic construct
  source 1..75: mol_type = other DNA
accggcgcagagtaataccaccacctggtttaccgaaggtgacggacaaaaaggtatcagctggattggtcagga

SEQ ID NO: 402285 - DNA, 75 bp, synthetic construct
  source 1..75: mol_type = other DNA
ccgggagtaattctgccgataacatcggcggaatttattaccgtccgctccagtactgcataaacggaacatggg

SEQ ID NO: 402286 - DNA, 75 bp, synthetic construct
  source 1..75: mol_type = other DNA
ggaaagctgggatctgaatctggggggcggcaatgttcttaccggaattaaagtacaggatgtcggtaagaatac

SEQ ID NO: 402287 - DNA, 75 bp, synthetic construct
  source 1..75: mol_type = other DNA
aacgtcggtttacgggaaacggtaaataaggcggcgaatgccctgccatcggacggcaccgctgcggcagcgaat

SEQ ID NO: 402288 - DNA, 75 bp, synthetic construct
  source 1..75: mol_type = other DNA
atgtacagaatgttcagcttggagcacagagctatcattcacccggaggcaatgaaatgtcatggaattacagcg

SEQ ID NO: 402289 - DNA, 75 bp, synthetic construct
  source 1..75: mol_type = other DNA
tggctataacaaaagttgcaccattgccaagccgggcattaaagcgaaagacgaacatatcgccaaaatgatcgc

SEQ ID NO: 402290 - DNA, 75 bp, synthetic construct
  source 1..75: mol_type = other DNA
cattgtcgattgccatcgcggtgattggctataacaaaagttgcaccattgccaaaccaggcattaaagcgaaag

SEQ ID NO: 402291 - DNA, 75 bp, synthetic construct
  source 1..75: mol_type = other DNA
aggctggcaaatgcccatacaattaatggggttccctttgacgggacccgggatatcactatctcatcaggaaca

SEQ ID NO: 402292 - DNA, 75 bp, synthetic construct
  source 1..75: mol_type = other DNA
cgctggcagaatggtcagaagacgaaatacgaatgccaccgccaccagtacagcctgaaaaaccggcgcaaccag

SEQ ID NO: 402293 - DNA, 75 bp, synthetic construct
  source 1..75: mol_type = other DNA
gcgatgcggcaggattactgacactggcagcggtggcggtcatcggttcgctgattattttcactctgcgtgtaa

SEQ ID NO: 402294 - DNA, 75 bp, synthetic construct
  source 1..75: mol_type = other DNA
cttccctgctgaagctgaaagtcttcatggcggacgggtgcacctttcgctaaataaattccgggggccgggggg

SEQ ID NO: 402295 - DNA, 75 bp, synthetic construct
  source 1..75: mol_type = other DNA
ctgtcgttcatcgtctggctgcaccacttctttacgatgggtgcgggcgcgaacgtaaacgccttctttggtatc

SEQ ID NO: 402296 - DNA, 75 bp, synthetic construct
  source 1..75: mol_type = other DNA
cttcccaattctgacggttaccgtcgcgttgttgaccctggatcgctatctgggcccccatttctttaccaacga

SEQ ID NO: 402297 - DNA, 75 bp, synthetic construct
  source 1..75: mol_type = other DNA
aacctcttccccgcctccgttctataactttgccgtagtgccgcacgttcacgaacgtgatgcattctgggaaat

SEQ ID NO: 402298 - DNA, 75 bp, synthetic construct
  source 1..75: mol_type = other DNA
gctggaaggttatcgggcggcaatgaagcgtgctggccttgacgttcctgatggttatgaagtcactggcgattt

SEQ ID NO: 402299 - DNA, 75 bp, synthetic construct
  source 1..75: mol_type = other DNA
gcctggcgggtgtttccacttcaacggtttctcacgtcatcaataaagatcgcttcgtcagtgaagcgattaccg

SEQ ID NO: 402300 - DNA, 75 bp, synthetic construct
  source 1..75: mol_type = other DNA
gcggcgatgaaacgtgcgggtctcagcattcctgatgggggaaccgcagaattcggaaaaaatcgtacgctaagc

SEQ ID NO: 402301 - DNA, 75 bp, synthetic construct
  source 1..75: mol_type = other DNA
tccccggtccgaatgctgctgtcgttgttctcccacgcctggcactccagctcatcacgctgcgtaagcaaagag

SEQ ID NO: 402302 - DNA, 75 bp, synthetic construct
  source 1..75: mol_type = other DNA
gcactggccgaacaaaccgtcgtcgttcccggcacgaatgccgctgccgtagtactgccacgtctggcactccag

SEQ ID NO: 402303 - DNA, 75 bp, synthetic construct
  source 1..75: mol_type = other DNA
atatctgacctgaaacaacatggtcagatactgctggttgttgatcagccagctgccatcggtgcgttacctgtc

SEQ ID NO: 402304 - DNA, 75 bp, synthetic construct
  source 1..75: mol_type = other DNA
gttcaccatgtatcagggccgcatcgtgttccattctgcgatgctgtggaccatcggttttatcgtcaccttctc

SEQ ID NO: 402305 - DNA, 75 bp, synthetic construct
  source 1..75: mol_type = other DNA
ttactccagccgggcaggaaataattcgtattgctcgtgaagtcctgtcgaaagtagatgccattaaatcggttg

SEQ ID NO: 402306 - DNA, 75 bp, synthetic construct
  source 1..75: mol_type = other DNA
gatgctgacgtgattaaaacttacgttcgattagggttgggtgtaggggtgattgccagcatggcggtggatccg

SEQ ID NO: 402307 - DNA, 75 bp, synthetic construct
  source 1..75: mol_type = other DNA
gcatcgagtgttgaagggatgaacctcctgttcctgactaatacactacgcccaatgctggtcaatattgagcag

SEQ ID NO: 402308 - DNA, 75 bp, synthetic construct
  source 1..75: mol_type = other DNA
cccgctgatgccactccagcctgctgatgattttttcccgcagtgcagcaatctgttccggcgtgaaatgatttt

SEQ ID NO: 402309 - DNA, 75 bp, synthetic construct
  source 1..75: mol_type = other DNA
gtcacaggccgacattatcgaccgttttaatgcgctggaaacccgccatcagcaggacagccagaaaatcacttt

SEQ ID NO: 402310 - DNA, 75 bp, synthetic construct
  source 1..75: mol_type = other DNA
taaccgtgaagttcgtcgtctgtgggaagcggttggtgtgcaggtgagccgtctgatccgtgtacgttatggcga

SEQ ID NO: 402311 - DNA, 75 bp, synthetic construct
  source 1..75: mol_type = other DNA
gaagcggttggcgtgcaggttagccgcctgattcgtgtgcgttacggtgatatccctctaccgaaaggtctgcca

SEQ ID NO: 402312 - DNA, 75 bp, synthetic construct
  source 1..75: mol_type = other DNA
gtgatgcattctgggaaatgaaagagaaaggcgaagcgtataaaaagcctgaccactatgaagaaattcatatgc

SEQ ID NO: 402313 - DNA, 75 bp, synthetic construct
  source 1..75: mol_type = other DNA
ggctgttaagcgagtctatttcaacccttccgctgaaaatatacgttcgacagcctgacggttcgcgtaaagcgg

SEQ ID NO: 402314 - DNA, 75 bp, synthetic construct
  source 1..75: mol_type = other DNA
taaaaatactcgtttttcccccgaagtccgtcagcgggcgattcgtatggttctggaaagtcaggatgaatatga

SEQ ID NO: 402315 - DNA, 75 bp, synthetic construct
  source 1..75: mol_type = other DNA
tgcgtgagtccgctgagcaaatttgtcgcgtgctggcctattacaagccggaaggtgagttatgtacccgtaacg

SEQ ID NO: 402316 - DNA, 75 bp, synthetic construct
  source 1..75: mol_type = other DNA
tcttattcaggataactcgttgctgggcggagacttagcaacgcaatatctgatcgataaaggtcatacccgtat

SEQ ID NO: 402317 - DNA, 75 bp, synthetic construct
  source 1..75: mol_type = other DNA
tcctcaacccgttggaatgatggcgtctccttcccgatccagtccggtcacggttgcctgggctgttctgaaaat

SEQ ID NO: 402318 - DNA, 75 bp, synthetic construct
  source 1..75: mol_type = other DNA
cggctgcctgggttgtgcggaaaatggtttctgggatcgcggttcgttctacagccgcgtggtcgatattccaca

SEQ ID NO: 402319 - DNA, 75 bp, synthetic construct
  source 1..75: mol_type = other DNA
ttatttccctcgattacgacgatactttgatggctgccgccggaacccaggcggaagaagtctttgaagacatca

SEQ ID NO: 402320 - DNA, 75 bp, synthetic construct
  source 1..75: mol_type = other DNA
ttcagcagtctgatggccgaaatacgccgtattgcaggtgttaccgatgtgcgtactgtcccgtggatgccttcc

SEQ ID NO: 402321 - DNA, 75 bp, synthetic construct
  source 1..75: mol_type = other DNA
tatcaacaaaatcgcgtggcgcgctgggcagatgatcaaaaaattgtcggtcaggccgatcccgtggcatgggtc

SEQ ID NO: 402322 - DNA, 75 bp, synthetic construct
  source 1..75: mol_type = other DNA
ggctgttgttggcttccgcctgtgcatcagttttcgctgccaataacgaaaccagcaagtcggttacttttccca

SEQ ID NO: 402323 - DNA, 75 bp, synthetic construct
  source 1..75: mol_type = other DNA
ccggactgacagaacgtgatgcccggatttacagccattacctgcagactgagcacaaaaggtttgtgaaactgg

SEQ ID NO: 402324 - DNA, 75 bp, synthetic construct
  source 1..75: mol_type = other DNA
tacgtcagcagtgcagaattccgggacgaaatcggttacatcggtgaatgattcgctcttggggcaggtcacggg

SEQ ID NO: 402325 - DNA, 75 bp, synthetic construct
  source 1..75: mol_type = other DNA
acgtataattaatgagttattagattcatttgaaagtaaacttattaacaactcaaaacaaattgatagcttaga

SEQ ID NO: 402326 - DNA, 75 bp, synthetic construct
  source 1..75: mol_type = other DNA
aggccatgcggcgtcagggcgttacccggcgcagctttctcaaatattgcagtctggctgccacgtcgctgggat

SEQ ID NO: 402327 - DNA, 75 bp, synthetic construct
  source 1..75: mol_type = other DNA
gtctggaatgtacctgctgcaccgaatcttttatccgttctgctcatccgctggcgaaggatgtcattctttccc

SEQ ID NO: 402328 - DNA, 75 bp, synthetic construct
  source 1..75: mol_type = other DNA
agggcctaccacctataacgcctgttcctccacacgctggaacgatggcgtttccttcccgatccagtcaggtca

SEQ ID NO: 402329 - DNA, 75 bp, synthetic construct
  source 1..75: mol_type = other DNA
cacgagaacaccgttagcttagcgtacgattttttccgaattctgcggttcccccttaatgggcagaatttcctg

SEQ ID NO: 402330 - DNA, 75 bp, synthetic construct
  source 1..75: mol_type = other DNA
tcccgttcctgtatgcctcttccgcagccacctacggcggacgcacctccgactttattgaatcccgcgaatatg

SEQ ID NO: 402331 - DNA, 75 bp, synthetic construct
  source 1..75: mol_type = other DNA
tttcaacgtttatggaccgcgtgaaggccataaaggcagcatggcgagcgtcgctttccatctcaacacccagct

SEQ ID NO: 402332 - DNA, 75 bp, synthetic construct
  source 1..75: mol_type = other DNA
atgactacattattcagaaaagaatatccgcaaaaaagtagggcaacagaatttttgtttctcattctgtttatc

SEQ ID NO: 402333 - DNA, 75 bp, synthetic construct
  source 1..75: mol_type = other DNA
atggatgtcgcgtatgaaagctctggctctggtgactggcgcacaagcggggttactgttggtattggtctgaaa

SEQ ID NO: 402334 - DNA, 75 bp, synthetic construct
  source 1..75: mol_type = other DNA
gatggcagggatgggcgttgctaaagttagcgctgacctgaaaattaaggacaatattaacaggtggctttttta

SEQ ID NO: 402335 - DNA, 75 bp, synthetic construct
  source 1..75: mol_type = other DNA
ctcaaaattcctgtttgatgaatatgttcgtcaaatcctgcctgaagcgaactcgcagattgttggcttccgtta

SEQ ID NO: 402336 - DNA, 75 bp, synthetic construct
  source 1..75: mol_type = other DNA
ctgcacaggctatgtggttttcgtgttgagtgggggtgctatgagatgcgatgcagatggcatcatcggggggat

SEQ ID NO: 402337 - DNA, 75 bp, synthetic construct
  source 1..75: mol_type = other DNA
gaacatagtggaattgagttttcgtgcgataggcgaattttcgttgttgctccaaatcctaaagccactgacttt

SEQ ID NO: 402338 - DNA, 75 bp, synthetic construct
  source 1..75: mol_type = other DNA
agaagcagaaagtgttgaacaagcaattatcgattgcctgataaactatcctgactccaagcctgcttatggcat

SEQ ID NO: 402339 - DNA, 75 bp, synthetic construct
  source 1..75: mol_type = other DNA
tccgcgtaccgccatttatggtcggccacacatcgaaacagagcagctgggcatcgagtcttgagggtatgaacc

SEQ ID NO: 402340 - DNA, 75 bp, synthetic construct
  source 1..75: mol_type = other DNA
tatgagtgtttcaaaatcactagcaaaaggctttgcaaggaaaaagataaaagataaaagatattacaggaatag

SEQ ID NO: 402341 - DNA, 75 bp, synthetic construct
  source 1..75: mol_type = other DNA
aacaaactttaaggatgagggaattagtacacttatgagtgtttcaaaatcactagcaaaaggctttgcaaggaa

SEQ ID NO: 402342 - DNA, 75 bp, synthetic construct
  source 1..75: mol_type = other DNA
tccgaccttatgctgaacagggcagggggataacaggcattgagtccagttattacactctgccacatttcgtcc

SEQ ID NO: 402343 - DNA, 75 bp, synthetic construct
  source 1..75: mol_type = other DNA
tcgtctgatggaaaccgcacccggcaccataacggcaggtagcgcttctgccgaagcgggtgacgatttgttaaa

SEQ ID NO: 402344 - DNA, 75 bp, synthetic construct
  source 1..75: mol_type = other DNA
agatgcccacttaatcgagctgaacaaaaaatacacaaaaaatatagatctccgtcacatttttgcgttatacag

SEQ ID NO: 402345 - DNA, 75 bp, synthetic construct
  source 1..75: mol_type = other DNA
cttcatgatattcacctcgcttataaatacgggaaggtttacaccgaaaaaaaccgtccttatgacgtgcaattc

SEQ ID NO: 402346 - DNA, 75 bp, synthetic construct
  source 1..75: mol_type = other DNA
ttccatgaaaaacccgtactggacgcctcagcataatgtaatgccagtaacttacggcactaaaggctattcctt

SEQ ID NO: 402347 - DNA, 75 bp, synthetic construct
  source 1..75: mol_type = other DNA
atcaccattgatacgcaatctatacccgcagatatcagtggtatcgaagacgttatgtttcacctccggcagctt

SEQ ID NO: 402348 - DNA, 75 bp, synthetic construct
  source 1..75: mol_type = other DNA
gctggtgcgtcggtcttcccgtaaggggatggatcttgagctgacatggctccagtcgttgaaggtcgtgctggt

SEQ ID NO: 402349 - DNA, 75 bp, synthetic construct
  source 1..75: mol_type = other DNA
cacaagccattagcatcctcagaacaatgcaggaaattaaaagagggcgttatgtattctattcatccagaacca

SEQ ID NO: 402350 - DNA, 75 bp, synthetic construct
  source 1..75: mol_type = other DNA
agatatttataatagaactatttatctagaacagcgtaagatcatgatgcaatgggtcggtgatttttttgatga

SEQ ID NO: 402351 - DNA, 75 bp, synthetic construct
  source 1..75: mol_type = other DNA
cagcagcaatttcatcaggtatggcagcgattggttccactgttggtggtgggatggctgccggtgcggtaatta

SEQ ID NO: 402352 - DNA, 75 bp, synthetic construct
  source 1..75: mol_type = other DNA
ctgcagcggtttcatcaggtatggcagcgattggttccactgttggtggtggaatggctgctggcgctgtgatta

SEQ ID NO: 402353 - DNA, 75 bp, synthetic construct
  source 1..75: mol_type = other DNA
tccagtcgttgaaggttgtgctggttcgtggagctgttgcattgggtctggggtttggcattggcaggcttgtat

SEQ ID NO: 402354 - DNA, 75 bp, synthetic construct
  source 1..75: mol_type = other DNA
ggctggaagaactggctaccctgcccgatgccacccgcaaacgcgcacaggcgctggtcgctaaaggcatcacca

SEQ ID NO: 402355 - DNA, 75 bp, synthetic construct
  source 1..75: mol_type = other DNA
cgcatttcatttgttatagtaggttttactgggatattacttgcgattacaccttttctgatgaaagtctcgact

SEQ ID NO: 402356 - DNA, 75 bp, synthetic construct
  source 1..75: mol_type = other DNA
atctggagaggaagtgatgattttttctcctgaaataattattcctaataccctgaaaggggtctcaatgccaac

SEQ ID NO: 402357 - DNA, 75 bp, synthetic construct
  source 1..75: mol_type = other DNA
caactcgataagtgtcccgcagcaggtgctgatgttattgagaaaatcaacaacaaatttggtcgcttacgcggt

SEQ ID NO: 402358 - DNA, 75 bp, synthetic construct
  source 1..75: mol_type = other DNA
tagattatgcatgcgacgtgataaaaaatattaagtctggttgtgatcagtctaaaagagctgaggcattatttt

SEQ ID NO: 402359 - DNA, 75 bp, synthetic construct
  source 1..75: mol_type = other DNA
tgacctctcaccggtcatccgttcgatgttagaaacttttttaaaatcgccatatatgagtgatgtaaaaatact

SEQ ID NO: 402360 - DNA, 75 bp, synthetic construct
  source 1..75: mol_type = other DNA
tacagttatctagcatcggcactgggattatttatgatttttatttcatttattttttataaattagatgagcgt

SEQ ID NO: 402361 - DNA, 75 bp, synthetic construct
  source 1..75: mol_type = other DNA
ctcatcagttgctgatgcgctgccaggcgttacttattcaactgctccataacggctggcgctatcaggaacaga

SEQ ID NO: 402362 - DNA, 75 bp, synthetic construct
  source 1..75: mol_type = other DNA
gtggcactgacgcatcatatcagtattgcgccgggtaaaatgttttctaccggtgaaaactggtcacgttttttt

SEQ ID NO: 402363 - DNA, 75 bp, synthetic construct
  source 1..75: mol_type = other DNA
catttccgccaaaattagcgtggcagaattaaccggtgcggaatttatgctctacaccacggttggggggcacga

SEQ ID NO: 402364 - DNA, 75 bp, synthetic construct
  source 1..75: mol_type = other DNA
tcagaccatcggtgattcgattatcgaaccgttgcgcgtacacggtttattgcaaggtaaagaagctgctgcacg

SEQ ID NO: 402365 - DNA, 75 bp, synthetic construct
  source 1..75: mol_type = other DNA
cagattatcaacttgttgctcgatctccagcgtgatttcggcattgcatatctgtttatctctcacgatatggcg

SEQ ID NO: 402366 - DNA, 75 bp, synthetic construct
  source 1..75: mol_type = other DNA
gaaacgttgtcgctggtgggggagtctggcagtggtaaatccaccaccggacgggcgttgttgcgcctggttgaa

SEQ ID NO: 402367 - DNA, 75 bp, synthetic construct
  source 1..75: mol_type = other DNA
accctttcaccgcgccctccgggcagcacatcgacgaactgcaactgacccgcctgaaggtgaaggatatgcgcg

SEQ ID NO: 402368 - DNA, 75 bp, synthetic construct
  source 1..75: mol_type = other DNA
tgagaaactggctaaacaggaacgtcccatcgaacaaagaacggtgattgagggcgatcctattttacaggtgcg

SEQ ID NO: 402369 - DNA, 75 bp, synthetic construct
  source 1..75: mol_type = other DNA
ttctattcgcgggcagattatcaacttgttgctcgatctccagcgtgatttcggcattgcgtatctgtttatctc

SEQ ID NO: 402370 - DNA, 75 bp, synthetic construct
  source 1..75: mol_type = other DNA
gatgttgatgatggcggttatcggttttgcagtgatggttccgttggcgggtctgctggcagatgcttttggtcg

SEQ ID NO: 402371 - DNA, 75 bp, synthetic construct
  source 1..75: mol_type = other DNA
tggcaacccgattctggtttttgccttcctgctgctggggttaagtctgatggggctgaccttcgggccgatggg

SEQ ID NO: 402372 - DNA, 75 bp, synthetic construct
  source 1..75: mol_type = other DNA
taaccgtactgggtacgttcattatgctggcaacctatacgctgttttacatcatgacggtctactctatgacct

SEQ ID NO: 402373 - DNA, 75 bp, synthetic construct
  source 1..75: mol_type = other DNA
gaaccgctgcgtgtacacggtttattgccaggtaaagaagcggctgcacgcgttgcgtggttgctggagcgcgtg

SEQ ID NO: 402374 - DNA, 75 bp, synthetic construct
  source 1..75: mol_type = other DNA
accacgagcaagaatacacgccgataaactcacgaaataaagtgctggtcgcctccctcattggcacagccattg

SEQ ID NO: 402375 - DNA, 75 bp, synthetic construct
  source 1..75: mol_type = other DNA
tttgcagtgatggttccgttggcgggtctgctggcagatgcttttggtcgccgtaaaagtatggtggtgatcact

SEQ ID NO: 402376 - DNA, 75 bp, synthetic construct
  source 1..75: mol_type = other DNA
cagggccgtggcgcagagcaaatttatattccggtactgattaaaaaaacgcgagcaggaaaaaggcctggatcg

SEQ ID NO: 402377 - DNA, 75 bp, synthetic construct
  source 1..75: mol_type = other DNA
atgctgtcaaaaatcgaccagaaaaagctgatcgatgcgggacaggttgaccaggttaaggcagaaattacgaaa

SEQ ID NO: 402378 - DNA, 75 bp, synthetic construct
  source 1..75: mol_type = other DNA
gcaaaaagtttcgcgtggctgtctccggatcaactgttgatggccgcgaaatcagcccggtacatctgcgtgaag

SEQ ID NO: 402379 - DNA, 75 bp, synthetic construct
  source 1..75: mol_type = other DNA
ctttgcggcacaacaacgtatgcaactgatgacattcaactgtcagcagggagaggtggcgatgttcaccgccgc

SEQ ID NO: 402380 - DNA, 75 bp, synthetic construct
  source 1..75: mol_type = other DNA
ttcttgatatgaaaaaaataactgaagagagcatgagaaaattaccaaaatcagaccagcaaaatataaaactca

SEQ ID NO: 402381 - DNA, 75 bp, synthetic construct
  source 1..75: mol_type = other DNA
agatatacccttctgtgattttttcatccgccgtcagcaggtgatttacctggagatcagggaagaaaaacaatg

SEQ ID NO: 402382 - DNA, 75 bp, synthetic construct
  source 1..75: mol_type = other DNA
aatagaacgcttcattcttgacaaatacaatgtaaccgttcccttaacggtaaatatagggaaagggtttgacat

SEQ ID NO: 402383 - DNA, 75 bp, synthetic construct
  source 1..75: mol_type = other DNA
atgagccaagcatgaaaaaagaaccaattgaacaaacaaaaagaacaaaaaacaaagaattgatgatagtgattc

SEQ ID NO: 402384 - DNA, 75 bp, synthetic construct
  source 1..75: mol_type = other DNA
tcgacgaaggaaaagaaccagtgatcgaacggatttttcgtcttgcagagcgttacaaatcgagaagtgaggcgg

SEQ ID NO: 402385 - DNA, 75 bp, synthetic construct
  source 1..75: mol_type = other DNA
cgcctgagctggcagagttttggcgcggtggcggcacgttcactgttactggtgctggtcagcttctggctggta

SEQ ID NO: 402386 - DNA, 75 bp, synthetic construct
  source 1..75: mol_type = other DNA
gtcgggctggcgatgaccgacaccccggcaagcctgggcactgagcgcctgaaattcacggcacagcaacgtcag

SEQ ID NO: 402387 - DNA, 75 bp, synthetic construct
  source 1..75: mol_type = other DNA
tcagaacctatcggacagcgctacaaagcgacggaagcgttatttaagtatgtcgccgtaaacccggaggggaaa

SEQ ID NO: 402388 - DNA, 75 bp, synthetic construct
  source 1..75: mol_type = other DNA
agtgtcattagcggttatttaggtaaaaactggggcatcctgttaggtgcgctctatttcgtaatgctggtgatt

SEQ ID NO: 402389 - DNA, 75 bp, synthetic construct
  source 1..75: mol_type = other DNA
acagaacgccccgtgtcacagccagtatcaaccgcacagataaccagtcagatggcagggaatatccgggcatta

SEQ ID NO: 402390 - DNA, 75 bp, synthetic construct
  source 1..75: mol_type = other DNA
gagttaaaaacctactttgatatgtttgatttcactatattctcttcaaaatcattagttgaacttattgaagta

SEQ ID NO: 402391 - DNA, 75 bp, synthetic construct
  source 1..75: mol_type = other DNA
gcattaagagcttacctcgacgcatttgatttcactattttctcatcaaaatcgatagttgagcttatcgaaatt

SEQ ID NO: 402392 - DNA, 75 bp, synthetic construct
  source 1..75: mol_type = other DNA
atgacgataccaaccagacggataagtttctatctgaagcccgccgccgtcaagaacgaaggcgaagcatgcgcc

SEQ ID NO: 402393 - DNA, 75 bp, synthetic construct
  source 1..75: mol_type = other DNA
agcgttatcagtgacacaaaccaggacagaacgccccgcgtcacagccagtatcaaccgcacagataaccagtca

SEQ ID NO: 402394 - DNA, 75 bp, synthetic construct
  source 1..75: mol_type = other DNA
gaggaaaaaaccaaagcacaggctgcgccagaggcgcagccaaccagccagatggccgcaaacatcagggcgtta

SEQ ID NO: 402395 - DNA, 75 bp, synthetic construct
  source 1..75: mol_type = other DNA
agtattgcgatgggggtatttgctaacttacccgtggcactggctccggcaatgggcctgaacgccttctttgcc

SEQ ID NO: 402396 - DNA, 75 bp, synthetic construct
  source 1..75: mol_type = other DNA
cagatgattaatcaggctgtgattaaattaattcctttttatatacaaaaggagttgcattcaaaaactgtagtt

SEQ ID NO: 402397 - DNA, 75 bp, synthetic construct
  source 1..75: mol_type = other DNA
ggacctgcatcaagaattaacaaaaaacctgacggcggacgaagtggcaacacttgagtatttgcttaagaaagt

SEQ ID NO: 402398 - DNA, 75 bp, synthetic construct
  source 1..75: mol_type = other DNA
atattcagccaaagggaagcagtgatgtcccgtcgtcttcgcacattcagactggattaccgattccaaaaacag

SEQ ID NO: 402399 - DNA, 75 bp, synthetic construct
  source 1..75: mol_type = other DNA
cgggggcgtttatcggcacctcgtctgttactgcctatattgaaagtacttctggtgtggcagtcggtggtcgca

SEQ ID NO: 402400 - DNA, 75 bp, synthetic construct
  source 1..75: mol_type = other DNA
attgtggtgacgtcttgctgtggattatttttcggtgatgttcattttagcggtgtctattccattccgcctgat

SEQ ID NO: 402401 - DNA, 75 bp, synthetic construct
  source 1..75: mol_type = other DNA
ccggcgaaagccagtgacgaagaaggcaccagagtcagtattaacaatgccagtgcggaagagttagcccgcgtt

SEQ ID NO: 402402 - DNA, 75 bp, synthetic construct
  source 1..75: mol_type = other DNA
ccttgccggcacaggctgagcatgccatttatgatatgtttgacaggcttgagcaaaaaggaattctttttatcg

SEQ ID NO: 402403 - DNA, 75 bp, synthetic construct
  source 1..75: mol_type = other DNA
ctcaaagcaatgaagaggtaacaaacgaagttcgttgcttcaaccaatgttatggtgccgggagtgcagaaaaaa

SEQ ID NO: 402404 - DNA, 75 bp, synthetic construct
  source 1..75: mol_type = other DNA
ggttggttgctggatcgttttggttcaaaacgcgtctacttctggtcgatctttatctggtcgatgtttaccttg

SEQ ID NO: 402405 - DNA, 75 bp, synthetic construct
  source 1..75: mol_type = other DNA
tgttactcaaagatgaacataagagtcatcgtgagcgtaatgatatcattagcaatattctacaagatgtaacag

SEQ ID NO: 402406 - DNA, 75 bp, synthetic construct
  source 1..75: mol_type = other DNA
ctaccgggaatgacgccgctgtttttaatcggcgacgatccgctgtctacagaatggctgcgccagcaccgggac

SEQ ID NO: 402407 - DNA, 75 bp, synthetic construct
  source 1..75: mol_type = other DNA
acattaacaaccctgcacgccaccgggctggtcgtgaacgtcaccactctggcgcggttgaatgccctgcggacc

SEQ ID NO: 402408 - DNA, 75 bp, synthetic construct
  source 1..75: mol_type = other DNA
cctgggagcactgacccgtatgctggatcgcctggtctgtaaaggctgggtggaaaggttgccgaacccgaatga

SEQ ID NO: 402409 - DNA, 75 bp, synthetic construct
  source 1..75: mol_type = other DNA
aactgaaaaaagtgttgtcggtcgacctgggagcactcacccgtatgctggatcgcctggtctgtaaaggctggg

SEQ ID NO: 402410 - DNA, 75 bp, synthetic construct
  source 1..75: mol_type = other DNA
ggctgggagcacgtctttaccgttatgggggtgattggttttgtgctgacggcgctgtggatcaaattgattcat

SEQ ID NO: 402411 - DNA, 75 bp, synthetic construct
  source 1..75: mol_type = other DNA
ggttttacgttcagggagacagatgtttctgatgacggagaaccagaatacacgcgaaacgaagggtactttgtt

SEQ ID NO: 402412 - DNA, 75 bp, synthetic construct
  source 1..75: mol_type = other DNA
gtcttcttgacgatggctttgatgaatccgtgttccgtgagtgggtggttacaccagagcgcccgctcagggagt

SEQ ID NO: 402413 - DNA, 75 bp, synthetic construct
  source 1..75: mol_type = other DNA
tcttgacgatggctttgatgaatccgtgttccgtgagtgggtggttacaccagagcgcccgctaagggagtggtt

SEQ ID NO: 402414 - DNA, 75 bp, synthetic construct
  source 1..75: mol_type = other DNA
ggatataaccgcatggaggcctgcgggcgtcatagtgtgtcgccgggatatttttctggtgcactgaagcggttt

SEQ ID NO: 402415 - DNA, 75 bp, synthetic construct
  source 1..75: mol_type = other DNA
ggcggggatgtggtggtcagcggtgacggcaaaaccgtgcgcgaccgtaaaaaacgcggccccggacgcgggcgg

SEQ ID NO: 402416 - DNA, 75 bp, synthetic construct
  source 1..75: mol_type = other DNA
tggaaatgcagcccgccgggccggtcaggaaacagaacttgtcggctcccgtatgcagcgaacgcttgccggtgt

SEQ ID NO: 402417 - DNA, 75 bp, synthetic construct
  source 1..75: mol_type = other DNA
gaaaaccgccgcacgggtggagcttgtggcccctgaaggctggcgggcacgcagtattgatgtggatgataccgc

SEQ ID NO: 402418 - DNA, 75 bp, synthetic construct
  source 1..75: mol_type = other DNA
cgccacccgtgccctgaaaatggcgcgggctgtcggaacggggattatacgtccgggtgctgcattgctgggata

SEQ ID NO: 402419 - DNA, 75 bp, synthetic construct
  source 1..75: mol_type = other DNA
cgcgcagtattgatgtggatgataccgcacagcatggcctggatgtgaacgtctggaacggagggaactatggcc

SEQ ID NO: 402420 - DNA, 75 bp, synthetic construct
  source 1..75: mol_type = other DNA
caggagacagaacttgtcggctcccgtatgcagcgaacgcttgccggtgttcgtggcagtatccgcacggtgacg

SEQ ID NO: 402421 - DNA, 75 bp, synthetic construct
  source 1..75: mol_type = other DNA
agagtatgttgctcgcatcatgcatggcgggaatggcattttccagtgccggacttgggttatgtcacgcgatgg

SEQ ID NO: 402422 - DNA, 75 bp, synthetic construct
  source 1..75: mol_type = other DNA
ctgattgccattccaacgaccgccggaaccggctctgaaaccaccaacgtaacggtgattatcgacgcggtgagc

SEQ ID NO: 402423 - DNA, 75 bp, synthetic construct
  source 1..75: mol_type = other DNA
agtctctacaccagttgttcgacttctctgagtgcaacgcatatcgcttgccgcagcttgttgtttggcgaatgt

SEQ ID NO: 402424 - DNA, 75 bp, synthetic construct
  source 1..75: mol_type = other DNA
cagcaacctttacgggatgctggcaggaggggctgcggtctacggttttaataaagcctttatccgcccggccgc

SEQ ID NO: 402425 - DNA, 75 bp, synthetic construct
  source 1..75: mol_type = other DNA
caaagtacctgatgtatatgtatctcgcctcccgtgcgctgaaggtgctcaggtttgcggggacgggggcattac

SEQ ID NO: 402426 - DNA, 75 bp, synthetic construct
  source 1..75: mol_type = other DNA
gggtgatcgcgtttggcggcggctcggtgctggatgcggcgaaagccgtggcgttgctggtgacgaacccggata

SEQ ID NO: 402427 - DNA, 75 bp, synthetic construct
  source 1..75: mol_type = other DNA
gcctgcgggtggtctggcatcaggtggcggggatgtggtggtcagcggtgacggcaaaaccgtgcgcggccgtaa

SEQ ID NO: 402428 - DNA, 75 bp, synthetic construct
  source 1..75: mol_type = other DNA
tggacggatggtgttcattgatgaattggggggaacatggacagaaaaagtaacagtgattcataccaacgctgg

SEQ ID NO: 402429 - DNA, 75 bp, synthetic construct
  source 1..75: mol_type = other DNA
ggtcgatggtctgaccgtctggttgccgaaattcgagctggcgcgaaaactgttcttccacgctgccttcatcgt

SEQ ID NO: 402430 - DNA, 75 bp, synthetic construct
  source 1..75: mol_type = other DNA
gatgctcagctgcgcaccaagatcgcctacaacggggagcgtgccaacgctcatggcaagaaggtcgacgacgag

SEQ ID NO: 402431 - DNA, 75 bp, synthetic construct
  source 1..75: mol_type = other DNA
ctgagtgcaccggcgaaaaccgaacaaactcagccagctgctccggctaagccgaccagcgatatcccgaactaa

SEQ ID NO: 402432 - DNA, 75 bp, synthetic construct
  source 1..75: mol_type = other DNA
gtttggttcaagtggttctggcaacttcatgacccgtatgacggctgtgctggcaacgttgttcttcatcatcag

SEQ ID NO: 402433 - DNA, 75 bp, synthetic construct
  source 1..75: mol_type = other DNA
tccggatggcgaccgttctcatgcggtggttgttacggtgtcggaccggcgctaccgcctgaaagggttgcagac

SEQ ID NO: 402434 - DNA, 75 bp, synthetic construct
  source 1..75: mol_type = other DNA
cgcagagggcggacgtcagcaggaaagcatttccgcagttacaacaaatgcacaggcattaccatccccccgcct

SEQ ID NO: 402435 - DNA, 75 bp, synthetic construct
  source 1..75: mol_type = other DNA
aagtggattttggtatcaccgaaggattgcgcagccgttaccgccagaagcaacttgtggccacaggtaagagcc

SEQ ID NO: 402436 - DNA, 75 bp, synthetic construct
  source 1..75: mol_type = other DNA
atgccgtggatgttgtggcttatatcggcagccaggtgtcatgggaatggccgctgtacgaaaaaatcgcagcag

SEQ ID NO: 402437 - DNA, 75 bp, synthetic construct
  source 1..75: mol_type = other DNA
ccagctgacaggattttcaacaccctcctgtattttttcttcacaaaagctgaaaatacatactcatctcctgag

SEQ ID NO: 402438 - DNA, 75 bp, synthetic construct
  source 1..75: mol_type = other DNA
aaaggaaagctacaggccgaacagttttatattcaaaaatttgtcagtctgcatcaaagcggtctaaaagcagca

SEQ ID NO: 402439 - DNA, 75 bp, synthetic construct
  source 1..75: mol_type = other DNA
atgtccagtaaaacaaaagccattctgctttcagtcctgctgttgccggcaacggttacggccagcaacatcagc

SEQ ID NO: 402440 - DNA, 75 bp, synthetic construct
  source 1..75: mol_type = other DNA
acaccaatgctatttttgatattaatgaaaaatatacgccttcatggctgacagaaattataagcttttttaact

SEQ ID NO: 402441 - DNA, 75 bp, synthetic construct
  source 1..75: mol_type = other DNA
taataaactcacttgttagcgatgttgagtcaatagataactctgaccgtcctcaaggggagaaaacaaaaaaaa

SEQ ID NO: 402442 - DNA, 75 bp, synthetic construct
  source 1..75: mol_type = other DNA
caccgataaggcgctgtggcaatatacccaggatctgaaaaatcagtttctgcgcaatgcgccgccaatcaataa

SEQ ID NO: 402443 - DNA, 75 bp, synthetic construct
  source 1..75: mol_type = other DNA
acgattattgcagccacggtattgagcgtaattggggtcgtttgcgggagagggcgaaatcctacgctaaggctt

SEQ ID NO: 402444 - DNA, 75 bp, synthetic construct
  source 1..75: mol_type = other DNA
atgaaaagctggttgacagctacacaactgcataacggggtaaatatgcgtatctatgagcacaagcgggataaa

SEQ ID NO: 402445 - DNA, 75 bp, synthetic construct
  source 1..75: mol_type = other DNA
atgaaaagctggtggacagctacacaactgcgtaatggggtgaatatgcgtatctatgaacacaagcgggataaa

SEQ ID NO: 402446 - DNA, 75 bp, synthetic construct
  source 1..75: mol_type = other DNA
ccagatctgctggtgaaaggcggcgactataaaccggaagagattgccgggagtaaagaagtctgggccaacggc

SEQ ID NO: 402447 - DNA, 75 bp, synthetic construct
  source 1..75: mol_type = other DNA
agcgatgcctccaccaaacggctgaaaggggattcccgccccgtaaacccgctcgaacagcgtatgattgtgctg

SEQ ID NO: 402448 - DNA, 75 bp, synthetic construct
  source 1..75: mol_type = other DNA
gctgttgtcggtaagtgtaagagcgaagaagagatcgttgaacgcggcatgaaattgattgccgactacgaactc

SEQ ID NO: 402449 - DNA, 75 bp, synthetic construct
  source 1..75: mol_type = other DNA
ttcgacacccggctgtggctaacgcagttgtcgcttggcaggacaaaatctgaaaatgatgtcaggcgttatttt

SEQ ID NO: 402450 - DNA, 75 bp, synthetic construct
  source 1..75: mol_type = other DNA
agtgcaaacgctgattaacgaacagcgtctgggcgatgtgctggcaaaacgttatccgggaacacacgactacgc

SEQ ID NO: 402451 - DNA, 75 bp, synthetic construct
  source 1..75: mol_type = other DNA
cgtctgggcgatgtgctggcaaaacgctatccgggaacacacgactacgccaccgataaggcgctgtggcaatat

SEQ ID NO: 402452 - DNA, 75 bp, synthetic construct
  source 1..75: mol_type = other DNA
ttcttgttgttgctgtcgccgccgctcttcctctcatggccagcgcagcagataccccgtcaactgccaccgcgc

SEQ ID NO: 402453 - DNA, 75 bp, synthetic construct
  source 1..75: mol_type = other DNA
atttataataagatgggttttatcatgatagaaaaaatcagggaactggtaacccacccattcggcataaattag

SEQ ID NO: 402454 - DNA, 75 bp, synthetic construct
  source 1..75: mol_type = other DNA
gaaatggtatctggtggcgcaccctggtgtaagtattccgacaccggtgatttttaaagatcccgaactcccgcg

SEQ ID NO: 402455 - DNA, 75 bp, synthetic construct
  source 1..75: mol_type = other DNA
agcaagccccggaatggctcaatggctttgtggcgaaaggcgttaatctttccccattgcacagagccatgcttt

SEQ ID NO: 402456 - DNA, 75 bp, synthetic construct
  source 1..75: mol_type = other DNA
tggacgctgcgcgatgtggagatggggtataaccacgactctaacgggcgttccgacccgacctcccgcagctgg

SEQ ID NO: 402457 - DNA, 75 bp, synthetic construct
  source 1..75: mol_type = other DNA
agcgcaaagagagcctcggtaaagtagtatttggcagcgtacagtcggtcgcccgcaatctcgacgcctttcaga

SEQ ID NO: 402458 - DNA, 75 bp, synthetic construct
  source 1..75: mol_type = other DNA
ctctgcgctggatcaccgccgccgatatcctcgcccagcaagccttattgcgacacccggattttgtcgtcgccc

SEQ ID NO: 402459 - DNA, 75 bp, synthetic construct
  source 1..75: mol_type = other DNA
gggtggttaatcgccacggcaccatttcgctaaccggaccggatttacagcgtcagcgacaggcattactggcag

SEQ ID NO: 402460 - DNA, 75 bp, synthetic construct
  source 1..75: mol_type = other DNA
gatcgccccgcgccgcgcgccaggtgggtggtgtgttaaagcgtctcccggaaggcagcaccttgccctggcatc

SEQ ID NO: 402461 - DNA, 75 bp, synthetic construct
  source 1..75: mol_type = other DNA
cgtcagcgacaggcattactggcagaaggtgtgatggtatcgggaagcgggcaaatcgacttgcagcgttatcgc

SEQ ID NO: 402462 - DNA, 75 bp, synthetic construct
  source 1..75: mol_type = other DNA
cgatcccggtgattttgtataacatcccgcaatttaccggtgtggagctggacagcctgagcgccgaagcgctgc

SEQ ID NO: 402463 - DNA, 75 bp, synthetic construct
  source 1..75: mol_type = other DNA
ttcgcggcattatttccgcggtagtcacgccgatgcacgcggatgaatccgttaactacgcggcgctggagactc

SEQ ID NO: 402464 - DNA, 75 bp, synthetic construct
  source 1..75: mol_type = other DNA
gcattactggcagaaggtgtgatggtatcgggaagcggacaaatcgacttgcagcgttatcgctggaactactaa

SEQ ID NO: 402465 - DNA, 75 bp, synthetic construct
  source 1..75: mol_type = other DNA
accgggtaaagcgccgctgcatatgccaacccaggcgcaggaagtgtatgacgttaccggtgcgggcgacacggt

SEQ ID NO: 402466 - DNA, 75 bp, synthetic construct
  source 1..75: mol_type = other DNA
ggcggactggatgtattccttgcgccgttcttcccggattcaacgatgctgatcacctcgttcaacaacctgtcg

SEQ ID NO: 402467 - DNA, 75 bp, synthetic construct
  source 1..75: mol_type = other DNA
ccaatgcggaattacttgccggacagctcatcctgtcatcgcgcgccattggcgggctggatgtattccttgcgc

SEQ ID NO: 402468 - DNA, 75 bp, synthetic construct
  source 1..75: mol_type = other DNA
atttactggcagaaaggttcaatgcgtcgcctgatgaaagacgagccggaatacaaccgcatcgccacctaccag

SEQ ID NO: 402469 - DNA, 75 bp, synthetic construct
  source 1..75: mol_type = other DNA
ttgcaggatcaggacacccgctaccaggggctggtggcgcaaatcgaactgctgaagcaggcggctgatacgccg

SEQ ID NO: 402470 - DNA, 75 bp, synthetic construct
  source 1..75: mol_type = other DNA
ttaattggaattaattactacacatatcatggatatgaatcaggaaaatcaaaaatgcctatggaagcaggtatg

SEQ ID NO: 402471 - DNA, 75 bp, synthetic construct
  source 1..75: mol_type = other DNA
ttaacgtgatcggtgtgaccgaccagaaaggcgaaaaagtcctcatggacaccaccgggccgattgcgcgcacaa

SEQ ID NO: 402472 - DNA, 75 bp, synthetic construct
  source 1..75: mol_type = other DNA
ggttaacgacattcgctcttccatactggatgagtggcacaaggacgccccggatctggttgttgtcatgggccg

SEQ ID NO: 402473 - DNA, 75 bp, synthetic construct
  source 1..75: mol_type = other DNA
ttatccccggagggggacacatattcacccacacgcatggccgcacgaccaataatgttattcagttctggctga

SEQ ID NO: 402474 - DNA, 75 bp, synthetic construct
  source 1..75: mol_type = other DNA
atcaccattgattaccatgaccggctactcctgtcagcagaaagtgcggaagcatttctgaaaaatatcacagaa

SEQ ID NO: 402475 - DNA, 75 bp, synthetic construct
  source 1..75: mol_type = other DNA
aacgatgcgtgggtggtggaagacttcggcaagtgcgcccttatcacggggctgaaactggctgatgaaagccat

SEQ ID NO: 402476 - DNA, 75 bp, synthetic construct
  source 1..75: mol_type = other DNA
accttgcgccatttttcccggctcagtcaatgctcatcacctcattcagcaacctgtcggtttactggcagaagg

SEQ ID NO: 402477 - DNA, 75 bp, synthetic construct
  source 1..75: mol_type = other DNA
ggaatacaaccgtatcgcgacttaccagtccatgaatgactgctacgtggtggaagactacggaaaatgcgcgct

SEQ ID NO: 402478 - DNA, 75 bp, synthetic construct
  source 1..75: mol_type = other DNA
aggggctggtggcgcaaatcgaactgctgaagcaggcggctgatacgccggaaattcaacagttgcaacagcagg

SEQ ID NO: 402479 - DNA, 75 bp, synthetic construct
  source 1..75: mol_type = other DNA
tgcgccatacattcgccagtcattttatgatgaacggtggaaacatactcgttttgaaagatattcttgggcatt

SEQ ID NO: 402480 - DNA, 75 bp, synthetic construct
  source 1..75: mol_type = other DNA
gagaagcaataaatcttacccgctcacaggtgaccaaataccgaattacctttgtaagaacgaaggggaagaaaa

SEQ ID NO: 402481 - DNA, 75 bp, synthetic construct
  source 1..75: mol_type = other DNA
gctttatgaagagatcatggcgctcgatgggttcaatttcttcacagactgctattttcaatttttatccgtgat

SEQ ID NO: 402482 - DNA, 75 bp, synthetic construct
  source 1..75: mol_type = other DNA
aacgtgcaggagtgatggtggttggtgatgtgatgctggatcgttactggtacggtcccaccagtcgtatctcgc

SEQ ID NO: 402483 - DNA, 75 bp, synthetic construct
  source 1..75: mol_type = other DNA
gaaggtgttgatccgcagccgctgcacgagcggattaatcaggcgctgagttcgattggcgcgctggtgctttct

SEQ ID NO: 402484 - DNA, 75 bp, synthetic construct
  source 1..75: mol_type = other DNA
ctcgctgacccaaagcgtttgatggcaaaattaaaaattatttgtaccggtctcggcaatcctattgcctcggaa

SEQ ID NO: 402485 - DNA, 75 bp, synthetic construct
  source 1..75: mol_type = other DNA
attacctatacaaagacaaagggtaaaaaaaaccgcaccgtaccgatatctcaggatctgtacaacgagctaccc

SEQ ID NO: 402486 - DNA, 75 bp, synthetic construct
  source 1..75: mol_type = other DNA
atgtcgcccgttaagccccgcacggtaaatcttgaacagcgcaacctatcatctgtttttggtacactgaaaaag

SEQ ID NO: 402487 - DNA, 75 bp, synthetic construct
  source 1..75: mol_type = other DNA
agaagccgtgctgaaaaccattccgttgcaggatcaggacacccgctatcagggactggtggcgcaaatcgaact

SEQ ID NO: 402488 - DNA, 75 bp, synthetic construct
  source 1..75: mol_type = other DNA
agtatgcgcactttgctcctgaccatcttgaacaagctgtcaccttgaatccgttgtcactgtgtattggcgaca

SEQ ID NO: 402489 - DNA, 75 bp, synthetic construct
  source 1..75: mol_type = other DNA
tcggcaattcaataccaaaggtgaggccgaggcattcgaagcatttacgaaaagcgagagtgaagataagccgtg

SEQ ID NO: 402490 - DNA, 75 bp, synthetic construct
  source 1..75: mol_type = other DNA
attgacacggcctcaactctctccctgcaaactgactttcacaaaaaccaaaggtaagaaaaatcgcaccgttcc

SEQ ID NO: 402491 - DNA, 75 bp, synthetic construct
  source 1..75: mol_type = other DNA
atgcggatgctggatggaagaagtcacagacaaatttgcgaaatgttcagccgggcacaacgggatccgttctgg

SEQ ID NO: 402492 - DNA, 75 bp, synthetic construct
  source 1..75: mol_type = other DNA
ggtattaggtgatgattcctcaccaactgataagctggtcgtcagcggcagtgccaccggcacgacctatgtcaa

SEQ ID NO: 402493 - DNA, 75 bp, synthetic construct
  source 1..75: mol_type = other DNA
gatgaagattggtttaaacgaagccattgtgttgcagcaactgcattactggttgagggataccagttccggcat

SEQ ID NO: 402494 - DNA, 75 bp, synthetic construct
  source 1..75: mol_type = other DNA
ggctttttccaggtgatgttgccagatggctcatcagcctatacccgtgacggctctttccaggtggatcagaac

SEQ ID NO: 402495 - DNA, 75 bp, synthetic construct
  source 1..75: mol_type = other DNA
caatatggacgtcattgccaacaacctggcaaacgtcagtaccaacggttttaagcgtcagcgcgcggtgtttga

SEQ ID NO: 402496 - DNA, 75 bp, synthetic construct
  source 1..75: mol_type = other DNA
gggcagctggtgacggctggtggttttcaggtgcagccagcgatcaccattccggcgaatgcgttaagtatcacc

SEQ ID NO: 402497 - DNA, 75 bp, synthetic construct
  source 1..75: mol_type = other DNA
atggtgggtacagtggaagcggaagcaccgcaggaacagccgcagcgggccacagcggagcgggaagaaatgcag

SEQ ID NO: 402498 - DNA, 75 bp, synthetic construct
  source 1..75: mol_type = other DNA
cagcgtgattgtgataacggtggctgatgtgatgctggcgttacacaacagctacgacaacaaaaactcaggcga

SEQ ID NO: 402499 - DNA, 75 bp, synthetic construct
  source 1..75: mol_type = other DNA
aaatggcacgttccattggttcaaaacgactcaatgtcatcgggtcaaaatggcctgatgatcttacagagaata

SEQ ID NO: 402500 - DNA, 75 bp, synthetic construct
  source 1..75: mol_type = other DNA
aataagtcgaagcgcgacatgaccaatttctacacgattaattacgagagtgagcttttagatgatggcaaagtg

SEQ ID NO: 402501 - DNA, 75 bp, synthetic construct
  source 1..75: mol_type = other DNA
cggccaataacctgtttgctacccgtctgcacgaccgtctgggtgagacgcagtacacggatgttctgaccggtg

SEQ ID NO: 402502 - DNA, 75 bp, synthetic construct
  source 1..75: mol_type = other DNA
atgtttatcgtggaatcgtatgctgtcgccataataatgtgttttattaccatgatttgctggggttcatgggcg

SEQ ID NO: 402503 - DNA, 75 bp, synthetic construct
  source 1..75: mol_type = other DNA
actacctttatgaacgacaccgggctggagagtattggtgaaaacctctacaccgaaacgcaatcctccggtgca

SEQ ID NO: 402504 - DNA, 75 bp, synthetic construct
  source 1..75: mol_type = other DNA
acaacctgtgcaaacgctatcaggaaggcagtgtgcaaaccgatgtgctgcacaatgtcagtttcagcgtgggcg

SEQ ID NO: 402505 - DNA, 75 bp, synthetic construct
  source 1..75: mol_type = other DNA
aaacgtatgagccgccagttagaaatgcgtgatggacgtctgacggcggaactgagcctgatgggggcggagtaa

SEQ ID NO: 402506 - DNA, 75 bp, synthetic construct
  source 1..75: mol_type = other DNA
cgccagcgtgtggcgattgcccgtgcgctggtcaataacccgcgtctggtactggcggatgaacctaccggtaac

SEQ ID NO: 402507 - DNA, 75 bp, synthetic construct
  source 1..75: mol_type = other DNA
gaaccttggcatcctgtaccagatgcaggacagcgacgctgaaatatcagggctgactgaattaagagagcaaca

SEQ ID NO: 402508 - DNA, 75 bp, synthetic construct
  source 1..75: mol_type = other DNA
gaaaaattgtacctgagacaggtcctgccaccaacaatatcgttgattatttgatgaacgaacatggtgttatcc

SEQ ID NO: 402509 - DNA, 75 bp, synthetic construct
  source 1..75: mol_type = other DNA
gaaaactattcagcaattattacaattcgagttattaagcagcgcactaaaacgaatgcctctgtcaccaggaat

SEQ ID NO: 402510 - DNA, 75 bp, synthetic construct
  source 1..75: mol_type = other DNA
cggctctttccaggtggatcagaacgggcagctggtggttttcaggtgcagccagcgatcaccattccggcgaat

SEQ ID NO: 402511 - DNA, 75 bp, synthetic construct
  source 1..75: mol_type = other DNA
ctgcctacgcgcacgctggtaacggcgtcaacaccgggtgcagacatgacgcccggcaagatggattacacctcg

SEQ ID NO: 402512 - DNA, 75 bp, synthetic construct
  source 1..75: mol_type = other DNA
aaaccaccttaccctccgggttacaaatcggcacgggggtgcgtccggttgctactgagcgcttacacagtcagg

SEQ ID NO: 402513 - DNA, 75 bp, synthetic construct
  source 1..75: mol_type = other DNA
aagcgcgatatgaccaatttctacacgatcaactacgggagcgagcttttagatggtggcaaattgagcgaatcc

SEQ ID NO: 402514 - DNA, 75 bp, synthetic construct
  source 1..75: mol_type = other DNA
agcaataccaacaaaaagctggatggaattatgagtcttctttttgctgaacgcccactggttataaacacgcag

SEQ ID NO: 402515 - DNA, 75 bp, synthetic construct
  source 1..75: mol_type = other DNA
gatgaaaattggtctgaacgaagccattgtgttgcagcagttgcattactggttgagagataccggttccggcat

SEQ ID NO: 402516 - DNA, 75 bp, synthetic construct
  source 1..75: mol_type = other DNA
tacggcccggcgtcgatcacctttaccggactggaagtggcaatggaagctaccctcaagacttactcgaaagtg

SEQ ID NO: 402517 - DNA, 75 bp, synthetic construct
  source 1..75: mol_type = other DNA
ccgcggcattaataaacgaggtaaccagcagcacagacaacctgataaaactgtttcgtattacctcattacagt

SEQ ID NO: 402518 - DNA, 75 bp, synthetic construct
  source 1..75: mol_type = other DNA
atgaagttgtaccagccgctgcaggagcgattcctcgccagcgtagactgcatcgtcgcctcgtcgcccaactac

SEQ ID NO: 402519 - DNA, 75 bp, synthetic construct
  source 1..75: mol_type = other DNA
cggctttgccaaatatatgcgtgatgccttgcccaatgcgagctatcttggctttaccggaacccccatagaaaa

SEQ ID NO: 402520 - DNA, 75 bp, synthetic construct
  source 1..75: mol_type = other DNA
tcttctgccactcagctacttcgtcagacaccaaaacaggccaacaaccgggaagaactcaaagaatatttgcgt

SEQ ID NO: 402521 - DNA, 75 bp, synthetic construct
  source 1..75: mol_type = other DNA
tacaggggttgcttaatcctgtaacgctgttggatgtgatccgccactttatcgtgtttgaagccagcaaacatg

SEQ ID NO: 402522 - DNA, 75 bp, synthetic construct
  source 1..75: mol_type = other DNA
aaaagagcttcgtcgtgatattgaaaaatataaaaatgtgatctccgaagataaaataaacgactttaaaaatca

SEQ ID NO: 402523 - DNA, 75 bp, synthetic construct
  source 1..75: mol_type = other DNA
cagaaggccgacacaacacgaatgatggtgctttttttcggcagttctgggatatgggagctaaagataaagcga

SEQ ID NO: 402524 - DNA, 75 bp, synthetic construct
  source 1..75: mol_type = other DNA
ggttttcgtgcaccgaatacgcgggagctgatcagcggttttgccgattatgttctgcaacgtgagctgggcggt

SEQ ID NO: 402525 - DNA, 75 bp, synthetic construct
  source 1..75: mol_type = other DNA
gctgatttaggcgatcttacgacgctttcagccggttacgaatatcagcgcattgatgttaatagcccaacctgg

SEQ ID NO: 402526 - DNA, 75 bp, synthetic construct
  source 1..75: mol_type = other DNA
gttacgaaaaagtacctcttatttcgaatgctgttgctagtggcttgactggggctgttaccttagttgtagcat

SEQ ID NO: 402527 - DNA, 75 bp, synthetic construct
  source 1..75: mol_type = other DNA
gacgaactgacacttactcagaaagaacgttctaaatgggcgagaatcgaagggctgattggcagttcaaaacgt

SEQ ID NO: 402528 - DNA, 75 bp, synthetic construct
  source 1..75: mol_type = other DNA
atgaatacagtcgatttatttcgtgccatgttaccgccggtcagctatgacccgaacgggaaatatatttccgca

SEQ ID NO: 402529 - DNA, 75 bp, synthetic construct
  source 1..75: mol_type = other DNA
cccgaacgggaaatatatttcagcagaactgaacgcagaagcagccattatggatgaagtaaaagcgtcagctgc

SEQ ID NO: 402530 - DNA, 75 bp, synthetic construct
  source 1..75: mol_type = other DNA
actcaatttgaatattaccgtgattcacaggggctatttccactgctggcaaacgttgccagagtagacccgcaa

SEQ ID NO: 402531 - DNA, 75 bp, synthetic construct
  source 1..75: mol_type = other DNA
gatgatggcgatggcgtcaccgacagctatagctatcagggcaaacgcggtgcaggcatcggagaacctcggcgg

SEQ ID NO: 402532 - DNA, 75 bp, synthetic construct
  source 1..75: mol_type = other DNA
tctatttgctatttctattatttattaaatactggcgaatacgctctcatgcacaacaattattaacacaggcca

SEQ ID NO: 402533 - DNA, 75 bp, synthetic construct
  source 1..75: mol_type = other DNA
tattatctggtaaaaaatatctgctattgcagggaccgatgggacctttcttcaatgatgttgccgagtggttag

SEQ ID NO: 402534 - DNA, 75 bp, synthetic construct
  source 1..75: mol_type = other DNA
tttacaaacagcaaataacagcagtaccccattagtagttaaccataatgggctgcactttgccgttatcacaga

SEQ ID NO: 402535 - DNA, 75 bp, synthetic construct
  source 1..75: mol_type = other DNA
tcttattttatttgttaacggtctgccgttgatcgttatcgaactaaaaaacgccgctgatgaaaatgccacggt

SEQ ID NO: 402536 - DNA, 75 bp, synthetic construct
  source 1..75: mol_type = other DNA
accgaatttgaatattaccgcgattcccgggggctattaccactgctggcaaacgtcgccagagtcgatccgctg

SEQ ID NO: 402537 - DNA, 75 bp, synthetic construct
  source 1..75: mol_type = other DNA
tcctgctgaaggtgcgacataccagcaacgccagcagcgtgtactggctaaactggctgaagtcggtggtctcag

SEQ ID NO: 402538 - DNA, 75 bp, synthetic construct
  source 1..75: mol_type = other DNA
atttccgctgcgtatctttttgggtaatgactccaacttactgatagtgttttatgttcagataatgcccgatga

SEQ ID NO: 402539 - DNA, 75 bp, synthetic construct
  source 1..75: mol_type = other DNA
actggcgattaaagaagcctctcgcggtaatgactccaacttattgatagtgttttatgttcagataatgcccga

SEQ ID NO: 402540 - DNA, 75 bp, synthetic construct
  source 1..75: mol_type = other DNA
aggtgccgggcacaatgaaaattatttcagcagaaatacctgtgcctaaagaagatgaagttttgattaaagtgg

SEQ ID NO: 402541 - DNA, 75 bp, synthetic construct
  source 1..75: mol_type = other DNA
agtaatgaggaagtaatcaccgccggtaatgactccaacttattgatagtgttttatgttcagataatgcccgat

SEQ ID NO: 402542 - DNA, 75 bp, synthetic construct
  source 1..75: mol_type = other DNA
gttgggactgggcgtctggcaagcaagtaatgaggaagtaatcaccgccattcaaaaagcgttagatagtgggtt

SEQ ID NO: 402543 - DNA, 75 bp, synthetic construct
  source 1..75: mol_type = other DNA
ttcggctcctgccgcgaaagatcgctggcgtgccgataaccgggccatttctgtcactggttttcgcgacaagct

SEQ ID NO: 402544 - DNA, 75 bp, synthetic construct
  source 1..75: mol_type = other DNA
cgctggcgcgccgataaccgggccatttctgttaccggttttcgcgacaagctggatcaactgtcgcaaaaataa

SEQ ID NO: 402545 - DNA, 75 bp, synthetic construct
  source 1..75: mol_type = other DNA
aacccttcaagctggacgatgtccgcgaggcactggctgaagtcggcattaccggcatgacggtcaccgaggtga

SEQ ID NO: 402546 - DNA, 75 bp, synthetic construct
  source 1..75: mol_type = other DNA
gcatggaagtcaatgcgggtaatgactccaacttattgatagtgttttatgttcagataatgcccgatgactttg

SEQ ID NO: 402547 - DNA, 75 bp, synthetic construct
  source 1..75: mol_type = other DNA
tgggtgcaattagtctgacatctgcatttgtgtttgcggataaaccggacgatcataaatcgaccaataatgagg

SEQ ID NO: 402548 - DNA, 75 bp, synthetic construct
  source 1..75: mol_type = other DNA
gccgtgggacttcggattgattgtgctacgtaatcccccttctggcattacaccgttgccgttatttgagggaga

SEQ ID NO: 402549 - DNA, 75 bp, synthetic construct
  source 1..75: mol_type = other DNA
tggttttttcgatagtaaagaaacgggtaatgactccaacttattgatagtgttttatgttcagataatgcccga

SEQ ID NO: 402550 - DNA, 75 bp, synthetic construct
  source 1..75: mol_type = other DNA
tgatggtgatgttatcagttatgaagtgggagcaatagaagatggtaatataagaatgcaacaaggtataagaca

SEQ ID NO: 402551 - DNA, 75 bp, synthetic construct
  source 1..75: mol_type = other DNA
gggatcttcacatacattcaccattaacgcatgtcaataacaactatcaaccaaaggatattgatttatatgttg

SEQ ID NO: 402552 - DNA, 75 bp, synthetic construct
  source 1..75: mol_type = other DNA
tccttgataataaagagcgtaagtattttgaaagccttaaagaagagtacgctgacctttataatttattacgct

SEQ ID NO: 402553 - DNA, 75 bp, synthetic construct
  source 1..75: mol_type = other DNA
aagtggattttggtatcaccgaagggttgcgcagccgttaccgccagaagcaacttgtggccacgggtaagagcc

SEQ ID NO: 402554 - DNA, 75 bp, synthetic construct
  source 1..75: mol_type = other DNA
aactgtcttctggtaaaaaaaataatgttccatctcctgcaaagggggttatacaaataaaaaaatcagcatcgc

SEQ ID NO: 402555 - DNA, 75 bp, synthetic construct
  source 1..75: mol_type = other DNA
gatcaaaaaaaagtaagccgtaaagttacagtaaaggatgctattggtcagttgccaaaaataggtgcaggggag

SEQ ID NO: 402556 - DNA, 75 bp, synthetic construct
  source 1..75: mol_type = other DNA
ctgcgtaacggcctgcccggcgggtattgctcacacatacatggctgcggagtatctggaaaaagccggacgcaa

SEQ ID NO: 402557 - DNA, 75 bp, synthetic construct
  source 1..75: mol_type = other DNA
ggcgatcccgatggcgattgaagatccgctgcgggttattggttcgtttgtgctgggatctatggtaacgggcgc

SEQ ID NO: 402558 - DNA, 75 bp, synthetic construct
  source 1..75: mol_type = other DNA
acctacgccaagctgtcctggctgcaagcctggcacatccgcgacgaaacctattcggcggccggttccggctga

SEQ ID NO: 402559 - DNA, 75 bp, synthetic construct
  source 1..75: mol_type = other DNA
cttccggctccaccggtaccccgaaaggagtgatgatcgaccaccgtgcggccatgaacaccactggaagacatc

SEQ ID NO: 402560 - DNA, 75 bp, synthetic construct
  source 1..75: mol_type = other DNA
atcgaagagggagtatccggtatttactacttcgacccgcgacagagctgtcttatgccggtagcaccagaagtc

SEQ ID NO: 402561 - DNA, 75 bp, synthetic construct
  source 1..75: mol_type = other DNA
gggaacctgtcgcctggatcaataactcgcttaccgcctggctgaacggtctgtcaggaagtaacgcgctgttgc

SEQ ID NO: 402562 - DNA, 75 bp, synthetic construct
  source 1..75: mol_type = other DNA
aacagcgaaaacgaagatacctccggtaatgactccaacttattgatagtgttttatgttcagataatgcccgat

SEQ ID NO: 402563 - DNA, 75 bp, synthetic construct
  source 1..75: mol_type = other DNA
ataggagtagcatccctgtatgccacatccagtattaaacgtgagcggctattttttgaagccgaaacagtcgag

SEQ ID NO: 402564 - DNA, 75 bp, synthetic construct
  source 1..75: mol_type = other DNA
atgggccagaacaaagtgggcctgagcttctcgctgccgatttatcagggcggaatggttaactcgcaggggaaa

SEQ ID NO: 402565 - DNA, 75 bp, synthetic construct
  source 1..75: mol_type = other DNA
agccaggacctggcgcgcgagcaaattcgccaggcgcaggatggtcacttaccgactctggatttaacggcttct

SEQ ID NO: 402566 - DNA, 75 bp, synthetic construct
  source 1..75: mol_type = other DNA
ctttgcactctgtgcatcacccgaaagaaagctcatctggggccaaccatgcccgggtgttcgactggaagcagc

SEQ ID NO: 402567 - DNA, 75 bp, synthetic construct
  source 1..75: mol_type = other DNA
agcctttaatgccatgattcggttctgccgtgaggttagacgccgggtcagttatccaaacagaacgaggaccag

SEQ ID NO: 402568 - DNA, 75 bp, synthetic construct
  source 1..75: mol_type = other DNA
ccacggtacggcatgtgattgaggttatggcgcgtcatggacgtgatgaacagaagcagttactggttccgggga

SEQ ID NO: 402569 - DNA, 75 bp, synthetic construct
  source 1..75: mol_type = other DNA
aatgcaaagatccccgtaaatgtcggttttatgccgaatatctgaatcacaaatactccaatgaattccctcagt

SEQ ID NO: 402570 - DNA, 75 bp, synthetic construct
  source 1..75: mol_type = other DNA
ctggtaatgttattggcaaaggggggaacgctgtagtatatgaagatgctgaggatgcaacaaaagtcctgaaga

SEQ ID NO: 402571 - DNA, 75 bp, synthetic construct
  source 1..75: mol_type = other DNA
tatatcatcttataatgtttccgaccgttcatggagtgaaagtcaaataatgcaatcttatcatggcggaaagca

SEQ ID NO: 402572 - DNA, 75 bp, synthetic construct
  source 1..75: mol_type = other DNA
actcggtcggtacgcgtaccattgttgatgtgttggatgcaaccaccacgctgtacaacgctaagcaagagctgg

SEQ ID NO: 402573 - DNA, 75 bp, synthetic construct
  source 1..75: mol_type = other DNA
acaagccgtagtttccgctcaaagctcattagacgcgatggaagcgggctactcggtcggtacgcgtaccattgt

SEQ ID NO: 402574 - DNA, 75 bp, synthetic construct
  source 1..75: mol_type = other DNA
actcggtcggtacgcgtaccattgttgatgtattggacgccaccacgacgctgtacaacgccaagcaagaactgg

SEQ ID NO: 402575 - DNA, 75 bp, synthetic construct
  source 1..75: mol_type = other DNA
tcacggttgccggtaaagaggcgaccaccctgatctcccgctgccagaaagcagtggatgaggaccgcaaggtac

SEQ ID NO: 402576 - DNA, 75 bp, synthetic construct
  source 1..75: mol_type = other DNA
agtcattaggccgtaacgctgtgaatgttgtattcaacggcggggatcgtttttactgccgccatcgacattatc

SEQ ID NO: 402577 - DNA, 75 bp, synthetic construct
  source 1..75: mol_type = other DNA
tatgaaactgtttaagaagtttcgggggtatttattggtgaagacgcaggttaatgcggtttattatgggggctt

SEQ ID NO: 402578 - DNA, 75 bp, synthetic construct
  source 1..75: mol_type = other DNA
tatgaaactgtttaagaagtttcgagggtatttattggttaagacgcaggttaatgcggtttattatggggagat

SEQ ID NO: 402579 - DNA, 75 bp, synthetic construct
  source 1..75: mol_type = other DNA
gcgtaatttcaaagaaggtagcgacatcgaagcaggtgtctctctctatcagattgatcctgcgacctatcaggc

SEQ ID NO: 402580 - DNA, 75 bp, synthetic construct
  source 1..75: mol_type = other DNA
gtgacttctccaatcagcggccgtattggtaaatcggccgtgacggaaggcgcactggtgcaaaatggtcaggca

SEQ ID NO: 402581 - DNA, 75 bp, synthetic construct
  source 1..75: mol_type = other DNA
taaggaatatggcttaggtgagcgagtcatatacgtgcacgatctcccgatgccggaattattacgccacgcaaa

SEQ ID NO: 402582 - DNA, 75 bp, synthetic construct
  source 1..75: mol_type = other DNA
gtcatttatgtgcacgatctcccgatgccggaattattacgccatgcaaaagcggtggtgacaattaacagtacg

SEQ ID NO: 402583 - DNA, 75 bp, synthetic construct
  source 1..75: mol_type = other DNA
tacgtccgttttgatgtcacggttgccggtaaggaggcgactgccctgattgcccgctgtcagaaggcggtggat

SEQ ID NO: 402584 - DNA, 75 bp, synthetic construct
  source 1..75: mol_type = other DNA
aatactttaatctgaccctcaaaggtctggggtatctcagtaatgtacgtcaggtgaatcaccagaacggcacgt

SEQ ID NO: 402585 - DNA, 75 bp, synthetic construct
  source 1..75: mol_type = other DNA
ccgatggatcgtggtcacagactctatcgaccattaattaagcggttgagtaaggaatatggcttaggtgagcga

SEQ ID NO: 402586 - DNA, 75 bp, synthetic construct
  source 1..75: mol_type = other DNA
aggtaacacagcgtaaggtattaccgaggttaatgaacgagttggaccagcgttattatcttgccgttttgcagg

SEQ ID NO: 402587 - DNA, 75 bp, synthetic construct
  source 1..75: mol_type = other DNA
atgcaaggtaatgcactaaccgttttattatccggtaaaaaatatctgctattgcaggggccgatgggacctttt

SEQ ID NO: 402588 - DNA, 75 bp, synthetic construct
  source 1..75: mol_type = other DNA
tttcaacttagaagcggtccgtgcggcattgttggccgataaacctgtttcgcaaagcgatctgaataagattga

SEQ ID NO: 402589 - DNA, 75 bp, synthetic construct
  source 1..75: mol_type = other DNA
cgatcggcatcgctggcgtcgcgatttgttatttaggattatctggttacgtgtggtaccacgataataaacgca

SEQ ID NO: 402590 - DNA, 75 bp, synthetic construct
  source 1..75: mol_type = other DNA
gaatccgtgaccattgaccttgcttatgaaggttccggtagtggcgactggcgaacggatgcatttattgttggt

SEQ ID NO: 402591 - DNA, 75 bp, synthetic construct
  source 1..75: mol_type = other DNA
cagcaacacgtctctggcgtggggggctggcgtgcagtttaacccgaccgagtccgtggccattgatgtcgctta

SEQ ID NO: 402592 - DNA, 75 bp, synthetic construct
  source 1..75: mol_type = other DNA
agagcgggcggaaatactcgcctggattgcaaaacaacgcgcagaatattacgccagtaatgatactgctccgga

SEQ ID NO: 402593 - DNA, 75 bp, synthetic construct
  source 1..75: mol_type = other DNA
actgggcgggtaaggtgagtgatgaagagcgtgcggaaattctcgcgtgggttgcgaagcagcgcgcagaatatt

SEQ ID NO: 402594 - DNA, 75 bp, synthetic construct
  source 1..75: mol_type = other DNA
attaacgtgaaataccgttatgagtttacggacactctgggaatggtgacgtcattcagctatgcaggagacagg

SEQ ID NO: 402595 - DNA, 75 bp, synthetic construct
  source 1..75: mol_type = other DNA
ttcaagtactgatgctccgcaacaggttaaaattattgaggatttaatcgcccgtaaggttaatgcaattacaat

SEQ ID NO: 402596 - DNA, 75 bp, synthetic construct
  source 1..75: mol_type = other DNA
aaggccgacgtagatatagataagcgaattatccgtttccataaggtactgctggtcaacaaagacaatatcgac

SEQ ID NO: 402597 - DNA, 75 bp, synthetic construct
  source 1..75: mol_type = other DNA
gttatgagtttacggacgcgctggggctgattacgtccttcagttatgccaatgctgaggatgagcaaaaaacgc

SEQ ID NO: 402598 - DNA, 75 bp, synthetic construct
  source 1..75: mol_type = other DNA
acccattacagcgatacccgctggcatgaagattccgttcgtaaccgctggttcagcgtaatggcggggccgtct

SEQ ID NO: 402599 - DNA, 75 bp, synthetic construct
  source 1..75: mol_type = other DNA
ccgtcgggaacaccttgcgtttcctgatggcatgccggatcacactgttcagcgactcgatggcgttcgttgtgt

SEQ ID NO: 402600 - DNA, 75 bp, synthetic construct
  source 1..75: mol_type = other DNA
cgaatccgtggccattgatattgcttatgaaggttccggcagtggcgactggcgcactgacggtttcatcgttgg

SEQ ID NO: 402601 - DNA, 75 bp, synthetic construct
  source 1..75: mol_type = other DNA
tgtccgcagccatctgtctggccgtatccggcgcgcctgcatgggcgtctgagcagcaggccacgctgagcgcgg

SEQ ID NO: 402602 - DNA, 75 bp, synthetic construct
  source 1..75: mol_type = other DNA
attccgtgcgtaaccgctggttcagcgtgatggcggggccgtctgtgcgcgtgaatgaatggttcagcgcgtatg

SEQ ID NO: 402603 - DNA, 75 bp, synthetic construct
  source 1..75: mol_type = other DNA
tctaaatggttgtcctgtctgcaataaaagagaatgtgtttgtgtcagttattcagggaagattagtaaaactga

SEQ ID NO: 402604 - DNA, 75 bp, synthetic construct
  source 1..75: mol_type = other DNA
tgtccgcagtagtctgtctgttcgctgctggtacgccagcgtgggcgtcagaacatcagtccacactaagcgccg

SEQ ID NO: 402605 - DNA, 75 bp, synthetic construct
  source 1..75: mol_type = other DNA
gcggggccctctgtgcgcgtgaatgaatggttcagcgcgtatgcgatggcgggtgtggcttacagccgtgtttcg

SEQ ID NO: 402606 - DNA, 75 bp, synthetic construct
  source 1..75: mol_type = other DNA
atgcgtaaactttatgcagccattttgtccgcagccatttgtctggccgtatccggtgcgcctgcatgggcgtct

SEQ ID NO: 402607 - DNA, 75 bp, synthetic construct
  source 1..75: mol_type = other DNA
accgaatccgtggccattgatattgcttatgaaggctccggcagtggcgactggcgaacggatgcatttattgtt

SEQ ID NO: 402608 - DNA, 75 bp, synthetic construct
  source 1..75: mol_type = other DNA
caaaaaacgcactacagcgatacccgctggcatgaagattccgtgcgtaaccgctggttcagcgtgatggcgggg

SEQ ID NO: 402609 - DNA, 75 bp, synthetic construct
  source 1..75: mol_type = other DNA
cagtgcaggcgtgcagattaacccgacagaaaatatcgtggtcgacctggcttatgaagcctcaggacgtggtga

SEQ ID NO: 402610 - DNA, 75 bp, synthetic construct
  source 1..75: mol_type = other DNA
cgatgtgctgaccggaagtgatgacggtcgccacagcaacacctctctggcgtggggggctggcgtgcagtttaa

SEQ ID NO: 402611 - DNA, 75 bp, synthetic construct
  source 1..75: mol_type = other DNA
cttgcttatgaaggctccggcagtggcgactggcgaacggatgcatttattgttggtatcggataccgtttctga

SEQ ID NO: 402612 - DNA, 75 bp, synthetic construct
  source 1..75: mol_type = other DNA
aaataccagaaagagcattacccggatatgcatgaagttacccgccgcatgcggttgccgagagtgtggatgact

SEQ ID NO: 402613 - DNA, 75 bp, synthetic construct
  source 1..75: mol_type = other DNA
tgaaaaaagcagctgcgatggctaataaggagttaggtacaattcctgctgatgttgcggatgctttaatctggg

SEQ ID NO: 402614 - DNA, 75 bp, synthetic construct
  source 1..75: mol_type = other DNA
cccgatcgaatccgtggccattgatattgcttatgaaggctccggcagtggcgactggcgaacggatgcatttat

SEQ ID NO: 402615 - DNA, 75 bp, synthetic construct
  source 1..75: mol_type = other DNA
ggaagtgatgacgatcgccacagcaacacgtctctggcgtggggagctggcgtgcagtttaacccgaccgaatcc

SEQ ID NO: 402616 - DNA, 75 bp, synthetic construct
  source 1..75: mol_type = other DNA
ggggctggcgtgcagtttaacccgaccgaatccgtggccattgatattgcttatgaaggctccggcagtggcgac

SEQ ID NO: 402617 - DNA, 75 bp, synthetic construct
  source 1..75: mol_type = other DNA
tgtcttacagccgtgtgtcgactttctccggagattatctgcaggtgaccgacaacaaggggaaaacgcacgatg

SEQ ID NO: 402618 - DNA, 75 bp, synthetic construct
  source 1..75: mol_type = other DNA
tggcttcaggggggagccggaacgtcaaccaatatgaactgcaacgaagtgatttgcaatcttgctgcagaaaaa

SEQ ID NO: 402619 - DNA, 75 bp, synthetic construct
  source 1..75: mol_type = other DNA
tcggtgggtggaatagccgtagaccatttagttatgattttgctggtggtggattagatctaggtggcacagcga

SEQ ID NO: 402620 - DNA, 75 bp, synthetic construct
  source 1..75: mol_type = other DNA
gaaaaggctgttatctgggctacagatgatggtattttacatatacgaaataatcatgggggttcatttagtcat

SEQ ID NO: 402621 - DNA, 75 bp, synthetic construct
  source 1..75: mol_type = other DNA
cgcagatcaaggacttatccgtggtgaagttgatggtggtgcatatgttgcatggagagaccgccctgctggttt

SEQ ID NO: 402622 - DNA, 75 bp, synthetic construct
  source 1..75: mol_type = other DNA
ttgaagactacgaagaaaatgcggtagataaggtaaataaactcaaagttaaaacctacgataaagttaaatctc

SEQ ID NO: 402623 - DNA, 75 bp, synthetic construct
  source 1..75: mol_type = other DNA
gctatttgctgtctaagaccgcaaactattttgatgatccaagtgcgcgtaaccttgattattttggtgcattcc

SEQ ID NO: 402624 - DNA, 75 bp, synthetic construct
  source 1..75: mol_type = other DNA
caaagttgacaataacaagtcttacactgattctgaactggcacgtttagaaagccgtattgatgcagccgatgg

SEQ ID NO: 402625 - DNA, 75 bp, synthetic construct
  source 1..75: mol_type = other DNA
cttgcttatgaaggttccggcagtggcgactggcgcactgacggtttcatcgtgggtgtcggttataaattctga

SEQ ID NO: 402626 - DNA, 75 bp, synthetic construct
  source 1..75: mol_type = other DNA
gcaaattactggcggcaaaactgggttatcgccttaaagcggcggtgtctaacgatgccagcaccgtcagcgtac

SEQ ID NO: 402627 - DNA, 75 bp, synthetic construct
  source 1..75: mol_type = other DNA
cgcgccagagcaacagcgtcgatctcgataaagcccgtctggtggtcagtgtcggccgcggcattggcagtaaag

SEQ ID NO: 402628 - DNA, 75 bp, synthetic construct
  source 1..75: mol_type = other DNA
catgtctggaaattaaacggcaaaccggacgatcggatgatcgaagattacgccggtgtcatggctgacactatt

SEQ ID NO: 402629 - DNA, 75 bp, synthetic construct
  source 1..75: mol_type = other DNA
cttacagccgtgtgtcgactttctccggggattatctccgcgtaactgacaacaaggggaaaacgcacgatgtgc

SEQ ID NO: 402630 - DNA, 75 bp, synthetic construct
  source 1..75: mol_type = other DNA
ccggaagtgatgacggtcgccacagcaacacgtctctggcgtggggagctggcgtgcagtttaacccgaccgaat

SEQ ID NO: 402631 - DNA, 75 bp, synthetic construct
  source 1..75: mol_type = other DNA
gaacatcagtccacactgagcgcggggtatcttcatgcccgtacgaacgctcccggcagcgataatctgaacggg

SEQ ID NO: 402632 - DNA, 75 bp, synthetic construct
  source 1..75: mol_type = other DNA
tcataaacgctcgccctatcgtgtcacgatgaattacgcttttggtcaggtcattgaaggctgtgccagcgatcg

SEQ ID NO: 402633 - DNA, 75 bp, synthetic construct
  source 1..75: mol_type = other DNA
atgcgcctggttcagctttctcgccattcaatagccttcccttccccggaaggcgcattacgtgagcctaacggc

SEQ ID NO: 402634 - DNA, 75 bp, synthetic construct
  source 1..75: mol_type = other DNA
ataagacacgtcagcatcgcatcagacattgatgtcggatgcggcgtaaacgccttatccgacctacaaaatcac

SEQ ID NO: 402635 - DNA, 75 bp, synthetic construct
  source 1..75: mol_type = other DNA
gaacatcagtccacgctgagcgcggggtatcttcatgtctcgacgaacgttcccggcagcgatgatctgaacggg

SEQ ID NO: 402636 - DNA, 75 bp, synthetic construct
  source 1..75: mol_type = other DNA
aacggcgcttctggtattctgtgaggaatttattggtcatggcggtaaacttatcgactgccaggtccttaacga

SEQ ID NO: 402637 - DNA, 75 bp, synthetic construct
  source 1..75: mol_type = other DNA
tatggcgtgaagaggaacttgtcggtggcatgtatggcgtggcgcagggaacactgttttgcggcgagtcgatgt

SEQ ID NO: 402638 - DNA, 75 bp, synthetic construct
  source 1..75: mol_type = other DNA
atgaatggttcagcgcgtatgcgatggcgggtatggcttacagccgtgtttcgactttctccggagattatatcc

SEQ ID NO: 402639 - DNA, 75 bp, synthetic construct
  source 1..75: mol_type = other DNA
cgtggggggctggcgtgcagtttaacccgaccgaatccgtaaccattgaccttgcttatgaaggttccggtagtg

SEQ ID NO: 402640 - DNA, 75 bp, synthetic construct
  source 1..75: mol_type = other DNA
atacccgctggcatgaagattccgttcgtaaccgctggttcagcgtgatggtggggccgtctgtgcgcgtgaatg

SEQ ID NO: 402641 - DNA, 75 bp, synthetic construct
  source 1..75: mol_type = other DNA
gcgtaaccgctggttcagcatgatggcggggccgtctgtacgcgtgaatgaatggttcagcgcgtatgcgatggc

SEQ ID NO: 402642 - DNA, 75 bp, synthetic construct
  source 1..75: mol_type = other DNA
cccgaccgaatccgtggccgttgatgtcgcttatgaaggctccggcagcggtgactggcgcactgacggtttcat

SEQ ID NO: 402643 - DNA, 75 bp, synthetic construct
  source 1..75: mol_type = other DNA
aatggttcagcgcgtatgcgatggcgggtatggcttacagccgtgtgtcgactttctccggggattatctccgcg

SEQ ID NO: 402644 - DNA, 75 bp, synthetic construct
  source 1..75: mol_type = other DNA
acacactgggaatggtgacgtcattcagctatgcaggagacaagaatcgccagctaacccattacagcgataccc

SEQ ID NO: 402645 - DNA, 75 bp, synthetic construct
  source 1..75: mol_type = other DNA
ggtatattcagtcccatactgatatgcccggcaacgatgacctgaagggcattaacgtgaaataccgttatgaat

SEQ ID NO: 402646 - DNA, 75 bp, synthetic construct
  source 1..75: mol_type = other DNA
cccgaccgaatccgtggccattgatattgtttatgaaggctccggcagtggcgactggcgcactgacggtttcat

SEQ ID NO: 402647 - DNA, 75 bp, synthetic construct
  source 1..75: mol_type = other DNA
tcccggcagtgatgatctgaacgggattaacgtgaaataccgttatgagtttacggacacactggggctggttac

SEQ ID NO: 402648 - DNA, 75 bp, synthetic construct
  source 1..75: mol_type = other DNA
cccgaccgaatccgtggtcattgatattgcttatgaaggctccggcagtggcgactggcgcactgacggtttcat

SEQ ID NO: 402649 - DNA, 75 bp, synthetic construct
  source 1..75: mol_type = other DNA
aatggttcagcgcgtatgcgatggcgggtgtagcattgcgatcagtcggtgccggacggttttggcggcacggag

SEQ ID NO: 402650 - DNA, 75 bp, synthetic construct
  source 1..75: mol_type = other DNA
gtcattcagttatgcaggagacaagaatcgccagattacccgttacagcgatacccgctggcatgaagattcagt

SEQ ID NO: 402651 - DNA, 75 bp, synthetic construct
  source 1..75: mol_type = other DNA
tgaccggaagtgatgacggtcgccacagcgacacctctctggcgtggggagctggcgtgcagtttaacccgaccg

SEQ ID NO: 402652 - DNA, 75 bp, synthetic construct
  source 1..75: mol_type = other DNA
ccgaatgcgtggccattgatattgcttatgaagggtccggcagtggggactggcgcactgacggtttcatcgtgg

SEQ ID NO: 402653 - DNA, 75 bp, synthetic construct
  source 1..75: mol_type = other DNA
ccgaatccgtggccattgatattgcttatgaagggtccggtagtggtgactggcgcactgacggtttcatcgtgg

SEQ ID NO: 402654 - DNA, 75 bp, synthetic construct
  source 1..75: mol_type = other DNA
ccgtggccattgatattgcttatgaaggttctggcagtggtgactggcgcactgacgggttcatcgtgggtgttg

SEQ ID NO: 402655 - DNA, 75 bp, synthetic construct
  source 1..75: mol_type = other DNA
gatgaacaaaaaacgcattacagcgatacccgctggcatgaagattccgtgcgtaaccgctggttcagcgtaatg

SEQ ID NO: 402656 - DNA, 75 bp, synthetic construct
  source 1..75: mol_type = other DNA
agtttaacccgaccgaatccgtggccgttgacgtcgcttatgaaggctccggcagcggtgactggcgtaccaaca

SEQ ID NO: 402657 - DNA, 75 bp, synthetic construct
  source 1..75: mol_type = other DNA
ggaaaaagcacgatgtgctgaccggaagtgatgacggtcgccacagcaacacgtctctggcgtggggggctggcg

SEQ ID NO: 402658 - DNA, 75 bp, synthetic construct
  source 1..75: mol_type = other DNA
cgaatccgtggccgttgatgtcgcttatgaaggctccggcagtggcgactggcgcactgacgggttcatcgtggg

SEQ ID NO: 402659 - DNA, 75 bp, synthetic construct
  source 1..75: mol_type = other DNA
ggtatcttcatgccccgacgaacgctcccggcagcgataatctgaacgggattaacgtgaaataccgttatgaat

SEQ ID NO: 402660 - DNA, 75 bp, synthetic construct
  source 1..75: mol_type = other DNA
ccgaattcgtggccattgatattgcttatgaagggtccggtagtggcgactggcgcactgacggtttcatcgtgg

SEQ ID NO: 402661 - DNA, 75 bp, synthetic construct
  source 1..75: mol_type = other DNA
ccgaatacgtggccattgatattgcttatgaagggtccgggagtggagactggcgcactgacggtttcatcgtgg

SEQ ID NO: 402662 - DNA, 75 bp, synthetic construct
  source 1..75: mol_type = other DNA
aaaacgcgctacagcgatacccgctggcatgaagattccgtgcgtaaccgctggttcagcgtgatggcggggccg

SEQ ID NO: 402663 - DNA, 75 bp, synthetic construct
  source 1..75: mol_type = other DNA
attaacgtgaaataccgttatgagtttacggacacactggggctggtgacgtcattcagctatgcaggagactgg

SEQ ID NO: 402664 - DNA, 75 bp, synthetic construct
  source 1..75: mol_type = other DNA
cgtaaagctgtcgaattccaggacatcctgaaaatgggccgtactcagctgcaggacgcagtgccgatgaccctt

SEQ ID NO: 402665 - DNA, 75 bp, synthetic construct
  source 1..75: mol_type = other DNA
gcggaactagacgatattttctccgtacagaatctgatgcacccggcttacaaagcaaaacgctatactgatgaa

SEQ ID NO: 402666 - DNA, 75 bp, synthetic construct
  source 1..75: mol_type = other DNA
tacagcgatacccgctggcatgaagattccgttcgtaaccgctggttcagcgtaatggcggggccgtctgtgcgc

SEQ ID NO: 402667 - DNA, 75 bp, synthetic construct
  source 1..75: mol_type = other DNA
gaaagagtactctccgctggcagtgaaaaactggctgaagtcactggcttcccatgcgtaccggctgaagacctg

SEQ ID NO: 402668 - DNA, 75 bp, synthetic construct
  source 1..75: mol_type = other DNA
tgaacgagatcaacctgccggagctgcaggcgggctcttccatcatgccagctaaagtaaacccggttgttccgg

SEQ ID NO: 402669 - DNA, 75 bp, synthetic construct
  source 1..75: mol_type = other DNA
aagtggttaaccaggtatgcttcaaagtcatcggtaacgacaccactgttaccatggcagcagaagcaggtcagc

SEQ ID NO: 402670 - DNA, 75 bp, synthetic construct
  source 1..75: mol_type = other DNA
gtcgttcagctatgcaggagacaggaatcgccagctgacccgttacagcgatacccgctggcatgaagattccgt

SEQ ID NO: 402671 - DNA, 75 bp, synthetic construct
  source 1..75: mol_type = other DNA
gaacatcagtcaacgctgagcgcggggtatcttcatgtctcgacgaacgttcctggcagcgatgaactgaacggg

SEQ ID NO: 402672 - DNA, 75 bp, synthetic construct
  source 1..75: mol_type = other DNA
acgtaaccgctggttcagcgtgatggcggggccgtctgtacgcgtgaatgaatggttcagcgcgtatgcgatggc

SEQ ID NO: 402673 - DNA, 75 bp, synthetic construct
  source 1..75: mol_type = other DNA
gctatcttcatgcctcgacgaacgttcccggcagcgatgatctgaacgggattaacgtgaaataccgttatgagt

SEQ ID NO: 402674 - DNA, 75 bp, synthetic construct
  source 1..75: mol_type = other DNA
gccaggaagcgataatctgaacgggattaacgtgaaataccgttatgaatttacggacacgctggggctgattac

SEQ ID NO: 402675 - DNA, 75 bp, synthetic construct
  source 1..75: mol_type = other DNA
ttatggacgcgctggggctgattacgtccttcagttatgccaatgctgaggatgagcaaaaaacgcgctacagcg

SEQ ID NO: 402676 - DNA, 75 bp, synthetic construct
  source 1..75: mol_type = other DNA
atgcgtaaactttatgccgccattttgtccgcagccatatgtctggccgtatccggagcacctgcatgggcgtct

SEQ ID NO: 402677 - DNA, 75 bp, synthetic construct
  source 1..75: mol_type = other DNA
atgcgtaaattatgtgctgttattctgtccgcagccatctgtctgtccgtatccggtgcgcctgcatgggcgtct

SEQ ID NO: 402678 - DNA, 75 bp, synthetic construct
  source 1..75: mol_type = other DNA
cagcaatgttcatgcttctgaaaacaaccgatggtaataatttgatcaaaagacagcgtaaatctaagccgaacc

SEQ ID NO: 402679 - DNA, 75 bp, synthetic construct
  source 1..75: mol_type = other DNA
cattgaccttgcttatgaaggttccggcagtggtgactggcgcactgacggtttcatcgtgggtgtcggttataa

SEQ ID NO: 402680 - DNA, 75 bp, synthetic construct
  source 1..75: mol_type = other DNA
ttgaccttgcttatgaaggctccggcagtggcgactggcgaacggatgcatttattgttggtatcggataccgtt

SEQ ID NO: 402681 - DNA, 75 bp, synthetic construct
  source 1..75: mol_type = other DNA
tgtccgcagccatttgtctgtccgtatccggggcgcctgcatgggcgtctgagcagcaggccacgctgagcgcgg

SEQ ID NO: 402682 - DNA, 75 bp, synthetic construct
  source 1..75: mol_type = other DNA
ttcatgcctcgacgaacgttcccggcagcgatgatctgaacgggattaacgtgaaataccgttatgagtttacgg

SEQ ID NO: 402683 - DNA, 75 bp, synthetic construct
  source 1..75: mol_type = other DNA
taggttccattattgcaaaatcgatggttacccaagtcttacgtcgtctgggctatcgccatacgttagtgggga

SEQ ID NO: 402684 - DNA, 75 bp, synthetic construct
  source 1..75: mol_type = other DNA
attgcgggtcttctctatgcccgcaaacatatgcccaacttcaccaccgcacgacgtaagtttgatatcagcggt

SEQ ID NO: 402685 - DNA, 75 bp, synthetic construct
  source 1..75: mol_type = other DNA
taccggtgccgttcaatatgggtatgccgatgctgggcgggccaatctccacggcgggtaacgtgctgtttatcg

SEQ ID NO: 402686 - DNA, 75 bp, synthetic construct
  source 1..75: mol_type = other DNA
atctctgcggcaatggcttatggtgcttatgcgtataaagatcacgagaatatcattgcttcggcaaattcatca

SEQ ID NO: 402687 - DNA, 75 bp, synthetic construct
  source 1..75: mol_type = other DNA
tatccagagggatcaggaataacaatcccggaaatcttaatttcgcaggacaaaaaggggctactctggaatcgg

SEQ ID NO: 402688 - DNA, 75 bp, synthetic construct
  source 1..75: mol_type = other DNA
ccgcagtatcagcagccgcaacagccggttgtaccacagccgcaggataccctgcttcatccgctgttgatgcgt

SEQ ID NO: 402689 - DNA, 75 bp, synthetic construct
  source 1..75: mol_type = other DNA
caaaatctggtcggacaggaccggatgtatccgggagagtgagggacgaaaaagggcgctttgtcggcagcggaa

SEQ ID NO: 402690 - DNA, 75 bp, synthetic construct
  source 1..75: mol_type = other DNA
gcgggtttgttggttttgcggttgaacatccctggctttttggggccgcagtacttgctggaccatcgagagttg

SEQ ID NO: 402691 - DNA, 75 bp, synthetic construct
  source 1..75: mol_type = other DNA
caccaaggcacttagcggatttgttggttttgccgttgaacatccctggctttttggggccgcagtgcttgcggg

SEQ ID NO: 402692 - DNA, 75 bp, synthetic construct
  source 1..75: mol_type = other DNA
atgcgcaatggtgacagccgtccgttgcataaaccgacgacgccgctgccttctctggatttgctgacacctccg

SEQ ID NO: 402693 - DNA, 75 bp, synthetic construct
  source 1..75: mol_type = other DNA
tattacaggccccacgggatgcgggaagacctcgctaatttgccaagttgcttctcgattgaattggcctgttca

SEQ ID NO: 402694 - DNA, 75 bp, synthetic construct
  source 1..75: mol_type = other DNA
gctatcgtttcaccaaagtagggtatgcggatgaggaagctgaactcagcattcttggccgtgttactccgaaac

SEQ ID NO: 402695 - DNA, 75 bp, synthetic construct
  source 1..75: mol_type = other DNA
actggaaagcgcgtggtcgcccacagtatgttgatggcatcacctccgacagtgaaagcgaaggtggcgtgggcg

SEQ ID NO: 402696 - DNA, 75 bp, synthetic construct
  source 1..75: mol_type = other DNA
gatgtctgcgctgggtgtgcgtaatctggcgggttataacgaaaaaattgctgaagccgataggatgatgcgtcc

SEQ ID NO: 402697 - DNA, 75 bp, synthetic construct
  source 1..75: mol_type = other DNA
attactctccggggccagttatcactcgctttgaattgaacctggcaccgggcgtaaaagcagcgcgcatttcta

SEQ ID NO: 402698 - DNA, 75 bp, synthetic construct
  source 1..75: mol_type = other DNA
ctgacggattatctgatgctctcgcgcccgcaggatgtgaacaacgccctgctgtggctgaccggcagcttatgg

SEQ ID NO: 402699 - DNA, 75 bp, synthetic construct
  source 1..75: mol_type = other DNA
attgggttagggataaatcctaaaaaaggggcaacagaaaatctccctgtgttgttagaaagagttgctgctctt

SEQ ID NO: 402700 - DNA, 75 bp, synthetic construct
  source 1..75: mol_type = other DNA
acttgtaaccttgatgcgaggaacaactgaagaagaagcgtggaatattgcccgttatcatacggcaggaggaag

SEQ ID NO: 402701 - DNA, 75 bp, synthetic construct
  source 1..75: mol_type = other DNA
tattttatacgattttctcaaagtcggagtaatagtagatcttacaccggatgggatcatcttggaaaatataaa

SEQ ID NO: 402702 - DNA, 75 bp, synthetic construct
  source 1..75: mol_type = other DNA
gctgggatctgcttgacgtgatgcgcgcctgctatgccctgcgcccggacggcatcaactggccggaaaacgacg

SEQ ID NO: 402703 - DNA, 75 bp, synthetic construct
  source 1..75: mol_type = other DNA
gccatcgcaacaagcacaaattgatggcgttgattgatgtgccacagatgaaaccactggtacacgtttccggta

SEQ ID NO: 402704 - DNA, 75 bp, synthetic construct
  source 1..75: mol_type = other DNA
acaaaatcaaaggtgttgcaaccggtcgtagcggtatgcatcaggacgtgccaaaagaagatgtcatcattaaaa

SEQ ID NO: 402705 - DNA, 75 bp, synthetic construct
  source 1..75: mol_type = other DNA
cctcaaacggcttgaggcaatttttgaaaagtatcgcaacgggctgatgatcggccctgccggaacgccgatgaa

SEQ ID NO: 402706 - DNA, 75 bp, synthetic construct
  source 1..75: mol_type = other DNA
attaacgtgaaataccgttatgaatttatggacacgctggggctggtgacgtcattcagttatgcaggatacaag

SEQ ID NO: 402707 - DNA, 75 bp, synthetic construct
  source 1..75: mol_type = other DNA
cgaagcctaccatcgtcttcacgaactcggtcatgcccactccatcgaagtctggtgtgaagatgagcttgttgg

SEQ ID NO: 402708 - DNA, 75 bp, synthetic construct
  source 1..75: mol_type = other DNA
gcgataacaatgcgaatctgagccagaaagaaaaattgctggcgatggtaagagcaaaagcgagggcagctctac

SEQ ID NO: 402709 - DNA, 75 bp, synthetic construct
  source 1..75: mol_type = other DNA
aaagctcttggcggatttgttggctttgcggttgaacatccctggctttttggggccgcagtgcttgccgggcca

SEQ ID NO: 402710 - DNA, 75 bp, synthetic construct
  source 1..75: mol_type = other DNA
taacgctggacgttaatgaagaacacctcaaacggcttgaggcaatttttgaaaagtatcgcaacgggctgatga

SEQ ID NO: 402711 - DNA, 75 bp, synthetic construct
  source 1..75: mol_type = other DNA
ggcgtccccttgtgatcgctcagaatggcggggaaatcatcaagccgcacccgatgtttcgtgtggtcgttactg

SEQ ID NO: 402712 - DNA, 75 bp, synthetic construct
  source 1..75: mol_type = other DNA
gtcgttactgatatgaaagatgccgccaacgcgctgcgctggtgtgttaacgagatggagcgtcgttataaactg

SEQ ID NO: 402713 - DNA, 75 bp, synthetic construct
  source 1..75: mol_type = other DNA
agcaacaatatcagcagccgcaacaaccagttgcgtcgcagccgcagtatcagcagccgcagcaaccagttgcgc

SEQ ID NO: 402714 - DNA, 75 bp, synthetic construct
  source 1..75: mol_type = other DNA
gatccgttgttcgatcaggcggtgcagtttgtcactgaaaaacgcaaagcgtcaatttctggcgtacagcgtcag

SEQ ID NO: 402715 - DNA, 75 bp, synthetic construct
  source 1..75: mol_type = other DNA
tatcagcagccacaacagccggttgtatcacagccgcaggataccctgcttcatccgctgttgatgcgtaatggc

SEQ ID NO: 402716 - DNA, 75 bp, synthetic construct
  source 1..75: mol_type = other DNA
gaagccgatcgcatgatgcgtccgattccagacccgtactggaagccgggtgacagtatggatgcccagcatccg

SEQ ID NO: 402717 - DNA, 75 bp, synthetic construct
  source 1..75: mol_type = other DNA
atgccgcacttgttggttgcggggactaccggttccggtaagtctgtcggggtgaacgcgatgatcctgagcatg

SEQ ID NO: 402718 - DNA, 75 bp, synthetic construct
  source 1..75: mol_type = other DNA
acgaagtaggcctgagcgtcgcccaggtcgaagagatgtatcgctacctcgccattgccaactatgaagaccgtt

SEQ ID NO: 402719 - DNA, 75 bp, synthetic construct
  source 1..75: mol_type = other DNA
aaggcatggagtacgcatggtttaacaacgtcgaaaccaaaccgggcattggttacccgaaaaactgggaagatc

SEQ ID NO: 402720 - DNA, 75 bp, synthetic construct
  source 1..75: mol_type = other DNA
tggctggcgtttgtgcattagcggttgcccatacaaaaaaatctacttcaactggaaaagcggcaagtcagaaaa

SEQ ID NO: 402721 - DNA, 75 bp, synthetic construct
  source 1..75: mol_type = other DNA
gcaccacagccgcaatatcagcagccgcaacagccagttgcgccacagccgcaggatactctgcttcatccgctg

SEQ ID NO: 402722 - DNA, 75 bp, synthetic construct
  source 1..75: mol_type = other DNA
ggtctgattaaagcgaatattccgacccgtatcgcctttaccgtatccagtaagattgactcacgtaccattctt

SEQ ID NO: 402723 - DNA, 75 bp, synthetic construct
  source 1..75: mol_type = other DNA
gatctacttcagcgaaaaatggaagaaaggagcaagcccggtcaccgttaacctggagcaaagctatctaagtag

SEQ ID NO: 402724 - DNA, 75 bp, synthetic construct
  source 1..75: mol_type = other DNA
tgaacgcgccttcagcgaccagctgcacttcgctgccattgctggcggaatacggtgtgactcatgccgaacccg

SEQ ID NO: 402725 - DNA, 75 bp, synthetic construct
  source 1..75: mol_type = other DNA
gcatggtacaaactggatacacaggccaggaataaaaaatggacagttctggctgaattccctggcggcccgaga

SEQ ID NO: 402726 - DNA, 75 bp, synthetic construct
  source 1..75: mol_type = other DNA
gagcaattgataacgacactgtctacattggtttaggtagcgcaggtacggcatggtacaagctggatacacagg

SEQ ID NO: 402727 - DNA, 75 bp, synthetic construct
  source 1..75: mol_type = other DNA
aaaatgctggagctttcggtttatgaaggcatcccgcatctgttaacggaagtcgttactgatatgaaagatgcc

SEQ ID NO: 402728 - DNA, 75 bp, synthetic construct
  source 1..75: mol_type = other DNA
gataccctgcttcatccgctgttgatgcgtaatggcgacagccgtccgttgcataaaccgacgacgccgctgcct

SEQ ID NO: 402729 - DNA, 75 bp, synthetic construct
  source 1..75: mol_type = other DNA
tggcgaatctccctggtacgggacggctggtgcggcggttgtgaataaaggtgataaaacctggcttattaatgg

SEQ ID NO: 402730 - DNA, 75 bp, synthetic construct
  source 1..75: mol_type = other DNA
aggtgaaacgactggaggtaaagctgttgcggattccgttttgatctcagtgatgggtaataaagttacggtaca

SEQ ID NO: 402731 - DNA, 75 bp, synthetic construct
  source 1..75: mol_type = other DNA
atcgccccggacagttgggtaatcgacgtcgatcagatactggaaaacggtaagcggctgattgagacggcgcgg

SEQ ID NO: 402732 - DNA, 75 bp, synthetic construct
  source 1..75: mol_type = other DNA
ctgctacggcggcggctattaccgtcgtggtcatgcgcaacatgcgctggtgtttacgccagaaaatcaaaggat

SEQ ID NO: 402733 - DNA, 75 bp, synthetic construct
  source 1..75: mol_type = other DNA
cttgtcatctggtttctgacgccgttgaacagggaactgatgtcatcaccgtgtttactctcgacaaagcgcggg

SEQ ID NO: 402734 - DNA, 75 bp, synthetic construct
  source 1..75: mol_type = other DNA
gcaccgggcgtaaaagcggcgcgcatttctaacttgtcacgggaccttgcccgttcactttcgacggtggcggtg

SEQ ID NO: 402735 - DNA, 75 bp, synthetic construct
  source 1..75: mol_type = other DNA
tcagcagccgcaacaaccggttgcgccacagcagcaatatcagcagccgcaacagccggttgcgccgcagcagca

SEQ ID NO: 402736 - DNA, 75 bp, synthetic construct
  source 1..75: mol_type = other DNA
acccatgccgaacctggtcatgcgctgaccggcactattccggcaaaccagcagggcgatcaacccgaacgtatc

SEQ ID NO: 402737 - DNA, 75 bp, synthetic construct
  source 1..75: mol_type = other DNA
aaataaccgcgccagataacgtgatccacaaaggggaaaaatttcacgttaccccggcccaggtgaatctcctgg

SEQ ID NO: 402738 - DNA, 75 bp, synthetic construct
  source 1..75: mol_type = other DNA
gaaaatcaaacgcgccgccctgatcctgcacgacgtcggcagcaagcaggaacgcaaagagtgggtggagcaatt

SEQ ID NO: 402739 - DNA, 75 bp, synthetic construct
  source 1..75: mol_type = other DNA
acgaactggagcgtctgtttaagaaaaagaaactcagcgaagtcacccagcaagaaatggttgcgaatatcggca

SEQ ID NO: 402740 - DNA, 75 bp, synthetic construct
  source 1..75: mol_type = other DNA
tatgcaggcgcatggtaaggctctaatccagacgctgagcctgctcaaatccacaatgggacgggaagccagtgc

SEQ ID NO: 402741 - DNA, 75 bp, synthetic construct
  source 1..75: mol_type = other DNA
gccgaccgcatcgaggaagcggcgagcaccgagcgcgaagttgacctctatgaacgccagtgcgaagtgttcctc

SEQ ID NO: 402742 - DNA, 75 bp, synthetic construct
  source 1..75: mol_type = other DNA
gccgaccgcatcgaagaagcggcgagcacggaacgtgaagttgatctctatgagcgccagtgcgaagtgttcctc

SEQ ID NO: 402743 - DNA, 75 bp, synthetic construct
  source 1..75: mol_type = other DNA
aacgtgcgcttcctgacagattacttccagaatcagcaggtgatccccaaattctactttattgttgaccgtctg

SEQ ID NO: 402744 - DNA, 75 bp, synthetic construct
  source 1..75: mol_type = other DNA
aggcatcgtcgcagaacgcaaccgcatcaacgaacgctttaaaaaccccaaattcaaacgcttcgccaacatcac

SEQ ID NO: 402745 - DNA, 75 bp, synthetic construct
  source 1..75: mol_type = other DNA
ccgcccggacatcacgctgctgatcaacggcatgccgctaatctttatcgaagtgaaaaaacccaacaatcggga

SEQ ID NO: 402746 - DNA, 75 bp, synthetic construct
  source 1..75: mol_type = other DNA
gttgacctctccggcctgctgaaccgggcgctggaagaggtgatctttgaattccataaagtgggtgaagaagag

SEQ ID NO: 402747 - DNA, 75 bp, synthetic construct
  source 1..75: mol_type = other DNA
gatcttgcacgacatcggcagcaagcaggagcgcaaagaatgggtggagcaattcaaagcgggcaagattgacct

SEQ ID NO: 402748 - DNA, 75 bp, synthetic construct
  source 1..75: mol_type = other DNA
gatctgctccagcaggcgcagcgcgagttcaccgcccgtggcttaatcgttcaccttatcgactcccgcgaagcc

SEQ ID NO: 402749 - DNA, 75 bp, synthetic construct
  source 1..75: mol_type = other DNA
tgatcagcctgccgctggcggcgaaggatctgggtgtgcagggtgacctctggccggtgcaggagcagagcatgc

SEQ ID NO: 402750 - DNA, 75 bp, synthetic construct
  source 1..75: mol_type = other DNA
tgccattaatacaggtgatgacacttatgatatctatgcatattacttcgaatttactaatatggtaatggctga

SEQ ID NO: 402751 - DNA, 75 bp, synthetic construct
  source 1..75: mol_type = other DNA
taataagcaagaggcagcggataacgttgcggcattaacccgtgatgttgaagccaaaaatacagcaattcatag

SEQ ID NO: 402752 - DNA, 75 bp, synthetic construct
  source 1..75: mol_type = other DNA
tactatcgcagcaaatcatgcagaaattaacaataaagttgatgtaattaaacgcgaaaccgacgcgacaatcga

SEQ ID NO: 402753 - DNA, 75 bp, synthetic construct
  source 1..75: mol_type = other DNA
tctttaaacctgttggatactcctgaatatctgggtggtgaaaaacctgttgcagacgaaatttttgatgctctt

SEQ ID NO: 402754 - DNA, 75 bp, synthetic construct
  source 1..75: mol_type = other DNA
ggcgttaaaaccagattctttggcgaaacattcactgacggtacattatacctaaatcagatgaataatagctct

SEQ ID NO: 402755 - DNA, 75 bp, synthetic construct
  source 1..75: mol_type = other DNA
tcactgatggtacattatacctaaatcagatgaataatagctctgaacgattctctatcaacaattggggaaatt

SEQ ID NO: 402756 - DNA, 75 bp, synthetic construct
  source 1..75: mol_type = other DNA
tacccggaaatggggcagatgctgcgccaggcccgttccgttggcctgaaaactcagtttatggggccggaaggt

SEQ ID NO: 402757 - DNA, 75 bp, synthetic construct
  source 1..75: mol_type = other DNA
tcctgcttctgctggcgttatctgcaggctccggcgcaaaagacctgggtacctggggcaatgtgtttgaaccgg

SEQ ID NO: 402758 - DNA, 75 bp, synthetic construct
  source 1..75: mol_type = other DNA
tccctgcccgggtgacgctctcagaagaccgacgccgtcttcgggtagatacttttgccctccctggtccaggag

SEQ ID NO: 402759 - DNA, 75 bp, synthetic construct
  source 1..75: mol_type = other DNA
ctaatgtttctggcaaaaagccaacgccggaacaattacaggtcggtgaggtggcaatcaaccttaaagaccatg

SEQ ID NO: 402760 - DNA, 75 bp, synthetic construct
  source 1..75: mol_type = other DNA
gaaggtgtcggtaatgcgtcactgtcgaacattgccggtgatgccgctgaaggcatgttggtcaccatgccaaaa

SEQ ID NO: 402761 - DNA, 75 bp, synthetic construct
  source 1..75: mol_type = other DNA
agaaagatttctccgcgctgatcgcccgcctgaaaaaagaaaacatcgacttcgtttactacggcggttactacc

SEQ ID NO: 402762 - DNA, 75 bp, synthetic construct
  source 1..75: mol_type = other DNA
gcatgacgaagggtgcagagagttaaccgaatacaaacgagccaaggcagccatcagcaaggccctgggggaaga

SEQ ID NO: 402763 - DNA, 75 bp, synthetic construct
  source 1..75: mol_type = other DNA
gtgatgcgcttcgctggataggtattgataccgatcttgggcgtaaaaataccgttcagggaacgcctgaaatcg

SEQ ID NO: 402764 - DNA, 75 bp, synthetic construct
  source 1..75: mol_type = other DNA
aagaaccaatacctcgcgtggagggaataatgagcaatgatttcttagtcgattatctgtcggaaaattttgaag

SEQ ID NO: 402765 - DNA, 75 bp, synthetic construct
  source 1..75: mol_type = other DNA
ctctgagcggcatctactatgaagtggacattgaaacaggatatgagattttatcccgaagaatttatcgtaccg

SEQ ID NO: 402766 - DNA, 75 bp, synthetic construct
  source 1..75: mol_type = other DNA
actttgtagagcaagccaataatacttatcgacttcctaaaaatatgatgtcagctatcgcggaggttgaatctt

SEQ ID NO: 402767 - DNA, 75 bp, synthetic construct
  source 1..75: mol_type = other DNA
gattctcaacggacaaggacttggatttgttgatgtcgcgacaactaaccaggtggaagcgaatctggacaagat

SEQ ID NO: 402768 - DNA, 75 bp, synthetic construct
  source 1..75: mol_type = other DNA
aaattcgaaagggacggtgtatgggaattacgagttgattacggtcctggttacagggtttattattcaatcgaa

SEQ ID NO: 402769 - DNA, 75 bp, synthetic construct
  source 1..75: mol_type = other DNA
ggttttacaaataccgttcatcaaaacattcggaatttatccagaaattccggcaggatttgaaacgccagctct

SEQ ID NO: 402770 - DNA, 75 bp, synthetic construct
  source 1..75: mol_type = other DNA
gtgcatattaataaatgtccggtgctggcacaggcgaatacacttcgcccggaggatgccgaccgtctgggaatt

SEQ ID NO: 402771 - DNA, 75 bp, synthetic construct
  source 1..75: mol_type = other DNA
ctacctttttgtttcacgattacgaaacctttggcacgcaccccgcgttagatcgccctgcgcagtttgccgcca

SEQ ID NO: 402772 - DNA, 75 bp, synthetic construct
  source 1..75: mol_type = other DNA
tattttatacgattttctcaaagtcggagtaatagtagatcttacactggatgggatcatcttggaaaatacaaa

SEQ ID NO: 402773 - DNA, 75 bp, synthetic construct
  source 1..75: mol_type = other DNA
gatcgccacagcaacacgtctctggcgtggggagctggcgtgcagtttaacccgaccgaatccgtggccattgat

SEQ ID NO: 402774 - DNA, 75 bp, synthetic construct
  source 1..75: mol_type = other DNA
tcagcgaagcggaaccgtgtgactggattaaaaacgggcagtcagtcggctcgcattcagttcagtgcgtgtcgt

SEQ ID NO: 402775 - DNA, 75 bp, synthetic construct
  source 1..75: mol_type = other DNA
tcagctgaattttataacccatatacgggcgccagaaatggcgccttttttattgcagaaaagcgagaggtaatt

SEQ ID NO: 402776 - DNA, 75 bp, synthetic construct
  source 1..75: mol_type = other DNA
gtggcggtttccgctacttccatttggctccttcgctgttgaaaaaagataactggggcaattgggtaatcaata

SEQ ID NO: 402777 - DNA, 75 bp, synthetic construct
  source 1..75: mol_type = other DNA
agtggcccgtcgtacgcaggttgctttcggtgaagtcagtgagtcgtctgctgacaacaaggcagacaaaacgga

SEQ ID NO: 402778 - DNA, 75 bp, synthetic construct
  source 1..75: mol_type = other DNA
atggattttgaatttacgggtgaagaaaccccggaacaactggaaaaaatgctggaagggcttggagatgtggat

SEQ ID NO: 402779 - DNA, 75 bp, synthetic construct
  source 1..75: mol_type = other DNA
gtgcgttataccgccagtaatgctgctcgttttgccggattatgggaaagaaataatctcataaacgaaaaatta

SEQ ID NO: 402780 - DNA, 75 bp, synthetic construct
  source 1..75: mol_type = other DNA
gtacttggttcggaaatctatagtgagtctcgcttttttataataggtcatgatgattgggataagttagagtat

SEQ ID NO: 402781 - DNA, 75 bp, synthetic construct
  source 1..75: mol_type = other DNA
atgaagagcatattaaatgctaatataattattgatataactaaagaaaaccaatctggctggactcttcgtata

SEQ ID NO: 402782 - DNA, 75 bp, synthetic construct
  source 1..75: mol_type = other DNA
cattcagaggctgaggcgattatgcgtggtatgacgaatgctgaaatagacgcacttctggagaagctcgggtaa

SEQ ID NO: 402783 - DNA, 75 bp, synthetic construct
  source 1..75: mol_type = other DNA
ttcggtgaagtcagtgagtcgtctgctgacaaccaggcagacaaaacggatatccggaaaacggcggaagagaaa

SEQ ID NO: 402784 - DNA, 75 bp, synthetic construct
  source 1..75: mol_type = other DNA
gggacgctgaaaacttacaaacagatcaattcaacgcttaaaacgactaattcccggttaaaaagcctgtttaaa

SEQ ID NO: 402785 - DNA, 75 bp, synthetic construct
  source 1..75: mol_type = other DNA
aatctctgatgagaagattgcccgtatcagggagatgtatccggaaattggtgacgcggtggcttcgctcatccg

SEQ ID NO: 402786 - DNA, 75 bp, synthetic construct
  source 1..75: mol_type = other DNA
tgccgtatccatcgacgggaagctccagaatgaccccgcatggaaagacaaaacgctcactgaacgtttcgctga

SEQ ID NO: 402787 - DNA, 75 bp, synthetic construct
  source 1..75: mol_type = other DNA
gaagcgactatcgtacgcacctgtaagaaattaggttatcagggttattaccatttaaaaattgcattagcaaaa

SEQ ID NO: 402788 - DNA, 75 bp, synthetic construct
  source 1..75: mol_type = other DNA
taaaacaggcgatggcggtggcagtaaagaatattgaaaccttccacactgcgcaaaaactgccgccggtagatg

SEQ ID NO: 402789 - DNA, 75 bp, synthetic construct
  source 1..75: mol_type = other DNA
gcatttattgttgtgtttacatcgtttaaaaatgaattgattaatattcctattttaaataaattagactacact

SEQ ID NO: 402790 - DNA, 75 bp, synthetic construct
  source 1..75: mol_type = other DNA
ataaaaaatctgatggatttaaatataatatagctatcatttgtgtatttttaatatctttttgtattgtacctg

SEQ ID NO: 402791 - DNA, 75 bp, synthetic construct
  source 1..75: mol_type = other DNA
aaagaatattgaaaccttccacactgcgcaaaaactgccgccggtagatgttgaaactcagccaggcgtacgttg

SEQ ID NO: 402792 - DNA, 75 bp, synthetic construct
  source 1..75: mol_type = other DNA
tgctgacagcggcgctacgccggatttcgtggcttctgatttgctctcccaggctgaacacggcccggactcaca

SEQ ID NO: 402793 - DNA, 75 bp, synthetic construct
  source 1..75: mol_type = other DNA
aggctgaacacggcccggactcacaggtgattttactgacgcctgacgctgatatggcgcatcaagttgccgaag

SEQ ID NO: 402794 - DNA, 75 bp, synthetic construct
  source 1..75: mol_type = other DNA
atgaaaaaacgctgcccgccaacgcaccacgtaacgcgcattataaatgcctatattctgggcgaagggcctgac

SEQ ID NO: 402795 - DNA, 75 bp, synthetic construct
  source 1..75: mol_type = other DNA
tccaagcacgacattgagccgaaacctcaaccggcattcggcggatttgagctatgcctgagtgatatctcgatc

SEQ ID NO: 402796 - DNA, 75 bp, synthetic construct
  source 1..75: mol_type = other DNA
tgcatttattggcaatctcgcgcggtcatatctttaatgatggtaataagcgcaccgcactgtttatcacgctat

SEQ ID NO: 402797 - DNA, 75 bp, synthetic construct
  source 1..75: mol_type = other DNA
gatgaaattattcatccccttcctgcgtataccccaggttttgatggctgggacgatcccctgcggaaaacctat

SEQ ID NO: 402798 - DNA, 75 bp, synthetic construct
  source 1..75: mol_type = other DNA
aaaaatcaccagcatcccggcagaaaaaattatccagttggcacgagagatcggttcagcaaaacctgcttatat

SEQ ID NO: 402799 - DNA, 75 bp, synthetic construct
  source 1..75: mol_type = other DNA
ggcaccgatggcgcactggcctgtgcgattgcctgggtactgattactgaaaacatggtcgatcagccatttctc

SEQ ID NO: 402800 - DNA, 75 bp, synthetic construct
  source 1..75: mol_type = other DNA
gcgactacgcctccggcaccaatcacgtgctgccgacttacggttataccgccacctgttccagcctcggcctgg

SEQ ID NO: 402801 - DNA, 75 bp, synthetic construct
  source 1..75: mol_type = other DNA
cccgcgcatcgagcagaccctgacgaaagccataaagggcattctggcgctcggggacattatagggcggctgtt

SEQ ID NO: 402802 - DNA, 75 bp, synthetic construct
  source 1..75: mol_type = other DNA
aaaatccgtcagcgatgccgatggttactgacagcgccaacggtaccgccgactggattaaagagcactggggat

SEQ ID NO: 402803 - DNA, 75 bp, synthetic construct
  source 1..75: mol_type = other DNA
tacggacctgacaaaagcgctggctaagttgctcggtattgaccccaagtcatggtccctaaagtgggattttag

SEQ ID NO: 402804 - DNA, 75 bp, synthetic construct
  source 1..75: mol_type = other DNA
cgcgcaactacattccgaaagtaatgagcaatatgcccaccagcgccccggtgattcagcaggaaacgaatatta

SEQ ID NO: 402805 - DNA, 75 bp, synthetic construct
  source 1..75: mol_type = other DNA
gtgaccttaaaacgaccgttaacgaactggcgaaagcgctggcgaaactgctcaacattgaccctaaatcatggt

SEQ ID NO: 402806 - DNA, 75 bp, synthetic construct
  source 1..75: mol_type = other DNA
ggtctggcgggttcgctggacacgctgcgccgccacatcctagataacttcccgcgcatcgagcagaccctgacg

SEQ ID NO: 402807 - DNA, 75 bp, synthetic construct
  source 1..75: mol_type = other DNA
catgagcagtacatgcagacgcaggccctgtttgacagtaaatcgctggcgaacagcaatattctggagcgtcag

SEQ ID NO: 402808 - DNA, 75 bp, synthetic construct
  source 1..75: mol_type = other DNA
ttcgtggcttctgatttgctttctcaggctgaacacggcccggactcacaggtgattttactgacgcccgatgct

SEQ ID NO: 402809 - DNA, 75 bp, synthetic construct
  source 1..75: mol_type = other DNA
tcagttggtttgtatattcctggcggctccgccccgctcttctcaacggtattaatgctggcgactccggcgcgt

SEQ ID NO: 402810 - DNA, 75 bp, synthetic construct
  source 1..75: mol_type = other DNA
ctggcgtatcaggccgccgctggcaaccttaaccagcagactgttataaatgttcatggagttaacaaccctcag

SEQ ID NO: 402811 - DNA, 75 bp, synthetic construct
  source 1..75: mol_type = other DNA
ctcataccgtaaaaggcgcaaatattcagtcagatattccaggtgctgagccggaacaacatgcgcagtctacga

SEQ ID NO: 402812 - DNA, 75 bp, synthetic construct
  source 1..75: mol_type = other DNA
ccaacccggaggcgctgaaacaaaaagtggatcagtaccttcaggacaatgcgctcagtcacacacaggccatgt

SEQ ID NO: 402813 - DNA, 75 bp, synthetic construct
  source 1..75: mol_type = other DNA
gttcgctggacgaaatcaccagccgttttgaacgctcggtattaacccagctttatcgcaattatcccagcacgc

SEQ ID NO: 402814 - DNA, 75 bp, synthetic construct
  source 1..75: mol_type = other DNA
ggcgttacacggcaactacgacaacaaaaactcgggcgaaaaatttttgcaggggttgtgtgaagttgacctgct

SEQ ID NO: 402815 - DNA, 75 bp, synthetic construct
  source 1..75: mol_type = other DNA
tgtacaaattttgcgttcagcggaaaacctggtaccgggaagaatcacttagcggcagctatcgggaatcgcctg

SEQ ID NO: 402816 - DNA, 75 bp, synthetic construct
  source 1..75: mol_type = other DNA
gaaggacgaaaacgcagcgaggagattaaccgccagaatcaccagttgcgggtggaaaaaatcctgaatcgttcg

SEQ ID NO: 402817 - DNA, 75 bp, synthetic construct
  source 1..75: mol_type = other DNA
ggtgagatgtcgccgcgaatgcaggccaaactgctgcgttttcttaatgacgggactttccgccgggtcggcgaa

SEQ ID NO: 402818 - DNA, 75 bp, synthetic construct
  source 1..75: mol_type = other DNA
cggttcggtgctgttggatgagattggtgagatgtcgccacggatgcaggctaaactgctgcgtttcctcaatga

SEQ ID NO: 402819 - DNA, 75 bp, synthetic construct
  source 1..75: mol_type = other DNA
caccggaaaccgtctgcacctggtacacccggtggagcgacgagtttgacgcggcagagcttgccggaccgttct

SEQ ID NO: 402820 - DNA, 75 bp, synthetic construct
  source 1..75: mol_type = other DNA
gatcaaccgccagaatcgccagttgcgggtggaaaaaatcctgaatcgttcgggcatccagcctctgcacagcaa

SEQ ID NO: 402821 - DNA, 75 bp, synthetic construct
  source 1..75: mol_type = other DNA
aacggcatcgttactcagtgtggggatgctgacaaatcttaaccatgcagcgatgaatacacttctcggcgagcg

SEQ ID NO: 402822 - DNA, 75 bp, synthetic construct
  source 1..75: mol_type = other DNA
aacctggtaccgggaagaaccacttagcggcagctatcgggaatcgcctgctgaaagacggtcagacagtgattg

SEQ ID NO: 402823 - DNA, 75 bp, synthetic construct
  source 1..75: mol_type = other DNA
ggagatcgggtgatggaccgtatgaccatgaatggtggtcgttgggtgaattttaactgggagagctggcggtca

SEQ ID NO: 402824 - DNA, 75 bp, synthetic construct
  source 1..75: mol_type = other DNA
gacttgcaccacaggggggcggttccaccgtaccggacggtggaggagtggcgggaatggcaacttgctgaagga

SEQ ID NO: 402825 - DNA, 75 bp, synthetic construct
  source 1..75: mol_type = other DNA
gccatagcagcgctcagtactccggcgaaataaagggatacgattacgatacatataccttctatgccaaaaaag

SEQ ID NO: 402826 - DNA, 75 bp, synthetic construct
  source 1..75: mol_type = other DNA
atgtttggtggcagttacagcaaacaaaacaatcgttacttcagttcatgggccaacatcttcccggatgaaatt

SEQ ID NO: 402827 - DNA, 75 bp, synthetic construct
  source 1..75: mol_type = other DNA
gtgagttataacggtgcgaatacgaccgttatccggtcaaaaacaggatttctcacatcagttgtttttgatgaa

SEQ ID NO: 402828 - DNA, 75 bp, synthetic construct
  source 1..75: mol_type = other DNA
aagggttctttgagcaggcgaacggtggttcggtactgctggatgaaataggtgagatgtcaccacggatgcagg

SEQ ID NO: 402829 - DNA, 75 bp, synthetic construct
  source 1..75: mol_type = other DNA
aagacctcaccactgacggatttgacgatctcatcaaattcttcaccactggtgcattcggtgtaatggcccgca

SEQ ID NO: 402830 - DNA, 75 bp, synthetic construct
  source 1..75: mol_type = other DNA
ctttacatggaaagcctgacggccgaagagcgcgagattatcaaggcgggtagtttgattaacttcaataaaaac

SEQ ID NO: 402831 - DNA, 75 bp, synthetic construct
  source 1..75: mol_type = other DNA
ttacatttacatccctggcattaaaatggcgctggataatccaggtacgacgtttaaaggttatgtgatccatga

SEQ ID NO: 402832 - DNA, 75 bp, synthetic construct
  source 1..75: mol_type = other DNA
ggataaagtggaaaatggtcgcctgaaagtgcagcaggggattatcgcgggctgttctggcggtaactacgaaaa

SEQ ID NO: 402833 - DNA, 75 bp, synthetic construct
  source 1..75: mol_type = other DNA
gcctaccgataactacaatttcaaaatcatgtctgccgaaggtttacaaatcacctgcgacatgctgggccgttc

SEQ ID NO: 402834 - DNA, 75 bp, synthetic construct
  source 1..75: mol_type = other DNA
actgatcaacttcttcaccattggtgaattcggtgttctggcccgcaataacttcgttgcaaaatatgatgtcat

SEQ ID NO: 402835 - DNA, 75 bp, synthetic construct
  source 1..75: mol_type = other DNA
gaatacgatagcgatggcgacccgatcccgatgttcgcggctggttacggtgttaactggcgtctcgctcagggc

SEQ ID NO: 402836 - DNA, 75 bp, synthetic construct
  source 1..75: mol_type = other DNA
tgcctatcaacgccgccgcaacgtcattaccccgctggttggtatgactactggcgtagtgcctctgccgcgcac

SEQ ID NO: 402837 - DNA, 75 bp, synthetic construct
  source 1..75: mol_type = other DNA
accccgctggttggtatgactactggcgtagtgcctcttccgcgctttatgccaactgataactacaacttccgc

SEQ ID NO: 402838 - DNA, 75 bp, synthetic construct
  source 1..75: mol_type = other DNA
tatcggtaaaacgctgaaaatgtacagcgtagcaggcgacattaacgatgaagtcgtaatgtctatggacggtca

SEQ ID NO: 402839 - DNA, 75 bp, synthetic construct
  source 1..75: mol_type = other DNA
ccacgctcggagtttgaaagacgcgctaagtttaacaatgagcagacatcatcaaaagcaggagtctatggcaat

SEQ ID NO: 402840 - DNA, 75 bp, synthetic construct
  source 1..75: mol_type = other DNA
cagaccaagccccgccagagcggtttgtttaaacgtttcacactactgatagtaggatatataagagagaaattt

SEQ ID NO: 402841 - DNA, 75 bp, synthetic construct
  source 1..75: mol_type = other DNA
gacaccactgatgctgaccatgataagcgtatcgcagagaactatgtctatgatgaagtgctgggtgtctctgtt

SEQ ID NO: 402842 - DNA, 75 bp, synthetic construct
  source 1..75: mol_type = other DNA
cgaagcggcaagcacctgacgcaggtaacgccagcaggacaagaaataattcgtatcgctcgcgaagtcctgtcg

SEQ ID NO: 402843 - DNA, 75 bp, synthetic construct
  source 1..75: mol_type = other DNA
gtttcccaaatcgttttgagcaagaacaaacggaggtcaataaacacatggaatttatactgtctattggtggaa

SEQ ID NO: 402844 - DNA, 75 bp, synthetic construct
  source 1..75: mol_type = other DNA
agcgtatcgcagagaactatgtctatgatgatgtgttgggtgtcaatgttccgcgctctgagtttgaaaaacgta

SEQ ID NO: 402845 - DNA, 75 bp, synthetic construct
  source 1..75: mol_type = other DNA
gtatcagataatgacgagacagttcgtttcccaagccgtcaaagtaacacagaaaaaaataatagcgattttcag

SEQ ID NO: 402846 - DNA, 75 bp, synthetic construct
  source 1..75: mol_type = other DNA
accacaggcagagttctgtggcgacgtatcagataatgatgagttcactcgcttcccaagtaggttgagaaaaaa

SEQ ID NO: 402847 - DNA, 75 bp, synthetic construct
  source 1..75: mol_type = other DNA
gtatcagataatgacaagaccgttcgtttcccaagtcgtcctcgtaagggagagaattctaccgatagcaatata

SEQ ID NO: 402848 - DNA, 75 bp, synthetic construct
  source 1..75: mol_type = other DNA
gataagaaaaaattggttgccgaatactgccagaaaaactttgtcgataaggggatgattgctgatatcgcattt

SEQ ID NO: 402849 - DNA, 75 bp, synthetic construct
  source 1..75: mol_type = other DNA
tatacctgtagaactcaacaacgatgataagaaaaaattagttgccgaatactgccagaagaactttgttgataa

SEQ ID NO: 402850 - DNA, 75 bp, synthetic construct
  source 1..75: mol_type = other DNA
gaatcagaccatgacaagaccgttcgttttccaagtcgtcctaaacagggaaagcctaatgttgataagaacatg

SEQ ID NO: 402851 - DNA, 75 bp, synthetic construct
  source 1..75: mol_type = other DNA
taaagattgtgactattttatgttattacaaccgacgtctccttttagaaatgcccatcatataaaggaagccat

SEQ ID NO: 402852 - DNA, 75 bp, synthetic construct
  source 1..75: mol_type = other DNA
catagaatctctgcgcgacactctccttcccaaactgatgagcggcgaagtacgggttcagtatgcggaagaagc

SEQ ID NO: 402853 - DNA, 75 bp, synthetic construct
  source 1..75: mol_type = other DNA
attgatttcttctggaaaaaaataagtattaacaactcacaaattaaaaacatagaatctctgcgcgacactctc

SEQ ID NO: 402854 - DNA, 75 bp, synthetic construct
  source 1..75: mol_type = other DNA
tcagtacgacctctcatacctttcgccggatatctgtcatcgttgctctcgtgcttttcgccctggcaaccagcg

SEQ ID NO: 402855 - DNA, 75 bp, synthetic construct
  source 1..75: mol_type = other DNA
tagatgaagttgttgaatacttcattgattacagagggaaaacacctgttaaaacaggttcaggcataccactta

SEQ ID NO: 402856 - DNA, 75 bp, synthetic construct
  source 1..75: mol_type = other DNA
tatggaaggttcaactggcagacaacgagttaacttggatcaccttaagaagttcaatgttaatctgccaacaga

SEQ ID NO: 402857 - DNA, 75 bp, synthetic construct
  source 1..75: mol_type = other DNA
attgggaaataacgactcttgattgtcatattacagtagctaagggattaagctacaagggagccggccttacca

SEQ ID NO: 402858 - DNA, 75 bp, synthetic construct
  source 1..75: mol_type = other DNA
gaagcggttggtgtgcaggtaagtcgcctgatccgtgtgcgttacggtgatattccactgccgaaaggtctgcca

SEQ ID NO: 402859 - DNA, 75 bp, synthetic construct
  source 1..75: mol_type = other DNA
accgtcgtcgtatgaaggcgaatcagattcgtcgtgcggtgaaacgtcatagccaggtgagcggtggtcgccgtt

SEQ ID NO: 402860 - DNA, 75 bp, synthetic construct
  source 1..75: mol_type = other DNA
tatcccactgccgaaaggtctgccacgcggtggctggacggagctggacctcgcccagactaactatctgcgcga

SEQ ID NO: 402861 - DNA, 75 bp, synthetic construct
  source 1..75: mol_type = other DNA
aatgtatacttatgatggcttacattttaatagtaatgggtatacagtattagaaaacgaaatagcggagattgt

SEQ ID NO: 402862 - DNA, 75 bp, synthetic construct
  source 1..75: mol_type = other DNA
tagaaagtgataaaagttcggcgttaattaaaccaattgataattcactgtcattaaggaactttgactgtgatt

SEQ ID NO: 402863 - DNA, 75 bp, synthetic construct
  source 1..75: mol_type = other DNA
ataattgggaaattgatagtttagcagggaaaaaagttaataactatggtatcgcaggaataaatagcgagcaat

SEQ ID NO: 402864 - DNA, 75 bp, synthetic construct
  source 1..75: mol_type = other DNA
caagcagaagaccagcagcaaaatcttaccgtgatcctaataaggtcagtaaagtaaatgtttcagggaagaaat

SEQ ID NO: 402865 - DNA, 75 bp, synthetic construct
  source 1..75: mol_type = other DNA
ctgacattgttacagagaaggtctcttccggcagggctgcaggcggggatcaccaccggcatacagggtacaccc

SEQ ID NO: 402866 - DNA, 75 bp, synthetic construct
  source 1..75: mol_type = other DNA
gacgaaagccataaaaggcattctggcgatcggagacatcatcgggcggctgttcttcaggctaattgagggaac

SEQ ID NO: 402867 - DNA, 75 bp, synthetic construct
  source 1..75: mol_type = other DNA
aaaatgctgaacatgatcgccgacctactcaacgctatcaaagatggccgctgggttgatgccgtcagcatcggc

SEQ ID NO: 402868 - DNA, 75 bp, synthetic construct
  source 1..75: mol_type = other DNA
cgaaagcttatcccatttcagtcgggaatattcgcggatgtttggagagtcacctaagagagatattaccgggtt

SEQ ID NO: 402869 - DNA, 75 bp, synthetic construct
  source 1..75: mol_type = other DNA
gacagtggccacttttatgaaccgggcacggctctggattatcgtgaacgggtacgcctttttgttcagatccag

SEQ ID NO: 402870 - DNA, 75 bp, synthetic construct
  source 1..75: mol_type = other DNA
atcgctgtctcctgccgataagtatgatctcatcaataaaacgtcccgtgtttctcctgacagtggtctgcttta

SEQ ID NO: 402871 - DNA, 75 bp, synthetic construct
  source 1..75: mol_type = other DNA
gagaatatcacctgggcgatttcatcgcagtctcctgccgataagtatgatctcatcaataaaacgtcccgtgtt

SEQ ID NO: 402872 - DNA, 75 bp, synthetic construct
  source 1..75: mol_type = other DNA
gcagaccatgcatatcggcgcccgtcagaagtcgttatggagataggctttgctggtggtggttccttgctggat

SEQ ID NO: 402873 - DNA, 75 bp, synthetic construct
  source 1..75: mol_type = other DNA
aacgcccacaagccacagcgcagggcaaggttttgctcgactggatggggccattgttcaataagctggagtctc

SEQ ID NO: 402874 - DNA, 75 bp, synthetic construct
  source 1..75: mol_type = other DNA
acccgcgttctgtcggtaccgaggtcgagcgccggcagcagtcggcaaacgcccaggtcatgcgcggtaatcaaa

SEQ ID NO: 402875 - DNA, 75 bp, synthetic construct
  source 1..75: mol_type = other DNA
tcggggacatcatcgggcggttgttcttccggcttattgaggggacatccagccttattacctggtggcaatcgc

SEQ ID NO: 402876 - DNA, 75 bp, synthetic construct
  source 1..75: mol_type = other DNA
atgcggtttcgcaggttggcggcagcgtggacgctgcgcgatcttctctggaaagcctctcccggtttattcgta

SEQ ID NO: 402877 - DNA, 75 bp, synthetic construct
  source 1..75: mol_type = other DNA
cctcaatgatttccccggtgctgaaactattcgtctggagcaaaactaccgctctaccagcaatattctgagcgc

SEQ ID NO: 402878 - DNA, 75 bp, synthetic construct
  source 1..75: mol_type = other DNA
agaagcttcaccgtgtctgttcttgctgaaccagaagaaattgttttaccagaaacgcgatccagctcttctaca

SEQ ID NO: 402879 - DNA, 75 bp, synthetic construct
  source 1..75: mol_type = other DNA
ctgaaaacatccacctctcaaaacccaaacagggcatccagaagcgcccctgaccgtgcaagaaagcataagact

SEQ ID NO: 402880 - DNA, 75 bp, synthetic construct
  source 1..75: mol_type = other DNA
cattcctgccgagttaaataatgacgacaagaaaaaacttgttcttgagtattgccagaaaaacttcgttgataa

SEQ ID NO: 402881 - DNA, 75 bp, synthetic construct
  source 1..75: mol_type = other DNA
gagtatcacaaattcataaatgaatttgttctttcatacttgaaagtaaataaggatgttgtgttttcgtataga

SEQ ID NO: 402882 - DNA, 75 bp, synthetic construct
  source 1..75: mol_type = other DNA
gtatagccgcaaactatgtcttcgatgaggtccaaggcatctatgtatcacgtgctgagcatgagagaagaggca

SEQ ID NO: 402883 - DNA, 75 bp, synthetic construct
  source 1..75: mol_type = other DNA
agaagcttcaccgtggctgttcttgctgaaccagaagagattgtattaccagaaacgcgttccggttcttctacc

SEQ ID NO: 402884 - DNA, 75 bp, synthetic construct
  source 1..75: mol_type = other DNA
tatcgcctggctgatgagcgtggaaaactgctcgccgtactcgattatggcggtgacgtttaccaacaaagcggc

SEQ ID NO: 402885 - DNA, 75 bp, synthetic construct
  source 1..75: mol_type = other DNA
gaagagtgtgtggaagaggtgcgcctgcgcgccacggtaagccgcccggtcagccatcagcgtatgggtacgccg

SEQ ID NO: 402886 - DNA, 75 bp, synthetic construct
  source 1..75: mol_type = other DNA
gccggacgtgctgccagcgccttacagcggtttatggaactgatcgacgccttagcgcaggaaactgccgatatg

SEQ ID NO: 402887 - DNA, 75 bp, synthetic construct
  source 1..75: mol_type = other DNA
caagtttaaccaagataactataaaccaacaccggatgagatcaaccgttttccaagccgcttaactaaagccga

SEQ ID NO: 402888 - DNA, 75 bp, synthetic construct
  source 1..75: mol_type = other DNA
aggatttccagatcctcgatagcgaggaccagctgcgcctgcttaagcgtctgattaaggcgatgaatctcgacg

SEQ ID NO: 402889 - DNA, 75 bp, synthetic construct
  source 1..75: mol_type = other DNA
caccatatggacgccaatctgccgcaggatttccagatcctcgacagtgaagaccagctacgcctgcttaagcgt

SEQ ID NO: 402890 - DNA, 75 bp, synthetic construct
  source 1..75: mol_type = other DNA
gccgcgtgccgaaaccgcccgtcaggcactgagcaccagccgcctgattgtgactaaagatttagcgcagtgcgt

SEQ ID NO: 402891 - DNA, 75 bp, synthetic construct
  source 1..75: mol_type = other DNA
taaccaacgatttagcgcagtgcgtggagatctccaatcagtacggtccggagcacctgatcattcagacccgca

SEQ ID NO: 402892 - DNA, 75 bp, synthetic construct
  source 1..75: mol_type = other DNA
aggaaggacatcaaattggctggcaggagggtaaattagaaggcatgcatgaacaagccattaaaattgccttgc

SEQ ID NO: 402893 - DNA, 75 bp, synthetic construct
  source 1..75: mol_type = other DNA
ataccgtcgatttactctgtttccggcactacggcaccacgcagggggtgaccgcacaggtacttgatgccaatc

SEQ ID NO: 402894 - DNA, 75 bp, synthetic construct
  source 1..75: mol_type = other DNA
ggaagccggacaggaagtggaattaccggagcaggaagagaaaaaaacacaggagacggtgcagttatgggatta

SEQ ID NO: 402895 - DNA, 75 bp, synthetic construct
  source 1..75: mol_type = other DNA
caggcccgtcggaagtgctggtgattgctgacagcggcgcaacgccggatttcgtggcttctgatttgctttctc

SEQ ID NO: 402896 - DNA, 75 bp, synthetic construct
  source 1..75: mol_type = other DNA
tcgacctatctgtttaacagccagttgttgagccgtgatgacggttcgatggtgttggtgctgccgcaggagtgt

SEQ ID NO: 402897 - DNA, 75 bp, synthetic construct
  source 1..75: mol_type = other DNA
tgcgctcaataactggatagaccattactatcgcgatcgtcttactaccgccgatctggccgacccgcagttgct

SEQ ID NO: 402898 - DNA, 75 bp, synthetic construct
  source 1..75: mol_type = other DNA
tatgcaactttttgtctacgggcgagaagagggcaatgatacccggccttcccgttatccggcgcgacagactcg

SEQ ID NO: 402899 - DNA, 75 bp, synthetic construct
  source 1..75: mol_type = other DNA
tgagaaaacttccggcagaaataaaaccggtagtgatgcgcattatggctacgtatgcgtttgaagattatgccc

SEQ ID NO: 402900 - DNA, 75 bp, synthetic construct
  source 1..75: mol_type = other DNA
ggaaagggggaggtatccacagcttgtaaagattgccgtgggcgcggtgttgccatgcatcgtgaagagtcggaa

SEQ ID NO: 402901 - DNA, 75 bp, synthetic construct
  source 1..75: mol_type = other DNA
tcgctatccattcggcgttgccacaggtggccttgctcggtgacgagggggcggcaaaccacaatcgtctgggcg

SEQ ID NO: 402902 - DNA, 75 bp, synthetic construct
  source 1..75: mol_type = other DNA
cggcgacaacgcgcgctaactcctattataacattgccaaaatttatgaaactgctggacaggacgctgatgcat

SEQ ID NO: 402903 - DNA, 75 bp, synthetic construct
  source 1..75: mol_type = other DNA
cttttctctgattcccggataagggtgactttcgatggcgtccggggggaaacgccggataagtttaatttatcc

SEQ ID NO: 402904 - DNA, 75 bp, synthetic construct
  source 1..75: mol_type = other DNA
cggtgagtgaactgagcgagacagagaagcagacggtctcgacactggcaacggttgctgctggtctggccggtg

SEQ ID NO: 402905 - DNA, 75 bp, synthetic construct
  source 1..75: mol_type = other DNA
tggactattgatattaaggggaataaacaactttctgacattgcatataaatacaaagatgtggagataaaattt

SEQ ID NO: 402906 - DNA, 75 bp, synthetic construct
  source 1..75: mol_type = other DNA
caggtaatcgacatgggagaaacacctgtacgggatttacagaacagtagtgttggagcagaaaagaaatttcgc

SEQ ID NO: 402907 - DNA, 75 bp, synthetic construct
  source 1..75: mol_type = other DNA
atgacccttcctgaatactggggagaagaacacgtatggtgggacggcagggctgcttttcatggtgaggttgtc

SEQ ID NO: 402908 - DNA, 75 bp, synthetic construct
  source 1..75: mol_type = other DNA
tgaaacgccggataagtttaatttatccggtcaggcaaaaggaattaatctacagatagctgatgccaggggaaa

SEQ ID NO: 402909 - DNA, 75 bp, synthetic construct
  source 1..75: mol_type = other DNA
atgttaagggggcatggctccgatgacgcgcaggctggcggtgaaacggtgaaagtggatgccggtcgtcatctg

SEQ ID NO: 402910 - DNA, 75 bp, synthetic construct
  source 1..75: mol_type = other DNA
aataccagcaggcgatacaggccgcaacggcagcagtacaggggctggccggcggtaatctgagtgcagccctgg

SEQ ID NO: 402911 - DNA, 75 bp, synthetic construct
  source 1..75: mol_type = other DNA
acggcgctggcaacgtttattttcaacaccggtgttaccgcattcagtaaatcaacgctgctgaaaaaactcaat

SEQ ID NO: 402912 - DNA, 75 bp, synthetic construct
  source 1..75: mol_type = other DNA
ctatcagatggttcggtaataacacttagaaacatatctacatcagaaggtcagacaggcgctcgttggactata

SEQ ID NO: 402913 - DNA, 75 bp, synthetic construct
  source 1..75: mol_type = other DNA
agcccgtcatcaggaggttcagcaacaacgatttgatgaactgagtaaaatatatgataaaagtcacccggccgg

SEQ ID NO: 402914 - DNA, 75 bp, synthetic construct
  source 1..75: mol_type = other DNA
ggtaagtaaccgttatggtacgacgaaagtgtttgaaagccagaatttgacggataaacagatccacaattacgc

SEQ ID NO: 402915 - DNA, 75 bp, synthetic construct
  source 1..75: mol_type = other DNA
gtcattacggtgaaccgggaatgcagatttttgtttacgggcgagaggagggcaatgatacccgaccgtcccgct

SEQ ID NO: 402916 - DNA, 75 bp, synthetic construct
  source 1..75: mol_type = other DNA
ctatgaaagattaccttcaacggaggcatttaatgccatatgtaatgtaaccgatgccatatctcttgatacatg

SEQ ID NO: 402917 - DNA, 75 bp, synthetic construct
  source 1..75: mol_type = other DNA
agatccagtatccggatggtaagccgccagtgtgggcaaagtgcacaaaaggcgtgtatccgtcttactgggagg

SEQ ID NO: 402918 - DNA, 75 bp, synthetic construct
  source 1..75: mol_type = other DNA
caccctgcgtcctgcagggatgcatcaggcatacggtaataaagttggtctgtacagagtggataacccgacgga

SEQ ID NO: 402919 - DNA, 75 bp, synthetic construct
  source 1..75: mol_type = other DNA
agtaaagaggggactgatgccaatctggatgttgatgatacggatagctatggaccagaaactgtcactatcagc

SEQ ID NO: 402920 - DNA, 75 bp, synthetic construct
  source 1..75: mol_type = other DNA
agtcggtgcgatcgtgtggcggcgttgagaaaacttccggcagaaataaaaccggtagtgatgcgcattatggct

SEQ ID NO: 402921 - DNA, 75 bp, synthetic construct
  source 1..75: mol_type = other DNA
actactccccaaaatcccctggcctgaccgatgcatcggcctcaacgtcaaaagatacgctgagtatcactgatg

SEQ ID NO: 402922 - DNA, 75 bp, synthetic construct
  source 1..75: mol_type = other DNA
ctgcttgggcattagaccgccctgtaacagaagtgttgaaagtggaaactaaagattcaattggacctctgttta

SEQ ID NO: 402923 - DNA, 75 bp, synthetic construct
  source 1..75: mol_type = other DNA
aaggcttagcatttctgaaagaagctgtagcacttatggctgatggaaaagctgaggatgttctgcgacatgcgc

SEQ ID NO: 402924 - DNA, 75 bp, synthetic construct
  source 1..75: mol_type = other DNA
cgctggccgccgccgagctgctgaccgcccacaaaaatgccgttaccctgcgcgtgaacgccctgaaggagcaag

SEQ ID NO: 402925 - DNA, 75 bp, synthetic construct
  source 1..75: mol_type = other DNA
gtgatggccgcgcagggcatgacacagaatcgggctgagatgggtttttctgcgttcctggggaaaatgggcatc

SEQ ID NO: 402926 - DNA, 75 bp, synthetic construct
  source 1..75: mol_type = other DNA
aggtggttagataaggcctttaaatcatctacttcgacagtaaaacaatatcaaggtaaaagtaaagtaaataaa

SEQ ID NO: 402927 - DNA, 75 bp, synthetic construct
  source 1..75: mol_type = other DNA
gactgggttgtattcgggtctgctggaggtaaatggccatgcgccgcttacacacgcggagagcagattccctgc

SEQ ID NO: 402928 - DNA, 75 bp, synthetic construct
  source 1..75: mol_type = other DNA
gagatggggttttctgcgttcctggggaaaatgggcatcagtatgaatgacagggcgcgggcaacagaattactg

SEQ ID NO: 402929 - DNA, 75 bp, synthetic construct
  source 1..75: mol_type = other DNA
ccctgctccccaaagcagcggaagacgacagattgactcagttggccaaggccggcggcttctccctgcacgccg

SEQ ID NO: 402930 - DNA, 75 bp, synthetic construct
  source 1..75: mol_type = other DNA
tacgacttcccaccgttgtatcgtgattttcgtaattttcgcgcttatctggcaatgttgctggcgaataatgga

SEQ ID NO: 402931 - DNA, 75 bp, synthetic construct
  source 1..75: mol_type = other DNA
aaagctgggagacatctttcattccttttacaccagaacaacaaatcctttggcaattaggttttaatgaatggc

SEQ ID NO: 402932 - DNA, 75 bp, synthetic construct
  source 1..75: mol_type = other DNA
tgatgatgaacgatacgctgtttaatgcgctcaatgactgggtggatcgttactaccgcgatcgtcttactgctg

SEQ ID NO: 402933 - DNA, 75 bp, synthetic construct
  source 1..75: mol_type = other DNA
atccggcgcggcagactcgcgaagccagcgaggcggtggcaaggctgaatcaggtgaatccccaacaggtgattt

SEQ ID NO: 402934 - DNA, 75 bp, synthetic construct
  source 1..75: mol_type = other DNA
gcaggtttccgtgtcggatgcggtttcgacctatctgtttaacagccaactgttgagccgtgatgacggttccat

SEQ ID NO: 402935 - DNA, 75 bp, synthetic construct
  source 1..75: mol_type = other DNA
aatggaaaaaagtcagggaggtggtaaaagttgcctgtccggagtgtggcggaaagggtgaggtttccaccgcct

SEQ ID NO: 402936 - DNA, 75 bp, synthetic construct
  source 1..75: mol_type = other DNA
gggaagggggagatttccactgcctgtaaagactgccgtgggcgtggtgttgccattcatcgtgaagagtcggaa

SEQ ID NO: 402937 - DNA, 75 bp, synthetic construct
  source 1..75: mol_type = other DNA
atgaagctggaagatttaccgaaatactactccccaaaatcgcctggcctgactgatgcatccgtctcgacgtca

SEQ ID NO: 402938 - DNA, 75 bp, synthetic construct
  source 1..75: mol_type = other DNA
ccagattcagtgaaatcgcgaaatatcaggcatcacagcaaaccttatttaccgatctgccactaattgaaaagg

SEQ ID NO: 402939 - DNA, 75 bp, synthetic construct
  source 1..75: mol_type = other DNA
gtagtgcagcgagcaaaaagcagtgtccttgttgccgtggggaaaaatttattgaaagcgaagtttttacaaaca

SEQ ID NO: 402940 - DNA, 75 bp, synthetic construct
  source 1..75: mol_type = other DNA
aggttcagtatccggatggcaagccgccagtatgggcaaagtgtacgaagggtgtgtatccgtcttactgggaag

SEQ ID NO: 402941 - DNA, 75 bp, synthetic construct
  source 1..75: mol_type = other DNA
gaaggttttgccgtcgaggtctttgagcgaggcttgccggtgctggataaagctcgccagcaggttcccgatgtc

SEQ ID NO: 402942 - DNA, 75 bp, synthetic construct
  source 1..75: mol_type = other DNA
cttactgcgtcgggtgaagaagttctcgacgccgtctcccgtcatccgtattggtcattttgaattgaatgaacc

SEQ ID NO: 402943 - DNA, 75 bp, synthetic construct
  source 1..75: mol_type = other DNA
cgcaggtagagaatattcagcgtttcctcaatgatttccccggtgctgaaactatccgtctggagcagaactacc

SEQ ID NO: 402944 - DNA, 75 bp, synthetic construct
  source 1..75: mol_type = other DNA
ctgcatataagtgcgagcctgttaaaaaagaaactcaaagaggagaacacaagtttttgtaaaataaagaaccag

SEQ ID NO: 402945 - DNA, 75 bp, synthetic construct
  source 1..75: mol_type = other DNA
cggcagcaattgatggattgtgtctgggaagatgcgcaggatacctacgatcgtactgtcgatacccatattaaa

SEQ ID NO: 402946 - DNA, 75 bp, synthetic construct
  source 1..75: mol_type = other DNA
tgggctggagataggcgctgatgactacgtggctaaacctttttctcctcgtgaagtgtgcgccagagtgcgcac

SEQ ID NO: 402947 - DNA, 75 bp, synthetic construct
  source 1..75: mol_type = other DNA
gatgaattagagcgtggtgaaagggtagtttctgagtcatcatgggatagttatatcggaatgatggcaagcgct

SEQ ID NO: 402948 - DNA, 75 bp, synthetic construct
  source 1..75: mol_type = other DNA
aacggcggacgctgggtgagttttaactgggaaagctggcacccgaatgtcgtccagccaggaatcacaaagtaa

SEQ ID NO: 402949 - DNA, 75 bp, synthetic construct
  source 1..75: mol_type = other DNA
gctggtggaggttccgcagacggtccgcaatctgtcagaggccatgaaggaaacggaatcactggtttatgccgg

SEQ ID NO: 402950 - DNA, 75 bp, synthetic construct
  source 1..75: mol_type = other DNA
tcctctcccatgcggcactggaagcaggtgaagggcaggcggatacctggcaggatgcggtgcagttgatgacgc

SEQ ID NO: 402951 - DNA, 75 bp, synthetic construct
  source 1..75: mol_type = other DNA
cggtgaacatagccgtttgcaggtggcattccagggccagggaatcaaatggctggtggcggcttacgcccggct

SEQ ID NO: 402952 - DNA, 75 bp, synthetic construct
  source 1..75: mol_type = other DNA
ataacgtcgatattcaaattaagtaaatatcaaccgacggggactctccccgtcataaacgttaacgccccactc

SEQ ID NO: 402953 - DNA, 75 bp, synthetic construct
  source 1..75: mol_type = other DNA
tgaatcgttcgggcatccagcctctgcacagcaaatgctcgtttgcgaattatcaggtgcagaatgacgggcaaa

SEQ ID NO: 402954 - DNA, 75 bp, synthetic construct
  source 1..75: mol_type = other DNA
gggcaatcaggcgaaaaatttttgcgggaactgtgccaagtggatctgctggttcttgatgaaattggcattcag

SEQ ID NO: 402955 - DNA, 75 bp, synthetic construct
  source 1..75: mol_type = other DNA
tgccctgcatgccagctatgacgacggacagtcaggcgaaaaatttttgcgggaactgtgcgaagtggatctgct

SEQ ID NO: 402956 - DNA, 75 bp, synthetic construct
  source 1..75: mol_type = other DNA
ggcaacttgctgaaggccagaaacgttgtgaggagatcaaccgtcagaatcgtcagttgcgggtggaaaaaattc

SEQ ID NO: 402957 - DNA, 75 bp, synthetic construct
  source 1..75: mol_type = other DNA
ggcgtcggcatggtgtttcagtcttacgcgctctatccccacctgtctgtagcagaaaacatgtcgtttggtctg

SEQ ID NO: 402958 - DNA, 75 bp, synthetic construct
  source 1..75: mol_type = other DNA
tggtttactgaatttggccacctgaacagaggtgatatgctcacctcagaacaacacaggtgccataatgaaaaa

SEQ ID NO: 402959 - DNA, 75 bp, synthetic construct
  source 1..75: mol_type = other DNA
aacggcggacgctgggtgaattttaactgggaaagctggcgcccgaatgtcgtccagccaggaatcacgaagtga

SEQ ID NO: 402960 - DNA, 75 bp, synthetic construct
  source 1..75: mol_type = other DNA
cattgcaggcgaactgataaccgggtgcacgaattttgtgttcagcggtaagccgggtaccggaaagaatcatct

SEQ ID NO: 402961 - DNA, 75 bp, synthetic construct
  source 1..75: mol_type = other DNA
gagcgaagacggtcacggtgtggtgttcccggctgaactggtgcggctgctggacagactggaggaagaaatccg

SEQ ID NO: 402962 - DNA, 75 bp, synthetic construct
  source 1..75: mol_type = other DNA
tgattttgaatcaaaagtgggtttaaaagtctttgaccgaaccacccggcagctgatgctcacaccttttggcac

SEQ ID NO: 402963 - DNA, 75 bp, synthetic construct
  source 1..75: mol_type = other DNA
ccatgaaaacattgctcggcgagcgggttatggatcgcatgaccatgaacggcggacgctgggtgaattttaact

SEQ ID NO: 402964 - DNA, 75 bp, synthetic construct
  source 1..75: mol_type = other DNA
ctccggggtgaaaacgccagtgcaaaaaaatgaatcaatactgagccggttaagtggctttgtagcgggagggta

SEQ ID NO: 402965 - DNA, 75 bp, synthetic construct
  source 1..75: mol_type = other DNA
taagggtgcttcaaactcgtaatgacgctcggaaaaacaaagctaaaaaatacagcgtcaacatccagattaagt

SEQ ID NO: 402966 - DNA, 75 bp, synthetic construct
  source 1..75: mol_type = other DNA
atcaatttgatgaaaagaagaagccagaaatttgaaaatgaacttagaaatcttattgagtcagtaaagcgctaa

SEQ ID NO: 402967 - DNA, 75 bp, synthetic construct
  source 1..75: mol_type = other DNA
ctaactctatcgtctttgatgaagcagaaaaccgcatgcataccattaaagcggtcatggtggcgacactcgacg

SEQ ID NO: 402968 - DNA, 75 bp, synthetic construct
  source 1..75: mol_type = other DNA
actaaataaaacgttgctttggagtagggggattattccccaattgagtgattataatttgcatgtttcctctca

SEQ ID NO: 402969 - DNA, 75 bp, synthetic construct
  source 1..75: mol_type = other DNA
ttcttgttgagggagatacggaaaaagcattgtttcaggatttcaaaacattgctaggctatcctattaagaaaa

SEQ ID NO: 402970 - DNA, 75 bp, synthetic construct
  source 1..75: mol_type = other DNA
atggcgcaaaaaataacaccatctaaaattgttaaacatgcccgggagttaattattaagggtattgaatcgggc

SEQ ID NO: 402971 - DNA, 75 bp, synthetic construct
  source 1..75: mol_type = other DNA
gtttaaaaaacaccaacaggaaagagagcgatctgtggggaaagaaccaatttaacagttcttttcccacctctc

SEQ ID NO: 402972 - DNA, 75 bp, synthetic construct
  source 1..75: mol_type = other DNA
cgatgccatacattatcccagaagcagatttcgatagaaaactgaacatgtctgagaagaacactagtcacaccg

SEQ ID NO: 402973 - DNA, 75 bp, synthetic construct
  source 1..75: mol_type = other DNA
cgatggcgtccggggtgaaacgccggataagtttaatttatccggtcaggcaaaaggaattaatctgcagatagc

SEQ ID NO: 402974 - DNA, 75 bp, synthetic construct
  source 1..75: mol_type = other DNA
tggtctgcagggcgaaacgcctgacaaattctcgctgaccggtcaggcagaaggtatcaatctgcagatactgga

SEQ ID NO: 402975 - DNA, 75 bp, synthetic construct
  source 1..75: mol_type = other DNA
ggcaattgatatgggggagaccccggttcgcgatttgcaggacagtttcgctggtcctgaaaagaaattccgtct

SEQ ID NO: 402976 - DNA, 75 bp, synthetic construct
  source 1..75: mol_type = other DNA
taatatctgtattaacgccgccaagtatcatatcaggagttgcttcgattattctctggagttatttcagtcacc

SEQ ID NO: 402977 - DNA, 75 bp, synthetic construct
  source 1..75: mol_type = other DNA
ccagggcggccgtcttcacgttctgccttgcgcagatgagatagatctagcgtggactcaaggctctcgcgaatg

SEQ ID NO: 402978 - DNA, 75 bp, synthetic construct
  source 1..75: mol_type = other DNA
cattgacgggtaatgaagaagcgctggattacaccctcagaattgtgagaaacggaaaaaaacttgaagccggaa

SEQ ID NO: 402979 - DNA, 75 bp, synthetic construct
  source 1..75: mol_type = other DNA
tttaaggcatttgtgcaggccacatcagaagccattacaaacaaggccgttcagccgggagattacaacgctacg

SEQ ID NO: 402980 - DNA, 75 bp, synthetic construct
  source 1..75: mol_type = other DNA
ccctgatgctgaaccgcataccgcctcacgacgcctgcatccgcacgatgaaagcgctggagcagttgctctgcc

SEQ ID NO: 402981 - DNA, 75 bp, synthetic construct
  source 1..75: mol_type = other DNA
tctctaccaaaagaggatggatatacgttcattccaaacgcatttctggaaaaggtaagcgactcgtcagaaccg

SEQ ID NO: 402982 - DNA, 75 bp, synthetic construct
  source 1..75: mol_type = other DNA
gtgtactgatgctggcctgcagtcttttgccagtatgtgatgtgatcgctgctggtagtacaaccatcaccatcc

SEQ ID NO: 402983 - DNA, 75 bp, synthetic construct
  source 1..75: mol_type = other DNA
tctgcatccaatggatgaaaagaaaaagttcaaggtttgataacgaaatcagaaatattatttataagttagtta

SEQ ID NO: 402984 - DNA, 75 bp, synthetic construct
  source 1..75: mol_type = other DNA
ctcctatctcgctcagcaacttttatctgcatccaatggatgaaaagaaaaagttcaaggtttgataacgaaatc

SEQ ID NO: 402985 - DNA, 75 bp, synthetic construct
  source 1..75: mol_type = other DNA
tgtcatcagttccaacccaacaaatgctcagatcttggtaaaaacaaatgatggcgatgaaaagcagatttcagc

SEQ ID NO: 402986 - DNA, 75 bp, synthetic construct
  source 1..75: mol_type = other DNA
gagaattccctggcgaacagggcattctggccaatgaaacgcataaaattaacatgcaggaaaagctgctggcga

SEQ ID NO: 402987 - DNA, 75 bp, synthetic construct
  source 1..75: mol_type = other DNA
ttataggggaaagcccggtagtggttcatgggatcaaaacggtaaaggggacacgtgggtacaaaatcagatggt

SEQ ID NO: 402988 - DNA, 75 bp, synthetic construct
  source 1..75: mol_type = other DNA
tgttattattttaattgtgatgtcagtgagttgctggaatttacttcggatgagtatcacgttgaattatctcgt

SEQ ID NO: 402989 - DNA, 75 bp, synthetic construct
  source 1..75: mol_type = other DNA
actatggcatacgcacattttgcaccggattatctggcagatgccatgagatttaacccggtagccaacatagtg

SEQ ID NO: 402990 - DNA, 75 bp, synthetic construct
  source 1..75: mol_type = other DNA
gcagttccatggcggtactgcgggtgctcccaaagccattgaatgagcccaattacttcttccagtctacctggc

SEQ ID NO: 402991 - DNA, 75 bp, synthetic construct
  source 1..75: mol_type = other DNA
accgtcaacgcatctgatgagcgctgaacgcattccggcgatcgacggaacaaccgtttacccgctgcgttatgg

SEQ ID NO: 402992 - DNA, 75 bp, synthetic construct
  source 1..75: mol_type = other DNA
ttaaatgtgcgtggcggcgaggcagacagttcgcttatcgcgccgttacttgctgaggcgtttgccgatcgcatt

SEQ ID NO: 402993 - DNA, 75 bp, synthetic construct
  source 1..75: mol_type = other DNA
ggcgaacggcttagtgcgcaagggcaaaaaatggcgacactgggtaacgatccacgtttagcggcaatgctggtg

SEQ ID NO: 402994 - DNA, 75 bp, synthetic construct
  source 1..75: mol_type = other DNA
ctgaacgatcagcgaaaagcgatccttccggcaccgcaaggaatgcgtaaagtggtgctggcaaccaatatcgct

SEQ ID NO: 402995 - DNA, 75 bp, synthetic construct
  source 1..75: mol_type = other DNA
cgacgctggaaacgtggctactgccgcatatgacaggcgtacattcgctacgcggcctgaaatcactcgatattt

SEQ ID NO: 402996 - DNA, 75 bp, synthetic construct
  source 1..75: mol_type = other DNA
gtggttgccggaatatgactggccagcggttgatgatgaaagtttgttggcgacgctggaaacgtggctgctgcc

SEQ ID NO: 402997 - DNA, 75 bp, synthetic construct
  source 1..75: mol_type = other DNA
gaatacccgactggaagtcgttactgaaggtgtactgacgcgcatgatccaacgcgacccagaactgagcggcgt

SEQ ID NO: 402998 - DNA, 75 bp, synthetic construct
  source 1..75: mol_type = other DNA
ggaacgggtagcgcgctttgactcgcgtaccggtcttacccgattaattacccagcgagtcagtcaggcgtcgat

SEQ ID NO: 402999 - DNA, 75 bp, synthetic construct
  source 1..75: mol_type = other DNA
caatagtgacctgggcgtggcgttttcgcgcaatcaaccagcctggcagcaacgtagtcagcaactgttaaaacg

SEQ ID NO: 403000 - DNA, 75 bp, synthetic construct
  source 1..75: mol_type = other DNA
gaatacccgcctggaagtggttaccgaaggcgtgctgacgcgcatgatccagcgtgacccggaactgagcggtgt

SEQ ID NO: 403001 - DNA, 75 bp, synthetic construct
  source 1..75: mol_type = other DNA
atttttacccggcgtcggagaaattcagcgcgttcaggaacaactgtcttcgcgcatcggcagtgatgtgttgct

SEQ ID NO: 403002 - DNA, 75 bp, synthetic construct
  source 1..75: mol_type = other DNA
tatcgctcaggggcgcgtgccgctggtgctggaattgctttcacccgcccagaggccgctgcaaatcacgcgtga

SEQ ID NO: 403003 - DNA, 75 bp, synthetic construct
  source 1..75: mol_type = other DNA
tggcgctggcactattgctggacgtgcaacaagggctgcgcgatgacttaaaactgctcattatgtcggccacgc

SEQ ID NO: 403004 - DNA, 75 bp, synthetic construct
  source 1..75: mol_type = other DNA
tggcaggggcgacagtatcaggcgtaccccattcaggggagcggatttgagatgaacggtaaaggagccagcgcc

SEQ ID NO: 403005 - DNA, 75 bp, synthetic construct
  source 1..75: mol_type = other DNA
caacgtatagcgttagagagcctcaatgtagatacctttgctcaagcctggtttgccgagcgtaaacaacatgat

SEQ ID NO: 403006 - DNA, 75 bp, synthetic construct
  source 1..75: mol_type = other DNA
aagtttgctgatccagactggagccaacgcatagccttagagagcctgaatgtcgattcctttgctcaagcctag

SEQ ID NO: 403007 - DNA, 75 bp, synthetic construct
  source 1..75: mol_type = other DNA
gtggagcagatgtcgcagctgacagccatgacggcctcgtttgtgctggctacaccgaccgagacggatggggcg

SEQ ID NO: 403008 - DNA, 75 bp, synthetic construct
  source 1..75: mol_type = other DNA
gtgcagaaattggtgaggcgatggctcgggcggtcgtaaaacctgcatcccgtgcacgtcggcgtctttcgtttg

SEQ ID NO: 403009 - DNA, 75 bp, synthetic construct
  source 1..75: mol_type = other DNA
aaagatattcctttccctgggctacgcgaacaattgcagaaaacaggcgaggaaatccctgatgttggtgaagat

SEQ ID NO: 403010 - DNA, 75 bp, synthetic construct
  source 1..75: mol_type = other DNA
atgaaaaaaattgctattgtgggtgccgggccaacagggatctacactctcttctcgcttttacagcaaccaacg

SEQ ID NO: 403011 - DNA, 75 bp, synthetic construct
  source 1..75: mol_type = other DNA
gacccggagcaggagctgaggaccggtgggtggtggagcagatgtcagctgacggccatgacggcctcgtttgtg

SEQ ID NO: 403012 - DNA, 75 bp, synthetic construct
  source 1..75: mol_type = other DNA
caccgcgggtggtactctgggaaatcgacctgacggtgcagggtggtgagcggtattttttctgcaatgagctga

SEQ ID NO: 403013 - DNA, 75 bp, synthetic construct
  source 1..75: mol_type = other DNA
actgagtgcggttagtgcctcctttgtgctctccacaccgacggaaacggatggtgctgtttttccggggcgcat

SEQ ID NO: 403014 - DNA, 75 bp, synthetic construct
  source 1..75: mol_type = other DNA
agcggtattttttctgtaatgagctgaatgaaaaaggggagccggtgacctggcaggggcggaagtatgaggcgt

SEQ ID NO: 403015 - DNA, 75 bp, synthetic construct
  source 1..75: mol_type = other DNA
ttcacgaccgacgctgacggtttctaacctggacggtatggtcaccggaatggcggaagatgtgcagagtctggt

SEQ ID NO: 403016 - DNA, 75 bp, synthetic construct
  source 1..75: mol_type = other DNA
ttcacgaccgaccctgacggtttctaacctggacggtatggtcaccggaatggcggaagatctgcagagtctggt

SEQ ID NO: 403017 - DNA, 75 bp, synthetic construct
  source 1..75: mol_type = other DNA
ttcacgaccgactctgacggtttctaacctggacggtatggtcaccggaatggcggaagatttgcagagtctggt

SEQ ID NO: 403018 - DNA, 75 bp, synthetic construct
  source 1..75: mol_type = other DNA
ctgaaaacacagggtaaccgttatgttgttcaactggggggagacattgcacagtggggctggggagaaactgac

SEQ ID NO: 403019 - DNA, 75 bp, synthetic construct
  source 1..75: mol_type = other DNA
atcatgagacgacacgccttactcagtcagcccaggcggtgctctgggaaatcgatctgacagaggtcggtggtg

SEQ ID NO: 403020 - DNA, 75 bp, synthetic construct
  source 1..75: mol_type = other DNA
ttcacgacctacactgacggtttctaacctggacggtatggtcaccggaatggcggaagatttgcagagtctggt

SEQ ID NO: 403021 - DNA, 75 bp, synthetic construct
  source 1..75: mol_type = other DNA
ttcacgaccaacactgacggtttctaacctggacggtatggtcaccggaatggcggaagatgtgcagagtctggt

SEQ ID NO: 403022 - DNA, 75 bp, synthetic construct
  source 1..75: mol_type = other DNA
ttcacgaccgacactgacggtttctaacctggacggtatggtcaccggaatggcggaagatatgcagagtctggt

SEQ ID NO: 403023 - DNA, 75 bp, synthetic construct
  source 1..75: mol_type = other DNA
ttcacgacccaccctgacggtttctaacctggacggtatggtcaccggaatggcggaagatgtgcagagtctggt

SEQ ID NO: 403024 - DNA, 75 bp, synthetic construct
  source 1..75: mol_type = other DNA
ttcacgacctactctgacggtttctaacctggacggtatggtcaccggaatggcggaagatgtgcagagtctggt

SEQ ID NO: 403025 - DNA, 75 bp, synthetic construct
  source 1..75: mol_type = other DNA
acctatcgcggtgatgagtgcggttataacggtccggttgttgcggatgaatatgaccagccgacgtccgatatc

SEQ ID NO: 403026 - DNA, 75 bp, synthetic construct
  source 1..75: mol_type = other DNA
gctgacagccatgacggcctcgtttgtgctggcaacaccgaccgagacggagggggcgctgtttcccggtcgtat

SEQ ID NO: 403027 - DNA, 75 bp, synthetic construct
  source 1..75: mol_type = other DNA
gatgaacggtaagggcagcagcgcacgtcccacgcttaaggtatcaaacctgcacggcatggtcaccgggatggc

SEQ ID NO: 403028 - DNA, 75 bp, synthetic construct
  source 1..75: mol_type = other DNA
gtgaggcctttgaataagacaaaaggctgcctcatcgctaactttgcaacagtgccaggaaaagaaatttccgtg

SEQ ID NO: 403029 - DNA, 75 bp, synthetic construct
  source 1..75: mol_type = other DNA
gctgacagccatgacggcctcgtttgtgctggccacaccgaccgagacggatggggcgctgtttcccggtcgaat

SEQ ID NO: 403030 - DNA, 75 bp, synthetic construct
  source 1..75: mol_type = other DNA
gctgacagccatgacggcctcgtttgtgctggctacaccgaccgagacggagggggcgctgtttcccggtcggat

SEQ ID NO: 403031 - DNA, 75 bp, synthetic construct
  source 1..75: mol_type = other DNA
ataacatatccattcacacatcgggcgatggtgcagattcagtagttgcaactaacaatggtaaagctgaattca

SEQ ID NO: 403032 - DNA, 75 bp, synthetic construct
  source 1..75: mol_type = other DNA
tgaatgagtgtacaaaagcggagcaatccgcactggtcgtgctctgggaagtcgatctgacagaagtcggtggcg

SEQ ID NO: 403033 - DNA, 75 bp, synthetic construct
  source 1..75: mol_type = other DNA
cgcccgtcactgacggtgtccaatctgtttggccttgtcaccgggatggcggaggacctgcagagtctggtgggg

SEQ ID NO: 403034 - DNA, 75 bp, synthetic construct
  source 1..75: mol_type = other DNA
tgtttggccttgtcaccggcatggcggaggacctgcagagcctggtgggggccacggtggtccgccgccgggtgt

SEQ ID NO: 403035 - DNA, 75 bp, synthetic construct
  source 1..75: mol_type = other DNA
gaatgaaaaagggaggcggttacctggcaggggcgggaatatcaggcatacccgattgacggcagcggttttgag

SEQ ID NO: 403036 - DNA, 75 bp, synthetic construct
  source 1..75: mol_type = other DNA
tcttggagcaggcgctgctattgaaactaagggagagcaatctgacgcaatccaaatcatcgaaagtaacggtgg

SEQ ID NO: 403037 - DNA, 75 bp, synthetic construct
  source 1..75: mol_type = other DNA
actggcgtattgaacagtgcagcgatctgacggcggtgacggcaacgtttgttctggcctcgccagcggagacag

SEQ ID NO: 403038 - DNA, 75 bp, synthetic construct
  source 1..75: mol_type = other DNA
gagcggatgccgggagctggacaagcccgtcagggcgcgtcagggggtttcggggcgaagccctgaaccagtcac

SEQ ID NO: 403039 - DNA, 75 bp, synthetic construct
  source 1..75: mol_type = other DNA
aggccaccatgtgcgaacggctgcacgaactggcggaagaactctgtaacagcgtacagacacactttgaagcgc

SEQ ID NO: 403040 - DNA, 75 bp, synthetic construct
  source 1..75: mol_type = other DNA
aagggcagcagtgcctgtccgtcgctgacggtgtcgaatctgttaggtctggtcaccggtatggcggaggacctg

SEQ ID NO: 403041 - DNA, 75 bp, synthetic construct
  source 1..75: mol_type = other DNA
aagggcagcagtgcctgaccgtcgctgacggtgtcgaatctgttgggtctggtcaccggcatggcggaggacctg

SEQ ID NO: 403042 - DNA, 75 bp, synthetic construct
  source 1..75: mol_type = other DNA
aagggcagcagtgcctgaccgtcgctgacggtgtcgaatctgttcggtctggtcaccgggatggcggaggacctg

SEQ ID NO: 403043 - DNA, 75 bp, synthetic construct
  source 1..75: mol_type = other DNA
gcgctgtttcccggtcgcatcatgctggcgaatacctgtatgtggacctaccgctctgatgagtgtggttacacg

SEQ ID NO: 403044 - DNA, 75 bp, synthetic construct
  source 1..75: mol_type = other DNA
ggagcaggagctgacggaccggtgggtggtggagcagatgtcatcgctgacggccatgacggcctcgtttgtgct

SEQ ID NO: 403045 - DNA, 75 bp, synthetic construct
  source 1..75: mol_type = other DNA
aagggcagcagtgcctggccgtcgctgacggtgtcgaatctgtttggtctggtcaccggtatggcggaggacctg

SEQ ID NO: 403046 - DNA, 75 bp, synthetic construct
  source 1..75: mol_type = other DNA
tctccacccgggcatcgattttaccagggcaacgtctggcaaatgagatgacaccggatgttccccgtatcccct

SEQ ID NO: 403047 - DNA, 75 bp, synthetic construct
  source 1..75: mol_type = other DNA
atggattaacggggagcacaccgatctggtgccgttctccccgtctaagtttgagaagtggatgagtgaatgtga

SEQ ID NO: 403048 - DNA, 75 bp, synthetic construct
  source 1..75: mol_type = other DNA
cactcatgccacatggtcagaggttgatttcaaaaaatggacgtggaccataccgtcagaccgtatgaagggaag

SEQ ID NO: 403049 - DNA, 75 bp, synthetic construct
  source 1..75: mol_type = other DNA
gatgaaacaaagcattatcgacagagacatcacgccggtatggggtcgcaagctgctgtcagagataaccccctc

SEQ ID NO: 403050 - DNA, 75 bp, synthetic construct
  source 1..75: mol_type = other DNA
gacgttattgcatgaggcggggtttaattccgactggatagaaaaatgcctcgcgcacgaggaaagaagcgtcag

SEQ ID NO: 403051 - DNA, 75 bp, synthetic construct
  source 1..75: mol_type = other DNA
ccgacaacttgagttgggtaagtttcgttcagacctctattacagactcaatgtcctgatgcttcacttgccgcc

SEQ ID NO: 403052 - DNA, 75 bp, synthetic construct
  source 1..75: mol_type = other DNA
ggttacagatgtgcgctggtggaagtgaatatctggttcctggtcgttacaacttccggaagccattatctaatg

SEQ ID NO: 403053 - DNA, 75 bp, synthetic construct
  source 1..75: mol_type = other DNA
acgaactgggcttgcagtttatgcagggtgcgcgcttctggcacgtactggatgcctctgccggaaaagatcagg

SEQ ID NO: 403054 - DNA, 75 bp, synthetic construct
  source 1..75: mol_type = other DNA
taccaaaggagaggatgaaacgacgtaatctacatttggtttttctttccagacaggcaatggatattatgattg

SEQ ID NO: 403055 - DNA, 75 bp, synthetic construct
  source 1..75: mol_type = other DNA
aggccgtggtgcagctgcaaccggcggtggaacgtctggtggtatccaggtcagctttaatcctcagtttttcct

SEQ ID NO: 403056 - DNA, 75 bp, synthetic construct
  source 1..75: mol_type = other DNA
gcgtgggctgagaaatggttacgcggttatcaaatggctgaatcgacgcgtgatatgcggcgttcggtatatcaa

SEQ ID NO: 403057 - DNA, 75 bp, synthetic construct
  source 1..75: mol_type = other DNA
taatccacatttggtttttctttccagacaggcaatggatattatgattgctctcaaaacctttgccggtagctc

SEQ ID NO: 403058 - DNA, 75 bp, synthetic construct
  source 1..75: mol_type = other DNA
acaaaatgatggctgaaattaccacatcgatggttcgtgatttgtgtgaccggattgtcgaacgcggtggccggg

SEQ ID NO: 403059 - DNA, 75 bp, synthetic construct
  source 1..75: mol_type = other DNA
ttcccgtccgaccctgacggtttctaacctggacggtatggtcaccgggatggcggaagagctgcagagtctggt

SEQ ID NO: 403060 - DNA, 75 bp, synthetic construct
  source 1..75: mol_type = other DNA
ttcccgtcccaccctgacggtttctaacctgcacggtatggtcaccgggatggcggaagagctgcagagtctggt

SEQ ID NO: 403061 - DNA, 75 bp, synthetic construct
  source 1..75: mol_type = other DNA
ttcccgtccaaccctgacggtttctaacctgaacggtatggtcaccgggatggcggaagagctgcagagtctggt

SEQ ID NO: 403062 - DNA, 75 bp, synthetic construct
  source 1..75: mol_type = other DNA
aacaggaggtgatcagccgctggcgcatcgagcagtgcagcgaactgagcgcggtcagtgcctcttttgtgctgg

SEQ ID NO: 403063 - DNA, 75 bp, synthetic construct
  source 1..75: mol_type = other DNA
ttcccggccaaccctgacggtttctaacctgtacggtatggtcaccgggatggcggaagagctgcagagtctggt

SEQ ID NO: 403064 - DNA, 75 bp, synthetic construct
  source 1..75: mol_type = other DNA
gggaaatcgacctgacggtacagggtggtgagcggtattttttctgtaatgagctgaatgaaaaaggggagccgg

SEQ ID NO: 403065 - DNA, 75 bp, synthetic construct
  source 1..75: mol_type = other DNA
gattaccggggagatgaatgcgggtataacggtcctgcggtggcggatgagttcgataaacccaccaccgatatc

SEQ ID NO: 403066 - DNA, 75 bp, synthetic construct
  source 1..75: mol_type = other DNA
aattacagaaaacaggggatgaaatccctgatgttggcgaagattatacgttacagcaacccgaagatattcgtg

SEQ ID NO: 403067 - DNA, 75 bp, synthetic construct
  source 1..75: mol_type = other DNA
ttcccgaccgaccctgacggtttctaacctgtacggtatggtcaccgggatggcggaagagctgcagagtctggt

SEQ ID NO: 403068 - DNA, 75 bp, synthetic construct
  source 1..75: mol_type = other DNA
ttttcggccttgtcaccgggatggcggaggatttgcagagcctggtgggggccacggtggtccgccgccgggtgt

SEQ ID NO: 403069 - DNA, 75 bp, synthetic construct
  source 1..75: mol_type = other DNA
atggaagccttgcaaacgggatgtgttcatataacacatcatgagacgacacgcctcactcagtcagcccaggtg

SEQ ID NO: 403070 - DNA, 75 bp, synthetic construct
  source 1..75: mol_type = other DNA
atccgcgctggtcgtgctctgggaagtcgatctgacagaggtcggcggagagcgttattttttctgtaatgagca

SEQ ID NO: 403071 - DNA, 75 bp, synthetic construct
  source 1..75: mol_type = other DNA
gaacgaaaaaggcgaatcggtcatctggcaggggcggcagtatcaggcctatcccattcaggggacgggatttga

SEQ ID NO: 403072 - DNA, 75 bp, synthetic construct
  source 1..75: mol_type = other DNA
acctatcgcggcgatgagtgcggttatcacggtccggcggtcgcggatgaatatgaccagccgacgtccgatatc

SEQ ID NO: 403073 - DNA, 75 bp, synthetic construct
  source 1..75: mol_type = other DNA
gagcaggagctgagtgaccgctgggtggtggagcagatgtcgcagctgacagccatgacggcctcgtttgtgctg

SEQ ID NO: 403074 - DNA, 75 bp, synthetic construct
  source 1..75: mol_type = other DNA
gattcagcggtgtcctgcaagcggatgcgtacgccgggttcaacgagctgtatcgcaatggtgggataacggaag

SEQ ID NO: 403075 - DNA, 75 bp, synthetic construct
  source 1..75: mol_type = other DNA
gattcagaggtgtcctgcacgcggatgcgtacgccgggttcaacgagctgtatcgcaatggtgggataacggaag

SEQ ID NO: 403076 - DNA, 75 bp, synthetic construct
  source 1..75: mol_type = other DNA
acagctggataagctgcgccggatgaacttcggcagccgctccgaaaaagtctccccgtcgtatcgcacagatgg

SEQ ID NO: 403077 - DNA, 75 bp, synthetic construct
  source 1..75: mol_type = other DNA
ggttcaggggtgtcctgcacgcggatgcgtacgccgggttcaacgagctgtatcgcaatggtgggataacggaag

SEQ ID NO: 403078 - DNA, 75 bp, synthetic construct
  source 1..75: mol_type = other DNA
ggttcagcggtgtcctgcaggcggatgcgtacgccgggttcaacgagctgtatcgcaatggtgggataacggaag

SEQ ID NO: 403079 - DNA, 75 bp, synthetic construct
  source 1..75: mol_type = other DNA
gcttcagcggtgtcctgcacgcggatgcgtacgccgggttcaacgagctgtatcgcaatggtgggataacggaag

SEQ ID NO: 403080 - DNA, 75 bp, synthetic construct
  source 1..75: mol_type = other DNA
gctctgctcccgtggcgggttactctgcctgcctgcctgaccagcttcacttcgtcaatacggttctcactgcac

SEQ ID NO: 403081 - DNA, 75 bp, synthetic construct
  source 1..75: mol_type = other DNA
tgttgccgggcaataagaagacgaagaccgggcgcttatggacgtacgttcgagacgaccgcaacgccggatcag

SEQ ID NO: 403082 - DNA, 75 bp, synthetic construct
  source 1..75: mol_type = other DNA
cgtaacgccgggtcaacgctggcgccggcggtgtggttcgcttacagcccggacagaaaaggcatccatccgcag

SEQ ID NO: 403083 - DNA, 75 bp, synthetic construct
  source 1..75: mol_type = other DNA
tgatcgcgaccatgaaagcaggcgtcagctatgtggattaccacatccagttccatcagcgcatcgccaaactgc

SEQ ID NO: 403084 - DNA, 75 bp, synthetic construct
  source 1..75: mol_type = other DNA
tatgtccttgacgtcatagccgactggccgataaaccgggtcggcgaactgctcccctggcgcgtagcactgccg

SEQ ID NO: 403085 - DNA, 75 bp, synthetic construct
  source 1..75: mol_type = other DNA
atcgctgaaaatgcgttgcggatggtcagtctgggccgcaaaaactacctgttcttcggttcggatcatggagga

SEQ ID NO: 403086 - DNA, 75 bp, synthetic construct
  source 1..75: mol_type = other DNA
agcggtctggttcgcgtactcgccgaaccggcaggggaaacacccggagcaacacctccgccccttccggggtat

SEQ ID NO: 403087 - DNA, 75 bp, synthetic construct
  source 1..75: mol_type = other DNA
gaccgacggcaaactccatgctgacgatacgcctgtcccggtgctgttgccgggcaataagaagacgaagaccgg

SEQ ID NO: 403088 - DNA, 75 bp, synthetic construct
  source 1..75: mol_type = other DNA
ctgctggcaccgctggatgaagcccttcagcactatgtcctgactgacggcaaactccatgccgatgataccccg

SEQ ID NO: 403089 - DNA, 75 bp, synthetic construct
  source 1..75: mol_type = other DNA
ccgctggaagaggcgcttcatggctatgtcatgactgacggcaaactccatgccgatgataccccggtccaggta

SEQ ID NO: 403090 - DNA, 75 bp, synthetic construct
  source 1..75: mol_type = other DNA
cttgctgaacgtcagcgaaaaatgaaaccgctgttgaaatccctggaaagctggttgcgtgaaaagatgaagacc

SEQ ID NO: 403091 - DNA, 75 bp, synthetic construct
  source 1..75: mol_type = other DNA
atgtacttgatgtcatcgccgactggcctgtgaaccgggtgggtgctctgctcccgtggcgggttactctgcctg

SEQ ID NO: 403092 - DNA, 75 bp, synthetic construct
  source 1..75: mol_type = other DNA
tactctgcctgaccagcttcacttcgtcaatacggttctcactgcacgcttaccattctctgccaggcatatgtc

SEQ ID NO: 403093 - DNA, 75 bp, synthetic construct
  source 1..75: mol_type = other DNA
atcgctgaaaatgccctgcgagcggtcagtctgggtcgtaaaaacttcctgttcttcggctctgaccatggtggt

SEQ ID NO: 403094 - DNA, 75 bp, synthetic construct
  source 1..75: mol_type = other DNA
gactgctggcccgtgtactggcgtcaaagtatgcagaacacacaccgctgtatcgccagtctgaaatatacggcc

SEQ ID NO: 403095 - DNA, 75 bp, synthetic construct
  source 1..75: mol_type = other DNA
cgagctgtatcgcaatggtgggataacggaagctgcctgctgtgctcatgcccgccgaaagatccacgatgtgca

SEQ ID NO: 403096 - DNA, 75 bp, synthetic construct
  source 1..75: mol_type = other DNA
gccatagaggcggatataaggggaatgccggcagagcagcggcttgctgaacgtcagcgaaaaacgaaaccgctg

SEQ ID NO: 403097 - DNA, 75 bp, synthetic construct
  source 1..75: mol_type = other DNA
gcgacactcagaactggcgaaagcgttcgcatatgccctgaaccagtggccggcgctgacgtactatgcagatga

SEQ ID NO: 403098 - DNA, 75 bp, synthetic construct
  source 1..75: mol_type = other DNA
tcttcctgctgaaacagcgccttgccgaacgtcagttgaaaacgaaaccgctgctgaaatccctggaaagctggc

SEQ ID NO: 403099 - DNA, 75 bp, synthetic construct
  source 1..75: mol_type = other DNA
gcgtcacaagctgaagatggcactgggtaaagacctgtcagataaacccgtggaacatatagaccagactaatga

SEQ ID NO: 403100 - DNA, 75 bp, synthetic construct
  source 1..75: mol_type = other DNA
tgtaaaaacgtctggaccagccgtgaaggcgtggagtacgcgtggttcaataacgttgaaaccaagccgggccag

SEQ ID NO: 403101 - DNA, 75 bp, synthetic construct
  source 1..75: mol_type = other DNA
gactgggaaaaccaggaaaaatacaaaggcggctggatccgtaaaatcaacggcaaactgcagccgcgcatgggt

SEQ ID NO: 403102 - DNA, 75 bp, synthetic construct
  source 1..75: mol_type = other DNA
atcgggacgtgcaaactaaacgacgtggatccagaaagctaccttcgtcatgtgcttgacgtcatagctgactga

SEQ ID NO: 403103 - DNA, 75 bp, synthetic construct
  source 1..75: mol_type = other DNA
agctatctgggcgaggataccgccgaacagctggagttgatgcgtagcgccttccgggttatccggacggtacgg

SEQ ID NO: 403104 - DNA, 75 bp, synthetic construct
  source 1..75: mol_type = other DNA
tgatcactatcacacgtaaggacggcgacagtcaccgctttaccctggcagatcgcggatcttacacgggcgtaa

SEQ ID NO: 403105 - DNA, 75 bp, synthetic construct
  source 1..75: mol_type = other DNA
ttcgcttacaggccggacagaaaaggcatccatccgcagactcatcttgcttgcttcagcagtgtgctgcaagcg

SEQ ID NO: 403106 - DNA, 75 bp, synthetic construct
  source 1..75: mol_type = other DNA
cccgctgtaccgccagtctgaaatgtacggccgccagggcgtggagctgagccgttcactgctgtcgggctgggt

SEQ ID NO: 403107 - DNA, 75 bp, synthetic construct
  source 1..75: mol_type = other DNA
gcgtgcgaaggtcaggacatgatgtcatggttaaatgcccacagccgttgtctgaccttcctgggcggcgtaccg

SEQ ID NO: 403108 - DNA, 75 bp, synthetic construct
  source 1..75: mol_type = other DNA
actctggcacaaggggcagtgtgtggcgcaacatccgcgcagcacacatgaatataaacacacaaccaatccgct

SEQ ID NO: 403109 - DNA, 75 bp, synthetic construct
  source 1..75: mol_type = other DNA
cgaaaaagtctcccgccgtatcgcacaaatggaagccgatctgaaccggcttcagaaagagagcgatacgctgac

SEQ ID NO: 403110 - DNA, 75 bp, synthetic construct
  source 1..75: mol_type = other DNA
tcttgcctgcttcagcggtgtgctgcaagcggatgcgtacgccgggttcaacgagctgtatcgcaatggtgggat

SEQ ID NO: 403111 - DNA, 75 bp, synthetic construct
  source 1..75: mol_type = other DNA
gccgttcactgctgtcgggctgggtggatgcatgctgccggctactgtcaccgctggaagaagcgcttcaggact

SEQ ID NO: 403112 - DNA, 75 bp, synthetic construct
  source 1..75: mol_type = other DNA
accgccgaacagctggagttgatgcgtagcgcattccgggttatccggacggtacgggaaaaacatgcctgtact

SEQ ID NO: 403113 - DNA, 75 bp, synthetic construct
  source 1..75: mol_type = other DNA
tactatgcagatgatggctgggctgaggcggacaataacatcgctgaaaatgcgttgcggatggtcagtctgggc

SEQ ID NO: 403114 - DNA, 75 bp, synthetic construct
  source 1..75: mol_type = other DNA
gaaaaagtctcccgccgtatcgcacaaatggaagccgatctgaaccggcttcataaagagagcgatacgctgact

SEQ ID NO: 403115 - DNA, 75 bp, synthetic construct
  source 1..75: mol_type = other DNA
aacgcgaaatagaccatctgcaggcacagctggataagctgcgccggatgaacctcggcagccgctcggaaaaag

SEQ ID NO: 403116 - DNA, 75 bp, synthetic construct
  source 1..75: mol_type = other DNA
cgagctgtatcgcaatggtgggataacggaagctgcctgctgggctcatgccccgccgaaagagccacgatgtgc

SEQ ID NO: 403117 - DNA, 75 bp, synthetic construct
  source 1..75: mol_type = other DNA
cccacgtgctgacctcgaagtatgcagagcacaccccgctgtatcgcagtcagaaatatacggccggcaaggtgt

SEQ ID NO: 403118 - DNA, 75 bp, synthetic construct
  source 1..75: mol_type = other DNA
gaacggtatcgatccggaagcgtatctgcgccatattctgagcgtactgccggaatggccctccaaccgtgttga

SEQ ID NO: 403119 - DNA, 75 bp, synthetic construct
  source 1..75: mol_type = other DNA
gctgctctgtatgctggtgtcggtgtttattctcggcgtaccctatcgcggttcgctgctgatcctgttttttat

SEQ ID NO: 403120 - DNA, 75 bp, synthetic construct
  source 1..75: mol_type = other DNA
ggctcaccctatatcgacgccaccatcagcgataaccgtcaggaattgatcgcaaaaatgcaggcgggaaaaatt

SEQ ID NO: 403121 - DNA, 75 bp, synthetic construct
  source 1..75: mol_type = other DNA
gcccggacagaaaaggcatccatccgcagacccatcttgcggggttcagtggtgtactgcaggcggatgcatacg

SEQ ID NO: 403122 - DNA, 75 bp, synthetic construct
  source 1..75: mol_type = other DNA
aacgcgaaatagaccatctgcaggcacagctggataagctgcgccggatgaacttcggcagcggctctgaaaaag

SEQ ID NO: 403123 - DNA, 75 bp, synthetic construct
  source 1..75: mol_type = other DNA
aacgcgaaatagaccatctgcaggcacagctggataagctgcgccggatgaacttcggcagctgctcagaaaaag

SEQ ID NO: 403124 - DNA, 75 bp, synthetic construct
  source 1..75: mol_type = other DNA
aacgcgaaatagaccatctgcaggcacagctggataagctgcgccggatgaacatcggcagcagctccgaaaaag

SEQ ID NO: 403125 - DNA, 75 bp, synthetic construct
  source 1..75: mol_type = other DNA
ggcatgaatgagtccgggcagatatatatcattggtccggctgatgtaatcgtgaatgcaggagggagtgttaac

SEQ ID NO: 403126 - DNA, 75 bp, synthetic construct
  source 1..75: mol_type = other DNA
gtcaaatcagccgataacatcagcgttaatggcaaaaacattactgtgacagccgacgaaaatattgatttcaag

SEQ ID NO: 403127 - DNA, 75 bp, synthetic construct
  source 1..75: mol_type = other DNA
attaactccaaccgccagtgacgttctggcaacgcttgagccggaagcgttttcaattccgctctaccggaaagc

SEQ ID NO: 403128 - DNA, 75 bp, synthetic construct
  source 1..75: mol_type = other DNA
gaaaaaggcaccacacctggcctaaatgtggtcgctacaatagcaaaattagagaatgtatcactggaatggctg

SEQ ID NO: 403129 - DNA, 75 bp, synthetic construct
  source 1..75: mol_type = other DNA
gccgcgccaaagccattttctgtgctggaacaccaggtgatcgcgttcccgtcacaccggagcaagaaactaagc

SEQ ID NO: 403130 - DNA, 75 bp, synthetic construct
  source 1..75: mol_type = other DNA
cgaaagtaaataacaaccttagcctgtgggggaatgtcggtgtgcaactaggtgataaaggctatagcgatactc

SEQ ID NO: 403131 - DNA, 75 bp, synthetic construct
  source 1..75: mol_type = other DNA
actgaacggtaagggcagtgctgcccgtccgacactgacggtctctaacctgcacggcatggtcaccgggatggc

SEQ ID NO: 403132 - DNA, 75 bp, synthetic construct
  source 1..75: mol_type = other DNA
acattggcggcgtcggtgcacaaacggtcaacggtattgaactcattgaggttggcggtaattctgcaggtaact

SEQ ID NO: 403133 - DNA, 75 bp, synthetic construct
  source 1..75: mol_type = other DNA
cagattgcagagcgaagcattgccaacgccgggaggatgtcggttagcgtactgcgaaatcctgcatcgatggat

SEQ ID NO: 403134 - DNA, 75 bp, synthetic construct
  source 1..75: mol_type = other DNA
aatatattttattattaaaaaatctattttcaaaagctttgattcttattccaattcagtaaaaaccatcttcag

SEQ ID NO: 403135 - DNA, 75 bp, synthetic construct
  source 1..75: mol_type = other DNA
aagggacacaacagaatggacgacggtaaatcccgtgagttccgtccgttcgtggaggtgaactggctgcacaac

SEQ ID NO: 403136 - DNA, 75 bp, synthetic construct
  source 1..75: mol_type = other DNA
tagcccattcaggggacgggatttgaactgaacggcaagggcagtgctgcccgtccgacactgacggtttctaac

SEQ ID NO: 403137 - DNA, 75 bp, synthetic construct
  source 1..75: mol_type = other DNA
caccttcgcaacggtcatcggcggcaccttgctaagccttccgctgatgtggcaactggcagatatcataatggc

SEQ ID NO: 403138 - DNA, 75 bp, synthetic construct
  source 1..75: mol_type = other DNA
atggtgctgtttttccggggcgcatcatgctggccaacacctgtacctggacctatcgcggtgatgagtgcggtt

SEQ ID NO: 403139 - DNA, 75 bp, synthetic construct
  source 1..75: mol_type = other DNA
ctctgcgccgacgtcagatgtcgggaagttactgctggagtttgtcaaaacactggcctttgaaacctcaatgga

SEQ ID NO: 403140 - DNA, 75 bp, synthetic construct
  source 1..75: mol_type = other DNA
ctacaacacctgtattaatcaaaagggtgtcgataaatatgtctcggcgtatctggtcggcgatccactggaatt

SEQ ID NO: 403141 - DNA, 75 bp, synthetic construct
  source 1..75: mol_type = other DNA
cgccattattgtcaatgttgcccaacgtaataaacgccagcgtggcgagttacgggttaacaatctcagcgaaca

SEQ ID NO: 403142 - DNA, 75 bp, synthetic construct
  source 1..75: mol_type = other DNA
ggacatcagcgctatctctgctcttattgccgtaaaacatggcaactacagttcacttacaccgcctctcagccc

SEQ ID NO: 403143 - DNA, 75 bp, synthetic construct
  source 1..75: mol_type = other DNA
cttcgcggcggcagtattccgtcaggagcaggcctgcgtatcttctatcggaaccagcgtctgaaggaagatgat

SEQ ID NO: 403144 - DNA, 75 bp, synthetic construct
  source 1..75: mol_type = other DNA
acgggtgaacactggtacggacaacaggcggtagagaaaggcctggttgatgaaatcaacaccagtgatgaagtt

SEQ ID NO: 403145 - DNA, 75 bp, synthetic construct
  source 1..75: mol_type = other DNA
taccggtagtgcggcggagagcgccgatcgcttgttgctacgctggtggcaacgtgggcaaaagcctttaatgta

SEQ ID NO: 403146 - DNA, 75 bp, synthetic construct
  source 1..75: mol_type = other DNA
aggatcaggttgtgctccgtctggaaagccctggtggcatggtgcatggttacgggttggcggcttcgcagctgc

SEQ ID NO: 403147 - DNA, 75 bp, synthetic construct
  source 1..75: mol_type = other DNA
ctgtctccgctggaagaggcgcttcatggctatgtcatgactgacggcaaactccatgccgatgataccccggtc

SEQ ID NO: 403148 - DNA, 75 bp, synthetic construct
  source 1..75: mol_type = other DNA
tgcctgtactcagtgcgatgccatcgtgcaggcccccgcgccttcacggcccatcgagcggggtatcgcaggacc

SEQ ID NO: 403149 - DNA, 75 bp, synthetic construct
  source 1..75: mol_type = other DNA
tatgtccttgacgtcatagccgactggccgataaaccgggtcggcgaactgctccccctggcgcgtagcactgcc

SEQ ID NO: 403150 - DNA, 75 bp, synthetic construct
  source 1..75: mol_type = other DNA
aacgcgaaatagaccacctgcaggcacaactggataaactccgccggatgaacttcggcagtcgttccgaaaagg

SEQ ID NO: 403151 - DNA, 75 bp, synthetic construct
  source 1..75: mol_type = other DNA
gccggcagagcagcggcttgctgaacgtcagcgaaaaacgaaaccgttgttgaaatccctggaaagctggttgcg

SEQ ID NO: 403152 - DNA, 75 bp, synthetic construct
  source 1..75: mol_type = other DNA
atcggtgtggtagcgcaaatgcccaactttaaccgcttcctgaaaagtaaagatattgatattgaactgcatact

SEQ ID NO: 403153 - DNA, 75 bp, synthetic construct
  source 1..75: mol_type = other DNA
tctatattgcagatgctgaaactgcctgacggcaccgtcaaagtgctggtcgagggttacagcgcgcgcgtattt

SEQ ID NO: 403154 - DNA, 75 bp, synthetic construct
  source 1..75: mol_type = other DNA
agaggcccagagtaaagcggaagtcatcagcacaccttcgccggtgaccgctgccgtcagcccgctcatcactcc

SEQ ID NO: 403155 - DNA, 75 bp, synthetic construct
  source 1..75: mol_type = other DNA
ccgctgacgttgacaccgccatattgcccggcggtaaagccagcgatgttacacaagattttctcgcattgttga

SEQ ID NO: 403156 - DNA, 75 bp, synthetic construct
  source 1..75: mol_type = other DNA
gtgtatgaaatttacggtatgtggattgatgacatgaacgacgaacaggtagccatgttgaatgcgcggttatca

SEQ ID NO: 403157 - DNA, 75 bp, synthetic construct
  source 1..75: mol_type = other DNA
attggcttttatagttagaaaattaagacgtcgtcctcgagatcaatttgctatgtttatagccttagttctggg

SEQ ID NO: 403158 - DNA, 75 bp, synthetic construct
  source 1..75: mol_type = other DNA
aactttaaccgcttcctgaaaagtaaagatattgatatcgaactgcatactgccgggcaatataagcggacgttg

SEQ ID NO: 403159 - DNA, 75 bp, synthetic construct
  source 1..75: mol_type = other DNA
ttacggtctggcagcctcgcagttgcagcgtctgcgcgataaaaacattcctttaaccgttacggtagacaaagt

SEQ ID NO: 403160 - DNA, 75 bp, synthetic construct
  source 1..75: mol_type = other DNA
ggagaaattccgcgaagagttgaacgaaacgcatcagttgtttaaagattttgtgaagcgtatgcgtccgtctct

SEQ ID NO: 403161 - DNA, 75 bp, synthetic construct
  source 1..75: mol_type = other DNA
cagaaagcggtattcagttggggcagagcaatatcagcggcgaaagttctagcggtcagcaacaggcagcgtctc

SEQ ID NO: 403162 - DNA, 75 bp, synthetic construct
  source 1..75: mol_type = other DNA
atccacatcaacaccattaatcaccgctcaggcgattacgctggctgcggtgccagacaaagacacggcaaaaga

SEQ ID NO: 403163 - DNA, 75 bp, synthetic construct
  source 1..75: mol_type = other DNA
ctgatgagaccgggatcaggactggcgtcattatgtctgttgctgaatatgaaagactgttgaaccaggcagatc

SEQ ID NO: 403164 - DNA, 75 bp, synthetic construct
  source 1..75: mol_type = other DNA
atgaaataccacgtcagtgtgtgactcctggcgattatgttcttcatgaagaccggacatatattgcctcggcaa

SEQ ID NO: 403165 - DNA, 75 bp, synthetic construct
  source 1..75: mol_type = other DNA
atgattgcacatcacttcggaactgatgaaataccacgtcagtgtgtgactcctggcgattatgttcttcatgaa

SEQ ID NO: 403166 - DNA, 75 bp, synthetic construct
  source 1..75: mol_type = other DNA
atgaaataccacgccagtgcgtgacaccaggtgattatgttattcataaaggcagaacatatattgcctcggtaa

SEQ ID NO: 403167 - DNA, 75 bp, synthetic construct
  source 1..75: mol_type = other DNA
agcgtcgcaaacagattattgaaacgatgcgtatggttgggctgctaccggatcacgtcagttactatccgcata

SEQ ID NO: 403168 - DNA, 75 bp, synthetic construct
  source 1..75: mol_type = other DNA
ttgaatccccgtcaacgtatctcgcaaattctggattttccactgcgtctgaacaccgatctggaaccggaacag

SEQ ID NO: 403169 - DNA, 75 bp, synthetic construct
  source 1..75: mol_type = other DNA
tatccgtagcctgaccacaaaaacatgcattactgactgcatgatcaaagtcttcctcggtcgtgatggtttacc

SEQ ID NO: 403170 - DNA, 75 bp, synthetic construct
  source 1..75: mol_type = other DNA
gcgataatgatatcgatttgcgtgcctattgttttatttcttcttctattttcggatgggataatgtattattgg

SEQ ID NO: 403171 - DNA, 75 bp, synthetic construct
  source 1..75: mol_type = other DNA
aggctgaaggatattcatgaggatgaggcggtgattacccttcagctggaagggagtaaaacccgacgtgaatgg

SEQ ID NO: 403172 - DNA, 75 bp, synthetic construct
  source 1..75: mol_type = other DNA
aatccaaccggaaaattttcgcacgtggcggacgaagtgcgctttacccggcctggttctggataaccgtcctcg

SEQ ID NO: 403173 - DNA, 75 bp, synthetic construct
  source 1..75: mol_type = other DNA
atgactgagtcagccgagaagtatttccccgcttattcgcaccttccctatcagttgcatagtctgctggctgct

SEQ ID NO: 403174 - DNA, 75 bp, synthetic construct
  source 1..75: mol_type = other DNA
atgaaataccacgtcagtgtgtgacccctggtgattatgttcttcatgaaggtcggacatatatcgcctcggcaa

SEQ ID NO: 403175 - DNA, 75 bp, synthetic construct
  source 1..75: mol_type = other DNA
aaacccggtgataagatctgggaatctgacgatattaaaattcccgtctattgtgacaacaataccaacggcaac

SEQ ID NO: 403176 - DNA, 75 bp, synthetic construct
  source 1..75: mol_type = other DNA
ttcaccggtcagattgatgccgtaccgcaggaggatcaccttgcctggcaggtaagtttcaccctgcgtgaaaaa

SEQ ID NO: 403177 - DNA, 75 bp, synthetic construct
  source 1..75: mol_type = other DNA
tcagaatcaaggctggcgaggtagccgagaagatcatcgcaatggtgacgccaatcaaggcactaatggatgcct

SEQ ID NO: 403178 - DNA, 75 bp, synthetic construct
  source 1..75: mol_type = other DNA
gaggaatttaactcaatacgtgacaacacaccaacaatcatacaggaaatggcccgccaaatggggttgtctatg

SEQ ID NO: 403179 - DNA, 75 bp, synthetic construct
  source 1..75: mol_type = other DNA
tgcctgtgcaaatcacagttcagaccacaaacggatttagcgacgaagatagccgcagacttgagcagacgatgg

SEQ ID NO: 403180 - DNA, 75 bp, synthetic construct
  source 1..75: mol_type = other DNA
agacttgaattaacaatggaacgtgtagccatgaaaatgataacaagggaatctcaaagaccaggcggaatgttg

SEQ ID NO: 403181 - DNA, 75 bp, synthetic construct
  source 1..75: mol_type = other DNA
gaacgtgtagcaatgaagatgataacaagggaatcgcaaagacctggcgggatgttgcaaccgcgccgcaaataa

SEQ ID NO: 403182 - DNA, 75 bp, synthetic construct
  source 1..75: mol_type = other DNA
tcaactggcggtagctgggcggcggctggttcggcggcgctcactgcgatcatgtcgctggctacgtcaattttc

SEQ ID NO: 403183 - DNA, 75 bp, synthetic construct
  source 1..75: mol_type = other DNA
agcggtgaattttcgtgaggccacattcagcggaatgctggatgcaccacagcaggacgggaaaatgtcctggat

SEQ ID NO: 403184 - DNA, 75 bp, synthetic construct
  source 1..75: mol_type = other DNA
cagtttcaggataaagaccagtccggccagacaagtgccacaaccaaatcagaacagggggcaaaagggaaagag

SEQ ID NO: 403185 - DNA, 75 bp, synthetic construct
  source 1..75: mol_type = other DNA
cgcaggaggatcaccttgcctggcaggtaagtttcaccctgcgtgaaaaaggcagcgtcccggaaaaacgacagg

SEQ ID NO: 403186 - DNA, 75 bp, synthetic construct
  source 1..75: mol_type = other DNA
gccagacagctggcgaagatagtgaaaaaatgacgtggtttgaaagcaaggtgctcaaacccgtgaatgatgcgc

SEQ ID NO: 403187 - DNA, 75 bp, synthetic construct
  source 1..75: mol_type = other DNA
ttaatggtgaagccataccgctgaagaatatgcgtgtgacggtctcgcagcagtttcaggataaagaccagtccg

SEQ ID NO: 403188 - DNA, 75 bp, synthetic construct
  source 1..75: mol_type = other DNA
ggtgactttcacgctggcggaacatattagcgtacaggaaaagcgggaagccagatcaaccggcaaaaccactgc

SEQ ID NO: 403189 - DNA, 75 bp, synthetic construct
  source 1..75: mol_type = other DNA
acagccagagatattcagagatggcggcgccatatgctgaaagttcaggggcgttcgacaaatacctggaataat

SEQ ID NO: 403190 - DNA, 75 bp, synthetic construct
  source 1..75: mol_type = other DNA
cgagcacaccattgatgacagtgggtttaccacgcggcttgagcttgagacaaaaatccctgaatggatagcaga

SEQ ID NO: 403191 - DNA, 75 bp, synthetic construct
  source 1..75: mol_type = other DNA
aaaccgccaaaaccgaaaaaggagcaaagcagcagccgcgaaggcgattatatggaaggagcggaaggcaacgta

SEQ ID NO: 403192 - DNA, 75 bp, synthetic construct
  source 1..75: mol_type = other DNA
cagcaagacgtgcagcggcggcaaagtggcagcagctacaacgcggagccgcatcattctccatcacgctggcgc

SEQ ID NO: 403193 - DNA, 75 bp, synthetic construct
  source 1..75: mol_type = other DNA
gcaggactgacccagctttaccggatgcgcgatgcgcagttgtggcgtcacatcgaatttcaccccgaatgcaac

SEQ ID NO: 403194 - DNA, 75 bp, synthetic construct
  source 1..75: mol_type = other DNA
agtattaaaacgaccaagagccaaaacgatcaatgcaccgacggatttaaagtcagttcctccttttataccgaa

SEQ ID NO: 403195 - DNA, 75 bp, synthetic construct
  source 1..75: mol_type = other DNA
ctcgacgctggcgattggtgtgctggtgctggaagtgctgctcgctattaccgttattctgtggggttacggtta

SEQ ID NO: 403196 - DNA, 75 bp, synthetic construct
  source 1..75: mol_type = other DNA
gcttgatctcacgctggatgattcagacggacagatcgttatgccatcgcgtggcgcgaagatttccgtttcgct

SEQ ID NO: 403197 - DNA, 75 bp, synthetic construct
  source 1..75: mol_type = other DNA
cctggcagatcgcggagcctatacgggcgtcattgccagctggttgcatacccgcgaacccgcgaagaaagaaag

SEQ ID NO: 403198 - DNA, 75 bp, synthetic construct
  source 1..75: mol_type = other DNA
gggtttaccacatcgctggaactggaagtaaaaatcgacgactggacagcggagagtgacgattcaacgtcttaa

SEQ ID NO: 403199 - DNA, 75 bp, synthetic construct
  source 1..75: mol_type = other DNA
gtgctgatgcctgcggcatcattctgacttcccttgtgattaaccgccagttgtggctgtaccacgacagcggtg

SEQ ID NO: 403200 - DNA, 75 bp, synthetic construct
  source 1..75: mol_type = other DNA
acggctgaactttcgtccattcccggcacccccatcgaagcgggtcccttcgatacagtggtgctttttaagatt

SEQ ID NO: 403201 - DNA, 75 bp, synthetic construct
  source 1..75: mol_type = other DNA
agtatcgccagccggtacgacctgcgagccggggtgagtgaggaactggcgaagattgagatcgatcacgcagac

SEQ ID NO: 403202 - DNA, 75 bp, synthetic construct
  source 1..75: mol_type = other DNA
ctgacttcccttgtgattaaccgccagttgtggctgcaccacgacagcggtaacgcagggttgacacacctgtac

SEQ ID NO: 403203 - DNA, 75 bp, synthetic construct
  source 1..75: mol_type = other DNA
gtgctgatgccgcaggtatcatcctgacttcccttgtgattaaccgccagttgtggctgtaccacgacagcgggg

SEQ ID NO: 403204 - DNA, 75 bp, synthetic construct
  source 1..75: mol_type = other DNA
tgaatgttgaagagtgcgaccgtctctcctttctgccttacctgtttggcctgggttttctgtatgccgaagcgt

SEQ ID NO: 403205 - DNA, 75 bp, synthetic construct
  source 1..75: mol_type = other DNA
actcacctgtacaggatgcgcgatgcacagttgtggagccacatcgaatttcaccctgaatgcaacgcgatttac

SEQ ID NO: 403206 - DNA, 75 bp, synthetic construct
  source 1..75: mol_type = other DNA
atgcagggctgacacacctgtaccggatgcgtgatgcgcagttgtggagccacatcgaatttcaccccgaatgca

SEQ ID NO: 403207 - DNA, 75 bp, synthetic construct
  source 1..75: mol_type = other DNA
caggatgcgcgatgcgcagttgtggagccacatcgaatttcaccctgaatgcaacgcgatttacgcggcgctgga

SEQ ID NO: 403208 - DNA, 75 bp, synthetic construct
  source 1..75: mol_type = other DNA
atgcaggactgacccagctttaccggatgcgcagttgtggcgtcacatcgaatttcaccctgaatgcaacgcgat

SEQ ID NO: 403209 - DNA, 75 bp, synthetic construct
  source 1..75: mol_type = other DNA
atgcaggactgacccagctttaccggatgcgcgatgcgcagttgtggcgtcacatcgaatttcacctcgaatgca

SEQ ID NO: 403210 - DNA, 75 bp, synthetic construct
  source 1..75: mol_type = other DNA
ggatgcgcgatgcgcagttgtggcgtcacatcgaatttcaccccgaatgcaacgcgatttacgcggctctggact

SEQ ID NO: 403211 - DNA, 75 bp, synthetic construct
  source 1..75: mol_type = other DNA
ccggatgcgtgatgcgcagtcgtggagccacatcgaagttcatcccgaatgtaacgcgatttacgcggcactgga

SEQ ID NO: 403212 - DNA, 75 bp, synthetic construct
  source 1..75: mol_type = other DNA
gtgccgatgccgcaggcatcattctgacttcccttgtgattaaccgtcagttgtggctgtaccacgacagcggcg

SEQ ID NO: 403213 - DNA, 75 bp, synthetic construct
  source 1..75: mol_type = other DNA
gaaaactggtttgaccgtacggtcagcgccgatgccgcaggcatcattgtgacctcccttgtgattaaccgccag

SEQ ID NO: 403214 - DNA, 75 bp, synthetic construct
  source 1..75: mol_type = other DNA
acggtggcggttacatgatgccggatggcgaccgtttccacatggtgaacggtgcaaactggtttgaccgtaccg

SEQ ID NO: 403215 - DNA, 75 bp, synthetic construct
  source 1..75: mol_type = other DNA
ccatttattatttatgtgattgaccatattcagaataactttgagagatttaccacgcaagaaggaaactgtggt

SEQ ID NO: 403216 - DNA, 75 bp, synthetic construct
  source 1..75: mol_type = other DNA
ccatttattatccatgcgattgaccacattcagaacaactttgaaatattcactgcccaagagggtaataacggt

SEQ ID NO: 403217 - DNA, 75 bp, synthetic construct
  source 1..75: mol_type = other DNA
agtcagcatcgtgatcgtgtcatcgacacccaggcgctggttgctattgtgttggcagaaaaagaccactgggag

SEQ ID NO: 403218 - DNA, 75 bp, synthetic construct
  source 1..75: mol_type = other DNA
ttacgatgattaccacgacggtagcaggatcattcaacaactgctggcgctgggaaagttacaaaaaatcccttc

SEQ ID NO: 403219 - DNA, 75 bp, synthetic construct
  source 1..75: mol_type = other DNA
aaattaccttacaggcagcggctgaatccaatagcggtaaccataaaggtctgatccgcacatattatcactgca

SEQ ID NO: 403220 - DNA, 75 bp, synthetic construct
  source 1..75: mol_type = other DNA
caccgctcaagaaggaaacaatggtgatattaatcaagttaactttgaactagtcgctgccatgttagttgagta

SEQ ID NO: 403221 - DNA, 75 bp, synthetic construct
  source 1..75: mol_type = other DNA
tgcgtctggacaaatatccgctcaacgtactgattgttgacgatattaaaccttacaaagaacgtaaggtcgcaa

SEQ ID NO: 403222 - DNA, 75 bp, synthetic construct
  source 1..75: mol_type = other DNA
acgcagaagaaagcgccaaaagtaccggaagcgcgcgaaggtgaatacatggccggtgaggctgacaacgttttt

SEQ ID NO: 403223 - DNA, 75 bp, synthetic construct
  source 1..75: mol_type = other DNA
tatttaaaggtgcaacacgcgtcccccggcttgctggcgttccgcgtactgtggcgctggttatcttcatgatct

SEQ ID NO: 403224 - DNA, 75 bp, synthetic construct
  source 1..75: mol_type = other DNA
catcccttgtgaactgatcgactataacggcgatgcgctgcgtgaactggttctgcgctacgcacaagagtgggc

SEQ ID NO: 403225 - DNA, 75 bp, synthetic construct
  source 1..75: mol_type = other DNA
tggtcgagcaggttgctaatgacctggatgcgattctcgaaaaagggatgcgcgaagctgtacgtccgttgtgct

SEQ ID NO: 403226 - DNA, 75 bp, synthetic construct
  source 1..75: mol_type = other DNA
gctggaacgttatcagcaactctggagccagcatcgtgaccgtgttatcggcacccaggaactggtagcgattgt

SEQ ID NO: 403227 - DNA, 75 bp, synthetic construct
  source 1..75: mol_type = other DNA
attatttcttttatgggtataatatagcaagcattgcttaccagttaggtataagttcaaaaactgtatactctc

SEQ ID NO: 403228 - DNA, 75 bp, synthetic construct
  source 1..75: mol_type = other DNA
acgtccggcgaagggctgggaagatgtcgatcagtttcttgcacagccgctacttgctgacgtcgatgagcgtac

SEQ ID NO: 403229 - DNA, 75 bp, synthetic construct
  source 1..75: mol_type = other DNA
gacagtggctatatgagaggcttgtattctggagggcaaatgaacatcagagaataaaattacgctggcttaatg

SEQ ID NO: 403230 - DNA, 75 bp, synthetic construct
  source 1..75: mol_type = other DNA
ttggattttccttgctataggtagctttatcgataaccaacgcggtgcaacgttaagtagtactttggatccggc

SEQ ID NO: 403231 - DNA, 75 bp, synthetic construct
  source 1..75: mol_type = other DNA
gtaaccatcacgctttccgggcggatgcagcaacaacttgggcgaacgcgcagccagcaggagtaccagcaggcg

SEQ ID NO: 403232 - DNA, 75 bp, synthetic construct
  source 1..75: mol_type = other DNA
tctcgcccgctcggtgccgttctacgccgcgaatcaaccgctggcggatatcagcgaaatgcgtgtggtgcaggg

SEQ ID NO: 403233 - DNA, 75 bp, synthetic construct
  source 1..75: mol_type = other DNA
cgatgacccgccagcaaatcaacatcaacacattagacgtcacgcaaagcgtgattcttgaggcgctgtttgacc

SEQ ID NO: 403234 - DNA, 75 bp, synthetic construct
  source 1..75: mol_type = other DNA
gggaatatggctatttgtacaggcccattggatatagtaactatgggaagcatgaaggtttttattgggggtaag

SEQ ID NO: 403235 - DNA, 75 bp, synthetic construct
  source 1..75: mol_type = other DNA
ctgatatgcatgtatgtcctatggtgacgccaggtttgccacctgttcctcatgtaggaggccccttgttaccac

SEQ ID NO: 403236 - DNA, 75 bp, synthetic construct
  source 1..75: mol_type = other DNA
taaggtcttgatatgcggcaaaccagctgcacgaatgggcgatatctgtgctcacggagggacaattgtcagtgg

SEQ ID NO: 403237 - DNA, 75 bp, synthetic construct
  source 1..75: mol_type = other DNA
cctgaaaaatgaaaagcgcgtgcatctggcacaaccgtgggcttctggccctcgttttttcccactgccgcaggg

SEQ ID NO: 403238 - DNA, 75 bp, synthetic construct
  source 1..75: mol_type = other DNA
tggctttcccgctgcgcgatggcatcccagtgctgttggaaacggaagcccgcgtgctgactgctgatgagagta

SEQ ID NO: 403239 - DNA, 75 bp, synthetic construct
  source 1..75: mol_type = other DNA
ttgcctgcccggtttgcaacggaaaactttggtataaccaggaaaaacaagagcttatttgcaaactggacaacc

SEQ ID NO: 403240 - DNA, 75 bp, synthetic construct
  source 1..75: mol_type = other DNA
aaaatgctgcttgacctggccccgaatgagatggtccgtacacacctgaaggaatgggatgttccgggggggcgt

SEQ ID NO: 403241 - DNA, 75 bp, synthetic construct
  source 1..75: mol_type = other DNA
tcatgggttcaaaccttatggataagaaaggaaaatccatctggcgatatgatgactctatgagtctgatgggct

SEQ ID NO: 403242 - DNA, 75 bp, synthetic construct
  source 1..75: mol_type = other DNA
tggcaaggtacttttcagagtgtctttcggggaatacggatgtctacggtattgttcatggcgtattaccatcaa

SEQ ID NO: 403243 - DNA, 75 bp, synthetic construct
  source 1..75: mol_type = other DNA
aagtgatatatctttagaaccaaaattcattgatggtcgtcttgatttaaatgaagttggtaacattagaactat

SEQ ID NO: 403244 - DNA, 75 bp, synthetic construct
  source 1..75: mol_type = other DNA
ttctgatactgaaaagcgtaagcgtttgatcatgcgagtgcagttcgcattactggataaagggttttataacgg

SEQ ID NO: 403245 - DNA, 75 bp, synthetic construct
  source 1..75: mol_type = other DNA
tggcccccacggtcactgccgggaacagtctgatgctttccgccggtcgtgatgtgaacagccaggctgccggta

SEQ ID NO: 403246 - DNA, 75 bp, synthetic construct
  source 1..75: mol_type = other DNA
acaacagtctgtgggtacagaaggacagcagcgggacggcaaacagcgaaatcattaaccgttccggtaatattg

SEQ ID NO: 403247 - DNA, 75 bp, synthetic construct
  source 1..75: mol_type = other DNA
caaataaagatggctcaccagaccgacgatttaaagataactatcaaattccaatttgcatttatggaaagttat

SEQ ID NO: 403248 - DNA, 75 bp, synthetic construct
  source 1..75: mol_type = other DNA
atccctgtagatgaattgcgtgataaatggtcgcaaatagttagcccgatggaccagctaaaaggcgaggttgac

SEQ ID NO: 403249 - DNA, 75 bp, synthetic construct
  source 1..75: mol_type = other DNA
ggtgcatcagcggaacagatgtctaactcaatgcgccagttccgccaggctatcgacggcggcgtactccgtgct

SEQ ID NO: 403250 - DNA, 75 bp, synthetic construct
  source 1..75: mol_type = other DNA
ccaagaaaaacttattcagttaggtcaacaatatccggaggacccatccgataaagaagcaatggataattacac

SEQ ID NO: 403251 - DNA, 75 bp, synthetic construct
  source 1..75: mol_type = other DNA
taaacgtcgcattgcagaacttgaagtaacgctaccacaaacacaagcagaagtatctcgtcttgtatcctggga

SEQ ID NO: 403252 - DNA, 75 bp, synthetic construct
  source 1..75: mol_type = other DNA
tgaagaatacatggtatcaaatgctgatgcagctctggctttcgcagaggcatttaagcgctatcaggattcact

SEQ ID NO: 403253 - DNA, 75 bp, synthetic construct
  source 1..75: mol_type = other DNA
ttctggtacagagaagcgtaagcgcttaatcatgcgggttcaattcgctttgctggacaaaggttattacaacgg

SEQ ID NO: 403254 - DNA, 75 bp, synthetic construct
  source 1..75: mol_type = other DNA
atgtccctgaaagaatatatcggctcgattgtgttggaaattgacagccaggaaatcgagatcaccgaccttgat

SEQ ID NO: 403255 - DNA, 75 bp, synthetic construct
  source 1..75: mol_type = other DNA
ataatgttcttaacaatgtattgttgtctttaggtggtgtcagtcctcatacaattagcgttacggggttggcgt

SEQ ID NO: 403256 - DNA, 75 bp, synthetic construct
  source 1..75: mol_type = other DNA
aatcatatataggtgatgcccttaaatttaaaatatatgtaatgatttattccagtaatgatgataataaaatga

SEQ ID NO: 403257 - DNA, 75 bp, synthetic construct
  source 1..75: mol_type = other DNA
cagaaaaaacatcttttggtgcggtgagtatgcaattgcgaactgcagccaaaacactcgggcttgatgagacta

SEQ ID NO: 403258 - DNA, 75 bp, synthetic construct
  source 1..75: mol_type = other DNA
gacatctttatcaattggctgaaaaagatggctttcaggtatccttacctcacctgacagaagaacaaataagaa

SEQ ID NO: 403259 - DNA, 75 bp, synthetic construct
  source 1..75: mol_type = other DNA
agggaacggcaacaactcacccctcccagtgaagggacgggtagtttgccgctctcgatatgccggacggagcca

SEQ ID NO: 403260 - DNA, 75 bp, synthetic construct
  source 1..75: mol_type = other DNA
atttaagatgtatgtgaaaatttatcccggtgacaatgataatcaactgaatataaacaataagcttggttttaa

SEQ ID NO: 403261 - DNA, 75 bp, synthetic construct
  source 1..75: mol_type = other DNA
atggccgataagagcgggaaagttaacatggctgtgattaatgacagaagtaaattcagtttttttaataaagtt

SEQ ID NO: 403262 - DNA, 75 bp, synthetic construct
  source 1..75: mol_type = other DNA
tctaatgcaggcgcagaaaactgcgccagtattgcaacgcgtcaccattggtaagcagattgttgatgtgatgct

SEQ ID NO: 403263 - DNA, 75 bp, synthetic construct
  source 1..75: mol_type = other DNA
ggtcagatagagaatctgtatcaggatgagaaggacggaaagtatcatctcacattattcgataatggattaacc

SEQ ID NO: 403264 - DNA, 75 bp, synthetic construct
  source 1..75: mol_type = other DNA
ttactctcatcaatatatcaaatccgagtgtccataaatccttttcgtggtacttttgaaaatacagaacccaat

SEQ ID NO: 403265 - DNA, 75 bp, synthetic construct
  source 1..75: mol_type = other DNA
gagtataaatagaaagcttggatttaatatttcaattggttctggaatagaaaaatataaagagcgtcgattttg

SEQ ID NO: 403266 - DNA, 75 bp, synthetic construct
  source 1..75: mol_type = other DNA
tgcggatgccctgatgcgggagctggatccgcgcaccaccaccgaactgataaatcgctgggagcgtctgtgcgg

SEQ ID NO: 403267 - DNA, 75 bp, synthetic construct
  source 1..75: mol_type = other DNA
ctgttttgtgttgtggtgagaatatcacctttcatcaggtggccaaatttagtgtgccactacatccgcctgtta

SEQ ID NO: 403268 - DNA, 75 bp, synthetic construct
  source 1..75: mol_type = other DNA
atggacgtgacaaacgatgattacatccgtctgttgtcggcactgttgccacccggtccggcgtggtcagccaga

SEQ ID NO: 403269 - DNA, 75 bp, synthetic construct
  source 1..75: mol_type = other DNA
aatctggcgttggtggcggtattgtggcgattgttccgcatgaaatggccatcgctgtctggagtccggaactgg

SEQ ID NO: 403270 - DNA, 75 bp, synthetic construct
  source 1..75: mol_type = other DNA
gaatacgatgaattcctgaaactggcgcacaacccggaaatgcgctttgttttctctaacaccaccgaagcgggt

SEQ ID NO: 403271 - DNA, 75 bp, synthetic construct
  source 1..75: mol_type = other DNA
cgccgtcactgagcacgcaggatggtctgtacaccaccattatccgtggcctgaatgagaagggggaagcggtca

SEQ ID NO: 403272 - DNA, 75 bp, synthetic construct
  source 1..75: mol_type = other DNA
gcggtgaaataggtaaaggcctcaccggcaggaccgtaattgctgaagtgatagaacctgataaccgcttatttc

SEQ ID NO: 403273 - DNA, 75 bp, synthetic construct
  source 1..75: mol_type = other DNA
tgtggactccccactgctaccagaccaacacatcatcttcggtgggcggcgctggaaagtgacagagatcgagac

SEQ ID NO: 403274 - DNA, 75 bp, synthetic construct
  source 1..75: mol_type = other DNA
cccttgcaggagagttctatcccggcaattttagcccgtgatcgagacgtgctaatcagtgcaggtacagcagcg

SEQ ID NO: 403275 - DNA, 75 bp, synthetic construct
  source 1..75: mol_type = other DNA
ccggcgggcggccaatgtattacccccggtgatgtgcgtcagctgcttgagcagatggtgaaagaggctgtaagc

SEQ ID NO: 403276 - DNA, 75 bp, synthetic construct
  source 1..75: mol_type = other DNA
tacatacaaactcagctctgggtataccggagcggatgattacgatgggtatgaatgccgatcttatttgcgatg

SEQ ID NO: 403277 - DNA, 75 bp, synthetic construct
  source 1..75: mol_type = other DNA
ccgattatctgtgacaaatccgacgaagaggccgtcaaactggcatggagtcgtgctatttcatcggcaatgcga

SEQ ID NO: 403278 - DNA, 75 bp, synthetic construct
  source 1..75: mol_type = other DNA
ccggcagacggtaaaagtctcaccccggatgatgtgcgtccgatgcttgaacagatggtgaaagaggcgctaagc

SEQ ID NO: 403279 - DNA, 75 bp, synthetic construct
  source 1..75: mol_type = other DNA
ttaattattgaaggttgtcttgctcgtctaaagcaaaaaaagccagatgagcactcgctgcttgtggcacattat

SEQ ID NO: 403280 - DNA, 75 bp, synthetic construct
  source 1..75: mol_type = other DNA
cttgcgcagtgcgggctgacggtggagcggctggcggcacagatagagccggtttatttgcctgagcgaaaaata

SEQ ID NO: 403281 - DNA, 75 bp, synthetic construct
  source 1..75: mol_type = other DNA
gggcgcgctgctgttattcctcgcttgccctgaaagcggttcagttatcgctacggcatattccggcatcactgc

SEQ ID NO: 403282 - DNA, 75 bp, synthetic construct
  source 1..75: mol_type = other DNA
ccgttccgctatctgttcggcctctaccaggaatcacactggctggtggtcatcgttaacatcctgatatgcgcc

SEQ ID NO: 403283 - DNA, 75 bp, synthetic construct
  source 1..75: mol_type = other DNA
ccgctatatcattgctggcgtacttcgttgtgctggtttatgccagcgttccattccgatatctgtttggcctct

SEQ ID NO: 403284 - DNA, 75 bp, synthetic construct
  source 1..75: mol_type = other DNA
atcgctggccgaaagatattcctgtcgatgttcaaccattgccgcagctatccggtacgcgctccgtttctgagt

SEQ ID NO: 403285 - DNA, 75 bp, synthetic construct
  source 1..75: mol_type = other DNA
tgcatttggtggcacgaacacgagcattttccctaatggttataccgcgatttcaaatccaagcgcggggattat

SEQ ID NO: 403286 - DNA, 75 bp, synthetic construct
  source 1..75: mol_type = other DNA
catgtggctgcttttgccagaagggcaacggatacatatgccgatgcggatggtggcgttccctggaatgccgaa

SEQ ID NO: 403287 - DNA, 75 bp, synthetic construct
  source 1..75: mol_type = other DNA
gcatccagtacggatttggggacgaaaaccacatcgtcgtttgattacggcactaaatccacgaataacactggt

SEQ ID NO: 403288 - DNA, 75 bp, synthetic construct
  source 1..75: mol_type = other DNA
ggacgcaggggacgtattcttcccttgccctgaaagcggttcagctatctgtgcggcatatgctgtcggcacgat

SEQ ID NO: 403289 - DNA, 75 bp, synthetic construct
  source 1..75: mol_type = other DNA
tcctaactataaaactattgaatgcggtgagaactgcagaatagttggtcttgtcaaacaagtaataatggattt

SEQ ID NO: 403290 - DNA, 75 bp, synthetic construct
  source 1..75: mol_type = other DNA
gtgctcatacgcactccgttgcgattggctcacatggacacaccatcaccgttaacgctgcgggtaacgcggaaa

SEQ ID NO: 403291 - DNA, 75 bp, synthetic construct
  source 1..75: mol_type = other DNA
cttttattggctcagagcgtggtatacaactgctttcgctgcttaacagaattgaccatgtgctgggacgccagt

SEQ ID NO: 403292 - DNA, 75 bp, synthetic construct
  source 1..75: mol_type = other DNA
ggaaaagacggtgtagctcagatgtcattacctatatatgcatactcaacatgtcgtttttggacaaaagaaagt

SEQ ID NO: 403293 - DNA, 75 bp, synthetic construct
  source 1..75: mol_type = other DNA
ttgttaacaacctcaaaagctcatgggggcgggattatagttatttttaaagattttataaatgactggtggaaa

SEQ ID NO: 403294 - DNA, 75 bp, synthetic construct
  source 1..75: mol_type = other DNA
tagcgcaatagatcatgcaggagcagtgtcagatattaaaaacattgtagacaaatttttaggcggaattttaac

SEQ ID NO: 403295 - DNA, 75 bp, synthetic construct
  source 1..75: mol_type = other DNA
acctctcaaagttggataattaatgaactgttaaatggagttgatagaaataccattccatttcagaaaataagt

SEQ ID NO: 403296 - DNA, 75 bp, synthetic construct
  source 1..75: mol_type = other DNA
atttcttggaacacaatacatttttcagtattaccggtatagatgagtctctctatgaaaagtatataatcttta

SEQ ID NO: 403297 - DNA, 75 bp, synthetic construct
  source 1..75: mol_type = other DNA
acaatggaagcgcaaaggttctaagcattaacagagatacaggtataatcgatttatcaaataatcaggtgttag

SEQ ID NO: 403298 - DNA, 75 bp, synthetic construct
  source 1..75: mol_type = other DNA
tacatcagtctgaaaggaaggaactattacaaccaaaaagcatcaatcatttaaaaaaaagtgataccatagacg

SEQ ID NO: 403299 - DNA, 75 bp, synthetic construct
  source 1..75: mol_type = other DNA
taaagggatcgccagagcacttcaggctggtgatgtaaaaacagcacaacatcttcagagcgaatgtaataaagt

SEQ ID NO: 403300 - DNA, 75 bp, synthetic construct
  source 1..75: mol_type = other DNA
cagattcgtcgggctcatccggatctggtcctttacaatggatatgatgagatttttgcttcaggattgctggcg

SEQ ID NO: 403301 - DNA, 75 bp, synthetic construct
  source 1..75: mol_type = other DNA
tccatttagaatagttctcgggaataaaatgttgtatccatcagaagaacttgtaaagtttataagaacctcaaa

SEQ ID NO: 403302 - DNA, 75 bp, synthetic construct
  source 1..75: mol_type = other DNA
tcactttagtgagtatcctaataattggaagtatattaaactccctcttatccagaacgaatctttgtcaaggga

SEQ ID NO: 403303 - DNA, 75 bp, synthetic construct
  source 1..75: mol_type = other DNA
tattcaatagatatgattgcctggaaggataaaaataaaactgaaaaagagcctttaccacttgatgtaattcag

SEQ ID NO: 403304 - DNA, 75 bp, synthetic construct
  source 1..75: mol_type = other DNA
atactgatattcttcctgcatattcagatgaagtgtcacagataataaataaaaaaagtgatggagatatgtttt

SEQ ID NO: 403305 - DNA, 75 bp, synthetic construct
  source 1..75: mol_type = other DNA
caaaacactttgtctgcaatcacagggcagggggccgaactggtagcaatgctgactggttctaaaactggggga

SEQ ID NO: 403306 - DNA, 75 bp, synthetic construct
  source 1..75: mol_type = other DNA
caaaacacgttgtctgcaatcaccgggcagggtgcagaactggcagcaatgctgaccagctctaaaacaggggga

SEQ ID NO: 403307 - DNA, 75 bp, synthetic construct
  source 1..75: mol_type = other DNA
tgttcttagcttcctggttgcggctcaaaacacgttgtctgcaatcaccgggcagggtgcagaactggcagcaat

SEQ ID NO: 403308 - DNA, 75 bp, synthetic construct
  source 1..75: mol_type = other DNA
acagctatgtcaaacaggcccgttccgtaatgtggatttaggcgatttcaaaagcctgcttaaacatatgggggc

SEQ ID NO: 403309 - DNA, 75 bp, synthetic construct
  source 1..75: mol_type = other DNA
atgagcagtgcctacaatagtcttgatccccgtgtccgtaagtgggtttataagcagggctggtcatccttaagg

SEQ ID NO: 403310 - DNA, 75 bp, synthetic construct
  source 1..75: mol_type = other DNA
tgctcatcggcctgtactgacgcagtgaatgcgccggaatggcggtattactggcaggtcaacatgccagccgcc

SEQ ID NO: 403311 - DNA, 75 bp, synthetic construct
  source 1..75: mol_type = other DNA
aaggcgaacgtcaggtgaatcaatataccttctatgccgtgttcagcacgccggaagagtttcgtattgtggcgg

SEQ ID NO: 403312 - DNA, 75 bp, synthetic construct
  source 1..75: mol_type = other DNA
tctgatcagcgccgcgactgccgcaggtaaaacagaagcgtttttcctgcccgcctgttctgccattgcggatat

SEQ ID NO: 403313 - DNA, 75 bp, synthetic construct
  source 1..75: mol_type = other DNA
ttaaaacaaatgttctttcagttaataacttcaaagaatcaaagataaatagtgatactgtggaggttacagtaa

SEQ ID NO: 403314 - DNA, 75 bp, synthetic construct
  source 1..75: mol_type = other DNA
ggttctcagtttccttgttgctgcacagaacacgctttcggctattacagggcagggcgctgaactggctgcgat

SEQ ID NO: 403315 - DNA, 75 bp, synthetic construct
  source 1..75: mol_type = other DNA
atgaaaacaggtctttcccacttcaacctcagcaaacacgcctttattgcatttttgggcgcgatgctgtttttc

SEQ ID NO: 403316 - DNA, 75 bp, synthetic construct
  source 1..75: mol_type = other DNA
ggccgattttgccgataccacggccaaaaacctgtttgatgaagggctgcactgttttcgcaacaataatctggc

SEQ ID NO: 403317 - DNA, 75 bp, synthetic construct
  source 1..75: mol_type = other DNA
atgaccgataccaccatgcaattgctcagtcagagcacagaccccgtgaaaatgccggattttgatattctcgcg

SEQ ID NO: 403318 - DNA, 75 bp, synthetic construct
  source 1..75: mol_type = other DNA
tttctcacgcgtatggcagacatgctgggagccatagccaccgtcaagaacggcgcactgcttttcatcgtgccc

SEQ ID NO: 403319 - DNA, 75 bp, synthetic construct
  source 1..75: mol_type = other DNA
gacaaccggggatttgaggcagaccagttaaccctcacgattgacgacagcgacggcggcgtgcgtctcccgaag

SEQ ID NO: 403320 - DNA, 75 bp, synthetic construct
  source 1..75: mol_type = other DNA
cgagcacaccattgataacagcggctttaccacgcagcttgagcttgaagccaaaatcccggaatggatagcgga

SEQ ID NO: 403321 - DNA, 75 bp, synthetic construct
  source 1..75: mol_type = other DNA
ctgatggatatcgaaatcgaccacgccgaccagaccgagaaagtgacatgtcctccttacgcgcatggcggaaat

SEQ ID NO: 403322 - DNA, 75 bp, synthetic construct
  source 1..75: mol_type = other DNA
tcacacgcagcagcggcgatcgccatcagttccgcattgctgaccgcgaagcgtatacgggggtacgcgcctact

SEQ ID NO: 403323 - DNA, 75 bp, synthetic construct
  source 1..75: mol_type = other DNA
caggagaaacacgaggacggaacgcatcagtcctgcgatgtaaatcgtggatggtttagcccactgacgacagat

SEQ ID NO: 403324 - DNA, 75 bp, synthetic construct
  source 1..75: mol_type = other DNA
gcgaagtttcaggatttccaggtgcgcatccgtgacgccatcgtgaaacgtcaggctctggaccgcatcatgatc

SEQ ID NO: 403325 - DNA, 75 bp, synthetic construct
  source 1..75: mol_type = other DNA
caggaaaacagtgaaaaactggcggccgatatgattatcagtcagaaacgcatgggtggcctgcaggccgtgcgt

SEQ ID NO: 403326 - DNA, 75 bp, synthetic construct
  source 1..75: mol_type = other DNA
catggccgatgagtttcccggtggcgctgttgttttcactgttttaaatcttactcactggcttgacggcaccac

SEQ ID NO: 403327 - DNA, 75 bp, synthetic construct
  source 1..75: mol_type = other DNA
gattgcagtttttatttcagttccctaacaatgctaatataggttactggaatggaacattgcaacagcataaat

SEQ ID NO: 403328 - DNA, 75 bp, synthetic construct
  source 1..75: mol_type = other DNA
atgtatgataaaaaaatgttttcttcaggctttattaagaatgggatatcaaattatatttgtgtggcatggatg

SEQ ID NO: 403329 - DNA, 75 bp, synthetic construct
  source 1..75: mol_type = other DNA
gagattgataatcaggactggattattgcaaaagccgagcacaccattgataacagcggctttaccacgcagctt

SEQ ID NO: 403330 - DNA, 75 bp, synthetic construct
  source 1..75: mol_type = other DNA
attttcgggaaaccctgaatccccgccgtgaaaaatcgtggcataacaccaccatcggggaagtggtgaaggaaa

SEQ ID NO: 403331 - DNA, 75 bp, synthetic construct
  source 1..75: mol_type = other DNA
gacgatgacgatctggtggtgatttgcggtcgtgaactgttgtctgacaagtatttcccactggtcaacaaagag

SEQ ID NO: 403332 - DNA, 75 bp, synthetic construct
  source 1..75: mol_type = other DNA
caaaggctggttacagaaaatccgtgaggatgcaccggatcatgtcatgggcagcagcaccacgggcggtgaaac

SEQ ID NO: 403333 - DNA, 75 bp, synthetic construct
  source 1..75: mol_type = other DNA
taacgtgatggttggcgaagagggaaatatcaaggtgctgcgccacacctatgccaacaaaaataacgcctacag

SEQ ID NO: 403334 - DNA, 75 bp, synthetic construct
  source 1..75: mol_type = other DNA
gtgaacgcacagggccagccgttgccctcgttcgccatcacacgcagcagcggcgatcgccatcagttccgcatt

SEQ ID NO: 403335 - DNA, 75 bp, synthetic construct
  source 1..75: mol_type = other DNA
gggcaaaagcgccagcggtaaacctctgccggtgatcactatcacacgcaaggacggcgacagtcaccgctttac

SEQ ID NO: 403336 - DNA, 75 bp, synthetic construct
  source 1..75: mol_type = other DNA
gagcaggacaacagcgagaaaatcgccgccgatctgatcatcagccagaaacgcatgggcggcctgcaggctgtg

SEQ ID NO: 403337 - DNA, 75 bp, synthetic construct
  source 1..75: mol_type = other DNA
aaaccgccaaaacccaaaaaggagaaaagcagtagccgtgaaggtgattatatggaaggcgcggaaggcaatgtg

SEQ ID NO: 403338 - DNA, 75 bp, synthetic construct
  source 1..75: mol_type = other DNA
cagggccagccgttgccatcgttcgccatcacacgcagcagcggcgatcgccatcagttccgcattgctgaccgc

SEQ ID NO: 403339 - DNA, 75 bp, synthetic construct
  source 1..75: mol_type = other DNA
gcttatcgacgtggtctaccaggacgatgacgatctggtggtgatttgcggtcgtgaactgctgtctgacaagta

SEQ ID NO: 403340 - DNA, 75 bp, synthetic construct
  source 1..75: mol_type = other DNA
gacgatgacgatctggtggtgatttgcggccgtgaactgttgtctgataagtatttcccgctggtcaacaaagag

SEQ ID NO: 403341 - DNA, 75 bp, synthetic construct
  source 1..75: mol_type = other DNA
catgattggctttaacggcgagaagcgcgccaaaacgtctaaccgtggtgaaaacccactgctgcaggacgtcaa

SEQ ID NO: 403342 - DNA, 75 bp, synthetic construct
  source 1..75: mol_type = other DNA
caggaaaacagtgaaaaactggccgccgatatgatcatcagtcagaaacgcatgggaggcctgcaggccgtgcgt

SEQ ID NO: 403343 - DNA, 75 bp, synthetic construct
  source 1..75: mol_type = other DNA
aaaaatgatattgtattgtccggagtaatgaccggaacatcaaagatttttcatctaaataattcaggtgattta

SEQ ID NO: 403344 - DNA, 75 bp, synthetic construct
  source 1..75: mol_type = other DNA
attttacaacattatataaatacgcattatttgtcagaggagcaaactcagaagatcaaagatattgtgggtttt

SEQ ID NO: 403345 - DNA, 75 bp, synthetic construct
  source 1..75: mol_type = other DNA
ggagggagcaatacctatttcgttcccgccacactacaggataatttacacatatatatatcagaaaaatcaaat

SEQ ID NO: 403346 - DNA, 75 bp, synthetic construct
  source 1..75: mol_type = other DNA
tgagaaaatcatgcgcatctatgaaaactccaatatgacaaaaaaagatctagaggaaatactgagcaggttgcc

SEQ ID NO: 403347 - DNA, 75 bp, synthetic construct
  source 1..75: mol_type = other DNA
tgattatgcgacaaatgaaaaaatactataaatctctagggcgcataggtgaagtacatattaaagacaataaat

SEQ ID NO: 403348 - DNA, 75 bp, synthetic construct
  source 1..75: mol_type = other DNA
cagtattacaggtatagatgagtctctctatgaaaagcatataatctttatcactcttaaggttattgtcccctc

SEQ ID NO: 403349 - DNA, 75 bp, synthetic construct
  source 1..75: mol_type = other DNA
cagaaaacaactggaatattagagggaataataatttcatgctaactcacaagggaagtaaatgtattgatttta

SEQ ID NO: 403350 - DNA, 75 bp, synthetic construct
  source 1..75: mol_type = other DNA
cattacaatgtccaatgagttaggcaataatagattaaaaaactcacagttagaaattctagaattgaaggaccc

SEQ ID NO: 403351 - DNA, 75 bp, synthetic construct
  source 1..75: mol_type = other DNA
aatatcatctggtattcacattataaagtttcaggctctgtttataccaatgcatatcgtggcccaatggaaact

SEQ ID NO: 403352 - DNA, 75 bp, synthetic construct
  source 1..75: mol_type = other DNA
cttacattgataacagttcctattgatgacaaattgtcagatagtagaattaatataacaccaatgggtataaag

SEQ ID NO: 403353 - DNA, 75 bp, synthetic construct
  source 1..75: mol_type = other DNA
atacatttgaacctgaaaacacaattaattttatttatgatttttatagaaaaaaacaagatgacttactcagcg

SEQ ID NO: 403354 - DNA, 75 bp, synthetic construct
  source 1..75: mol_type = other DNA
atatgataagattcgtggtaataatttagataataccttttcccttggaaatggggggggggttatatattctgg

SEQ ID NO: 403355 - DNA, 75 bp, synthetic construct
  source 1..75: mol_type = other DNA
tgcgtacccgcaaatggaccgatcagtctggccaggatcgctacacgacagaagttgtcgtaaacgtcggcggca

SEQ ID NO: 403356 - DNA, 75 bp, synthetic construct
  source 1..75: mol_type = other DNA
tcagtgatgtggatattcgttccgtttcagattctgcaacgctggcggtgctggaagatcagatttaccaggctg

SEQ ID NO: 403357 - DNA, 75 bp, synthetic construct
  source 1..75: mol_type = other DNA
caggtgcgcatccgtgacgccatcgtgaaacgtcaggctctggaccgcataatgatcggctttaacggcgtgaag

SEQ ID NO: 403358 - DNA, 75 bp, synthetic construct
  source 1..75: mol_type = other DNA
gttgaggactaccgctgtgccgcacttgtggaaaacatccagattggcgacttcagcgccgccgcagcagaaacc

SEQ ID NO: 403359 - DNA, 75 bp, synthetic construct
  source 1..75: mol_type = other DNA
caggaaaacagtgaaaaactggccgccgatatgataatcagtcagaaacgcatgggcggcctgcaggccgtgcgt

SEQ ID NO: 403360 - DNA, 75 bp, synthetic construct
  source 1..75: mol_type = other DNA
caggaaaacagtgaaaaactggctgccgatatgatgatcagtcagaaacgcatgggtggcctgcaggccgtgcgt

SEQ ID NO: 403361 - DNA, 75 bp, synthetic construct
  source 1..75: mol_type = other DNA
caggaaaacagtgaaaaactggcagccgatatgatcatcagtcagaaacgcatgggcggcctgcaggccgtgcgt

SEQ ID NO: 403362 - DNA, 75 bp, synthetic construct
  source 1..75: mol_type = other DNA
gacagaacgcatcagtcctgcgatgtaaatcgtggatggtttagcccactgacgacagataaaaataacacctga

SEQ ID NO: 403363 - DNA, 75 bp, synthetic construct
  source 1..75: mol_type = other DNA
attacgccactaagagattatgacgctgtccgtgggctaagagaagcttttggtaagcctgatcgagaggaagag

SEQ ID NO: 403364 - DNA, 75 bp, synthetic construct
  source 1..75: mol_type = other DNA
agaaaaaagctgcgcaatctagtttaaatgaagcgtctaaatctattgctgtggatatactctccgaattaaatt

SEQ ID NO: 403365 - DNA, 75 bp, synthetic construct
  source 1..75: mol_type = other DNA
gtctggctgaacgccttcaaaatccctccccgtcgcctggtcaaaattaacactgcaagcctcgcgggggcatga

SEQ ID NO: 403366 - DNA, 75 bp, synthetic construct
  source 1..75: mol_type = other DNA
catgggtggcctgcaggcggtgcgtgcgccgttcttcccgccgaatgcactgctgatcacccgtctggataacct

SEQ ID NO: 403367 - DNA, 75 bp, synthetic construct
  source 1..75: mol_type = other DNA
accggtactacgatccgttgcaggggcggtatatcaccccggacccgattgggttgagaggtggatggaatatgt

SEQ ID NO: 403368 - DNA, 75 bp, synthetic construct
  source 1..75: mol_type = other DNA
gcgcgtttggtgatgtgatacgtcagagcgaaacaggccaggttaaccagctactggatattctcagacataaag

SEQ ID NO: 403369 - DNA, 75 bp, synthetic construct
  source 1..75: mol_type = other DNA
tttctctgcgatcaacaaaaaactggcatcgatcatctttgatgacattctgaaaagccgtaaatatcgttatcc

SEQ ID NO: 403370 - DNA, 75 bp, synthetic construct
  source 1..75: mol_type = other DNA
gaagcctcccgccaatgggtggaacaactcgacaaaaacttcccgctggatatcaataatttttgccagtgggta

SEQ ID NO: 403371 - DNA, 75 bp, synthetic construct
  source 1..75: mol_type = other DNA
atgttgcacaggagcatatccgcacggccggagagcgcacgttcttccggcgtttaaaagagggactgaccggcg

SEQ ID NO: 403372 - DNA, 75 bp, synthetic construct
  source 1..75: mol_type = other DNA
acgtcagggcgaaacaggccaggttaaccagctactggatattctcagacataaagcattaacgcagatggcaca

SEQ ID NO: 403373 - DNA, 75 bp, synthetic construct
  source 1..75: mol_type = other DNA
acgattgcctttatcaggcagtttaatcacttcataaataagaataaccatctaaaacaaattaaagttaacgac

SEQ ID NO: 403374 - DNA, 75 bp, synthetic construct
  source 1..75: mol_type = other DNA
gttcgcatgcctcgtctctgctctgcagatcgtctctctgaaagtatggtcgatgaaatatttcagaagggggct

SEQ ID NO: 403375 - DNA, 75 bp, synthetic construct
  source 1..75: mol_type = other DNA
gttcgtatgccccgtctctgctctgcagaacgcctctctgaaagtatggttgatgaaatatttcagaagggagag

SEQ ID NO: 403376 - DNA, 75 bp, synthetic construct
  source 1..75: mol_type = other DNA
gtttttgtccgcacggatggcgcgccgctggacaggggcgtgcccggcatcttcacccgcgaaggctaccgggaa

SEQ ID NO: 403377 - DNA, 75 bp, synthetic construct
  source 1..75: mol_type = other DNA
tagacggcgcagtgcttaacgatctggtggtgaagatcctgacccctaaagatccgacctattcgttctataaca

SEQ ID NO: 403378 - DNA, 75 bp, synthetic construct
  source 1..75: mol_type = other DNA
atgcttagcccatcccaatcccttcaataccagaaagaaagcgtcgagcgggctttaacgtgcgctaactgcggc

SEQ ID NO: 403379 - DNA, 75 bp, synthetic construct
  source 1..75: mol_type = other DNA
ccgtatgatcctgaactggattttcactatcgcattttcaatgctgatggcagtgaagtggcgcagtgcggcaac

SEQ ID NO: 403380 - DNA, 75 bp, synthetic construct
  source 1..75: mol_type = other DNA
gcaaattttgacaaagttatatgtctggtagatgtggatagtgataggctttttctctctcttttattgattgta

SEQ ID NO: 403381 - DNA, 75 bp, synthetic construct
  source 1..75: mol_type = other DNA
tgcgcaagcgaaagggttagcgcgggcgcgaaataacattgatgcatggtggcccgcgattgaagcgggcgccga

SEQ ID NO: 403382 - DNA, 75 bp, synthetic construct
  source 1..75: mol_type = other DNA
ttacccgccaaaattgtgaaagccaaaccgcgtccgccgctgcgccataagcgccgggttttaatgctggaaggt

SEQ ID NO: 403383 - DNA, 75 bp, synthetic construct
  source 1..75: mol_type = other DNA
atgaaaataaaacaacacagcattattctgtctcttgtcccctttctgattaccggagctcctgcgtttgcgcag

SEQ ID NO: 403384 - DNA, 75 bp, synthetic construct
  source 1..75: mol_type = other DNA
tatgtgacgcgcggtgagggaaccggtgaacgaattactgtacaggaagggctggtacgtacacaggaaatggcc

SEQ ID NO: 403385 - DNA, 75 bp, synthetic construct
  source 1..75: mol_type = other DNA
ggataaaacccgggttctcggtggtgtcagtgatggtacacgggatacggatgcagccactgtcgggcaactgaa

SEQ ID NO: 403386 - DNA, 75 bp, synthetic construct
  source 1..75: mol_type = other DNA
ctcttcatcatgcagaacggaattgcacacaacagactgatacttctctgtctgatgaagggggagagcgtttac

SEQ ID NO: 403387 - DNA, 75 bp, synthetic construct
  source 1..75: mol_type = other DNA
aggttaaccagctactggatattctcagacataaagcattaacgcagatggcacaggagagtggcggtagtgcaa

SEQ ID NO: 403388 - DNA, 75 bp, synthetic construct
  source 1..75: mol_type = other DNA
ccccggcggtcgtcttgatatcgcctggaaaggtccgggtcaccccttatatatgacggggccggcggtacatgt

SEQ ID NO: 403389 - DNA, 75 bp, synthetic construct
  source 1..75: mol_type = other DNA
tgtcgcttgatgaacagtggcggatgattaaagagaatcagttgatgatgatggcccacggtgtcgcttcgccgc

SEQ ID NO: 403390 - DNA, 75 bp, synthetic construct
  source 1..75: mol_type = other DNA
gtgcatcgggtaggtgccagtgccgggattaccttgattgatgacaacaatcatcaggcggcagaagtgatgtcg

SEQ ID NO: 403391 - DNA, 75 bp, synthetic construct
  source 1..75: mol_type = other DNA
tatgcgccaacgtgcagggtaatttgatggatgagatgctgattacgattattcaggggcacgctcagcgactcg

SEQ ID NO: 403392 - DNA, 75 bp, synthetic construct
  source 1..75: mol_type = other DNA
ggcggtcgcgcagccgtgctggagcatattgacgccctgtttgacggcagccgcgtggtgcattcgccctgggaa

SEQ ID NO: 403393 - DNA, 75 bp, synthetic construct
  source 1..75: mol_type = other DNA
agatatttctacaggagaacatgatgattatatcatacaaacattagatgtaggcacttttgcaccttttggtga

SEQ ID NO: 403394 - DNA, 75 bp, synthetic construct
  source 1..75: mol_type = other DNA
gatgctcagatgatgctcaagctgcaaactatcaccgaaaacttgggcgttatttgtggtgggcgggcatgggtg

SEQ ID NO: 403395 - DNA, 75 bp, synthetic construct
  source 1..75: mol_type = other DNA
atgcgaattattaccccgatgggatgcacagccagaagcgggagaactggcgcgaatatctggaacgggagcgcg

SEQ ID NO: 403396 - DNA, 75 bp, synthetic construct
  source 1..75: mol_type = other DNA
gccgttccgatgccctttcggagcttgaaatggcgaaagccagattggcaaaactcgacaatgaggcagcagaaa

SEQ ID NO: 403397 - DNA, 75 bp, synthetic construct
  source 1..75: mol_type = other DNA
ctttgtcagcaaacgtgtagtgaataacaacaaaagcgcacggatataccgtattgccatcagtgctattgatag

SEQ ID NO: 403398 - DNA, 75 bp, synthetic construct
  source 1..75: mol_type = other DNA
accccccttgtgcactttaataaaaccagcattacttcagattgttggcaaattctctttttttcacccgatcat

SEQ ID NO: 403399 - DNA, 75 bp, synthetic construct
  source 1..75: mol_type = other DNA
tggatctgccggatacgacacgcaactggattacgtggttaaggggattattccggcggtatcgctatgcagcat

SEQ ID NO: 403400 - DNA, 75 bp, synthetic construct
  source 1..75: mol_type = other DNA
gcttaaatcattcagaaccaagtcacagacaggccatttcccaggtaaatctcaaattgacgagggtcttgcatt

SEQ ID NO: 403401 - DNA, 75 bp, synthetic construct
  source 1..75: mol_type = other DNA
aaatcagcaacgccaagtgccatcgtcgaagaagcatacaaatacgttatcgaaaataccttcgctaaattgaac

SEQ ID NO: 403402 - DNA, 75 bp, synthetic construct
  source 1..75: mol_type = other DNA
gtatgaaatgaaaaacttccggcgctggctgtacaagctggaaagcgacggcgtaatcgctattgacggtgatta

SEQ ID NO: 403403 - DNA, 75 bp, synthetic construct
  source 1..75: mol_type = other DNA
tgaactggcagacctgagaatcatcgacgaggggcgctattgtgtccggctgtacaaggcaggccacatcaggcc

SEQ ID NO: 403404 - DNA, 75 bp, synthetic construct
  source 1..75: mol_type = other DNA
ggttccagtgcatttcgtgcatctctggacgctgaataccgtattcgccgtgaaggtgcggacagtgaagccctg

SEQ ID NO: 403405 - DNA, 75 bp, synthetic construct
  source 1..75: mol_type = other DNA
aatcttgagctgacggacgatcaagtccgggaagaattcgacaaaatcgtggaaaggatcagcaaggggaattga

SEQ ID NO: 403406 - DNA, 75 bp, synthetic construct
  source 1..75: mol_type = other DNA
gatggagcaaaccgcgcatatcctcaccgtgccgggcggcggaacgctgcattgcgactggtggtttaccaacga

SEQ ID NO: 403407 - DNA, 75 bp, synthetic construct
  source 1..75: mol_type = other DNA
cgaaaagtcctggaaggaaagcgttttctgtacgagctgccgtggtttatggttatcggcagccccggcgatggt

SEQ ID NO: 403408 - DNA, 75 bp, synthetic construct
  source 1..75: mol_type = other DNA
aggtccgtcgcctgtacctggctgaatatgcccgccgctggcaggattttctggcaagcattcacagcatcaaca

SEQ ID NO: 403409 - DNA, 75 bp, synthetic construct
  source 1..75: mol_type = other DNA
agaccacgctggtgccgccgctggatgcgcaggccagacaaaagcagatggcccagcgtgcgcatgaccggctct

SEQ ID NO: 403410 - DNA, 75 bp, synthetic construct
  source 1..75: mol_type = other DNA
cgcctgagtaaagcggtggtggagcagaccacgctggtgccgccgctggatgcgcaggccagacaaaagcagatg

SEQ ID NO: 403411 - DNA, 75 bp, synthetic construct
  source 1..75: mol_type = other DNA
gcgtgaatttgccgcgctgggtgcgccgctgctggaagccattgaacagattttcctcgattcaaaatttgatgc

SEQ ID NO: 403412 - DNA, 75 bp, synthetic construct
  source 1..75: mol_type = other DNA
ggatactgatgtcaaagcctataccggaaaacctgcgatgcccccggttcccgcattactgaaccaggcgcgggc

SEQ ID NO: 403413 - DNA, 75 bp, synthetic construct
  source 1..75: mol_type = other DNA
acgcgccgttgaacggcgtgcttctgacgctgaacgtggcagatctaaccgcgcagtcatcggcagaacgcctgg

SEQ ID NO: 403414 - DNA, 75 bp, synthetic construct
  source 1..75: mol_type = other DNA
aggattggttaatcttgagcttacagacgatcaagtccgagaagaattcgacaaaatcgtggaaaggattagcaa

SEQ ID NO: 403415 - DNA, 75 bp, synthetic construct
  source 1..75: mol_type = other DNA
cctggacgatgcaggtccgcgttgtggatatggatcctgccatcactgaactggtgattgatattgacggccagg

SEQ ID NO: 403416 - DNA, 75 bp, synthetic construct
  source 1..75: mol_type = other DNA
ggcctcgccagattcaccgttgatgcggctgagtaaagccgtggtggagcagaccaccctggtaccgccgctgga

SEQ ID NO: 403417 - DNA, 75 bp, synthetic construct
  source 1..75: mol_type = other DNA
cacccggaagagcggctggaaaaatcactggtggatgaccgtttcgccgccctgcgggaagtggtttccgggcgg

SEQ ID NO: 403418 - DNA, 75 bp, synthetic construct
  source 1..75: mol_type = other DNA
caacccatcgacgcagctgccgacggtacgctaccgctggataaagtggcgatgaaaatcaaacccgacgatatc

SEQ ID NO: 403419 - DNA, 75 bp, synthetic construct
  source 1..75: mol_type = other DNA
gcaagtgagttcgacgcacgccaaggtgacccttgagcctttagagcgtggctttggccatactctgggtaacgc

SEQ ID NO: 403420 - DNA, 75 bp, synthetic construct
  source 1..75: mol_type = other DNA
gtacgctaccgctggataaagtggcgatgaaaatcaaacccgacgatatccatttcgcccgcaccaaattactca

SEQ ID NO: 403421 - DNA, 75 bp, synthetic construct
  source 1..75: mol_type = other DNA
taattttcgccgccacgatgtttggcaacgcaggtgtgtttgcctggttcagctacgtaaagccatacatgatgt

SEQ ID NO: 403422 - DNA, 75 bp, synthetic construct
  source 1..75: mol_type = other DNA
atttgttgcgcgggattatttgccctttcagcaccactgcaaatattgttactgcaaaatgccaaaggcggagag

SEQ ID NO: 403423 - DNA, 75 bp, synthetic construct
  source 1..75: mol_type = other DNA
aagtcttcccgggtgatgaggtgtttgtcagaaccatcgaaggacacaacatgatcaagattcttggctatgaca

SEQ ID NO: 403424 - DNA, 75 bp, synthetic construct
  source 1..75: mol_type = other DNA
gcagatgctgggatatgcctcgctggcagaggttccggcggaacagctggacgggaaaagcgagcgcattcagca

SEQ ID NO: 403425 - DNA, 75 bp, synthetic construct
  source 1..75: mol_type = other DNA
cggtgtgaagcggggcgaggaactggcggaagcaagcggtgatttatggcgtgacgcccgctgggccatcagccg

SEQ ID NO: 403426 - DNA, 75 bp, synthetic construct
  source 1..75: mol_type = other DNA
atgaagtttgttgcgcccgaacaggcaccggaacaggcggaggtcatcaaaaatacgccgttctggcctgatgtg

SEQ ID NO: 403427 - DNA, 75 bp, synthetic construct
  source 1..75: mol_type = other DNA
tggtgataccacacctgcgtcggtatttcatgtcgggttaacctcctgcggcagtgctgtcagtgcagtgaagct

SEQ ID NO: 403428 - DNA, 75 bp, synthetic construct
  source 1..75: mol_type = other DNA
caacgctgagctgtatgagtttcgcagacgccagcagatgctggggtatgcctcgctggcagaggttccggcgga

SEQ ID NO: 403429 - DNA, 75 bp, synthetic construct
  source 1..75: mol_type = other DNA
gacctgtcggagttccgcagtgtgatgcgcactgacggcacggtgacgcagccacgtttaaagcaggttgcgcta

SEQ ID NO: 403430 - DNA, 75 bp, synthetic construct
  source 1..75: mol_type = other DNA
ggggtattcgcctggttcagttacgtaaaaccttacatgatgtttatttccggtttttcggaaacggcgatgacc

SEQ ID NO: 403431 - DNA, 75 bp, synthetic construct
  source 1..75: mol_type = other DNA
tttaattgccagtatttttaatggtcctggcgaaaaactcaatcttgttcctatggatggcaacctgaataaagg

SEQ ID NO: 403432 - DNA, 75 bp, synthetic construct
  source 1..75: mol_type = other DNA
aactggatatcattaataccgcctttaaagttatcgaaaccatacgccccaaactggcctgtagccggtgtgatg

SEQ ID NO: 403433 - DNA, 75 bp, synthetic construct
  source 1..75: mol_type = other DNA
atcaggctcagccaggacgaggagcattaagagtaacgttcaccccaacgtttgataacaattgcaagaatataa

SEQ ID NO: 403434 - DNA, 75 bp, synthetic construct
  source 1..75: mol_type = other DNA
ctatgtgctgatgccgggtaaagtgcatgccgatgacacgccggtaaatgtactggagccgggtcagggtaaaac

SEQ ID NO: 403435 - DNA, 75 bp, synthetic construct
  source 1..75: mol_type = other DNA
gtgttgtactcgctgatcggcacatgccgtctgaacaatgtggaaccagaaaaatggctgcgttacgtcattgaa

SEQ ID NO: 403436 - DNA, 75 bp, synthetic construct
  source 1..75: mol_type = other DNA
ggtgtttccatcagctccgtgaaaaaatacgtggcgaaagccgtcgagcactgcctgctgttccgtctggagtat

SEQ ID NO: 403437 - DNA, 75 bp, synthetic construct
  source 1..75: mol_type = other DNA
gctgggcattacctgcggcgtaatggtttgggcagggattgcgttgcttggcctgcatttgattatcgaaaaaat

SEQ ID NO: 403438 - DNA, 75 bp, synthetic construct
  source 1..75: mol_type = other DNA
ggatgggctaccagatgctacgcggagcgctgaaaaaagaggttatttctgcccctgcgccacaagtcgaattgg

SEQ ID NO: 403439 - DNA, 75 bp, synthetic construct
  source 1..75: mol_type = other DNA
aacccattagagtcagttcgctttggatatggaacgatcaagaagttaatcagctatcgtgtaattcctatgctg

SEQ ID NO: 403440 - DNA, 75 bp, synthetic construct
  source 1..75: mol_type = other DNA
ttattgagcatatccaggactggccggcaaaccgggtacacgatctgttgccctggaaagttgatctgacctctc

SEQ ID NO: 403441 - DNA, 75 bp, synthetic construct
  source 1..75: mol_type = other DNA
tgcagtcgttgtacgactggatacagttgcagaggaaaacgctgtcgaaacatgcggagatggggaaggcgttcg

SEQ ID NO: 403442 - DNA, 75 bp, synthetic construct
  source 1..75: mol_type = other DNA
tccggcagaggaacggctcgcagtcagaaaagccagaagcgtccagttgatgcagtcgttgtacgactggataca

SEQ ID NO: 403443 - DNA, 75 bp, synthetic construct
  source 1..75: mol_type = other DNA
atgatcagcagagtgacagaagctctaagcaaagttaaaggatcgatgggaagccacgagcgccatgcattgcct

SEQ ID NO: 403444 - DNA, 75 bp, synthetic construct
  source 1..75: mol_type = other DNA
atgattcttgtaaaaaaagcaggaggacgctacggaattcgttatgacgaattggctatgtttatattaatggca

SEQ ID NO: 403445 - DNA, 75 bp, synthetic construct
  source 1..75: mol_type = other DNA
tggcggcagcgccgggctgattggcgggcgcgttgatcaggccaccatgcgcgtcgccgatatgtttatgacctt

SEQ ID NO: 403446 - DNA, 75 bp, synthetic construct
  source 1..75: mol_type = other DNA
gggcgcgttgatcaggccaccatgcgcgtcgccgatatgtttatgaccttcccgacctcgattctgtcgttcttt

SEQ ID NO: 403447 - DNA, 75 bp, synthetic construct
  source 1..75: mol_type = other DNA
gtaatactggaagtttaaatattagaagtgggataagagtaagaatcggtcacgctgatggaacagactggtggt

SEQ ID NO: 403448 - DNA, 75 bp, synthetic construct
  source 1..75: mol_type = other DNA
tcgaaagccagcaagcatatgtaactataaatggtggtaatgctattggttatggagcacgtatgatagcttccc

SEQ ID NO: 403449 - DNA, 75 bp, synthetic construct
  source 1..75: mol_type = other DNA
tgtgcagaaagcagactcctcctttctttatgataagtatcagaatcagagtattgccgcgcatgtgatgcgcgc

SEQ ID NO: 403450 - DNA, 75 bp, synthetic construct
  source 1..75: mol_type = other DNA
gacgtgctggagacgcatgaagagcgcctgaacagccagcaacagcagataaataccggaagtaccgttgctgtg

SEQ ID NO: 403451 - DNA, 75 bp, synthetic construct
  source 1..75: mol_type = other DNA
tcagcagcgctggccggtcttttccagccatacagtgtgggtaaatttaacgccacagcggctgtgggcgggtaa

SEQ ID NO: 403452 - DNA, 75 bp, synthetic construct
  source 1..75: mol_type = other DNA
atggtcggcgtactcggcaccgggctaaccaacgtgattatcgccatcgccctgtcgcactgggcgtggtacgca

SEQ ID NO: 403453 - DNA, 75 bp, synthetic construct
  source 1..75: mol_type = other DNA
attactctttgcgagaaaagctacagcataaaacaggggcgttgagagactctattgtccataaagtgcttcgca

SEQ ID NO: 403454 - DNA, 75 bp, synthetic construct
  source 1..75: mol_type = other DNA
cgtgcagagagcagactcctcctttctttatgataagggaaggtgcgaacaagtccctgatatgagatcatgttt

SEQ ID NO: 403455 - DNA, 75 bp, synthetic construct
  source 1..75: mol_type = other DNA
gcttgccttggtgacgtctctcgtcaggttgaatggcatgatcgctggctggatgcagaaagctggaagtgcgtt

SEQ ID NO: 403456 - DNA, 75 bp, synthetic construct
  source 1..75: mol_type = other DNA
gcacgcgccatgctcaacgaacgataccaggactatgacgccacggcgtccggtgtgaagcggggcgaggaactg

SEQ ID NO: 403457 - DNA, 75 bp, synthetic construct
  source 1..75: mol_type = other DNA
attgataacgatacccgccttccagcgtttaaagacgcgctgcgctggaacgaagtgtattacaccatgaccgct

SEQ ID NO: 403458 - DNA, 75 bp, synthetic construct
  source 1..75: mol_type = other DNA
gacatttacgggcacaccagataatcaggaggcggggcttattcagattaacagcataaatggagcacggggtgt

SEQ ID NO: 403459 - DNA, 75 bp, synthetic construct
  source 1..75: mol_type = other DNA
aactttgatgtcagtctgggaagttatgacagccgacagtttaccgcagctggtgataccacacctgcgtcggta

SEQ ID NO: 403460 - DNA, 75 bp, synthetic construct
  source 1..75: mol_type = other DNA
gcagaggttccggcggaacagctggatggcaaaagtgagcgcattcatcactatttcaacgcggtttactgctgg

SEQ ID NO: 403461 - DNA, 75 bp, synthetic construct
  source 1..75: mol_type = other DNA
tggcggccgaagtgataaaagatctcgtcaataccgtgcgttcttatgacacggaaaatgaacatgatgtgtgtg

SEQ ID NO: 403462 - DNA, 75 bp, synthetic construct
  source 1..75: mol_type = other DNA
aaagatgatcctgcccgcctgatcttcaacactcaaactggcccggccatcgtcgccagcctgattgatctcggt

SEQ ID NO: 403463 - DNA, 75 bp, synthetic construct
  source 1..75: mol_type = other DNA
caaaatagaatccgcgactggcatgccggtagaagccagtcagctctcagccagctggcagaattttggcccgac

SEQ ID NO: 403464 - DNA, 75 bp, synthetic construct
  source 1..75: mol_type = other DNA
atgtctattgtgatgcagctacaggatgttgcggaatcaacccgccttgggccgctttctggcgaggttcgggct

SEQ ID NO: 403465 - DNA, 75 bp, synthetic construct
  source 1..75: mol_type = other DNA
tgacaaactcggacgtagcaccaatcaactttccggcggtgaatggcaacgcgtacgtcttgctgcggtggtgct

SEQ ID NO: 403466 - DNA, 75 bp, synthetic construct
  source 1..75: mol_type = other DNA
tctgaccgcgcatattacgcgtgaaaatccgggctggcagttctctattcccgatacacggatcacgatggacgg

SEQ ID NO: 403467 - DNA, 75 bp, synthetic construct
  source 1..75: mol_type = other DNA
tcaaatatctttattacaacccgagcgtggcgaaaactcgtggtgattcaacgccgtcatcacctttcccgacaa

SEQ ID NO: 403468 - DNA, 75 bp, synthetic construct
  source 1..75: mol_type = other DNA
ttgaactggactttattaacgacggtttatggatgaaaaccgatggcgttaatctgggcggtgtgcgcgccagta

SEQ ID NO: 403469 - DNA, 75 bp, synthetic construct
  source 1..75: mol_type = other DNA
atgtatcaacgctgttttgataatgccagtgaaacgctgtttgtcgctggtaaaacgccacggctttcacgtttt

SEQ ID NO: 403470 - DNA, 75 bp, synthetic construct
  source 1..75: mol_type = other DNA
tgaaaccgagctgatttacgtcaagaaaggggtagcaaggtttaccatcgattcttcgttatatgtcgcgcatgc

SEQ ID NO: 403471 - DNA, 75 bp, synthetic construct
  source 1..75: mol_type = other DNA
attaactatgttattcaacggcgtatgacggaagcgaaatggtcactcactaatactgaattatcacaggcagag

SEQ ID NO: 403472 - DNA, 75 bp, synthetic construct
  source 1..75: mol_type = other DNA
atcaactatgtgattcaacgacgtatgaccgaagcaaaatggctgctgaccaataccgatttgtcgcaggctgaa

SEQ ID NO: 403473 - DNA, 75 bp, synthetic construct
  source 1..75: mol_type = other DNA
gcaacgacgtgtacctgtgcgctgtacggctttcagtttcagggggctgaggaaaatcagctactgcaaccgcat

SEQ ID NO: 403474 - DNA, 75 bp, synthetic construct
  source 1..75: mol_type = other DNA
cgcccagcgattaccgtaggcaatttaaaaattgttttgcggaacaagaaatcttatctgaatttcctcaaccgg

SEQ ID NO: 403475 - DNA, 75 bp, synthetic construct
  source 1..75: mol_type = other DNA
ttgcttaccgcttccatgaagcaggcgaaaatgccttacgaaacggtatttcgtgcgccgctggaaattgtcgac

SEQ ID NO: 403476 - DNA, 75 bp, synthetic construct
  source 1..75: mol_type = other DNA
cgaaagcgagaagagaatcagcgccgccatcctcgaccacgacaggaagctgtccgctgccatgagccagcgcac

SEQ ID NO: 403477 - DNA, 75 bp, synthetic construct
  source 1..75: mol_type = other DNA
tatcatttacacgagtcatgttgatgcctaaaaagcaacgcgcccgttgggtaagtcccgatcgcgggattctga

SEQ ID NO: 403478 - DNA, 75 bp, synthetic construct
  source 1..75: mol_type = other DNA
ccggcttatgatggttggtctgacgacggtaaatactcctgggtgaaatcaccgactttctacggcaaaacggta

SEQ ID NO: 403479 - DNA, 75 bp, synthetic construct
  source 1..75: mol_type = other DNA
gataccgggggcggtgatggtggactcaccacagctgaacgtcagcgtctgaaagagctggaacgtgaaaatcgt

SEQ ID NO: 403480 - DNA, 75 bp, synthetic construct
  source 1..75: mol_type = other DNA
aactcaggctcttctgcttggtggtttcaccattgaggatgcgaaggaattacatgaagacctggtacgcagcca

SEQ ID NO: 403481 - DNA, 75 bp, synthetic construct
  source 1..75: mol_type = other DNA
cccgaaagttgctggttcagtaacaacaggcgaggataaagtaaccaattctgatacgtcgtcaattattactca

SEQ ID NO: 403482 - DNA, 75 bp, synthetic construct
  source 1..75: mol_type = other DNA
ccggtagaagccagccagctatctgccagttggcagaatttcggtccgacgcttgaagcgcgtgacattcgcgca

SEQ ID NO: 403483 - DNA, 75 bp, synthetic construct
  source 1..75: mol_type = other DNA
agaattttttggtgtcacgacgcccatacggcagtcgtcatttaatgtggattacgatttacactggcgtaaagc

SEQ ID NO: 403484 - DNA, 75 bp, synthetic construct
  source 1..75: mol_type = other DNA
gaatgttggttatgggggcaaaaattcggccgcatcgacagtgatatcaccatttccggcgatacgttaaccctg

SEQ ID NO: 403485 - DNA, 75 bp, synthetic construct
  source 1..75: mol_type = other DNA
atcagctttcggcgctggactgggtggacatcacttctgcactgcaagctgacccaaccaaagcctccgaaatgc

SEQ ID NO: 403486 - DNA, 75 bp, synthetic construct
  source 1..75: mol_type = other DNA
gtacaccggcgttgtcactggggaatcagcagtggaacaacctgagcatcgtctcgcagctgacggcgaatggca

SEQ ID NO: 403487 - DNA, 75 bp, synthetic construct
  source 1..75: mol_type = other DNA
aggtaagtctctccagtctgaccggacaacacggcgtgatgcaggtgcgcatggatctgcgtgatgatgagggac

SEQ ID NO: 403488 - DNA, 75 bp, synthetic construct
  source 1..75: mol_type = other DNA
tcagttatatttgccatgaatttaccaaagagtatcgcatttcccctattaactatgttattcaacggcgtatga

SEQ ID NO: 403489 - DNA, 75 bp, synthetic construct
  source 1..75: mol_type = other DNA
agaagtttcagtcggttagcttgctggaagagtacctgcgttcatcaccttatgtgatggaccaattaaaagagg

SEQ ID NO: 403490 - DNA, 75 bp, synthetic construct
  source 1..75: mol_type = other DNA
tcgttgttggtctgctgttcctgctggttatctttctgtcgccgctggcggggatggtgccaggctacgctgcag

SEQ ID NO: 403491 - DNA, 75 bp, synthetic construct
  source 1..75: mol_type = other DNA
agaaaggtaaattcccgcgcatgaagcaggcgctgtatgtcgacagcatctcttccgtgaccggttcgtttatcg

SEQ ID NO: 403492 - DNA, 75 bp, synthetic construct
  source 1..75: mol_type = other DNA
gccccacgctcttcgggtggttcccctgaagattatgctgagcccttactcggtgaaataggtcttttacaggaa

SEQ ID NO: 403493 - DNA, 75 bp, synthetic construct
  source 1..75: mol_type = other DNA
acttccccgtgaaacccgggttatccggccagaagaggaatgctgtcctgcctgtggtggtgaactcagttctct

SEQ ID NO: 403494 - DNA, 75 bp, synthetic construct
  source 1..75: mol_type = other DNA
cttctggcccatgttgtcgctggaaaatatgcagaccatctgccgttataccgccagtcagaaatataccgtcgc

SEQ ID NO: 403495 - DNA, 75 bp, synthetic construct
  source 1..75: mol_type = other DNA
ggcggtcgtaccggtctgacggcagtggttgttggtctgctgttcctgctggttatcttcttgtcgccgctggcg

SEQ ID NO: 403496 - DNA, 75 bp, synthetic construct
  source 1..75: mol_type = other DNA
gcgtgctgctggggatcctcggcttcttcatcatcgccattctggcctcgcgcaacattcacgcggcggtgctgg

SEQ ID NO: 403497 - DNA, 75 bp, synthetic construct
  source 1..75: mol_type = other DNA
catttcgtttctcagcagcgttcgacatatggccgccgttcatcagtatggcctgcgcgatcgggtaaatcgcta

SEQ ID NO: 403498 - DNA, 75 bp, synthetic construct
  source 1..75: mol_type = other DNA
cacaggacgtctgcgtgatctaagcccgtgcgtagtcatcgttgcactgctgtttatcctgaaaattgtgtttat

SEQ ID NO: 403499 - DNA, 75 bp, synthetic construct
  source 1..75: mol_type = other DNA
ggaatggtgcctggctatgctgctgctggtgcgctgatttacgttggcgtactgatgacttccagtttagcacgc

SEQ ID NO: 403500 - DNA, 75 bp, synthetic construct
  source 1..75: mol_type = other DNA
tacaacggcatcgtctctgcgccgccgagcgtaatgacggtggtggggcacgtggatttggccgggtcgtttaac

SEQ ID NO: 403501 - DNA, 75 bp, synthetic construct
  source 1..75: mol_type = other DNA
ttatcagcagcgcctttaaggttatcgaaacacaacgtccgaaacaggcctgttgccggtgcgaccatatcgtgc

SEQ ID NO: 403502 - DNA, 75 bp, synthetic construct
  source 1..75: mol_type = other DNA
taacgccgcagcagttacatgacgaaagcaacctgatccaggccggcctggattcaataagattgatgagatggt

SEQ ID NO: 403503 - DNA, 75 bp, synthetic construct
  source 1..75: mol_type = other DNA
gagcaacctgatccaggccggcctggattccataagattgatgagatggttacactggtttcgtaaaaatggcta

SEQ ID NO: 403504 - DNA, 75 bp, synthetic construct
  source 1..75: mol_type = other DNA
atgatttctggcgcaccatctcaggattcgctgttaccggacaaccgccacgcggctgattaccaacaattacgc

SEQ ID NO: 403505 - DNA, 75 bp, synthetic construct
  source 1..75: mol_type = other DNA
ggtacatcgtttagcggatgacgcgctgaacggcgtaaccggtctggttgagtatcacgagcacttcaatcgctt

SEQ ID NO: 403506 - DNA, 75 bp, synthetic construct
  source 1..75: mol_type = other DNA
ggtacatcgtttagcggatgacgcgctgaatggcgtaaccggtctggttgagtatcacgagcatttcaatcgctt

SEQ ID NO: 403507 - DNA, 75 bp, synthetic construct
  source 1..75: mol_type = other DNA
gcctcaggacgtcgaaacaccgcgcttcgctcgcctgaacgacgtactcgacagcacacgctggcatcggctgaa

SEQ ID NO: 403508 - DNA, 75 bp, synthetic construct
  source 1..75: mol_type = other DNA
acgcaaccggtgaaaagtgtcaaaacggagctgaaacaggcactgttgagcgggatctctttcgccgtgccgttg

SEQ ID NO: 403509 - DNA, 75 bp, synthetic construct
  source 1..75: mol_type = other DNA
tgagacgcgtaccgtacagcaagatacgcaaccggtgaaaagtgtcaaaacggagctgaaacaggcactgttgag

SEQ ID NO: 403510 - DNA, 75 bp, synthetic construct
  source 1..75: mol_type = other DNA
agtgttattacgggcgaaggcatactggaacgtatactccacgcgatcgcgacggcatcttcgaacatgggcaac

SEQ ID NO: 403511 - DNA, 75 bp, synthetic construct
  source 1..75: mol_type = other DNA
aatacggacgataacccggacatcaccaaatatatgggttactaccagcttaaaatcggctatcacctcggtgat

SEQ ID NO: 403512 - DNA, 75 bp, synthetic construct
  source 1..75: mol_type = other DNA
ccaaatatatgggttactaccagcttaaaatcggctatcacctcggtgatgcggtgttgagtgcgaaaggacagt

SEQ ID NO: 403513 - DNA, 75 bp, synthetic construct
  source 1..75: mol_type = other DNA
ctcaggtctacagcggttacggcgaatcacttatcgactataactttaaccagacccgcgtcggtgtgggggtta

SEQ ID NO: 403514 - DNA, 75 bp, synthetic construct
  source 1..75: mol_type = other DNA
ggggagcagcaactggcagaactggcagacatgagaatcatcgacgaggggcgctattgcgtccggctgtacaaa

SEQ ID NO: 403515 - DNA, 75 bp, synthetic construct
  source 1..75: mol_type = other DNA
tggtggtgattgacgttccccgcgcccctgctgaactggagcgcatagaggaggccgggaacaagactgaaaatc

SEQ ID NO: 403516 - DNA, 75 bp, synthetic construct
  source 1..75: mol_type = other DNA
gcgatgacatgaaaaagctggggtatgagatgaaacacttccggcgctggctgtacaagctggaaggtgacggcg

SEQ ID NO: 403517 - DNA, 75 bp, synthetic construct
  source 1..75: mol_type = other DNA
ctgtatctggtaaaccgtcccatctttccggctgtcccgcttgatgttgatgaaatggttattgcagccagccag

SEQ ID NO: 403518 - DNA, 75 bp, synthetic construct
  source 1..75: mol_type = other DNA
gatcgccggagtccaggaagcgcggctgctttctgaaaatttcgaattgctggagaaatggaccgaccagctacc

SEQ ID NO: 403519 - DNA, 75 bp, synthetic construct
  source 1..75: mol_type = other DNA
gaaggtgttgccggtgtcctgatggattacaacttgtttgccagcagctaccgcccacaggacggcagcagcagc

SEQ ID NO: 403520 - DNA, 75 bp, synthetic construct
  source 1..75: mol_type = other DNA
gcccttttccgtgactgcatttatgaactgccgctgcgttatatgattaaacacagctatctgacgccgccagaa

SEQ ID NO: 403521 - DNA, 75 bp, synthetic construct
  source 1..75: mol_type = other DNA
ccgaagagttgccttattttattcaagatcttgaagcgtataccggaagcatcatcactaaaaatgcgacaaaga

SEQ ID NO: 403522 - DNA, 75 bp, synthetic construct
  source 1..75: mol_type = other DNA
aacagctcaaacctattaccggaaattatccttacatttttgccggtaggaacaaccgcagcaaaccgatctcga

SEQ ID NO: 403523 - DNA, 75 bp, synthetic construct
  source 1..75: mol_type = other DNA
tgcggcacagccttcctttaagcgtgggctctgatgggtacgatcaggagcaggattacacgttaaaaagttatc

SEQ ID NO: 403524 - DNA, 75 bp, synthetic construct
  source 1..75: mol_type = other DNA
actggcgccacgttgctggtggtgcatcattcaggaaaagacgataccaaaggcgcacgtggttccagtgctttc

SEQ ID NO: 403525 - DNA, 75 bp, synthetic construct
  source 1..75: mol_type = other DNA
tgcactattgccctgctgcgcgacgatatgaaaaagctggggtatgagatgaagcacttccggcgctggctgtac

SEQ ID NO: 403526 - DNA, 75 bp, synthetic construct
  source 1..75: mol_type = other DNA
tccggctgccccgcttgatattgatgaaatggttatcgctgccagccaggtggagcgggaaacgggtaaacctgt

SEQ ID NO: 403527 - DNA, 75 bp, synthetic construct
  source 1..75: mol_type = other DNA
tgcgcccagcctacgctttcgcccaacaccaacgcggcaactgcgcgagtgctggatcgtctggggatcagcgtg

SEQ ID NO: 403528 - DNA, 75 bp, synthetic construct
  source 1..75: mol_type = other DNA
aaccgcgtccaccgctgcgccataagcgtcgggttttaatgctggaaggctgcgcccagcctacgctttcgccca

SEQ ID NO: 403529 - DNA, 75 bp, synthetic construct
  source 1..75: mol_type = other DNA
tctttctcaggaagtttagtctccaggattcccggggcggttcagaccgccgcagaatggatgtttgacatggtg

SEQ ID NO: 403530 - DNA, 75 bp, synthetic construct
  source 1..75: mol_type = other DNA
tgcgcaagagaaagggttagcgcgggcgcgcaataatattgatgcctggtggcccgcgattgaagcaggtgccga

SEQ ID NO: 403531 - DNA, 75 bp, synthetic construct
  source 1..75: mol_type = other DNA
gggataacaaaatgaatgcgctggaaagcggcaaaccggaaatgatcgtcaccgccaacattggttgccagacgc

SEQ ID NO: 403532 - DNA, 75 bp, synthetic construct
  source 1..75: mol_type = other DNA
aaactggccttccactgcccgtgtaccctacaacatgcgcaaaagctgaacggcgaagtggaaaaagtgttactt

SEQ ID NO: 403533 - DNA, 75 bp, synthetic construct
  source 1..75: mol_type = other DNA
aaaatgactcccgcgacatggggggatttatccgtggttgtgacgagcttaaacggcgcacaggggctacggtgc

SEQ ID NO: 403534 - DNA, 75 bp, synthetic construct
  source 1..75: mol_type = other DNA
ttcatggggttctgagggattcgacgcgcagcaaagctacgtaattaaggggcttattccggctgaatcattatg

SEQ ID NO: 403535 - DNA, 75 bp, synthetic construct
  source 1..75: mol_type = other DNA
gctgacggggagttaatcacgtcgctggtggtggtggataagccgcgccctcccgttgaactggagcgcatcgag

SEQ ID NO: 403536 - DNA, 75 bp, synthetic construct
  source 1..75: mol_type = other DNA
aatcgctccatcatggggcgatatcttggtgaaatcgcatgggaaacagaggtatgggtggctgatgcaccttct

SEQ ID NO: 403537 - DNA, 75 bp, synthetic construct
  source 1..75: mol_type = other DNA
caggtgaaaaatctgtatctggtaaaccgtcccatctttccggctgtcccgcttgatgttgatgaactgattatt

SEQ ID NO: 403538 - DNA, 75 bp, synthetic construct
  source 1..75: mol_type = other DNA
gattgaaccattagaactgctaaccgtcctgcaaaaaatagagaaaagaggtgcgctagagcaaaccagtaagat

SEQ ID NO: 403539 - DNA, 75 bp, synthetic construct
  source 1..75: mol_type = other DNA
aaccgatgcctcttgttttccgctggtgccgtttgcaaaccgggtgagcggcaatcgttttgtctggcaggggcg

SEQ ID NO: 403540 - DNA, 75 bp, synthetic construct
  source 1..75: mol_type = other DNA
atggccatctataccttatctcacggggcgctaaagctggacgtttctgaccagggtggtgttattgaaggtttc

SEQ ID NO: 403541 - DNA, 75 bp, synthetic construct
  source 1..75: mol_type = other DNA
gtggcgtttatcattatcgggtaagtcagacgtttcatttaacggcagatgcgctgacggtcacgctctctgtca

SEQ ID NO: 403542 - DNA, 75 bp, synthetic construct
  source 1..75: mol_type = other DNA
cgatcgtaaaacccactttggttcatgggcgcgtcgcggaattatttccgaccgtctggcaacagccattcttct

SEQ ID NO: 403543 - DNA, 75 bp, synthetic construct
  source 1..75: mol_type = other DNA
gccatggtaaataaataccgtgcagacctggcagatattgcagaccagtgtattggcgggacaacgtccggcgtc

SEQ ID NO: 403544 - DNA, 75 bp, synthetic construct
  source 1..75: mol_type = other DNA
gcaatcgttttgtctggcaggggcgtgagtatcaactgcaaccgaatgttgaatgggatgcgcactatctgcacg

SEQ ID NO: 403545 - DNA, 75 bp, synthetic construct
  source 1..75: mol_type = other DNA
catgccacctgtgccggatgccggcagggacagcgcttcttccgtctcagtggccacgccactttctgcgggcag

SEQ ID NO: 403546 - DNA, 75 bp, synthetic construct
  source 1..75: mol_type = other DNA
tatggattttgtgtcggataatctgtttaacgggcggcgtttccgggcgctgactgtagtggataattttagtcg

SEQ ID NO: 403547 - DNA, 75 bp, synthetic construct
  source 1..75: mol_type = other DNA
tacggttgccagcgcattcatattcttttacgacgggaaggctggttaatcaatcataagaaaacccatcggatt

SEQ ID NO: 403548 - DNA, 75 bp, synthetic construct
  source 1..75: mol_type = other DNA
gtgacgctctctgtcaccaatcaaggggcagagacgctgccatttggtaccggctggcatccttattttccgttg

SEQ ID NO: 403549 - DNA, 75 bp, synthetic construct
  source 1..75: mol_type = other DNA
tggaaaactcaggaaactgtggatcagacgcagggtggagatgagtctcgaagatattgcgaagtggctgaatcc

SEQ ID NO: 403550 - DNA, 75 bp, synthetic construct
  source 1..75: mol_type = other DNA
agaagacccggatattccggctatcgggtattatggttccggtggacgaacggatgcgaagagctggacaacatc

SEQ ID NO: 403551 - DNA, 75 bp, synthetic construct
  source 1..75: mol_type = other DNA
ggtgacaccgggtggtgcggcctgtgcatataacgacatcattccggcggaccactgcctgcatgatgtgcagga

SEQ ID NO: 403552 - DNA, 75 bp, synthetic construct
  source 1..75: mol_type = other DNA
gaacttttttccagtatgcatgcctcgttaagaaatgaacttttcttagataatggaaggtcgattgaattagct

SEQ ID NO: 403553 - DNA, 75 bp, synthetic construct
  source 1..75: mol_type = other DNA
gttctttaggagatctttgtttaacatatggtgattatgccagaaaaaaaattagtcatttctgcccttctgtaa

SEQ ID NO: 403554 - DNA, 75 bp, synthetic construct
  source 1..75: mol_type = other DNA
ttaatcgcggtactgagttatctggtgctggtgggtgatatcaagcgtattgagctgaaacctgtcgcgggaaaa

SEQ ID NO: 403555 - DNA, 75 bp, synthetic construct
  source 1..75: mol_type = other DNA
ggtagaaatgatccccgcaaaccaattagtaaggaaagcattaaccaagtaattgaattacttggatataaggga

SEQ ID NO: 403556 - DNA, 75 bp, synthetic construct
  source 1..75: mol_type = other DNA
gcaaacatatattagggcaacggtaaaggatttgcttattactaaaaggaagtttaagaaactcattataaaata

SEQ ID NO: 403557 - DNA, 75 bp, synthetic construct
  source 1..75: mol_type = other DNA
aatacagatataaaagtaatgtttttagataaatcaaaaatatcagatttagatggtgtgtttgatgtaattgtt

SEQ ID NO: 403558 - DNA, 75 bp, synthetic construct
  source 1..75: mol_type = other DNA
cgatgattggttggttgaagttgaaggaaaaacaagcgtccgcactcttacacggattccggtacgaaaagtcag

SEQ ID NO: 403559 - DNA, 75 bp, synthetic construct
  source 1..75: mol_type = other DNA
tggcctggttggtggtcaaaaatggagttatttaacccaaaccatccagtaatcgggaatcatgacattttatat

SEQ ID NO: 403560 - DNA, 75 bp, synthetic construct
  source 1..75: mol_type = other DNA
tgcatgaatgccaaacagaagataaatggggtgatcaggggtttctgggtagcgtcatgaaacctgtattgtggc

SEQ ID NO: 403561 - DNA, 75 bp, synthetic construct
  source 1..75: mol_type = other DNA
gctgggttgggctgtaatggcagataccgcgccaaaagagatcagcggtctttccggtggcctgttcaacatgtt

SEQ ID NO: 403562 - DNA, 75 bp, synthetic construct
  source 1..75: mol_type = other DNA
ggttttatcggcggtgtgctgggtgggattatttccgactggctgatgcgccgcacgggatcgctgaacattgcg

SEQ ID NO: 403563 - DNA, 75 bp, synthetic construct
  source 1..75: mol_type = other DNA
accagtcctattctgaagtttatgacgatgaatggttggttgaaattgaagggaaaacaagcgtccgaactctta

SEQ ID NO: 403564 - DNA, 75 bp, synthetic construct
  source 1..75: mol_type = other DNA
aaaccaggcgggctgggctacgtcggcgtgctggcagctatgattatggcgagcctttctgatcctacccacgta

SEQ ID NO: 403565 - DNA, 75 bp, synthetic construct
  source 1..75: mol_type = other DNA
aagcaaatatttataaagcaatgttttattttttcttcaacaaggaaaaatttattacgcttagcgctatcaaca

SEQ ID NO: 403566 - DNA, 75 bp, synthetic construct
  source 1..75: mol_type = other DNA
atgaaaaacagaatgaggctggtattatcagcactgacgggcggagttatgttgttatcggcgccggttatggca

SEQ ID NO: 403567 - DNA, 75 bp, synthetic construct
  source 1..75: mol_type = other DNA
aggcagggaaaacatccggtacaacaccttcgtcccttccggggtatcctgcaggcggatgcattcagcggttac

SEQ ID NO: 403568 - DNA, 75 bp, synthetic construct
  source 1..75: mol_type = other DNA
aaactggtggggcataaaccaggcgggctgggctacgtcggcgtgctggcagctatgattatggcgagcctttct

SEQ ID NO: 403569 - DNA, 75 bp, synthetic construct
  source 1..75: mol_type = other DNA
gtcatgctgcccggaatgtggaggctcactgagctatctgggtgaggatgccgccgaacagctggagctgatgcg

SEQ ID NO: 403570 - DNA, 75 bp, synthetic construct
  source 1..75: mol_type = other DNA
aggggaatgacggcggagctgcgccttgccgaacgtcagttgaaaacgaaaccgctgctgaaatccctggaaagc

SEQ ID NO: 403571 - DNA, 75 bp, synthetic construct
  source 1..75: mol_type = other DNA
cgtcagttgaaaacgaaaccgctgctgaaatccctggaaagctggctgcgtgaaaagatgaaaaccctgtcgcga

SEQ ID NO: 403572 - DNA, 75 bp, synthetic construct
  source 1..75: mol_type = other DNA
acggagtggagccagaaagctacctccgctatgtccttgacgtcatagccgactggccgataaaccgggtcggcg

SEQ ID NO: 403573 - DNA, 75 bp, synthetic construct
  source 1..75: mol_type = other DNA
ggcgccgtgctgcccgaactgcggcggttcactgagctatctgggcgaggatactgccgaacagctggagttgat

SEQ ID NO: 403574 - DNA, 75 bp, synthetic construct
  source 1..75: mol_type = other DNA
aaagtcaattcagatgccaggtatgtggatatacagcgaacgccgatgtaaacggcgctcgtaacattttagcgg

SEQ ID NO: 403575 - DNA, 75 bp, synthetic construct
  source 1..75: mol_type = other DNA
gccggctgctgtctccgctggaagaggcgcttcatggctatgtcatgactgacggcaaactccatgccgatgata

SEQ ID NO: 403576 - DNA, 75 bp, synthetic construct
  source 1..75: mol_type = other DNA
cgccaaaatgcaggcggggaaaattcgcggtctggtggttattccggtggatttcgccgaacagatggagcgcgc

SEQ ID NO: 403577 - DNA, 75 bp, synthetic construct
  source 1..75: mol_type = other DNA
ctcgcggtaatgggaacgaatagcgctctcgcaacctatttagcaaagactgatgagttagctggcaattcagaa

SEQ ID NO: 403578 - DNA, 75 bp, synthetic construct
  source 1..75: mol_type = other DNA
tcagggtgtggagctgagccgtgccacactggggcgctggacaggtgccgttgctgaactactggagccgctgta

SEQ ID NO: 403579 - DNA, 75 bp, synthetic construct
  source 1..75: mol_type = other DNA
gccgagatcaaagaacgcgacgaccgcgatcgtaaccgagcggtagcgccactggttccggcagccgatgcttta

SEQ ID NO: 403580 - DNA, 75 bp, synthetic construct
  source 1..75: mol_type = other DNA
cggcctgtcaccaattgcttttgcctgtaaatcggcaggtgtggcagttgcgatggaggaccagcagcgagattt

SEQ ID NO: 403581 - DNA, 75 bp, synthetic construct
  source 1..75: mol_type = other DNA
cccgagtgctgacctcaaagtatgcagagtacataccgctgtatcgccagtcggagatctatgcccgccagggtg

SEQ ID NO: 403582 - DNA, 75 bp, synthetic construct
  source 1..75: mol_type = other DNA
gtacagacacttctgtggggaaaacggtggtttcccgcgcattgctacaagcgttagcctcccagggaaaaacgg

SEQ ID NO: 403583 - DNA, 75 bp, synthetic construct
  source 1..75: mol_type = other DNA
cctgatcgggacgtgcaaactgaatgacgtggatccagaaagctaccttctccatgtgcttggcgtcatagcaga

SEQ ID NO: 403584 - DNA, 75 bp, synthetic construct
  source 1..75: mol_type = other DNA
acgctggtgaacggagccgatagcttctccctgctggcgattccgttctttgtgctggcgggtgaaatcatgaat

SEQ ID NO: 403585 - DNA, 75 bp, synthetic construct
  source 1..75: mol_type = other DNA
gtcgcgtgcgggcgctgtgcgtcaaagaaacgcggcagatcattcgcgatccgagtagctggctgattgcagtag

SEQ ID NO: 403586 - DNA, 75 bp, synthetic construct
  source 1..75: mol_type = other DNA
taatgcaaccttcagcggttttcttaaacggttacggccaacacaagatcatattacttaccctaagtttatggc

SEQ ID NO: 403587 - DNA, 75 bp, synthetic construct
  source 1..75: mol_type = other DNA
aacgatggctgggctgaggcggacaataacatcgctgaaaatgcgttgcggatggtcagtctgggccgcaaaaac

SEQ ID NO: 403588 - DNA, 75 bp, synthetic construct
  source 1..75: mol_type = other DNA
gtctgttgggtggtattgctatcggtttgcctattgcctgggcactgttgttgtgcgaggcggcgttaatgttct

SEQ ID NO: 403589 - DNA, 75 bp, synthetic construct
  source 1..75: mol_type = other DNA
aagctacctacgcaatgtacttgacgtcatagccgactggccggtgaaccgggtcagcgaactgctcccttggcg

SEQ ID NO: 403590 - DNA, 75 bp, synthetic construct
  source 1..75: mol_type = other DNA
atcagacaatgattgatcaccatatcagcgaattcctgaataaagggaaactgaagcccgaaaacggcggctcag

SEQ ID NO: 403591 - DNA, 75 bp, synthetic construct
  source 1..75: mol_type = other DNA
cggcggcaaatgcagacccgacgcgtgttacagcagatgagtgatgagcggttgaaggatatcgggttacgcagg

SEQ ID NO: 403592 - DNA, 75 bp, synthetic construct
  source 1..75: mol_type = other DNA
taaagcgttattagataccacaggtttctggcatgacgattttaataacgccacgccggtaatgactccaactta

SEQ ID NO: 403593 - DNA, 75 bp, synthetic construct
  source 1..75: mol_type = other DNA
atggaatttcacgaaaacaaagccaaagcgccgtttatcggccttgtgcaactctggcaggcggtgagaagctgg

SEQ ID NO: 403594 - DNA, 75 bp, synthetic construct
  source 1..75: mol_type = other DNA
cgcgatgaattcagaatgaagccagcccccggtgctgagccggttaagtggtataaaaatactggtgatgcctct

SEQ ID NO: 403595 - DNA, 75 bp, synthetic construct
  source 1..75: mol_type = other DNA
gacgtgcgcaggcgattgccgaagacaggtgtttctcgaaaggacgtctgcgcgatgaatccagaatgaaaccag

SEQ ID NO: 403596 - DNA, 75 bp, synthetic construct
  source 1..75: mol_type = other DNA
tttgtcaaaaattcagatagttcagcagtatgcactttatttgatgttgatgcactttctcgcgtggttaatgac

SEQ ID NO: 403597 - DNA, 75 bp, synthetic construct
  source 1..75: mol_type = other DNA
tgtaagttttctgttaatacggagagccttcagtgtccatccgaggcggttcgatgcccaattatactggataaa

SEQ ID NO: 403598 - DNA, 75 bp, synthetic construct
  source 1..75: mol_type = other DNA
gagtattcaggacaaaatatctcaatgtaagtttcctgttagttcaggaaatttccagtgcccgccagagtctat

SEQ ID NO: 403599 - DNA, 75 bp, synthetic construct
  source 1..75: mol_type = other DNA
ccacgccgaacgatatttgcgtggcaattcgtagcgaagcggcggatgcggggatcgcgcaggcgattatgcagc

SEQ ID NO: 403600 - DNA, 75 bp, synthetic construct
  source 1..75: mol_type = other DNA
tctcgaagagccgccacggatgggcaatagtgacctgggcgtggcgttttcgcgcaatcaacccgcctggcagca

SEQ ID NO: 403601 - DNA, 75 bp, synthetic construct
  source 1..75: mol_type = other DNA
ccaggcgataccgttggctaccggatgcgtgcgcaaaactgcgtcgggccgaatacccgcctggaagtggttacc

SEQ ID NO: 403602 - DNA, 75 bp, synthetic construct
  source 1..75: mol_type = other DNA
atggaatttcatgaaaacaaagctaaagcgccgtttactggcttcgtacaactctggcaggcagtgagaagctgg

SEQ ID NO: 403603 - DNA, 75 bp, synthetic construct
  source 1..75: mol_type = other DNA
ctggccgaccgggagcggaaaatagaccatctgcaggcgcaactgggcaggcttcgtcggatgaacttcggccgc

SEQ ID NO: 403604 - DNA, 75 bp, synthetic construct
  source 1..75: mol_type = other DNA
tatggcaaactgactaaccaactcctgcaggctgtagccaaacaaactcgtagtggcgatacccaacaatggttc

SEQ ID NO: 403605 - DNA, 75 bp, synthetic construct
  source 1..75: mol_type = other DNA
gatacagcagcctctcgatatgaactgtgcacaatcatcaattagtcactttttgcaatccaataaatactttaa

SEQ ID NO: 403606 - DNA, 75 bp, synthetic construct
  source 1..75: mol_type = other DNA
aagctacctacgcaatgtacttgacgtcatagctgactggccggtgaaccgggtcagcgaactgctcccctggcg

SEQ ID NO: 403607 - DNA, 75 bp, synthetic construct
  source 1..75: mol_type = other DNA
ttgccctgattgctaaagagcatggcgttgtactggatgtcaccgatcctattctggtggttcctaccatgcttc

SEQ ID NO: 403608 - DNA, 75 bp, synthetic construct
  source 1..75: mol_type = other DNA
attctcagggaattactgggcaggactacgacgccggagctggttgctgttgacaaaatgacaccgccggatcga

SEQ ID NO: 403609 - DNA, 75 bp, synthetic construct
  source 1..75: mol_type = other DNA
cggcggcaaatgcaggcccgacgggtgttacagcagatgagtgatgaacggttgagggacaatgggttaagctgg

SEQ ID NO: 403610 - DNA, 75 bp, synthetic construct
  source 1..75: mol_type = other DNA
cggcggcaaatgcaggcccgacgggtgttacagcagatgagtgatgaacggttgagggatagtgggttatgctgg

SEQ ID NO: 403611 - DNA, 75 bp, synthetic construct
  source 1..75: mol_type = other DNA
cggcggcaaatgcaggcccgacgggtgttacagcagatgagtgatgaacggttgagggatattgggttaggctgg

SEQ ID NO: 403612 - DNA, 75 bp, synthetic construct
  source 1..75: mol_type = other DNA
cgcaactttagcggcttcaaagtcagtgagataaaagcgattactcagaatgcgattttagagcatgtacaggat

SEQ ID NO: 403613 - DNA, 75 bp, synthetic construct
  source 1..75: mol_type = other DNA
cggcggcaaatgcaggcccgacgggtgttacagcagatgagtgatgagcggttgagggatatcgggttacgcagg

SEQ ID NO: 403614 - DNA, 75 bp, synthetic construct
  source 1..75: mol_type = other DNA
cggcggcaaatgcaggcccgacgggtgttacagcagatgagtgatgaacggttgagggagactgggttacgctgg

SEQ ID NO: 403615 - DNA, 75 bp, synthetic construct
  source 1..75: mol_type = other DNA
agcttccgttatcccgcctgggcgaacaacatccggcatatgcttcagagcatgaaaacctgcgtggtcctggct

SEQ ID NO: 403616 - DNA, 75 bp, synthetic construct
  source 1..75: mol_type = other DNA
aagctacctccgctatgtccttgacgtcatagccgactggccgataaaccgggtcggcgaactgctcccctggcg

SEQ ID NO: 403617 - DNA, 75 bp, synthetic construct
  source 1..75: mol_type = other DNA
acggtgccggaagcggttgaaatgcagtctcgcgttgccaagatttatggcgatcgccaggcgatggcagccggt

SEQ ID NO: 403618 - DNA, 75 bp, synthetic construct
  source 1..75: mol_type = other DNA
tcacaagtcgccgcatttcctcgtgttcgtgaagcattattgcgtcgccaacgtgcgtttcgcgaattgccgggc

SEQ ID NO: 403619 - DNA, 75 bp, synthetic construct
  source 1..75: mol_type = other DNA
ggcaatctggaagtgatcctcgaaggggaagatgtcagcggcgaaattcgtactcaggaagtggcgaatgctgct

SEQ ID NO: 403620 - DNA, 75 bp, synthetic construct
  source 1..75: mol_type = other DNA
aatgaaggggtacggcaatcaaacccgtgcagaacgcttccgcatactggatgcgccagcactctctccgctgcc

SEQ ID NO: 403621 - DNA, 75 bp, synthetic construct
  source 1..75: mol_type = other DNA
atgcagaacagcgctttgaaagcctggttggactcttcttacctctctggcgcaaaccagagctggatagaacag

SEQ ID NO: 403622 - DNA, 75 bp, synthetic construct
  source 1..75: mol_type = other DNA
actgacggcaaactccatgccgatgataccccggtccaggtactgctgccgggtaataagaagacgaagacacac

SEQ ID NO: 403623 - DNA, 75 bp, synthetic construct
  source 1..75: mol_type = other DNA
gctgccggctgctgtctccgctggaagaggcgcttcatggctatgtcatgactgacggcaaactccatgccgatg

SEQ ID NO: 403624 - DNA, 75 bp, synthetic construct
  source 1..75: mol_type = other DNA
ggaaactctgaacatgtcgaaagcgcgtggttatgaagttggcggtacggtacgtatcgttatcaacaatcaggt

SEQ ID NO: 403625 - DNA, 75 bp, synthetic construct
  source 1..75: mol_type = other DNA
agaaatggggccggatgtgtggtctggtgatgttgctgccgcacggttacgaagggcaggggccggagcactcct

SEQ ID NO: 403626 - DNA, 75 bp, synthetic construct
  source 1..75: mol_type = other DNA
cacctttaaacgtgatgtcttcatcgacctggtgtgctaccgccgtcatggccacaacgaagccgacgagccgag

SEQ ID NO: 403627 - DNA, 75 bp, synthetic construct
  source 1..75: mol_type = other DNA
agtgaaaatattccttgacgcctcttcggaagaacgtgcgcatcgccgaatgctacagttgcaggagaagggctt

SEQ ID NO: 403628 - DNA, 75 bp, synthetic construct
  source 1..75: mol_type = other DNA
cgaagcaaagtgttactgacgtcgctgcatgaatggatggtggagaagaatggtacgctgtcgaaaaaatccaga

SEQ ID NO: 403629 - DNA, 75 bp, synthetic construct
  source 1..75: mol_type = other DNA
tttaaacagccgatagatgatgtggaatggaccattacgactctgacgcataccgtcagcccggataacggtttt

SEQ ID NO: 403630 - DNA, 75 bp, synthetic construct
  source 1..75: mol_type = other DNA
acaacatcgctgaaaatgccctgcgggcggtcagtctgggtcgtaaaaacttcctgttcttcggctctgaccatg

SEQ ID NO: 403631 - DNA, 75 bp, synthetic construct
  source 1..75: mol_type = other DNA
tctgactaccacgttgaatatgcccgtcactggtactctattccacacgaactagtcggtcagcgtctgtcactg

SEQ ID NO: 403632 - DNA, 75 bp, synthetic construct
  source 1..75: mol_type = other DNA
aaggcatccatccgcagactcatcttgcttgcttcagcggtgtgctgcaagcggatgcgtacgccgggttcaacg

SEQ ID NO: 403633 - DNA, 75 bp, synthetic construct
  source 1..75: mol_type = other DNA
aactccatgccgatgataccccggtccaggtactgctgccgggtaataagaagacgaagaccgggcggttgtggg

SEQ ID NO: 403634 - DNA, 75 bp, synthetic construct
  source 1..75: mol_type = other DNA
gtctgctggcacttcagaaaaaatacggcccggaacggctggaaaaggcctgttacgttgccctgcactataacg

SEQ ID NO: 403635 - DNA, 75 bp, synthetic construct
  source 1..75: mol_type = other DNA
cggcccggaacggctggaaaaggcctgttacgttgccctgcactataacgccccggacagacgctttatcgacaa

SEQ ID NO: 403636 - DNA, 75 bp, synthetic construct
  source 1..75: mol_type = other DNA
gacgacggctgggccgaggcggacaataacatcgctgaaaatgcgttgcggatggtcagtctgggccgcaaaaac

SEQ ID NO: 403637 - DNA, 75 bp, synthetic construct
  source 1..75: mol_type = other DNA
tcagccctgacggaggaagcgctgaaacggatcggcgaactgtacgccatcgaggcagagataaggggaatgacg

SEQ ID NO: 403638 - DNA, 75 bp, synthetic construct
  source 1..75: mol_type = other DNA
gcagagaacgccttacggggagtggccgtaggccggaaaaactggctcttcgcgggttccgacagcggtggcgaa

SEQ ID NO: 403639 - DNA, 75 bp, synthetic construct
  source 1..75: mol_type = other DNA
tgtatcgccagtcagaaatatacggccggcaaggtgtggagctgaggcgttcactgctgtcgggctgggtggatg

SEQ ID NO: 403640 - DNA, 75 bp, synthetic construct
  source 1..75: mol_type = other DNA
gttatgctgcccggaatgtggaggctcactgagctatctgggtgaggatgccgccgaacagctggagttgatgcg

SEQ ID NO: 403641 - DNA, 75 bp, synthetic construct
  source 1..75: mol_type = other DNA
gcctgcccgacctgtgacggtcttggcgtacagcaatacttcgatcccgatcgtgtgatccaaaaccctgagctg

SEQ ID NO: 403642 - DNA, 75 bp, synthetic construct
  source 1..75: mol_type = other DNA
ccgctggaagcgattatggcagtgcctgaatcgttgaccgggcagtacatgagcggtaaacgcaagattgaagtg

SEQ ID NO: 403643 - DNA, 75 bp, synthetic construct
  source 1..75: mol_type = other DNA
atatcggtcctggtgcgggtgttcacggcggtgaagtggtcgcagaaggtccgctggaagcgattatggcagtgc

SEQ ID NO: 403644 - DNA, 75 bp, synthetic construct
  source 1..75: mol_type = other DNA
gtagcggcggcggcgagatcctcgtctccggcacgccagaaactgtcgcagagtgcgaagcttcacatacagcgc

SEQ ID NO: 403645 - DNA, 75 bp, synthetic construct
  source 1..75: mol_type = other DNA
ccactggaagcgattatggcagtgcctgagtcgttgaccgggcagtacatgagcggtaaacgcaagattgaagtg

SEQ ID NO: 403646 - DNA, 75 bp, synthetic construct
  source 1..75: mol_type = other DNA
gccgcgctgcccggaccacgatgttccgctggcggcgcaaaccgtcagccagatggtggataacgtgctttcgca

SEQ ID NO: 403647 - DNA, 75 bp, synthetic construct
  source 1..75: mol_type = other DNA
gccaatatggatgtgaaactcgtcgggaaaaaagtggtttatcgctatcaacgcgacagcgaatacgccgacttt

SEQ ID NO: 403648 - DNA, 75 bp, synthetic construct
  source 1..75: mol_type = other DNA
ataacatcgctgaaaatgcgttgcggatggtcagtctgggccgcaaaaactacctgctcttcggttcggatcatg

SEQ ID NO: 403649 - DNA, 75 bp, synthetic construct
  source 1..75: mol_type = other DNA
ggcgtcatagcagactggccggtcaaccgggtcagcgaactgcttccgtggcgcatagcactgccagctgaataa

SEQ ID NO: 403650 - DNA, 75 bp, synthetic construct
  source 1..75: mol_type = other DNA
tcactggctggcggtgcgatccgtggctgggatcgccgcaacttctattacttccagatgctgaaatcgctggca

SEQ ID NO: 403651 - DNA, 75 bp, synthetic construct
  source 1..75: mol_type = other DNA
tggcggagcagctgcgtgaagcaggcgcggatgtgatgcgtcaggacactaatatgctgtttgttcgcgtcgggg

SEQ ID NO: 403652 - DNA, 75 bp, synthetic construct
  source 1..75: mol_type = other DNA
ggggacgacgtttacggagacgaccctaccgttaatgctctgcaggactatgcagcagagctttccggtaaagaa

SEQ ID NO: 403653 - DNA, 75 bp, synthetic construct
  source 1..75: mol_type = other DNA
gccgcgctgcccggaccacgatgttccgctggcggcacaaaccgtcagccagatggtggataacgtgttgtcgca

SEQ ID NO: 403654 - DNA, 75 bp, synthetic construct
  source 1..75: mol_type = other DNA
tcctcaaagagattggtgaccggctgaaattcctcgttaacgttgggctgaattacctgacactttcccgctcgg

SEQ ID NO: 403655 - DNA, 75 bp, synthetic construct
  source 1..75: mol_type = other DNA
caacctcgttatcccccgcgacaaactcattgtcgtgaccgggctttcgggttctggcaaatcctcgctcgcttt

SEQ ID NO: 403656 - DNA, 75 bp, synthetic construct
  source 1..75: mol_type = other DNA
attcagggactggagcatttcgataaagtgatcgatatcgaccaaagcccaattggtcgtactccgcgttctaac

SEQ ID NO: 403657 - DNA, 75 bp, synthetic construct
  source 1..75: mol_type = other DNA
tcagtgcgatgccatcgtgcaggcacctgcaccttcgcggcccatcgagcggggtatcgccggaccggggctgct

SEQ ID NO: 403658 - DNA, 75 bp, synthetic construct
  source 1..75: mol_type = other DNA
gatggctgggtggaaatcgacaacaacatcgctgaaaatgccctgcgggcggtcagtcgtgggtacgtaaaactt

SEQ ID NO: 403659 - DNA, 75 bp, synthetic construct
  source 1..75: mol_type = other DNA
gccgtacctgtggaaaagaggcagagttgctctttactgtctggtcatacaaagtcatttgcagcgagtgtagta

SEQ ID NO: 403660 - DNA, 75 bp, synthetic construct
  source 1..75: mol_type = other DNA
cggaaaaagtgctgaagctgacaggcgcacgcggcaacaacctgaaggacgtgacgctgacgctgccggtgggtc

SEQ ID NO: 403661 - DNA, 75 bp, synthetic construct
  source 1..75: mol_type = other DNA
gcagtgggggcggcgaaatcctcgtctccggtacgccagaaaccgtcgcagagtgcgaagcttcgcatacggcgc

SEQ ID NO: 403662 - DNA, 75 bp, synthetic construct
  source 1..75: mol_type = other DNA
gtctccggcacgccagaaaccgtcgcagagtgcgaagcttcgcatacagcgcgcttcctcaagccaatgctgtaa

SEQ ID NO: 403663 - DNA, 75 bp, synthetic construct
  source 1..75: mol_type = other DNA
gcggcgaaatcctcgtctccggtacgccagaaaccgtcgcggagtgcgaagcttcgcatacggcacgcttcctca

SEQ ID NO: 403664 - DNA, 75 bp, synthetic construct
  source 1..75: mol_type = other DNA
aagtgctggatatgaccatcgaagaggcgcgtgagttctttgatgcggtgccagctctggcgcgtaagctgcaaa

SEQ ID NO: 403665 - DNA, 75 bp, synthetic construct
  source 1..75: mol_type = other DNA
gccgcgctgcccggaccacgatgtaccgctggcggcgcaaaccgtcagtcagatggtggataacgtgttgtccca

SEQ ID NO: 403666 - DNA, 75 bp, synthetic construct
  source 1..75: mol_type = other DNA
gtgtggattatgaagatagcaatgtagcaattgatactttcgcctgtctggataagtttgaacaatattacgatg

SEQ ID NO: 403667 - DNA, 75 bp, synthetic construct
  source 1..75: mol_type = other DNA
gtgaaatttaaagcacgtccagcagtggatcaaacctgggattttggcgtggtaaatgttctgcaatttgatggt

SEQ ID NO: 403668 - DNA, 75 bp, synthetic construct
  source 1..75: mol_type = other DNA
ctgggaagaactgctgggcggcgagtttgaaaaacgtgcccgcgaccgcaacttcgaggccatgcaaaaggagat

SEQ ID NO: 403669 - DNA, 75 bp, synthetic construct
  source 1..75: mol_type = other DNA
attgaccgggccgctaaagcccgaggaaaaaatcgcaccgaatttgtccttgaggccgccagagccgcagctgaa

SEQ ID NO: 403670 - DNA, 75 bp, synthetic construct
  source 1..75: mol_type = other DNA
tttcatcaacacactgaacgctttctttagtgctggtggtaaaggtgcgaatgtgacggtgccttttaaagaaga

SEQ ID NO: 403671 - DNA, 75 bp, synthetic construct
  source 1..75: mol_type = other DNA
tcatcgctcattcatccaggcatttattgctatgacatgttctatcagaaaggaaaaactccttttctggcatgg

SEQ ID NO: 403672 - DNA, 75 bp, synthetic construct
  source 1..75: mol_type = other DNA
aaagcatggcgcgataagctgactcaacaagcgattgattgtcgctacatcgaccagcgcaccgctcttaactga

SEQ ID NO: 403673 - DNA, 75 bp, synthetic construct
  source 1..75: mol_type = other DNA
tcaaagctgacgccatcaacgctccgctttctgccaactcattcttgccacaaccacacccaggcaactgtggca

SEQ ID NO: 403674 - DNA, 75 bp, synthetic construct
  source 1..75: mol_type = other DNA
ctttactggcggcttctctgctccccttctcttcaggcaatgccgcagacttacaggccaaacagtatggcgatt

SEQ ID NO: 403675 - DNA, 75 bp, synthetic construct
  source 1..75: mol_type = other DNA
gataaatatgaacaatactataatgggtattatcatgaccctgtatgcaatggcagtacccttcaaaaaaatgta

SEQ ID NO: 403676 - DNA, 75 bp, synthetic construct
  source 1..75: mol_type = other DNA
gatgtaaatgtactacaatttgacggcgaaggcggcgctaatctgtcatctggagcccaaaacttgcgttatgtt

SEQ ID NO: 403677 - DNA, 75 bp, synthetic construct
  source 1..75: mol_type = other DNA
ccctgaaagtcaaatcgttaatttcggacgtattgacccgagtacaatcgtgactataccaccaacagctacatt

SEQ ID NO: 403678 - DNA, 75 bp, synthetic construct
  source 1..75: mol_type = other DNA
gacgtgaagcgcggtttgcgaaacggcgttgctccttacatcccggcgtctttttgccgggatgccgggagcgca

SEQ ID NO: 403679 - DNA, 75 bp, synthetic construct
  source 1..75: mol_type = other DNA
acatggtaagcggctcaccagaaccgtattgatatttactgagagctcagatcaactttccagggcaacagatcg

SEQ ID NO: 403680 - DNA, 75 bp, synthetic construct
  source 1..75: mol_type = other DNA
tgagcggcctgatgttctggggttccgctacggggcatcgtgtctcattgaggtgatatgttcccggtctgattt

SEQ ID NO: 403681 - DNA, 75 bp, synthetic construct
  source 1..75: mol_type = other DNA
gatttctccttcaccgtggacggtcgttaccgcgtggacgtgaaaggtgatggtgatggactgggtttatttcac

SEQ ID NO: 403682 - DNA, 75 bp, synthetic construct
  source 1..75: mol_type = other DNA
ggactgaaaccacaacagacagcggtaaaaccgtcaccatcaacagtggtcgggatacggtactgaacggtgctc

SEQ ID NO: 403683 - DNA, 75 bp, synthetic construct
  source 1..75: mol_type = other DNA
ccggcgggctggggactgttgtatgtgattaacgggcgggtcaggaaagtacatggctggcccggaaatcatcag

SEQ ID NO: 403684 - DNA, 75 bp, synthetic construct
  source 1..75: mol_type = other DNA
ctgatagaagcgaagtgttctcgtgctgacttgttagcagatagaaaaaagcgttttcgtaaaaatccgtctctt

SEQ ID NO: 403685 - DNA, 75 bp, synthetic construct
  source 1..75: mol_type = other DNA
ttcgacattcaggaagctgccagcgcgggtgcgccgagtgatgccagtacgccgccgcgttatatgcacatcctg

SEQ ID NO: 403686 - DNA, 75 bp, synthetic construct
  source 1..75: mol_type = other DNA
atatacctgaaaaagatttctctaattgctttaggttccttaaggaaaatttctttattatacctggcgagtata

SEQ ID NO: 403687 - DNA, 75 bp, synthetic construct
  source 1..75: mol_type = other DNA
atatggttcagaaaaggaaaacattgatcataagattaagctaatcaatagcagatttaaaccggcaacatttgc

SEQ ID NO: 403688 - DNA, 75 bp, synthetic construct
  source 1..75: mol_type = other DNA
gatttctccttcaccgttgatgaccgttaccgtgttgacgtcagagacctgaatcacagcctgaatctgggcctg

SEQ ID NO: 403689 - DNA, 75 bp, synthetic construct
  source 1..75: mol_type = other DNA
gtgggcagtggatccccggctggcttcccgcctgaacgactggcacgactattaccgccgcgcctgtaaacaggc

SEQ ID NO: 403690 - DNA, 75 bp, synthetic construct
  source 1..75: mol_type = other DNA
ttagtgagccggaaattatttcagttgaggatttacctcccggctggggattacttcacgttgttaacggaagag

SEQ ID NO: 403691 - DNA, 75 bp, synthetic construct
  source 1..75: mol_type = other DNA
caacacgatcgaaatcgtaacgaacgggatgaatgtcgcctgcaaaccgaaacacccaacaaagccgactttctg

SEQ ID NO: 403692 - DNA, 75 bp, synthetic construct
  source 1..75: mol_type = other DNA
attgcttttgcggatgtgaaatcgcgtatttacgagcataaaacacatctctatattcatatgcctttttgccag

SEQ ID NO: 403693 - DNA, 75 bp, synthetic construct
  source 1..75: mol_type = other DNA
atgaataatgaatcgatttatcagcaatatatgtacagttacccgcataagaccgcttatcgggaattaaacaat

SEQ ID NO: 403694 - DNA, 75 bp, synthetic construct
  source 1..75: mol_type = other DNA
actcacagctgcgaaggatggaaaactggggacgaagcctaaagcgtggcgcgatctgacggtagatggtgaaac

SEQ ID NO: 403695 - DNA, 75 bp, synthetic construct
  source 1..75: mol_type = other DNA
ttatcgcctgcgcagcggaatgaaaaccgcgaacggcaacgtggtgcgcttttttgaagtgatgaaaggcgacaa

SEQ ID NO: 403696 - DNA, 75 bp, synthetic construct
  source 1..75: mol_type = other DNA
ctatgatcaggatgtttttgagaaatttttcggatacaagaagtggataaaaaaagttgcgggcgagtttgtttc

SEQ ID NO: 403697 - DNA, 75 bp, synthetic construct
  source 1..75: mol_type = other DNA
aacttgaagccgtagactgggcaagttttaccattggcggcggtacgccattgttgcttaatgtcgggcagctgt

SEQ ID NO: 403698 - DNA, 75 bp, synthetic construct
  source 1..75: mol_type = other DNA
aagcgatgccgggtatatgaaagacccgaaacgcgcatggaatctgctaatggcgtttgatggggagcaacatct

SEQ ID NO: 403699 - DNA, 75 bp, synthetic construct
  source 1..75: mol_type = other DNA
cgaaaatgattgccggattgccggatcacgtacacaacgcggcgcgtattcgttatccgatggtacgcgtggact

SEQ ID NO: 403700 - DNA, 75 bp, synthetic construct
  source 1..75: mol_type = other DNA
ttttcgtcatggcatcgccattgccggaacgcacggcaaaacgacaaccaccgcgatggtttccagcatctacgc

SEQ ID NO: 403701 - DNA, 75 bp, synthetic construct
  source 1..75: mol_type = other DNA
gtgctggacagtatgcgcattagcgtgaacagtcatatggcgcgttatcagagcggcaaaaacacgccagaccag

SEQ ID NO: 403702 - DNA, 75 bp, synthetic construct
  source 1..75: mol_type = other DNA
aatgacagtacccgctatagctatttttaccagtcggtatggcataacgtacttatattattggtgatttttatc

SEQ ID NO: 403703 - DNA, 75 bp, synthetic construct
  source 1..75: mol_type = other DNA
ctttgatcctgacaagaaagaatggcaagagcttacgatgagtttacttccgcgtgatataacgaaagaaaaatt

SEQ ID NO: 403704 - DNA, 75 bp, synthetic construct
  source 1..75: mol_type = other DNA
atgaaaaatcctgaacttaaaaatctgacggattattccccgacggataaaccgtgggatgagcgccggagcttt

SEQ ID NO: 403705 - DNA, 75 bp, synthetic construct
  source 1..75: mol_type = other DNA
tgctgtcagatgacagtaccgaatgggcaaagttcgctaagccaggtaaaaagaccaatctcaatgatgaccaat

SEQ ID NO: 403706 - DNA, 75 bp, synthetic construct
  source 1..75: mol_type = other DNA
caaggtttatatgcgatgcgtgacgtgcaggtagcgcgcctggctctgtttcatggcgatccagaaaaggcaaaa

SEQ ID NO: 403707 - DNA, 75 bp, synthetic construct
  source 1..75: mol_type = other DNA
acacctgttaatctggcgacgcgtatggcgctcgatgcttttaacgtcgcactggcaaaagatctacgtgttaat

SEQ ID NO: 403708 - DNA, 75 bp, synthetic construct
  source 1..75: mol_type = other DNA
gacgccgcctttgccaaaagctggggaaaagagaacgtgaaagcagttaagctaacgtgccagggtaaccctgcg

SEQ ID NO: 403709 - DNA, 75 bp, synthetic construct
  source 1..75: mol_type = other DNA
tggcggacgttcctgcctggaacgctacgaatatgccaaacacggtgcctgctttggttttgatccggacgcata

SEQ ID NO: 403710 - DNA, 75 bp, synthetic construct
  source 1..75: mol_type = other DNA
aaagaactgaccaatgaagcttccgctttgctgtcagatgacagtaccgaatgggctttgttgaataaatcgaac

SEQ ID NO: 403711 - DNA, 75 bp, synthetic construct
  source 1..75: mol_type = other DNA
aaccgggccaatttccaggatctgatgcgtatgatccgccgacagttgctggcagaaggtcgcgacctgatcctt

SEQ ID NO: 403712 - DNA, 75 bp, synthetic construct
  source 1..75: mol_type = other DNA
tgataacacacaaacaatttgccaggattatgcgggaaaatatactaatgtagtttattatcatcaagccaataa

SEQ ID NO: 403713 - DNA, 75 bp, synthetic construct
  source 1..75: mol_type = other DNA
gcggcgcggtggctgaaactctgaaatattccacaaagcctgctgatatgctggctgatcctgaatggttcctcg

SEQ ID NO: 403714 - DNA, 75 bp, synthetic construct
  source 1..75: mol_type = other DNA
gtcggtaatgtctcagaagacaaactcgtggcgttaattacgcgttacttaggatcaatcaaacactctgattcg

SEQ ID NO: 403715 - DNA, 75 bp, synthetic construct
  source 1..75: mol_type = other DNA
ataatgttttacctgcatggaaagtaaagatgaatctgttgcagatggatgtgtcaggtttacaagttaaaacgg

SEQ ID NO: 403716 - DNA, 75 bp, synthetic construct
  source 1..75: mol_type = other DNA
cagcggtgaacctctgcgacaccatgaaggagatagtcgaactggcgaatagcgcggacgtcgcccgtccaatgg

SEQ ID NO: 403717 - DNA, 75 bp, synthetic construct
  source 1..75: mol_type = other DNA
ggtcctgaagggttaatgccttctgacgataccctgaaaaactggaaagtcagtaaaattatctggcggcgttaa

SEQ ID NO: 403718 - DNA, 75 bp, synthetic construct
  source 1..75: mol_type = other DNA
tttttgaagtgatgaaaggcgacaacgtggcgatggtaattaacggcgatcagggcacgatcagccgcattgatg

SEQ ID NO: 403719 - DNA, 75 bp, synthetic construct
  source 1..75: mol_type = other DNA
gcgtccacaccactgcaagaacaagccattgccgatgcgcttgatggcgattatcgcctgcgcagcggaatgaaa

SEQ ID NO: 403720 - DNA, 75 bp, synthetic construct
  source 1..75: mol_type = other DNA
taaagataaagacaaaaaagatgaacatggcggcattggtacgccagctacccgcgcagcgattctggaaacgtt

SEQ ID NO: 403721 - DNA, 75 bp, synthetic construct
  source 1..75: mol_type = other DNA
ttaagggatttaaaaagaaaagcggtggaacgtatgatacagttcttgtccttgaggataagaaaacagggaagc

SEQ ID NO: 403722 - DNA, 75 bp, synthetic construct
  source 1..75: mol_type = other DNA
atgacggcacaaaaaacgctggatattacgcaacaattacgtgaaaaatataaagcgattacttataaccgctct

SEQ ID NO: 403723 - DNA, 75 bp, synthetic construct
  source 1..75: mol_type = other DNA
ctatacgatgaactgacaggcatgatttctgacgttgacctgggcgaaatgaaaattgaacccgcagcgccagcc

SEQ ID NO: 403724 - DNA, 75 bp, synthetic construct
  source 1..75: mol_type = other DNA
tatcttgttcagttcatgcctgaaaaagcataccaggaagtatcggttgccattcagtgtggtgatgagtcgttt

SEQ ID NO: 403725 - DNA, 75 bp, synthetic construct
  source 1..75: mol_type = other DNA
gaggatatcagggcgttctgtctgtcgggcgcgtccagactcccgttcttggcctgattgtgaatcgtacccgtg

SEQ ID NO: 403726 - DNA, 75 bp, synthetic construct
  source 1..75: mol_type = other DNA
agataaagacaaaaaagatgaacatggcggtattggtacaccagctacccgagcagccattctggaaactctgaa

SEQ ID NO: 403727 - DNA, 75 bp, synthetic construct
  source 1..75: mol_type = other DNA
ctatacgatgaactgacaggcatgatttcttatgttgacctaggcgagatgaagattgaacccgctgcgccagta

SEQ ID NO: 403728 - DNA, 75 bp, synthetic construct
  source 1..75: mol_type = other DNA
ttactataccatgaccggacattttcagcgcggcgcagatattatcagagcgaactggaaacctggtgagtttgc

SEQ ID NO: 403729 - DNA, 75 bp, synthetic construct
  source 1..75: mol_type = other DNA
ttgctgacaaaaggtattacaggagagttaaaagggtttgttagttccaggacgaataaagaattttcggctaag

SEQ ID NO: 403730 - DNA, 75 bp, synthetic construct
  source 1..75: mol_type = other DNA
tatcaatgtaagttttctgttaaaacagagagcctccagtgtccctctgatgcaactcgatgcccaattatactg

SEQ ID NO: 403731 - DNA, 75 bp, synthetic construct
  source 1..75: mol_type = other DNA
ggttcttcgtgctcaagttgcagccaatgggcgcggagaaattagattaggtaatgaaactgtcagtattgtgtt

SEQ ID NO: 403732 - DNA, 75 bp, synthetic construct
  source 1..75: mol_type = other DNA
tccatcaatgattgtagagccagaagattgtatatttgacagttcaaagggaaacttcattataaaagatagtta

SEQ ID NO: 403733 - DNA, 75 bp, synthetic construct
  source 1..75: mol_type = other DNA
ggtatcaatgattgtaagacctgaaaattgtatatatgactcatcaaaggaaaacttcattataaaagatagtta

SEQ ID NO: 403734 - DNA, 75 bp, synthetic construct
  source 1..75: mol_type = other DNA
ttcagatagttcagcagtatgcactttatttgatgttgatgcactttctcgcgtggttaatgacggttcagttca

SEQ ID NO: 403735 - DNA, 75 bp, synthetic construct
  source 1..75: mol_type = other DNA
catcttcgttcagccttggaatggaggttcttcgtactcaagttgcagccaatgggcgcggagaaattagattag

SEQ ID NO: 403736 - DNA, 75 bp, synthetic construct
  source 1..75: mol_type = other DNA
gtcgcagattttgtcactgatccagtgattaaaaaattactgaaggataaagatcgggataaaaaggatgaacat

SEQ ID NO: 403737 - DNA, 75 bp, synthetic construct
  source 1..75: mol_type = other DNA
gacggttgaacagtttattaatgagctgtacggtgaactgacaggcatgatttctgacgttgacctaggcgaaat

SEQ ID NO: 403738 - DNA, 75 bp, synthetic construct
  source 1..75: mol_type = other DNA
gaagagaaactatatcacgctcgaaaaagggaaacttattcctactgataccggatatgcgcttattgatgccct

SEQ ID NO: 403739 - DNA, 75 bp, synthetic construct
  source 1..75: mol_type = other DNA
atgcctggattagtatcatatatatcatcgacttcattcgcgaatgagatggcggagatgcgtcagcaggtaatg

SEQ ID NO: 403740 - DNA, 75 bp, synthetic construct
  source 1..75: mol_type = other DNA
tcaggatcagatgcaggtgaaacacaatcgcaagtgactcctcaggataaaatatatcaatgtaagttttctgtt

SEQ ID NO: 403741 - DNA, 75 bp, synthetic construct
  source 1..75: mol_type = other DNA
ttgtacgggcagtatgctgacagtgttcgttataccgtgtgtggtgcaggatggtttttcctggtgttcagtaac

SEQ ID NO: 403742 - DNA, 75 bp, synthetic construct
  source 1..75: mol_type = other DNA
tatgcccgtgccagaaaaacaactgacagcggatttgaggcatttcttggcacggaaaccacaaacgaggatgaa

SEQ ID NO: 403743 - DNA, 75 bp, synthetic construct
  source 1..75: mol_type = other DNA
gactggtgggttgggtaaaggcgggaagcctgcggctggaaccgcagggaaaaatatcgttgtggttgactcggg

SEQ ID NO: 403744 - DNA, 75 bp, synthetic construct
  source 1..75: mol_type = other DNA
cgtctatggcttctctatgacgcgtgcttacacgattccggcacaggccagaggatacaaaggtacactttcagt

SEQ ID NO: 403745 - DNA, 75 bp, synthetic construct
  source 1..75: mol_type = other DNA
tataatcctgaatacaaagagtggaagattgaaacactccctttgcgtctttatcccgtaaaataccagcctgta

SEQ ID NO: 403746 - DNA, 75 bp, synthetic construct
  source 1..75: mol_type = other DNA
ctccaccgttatttacagaggatacattgctgaaagcacttgttcgtatagctgattttgtttctgatccaataa

SEQ ID NO: 403747 - DNA, 75 bp, synthetic construct
  source 1..75: mol_type = other DNA
actggcaaatcttaaagataatcgtgatttcaaaggactttaccttaaggcgctggcgcgttcagttgccgatgc

SEQ ID NO: 403748 - DNA, 75 bp, synthetic construct
  source 1..75: mol_type = other DNA
ggccattacttataaccgttctgattgttcgtatctttcagaggaacaatttggtgaagcaccgcagattattga

SEQ ID NO: 403749 - DNA, 75 bp, synthetic construct
  source 1..75: mol_type = other DNA
agtcagcctctgatagattacgtcgatctttttaatgatattgataggcaagataaccaagcagactctgtgtcc

SEQ ID NO: 403750 - DNA, 75 bp, synthetic construct
  source 1..75: mol_type = other DNA
ttgcccggtgcctggcaaaacaccacggcgacaatatcgaagatattaagccggggctgtcagccacgctggaat

SEQ ID NO: 403751 - DNA, 75 bp, synthetic construct
  source 1..75: mol_type = other DNA
atgagccattggctgttatgaaggatgttggtgtagaacttctcaagtcattggcaaagaagaagtttggtttat

SEQ ID NO: 403752 - DNA, 75 bp, synthetic construct
  source 1..75: mol_type = other DNA
accgcacctcaccgcttttgcccccgttttaagcgcgccgctgggctctcacgaatggcaacagacattaagcca

SEQ ID NO: 403753 - DNA, 75 bp, synthetic construct
  source 1..75: mol_type = other DNA
ctttccacgtcagcgaaatctttaacatcgctggttgcaaaagcccgaacaaacgcggaggttatcagtacgcct

SEQ ID NO: 403754 - DNA, 75 bp, synthetic construct
  source 1..75: mol_type = other DNA
tcaagaacgctcatagtgaccgctgtgtgcctctggtcgatggggcctatggttttatattggctgactttatgg

SEQ ID NO: 403755 - DNA, 75 bp, synthetic construct
  source 1..75: mol_type = other DNA
gatatgcgcttattgatgctctgccggatatagctgttaatccagatatgacagcattatgggctgaaaagcagg

SEQ ID NO: 403756 - DNA, 75 bp, synthetic construct
  source 1..75: mol_type = other DNA
ggcattggtacgccagctacccgcgcggctatgcttgaagccctgaaaaaacggaactatatcacgctcgaaaaa

SEQ ID NO: 403757 - DNA, 75 bp, synthetic construct
  source 1..75: mol_type = other DNA
gatttcaaagggctttacctcaaggcgttggcacgttctgttgctgacgagatctacggtttctccatgacccgt

SEQ ID NO: 403758 - DNA, 75 bp, synthetic construct
  source 1..75: mol_type = other DNA
cagtgattaaaaagttactgaaggataaagatcgggataaaaaagacgaacatggcggtattggtacgccagcta

SEQ ID NO: 403759 - DNA, 75 bp, synthetic construct
  source 1..75: mol_type = other DNA
ccaatggatattgatacgacacgtaaaagcaaggcatttaacagcgcaaaagtaacagcgcatacagccatcatc

SEQ ID NO: 403760 - DNA, 75 bp, synthetic construct
  source 1..75: mol_type = other DNA
gcttacaccattccggcaaaagccagaggatatcagggtgttctgtctgtcgggcgcgtccagactcccgttctt

SEQ ID NO: 403761 - DNA, 75 bp, synthetic construct
  source 1..75: mol_type = other DNA
gacagctacttgtcgatgaggtcctggaatatgcaggcaacacaaaacccgttaagcgcgttctgatcaacgaca

SEQ ID NO: 403762 - DNA, 75 bp, synthetic construct
  source 1..75: mol_type = other DNA
ctgtacagtgaactgacaggcatgatttctgatgttgacctggacgagatgaagattgaacccgctgcgccagca

SEQ ID NO: 403763 - DNA, 75 bp, synthetic construct
  source 1..75: mol_type = other DNA
cggtgaacgccatcgcggagaaagtcaccagtatggaaaccgcatttgctgaactcagcaaggatgccacgaagc

SEQ ID NO: 403764 - DNA, 75 bp, synthetic construct
  source 1..75: mol_type = other DNA
cattgggtgaagatattccgtgggcaatgaagaatgacttatccgttctgttgatgcagcagatggatgagtcag

SEQ ID NO: 403765 - DNA, 75 bp, synthetic construct
  source 1..75: mol_type = other DNA
cgattaaaaaattgttgaaggataaggataaagacaaaaaagatgaacatggtggcattggtacgccagctaccc

SEQ ID NO: 403766 - DNA, 75 bp, synthetic construct
  source 1..75: mol_type = other DNA
gataaaaaaacggctgcaccgttgccctttaacctggtacgactccagcaatacatgaacaaaaagttcaaaatg

SEQ ID NO: 403767 - DNA, 75 bp, synthetic construct
  source 1..75: mol_type = other DNA
cttttaacctggtcaggctccagcaatacatgaacaaaaagttcaaaatgacagcgcaaaaaacgttggatgtta

SEQ ID NO: 403768 - DNA, 75 bp, synthetic construct
  source 1..75: mol_type = other DNA
ccggaagaggccattacagacatgacgtattttcccttttaccggtatgccatgacgtttgaagaatttgttccg

SEQ ID NO: 403769 - DNA, 75 bp, synthetic construct
  source 1..75: mol_type = other DNA
tgcttgatgtttctcaacaagctaatggtttcagtagtgtcgatgttctggaagtaacagacaaaggccaagcgg

SEQ ID NO: 403770 - DNA, 75 bp, synthetic construct
  source 1..75: mol_type = other DNA
gatgacaaaaacaggttctactggtgtcatcaatttgtcaaagtttgttccggttgtggggggggattgttggtg

SEQ ID NO: 403771 - DNA, 75 bp, synthetic construct
  source 1..75: mol_type = other DNA
ctgccttttaacaaggagacctggacccgagtctctcattatcctcaagcttccgagaacgaatattgggctcgc

SEQ ID NO: 403772 - DNA, 75 bp, synthetic construct
  source 1..75: mol_type = other DNA
ttgctcaaaccattttgcaaggcttcgacgctcagtatggtcgattcctcgaagtgacttccggggcgcagcagc

SEQ ID NO: 403773 - DNA, 75 bp, synthetic construct
  source 1..75: mol_type = other DNA
agtttatttttttatatactcatcagtgttaggtgatagagaagttattaatcgagattttttttatgagttatt

SEQ ID NO: 403774 - DNA, 75 bp, synthetic construct
  source 1..75: mol_type = other DNA
acgtgcttgcggcatcgactgatgtcggcgacgtcagttggaaactgcctgttgcccagtgtttcagcccctgtt

SEQ ID NO: 403775 - DNA, 75 bp, synthetic construct
  source 1..75: mol_type = other DNA
tgctgatagcactggtatggataggattattactcagcggatatggcgttttgattggaagcaaagagaatgccg

SEQ ID NO: 403776 - DNA, 75 bp, synthetic construct
  source 1..75: mol_type = other DNA
tctttaccccactgcaaacagcggtgatctcacggtcattattaaagaagcggatggcagtgaacaacgctttat

SEQ ID NO: 403777 - DNA, 75 bp, synthetic construct
  source 1..75: mol_type = other DNA
ggagaaagccattgatgcgctcaacatggcggcaagttttaagacggtagcggaggactggctgactactagggt

SEQ ID NO: 403778 - DNA, 75 bp, synthetic construct
  source 1..75: mol_type = other DNA
cggcatttggaaagtaacaaatcgaatggagctatggagtcttcttggatcccgcatttttgatcagaatcttga

SEQ ID NO: 403779 - DNA, 75 bp, synthetic construct
  source 1..75: mol_type = other DNA
catagcgcaattccatcaacagtatcctcagtgggtttggtcgcggatagttgatatcgtacaaacttggaataa

SEQ ID NO: 403780 - DNA, 75 bp, synthetic construct
  source 1..75: mol_type = other DNA
ctccagggcaagattgatggttttgataccgacgacttgatcgtcgttgttaaagatttcaacagcaatgaaaaa

SEQ ID NO: 403781 - DNA, 75 bp, synthetic construct
  source 1..75: mol_type = other DNA
gaaaatccgtgacatcttcttcagcaaacagaacggtctgggaacatcctttgccgtggaaacggtatcgctttc

SEQ ID NO: 403782 - DNA, 75 bp, synthetic construct
  source 1..75: mol_type = other DNA
caaaaaacatcgaaacaggaagcggcacagccggagcctaagcaagaaccgaaaatgccggatattaacagctac

SEQ ID NO: 403783 - DNA, 75 bp, synthetic construct
  source 1..75: mol_type = other DNA
agggccgaaaataccgggcctggattatttcgacaacctaaccgacccgatgaaagagtatttcgaacgcagctt

SEQ ID NO: 403784 - DNA, 75 bp, synthetic construct
  source 1..75: mol_type = other DNA
atggacgagcaaatggaaatcgaccagttaacgaaacaatttcaaatactggacgaagaacaaagtaagttaccc

SEQ ID NO: 403785 - DNA, 75 bp, synthetic construct
  source 1..75: mol_type = other DNA
tgcgccagatagttgcgcttcccttatttagtgatcttgtcccatgcggctttccctcgccagcgcaggattaca

SEQ ID NO: 403786 - DNA, 75 bp, synthetic construct
  source 1..75: mol_type = other DNA
gaataaagcagcagaagctggactggttgtttttgatgcagttccaggtttagattcagaggctggatatcgcca

SEQ ID NO: 403787 - DNA, 75 bp, synthetic construct
  source 1..75: mol_type = other DNA
tttattggcgtcaaaaattatatagggaaatttcccccatataataccctgagagccgcatcacgtctggcctga

SEQ ID NO: 403788 - DNA, 75 bp, synthetic construct
  source 1..75: mol_type = other DNA
taccagttactcacccgcctcgggcatgaattcgccccggaaaacagtaccctggcagtacagaaagacaaagaa

SEQ ID NO: 403789 - DNA, 75 bp, synthetic construct
  source 1..75: mol_type = other DNA
tgccggggtgcgcctgagctgggcattgatgaaccggaaggggctgaaaacttccgcgaatccatgagtcgggcc

SEQ ID NO: 403790 - DNA, 75 bp, synthetic construct
  source 1..75: mol_type = other DNA
caggcaataaacgccgcagtgtactgaaccttgacggtcagttagtcgattacagccagggccgtaactataccg

SEQ ID NO: 403791 - DNA, 75 bp, synthetic construct
  source 1..75: mol_type = other DNA
gctggcccacagaaaacagcgttacagaaagccgccgggaaagttaagaaccagcttgttactaaattgaacgct

SEQ ID NO: 403792 - DNA, 75 bp, synthetic construct
  source 1..75: mol_type = other DNA
aaggattgttacaaaaaatatctaagaaaagtaataatacaaattttactgatacagactactgcccaggttcct

SEQ ID NO: 403793 - DNA, 75 bp, synthetic construct
  source 1..75: mol_type = other DNA
taccgtgtgcataccgacactgaggataacccattcagcggtgggttattcagccagtttggtctgtcagacaca

SEQ ID NO: 403794 - DNA, 75 bp, synthetic construct
  source 1..75: mol_type = other DNA
tagatcggcactggagaaagatgtttaccccgtgctgggtaagcgctcgatcgtggatataacggcccgtgacgt

SEQ ID NO: 403795 - DNA, 75 bp, synthetic construct
  source 1..75: mol_type = other DNA
ctacgtcatggttaactatgacaggtatgtggtttgatatttttaaacgagccgctattgtagctattggcgatg

SEQ ID NO: 403796 - DNA, 75 bp, synthetic construct
  source 1..75: mol_type = other DNA
tccagataagggcgcttttctggacaatattggcgttaccagcctgacgtttatgaaacacaatggaatgattcc

SEQ ID NO: 403797 - DNA, 75 bp, synthetic construct
  source 1..75: mol_type = other DNA
tggcgtccgttgagctgagtattgatgccagcacagtgatggcgacgcaggattatgtcgatgacaaaatcgcag

SEQ ID NO: 403798 - DNA, 75 bp, synthetic construct
  source 1..75: mol_type = other DNA
aaaatattcatattggtgattttaatatcagtgattttcaggctgcgaataccgtaagcactgctgctgatttga

SEQ ID NO: 403799 - DNA, 75 bp, synthetic construct
  source 1..75: mol_type = other DNA
tcgtggagcgaatggcgtgaagtctacacctcgtattcacttcccctgaatctgggtatcggcggtgcagtggca

SEQ ID NO: 403800 - DNA, 75 bp, synthetic construct
  source 1..75: mol_type = other DNA
cgttacaggtaaagcgaccaacggtccaatactggacggaaacggcgtgacagtcctcgggattctggaagtgtt

SEQ ID NO: 403801 - DNA, 75 bp, synthetic construct
  source 1..75: mol_type = other DNA
tatagaggataaagaattagaacaagctatatctctaataaagaaaaaaagagttaaggtatcaacaataaattt

SEQ ID NO: 403802 - DNA, 75 bp, synthetic construct
  source 1..75: mol_type = other DNA
ccaaaaaaaaattaacagaggagcagattgatcaaaccagaaacagtattgcgataatgaggaatcaaatcagat

SEQ ID NO: 403803 - DNA, 75 bp, synthetic construct
  source 1..75: mol_type = other DNA
tgagatagatgcatcttcatcaactcattatttcaggaataatgaagaaaattatcgtgagatgctttcaaagtt

SEQ ID NO: 403804 - DNA, 75 bp, synthetic construct
  source 1..75: mol_type = other DNA
agagcgggaaaagcgaaccaacgggcttatttacctggtacggtaaagataaaaaaggcgactctctcgctattg

SEQ ID NO: 403805 - DNA, 75 bp, synthetic construct
  source 1..75: mol_type = other DNA
agtgtccgagttcgaaaagtctgagcgtcctcgcaaagacaaccttgaacggctagctacactgtacaaatgcag

SEQ ID NO: 403806 - DNA, 75 bp, synthetic construct
  source 1..75: mol_type = other DNA
atgcattttagcttgaacggagtgagttgggatctctcatatattggtgaaaaacagattgcaaagatgtatagc

SEQ ID NO: 403807 - DNA, 75 bp, synthetic construct
  source 1..75: mol_type = other DNA
aaagaccatcgaccggatcggctggaaaggtgtggtaacaggtcacggattcaggacgactttcagcaccacact

SEQ ID NO: 403808 - DNA, 75 bp, synthetic construct
  source 1..75: mol_type = other DNA
tggtccatcccaacggcagcaaatactggcgattccggtactggatagacaagaaagagcggttacaggctattg

SEQ ID NO: 403809 - DNA, 75 bp, synthetic construct
  source 1..75: mol_type = other DNA
tacacgaaacaggttagatcggcactggaaaaagatgtttaccccgtgctggggaagcggtcaattgtcgatata

SEQ ID NO: 403810 - DNA, 75 bp, synthetic construct
  source 1..75: mol_type = other DNA
gagaaagatgtttaccccgtgctgggtaagcgctcgatcgtggatataacggcccgtgatgtgctggcgttacta

SEQ ID NO: 403811 - DNA, 75 bp, synthetic construct
  source 1..75: mol_type = other DNA
ccattgatgcgctcaacatggcggcaagttttaagacggtagcggaagactggtttgctaccagagttagcggtt

SEQ ID NO: 403812 - DNA, 75 bp, synthetic construct
  source 1..75: mol_type = other DNA
aagtcgatcgccactggtcatggctggcggaccaccttttcaacggcgcttaatgagtctggcagatactcacca

SEQ ID NO: 403813 - DNA, 75 bp, synthetic construct
  source 1..75: mol_type = other DNA
ttcagaagaaagagcgcaccgcaccggagcaggccagaaagctacgacagcgtatcggggagatcttcaaatttg

SEQ ID NO: 403814 - DNA, 75 bp, synthetic construct
  source 1..75: mol_type = other DNA
tgtcgctgagtaaaggcagtcgtgggaagcgggtcaagaatatcatcatcacggataaaacgctgaaggtgctgc

SEQ ID NO: 403815 - DNA, 75 bp, synthetic construct
  source 1..75: mol_type = other DNA
aaacgagagtttttgcaggctattggtgtttacccgctaatcacactcaaagaagcacgcaggcgcgccacggag

SEQ ID NO: 403816 - DNA, 75 bp, synthetic construct
  source 1..75: mol_type = other DNA
cgaatgagtggtatcagacaaaggtcagtagctggtcagaaggatacgcccgccaggtgagagcggcacttgata

SEQ ID NO: 403817 - DNA, 75 bp, synthetic construct
  source 1..75: mol_type = other DNA
cagcgccgtcaaatgcttcaggactacgccgatgccattgattcaatactggctggaaacggaaatcccctggaa

SEQ ID NO: 403818 - DNA, 75 bp, synthetic construct
  source 1..75: mol_type = other DNA
ggggagatcttcaaatttgccgttatcaccgaactggttaaccggaatccggttgcagatctggatacggcactg

SEQ ID NO: 403819 - DNA, 75 bp, synthetic construct
  source 1..75: mol_type = other DNA
ggagaaagccattgatgctcttaatgctatcgccagttttaaagctgtagcagaagactggatggctaccaaggt

SEQ ID NO: 403820 - DNA, 75 bp, synthetic construct
  source 1..75: mol_type = other DNA
agcggagagtatgcaggtcagacgcggtttctggatgccgatgccgtcagtgatgccggattcagtaaacgtatc

SEQ ID NO: 403821 - DNA, 75 bp, synthetic construct
  source 1..75: mol_type = other DNA
cactctgcaagcgaagccataccggcggagaacactcaaacagtttcagaacgtcttacccagcccttttctgac

SEQ ID NO: 403822 - DNA, 75 bp, synthetic construct
  source 1..75: mol_type = other DNA
aaaaaagttactttttgtcgtgaaccctgatccgaaaagtctctggaaagtgattgacccgccttctgatgcacc

SEQ ID NO: 403823 - DNA, 75 bp, synthetic construct
  source 1..75: mol_type = other DNA
ttgactgagctaatccaaaaagtaacaagagtcgtacaactatctgacctttcagacaatacgttagaattactt

SEQ ID NO: 403824 - DNA, 75 bp, synthetic construct
  source 1..75: mol_type = other DNA
tgagagctgtgaggaccgtgtcgcgctcacatggaacaatctccggaaaaccctcctggtccatcaggcatctga

SEQ ID NO: 403825 - DNA, 75 bp, synthetic construct
  source 1..75: mol_type = other DNA
ggaccgttataacccggcagaccaagacagttcgtgctggatccgtgtggcacaggcgtgggcaggcaccggctt

SEQ ID NO: 403826 - DNA, 75 bp, synthetic construct
  source 1..75: mol_type = other DNA
agagtcgcgttgagctgtggattgccaaatcctcggcggagagcaacacctttgcgtttaactggctctatgagc

SEQ ID NO: 403827 - DNA, 75 bp, synthetic construct
  source 1..75: mol_type = other DNA
taagagcattttcttgggtaaaaaaataaaaataacagcagtcggtgatacaaaacaaagaataatgggttgggc

SEQ ID NO: 403828 - DNA, 75 bp, synthetic construct
  source 1..75: mol_type = other DNA
tgttcagcgatcttgttaaccgaacaaaagcggctctcagcagtaaccccagaaatattctcctgtccgttgtct

SEQ ID NO: 403829 - DNA, 75 bp, synthetic construct
  source 1..75: mol_type = other DNA
tattgctgctgtgctttggatatatcgccatcggccacgccgccagtagctctatggacgttacggtacgcgcta

SEQ ID NO: 403830 - DNA, 75 bp, synthetic construct
  source 1..75: mol_type = other DNA
atgaaatacgccaccagcagctttaatgtaccgtccacgcaaatggcggcagcaacgtttgtgctggaaggtcac

SEQ ID NO: 403831 - DNA, 75 bp, synthetic construct
  source 1..75: mol_type = other DNA
taatcctgctgtttttcggctgcacgcgtttttgcctggccggcagcagttctttagctatgacagtacgtacca

SEQ ID NO: 403832 - DNA, 75 bp, synthetic construct
  source 1..75: mol_type = other DNA
gaacacgagcattttccctaatggttataccgcgatttcaaatctaagcgcggggattatgagcacaacaagcgg

SEQ ID NO: 403833 - DNA, 75 bp, synthetic construct
  source 1..75: mol_type = other DNA
attctctacggtgttttctttgcgtgggaaatcatgtacacacgcaaggatgatgtgatgatggaatccgtaaaa

SEQ ID NO: 403834 - DNA, 75 bp, synthetic construct
  source 1..75: mol_type = other DNA
ttccgatgaccgatggctggcatccgtcgccggattttcgacgacgggctgctctgtggggagtggctctgcctg

SEQ ID NO: 403835 - DNA, 75 bp, synthetic construct
  source 1..75: mol_type = other DNA
ccttcaaggcgaacaaacaggcggaatgtgattacctgttcagtgccctccgtcggctggagctacagggctaca

SEQ ID NO: 403836 - DNA, 75 bp, synthetic construct
  source 1..75: mol_type = other DNA
attattgatactgaaaactgggcattctcaaatattgcaaatcaaatagtcaattatctgtcagattcatatgac

SEQ ID NO: 403837 - DNA, 75 bp, synthetic construct
  source 1..75: mol_type = other DNA
aaatgtttatcttcagaaaatctgcagcaaataaaaaaatgggattggaaagttaaatctgagaacttccgcatt

SEQ ID NO: 403838 - DNA, 75 bp, synthetic construct
  source 1..75: mol_type = other DNA
tctaaatgggcgggagaagtagaggattttaaaggttaccattctttattaaagccagcagttgagcaattacaa

SEQ ID NO: 403839 - DNA, 75 bp, synthetic construct
  source 1..75: mol_type = other DNA
ctccgcgccgccatgcttcatggtgccgaacctgtaagccaaacttacaagtcacaacatacgcagtttgaacaa

SEQ ID NO: 403840 - DNA, 75 bp, synthetic construct
  source 1..75: mol_type = other DNA
aacggcagaacattaccggaacaagatagcggtctacctgcactggtatcagacccggggcttccccggatgatc

SEQ ID NO: 403841 - DNA, 75 bp, synthetic construct
  source 1..75: mol_type = other DNA
ataggaaatactgtcgactccttacgttgtctaatcatttctgctgatagtggctctgacattgcttataagaat

SEQ ID NO: 403842 - DNA, 75 bp, synthetic construct
  source 1..75: mol_type = other DNA
cttaattttgtttgatgacttttttagaagccataacttgcctaaaccatctccagtccttcatcatttttttca

SEQ ID NO: 403843 - DNA, 75 bp, synthetic construct
  source 1..75: mol_type = other DNA
ttcgttaattttttaaaggcaaacttcaaccaagaaataggtaatgactccaacttattgatagtgttttatgtt

SEQ ID NO: 403844 - DNA, 75 bp, synthetic construct
  source 1..75: mol_type = other DNA
cacacgtatccagacggtatacgagccgggaagcttcacgccgctcatccgggtcgagacagagaacggcgagcg

SEQ ID NO: 403845 - DNA, 75 bp, synthetic construct
  source 1..75: mol_type = other DNA
tgcagccacttacccgatgttgtttgacacaattaaagtgcaggttaacgatgcggtctcttcgtctaatgtgaa

SEQ ID NO: 403846 - DNA, 75 bp, synthetic construct
  source 1..75: mol_type = other DNA
tgaaatgcatgaactccgcagggcaggaacacagatgagccagatattcagagaaagatgcatgcgtgttgattg

SEQ ID NO: 403847 - DNA, 75 bp, synthetic construct
  source 1..75: mol_type = other DNA
accgtcaccactaccgacgggccgatggaattacgaactccacgtgatcgtgatggttccttcgaaccacaatgg

SEQ ID NO: 403848 - DNA, 75 bp, synthetic construct
  source 1..75: mol_type = other DNA
tcggtcaccattattcttttagacattgatcctatgaaactgccgcaaagttgctggcgggaactgaagttgcgt

SEQ ID NO: 403849 - DNA, 75 bp, synthetic construct
  source 1..75: mol_type = other DNA
gaattatcccgtgataatcccaaatgggaagaatggaaattgaaggggcaggtattactcaatcagaaaaaggaa

SEQ ID NO: 403850 - DNA, 75 bp, synthetic construct
  source 1..75: mol_type = other DNA
ggctcacagacagagtgcaaactatccgtggtttaaaatcaccgaatgagccacaacgcttattggtgattttgc

SEQ ID NO: 403851 - DNA, 75 bp, synthetic construct
  source 1..75: mol_type = other DNA
tggctgctccctattgcttacttaatcatctctgcaaaaattgatggaattgtaggcattaccatcgcttggtta

SEQ ID NO: 403852 - DNA, 75 bp, synthetic construct
  source 1..75: mol_type = other DNA
caggctcgggcagatattgaagccgcgctgcaatggctttattcccaaatggaccccgattttaatacaggtgat

SEQ ID NO: 403853 - DNA, 75 bp, synthetic construct
  source 1..75: mol_type = other DNA
catatcaggcttaatgcccgccggaagattcaaagcgaaccgatagatatcgatactctcaaaaaatctcttgca

SEQ ID NO: 403854 - DNA, 75 bp, synthetic construct
  source 1..75: mol_type = other DNA
acgtatttcgtaaaagctgcaggcgactcgatgattgaggccgggatcagcgacggcgatctgctggtggtggat

SEQ ID NO: 403855 - DNA, 75 bp, synthetic construct
  source 1..75: mol_type = other DNA
attgagaatgtattcaaaaatgtatatatagtgaactctaataatgagacgctaggtgaaatagatgtactggta

SEQ ID NO: 403856 - DNA, 75 bp, synthetic construct
  source 1..75: mol_type = other DNA
tagatatggcggaggaaaaatactccttagataattcttggtttttagagaatatggggtttacatgcatcgata

SEQ ID NO: 403857 - DNA, 75 bp, synthetic construct
  source 1..75: mol_type = other DNA
ctgatacctggcatcacaacaggaaattcgcttgaaatagctaaaggtgtgcttgcttccataaacggtacgttt

SEQ ID NO: 403858 - DNA, 75 bp, synthetic construct
  source 1..75: mol_type = other DNA
aatacatgcatgaacgaaagaaagctcaagatgcgttctccgttaagtatcgcggtactctcgatcctgatgctc

SEQ ID NO: 403859 - DNA, 75 bp, synthetic construct
  source 1..75: mol_type = other DNA
atcagcgaaggccaccgtgtggcggtccactacggccacgacgataaaggccgcctgacgggcgaacggcagacg

SEQ ID NO: 403860 - DNA, 75 bp, synthetic construct
  source 1..75: mol_type = other DNA
ttaatcaggtggccaaatttactgtgccactacagtcggaccgcatcacgcaccggacggtgaacggcgacccgg

SEQ ID NO: 403861 - DNA, 75 bp, synthetic construct
  source 1..75: mol_type = other DNA
aggagtcggggctgtactacaaccgtcaccggtactatgacccgctacaggggaggtatatcacccaggatccga

SEQ ID NO: 403862 - DNA, 75 bp, synthetic construct
  source 1..75: mol_type = other DNA
aaagaatcatggaattttatccggtgaggggtgtatatatcttgatatggatatgatgcttacaggtaagcttgg

SEQ ID NO: 403863 - DNA, 75 bp, synthetic construct
  source 1..75: mol_type = other DNA
ggttcgggccagtgcactaatgggagcgttgggtattgggctgattatttttgtcgatagcgcctgggtcgctgg

SEQ ID NO: 403864 - DNA, 75 bp, synthetic construct
  source 1..75: mol_type = other DNA
acacgcgggaccggctgcaccgtgagacggcccgcagcttcggcggggaggcatatgagcttgccaccgcctgga

SEQ ID NO: 403865 - DNA, 75 bp, synthetic construct
  source 1..75: mol_type = other DNA
tggctgggattcgacgtcgaccgcgccggtgctgccatcgactggagcgaccgcaacgctcccgcaccaacgctg

SEQ ID NO: 403866 - DNA, 75 bp, synthetic construct
  source 1..75: mol_type = other DNA
gggcatatcgtgccatccgtcaggggtggcctgagtatgagcagtggttacaagcctgctatgaacgagcctgtg

SEQ ID NO: 403867 - DNA, 75 bp, synthetic construct
  source 1..75: mol_type = other DNA
atcaccaaccccgaaaacggacacgcgcacctgctttatgcgctggaaacctctatacgcacagcacctgacgga

SEQ ID NO: 403868 - DNA, 75 bp, synthetic construct
  source 1..75: mol_type = other DNA
ccggaggactggttgcgcgaagtgatcgagaagctcaatgactggccgtcgaaccaagtgcataaactgctgccc

SEQ ID NO: 403869 - DNA, 75 bp, synthetic construct
  source 1..75: mol_type = other DNA
ttaaagcaggggatgttgaacttaaataattcgagaacattgaatcaagatgttgtgcacagaattattaatact

SEQ ID NO: 403870 - DNA, 75 bp, synthetic construct
  source 1..75: mol_type = other DNA
gtttacgctgtgtcaatgttcaacccgcaaggtaacgatatgaccaaaggactgcttacgctggcgaaaggtaaa

SEQ ID NO: 403871 - DNA, 75 bp, synthetic construct
  source 1..75: mol_type = other DNA
caagtggaagcattgtccggtcgaggacatccctgcgattgagcgtgaagaactcccgatgaaaccggaagacat

SEQ ID NO: 403872 - DNA, 75 bp, synthetic construct
  source 1..75: mol_type = other DNA
atgtgggaaatacccggatattacgcgctgaagcgggaacggcggtaagctatcacatggacctgcaaaacggta

SEQ ID NO: 403873 - DNA, 75 bp, synthetic construct
  source 1..75: mol_type = other DNA
cgtgcagcaggaactggtcaagctagggcggaacctgctgtgtagttatcgcaccagggaggtggcatcagccga

SEQ ID NO: 403874 - DNA, 75 bp, synthetic construct
  source 1..75: mol_type = other DNA
gcattgaccatttgatgtgtgaattagcgtatagttcagagtatccaacggcaaatatgaattcctttgtcatga

SEQ ID NO: 403875 - DNA, 75 bp, synthetic construct
  source 1..75: mol_type = other DNA
ttcagacaattttctctacctcctcatgaagaggaattcattccttattttgagaatattctaaaacgatattct

SEQ ID NO: 403876 - DNA, 75 bp, synthetic construct
  source 1..75: mol_type = other DNA
gctgccgggtatgaccgtctttttcccgagcttaaaccacataaaactaaaggctatggtaggccggtttccgca

SEQ ID NO: 403877 - DNA, 75 bp, synthetic construct
  source 1..75: mol_type = other DNA
tcaaagctgattagtctcggtttcatcgactacgtgaacgccttaaaagatgcagggtatacccgtctcttcccg

SEQ ID NO: 403878 - DNA, 75 bp, synthetic construct
  source 1..75: mol_type = other DNA
aagcaaatctttccactctttccggcattctgtttcaactttgcttaaagagaagggtgttagttcggaactgcg

SEQ ID NO: 403879 - DNA, 75 bp, synthetic construct
  source 1..75: mol_type = other DNA
tcactgtccatcaggagctgagcagttttgttaaaacggatacgggtatcagtgacagtccgacccttctcaaac

SEQ ID NO: 403880 - DNA, 75 bp, synthetic construct
  source 1..75: mol_type = other DNA
ttgccgctgcaatgaaaggcggttatatcaacgcactggttaccgatcaggacacagcagcggcgattttacgta

SEQ ID NO: 403881 - DNA, 75 bp, synthetic construct
  source 1..75: mol_type = other DNA
ggttgtagagatactgttaaagataaagtgtcaggttttttgtgcaaaccaaaatcagtagaaagcttggttaac

SEQ ID NO: 403882 - DNA, 75 bp, synthetic construct
  source 1..75: mol_type = other DNA
gcttggcgtagagatcctgatccgcgagcggcgaaaagcactgcagctgactgacgccggctcacgcatcgcaag

SEQ ID NO: 403883 - DNA, 75 bp, synthetic construct
  source 1..75: mol_type = other DNA
cattaaaggcaaaaacaccctgcggatttctgacctgctgcatcacagcggcggttttccccggcagatccgcaa

SEQ ID NO: 403884 - DNA, 75 bp, synthetic construct
  source 1..75: mol_type = other DNA
attaccgcccacccatctactgacaaataatagcaccattacggtggatgagttaatgggagagccgttaattgt

SEQ ID NO: 403885 - DNA, 75 bp, synthetic construct
  source 1..75: mol_type = other DNA
cattgtttatcttgactgtatcgtcctgaaagttcggcaggacagtcgcctcatcaacaaatcggtgttcctggc

SEQ ID NO: 403886 - DNA, 75 bp, synthetic construct
  source 1..75: mol_type = other DNA
aatgttgaaaattataaaataaccctatcctgcaaccccaattatttatactcttccgtttctcaagagatggat

SEQ ID NO: 403887 - DNA, 75 bp, synthetic construct
  source 1..75: mol_type = other DNA
tctacgcccatgaaggtaacaaaggtttctccgaactcgtcgccgaaggtgcctacaaaaccttcccagctgaca

SEQ ID NO: 403888 - DNA, 75 bp, synthetic construct
  source 1..75: mol_type = other DNA
atgaataataaaaataatattgaaaatctaactttagagattattgaccttcacaaaaaagattgggatgaaaaa

SEQ ID NO: 403889 - DNA, 75 bp, synthetic construct
  source 1..75: mol_type = other DNA
tgacccgctgcaggggcggtatatcactcaggatccgattgggctgaagggggatggaatttttatcagtatccg

SEQ ID NO: 403890 - DNA, 75 bp, synthetic construct
  source 1..75: mol_type = other DNA
gcaagatccagtttgcaagacctggagaaatacgggaaatcatatgtatccaagcattccgaccggatgggcgat

SEQ ID NO: 403891 - DNA, 75 bp, synthetic construct
  source 1..75: mol_type = other DNA
gtttctacgccacgtatatcaaagccctggaaaacgaactggatggcttcaccttcgaagacaataaagacgacc

SEQ ID NO: 403892 - DNA, 75 bp, synthetic construct
  source 1..75: mol_type = other DNA
atgtaagaagcaaggtgaatatttccctatgaatccgataagttcaaatgataatgatagtgtagacttgcgaaa

SEQ ID NO: 403893 - DNA, 75 bp, synthetic construct
  source 1..75: mol_type = other DNA
tatatcaccccggacccgatagggctggagggggggatggagtctgtatgcgtacccgctgaatccggtgaatgg

SEQ ID NO: 403894 - DNA, 75 bp, synthetic construct
  source 1..75: mol_type = other DNA
tgctctatgccttgctgccgctggtgcgcggcgtggtagtcggtttgaaccagatcccgcgcgatgtgctggaga

SEQ ID NO: 403895 - DNA, 75 bp, synthetic construct
  source 1..75: mol_type = other DNA
gcgcatcctgttatcgggtgttagcgacgtccctttcagtcatctgccgtggtcacaggtacggatcgaccgaac

SEQ ID NO: 403896 - DNA, 75 bp, synthetic construct
  source 1..75: mol_type = other DNA
aactcgaatgatcccaaatttgggttacagaaccagtcggtttatccccgctggcgcggggaactcggacttaaa

SEQ ID NO: 403897 - DNA, 75 bp, synthetic construct
  source 1..75: mol_type = other DNA
ataaataccaagtttattcaccattttatgattttggcactctgtacgaatcactgcaatccttagaagagataa

SEQ ID NO: 403898 - DNA, 75 bp, synthetic construct
  source 1..75: mol_type = other DNA
gaactggaggccgttttgatgggtgctgcgggtatctgctctatgaacagatcaaggagtaccttgatactggtc

SEQ ID NO: 403899 - DNA, 75 bp, synthetic construct
  source 1..75: mol_type = other DNA
atgcggatgaatatgtctgactttgccactttctttgccgtggcccgtaatcaaagctttcgtgcagcgggcgat

SEQ ID NO: 403900 - DNA, 75 bp, synthetic construct
  source 1..75: mol_type = other DNA
gtgacactgacaaagttttccctaatcctggtaattcaagcctgggactgataactgcttttttcgaagcatacc

SEQ ID NO: 403901 - DNA, 75 bp, synthetic construct
  source 1..75: mol_type = other DNA
tgtctaacactgccggctttgcaaatacaatttcctccggcaatggtggttcaagcagagccgcagtcgaagtat

SEQ ID NO: 403902 - DNA, 75 bp, synthetic construct
  source 1..75: mol_type = other DNA
attgtgccgggcttccaggaaagagtgctcaactcgtcttagcgcccagaaacaacggttgcgcaggaggcatgt

SEQ ID NO: 403903 - DNA, 75 bp, synthetic construct
  source 1..75: mol_type = other DNA
gaactggcggcggttccactatctgttcacaggagattcagtaccgtttattccgtctggggctaccagtggtca

SEQ ID NO: 403904 - DNA, 75 bp, synthetic construct
  source 1..75: mol_type = other DNA
ataagtatcaaatctattcgccattttatgactttggaactatgtaccagtctctgcaggctctggaggaaatta

SEQ ID NO: 403905 - DNA, 75 bp, synthetic construct
  source 1..75: mol_type = other DNA
ccgttagaagacaaaatcctcatctatggcgaaggaattcttcaagattggttcaggtattctcagttcttgatt

SEQ ID NO: 403906 - DNA, 75 bp, synthetic construct
  source 1..75: mol_type = other DNA
gatcggttgcgtaagacctatgacctgcaggtgagcaaggctggagcgctggagcgccacaaggggctttcacgc

SEQ ID NO: 403907 - DNA, 75 bp, synthetic construct
  source 1..75: mol_type = other DNA
cgggatgatcttcagcgcgtaggtggagcaggagatggtggtatcgatggcattatttcacttgataaattggga

SEQ ID NO: 403908 - DNA, 75 bp, synthetic construct
  source 1..75: mol_type = other DNA
ggttttgctcccggcaatgccgggctgcgtcagcgttatgcccgggatatccgcgccatctggctgtaccttcgc

SEQ ID NO: 403909 - DNA, 75 bp, synthetic construct
  source 1..75: mol_type = other DNA
ccggactgctctggctcccccctgccggggcatggtgtttccggcaggccggagagcgatatcagattgatcccc

SEQ ID NO: 403910 - DNA, 75 bp, synthetic construct
  source 1..75: mol_type = other DNA
ataaattctacccaacacaccttcgcggcgaatacaaaaaaaacggcatgtggccaacagactgcattgatattg

SEQ ID NO: 403911 - DNA, 75 bp, synthetic construct
  source 1..75: mol_type = other DNA
atggagccatacagcctcacactcgatgaggcctgttcattgctcaatgatatccagacctaccatcgccgcatc

SEQ ID NO: 403912 - DNA, 75 bp, synthetic construct
  source 1..75: mol_type = other DNA
ttcgcaatctattaacaaattctagaactgaacaaccaagttatgatttcaaacaagggttctttaatttatcag

SEQ ID NO: 403913 - DNA, 75 bp, synthetic construct
  source 1..75: mol_type = other DNA
actcaaggactaccgagcaattatacgaatggtatttgcaaggaaatttgatagtcaatagacgttatcaaagga

SEQ ID NO: 403914 - DNA, 75 bp, synthetic construct
  source 1..75: mol_type = other DNA
gtgatgatgctggtggagactgacagggaacgcgaacgggtggcaatgcgcagggcagagtgttacgggaaggca

SEQ ID NO: 403915 - DNA, 75 bp, synthetic construct
  source 1..75: mol_type = other DNA
ttgattgtcgatgagccgacgcgcggcgtggatgtctcggcccgtaatgatatctaccagctgttgcgcagcatc

SEQ ID NO: 403916 - DNA, 75 bp, synthetic construct
  source 1..75: mol_type = other DNA
gtcgggcgctgaatattaaatttaaccaaccggaacaagctgcacggacattatccggtggcaaccagcaaaaaa

SEQ ID NO: 403917 - DNA, 75 bp, synthetic construct
  source 1..75: mol_type = other DNA
ggaatgattcatacttctacgggctctatttcaccagaaagcatgcagatgctggtacagctcaaagagttatat

SEQ ID NO: 403918 - DNA, 75 bp, synthetic construct
  source 1..75: mol_type = other DNA
tgttaccgatttactgtttgttggccttgtgcaactcaatgatgtggagtcattgaaaatgattcagcgcagcag

SEQ ID NO: 403919 - DNA, 75 bp, synthetic construct
  source 1..75: mol_type = other DNA
attacagctatctccaaataaatgaagcactaagatcattttactcagagataattgaggattttaagggcgaaa

SEQ ID NO: 403920 - DNA, 75 bp, synthetic construct
  source 1..75: mol_type = other DNA
ccgtctggaagatgacaactggcgcttgctggaacgggatatcgtcctggatcaagcggtgatcacttcccataa

SEQ ID NO: 403921 - DNA, 75 bp, synthetic construct
  source 1..75: mol_type = other DNA
taccaaacgtatttgctgtgcgggtaaattatctgctttatcgggcacaaaaagagcgcgatgaaacattctatg

SEQ ID NO: 403922 - DNA, 75 bp, synthetic construct
  source 1..75: mol_type = other DNA
acggcaacaaatgttacccagcacgatggtgcaattttaaaaactaacactaacggggtaatgactccaacttat

SEQ ID NO: 403923 - DNA, 75 bp, synthetic construct
  source 1..75: mol_type = other DNA
tcacagcgatgccgttgctgtcgacctgcgcttagtcaactgcgatctggaaaactccagcaacggttccggtgg

SEQ ID NO: 403924 - DNA, 75 bp, synthetic construct
  source 1..75: mol_type = other DNA
cctcgaccgtcagacgcgccgtattggcgttattaacaatgacagcattccgctgattattaatgatattgaaca

SEQ ID NO: 403925 - DNA, 75 bp, synthetic construct
  source 1..75: mol_type = other DNA
aaattatctgctttatcgggcacaaaaagagcgcgatgaaacgttctatgtcgggactcgttttgacaaagttcg

SEQ ID NO: 403926 - DNA, 75 bp, synthetic construct
  source 1..75: mol_type = other DNA
tgttaagtatatatgatcatacaatagcaatatccgatgctgttaaaagcatggttttgaaaggaacaaaaggaa

SEQ ID NO: 403927 - DNA, 75 bp, synthetic construct
  source 1..75: mol_type = other DNA
aaatgagcttgagtatttatactgtgatttgctttataaggagtatagagaaaggttttcgttagagtcacttct

SEQ ID NO: 403928 - DNA, 75 bp, synthetic construct
  source 1..75: mol_type = other DNA
agttaaccctgcctgaagcgctggtatttatcgataaggtggttgacgacgttgatattattgaagtgggtacac

SEQ ID NO: 403929 - DNA, 75 bp, synthetic construct
  source 1..75: mol_type = other DNA
ggtacacagaatattaataatcatggtattgccacgggtaccaatatcaacggcggaacgcaaaatatcaagagc

SEQ ID NO: 403930 - DNA, 75 bp, synthetic construct
  source 1..75: mol_type = other DNA
caagctctctcacttcactattaccggaggggaggctaattatgttgtgctggaaaataccggcgaactgacggt

SEQ ID NO: 403931 - DNA, 75 bp, synthetic construct
  source 1..75: mol_type = other DNA
agttttaaccaatgctaaagctgatgcgacccgaatagataatggcggggttatggatgttgccggaaacgcgac

SEQ ID NO: 403932 - DNA, 75 bp, synthetic construct
  source 1..75: mol_type = other DNA
aaaacttgtggaaatttgccgtttactccgggcttcgtcacggggaactggcagctctggcgtgggaggatgtgg

SEQ ID NO: 403933 - DNA, 75 bp, synthetic construct
  source 1..75: mol_type = other DNA
cacgaagaattatcatcaacagcatattctttgttattctcgaaaaattgctgttacttacacctactcagtttc

SEQ ID NO: 403934 - DNA, 75 bp, synthetic construct
  source 1..75: mol_type = other DNA
ctttttttgaatctttttgcccagatagctttgaaaatttatccaatatacattggcttaataatgatgtcattg

SEQ ID NO: 403935 - DNA, 75 bp, synthetic construct
  source 1..75: mol_type = other DNA
attgtactctcctacatggcgtccatatgataaggcaaggtttttcccatttgccgatttagaagcgaatgaatt

SEQ ID NO: 403936 - DNA, 75 bp, synthetic construct
  source 1..75: mol_type = other DNA
aacgccagttacagtatgtcaaacgatttgaaaggcggcatgaccaatctatcgggagtttatggcactctgctg

SEQ ID NO: 403937 - DNA, 75 bp, synthetic construct
  source 1..75: mol_type = other DNA
aaatacggcccacctgttcatgagttcatgaagccacgatataagtttgccggtgaatattatatcggtttgaat

SEQ ID NO: 403938 - DNA, 75 bp, synthetic construct
  source 1..75: mol_type = other DNA
gtgaatactgtcaacggcggacgcgtacttgccaccggcagtgccgacgttaaaggaaccacgctgaataatacc

SEQ ID NO: 403939 - DNA, 75 bp, synthetic construct
  source 1..75: mol_type = other DNA
ggcttctctcagggaaccagcatccgccagtacaccgatcagctgatggcgccgcacagctttaactatgtcctt

SEQ ID NO: 403940 - DNA, 75 bp, synthetic construct
  source 1..75: mol_type = other DNA
tggatatcaataatcaggcggagatcgacaaagtgattgcccacaccttgcgcccggtggagtccattcattacc

SEQ ID NO: 403941 - DNA, 75 bp, synthetic construct
  source 1..75: mol_type = other DNA
ctgcgcagatggtgtatgaaatttacggtatgtggattgatgatatgaacgacgaacaggtagccatgttgaatg

SEQ ID NO: 403942 - DNA, 75 bp, synthetic construct
  source 1..75: mol_type = other DNA
gcagcaagccggttaaaccggaagaagtaatcaaaggcacccttctctaccgcaacggctcactgctggcgcgca

SEQ ID NO: 403943 - DNA, 75 bp, synthetic construct
  source 1..75: mol_type = other DNA
tcttgatcaggctgctaccggcgatgcccctatccagtggaaagcatctctgccgattactgttcgttaccagta

SEQ ID NO: 403944 - DNA, 75 bp, synthetic construct
  source 1..75: mol_type = other DNA
gatttggctatttgatatcgatattgttatcgatttgttcagtgtgaaaattgaggcaaaacaggcactggcagc

SEQ ID NO: 403945 - DNA, 75 bp, synthetic construct
  source 1..75: mol_type = other DNA
gcatcagccgcagaacactcgttaaatcaaccgcgacaggttctctggcgctggctgcaggcggtttttctttac

SEQ ID NO: 403946 - DNA, 75 bp, synthetic construct
  source 1..75: mol_type = other DNA
aaactggtgatcgtcggtgatccttttgccagtaaaaaaggtgaaaaagctgaatatcagaaaaaagttctggat

SEQ ID NO: 403947 - DNA, 75 bp, synthetic construct
  source 1..75: mol_type = other DNA
tgatactgtgctattatttgcaggaaggatatcgccagataaaggttgcctgatgcttatggaggcttttaatca

SEQ ID NO: 403948 - DNA, 75 bp, synthetic construct
  source 1..75: mol_type = other DNA
tcacgccaatattttctataccgccaaaaggagctgcagcggttgaaacgtggatttatcaggtagcaaaaaggc

SEQ ID NO: 403949 - DNA, 75 bp, synthetic construct
  source 1..75: mol_type = other DNA
gcaaatacaccctacgtcggttcgccgccttgttcgatgtgatctgctgggtgcttattgccgtagtaaccgttg

SEQ ID NO: 403950 - DNA, 75 bp, synthetic construct
  source 1..75: mol_type = other DNA
gcaaatacaccctgcgtcggctcgccgccatttttgatgttatctgctgggtgctgattgccgtagtaaccgttg

SEQ ID NO: 403951 - DNA, 75 bp, synthetic construct
  source 1..75: mol_type = other DNA
gttgctattggatttcattggtcatctattattataccatcgctgctcttaatgtttcgatttataccaaaacgc

SEQ ID NO: 403952 - DNA, 75 bp, synthetic construct
  source 1..75: mol_type = other DNA
attggccgctgctcacaaaaatttaaaattagttgtgattggtgattatacagaaatgagtaaaagtgacaaagg

SEQ ID NO: 403953 - DNA, 75 bp, synthetic construct
  source 1..75: mol_type = other DNA
cgacaacccatataaaccgggatcatcacagcaataaagtggccgtcgacattcgcttaataaactgtgacctgc

SEQ ID NO: 403954 - DNA, 75 bp, synthetic construct
  source 1..75: mol_type = other DNA
atgtttaaaggacaaaaaacattggccgcattggccgtatctctgttgttcactgctcctgtttatgccgcagac

SEQ ID NO: 403955 - DNA, 75 bp, synthetic construct
  source 1..75: mol_type = other DNA
cagaacagttagacagaaatgcaaaggtaatcgtaccgagccagtttcttttcgatttctactcagaaaaaatgc

SEQ ID NO: 403956 - DNA, 75 bp, synthetic construct
  source 1..75: mol_type = other DNA
tattaatgtatcaccatatcagtaataatccggggctggtgacgctttcactccggactttccgcgagcagatgc

SEQ ID NO: 403957 - DNA, 75 bp, synthetic construct
  source 1..75: mol_type = other DNA
aaggattatattcagatcgctgaagaacttggattccattatttatatacaacagaaagaagaatgaatgctccc

SEQ ID NO: 403958 - DNA, 75 bp, synthetic construct
  source 1..75: mol_type = other DNA
gtggtgtggatattgtttttgaaccaaaccagacggcgtacaataaatttattaatgaaatggcaatggataata

SEQ ID NO: 403959 - DNA, 75 bp, synthetic construct
  source 1..75: mol_type = other DNA
tgatctttatgcggtatacagggtcacgtacaatctggttacagcagttaggacgtgggttgcgcaaaacgccaa

SEQ ID NO: 403960 - DNA, 75 bp, synthetic construct
  source 1..75: mol_type = other DNA
cggctcatcaacaaaacagtgaccgagcaggggatagaggacgtaaaagggatcatcttttgccggaatatccag

SEQ ID NO: 403961 - DNA, 75 bp, synthetic construct
  source 1..75: mol_type = other DNA
tgccgaaattacccaaacaggcaaagaattcaaacacggtgatggtggggtcgatattttcgcctggaaagggag

SEQ ID NO: 403962 - DNA, 75 bp, synthetic construct
  source 1..75: mol_type = other DNA
aggaaaagtgggaatttataaaaaaggaataaaatgttatcttaaccaacgtgttgggaaatttatacccaaaga

SEQ ID NO: 403963 - DNA, 75 bp, synthetic construct
  source 1..75: mol_type = other DNA
attatgtagaagatggtggtatcagtgtaatccattatggtgagatatatacacgatatggtgtttacacaactc

SEQ ID NO: 403964 - DNA, 75 bp, synthetic construct
  source 1..75: mol_type = other DNA
aatgagattaagagcctagcaaaagagattgaacagcagccaaggtatcacgacagcactattgatgatccggag

SEQ ID NO: 403965 - DNA, 75 bp, synthetic construct
  source 1..75: mol_type = other DNA
atcgccgtccttgttgaccagcgtcttggtcacgaaggccgcgtattctttggcgttgtcgtaccctttccagac

SEQ ID NO: 403966 - DNA, 75 bp, synthetic construct
  source 1..75: mol_type = other DNA
catcctgctctctgtttttttattcttttttggcacctgcaatattatatatgttgctgacgctattattcacaa

SEQ ID NO: 403967 - DNA, 75 bp, synthetic construct
  source 1..75: mol_type = other DNA
cgatgccactaaatcgttacaaaccgcagaaggaatattaaaagcgtatagcgatctcgacgccattatcgcccc

SEQ ID NO: 403968 - DNA, 75 bp, synthetic construct
  source 1..75: mol_type = other DNA
gggttggcgcggtgcgccttccctggctcaaagagaaaaacgggtggttgctaccgtgggatgatgtcgttacca

SEQ ID NO: 403969 - DNA, 75 bp, synthetic construct
  source 1..75: mol_type = other DNA
accagctctgctgtcggttttaacattcagctgaatgattgcgataccagtgttgccacaaaagccgctgttgcc

SEQ ID NO: 403970 - DNA, 75 bp, synthetic construct
  source 1..75: mol_type = other DNA
gttcaatccagcatcaaatgaaggttaatttatggacgaaaaacagttacaggctctggctaacgaactggccaa

SEQ ID NO: 403971 - DNA, 75 bp, synthetic construct
  source 1..75: mol_type = other DNA
acaaattcgatatgccatcagggcgaggtgctgctgattgataacgaggatgccttcacctcgatgatgaagtat

SEQ ID NO: 403972 - DNA, 75 bp, synthetic construct
  source 1..75: mol_type = other DNA
aaaaccagcggcaaatcagggtactctcctgcctgcgctaacgaatggcaggcgagaatatgcggtaaaccccgg

SEQ ID NO: 403973 - DNA, 75 bp, synthetic construct
  source 1..75: mol_type = other DNA
tataatttgagtttgtttgatgagcgatttgccttatacggtgttgatcttagtttgtttcgtaggattgagagg

SEQ ID NO: 403974 - DNA, 75 bp, synthetic construct
  source 1..75: mol_type = other DNA
attaatctacaacaaaacactcagttaagaccattcaatgccggggttaatttcgattacatatacagaaaaaaa

SEQ ID NO: 403975 - DNA, 75 bp, synthetic construct
  source 1..75: mol_type = other DNA
gtttctgcgccgccgtcggcccggataaccgcactcagtttctcatgcgggttatcggcaccggggcggtactgc

SEQ ID NO: 403976 - DNA, 75 bp, synthetic construct
  source 1..75: mol_type = other DNA
tatccaacccaagccgcatgaactgcttgtaattggcccaggtcctggcgatccacgtaatctgagcgacgaacg

SEQ ID NO: 403977 - DNA, 75 bp, synthetic construct
  source 1..75: mol_type = other DNA
tcagacagtttctgcgagatggaaaatccacgagcctggctatatcgggcggcgaggaatctgctgattgatggg

SEQ ID NO: 403978 - DNA, 75 bp, synthetic construct
  source 1..75: mol_type = other DNA
tggccgatgagctggggatcacgcttacagcgtttaaatcccgccagcttcgggccagaaagcacctgaaagaag

SEQ ID NO: 403979 - DNA, 75 bp, synthetic construct
  source 1..75: mol_type = other DNA
tcgtatgtcgcgtttgccaaaccgtttgccgaaggttttaacctcggacgcgaagcgcatttcaataacgccaaa

SEQ ID NO: 403980 - DNA, 75 bp, synthetic construct
  source 1..75: mol_type = other DNA
gatgagtgtgcaccttttctaagtcgtcctaataacgatgttaaactttttaattatactgaaaatagaccatta

SEQ ID NO: 403981 - DNA, 75 bp, synthetic construct
  source 1..75: mol_type = other DNA
tatggcggaatgggtggaaggtattccgatgaagcgtgccggtaaacctgaagatgttgccggactggttgcctt

SEQ ID NO: 403982 - DNA, 75 bp, synthetic construct
  source 1..75: mol_type = other DNA
agctggaagaagatgccctattaacagacgcatcccctgatgcaatctcaacgctggatatttgcctgcctgaaa

SEQ ID NO: 403983 - DNA, 75 bp, synthetic construct
  source 1..75: mol_type = other DNA
agaaggcacagtaatcagcgccaccagagacccggagtattactttgttgtggttctggcggggcagtcaaacag

SEQ ID NO: 403984 - DNA, 75 bp, synthetic construct
  source 1..75: mol_type = other DNA
ttactgatctctttgatatcgccgaacggcggaatccaaaacgcgcatttctgtttgtcagtaaagtgctgggtc

SEQ ID NO: 403985 - DNA, 75 bp, synthetic construct
  source 1..75: mol_type = other DNA
atggagacagatatgtcagcaattgatggtaatttcgtttatcaaaagacattatcctgtggacgaattgaggta

SEQ ID NO: 403986 - DNA, 75 bp, synthetic construct
  source 1..75: mol_type = other DNA
agggcgacatgacgcagtatggcggtagcattgtccagggttcagccggggtgcgcatcggtgcccccaccggtg

SEQ ID NO: 403987 - DNA, 75 bp, synthetic construct
  source 1..75: mol_type = other DNA
actgtgtctatctgacatcaacacggcatccggttgatgctgaactgctgtgcgagtttaaagaagagcacagtc

SEQ ID NO: 403988 - DNA, 75 bp, synthetic construct
  source 1..75: mol_type = other DNA
tgttgcgaaacgccagttgccagcgtcgacccccggctgcttgaggcgctttccgctgtcgctcccaccttagag

SEQ ID NO: 403989 - DNA, 75 bp, synthetic construct
  source 1..75: mol_type = other DNA
gaagccctctatcagaactgccccctgcccctgcatacagtatcgctcatctcaggcagctggcgctggactcca

SEQ ID NO: 403990 - DNA, 75 bp, synthetic construct
  source 1..75: mol_type = other DNA
gagctgctgtgcgattacgcgcctgctcgccgttttggcaaagcgggaatggaattatttgatttacgcctgcac

SEQ ID NO: 403991 - DNA, 75 bp, synthetic construct
  source 1..75: mol_type = other DNA
cgggagtgttcgttgataatcctcgaatctctgcggttaatggggctctttggactataaaagttgagatcctat

SEQ ID NO: 403992 - DNA, 75 bp, synthetic construct
  source 1..75: mol_type = other DNA
gaacggcacggtctgtacctgtacagtttacggagacacacaacgttttcactggcgggtggattactgcacaaa

SEQ ID NO: 403993 - DNA, 75 bp, synthetic construct
  source 1..75: mol_type = other DNA
gttgtgatggggtgtaaatctgcgaaagatcgcacgatatccattgtccttggcaactcgatgttgcaaacactc

SEQ ID NO: 403994 - DNA, 75 bp, synthetic construct
  source 1..75: mol_type = other DNA
atggcgatagtattattcctgtttttatcattgatttacatggtgatgtttatgcaactgattaatgtcaaacga

SEQ ID NO: 403995 - DNA, 75 bp, synthetic construct
  source 1..75: mol_type = other DNA
acattttgtttttaaatgaaaataacgattcttatctttttaagtattcgcttatttcctggcgatctcctacag

SEQ ID NO: 403996 - DNA, 75 bp, synthetic construct
  source 1..75: mol_type = other DNA
tacaaaagaagtgtggtgtaaatatggtaaaataccagggcaaggggatagcgtaaacctttttttgttggtgaa

SEQ ID NO: 403997 - DNA, 75 bp, synthetic construct
  source 1..75: mol_type = other DNA
gcatttaatcgacctacagaaattggctcaggaataggtgttgctatagcattatttctaccgttcatggtattt

SEQ ID NO: 403998 - DNA, 75 bp, synthetic construct
  source 1..75: mol_type = other DNA
tttaacgcgggaattgaagaagcgatccgcacccatctcgcctggagcgaacggatttcagaagagatggatctg

SEQ ID NO: 403999 - DNA, 75 bp, synthetic construct
  source 1..75: mol_type = other DNA
tatgtaactggtatcctgaacatggaagccatttagtctcgcctgatcatttcttagagtttatcaatttaaaac

SEQ ID NO: 404000 - DNA, 75 bp, synthetic construct
  source 1..75: mol_type = other DNA
ccagtgtttccactccctgcgtggtcacttcatcacctgcttagaccgggcaggtgtaccagaacagcgcatagg

SEQ ID NO: 404001 - DNA, 75 bp, synthetic construct
  source 1..75: mol_type = other DNA
attttaaaattgaagcggtaaaacaagttgttgaccgcggtcattctgcttccagcgttgcaacacttcgtcatg

SEQ ID NO: 404002 - DNA, 75 bp, synthetic construct
  source 1..75: mol_type = other DNA
ctggactgcaccatcaaggaagtccagttcaccgccggtcagaaacaggatattgatgtgaccacgctctgctcc

SEQ ID NO: 404003 - DNA, 75 bp, synthetic construct
  source 1..75: mol_type = other DNA
gtagcccactggtggtacagcgcattacgccggttgttgaacgccagttgatgctggtgcgcaggaagaaccgtt

SEQ ID NO: 404004 - DNA, 75 bp, synthetic construct
  source 1..75: mol_type = other DNA
actgccatagaagattgtcttaatgggcaggtgtttcatcgaactttaatgacatatgtttctacttatcctcag

SEQ ID NO: 404005 - DNA, 75 bp, synthetic construct
  source 1..75: mol_type = other DNA
cataattcatcaggaataaaaaacggaattgaagtcaggaaaatacgaacagttaccgataaaacgggctttgtt

SEQ ID NO: 404006 - DNA, 75 bp, synthetic construct
  source 1..75: mol_type = other DNA
tgcagcgccgggtggcatggataaacccggaagagagtaaatcaaaccgcgcaattggcgttgcgctgaatgata

SEQ ID NO: 404007 - DNA, 75 bp, synthetic construct
  source 1..75: mol_type = other DNA
aacttcttcacaaccatccaactggtgatggccggtaatgatttagaagggcttcgatatggtgtaattgaaacg

SEQ ID NO: 404008 - DNA, 75 bp, synthetic construct
  source 1..75: mol_type = other DNA
agcatgaggaaggggaggaactcgttgcgatttggtgtcgatctgtcgatgccacccacgatttttatcagcaga

SEQ ID NO: 404009 - DNA, 75 bp, synthetic construct
  source 1..75: mol_type = other DNA
tttcgacgattaccttattccagagaaagactttgataagctctcgcctgcattaccactacctgtttctgctga

SEQ ID NO: 404010 - DNA, 75 bp, synthetic construct
  source 1..75: mol_type = other DNA
cgctggcgcggggaacaccgcctgcacgcgacatcaaaatagtgattgctcggtttatccccgctggcgcgggga

SEQ ID NO: 404011 - DNA, 75 bp, synthetic construct
  source 1..75: mol_type = other DNA
tatttatatcattcaccattattatctttgctggcgctggattcgcagatagacatcaaagaattcgagatacaa

SEQ ID NO: 404012 - DNA, 75 bp, synthetic construct
  source 1..75: mol_type = other DNA
tatttatattatttaccattattatccttgctggtactggatttgcagatagacatcaaagaatccgagatacaa

SEQ ID NO: 404013 - DNA, 75 bp, synthetic construct
  source 1..75: mol_type = other DNA
atgtggtttattttccgaattccaagcgcagccctactttcttgtgcgtatttgcgtgttttgcgcagttttgaa

SEQ ID NO: 404014 - DNA, 75 bp, synthetic construct
  source 1..75: mol_type = other DNA
aagcgcatcacatcatgaacgtggtgaaagcagcacatcagcttacatggcaacaagcgccgaaatcatcagaac

SEQ ID NO: 404015 - DNA, 75 bp, synthetic construct
  source 1..75: mol_type = other DNA
cgagctgccattagcaatagtggaaccgtgctcaccatcaactattcgtcaatcaaatatgcttatccaaaaaat

SEQ ID NO: 404016 - DNA, 75 bp, synthetic construct
  source 1..75: mol_type = other DNA
aacgtcgggccgccgaatggggggttttgttcgccgcgctgaccacgctgtgcatgttgtcgctgatctccgcgt

SEQ ID NO: 404017 - DNA, 75 bp, synthetic construct
  source 1..75: mol_type = other DNA
tcaccacccacagcctttatgcttggataaagaagtacggtccggattcttccactaataaagaacagtcagatt

SEQ ID NO: 404018 - DNA, 75 bp, synthetic construct
  source 1..75: mol_type = other DNA
gtttattcacaggagaagggaatgatttaatcgttacaggaagagattatggacgtaataccagtgcaggataca

SEQ ID NO: 404019 - DNA, 75 bp, synthetic construct
  source 1..75: mol_type = other DNA
aagataatgtactgccaccgcgggttagatcgaatggttacagttacgtgtggaaaccagaaggaagtacaagaa

SEQ ID NO: 404020 - DNA, 75 bp, synthetic construct
  source 1..75: mol_type = other DNA
agatacgcgcgcgtatgcactcccgccgcggaccggggatctggcaggattatcgcgatatccacaaactgttta

SEQ ID NO: 404021 - DNA, 75 bp, synthetic construct
  source 1..75: mol_type = other DNA
ctcattcaccatgtgacctggcttggcttcagccttgctgcgcttgcatgggtcttctggttaaccggtctgtaa

SEQ ID NO: 404022 - DNA, 75 bp, synthetic construct
  source 1..75: mol_type = other DNA
gggagatcaggtttggataaatagcatcatgctcgggctcttcatgggtgcaacggtttggctgctggacgcatt

SEQ ID NO: 404023 - DNA, 75 bp, synthetic construct
  source 1..75: mol_type = other DNA
caacgacgttgttcaaagtgcaatacgcagcatcatgcgctggacgccagatattgtcggatatgcggaaattca

SEQ ID NO: 404024 - DNA, 75 bp, synthetic construct
  source 1..75: mol_type = other DNA
tcgcattgttaagtgttggcgttgttttcatagaatccggtattggatcgcaatttcagttaacctacgacgaat

SEQ ID NO: 404025 - DNA, 75 bp, synthetic construct
  source 1..75: mol_type = other DNA
ttgatgggtatatcataacagatttcataggagacggagggaacggagatgtgtatcttgtaacttcaagttctg

SEQ ID NO: 404026 - DNA, 75 bp, synthetic construct
  source 1..75: mol_type = other DNA
tttgaagagaagtatggctcccagctggagctgatatttcgttttatcgatcgtgcgctggcaataggcgtactg

SEQ ID NO: 404027 - DNA, 75 bp, synthetic construct
  source 1..75: mol_type = other DNA
aaatgggttaaatcgcataagatagatgctcatattattacatttgtagcaaagatgccgtatattgattcaata

SEQ ID NO: 404028 - DNA, 75 bp, synthetic construct
  source 1..75: mol_type = other DNA
aaggaactggacgcatcacccttagcactcttcatagtgcaaaaggccgagaatttgatgtagccataatgtttg

SEQ ID NO: 404029 - DNA, 75 bp, synthetic construct
  source 1..75: mol_type = other DNA
gccctgattgaagaggtcgctgacccccgaggcgtagcctgtattacttacaacaatgaatgcgcttctgaactt

SEQ ID NO: 404030 - DNA, 75 bp, synthetic construct
  source 1..75: mol_type = other DNA
ttgttactgctgaaacatttaatggtaaattaaagcccgtttttgacgaaagcgtaccggttgttattagttttg

SEQ ID NO: 404031 - DNA, 75 bp, synthetic construct
  source 1..75: mol_type = other DNA
aaaaaagcgctgatgataataaatcctgatgcatattattgggggctaataaatgatgaagatgctctgaaagaa

SEQ ID NO: 404032 - DNA, 75 bp, synthetic construct
  source 1..75: mol_type = other DNA
aatatataaacaaaagcataaaggaacaacagtcattttttttattttgtatctgtcatattaattatatcagta

SEQ ID NO: 404033 - DNA, 75 bp, synthetic construct
  source 1..75: mol_type = other DNA
cctgctatcagtggcgacttgtggagttgcttttatttggttgcagatatgcaaatttcgtatgtttgtggcagc

SEQ ID NO: 404034 - DNA, 75 bp, synthetic construct
  source 1..75: mol_type = other DNA
gtatacacgccggcgcgaaaaattcacctgtaccactgcgaccatcgcggcctgccgctggcccttatcagcacg

SEQ ID NO: 404035 - DNA, 75 bp, synthetic construct
  source 1..75: mol_type = other DNA
gatgtggctaaatctctctttaatattgatgagaaatatattgatgtggtatacatctctcatttggattcagac

SEQ ID NO: 404036 - DNA, 75 bp, synthetic construct
  source 1..75: mol_type = other DNA
taaacaagatttcaccttctacagataacgaaaatgatgatgacattaataatcaggaaatggcatctgacgatg

SEQ ID NO: 404037 - DNA, 75 bp, synthetic construct
  source 1..75: mol_type = other DNA
tatttttgattaatgactttattatcgaagagcataccaagcgatacccagtaacgaaagctatgtcttgcgaga

SEQ ID NO: 404038 - DNA, 75 bp, synthetic construct
  source 1..75: mol_type = other DNA
gtcaccaccacccagcagtatgaccgtcgcggggagcaacgcctgcaggacgcgcgggatagactcaaccttatt

SEQ ID NO: 404039 - DNA, 75 bp, synthetic construct
  source 1..75: mol_type = other DNA
ttcggtagtatatactcttgcagatcggatcaatagtccgcaagaactgaggaatattctattttcccacctacg

SEQ ID NO: 404040 - DNA, 75 bp, synthetic construct
  source 1..75: mol_type = other DNA
ttaagtattaatggtatgtttggactaaatgacgcaagagaaagcataaaaaagttatacaagagcaaaggaaaa

SEQ ID NO: 404041 - DNA, 75 bp, synthetic construct
  source 1..75: mol_type = other DNA
agcgcacagggtgagctgtgggaataccgctacgacgccagcggcaggcggacggaaaaatgctgccggcaaaaa

SEQ ID NO: 404042 - DNA, 75 bp, synthetic construct
  source 1..75: mol_type = other DNA
acctggtgtttaacggctttgagctgataagccagcagttcagccgggtacggcagccgcacccgtccgtggcac

SEQ ID NO: 404043 - DNA, 75 bp, synthetic construct
  source 1..75: mol_type = other DNA
ttgcgtgaacagctcgatagcttaattaattctcatcaatcagcagaaaatgttgccattacggaggcagtataa

SEQ ID NO: 404044 - DNA, 75 bp, synthetic construct
  source 1..75: mol_type = other DNA
agtttgaaaaatggttaaagtctctaaaagacaaaatagcaaaagctaaaatattgatgcgcctcgaacgcatgg

SEQ ID NO: 404045 - DNA, 75 bp, synthetic construct
  source 1..75: mol_type = other DNA
gttttgatgcagatggtaataatctgggtggatatgatttttacactgatgcggttgttgatacacactggcgtg

SEQ ID NO: 404046 - DNA, 75 bp, synthetic construct
  source 1..75: mol_type = other DNA
taaactatagtggttttgtctattacaacaacaccaatggtgatttcgatcagtcctttaacggcgataccgtta

SEQ ID NO: 404047 - DNA, 75 bp, synthetic construct
  source 1..75: mol_type = other DNA
gaattcattcactgagatgagtgatgttcatacccgtgcacattttagtgcgtcgacctatgcgcgcttgttcat

SEQ ID NO: 404048 - DNA, 75 bp, synthetic construct
  source 1..75: mol_type = other DNA
gatgtaacggaagctattcgctttggttatggaacgattaagaaaatcattaattacagactccttcccatgatc

SEQ ID NO: 404049 - DNA, 75 bp, synthetic construct
  source 1..75: mol_type = other DNA
cctttctcgcctgttgtatacagatgacgatgatgagatcaacactcgcctgaaccaccaaatcagggatacaga

SEQ ID NO: 404050 - DNA, 75 bp, synthetic construct
  source 1..75: mol_type = other DNA
tttaatactgattccaaacaaacaattgatgtcagattattgaatcaaaatatagacatgatattgggaggcgtg

SEQ ID NO: 404051 - DNA, 75 bp, synthetic construct
  source 1..75: mol_type = other DNA
tagaatgggtcgcacataaaattttagatttaagagattctaaagtagttggccgagccgggagtcaagctttga

SEQ ID NO: 404052 - DNA, 75 bp, synthetic construct
  source 1..75: mol_type = other DNA
aacccgcttgaatctgttcgttttggttatggtaccatcaagaaactaatcaattatcggatcatacctatgctg

SEQ ID NO: 404053 - DNA, 75 bp, synthetic construct
  source 1..75: mol_type = other DNA
agaagatcgactttcacgcctcctttacaccgacgatgatgatgaagaacagacccgcctcaatcaccaaattcg

SEQ ID NO: 404054 - DNA, 75 bp, synthetic construct
  source 1..75: mol_type = other DNA
atcgcttttgtaggtcacggtgatgcagatgcattttataatatcaacttgcttggcacccgtaatttattacag

SEQ ID NO: 404055 - DNA, 75 bp, synthetic construct
  source 1..75: mol_type = other DNA
atcgcttttgtaggtcacggtgatgcggatgcattttataatatcaacttgcttggcacccgtaatttattgcag

SEQ ID NO: 404056 - DNA, 75 bp, synthetic construct
  source 1..75: mol_type = other DNA
gcgaaaacaccgtcgtcagactaaacacctcatgggatacacaacatggaacaggcgttgccacaggcatgtcca

SEQ ID NO: 404057 - DNA, 75 bp, synthetic construct
  source 1..75: mol_type = other DNA
cgcggcctgtataacacttaagaatctggcacaactgcatattaagcagccagaatacccaattacactgcttgc

SEQ ID NO: 404058 - DNA, 75 bp, synthetic construct
  source 1..75: mol_type = other DNA
gtcggtccgttgaatcttgcgctacgtgaaaatctccctctggatatcgtaatgactctggcgaaaagagattgg

SEQ ID NO: 404059 - DNA, 75 bp, synthetic construct
  source 1..75: mol_type = other DNA
aaaattatgttggtgtacgtaaaggttatataaatttgcttaaatttacttcatttattggaaagttagaaagaa

SEQ ID NO: 404060 - DNA, 75 bp, synthetic construct
  source 1..75: mol_type = other DNA
accaaggaagaaatgcagttgtcgaatgttatgtctcaaaaaccttccgataacgaagatgaaaatgctgaggat

SEQ ID NO: 404061 - DNA, 75 bp, synthetic construct
  source 1..75: mol_type = other DNA
atttacatgatatatctcctaatcttgctgccgggttaatcccaaagtttaaagtggaacctaagtgggaaaata

SEQ ID NO: 404062 - DNA, 75 bp, synthetic construct
  source 1..75: mol_type = other DNA
catcaagcgaacgcttgcagatcctacgcaactatggcgaaccccatgatcgcctcgtacgtgaaaaagaacgtc

SEQ ID NO: 404063 - DNA, 75 bp, synthetic construct
  source 1..75: mol_type = other DNA
cggctattatcgtgtagattcatataaccccgtaacaggtgagatagtgtctcgtaagttcacacaatttgctga

SEQ ID NO: 404064 - DNA, 75 bp, synthetic construct
  source 1..75: mol_type = other DNA
gttatgaattctttagagagttttcacgttatgaatattgccttaaggcatgtggacttcatcataaaataaaag

SEQ ID NO: 404065 - DNA, 75 bp, synthetic construct
  source 1..75: mol_type = other DNA
taacccgaacactcgatgatggtttagaggttaaaaatggtaatgatgatgtgctaaagaacatagcgaatgatc

SEQ ID NO: 404066 - DNA, 75 bp, synthetic construct
  source 1..75: mol_type = other DNA
ggtagtggtgttagacgtttagtcctgattagtttttttaaagcggaagcagaaagattgcaaaaagaattccca

SEQ ID NO: 404067 - DNA, 75 bp, synthetic construct
  source 1..75: mol_type = other DNA
gagtggctatcaggctggataatggcggagccaccgacaatgcaggggcgttctgctatggcacagcgacgcgta

SEQ ID NO: 404068 - DNA, 75 bp, synthetic construct
  source 1..75: mol_type = other DNA
gaattgccgcctatcccctcgacagttaatacgttaaatctggaaaacaattgtctaacttgtcttgactttgct

SEQ ID NO: 404069 - DNA, 75 bp, synthetic construct
  source 1..75: mol_type = other DNA
caacccagatgaattaactgaaagagaggtgttgtcatttggaataaaggtttcaagattaagagagcgctttat

SEQ ID NO: 404070 - DNA, 75 bp, synthetic construct
  source 1..75: mol_type = other DNA
taatgcacagtcagattccttggaagatcaagacgaataaaaaaacaatgagattacagctgtttctgaatttct

SEQ ID NO: 404071 - DNA, 75 bp, synthetic construct
  source 1..75: mol_type = other DNA
tcattcgtgagggcgaagagaaaatgtcgtttaccagcaaaaaggaagccgatgcttatgacaaaatgcttgata

SEQ ID NO: 404072 - DNA, 75 bp, synthetic construct
  source 1..75: mol_type = other DNA
aaagagttgaaaatgagttaagacttgcatgtgaatatgatgattttaagagaacacctatgcatagtaaattat

SEQ ID NO: 404073 - DNA, 75 bp, synthetic construct
  source 1..75: mol_type = other DNA
gcagcagcgaaaattacactcatctttgtgccccaaaaggacttgtacgagtaggtccggacgacggtgttgata

SEQ ID NO: 404074 - DNA, 75 bp, synthetic construct
  source 1..75: mol_type = other DNA
tgcaggattgctgggtgctttagggttgttcatcatggctgcggggcttttttccctggttctgctgcccgcgtc

SEQ ID NO: 404075 - DNA, 75 bp, synthetic construct
  source 1..75: mol_type = other DNA
gcccctaaagacaaaaaagagtggcatgagtggattactcaccaatacgaatggcgcatgatccgcgaatgtcgc

SEQ ID NO: 404076 - DNA, 75 bp, synthetic construct
  source 1..75: mol_type = other DNA
gcatccactcgatatctggagcgacatcgcgcgggaaacgtctttgcttcagcggggttgccaaccagcgggtca

SEQ ID NO: 404077 - DNA, 75 bp, synthetic construct
  source 1..75: mol_type = other DNA
gaaaaactatggttattatcccgacaattttctgcatgaccaacctgaaatagacgttattcgtcctgagttttc

SEQ ID NO: 404078 - DNA, 75 bp, synthetic construct
  source 1..75: mol_type = other DNA
ttactgcgttatttattcccaccggttggctgcctaacgaacatttcgccaaaattgtcggcccgatgccctggt

SEQ ID NO: 404079 - DNA, 75 bp, synthetic construct
  source 1..75: mol_type = other DNA
gatgtataaaatcctctaatgacgaaacttatgcaataacaagtctccacgataatatactgattattcttttac

SEQ ID NO: 404080 - DNA, 75 bp, synthetic construct
  source 1..75: mol_type = other DNA
attttttgtatgaagccggactggtggattacgacgaaaataataacaggttgtccagacagtggtttcttgtct

SEQ ID NO: 404081 - DNA, 75 bp, synthetic construct
  source 1..75: mol_type = other DNA
ctgaacgaattgagccaaggagtgatgtctcctttgtatacggtttttcgttttaataaaggcttgttgaaattt

SEQ ID NO: 404082 - DNA, 75 bp, synthetic construct
  source 1..75: mol_type = other DNA
ggcgtcctgtcttcacccgatgacctgaggtgtactggcaatagcggacactaccatttgttcttttttaagcag

SEQ ID NO: 404083 - DNA, 75 bp, synthetic construct
  source 1..75: mol_type = other DNA
attccttattccttaatcaatgctggaatagtagtccaggacctgatccgcaaaacagcgatgaggttcgttatt

SEQ ID NO: 404084 - DNA, 75 bp, synthetic construct
  source 1..75: mol_type = other DNA
attccagtggtacaatgcacaaggttttagattgtctctgcagacagtagtagatttgaaaactttaggtgcatt

SEQ ID NO: 404085 - DNA, 75 bp, synthetic construct
  source 1..75: mol_type = other DNA
aattttcttgttgaaaatccacattatgaacatgttgattttgttctctatatatcagaactacgtagatcaaca

SEQ ID NO: 404086 - DNA, 75 bp, synthetic construct
  source 1..75: mol_type = other DNA
ctgaaaacagtatggatatccgcgccggacgggatgtgaacatggctgcggagtccacaggcgcaggtgaccacg

SEQ ID NO: 404087 - DNA, 75 bp, synthetic construct
  source 1..75: mol_type = other DNA
acggactcactgtttatgggcgcagccggggatatcagtatcaccggtgccgccgtttctgccggtgacagcgtg

SEQ ID NO: 404088 - DNA, 75 bp, synthetic construct
  source 1..75: mol_type = other DNA
cacagggagaactgaatgcgttgaaggccgcgaaggaagcaaccagcgaaacacttcctgctaatgcaacagaga

SEQ ID NO: 404089 - DNA, 75 bp, synthetic construct
  source 1..75: mol_type = other DNA
tgtatcagttacggcgatgttcatcagtcaatacgctggaaaaattattcataaaaacagagacagtttatcaaa

SEQ ID NO: 404090 - DNA, 75 bp, synthetic construct
  source 1..75: mol_type = other DNA
attagaactcaatatcagactgttcaggacaaggttctggctgattatttgaatacacctgttggagctgaaagt

SEQ ID NO: 404091 - DNA, 75 bp, synthetic construct
  source 1..75: mol_type = other DNA
ctgccgctctccagaacgttgagaacatgaaaacacagtctaatctgaccaatcagcagattttgaccgaggcaa

SEQ ID NO: 404092 - DNA, 75 bp, synthetic construct
  source 1..75: mol_type = other DNA
gcccgtatttcccgggattaataaattcaaatgataacgattattcgataaatggtggttttggcgttggtgcag

SEQ ID NO: 404093 - DNA, 75 bp, synthetic construct
  source 1..75: mol_type = other DNA
ctgagtctgggggccaataccagtttattggggcgaagttattccggtggtgctgcgggtggcggaggcggtggt

SEQ ID NO: 404094 - DNA, 75 bp, synthetic construct
  source 1..75: mol_type = other DNA
tacattatttcctggcgggtatgccgctctgaaatcgagctaatcaacttcgggaatctgcgtggccttgacccc

SEQ ID NO: 404095 - DNA, 75 bp, synthetic construct
  source 1..75: mol_type = other DNA
aaccgtcaccatcaacagtggtcgggatacggtactgaacggtgctcaggtcaacggcaacaggattatcgccga

SEQ ID NO: 404096 - DNA, 75 bp, synthetic construct
  source 1..75: mol_type = other DNA
ccgcaaacacacaaaaaacaacgggcaggaacagcagcagtggcggtggcgtgggtgtcagtatcggtgcaggta

SEQ ID NO: 404097 - DNA, 75 bp, synthetic construct
  source 1..75: mol_type = other DNA
gggagtccgtcaccatcaacggacagacagtcatggttccgaaactgtatctgtcgccggaagatatcaccctgc

SEQ ID NO: 404098 - DNA, 75 bp, synthetic construct
  source 1..75: mol_type = other DNA
aaccccccgcgccggtggggagcctcggccccggctggaaaatgcctgcggatatccgcttacagctgcgcgata

SEQ ID NO: 404099 - DNA, 75 bp, synthetic construct
  source 1..75: mol_type = other DNA
tcccgccaaagtcgtgggagaaattcgaagatttgactcgtgcattgtttgccgcagtgtggaggtctcccctta

SEQ ID NO: 404100 - DNA, 75 bp, synthetic construct
  source 1..75: mol_type = other DNA
tcaccgtgctcaccggtaatgacaatgtcaatttgcaacgtgccggaatcgatttggcaatctactttgatgacg

SEQ ID NO: 404101 - DNA, 75 bp, synthetic construct
  source 1..75: mol_type = other DNA
ataatattgctggttttgctgtgcccacattagttgcagtccctgctttggggattcttgccaggctgcttggac

SEQ ID NO: 404102 - DNA, 75 bp, synthetic construct
  source 1..75: mol_type = other DNA
atgaacaagctatctatgggggtgtttcgctgttcaagtgtcagcgaaatattgaaatacattagggcaataaca

SEQ ID NO: 404103 - DNA, 75 bp, synthetic construct
  source 1..75: mol_type = other DNA
cgtaccagcagcgagactcgcaattcaggagatgattgcgcgcaatgagccgcgtatcgtcaacatgtcgacgca

SEQ ID NO: 404104 - DNA, 75 bp, synthetic construct
  source 1..75: mol_type = other DNA
ggaacgccacaggcaacacccggcataaattttggtgtgcaatgcaaagggaagaacgaaggttatggggccaag

SEQ ID NO: 404105 - DNA, 75 bp, synthetic construct
  source 1..75: mol_type = other DNA
tttcttcttacgtcgctcatctgaaattccagatgcggatgaacctccaggaaataaagatgatggaaagaaaca

SEQ ID NO: 404106 - DNA, 75 bp, synthetic construct
  source 1..75: mol_type = other DNA
ggttggaagagaagcaacgtagttttgaactgataactcaaaaagaaagtaactattcgcaaattgatgataata

SEQ ID NO: 404107 - DNA, 75 bp, synthetic construct
  source 1..75: mol_type = other DNA
tatgatggtgagggcttcctttctacatttctctttggcggtgcgagtgttattaaaattgactctctgaaaagt

SEQ ID NO: 404108 - DNA, 75 bp, synthetic construct
  source 1..75: mol_type = other DNA
aaggtatacaacgcttaacgatattaccaagtgcgttgtccagagctatttttccaagattaagttcagaattgc

SEQ ID NO: 404109 - DNA, 75 bp, synthetic construct
  source 1..75: mol_type = other DNA
ctggaaagtgccagcagacctgatggcatccgagacgggagcctatgaggtcattaagctgattacgcgtctgga

SEQ ID NO: 404110 - DNA, 75 bp, synthetic construct
  source 1..75: mol_type = other DNA
tgaacgcgctgtagagctgtttgaaggtgacaaagaagcggcgcacaaatggctgaacgaagcgaaccgtggtct

SEQ ID NO: 404111 - DNA, 75 bp, synthetic construct
  source 1..75: mol_type = other DNA
tggggacaactgggattaaccatagtactaacatataatctgtatgaattaggatatatctacaatgatgcagaa

SEQ ID NO: 404112 - DNA, 75 bp, synthetic construct
  source 1..75: mol_type = other DNA
tcaggtgggcggtgcaacaagcggtctggtggaaacccttcaggggatgatcaccagtatcacgccggatgcgcg

SEQ ID NO: 404113 - DNA, 75 bp, synthetic construct
  source 1..75: mol_type = other DNA
acaccgtttcatggacgtttcgctcaccttcgggacacgggttgtcagggatatcgatatcggataccggccgta

SEQ ID NO: 404114 - DNA, 75 bp, synthetic construct
  source 1..75: mol_type = other DNA
gtctgttgttgcagagcttggcgatgattcaggctggcattttttcagccagaggaatacagataacagcatcac

SEQ ID NO: 404115 - DNA, 75 bp, synthetic construct
  source 1..75: mol_type = other DNA
agacgctggatggtcgtgaactgtttgccattgataccgagcgcttttcccgtcgggtaaatggtgtcgatatgt

SEQ ID NO: 404116 - DNA, 75 bp, synthetic construct
  source 1..75: mol_type = other DNA
tactgctcgcggtactgttgaggaaattgaagggtttattcaggctgtcacgccggatgcgcggggtaaggataa

SEQ ID NO: 404117 - DNA, 75 bp, synthetic construct
  source 1..75: mol_type = other DNA
gttattaccgtcaggctgttgacggtgtggaaaccatctgcattattccggaggagtttgtacgtcgtattaatg

SEQ ID NO: 404118 - DNA, 75 bp, synthetic construct
  source 1..75: mol_type = other DNA
caaaaaacagacaaggcgtaaaacgcagcctgcttacagatgtcaacgggcttcccctgtcgctggttgttgcag

SEQ ID NO: 404119 - DNA, 75 bp, synthetic construct
  source 1..75: mol_type = other DNA
cctatacatatattgatgatcgatatttaagatatacatttgggtttttaaatcctaatggattagggatgtttc

SEQ ID NO: 404120 - DNA, 75 bp, synthetic construct
  source 1..75: mol_type = other DNA
ttaaatagcatttctgagcttagtctatttataatggtaatgtctttatactactttgtttatcggcttatgata

SEQ ID NO: 404121 - DNA, 75 bp, synthetic construct
  source 1..75: mol_type = other DNA
ccaaatcccaacccaaatccgaagccggatccaaaaccagacccaaaaccggatccgaaaccagacccgactacc

SEQ ID NO: 404122 - DNA, 75 bp, synthetic construct
  source 1..75: mol_type = other DNA
ccagaccagaacaggccgcccagcgctgtcaccagtaagccggcctccagtgcatttcagccgctcacggggcgc

SEQ ID NO: 404123 - DNA, 75 bp, synthetic construct
  source 1..75: mol_type = other DNA
cagacggggcgtccgggacaaaaactcaggctggttgccggtcatgtaccagcccccacatactatatttgcgtc

SEQ ID NO: 404124 - DNA, 75 bp, synthetic construct
  source 1..75: mol_type = other DNA
gtaacaccggtgcaagtctcagacagtgtttatcttggcaacaaaagttcagtcagtacgcatggcgatccgtta

SEQ ID NO: 404125 - DNA, 75 bp, synthetic construct
  source 1..75: mol_type = other DNA
atgattatgcccgggcattaatattgtggcagcatgcatatcatgctgccacgctgactctcaacaaaaacctgg

SEQ ID NO: 404126 - DNA, 75 bp, synthetic construct
  source 1..75: mol_type = other DNA
ggttataaaaccacgctcttccatacctttaaagtcaataccagtatgttgacctcgcgtccggaaattcgtttc

SEQ ID NO: 404127 - DNA, 75 bp, synthetic construct
  source 1..75: mol_type = other DNA
cggcccgtgaatatcgccgcaccaataacaatgtctggatgatcaccattacgccatcctgtgccagcgttctgg

SEQ ID NO: 404128 - DNA, 75 bp, synthetic construct
  source 1..75: mol_type = other DNA
ctgaagcaaagaaaatctctgatgaactgtctaaagccttaggagagaaaaacaataatggccagggtggacttc

SEQ ID NO: 404129 - DNA, 75 bp, synthetic construct
  source 1..75: mol_type = other DNA
aaggttgctgaatatttggataaccttaataaaaaattagagagacaagtttcagttgatgtacaggtatactcg

SEQ ID NO: 404130 - DNA, 75 bp, synthetic construct
  source 1..75: mol_type = other DNA
aacttgccatttgtgaagatggtgaggaagtctctggccttgggccagcctatgcttctctggaaaacagacagg

SEQ ID NO: 404131 - DNA, 75 bp, synthetic construct
  source 1..75: mol_type = other DNA
agttacagagccagcacctgaacagcctggtgtatgaccgtgactacgggtggaatgacaacggcgacctggtgc

SEQ ID NO: 404132 - DNA, 75 bp, synthetic construct
  source 1..75: mol_type = other DNA
ggggagcttcgcgccgctcatccgcatcgaaacagacaacggtgagcgggagaaagcgcagcgccgcagcctggc

SEQ ID NO: 404133 - DNA, 75 bp, synthetic construct
  source 1..75: mol_type = other DNA
aaaacgaactggatggcttcacctttgaagacaataaagacgaccagtttgctgtcggtgcccaggctgaaatct

SEQ ID NO: 404134 - DNA, 75 bp, synthetic construct
  source 1..75: mol_type = other DNA
cagtctacttccatacctttaaagtcaataccagtatgttgacctcgcgtccggaaattcgtttctacgccacgt

SEQ ID NO: 404135 - DNA, 75 bp, synthetic construct
  source 1..75: mol_type = other DNA
catagagaaaacgggcctcatgcccgatgttttgttcgcgtaccacgctgaggatgtacagcaggagcagggcta

SEQ ID NO: 404136 - DNA, 75 bp, synthetic construct
  source 1..75: mol_type = other DNA
gggaatcaccgtgtttattcaaacatgaccggtggtaacagaacggttgaatttgcccgcctgttttcccgtatt

SEQ ID NO: 404137 - DNA, 75 bp, synthetic construct
  source 1..75: mol_type = other DNA
aaagcgtttctgatggaatgcgcaagcacaggaaaaacggttatcactgcggaagaaggccggaaaattgaactc

SEQ ID NO: 404138 - DNA, 75 bp, synthetic construct
  source 1..75: mol_type = other DNA
gaaattttcatgatgggcgaagaagcaaaactggcaggtcagctggaatatcaccgcaatctgcgaaccctggct

SEQ ID NO: 404139 - DNA, 75 bp, synthetic construct
  source 1..75: mol_type = other DNA
agacaaaaacgctcgatttaggaaccgctttccactgccgggtacttgaaccggaagaattcagtaaccgcttta

SEQ ID NO: 404140 - DNA, 75 bp, synthetic construct
  source 1..75: mol_type = other DNA
agtttccgatgaaacgttaaacacttacaaaaaagtaaccttccggataatccatcatcccataacgaacgaata

SEQ ID NO: 404141 - DNA, 75 bp, synthetic construct
  source 1..75: mol_type = other DNA
gtatctagtcgatcagaaagatgttcttaccaaatcccctactgatgggattagttacgaggttaaatccaaccg

SEQ ID NO: 404142 - DNA, 75 bp, synthetic construct
  source 1..75: mol_type = other DNA
ttcaacgattcaaaacggcttattacgactaccgctatcacgttcaggatgcattctacagtgacggttatgaag

SEQ ID NO: 404143 - DNA, 75 bp, synthetic construct
  source 1..75: mol_type = other DNA
gtttgcccgtctgttttcgcgcatagcaaaacgcacggctatcaaagcgcccaaagttaacgatgtaaaagcgat

SEQ ID NO: 404144 - DNA, 75 bp, synthetic construct
  source 1..75: mol_type = other DNA
gaccatcttgatattgcggcgctggaagaacttcgtttgttacaggaatcaacccgtattggcctggtattgatg

SEQ ID NO: 404145 - DNA, 75 bp, synthetic construct
  source 1..75: mol_type = other DNA
gaaaacgagcgggaattattacagcagattgcacaaaagccaggtgcgcttcgcatcctgaaccactcgctgcgc

SEQ ID NO: 404146 - DNA, 75 bp, synthetic construct
  source 1..75: mol_type = other DNA
agaatacctcacaaatcgccaatttctggattggcgatgcagacttcgccgaacactttatttacgtttcagaaa

SEQ ID NO: 404147 - DNA, 75 bp, synthetic construct
  source 1..75: mol_type = other DNA
catagtaaacagtgagcagatgatgtttgagggaggcaaaacagaagagaatttaaaagaataccgggtagagaa

SEQ ID NO: 404148 - DNA, 75 bp, synthetic construct
  source 1..75: mol_type = other DNA
caggttgtttcggtaaatgtattcgcacttacccagcgccagctgaaaggatatccagcccggtactgcgtctgg

SEQ ID NO: 404149 - DNA, 75 bp, synthetic construct
  source 1..75: mol_type = other DNA
ctggattcatggcgtaatagttcaggccgcgtggtttgtaaaagcatcactggagcagaccgcgctatcgcgcac

SEQ ID NO: 404150 - DNA, 75 bp, synthetic construct
  source 1..75: mol_type = other DNA
ctttaatgctgatagtttcatcaggcgtggtggcaagtaagaaagcgcatgaattgtatgacagcatatacggtg

SEQ ID NO: 404151 - DNA, 75 bp, synthetic construct
  source 1..75: mol_type = other DNA
tgcaactgtaaggaccacaatcgttgccgcaacggcaaccattaacggcaaggatgtggagttgctgaaagcggg

SEQ ID NO: 404152 - DNA, 75 bp, synthetic construct
  source 1..75: mol_type = other DNA
attttttagataaaggtttttcctgcatggatagcctcttcgccaccaccaataaattaggcgaagtggccaatc

SEQ ID NO: 404153 - DNA, 75 bp, synthetic construct
  source 1..75: mol_type = other DNA
gatacggagttacctgttcaacttaattatgctagtgttatttatggtaatcatggggcaaaatatacattcctc

SEQ ID NO: 404154 - DNA, 75 bp, synthetic construct
  source 1..75: mol_type = other DNA
cgacttattgttaaccacttcaaaaactcatgggggcggggttatagttatttttaaagattttataaataactg

SEQ ID NO: 404155 - DNA, 75 bp, synthetic construct
  source 1..75: mol_type = other DNA
cagcgttatggctgctgatgataatgctatcacggatggctcagtaacatttaatggtgatgctgccaacttact

SEQ ID NO: 404156 - DNA, 75 bp, synthetic construct
  source 1..75: mol_type = other DNA
cgggaagcttcgccctgcgaccggaacatatccgcctcaacacccctggtgaactgcaggccaatggcacgatcc

SEQ ID NO: 404157 - DNA, 75 bp, synthetic construct
  source 1..75: mol_type = other DNA
atgtggataaggagtattatgaaggtgaacaacaagaaaggcgaataacctactatgaacgtgatcctaaagcaa

SEQ ID NO: 404158 - DNA, 75 bp, synthetic construct
  source 1..75: mol_type = other DNA
aggctgcgcaagccttatcttccatttctactggtaatgcccagactaatttgattaatcagcaggctttgaccg

SEQ ID NO: 404159 - DNA, 75 bp, synthetic construct
  source 1..75: mol_type = other DNA
gattgatgttggcttgcctaaatctatccggcgtcattatgggcatggatgcccgcgcctcgatgagttccgcac

SEQ ID NO: 404160 - DNA, 75 bp, synthetic construct
  source 1..75: mol_type = other DNA
cagcatccgcgagcgccgttatctggtgctggaaccgtccccggagttcgcgcaggagaagcattactttgaccg

SEQ ID NO: 404161 - DNA, 75 bp, synthetic construct
  source 1..75: mol_type = other DNA
tgaacctgcgcagcggtttgaacgttggtccgtggcgtttacgtaataacagtatctggaaccgtaccgatggca

SEQ ID NO: 404162 - DNA, 75 bp, synthetic construct
  source 1..75: mol_type = other DNA
aaatcatcacaaccgatgcgatgggttgccagaaagatattgcagagaagatacaaaaacagggaggtgattatt

SEQ ID NO: 404163 - DNA, 75 bp, synthetic construct
  source 1..75: mol_type = other DNA
ttaatgatggatatgctcggagttggagatgcaattaatattaatacaaataaaaacatccggcaggtatgctaa

SEQ ID NO: 404164 - DNA, 75 bp, synthetic construct
  source 1..75: mol_type = other DNA
tctcaaaatgtttttaatgatggatatgctcggagttggagatgcaattaatacaaataaaaatatccggcaggt

SEQ ID NO: 404165 - DNA, 75 bp, synthetic construct
  source 1..75: mol_type = other DNA
aaaaaaattaataacaaaaacaaaatcaatagcagataaacatatgaaaagggatgacattgtcttcataaactt

SEQ ID NO: 404166 - DNA, 75 bp, synthetic construct
  source 1..75: mol_type = other DNA
ttggtttattgctcagacacaaaagagcagatggtagggtttcacaaaggtaaagggttatttcaattcttttac

SEQ ID NO: 404167 - DNA, 75 bp, synthetic construct
  source 1..75: mol_type = other DNA
cggcggttactggaagaagtggtgtacaccataacggagaccgtgagaaaaacggcgatgcaaatcacctggaga

SEQ ID NO: 404168 - DNA, 75 bp, synthetic construct
  source 1..75: mol_type = other DNA
agcactgccatagctagctatggcagtggggcatcgtttgcgttcgtagctgatgcgtctgctaattattctgaa

SEQ ID NO: 404169 - DNA, 75 bp, synthetic construct
  source 1..75: mol_type = other DNA
ctcgtccaaatgggaatgcttgaacgagcccctcgcagaggaagtctgttaaaaaacgttggccagagtagtatt

SEQ ID NO: 404170 - DNA, 75 bp, synthetic construct
  source 1..75: mol_type = other DNA
accctggcattttccgctgtgcgttttagcgttcatggtattaatcgctcagatatccaccttttcctcagattt

SEQ ID NO: 404171 - DNA, 75 bp, synthetic construct
  source 1..75: mol_type = other DNA
ctgatgtgcgccagtcccccctggttgctctgatgaatacgctggcggttcaggggtgtactggccagccccggg

SEQ ID NO: 404172 - DNA, 75 bp, synthetic construct
  source 1..75: mol_type = other DNA
gtgaagaagcccttaaccggggcaaactgattaaccttgatgacgaggcgctggacgctggcttaccgctggatc

SEQ ID NO: 404173 - DNA, 75 bp, synthetic construct
  source 1..75: mol_type = other DNA
gtggtgttactgggcccacaggtcaagtacatgcagagcgatctgcaaaaacaagccgacaaatatgggatccga

SEQ ID NO: 404174 - DNA, 75 bp, synthetic construct
  source 1..75: mol_type = other DNA
atgaggagtcggggctgtactataaccgcaaccggtactatgatccgttgcaggggaggtatattacccaggatc

SEQ ID NO: 404175 - DNA, 75 bp, synthetic construct
  source 1..75: mol_type = other DNA
cgcataaaagcggcaaagaggcagggagtcagattatgaaatttgaagtgcaggatgcttcaccactattgcgac

SEQ ID NO: 404176 - DNA, 75 bp, synthetic construct
  source 1..75: mol_type = other DNA
cggaatggctggaaacccagcagcaatttaaaaaagaatggcagcaagtgggctggaaacacgtttcgatgaagt

SEQ ID NO: 404177 - DNA, 75 bp, synthetic construct
  source 1..75: mol_type = other DNA
cgatcaaactgcatgaaggctgggaaaacgagctggtgattggcgtggacgacacgtttccttgcgccactgatt

SEQ ID NO: 404178 - DNA, 75 bp, synthetic construct
  source 1..75: mol_type = other DNA
gatagtgatgtttctgtgttggcccctgttactgcctctttatgtcagttatatcggtacccgatatcagaagga

SEQ ID NO: 404179 - DNA, 75 bp, synthetic construct
  source 1..75: mol_type = other DNA
ctttatggctaaggggcggactgacactttaatgcgtttaggtattataggtacttttttacaagtaagtgcttt

SEQ ID NO: 404180 - DNA, 75 bp, synthetic construct
  source 1..75: mol_type = other DNA
tataaattatttttcaaggaacgcagatagctttattattggtaaattcatgtccgcttcaattctcgggagtta

SEQ ID NO: 404181 - DNA, 75 bp, synthetic construct
  source 1..75: mol_type = other DNA
aaattttcttgatgcaaaaatgtatggcactgacgaacattgcacgcgtcgggcaactgattacacctggatgca

SEQ ID NO: 404182 - DNA, 75 bp, synthetic construct
  source 1..75: mol_type = other DNA
gaagctgcagcaggaagggagcgaggacgggcacggcgtggtatttccggctgaactggtgcggctgctggacag

SEQ ID NO: 404183 - DNA, 75 bp, synthetic construct
  source 1..75: mol_type = other DNA
gagccgctggtcgaaagtcgctatctttacgacccgctgggccgcagggtggcaaaacgggtatggcggcgtgaa

SEQ ID NO: 404184 - DNA, 75 bp, synthetic construct
  source 1..75: mol_type = other DNA
atgagcaggcggccatcgtgcattgctggctggataaagtcctggcgattgtcgatatagcccgtattgatgcgg

SEQ ID NO: 404185 - DNA, 75 bp, synthetic construct
  source 1..75: mol_type = other DNA
acctggtggagcaaatgctcccttatgaccaagttttacagaacctccgcagcgcccgctacgtggaaagccctg

SEQ ID NO: 404186 - DNA, 75 bp, synthetic construct
  source 1..75: mol_type = other DNA
gatttcaaaagacgatcccaatgggatatgaacctgcacttacataaatcacggagccattctttcgaaaaatat

SEQ ID NO: 404187 - DNA, 75 bp, synthetic construct
  source 1..75: mol_type = other DNA
ccctacccttgttctaatggccctggaaacagattgcatttgcgagtgtcatgcttaaggtgttgttgtttagtc

SEQ ID NO: 404188 - DNA, 75 bp, synthetic construct
  source 1..75: mol_type = other DNA
atagaataagggagtatatgaatgaaggtggtggaatacgatggtttacatgggataaccccgagatatcttttg

SEQ ID NO: 404189 - DNA, 75 bp, synthetic construct
  source 1..75: mol_type = other DNA
cagctgcagcagcttatccggctgccggggcagcagtatgatgaggagtccggcctgtattacaaccgccaccgc

SEQ ID NO: 404190 - DNA, 75 bp, synthetic construct
  source 1..75: mol_type = other DNA
gtagtattgggtacaaccctgtaccaacaaaacgttatgaggctaacaaccagtttgccaatagctcacaacctc

SEQ ID NO: 404191 - DNA, 75 bp, synthetic construct
  source 1..75: mol_type = other DNA
catgataagacacaaaaaaatgcttgggttatctgatgaggatgtagcaatactcaaaatattgaaagacaaggg

SEQ ID NO: 404192 - DNA, 75 bp, synthetic construct
  source 1..75: mol_type = other DNA
aggctatatcgcggaaaagacatttaataatagcattaccaggctcagatgaattcagaatgcttgaacattttg

SEQ ID NO: 404193 - DNA, 75 bp, synthetic construct
  source 1..75: mol_type = other DNA
gtgtttaacggctttgagctgataagccagcagttcagccgggtacggcaggcgcatccgtcggtggccccgcag

SEQ ID NO: 404194 - DNA, 75 bp, synthetic construct
  source 1..75: mol_type = other DNA
cttgaaaggtttggtgagttccaaagcaatacaaaaattgtgtgtgcaagccttccaagagaatctgaagaagat

SEQ ID NO: 404195 - DNA, 75 bp, synthetic construct
  source 1..75: mol_type = other DNA
ttatctgtacggatgaacgataaagatagttcagggtacacacaactttggcttgggagaggtaatggtgcctat

SEQ ID NO: 404196 - DNA, 75 bp, synthetic construct
  source 1..75: mol_type = other DNA
cccgcaaagcgatgatgcagtggtggtcggattatctggaagcatgccgagaatcttatgcaccgccttatacaa

SEQ ID NO: 404197 - DNA, 75 bp, synthetic construct
  source 1..75: mol_type = other DNA
ggggaaggggtgattgccgggggggggggggggctttggttccgtcactattattattggtctgggcgctatgct

SEQ ID NO: 404198 - DNA, 75 bp, synthetic construct
  source 1..75: mol_type = other DNA
gccgtctggtttttcaggacggtttttccagtattagactggccccctgaatctccagacaaccagtatcactta

SEQ ID NO: 404199 - DNA, 75 bp, synthetic construct
  source 1..75: mol_type = other DNA
cttggttatgctgatgagttgcttgggcagaaactcgaaagccagaatatcaatgactatcatatcattcgatat

SEQ ID NO: 404200 - DNA, 75 bp, synthetic construct
  source 1..75: mol_type = other DNA
gcgcatcggcgcactggtacggaacaccgacctggcagctcacgagcgcgtgcgtcgtgattacgcggtactctc

SEQ ID NO: 404201 - DNA, 75 bp, synthetic construct
  source 1..75: mol_type = other DNA
gagggcgatggatgtgatggaaccattactatcattagtaaatgcaataaaagtggatgtccggtagcatggatg

SEQ ID NO: 404202 - DNA, 75 bp, synthetic construct
  source 1..75: mol_type = other DNA
ccgcaggttatgcccgcgcagcagaacaggccaaaaatgacattgatgctgcgctgaccggcactctgaaaacgg

SEQ ID NO: 404203 - DNA, 75 bp, synthetic construct
  source 1..75: mol_type = other DNA
cagcaatggtgcaggcgcaggtcgatcgcaacgatgagatttatcgccgtcagcgtgaaatgaaagaggagctga

SEQ ID NO: 404204 - DNA, 75 bp, synthetic construct
  source 1..75: mol_type = other DNA
cggcagctattggtagaacagcaggcattggaaagggggcgtcttgccgagcgcattactgcacaacataacagc

SEQ ID NO: 404205 - DNA, 75 bp, synthetic construct
  source 1..75: mol_type = other DNA
cggatgtggcgcagggctctatcaatccattacttcattacatactgcacggaaaggcagaacagcgtcattgcc

SEQ ID NO: 404206 - DNA, 75 bp, synthetic construct
  source 1..75: mol_type = other DNA
attcaagctaactaattcattagatatgacttttgattatggattaaaaatatgtaacactgaatatacagaaga

SEQ ID NO: 404207 - DNA, 75 bp, synthetic construct
  source 1..75: mol_type = other DNA
cttactttttacggcattaacggccccatttatcacacccgctactgctactggcccatatccagactgactggg

SEQ ID NO: 404208 - DNA, 75 bp, synthetic construct
  source 1..75: mol_type = other DNA
agagttcagggacttttgaaagtgatggtggtgggggaaggattcgaaccttcgaagtcgatgacggcagattta

SEQ ID NO: 404209 - DNA, 75 bp, synthetic construct
  source 1..75: mol_type = other DNA
gcttttctgtatgaagatgttatccgttttgacactaagagtgatttcctggcctgggtaaggaatgcgctgcca

SEQ ID NO: 404210 - DNA, 75 bp, synthetic construct
  source 1..75: mol_type = other DNA
tatggaaacgattgttctacgctcctggacagaggcgacgctactttgaacaaggagagcgttcatttagtatta

SEQ ID NO: 404211 - DNA, 75 bp, synthetic construct
  source 1..75: mol_type = other DNA
cgtgcacaggcagccgcaggttatgcccgcgcagcagaacaggccaaaaatgacatttatgctgcgctgaccggc

SEQ ID NO: 404212 - DNA, 75 bp, synthetic construct
  source 1..75: mol_type = other DNA
gtgaatttgctgcaacaacaggctaatgcattgcagcaacagcttggcgatgaggagcaaaccaaaaaacagctg

SEQ ID NO: 404213 - DNA, 75 bp, synthetic construct
  source 1..75: mol_type = other DNA
tgagggggcttgggaagcattcaacagagactaccagcccttaggggaggcttttttcttcaaaagagcactaac

SEQ ID NO: 404214 - DNA, 75 bp, synthetic construct
  source 1..75: mol_type = other DNA
atgtttcatgtggataatccgacgggtgtaccggtaatgccacctgtcgcggctgaattaagcaaaacaacgctt

SEQ ID NO: 404215 - DNA, 75 bp, synthetic construct
  source 1..75: mol_type = other DNA
gatggcggtgaaagtgtggactgggccaatgcacgcccggtgcaggttctgattaatggcgtctggcgaaatgta

SEQ ID NO: 404216 - DNA, 75 bp, synthetic construct
  source 1..75: mol_type = other DNA
atgaaggcgtttacctatgaacgtgtgaacacccctgccgaggcggcacttagcgctcagcgcgtacccggcgca

SEQ ID NO: 404217 - DNA, 75 bp, synthetic construct
  source 1..75: mol_type = other DNA
tgttggtgtgggctccggaggctggggtatcagtgtttcagccagcgcaaaccagggtaagggcagtgaaaaagg

SEQ ID NO: 404218 - DNA, 75 bp, synthetic construct
  source 1..75: mol_type = other DNA
acttccaggggcttggcggcgatgaagcaaacacccaggcgcaggggattctggaacgcgcggcgaagcgtgccg

SEQ ID NO: 404219 - DNA, 75 bp, synthetic construct
  source 1..75: mol_type = other DNA
ttctattttcctaatgtgctgaagtatgacccggatcagttaagacaagagttagcaacagagggtaatgaaata

SEQ ID NO: 404220 - DNA, 75 bp, synthetic construct
  source 1..75: mol_type = other DNA
tacttgcaaacttatgcggacgtagcgcaaggctctatcaatcctttacttcactacatactgcacggaaaggca

SEQ ID NO: 404221 - DNA, 75 bp, synthetic construct
  source 1..75: mol_type = other DNA
caactggcagttgaacagaccacacatcagcaacagattagcgaacgggacttggcattagccgagcgttttagt

SEQ ID NO: 404222 - DNA, 75 bp, synthetic construct
  source 1..75: mol_type = other DNA
atgtttcatgtggataatccgacgggtgtgccggtgatgccacctgtcgcggctgaattaagcaaaacaacgctt

SEQ ID NO: 404223 - DNA, 75 bp, synthetic construct
  source 1..75: mol_type = other DNA
tctcccgtcgccgcttgctgctggctggcgaattacgatagagcgtgtgcttgatgtggtgcaggagactgatct

SEQ ID NO: 404224 - DNA, 75 bp, synthetic construct
  source 1..75: mol_type = other DNA
tgtgcacttggtgtgcgtattgatggtgcgggttgtgttgatgttgctggtaatgatatgcgcaattgtggaaca

SEQ ID NO: 404225 - DNA, 75 bp, synthetic construct
  source 1..75: mol_type = other DNA
tccgaaagtgccgtggtatcgatatgctgatgatggcattttgcattgtcacagcgaagcagaagcgactgaaat

SEQ ID NO: 404226 - DNA, 75 bp, synthetic construct
  source 1..75: mol_type = other DNA
gatatagagacttttcttttatctttcattaaaaaggaagaggttttatggacggttttcgttgaatacccaaat

SEQ ID NO: 404227 - DNA, 75 bp, synthetic construct
  source 1..75: mol_type = other DNA
cgctttatcaacgatagcgacagctacctgaatatgtacgagtcgctcacatcgcggctggccagcgagccaatg

SEQ ID NO: 404228 - DNA, 75 bp, synthetic construct
  source 1..75: mol_type = other DNA
cggcaacgccaaaggcggttaagacagcatatgaccttgctaacgggaaatataccgcacaggacgcgaccacag

SEQ ID NO: 404229 - DNA, 75 bp, synthetic construct
  source 1..75: mol_type = other DNA
caaattttgcctgggtcaatacatctggtgatacttacgatatttacgttgcaatcggaaattatgcgactggtg

SEQ ID NO: 404230 - DNA, 75 bp, synthetic construct
  source 1..75: mol_type = other DNA
gcgcgactgaacggcttaccagagcgcgcacaggtctggttcatgtgatgaatgagattcttccatcggtgggag

SEQ ID NO: 404231 - DNA, 75 bp, synthetic construct
  source 1..75: mol_type = other DNA
accatggcgataaaataaatgagaagaataacaataaacacattacttactttcccgttgatgccattttagatg

SEQ ID NO: 404232 - DNA, 75 bp, synthetic construct
  source 1..75: mol_type = other DNA
gtgagtcggcaaaatgaacataaacgtaaaaaatcttcttttacgcctgaagagttaatcaggaaatatcatgag

SEQ ID NO: 404233 - DNA, 75 bp, synthetic construct
  source 1..75: mol_type = other DNA
aaataaatgagaagtataacaataaacacattacttactttcccgttgatgccattttagatgggaataaacatt

SEQ ID NO: 404234 - DNA, 75 bp, synthetic construct
  source 1..75: mol_type = other DNA
cgctgttgcctgatggctgggcaaataatgtcggcataaccgtgtccgaagaaggcatcataaccgcgctggaaa

SEQ ID NO: 404235 - DNA, 75 bp, synthetic construct
  source 1..75: mol_type = other DNA
tgatcagcgccgcaaccgcctgacaacggcgacccaaaatgtggtgggcgatgtgttgtacacccaggcgcttgc

SEQ ID NO: 404236 - DNA, 75 bp, synthetic construct
  source 1..75: mol_type = other DNA
tctcttgtatctattgagagaggcttaagatatagctgtagtttaaaaaaaatctatgtagaaggaccacccttt

SEQ ID NO: 404237 - DNA, 75 bp, synthetic construct
  source 1..75: mol_type = other DNA
tggagcggtctatgtaatttacagttcacatattaaacctaccactgctgaccttggcctgagcgattcaaacgg

SEQ ID NO: 404238 - DNA, 75 bp, synthetic construct
  source 1..75: mol_type = other DNA
cgcgagcggttgaacataatgaaagcgagtccacacaacaataatgtctgggggacgacgtataacacccgtaat

SEQ ID NO: 404239 - DNA, 75 bp, synthetic construct
  source 1..75: mol_type = other DNA
attatagccgaagaaaaaaggactggtgtcggcggagaaacaattatccgttggttggtaagctgtaagcataaa

SEQ ID NO: 404240 - DNA, 75 bp, synthetic construct
  source 1..75: mol_type = other DNA
atcttcctgcgttaacggtatattttggtagcaatgaattatcagtcagattttcagcagttagtgctgcatgtt

SEQ ID NO: 404241 - DNA, 75 bp, synthetic construct
  source 1..75: mol_type = other DNA
aaagggtgacgatttttaatattacacgatgcgttaaatcaacacggcagcttgatattggagatatgcacaagt

SEQ ID NO: 404242 - DNA, 75 bp, synthetic construct
  source 1..75: mol_type = other DNA
ttggttgtatatgtcaatgattttaacttaagcaatcgagaaaaaacatatttaatacaaaggatatttaataat

SEQ ID NO: 404243 - DNA, 75 bp, synthetic construct
  source 1..75: mol_type = other DNA
acttttttctggagaaatctcattgttcgcgaattaggcgaggagtgataaaacctgggatattgactgatgagc

SEQ ID NO: 404244 - DNA, 75 bp, synthetic construct
  source 1..75: mol_type = other DNA
attacgacagtcagcaccggctggtgcactacacgcggacacaatatgaagagccgctggtcgaaagtcgctatc

SEQ ID NO: 404245 - DNA, 75 bp, synthetic construct
  source 1..75: mol_type = other DNA
gcggtaactcgattgttttgggtgataatgacacgggctttaaacaaaatggcgacggtaatctggatgtttatg

SEQ ID NO: 404246 - DNA, 75 bp, synthetic construct
  source 1..75: mol_type = other DNA
acaggcctgacagatggaactgtatatgtaatttacagttcacatattaaacctactgctgctgaccttggcttg

SEQ ID NO: 404247 - DNA, 75 bp, synthetic construct
  source 1..75: mol_type = other DNA
aaaaggtcttgtccaactcagtagtgccaccaacagcacgtctgaaacgctcgccgcaacaccaaaagcggtaaa

SEQ ID NO: 404248 - DNA, 75 bp, synthetic construct
  source 1..75: mol_type = other DNA
gccggaaacgcgacaaataccataattaatggtggcacacagaatattaataatcatggtattgccacgggaacc

SEQ ID NO: 404249 - DNA, 75 bp, synthetic construct
  source 1..75: mol_type = other DNA
atgaggggctggtcacccgactggtactatgacgaagcagaccgcctcactcaccgcaccgtgaagggtgaaacc

SEQ ID NO: 404250 - DNA, 75 bp, synthetic construct
  source 1..75: mol_type = other DNA
tagccgcgagctggaacaggccaaactgattatacagtctggttctctgcgtgaaggcctggcgaaatacggccg

SEQ ID NO: 404251 - DNA, 75 bp, synthetic construct
  source 1..75: mol_type = other DNA
gtggagatgatgcgcgaacatccatcaatcaaactttgctctttgacgcacatatgtgatgagttagccgcccag

SEQ ID NO: 404252 - DNA, 75 bp, synthetic construct
  source 1..75: mol_type = other DNA
ttctggccgaacgaagagctaccagcgttacgcttcctgcgctgaaggcaaagccggatagcttctacgatgcgg

SEQ ID NO: 404253 - DNA, 75 bp, synthetic construct
  source 1..75: mol_type = other DNA
actgcacagaaatttactccgctggtatagtgcaggtcgcctgggaatccccgaactcctggattacgcccggtc

SEQ ID NO: 404254 - DNA, 75 bp, synthetic construct
  source 1..75: mol_type = other DNA
ggaagggcacaggatcttatgggggcaatggtgtttctcgccagtgccgcttcagattatgtcaatggacaacta

SEQ ID NO: 404255 - DNA, 75 bp, synthetic construct
  source 1..75: mol_type = other DNA
ccgcattgaatatatttgtcccgcaaagaaaagggaaaattattaatatgtgttccgtattgtcatttcatgggg

SEQ ID NO: 404256 - DNA, 75 bp, synthetic construct
  source 1..75: mol_type = other DNA
tgagtttatgacaatagacataacaaaacctgatgcaacaagcaccattattaataggtgtctggagtgtttcgg

SEQ ID NO: 404257 - DNA, 75 bp, synthetic construct
  source 1..75: mol_type = other DNA
atttatcgtgatggtttttcccctcgcccagtttgtcgccatgtttaactggagcaacatggggaaattcatcgc

SEQ ID NO: 404258 - DNA, 75 bp, synthetic construct
  source 1..75: mol_type = other DNA
gtgattcatgctaagcaatttgcgaaaattggacgagaagcatacgaagcactaggacgtttatctagggaggaa

SEQ ID NO: 404259 - DNA, 75 bp, synthetic construct
  source 1..75: mol_type = other DNA
taggaattaaagtaataaggaaagcagataaatatttgccaccaaatgctagggcagcttttgattatggccttc

SEQ ID NO: 404260 - DNA, 75 bp, synthetic construct
  source 1..75: mol_type = other DNA
gtacgcgttttcatttatacgaaatactcagcgatgaaaaactctctgcgctggggcgttcactggtcgagatgg

SEQ ID NO: 404261 - DNA, 75 bp, synthetic construct
  source 1..75: mol_type = other DNA
agcgatcgtttctatgccacgcttccctggcaaccattaactgtccagcctgaatgcccggtaacgcttaaggat

SEQ ID NO: 404262 - DNA, 75 bp, synthetic construct
  source 1..75: mol_type = other DNA
ggaaaacgtcggggaaatagacgaagaagaactggaatcctttttatatgccattgcgaaggggaatgtttttaa

SEQ ID NO: 404263 - DNA, 75 bp, synthetic construct
  source 1..75: mol_type = other DNA
ctaggctgggcagcggccgcgggctataacactcttcgcatcaatctgccttttatcgtctgggagcacgaccgc

SEQ ID NO: 404264 - DNA, 75 bp, synthetic construct
  source 1..75: mol_type = other DNA
ctaatgttgatatattaatacccacttataatgaacctctgacggttgtgaagaatacagtttatggtgcactgg

SEQ ID NO: 404265 - DNA, 75 bp, synthetic construct
  source 1..75: mol_type = other DNA
gatttttttattcgcgccactatgtcctattttcttttcagttaatttgatagatgcgtcggttgcagatattat

SEQ ID NO: 404266 - DNA, 75 bp, synthetic construct
  source 1..75: mol_type = other DNA
tcaattgttgagcagccacttggattttatcaacaaacattattttcaattattatttgcatcgctgtcattgtc

SEQ ID NO: 404267 - DNA, 75 bp, synthetic construct
  source 1..75: mol_type = other DNA
cggcgcgggaagtccagagaccgagcattgatgctcaccttctgtggcttgaagcagagctgaagcgtcttgaga

SEQ ID NO: 404268 - DNA, 75 bp, synthetic construct
  source 1..75: mol_type = other DNA
aaaactggcgatgatgcagacgccacaccattttttctctcctgatccttttgaaagaaatttaggaaaatttcg

SEQ ID NO: 404269 - DNA, 75 bp, synthetic construct
  source 1..75: mol_type = other DNA
tgtggtaaaagtactctgatcaaaacgctgtgtggtgtttatgttcctgattcgggaagtgaaattattatagat

SEQ ID NO: 404270 - DNA, 75 bp, synthetic construct
  source 1..75: mol_type = other DNA
agtcttcaaagacgccggttttgccgacgacgtggtaaaaaccaacgcggtacagattctcaagcaggccggtat

SEQ ID NO: 404271 - DNA, 75 bp, synthetic construct
  source 1..75: mol_type = other DNA
acaggcttttggccgaactccgggcctcggtggagtggaagtatgtcgacagagaaatcgacatccggctagtgc

SEQ ID NO: 404272 - DNA, 75 bp, synthetic construct
  source 1..75: mol_type = other DNA
gatcgccgtgctaaaaaaatcagtctgacatcagatggtctgtcctttattcagaacgtcaatattgcacaaagt

SEQ ID NO: 404273 - DNA, 75 bp, synthetic construct
  source 1..75: mol_type = other DNA
ttattacttggttattttcaggtctgtttcccattgaacagggaaagcatacctttaccagataataaagaagaa

SEQ ID NO: 404274 - DNA, 75 bp, synthetic construct
  source 1..75: mol_type = other DNA
tgttgcattacttgctccggcaaaagggcgctttaatgttacggctaaagggggattaataaaaaataagtttgt

SEQ ID NO: 404275 - DNA, 75 bp, synthetic construct
  source 1..75: mol_type = other DNA
gagttttattgaaatatgttttatctctctgaaaggttattgcaatatggttttttatattctccggacactgaa

SEQ ID NO: 404276 - DNA, 75 bp, synthetic construct
  source 1..75: mol_type = other DNA
tgatgcgcgctacgtgtactattatttacgctcagtcccaatcaaagaagcaggttatagtagacatttcaagtt

SEQ ID NO: 404277 - DNA, 75 bp, synthetic construct
  source 1..75: mol_type = other DNA
atatatgtaagtgttatctttcttgttgttactatggctatggaacttatgggatagataatcttttaaaaaaga

SEQ ID NO: 404278 - DNA, 75 bp, synthetic construct
  source 1..75: mol_type = other DNA
atttctcctgttatgattgatatattaaggttagcagaggatcatcgacaattattgcatagagggattgacccc

SEQ ID NO: 404279 - DNA, 75 bp, synthetic construct
  source 1..75: mol_type = other DNA
ggacgccggaagagggcgttggcatgttcgtgaacgctgacgggcaggaaggtgaagttgaaaccgccagcctca

SEQ ID NO: 404280 - DNA, 75 bp, synthetic construct
  source 1..75: mol_type = other DNA
aacaaaacccgatgaaacagaagatgatcgccgcgctcaatgccgcaggcgtaacaaccgaggggctgaccgacg

SEQ ID NO: 404281 - DNA, 75 bp, synthetic construct
  source 1..75: mol_type = other DNA
gaacacaatggcgtggaattgcagacgacatcctggtacaccatcgcccggatgcatacaacagggttaagtggc

SEQ ID NO: 404282 - DNA, 75 bp, synthetic construct
  source 1..75: mol_type = other DNA
ctgaggcgctgattgccctgaaatggtgggatgttatcgcgctggcgaaaatactggagaaccgtaaccatatgc

SEQ ID NO: 404283 - DNA, 75 bp, synthetic construct
  source 1..75: mol_type = other DNA
aggacaggtcaggcagtttgaacccgcgcagttacacgccctgatggagcgcagagaagcggagcgacaggctca

SEQ ID NO: 404284 - DNA, 75 bp, synthetic construct
  source 1..75: mol_type = other DNA
aagcaaaatggttacattatgtatcgcctggtgcttttgaaattagtgatctctattccacgtcgtcgagcggtg

SEQ ID NO: 404285 - DNA, 75 bp, synthetic construct
  source 1..75: mol_type = other DNA
aaaagttcaacagtcaaatgatagcaacacaaataaaaaagcgcgtactgcaagaggtcctcgttttactttaag

SEQ ID NO: 404286 - DNA, 75 bp, synthetic construct
  source 1..75: mol_type = other DNA
aaaacgatgacctggatgaattgactgcaatgctgcaatctctcgaagaaccggttcagaaagctgcgaaaatga

SEQ ID NO: 404287 - DNA, 75 bp, synthetic construct
  source 1..75: mol_type = other DNA
agctctctggctggtatcgtcgcgcaatcacgctatacggaggatgatattgacgcactgatggaaacgtccggg

SEQ ID NO: 404288 - DNA, 75 bp, synthetic construct
  source 1..75: mol_type = other DNA
catacgaagcagagcaggccgttctgggtggcctgatgctggagaatgaacgctgggatgaagtggtgctgatgc

SEQ ID NO: 404289 - DNA, 75 bp, synthetic construct
  source 1..75: mol_type = other DNA
gctatagtattactcagactcgtcagagatcgctgacaaaaatactatcaagttacattgaaaaggatgatatat

SEQ ID NO: 404290 - DNA, 75 bp, synthetic construct
  source 1..75: mol_type = other DNA
aacaaataaagctgattgtgtaatattaaatggattatcaacttgctatgaaataaaaacggagttagataatct

SEQ ID NO: 404291 - DNA, 75 bp, synthetic construct
  source 1..75: mol_type = other DNA
aaatatatttccctaatcggacttgataagttgtcattcaatattgatgtttttagacaagcattagaggtaaaa

SEQ ID NO: 404292 - DNA, 75 bp, synthetic construct
  source 1..75: mol_type = other DNA
ttacgattgaatcgcacccattattatacaggcataccattggtagtaagattgcgaatgtgatttttgaaaaat

SEQ ID NO: 404293 - DNA, 75 bp, synthetic construct
  source 1..75: mol_type = other DNA
ttggatcgcgtcctgacaattcaacgcgaattacaagtttcgatgcaatcactattactcaaagcaggtttaaac

SEQ ID NO: 404294 - DNA, 75 bp, synthetic construct
  source 1..75: mol_type = other DNA
aaatactgaccacgctcggtcatattaatcgttcagcaattaacgtgttgttattgcgccatgaacgcagttctc

SEQ ID NO: 404295 - DNA, 75 bp, synthetic construct
  source 1..75: mol_type = other DNA
tggcagtaaggttgcactggtaaatgaagtagaggtttcctcaatgaagattgagaatgaagaccagggagtgga

SEQ ID NO: 404296 - DNA, 75 bp, synthetic construct
  source 1..75: mol_type = other DNA
catggccgcctgcacagcggccgtgagcgcaaaacctgacgatcacgtctttgtgttcagtcttgaaatgccctc

SEQ ID NO: 404297 - DNA, 75 bp, synthetic construct
  source 1..75: mol_type = other DNA
gggtggcctgatgctggagaatgaacgctgggatgaagtggtgctgatgctgagtcctgacgatttttatgtggc

SEQ ID NO: 404298 - DNA, 75 bp, synthetic construct
  source 1..75: mol_type = other DNA
attgcggtcagtttcatcaaacgcatcatctggattgataaagcgattctgtacccgattattctgattttcagt

SEQ ID NO: 404299 - DNA, 75 bp, synthetic construct
  source 1..75: mol_type = other DNA
atggatattttgattcaggcactaacgtatattaatttgaatgccattctggccattattgctgctacggccttt

SEQ ID NO: 404300 - DNA, 75 bp, synthetic construct
  source 1..75: mol_type = other DNA
ctaacagtattcatagcagcgcagacagtgattctggcgacagctattttctgaatttaaacagtggcgttaatt

SEQ ID NO: 404301 - DNA, 75 bp, synthetic construct
  source 1..75: mol_type = other DNA
aaacttcgcggcatccctgacgacattgttatcaggcaattacagtgaaagcaaaatcgatatggttgagatact

SEQ ID NO: 404302 - DNA, 75 bp, synthetic construct
  source 1..75: mol_type = other DNA
agcataaaatttatcaatgatgccttcctgatttgggaaagaaacactgactgggcgaaaattggatttaaaaat

SEQ ID NO: 404303 - DNA, 75 bp, synthetic construct
  source 1..75: mol_type = other DNA
tttgactatgtagtttacgactccgatattgagctggaatttgcctcggccttcgagcgaaatgaggatatcaaa

SEQ ID NO: 404304 - DNA, 75 bp, synthetic construct
  source 1..75: mol_type = other DNA
cagcttctcttttctctgtcgcggcgtttaacgcatcggcgcaaagcgtgacagcaaccggtacaacactggatt

SEQ ID NO: 404305 - DNA, 75 bp, synthetic construct
  source 1..75: mol_type = other DNA
tgaatacggggacaatcaactgtgctcaggtagcaacaaaccgttcttcgaaatcaaaaatggcgtaccgacggt

SEQ ID NO: 404306 - DNA, 75 bp, synthetic construct
  source 1..75: mol_type = other DNA
atgactaatgaccaaaaaattaacataaaggatttcagggatgcgtggcttgatgatttttttgaattttcaaca

SEQ ID NO: 404307 - DNA, 75 bp, synthetic construct
  source 1..75: mol_type = other DNA
atgagccgcagagtgttgacaccacagataagagtaaagaggccatcgcctcgcttaatcccatgtgtacactgc

SEQ ID NO: 404308 - DNA, 75 bp, synthetic construct
  source 1..75: mol_type = other DNA
ccggaaaagctttagcgacccggagcaagagaacaaagccaacatcattcaccgggcacacgaccggatgaccgg

SEQ ID NO: 404309 - DNA, 75 bp, synthetic construct
  source 1..75: mol_type = other DNA
gaggcgtcgaagcagttgtgggaacacttgcagagcgaaggccacattgacagcaagggtaaagtgcaggatagc

SEQ ID NO: 404310 - DNA, 75 bp, synthetic construct
  source 1..75: mol_type = other DNA
ttattgtcgacggcatcaagtaccaaaagattggtgatgatcagttctatgctcaggagttattccaacagaacg

SEQ ID NO: 404311 - DNA, 75 bp, synthetic construct
  source 1..75: mol_type = other DNA
atggctaatgaatcctacgagcaatttgcagagcaattgcagaaggaaatagaaaacgaggaaggcatcaagttt

SEQ ID NO: 404312 - DNA, 75 bp, synthetic construct
  source 1..75: mol_type = other DNA
tttgcaccctgaacgaaaccacatcggtcattaaaaaacgtcaggagatcggtcgtggcttgcgcatttgtgtga

SEQ ID NO: 404313 - DNA, 75 bp, synthetic construct
  source 1..75: mol_type = other DNA
taaagcggtgtttgccagggctaaagctgacctgatgggcgagtggaaaagcgttgtgcgcgtgaaagacgatgc

SEQ ID NO: 404314 - DNA, 75 bp, synthetic construct
  source 1..75: mol_type = other DNA
cacacccgagacttcgttaccgcactgctcctgcgcggcatccacttatccgaggtggaggcgaactcctggatc

SEQ ID NO: 404315 - DNA, 75 bp, synthetic construct
  source 1..75: mol_type = other DNA
aaaaacatgatgatacgtattccattgaatactttttacctatagtgctttgcccaccaggagaagatgtggata

SEQ ID NO: 404316 - DNA, 75 bp, synthetic construct
  source 1..75: mol_type = other DNA
atgcgctaaatgcggcaatttctgtattagagaaagcgccggttaatcctccgaataaaggagaaccatcaaata

SEQ ID NO: 404317 - DNA, 75 bp, synthetic construct
  source 1..75: mol_type = other DNA
ctggagagggaaagagaaagagtgcgccagcgtgcgtattcctcaccagcaccatcacgttcacgtgattatggt

SEQ ID NO: 404318 - DNA, 75 bp, synthetic construct
  source 1..75: mol_type = other DNA
tctttttctcgcagtgatatttttctttgggtttaaatataatcatgaccctgaaggtaatgctgccaacttact

SEQ ID NO: 404319 - DNA, 75 bp, synthetic construct
  source 1..75: mol_type = other DNA
agggcgacatgacgcagtatggcggtagcattgtccagggttcagccggggtgcgcatcggtgccccaccggcgt

SEQ ID NO: 404320 - DNA, 75 bp, synthetic construct
  source 1..75: mol_type = other DNA
ttatgtcaaatttaccggttcaaaaatgcatcctgtcgaactggcagagaaaactaacacacccgtatacctgtc

SEQ ID NO: 404321 - DNA, 75 bp, synthetic construct
  source 1..75: mol_type = other DNA
gttaacgatgatacgcttactcactatattaaagagcttagtgccaaagcaggggccgttggtgttcctctcgca

SEQ ID NO: 404322 - DNA, 75 bp, synthetic construct
  source 1..75: mol_type = other DNA
tccaaaaccccataccagcaaaaaatgaaaccattggcacacgcatagaaaccgcccgtaaaaaactggggctga

SEQ ID NO: 404323 - DNA, 75 bp, synthetic construct
  source 1..75: mol_type = other DNA
tgttattacttttgagaatgatagtggtgatacatttggtactaccatctcaacaactaactctaatgtatctat

SEQ ID NO: 404324 - DNA, 75 bp, synthetic construct
  source 1..75: mol_type = other DNA
gggtagcagcggcgcattgcatatcgccgtcatcggcagcggcggggccgcgatggcagcggcggggccgcgatg

SEQ ID NO: 404325 - DNA, 75 bp, synthetic construct
  source 1..75: mol_type = other DNA
atgcttacaggaacggaaaagcaaaacagcaatttttctttattgcttcagcaggccagagcagaagcgcaggcc

SEQ ID NO: 404326 - DNA, 75 bp, synthetic construct
  source 1..75: mol_type = other DNA
agcagtgccagtggagcgccagctaaagtgatgatgccatcgggtggttttccatcatggggatatggctttgcg

SEQ ID NO: 404327 - DNA, 75 bp, synthetic construct
  source 1..75: mol_type = other DNA
cagccagttgaatcatggttgtctcgtgaaaaagcaaaacaagaaaaagcccttgctgatgcgaagttgaaaatt

SEQ ID NO: 404328 - DNA, 75 bp, synthetic construct
  source 1..75: mol_type = other DNA
ggtgtggaagtgctggtggtgtgggaagacatagcgaagcggcggcgctgcgctcctgttattcacgcgcttgag

SEQ ID NO: 404329 - DNA, 75 bp, synthetic construct
  source 1..75: mol_type = other DNA
gcggtcaggacaggctggcaggaagggcgtgatgcagcagaccagatccttgaagccaactttaaccgtcttaac

SEQ ID NO: 404330 - DNA, 75 bp, synthetic construct
  source 1..75: mol_type = other DNA
ggttggttgaaaacgatcattccttttttgctggtttgtatgtttacaacaatacttgtttcatggtttcaaagt

SEQ ID NO: 404331 - DNA, 75 bp, synthetic construct
  source 1..75: mol_type = other DNA
gctgccgcgcctgcagagcttccaccgttgcatcctttggcacttcccgcgaaaggcggcgaagcgatggtgagt

SEQ ID NO: 404332 - DNA, 75 bp, synthetic construct
  source 1..75: mol_type = other DNA
tacgctgtgatgccattgggataacgttaaaagaagttattgatgggtgccgagacagaatattaagtccatatc

SEQ ID NO: 404333 - DNA, 75 bp, synthetic construct
  source 1..75: mol_type = other DNA
accacttcgcgtttaaagcaggtggtcattgaagccgtagcccacacagctgatcagctgaagcaatggcaggct

SEQ ID NO: 404334 - DNA, 75 bp, synthetic construct
  source 1..75: mol_type = other DNA
ccgcactcgcaacccaggcgaatgatcactggcgtgatgcgcgctgggctatctcggatattcagggcgtggtcc

SEQ ID NO: 404335 - DNA, 75 bp, synthetic construct
  source 1..75: mol_type = other DNA
taacccacaatccggcggggtgtcagtccccgtccggttcaggtataaggtgcgtgactatacgaaggggtgcga

SEQ ID NO: 404336 - DNA, 75 bp, synthetic construct
  source 1..75: mol_type = other DNA
atgagcagggagattaaagctgtctgtgtcgtggcgaaaccgccgaggcataacccacaatctggcggggtgtta

SEQ ID NO: 404337 - DNA, 75 bp, synthetic construct
  source 1..75: mol_type = other DNA
cagttgaccgatccagggtctgtttaagaatcctgaaacgctcactcgtttccggatttttgtgcacagaaaaac

SEQ ID NO: 404338 - DNA, 75 bp, synthetic construct
  source 1..75: mol_type = other DNA
accgaactccttacagtatacggcggcggatcaggtacacaccacggcgcgtattcagcatccgatggtgagaaa

SEQ ID NO: 404339 - DNA, 75 bp, synthetic construct
  source 1..75: mol_type = other DNA
gtcagagacacaaaaattgttggagtggtttttaacgccgcagggacagagtttggtggaagatgtaggttatgt

SEQ ID NO: 404340 - DNA, 75 bp, synthetic construct
  source 1..75: mol_type = other DNA
gtaatacaaacaacgcaataggttacaccttccgttattacgcaacacaaatgaacgccgataaaaatataaaac

SEQ ID NO: 404341 - DNA, 75 bp, synthetic construct
  source 1..75: mol_type = other DNA
gctaatattccttcaggttcaacaacttatgtccgcagtcaggacggcagtacgcttgcggatgagtacataaac

SEQ ID NO: 404342 - DNA, 75 bp, synthetic construct
  source 1..75: mol_type = other DNA
ggagtagaacggcaacttttagataattcttgtggcatatcctctctgtcttacatacttaacaagtattttaaa

SEQ ID NO: 404343 - DNA, 75 bp, synthetic construct
  source 1..75: mol_type = other DNA
gatggatgcactgattgacatctctgttatcgcagatatggcgcataaacacgccaccagtgaaacagaatatgc

SEQ ID NO: 404344 - DNA, 75 bp, synthetic construct
  source 1..75: mol_type = other DNA
tgggttagtatttcattcctatctttgcctgattgttaatacgtactatacaaaaaaaatgacaaaactaactct

SEQ ID NO: 404345 - DNA, 75 bp, synthetic construct
  source 1..75: mol_type = other DNA
attggagtattcgtttatgggtcggcggcttagcaatggcgcttagtgcaggtggattcgttggatatgaacgac

SEQ ID NO: 404346 - DNA, 75 bp, synthetic construct
  source 1..75: mol_type = other DNA
atgtgaagtatgtaaaaaatatcattgaaaaaaatccaaaccgaccgttatttctgagagcatttcagaaattaa

SEQ ID NO: 404347 - DNA, 75 bp, synthetic construct
  source 1..75: mol_type = other DNA
tgcctcaacgaaacagcagtttgctatttcgttacaaaactgctccggcgccggcactggacaagcccaactgaa

SEQ ID NO: 404348 - DNA, 75 bp, synthetic construct
  source 1..75: mol_type = other DNA
ggtcaacaaaattggatctggtgacgcattcgtagcctatttttcccgtgagtggatgctgaacaaaaaaacagc

SEQ ID NO: 404349 - DNA, 75 bp, synthetic construct
  source 1..75: mol_type = other DNA
cagctctggcttgttgagcaagcgcgacggaacctgagcgatcttgggctggacgttttttccccctaccacatg

SEQ ID NO: 404350 - DNA, 75 bp, synthetic construct
  source 1..75: mol_type = other DNA
ggtgatgcaacccaaaatttggggcgcgcgagcaacagatataatgttggatattttgccggaggtacgcaatca

SEQ ID NO: 404351 - DNA, 75 bp, synthetic construct
  source 1..75: mol_type = other DNA
tacggccaccatccgatcccgtgcctgatgatggcggcgcgaaagttgaaagcctgccattctggccggtcattt

SEQ ID NO: 404352 - DNA, 75 bp, synthetic construct
  source 1..75: mol_type = other DNA
aaacggaccagaaaatcagggaagaatctgcacaccgaatcataaccagcgaccaggaaagccgccggacgacaa

SEQ ID NO: 404353 - DNA, 75 bp, synthetic construct
  source 1..75: mol_type = other DNA
tttggacgaacgtcgattgatgatgcaatggtgggcggatttcctatcagcaaatcgtgagactttcgtaacacc

SEQ ID NO: 404354 - DNA, 75 bp, synthetic construct
  source 1..75: mol_type = other DNA
ttgattgaacaagcttataaaacagatcctcaggtatttggctcagtttattattacaatgatattttagacagg

SEQ ID NO: 404355 - DNA, 75 bp, synthetic construct
  source 1..75: mol_type = other DNA
agtattacaatgccggatattccgcaacagtacacactcgggcaaagcggcggaaacagcatcgacatcatgttt

SEQ ID NO: 404356 - DNA, 75 bp, synthetic construct
  source 1..75: mol_type = other DNA
gaaggggggatggaatttttatcagtatccgttaaatccggttcagtatatagattcaatgggactggcatctaa

SEQ ID NO: 404357 - DNA, 75 bp, synthetic construct
  source 1..75: mol_type = other DNA
atgattaaaaaagcttcgctgctgacggcgttttccgtcacagccttttccgcttgggcacaggataccagcccg

SEQ ID NO: 404358 - DNA, 75 bp, synthetic construct
  source 1..75: mol_type = other DNA
caagcgataaacgcgttttcgtctggtgatgctccacgctacgagcaaataatggatctcttttccaaagagaaa

SEQ ID NO: 404359 - DNA, 75 bp, synthetic construct
  source 1..75: mol_type = other DNA
aatttagtcaatcttaaaacactactcaatgatggttgctttattaaatatagtcattttaatgacgtggcatta

SEQ ID NO: 404360 - DNA, 75 bp, synthetic construct
  source 1..75: mol_type = other DNA
tttttaatatgataaacaatatatctgatcaagcatcatcattttcaggcacacaactgaatcaaagtgataatt

SEQ ID NO: 404361 - DNA, 75 bp, synthetic construct
  source 1..75: mol_type = other DNA
attttcagtattccttatcataaagctttttcccagaatttcgtttctggtattctggatatactcatttctgat

SEQ ID NO: 404362 - DNA, 75 bp, synthetic construct
  source 1..75: mol_type = other DNA
aactccagatgaaccacaaggaaagcaacagtgttcgtgctgcctatacacataaggccaaacatcttgagcagc

SEQ ID NO: 404363 - DNA, 75 bp, synthetic construct
  source 1..75: mol_type = other DNA
atgggctatgacaccacgcaggatatttgcggtcatggtttccgcacactggcatgtagtgctctgattgaatca

SEQ ID NO: 404364 - DNA, 75 bp, synthetic construct
  source 1..75: mol_type = other DNA
aacagcgatcaggaggaacgcacaacaacaaccagaacaaccacagtacaggcaaacgatataaccagcgttctg

SEQ ID NO: 404365 - DNA, 75 bp, synthetic construct
  source 1..75: mol_type = other DNA
atggatggttcagctaacatcacaggtagcttcaccaccgaaaatggacgattactattacagggtcatccagtt

SEQ ID NO: 404366 - DNA, 75 bp, synthetic construct
  source 1..75: mol_type = other DNA
cttggtaaaaatgtcagaatctatccaagtgctaaaatatggatgccaagaaatttaaccattggaaataattcc

SEQ ID NO: 404367 - DNA, 75 bp, synthetic construct
  source 1..75: mol_type = other DNA
catatatatacaatcaaggaaatgtcgagattggtgaatatagtattataagccaagatgtaaccatttgtgcta

SEQ ID NO: 404368 - DNA, 75 bp, synthetic construct
  source 1..75: mol_type = other DNA
tccttttatttgttatatttttacctttatgtctggaacagggcatgtggtatacagcttgttgccggtgatctc

SEQ ID NO: 404369 - DNA, 75 bp, synthetic construct
  source 1..75: mol_type = other DNA
agccgctgtcaatgtcggcggcgatccagattgtgatgctctccttcgcctgcctgattgtgctgctgtgccgcc

SEQ ID NO: 404370 - DNA, 75 bp, synthetic construct
  source 1..75: mol_type = other DNA
acgctgattggcgtggcgacgggagcgctcgccacctttaataaaggtaaagagctgaaagacgatccggaatac

SEQ ID NO: 404371 - DNA, 75 bp, synthetic construct
  source 1..75: mol_type = other DNA
tgcgcgccgaatatggcgatcgttatcagttccagaccggatctgactgtgaagtgatcctcgcgctgtatcagg

SEQ ID NO: 404372 - DNA, 75 bp, synthetic construct
  source 1..75: mol_type = other DNA
gttcatgaaataaactccggtgaatttgagtatttaagacgttttccccagtccagcactggggcaaaaatggtg

SEQ ID NO: 404373 - DNA, 75 bp, synthetic construct
  source 1..75: mol_type = other DNA
ttcgaagccagcctgcgtagcgatgaaggaaacaagatcgttgaattattcctcagcgatgaaggcgatgatgtg

SEQ ID NO: 404374 - DNA, 75 bp, synthetic construct
  source 1..75: mol_type = other DNA
cctgttgtgcgctccgtttcgtggagctaacggcgggtgaacaggccgcaccagattggacatatttcagcgtta

SEQ ID NO: 404375 - DNA, 75 bp, synthetic construct
  source 1..75: mol_type = other DNA
tcgcaagagcaatctgtttcttttaaaaaagtgaataatacggttgtacaacatacacatgaagactcattgacc

SEQ ID NO: 404376 - DNA, 75 bp, synthetic construct
  source 1..75: mol_type = other DNA
gagtttggttggggttgtagaatggttgcgagggcgaaagccacatgaggttgttatagatgaagccaataaccg

SEQ ID NO: 404377 - DNA, 75 bp, synthetic construct
  source 1..75: mol_type = other DNA
gattagcgcaatctaataaattttcatgggggaagtgtttctccgaaacatataatctatataaatcactatcta

SEQ ID NO: 404378 - DNA, 75 bp, synthetic construct
  source 1..75: mol_type = other DNA
tgaaaagtttacaatcatatggtggtatcactgtatactttgaagaaatcattaagagattaaaaaatgacgaat

SEQ ID NO: 404379 - DNA, 75 bp, synthetic construct
  source 1..75: mol_type = other DNA
ttagtagtagaggctgtacaatcattacatactgattataataaactgcgtttggctgggttgtctcaagcatca

SEQ ID NO: 404380 - DNA, 75 bp, synthetic construct
  source 1..75: mol_type = other DNA
aggggcgcacaaaagatgaaagcggtaaaggccgacgacatggcgactttgccgtggcgctctgtatggctgtca

SEQ ID NO: 404381 - DNA, 75 bp, synthetic construct
  source 1..75: mol_type = other DNA
acaatagatggtggtctacaggttgtcgattcaagtaccgcagaaataaccaccattaagagtggaggaacgcaa

SEQ ID NO: 404382 - DNA, 75 bp, synthetic construct
  source 1..75: mol_type = other DNA
tcaggatataaaaattttgagcttgcagttaaagccgtttctaaactttttgatactaatcttaaaatagtcggc

SEQ ID NO: 404383 - DNA, 75 bp, synthetic construct
  source 1..75: mol_type = other DNA
ttccactgatttaagattaattagtataatcacatgccattcaataataaatggtctttctcacaaaaaattgtc

SEQ ID NO: 404384 - DNA, 75 bp, synthetic construct
  source 1..75: mol_type = other DNA
acagtcctcatccatatgaaaatgaagttgctgcacttggtggaatacctttctcacaaataattggatggtatc

SEQ ID NO: 404385 - DNA, 75 bp, synthetic construct
  source 1..75: mol_type = other DNA
tcgcaccaggctataccgatgatgaaatttacgaatggatgttcgggaagatacgcgccattaatgacctgaaac

SEQ ID NO: 404386 - DNA, 75 bp, synthetic construct
  source 1..75: mol_type = other DNA
tgacactttttttcttttcattatttttagctaaaaattcactggctaattataaatgttttaatgaagcaggca

SEQ ID NO: 404387 - DNA, 75 bp, synthetic construct
  source 1..75: mol_type = other DNA
tctggatatcaattataccgggacaaatctggatatcctggacggtgatattaaggcactggttatctccccgcg

SEQ ID NO: 404388 - DNA, 75 bp, synthetic construct
  source 1..75: mol_type = other DNA
gcagccaatgcccgttgacgatggtgggccaggctgtctgggcatcattaaaattattttctatatttttatctt

SEQ ID NO: 404389 - DNA, 75 bp, synthetic construct
  source 1..75: mol_type = other DNA
tttaagatacaggcgctgtcaagccgtccgtctaacctgcgtggtttgcagggggacgtggtgattgatgaggcg

SEQ ID NO: 404390 - DNA, 75 bp, synthetic construct
  source 1..75: mol_type = other DNA
tcggcgttggcaataccagcagtggcctgtccagttgcgtagtaaaccgcctgaaatggaattttgttggttccg

SEQ ID NO: 404391 - DNA, 75 bp, synthetic construct
  source 1..75: mol_type = other DNA
gtgcagcgggagacagcaaaaataacattattgccattttcgatattttcattaatctcacacccgcatggataa

SEQ ID NO: 404392 - DNA, 75 bp, synthetic construct
  source 1..75: mol_type = other DNA
atcaatgcccttttattcatatgtagacagaaagtcaataattttggcgtcaaagttccctgaaaaacttaagtt

SEQ ID NO: 404393 - DNA, 75 bp, synthetic construct
  source 1..75: mol_type = other DNA
tccaccgccataaactaccagaaagcactcggtaatccggcgggtacgctgggcgctatccgcgattcgcaaatg

SEQ ID NO: 404394 - DNA, 75 bp, synthetic construct
  source 1..75: mol_type = other DNA
ttcaaatgtatggcgctaaaggaataaatacggtaggagatattgcaagaaaatgggctcctcctaaggaaaata

SEQ ID NO: 404395 - DNA, 75 bp, synthetic construct
  source 1..75: mol_type = other DNA
tgaggagatcaccgccatggagaagcgcgcgcagcaggatgcgcgcatgttgcaaattaccgaccagcaggcgcg

SEQ ID NO: 404396 - DNA, 75 bp, synthetic construct
  source 1..75: mol_type = other DNA
attataaatgccgaaaaacttagtgggtatgaacgttcgaaatcacatcaatatgtagaagcaattgaaaattat

SEQ ID NO: 404397 - DNA, 75 bp, synthetic construct
  source 1..75: mol_type = other DNA
ggaaaatgagaaatttcaaaaccttctcctaaaatcggagtttccagaatatgtgaaagataaattaataaagaa

SEQ ID NO: 404398 - DNA, 75 bp, synthetic construct
  source 1..75: mol_type = other DNA
aaaagcgaagctgatgccgacatttggttagtcgaagaatgcatgaaggtgatcggtcgattagcaaaaacattc

SEQ ID NO: 404399 - DNA, 75 bp, synthetic construct
  source 1..75: mol_type = other DNA
cttggagtaaaaaatatattccttccagactgttgagtgaatttatgcgtataataaaagcacgttgctctgtga

SEQ ID NO: 404400 - DNA, 75 bp, synthetic construct
  source 1..75: mol_type = other DNA
ccacgatgaactatgttgatcgcaaagttatcagccttgatgcttccgtgctcttcgatatgccaagcccaacta

SEQ ID NO: 404401 - DNA, 75 bp, synthetic construct
  source 1..75: mol_type = other DNA
tgtaattgggctcaaaaaggcatttttatcaatacttgcaaaagaagggaatgtgggaagcaaggatgagtgggt

SEQ ID NO: 404402 - DNA, 75 bp, synthetic construct
  source 1..75: mol_type = other DNA
cgcttgtcagcacggaagggacaacagcgtggtacgcagaatacgatgaatggggtaaccagctgaatgaagaga

SEQ ID NO: 404403 - DNA, 75 bp, synthetic construct
  source 1..75: mol_type = other DNA
atggtaaaactatcggtgattttttttatgcctcggcatcggttatgcggtaataagaagaacgatttttattgt

SEQ ID NO: 404404 - DNA, 75 bp, synthetic construct
  source 1..75: mol_type = other DNA
actgaccagcacatacacccccgcaggccagttacagagccagcacctgaacagcctggtgtatgaccgtgacta

SEQ ID NO: 404405 - DNA, 75 bp, synthetic construct
  source 1..75: mol_type = other DNA
cggtggagaacccggagacgggggaactgctgtggcagcatgagacaacacacgcctacaacgaacaggggctgg

SEQ ID NO: 404406 - DNA, 75 bp, synthetic construct
  source 1..75: mol_type = other DNA
ttccaggccgaaggtgaagcatttcgtctcttttcaccgctgatagcggaagataacggcctgttactcgatgat

SEQ ID NO: 404407 - DNA, 75 bp, synthetic construct
  source 1..75: mol_type = other DNA
atatcgagctatttacctccggttctacggggcagccaaagcgggtaattaaacctgttcatttgctggaccgtg

SEQ ID NO: 404408 - DNA, 75 bp, synthetic construct
  source 1..75: mol_type = other DNA
acgcgcggcgggcgtcagagtattggcgttttgctggtgctggatgacgaagctcgcctgcaatggcaaaacggc

SEQ ID NO: 404409 - DNA, 75 bp, synthetic construct
  source 1..75: mol_type = other DNA
ggcagcgcaacggggatacagcagagtagccagggcgcgttggttgcaaccaccagggcgacgcgggtcacaggg

SEQ ID NO: 404410 - DNA, 75 bp, synthetic construct
  source 1..75: mol_type = other DNA
gatgacgttttacaggccgtattcgacaaaggcacatcaaaatttcagctaacttatgatgacagagcgctataa

SEQ ID NO: 404411 - DNA, 75 bp, synthetic construct
  source 1..75: mol_type = other DNA
gccgacagctacgccatgacaatcaacggcgttacacgggcaatcagaaccacgaccacacaagccgggtatggt

SEQ ID NO: 404412 - DNA, 75 bp, synthetic construct
  source 1..75: mol_type = other DNA
tagcggtaggtattcacggtctttttgtcgaggcgctgaataaaaaagcccatacgttttatcaatcgctgggct

SEQ ID NO: 404413 - DNA, 75 bp, synthetic construct
  source 1..75: mol_type = other DNA
tcgtggttgtaccaaataaagaggcccgtcaaatatggcaatgctccggagggaaaactctggagttgtcctggc

SEQ ID NO: 404414 - DNA, 75 bp, synthetic construct
  source 1..75: mol_type = other DNA
gagatccctgccgaagactcctggctttttatcgctgacggatctgataaagaacttgattcctgtgccctttca

SEQ ID NO: 404415 - DNA, 75 bp, synthetic construct
  source 1..75: mol_type = other DNA
agataacggcctgttactcgatgatctcttgcagtttagccaggacggtcagttccatctgatggggcgtcgtgg

SEQ ID NO: 404416 - DNA, 75 bp, synthetic construct
  source 1..75: mol_type = other DNA
tggtcaaaatatcatgcacccgttcgggggaactattaaactagggaacgtacgatcagctaatgctaaaagttt

SEQ ID NO: 404417 - DNA, 75 bp, synthetic construct
  source 1..75: mol_type = other DNA
atcaggaataagagttcaacaagttcccagttctggggcagaagcacgagttgtctcattcagtacaactaatta

SEQ ID NO: 404418 - DNA, 75 bp, synthetic construct
  source 1..75: mol_type = other DNA
tatgtatattcgaactggcaaaaagagaaatatagggatgacgcatacacaatacaaaaacaaataataactcaa

SEQ ID NO: 404419 - DNA, 75 bp, synthetic construct
  source 1..75: mol_type = other DNA
ctgcgcaaaaaaattcaggcacaatatccccaagaagtgattaccaccgttcgcggccagggctatctgttcgaa

SEQ ID NO: 404420 - DNA, 75 bp, synthetic construct
  source 1..75: mol_type = other DNA
gtagaccatgaatattgttggagattaagagctgctgggtttaaagtaattaggaataaaaatgcgttacttgca

SEQ ID NO: 404421 - DNA, 75 bp, synthetic construct
  source 1..75: mol_type = other DNA
aacaacattcattactatcatttaggagataacaaaggcattgcgtttgcgcagaactatggtttcattaaagct

SEQ ID NO: 404422 - DNA, 75 bp, synthetic construct
  source 1..75: mol_type = other DNA
ttgttaattaaacaagcagaaagcctacagaaagatgcacaaaacacggacaaaaagaccgctgatatgctttct

SEQ ID NO: 404423 - DNA, 75 bp, synthetic construct
  source 1..75: mol_type = other DNA
gagcgacataatctgaatctgagacaacatctggcaaggctgggacggaagttactgtcgttctcaaaatcggtg

SEQ ID NO: 404424 - DNA, 75 bp, synthetic construct
  source 1..75: mol_type = other DNA
gcgcatcgttaagattgaagaaaaacgtatttcactccaggaagtagaacaacgtctgctggcgctggacggtat

SEQ ID NO: 404425 - DNA, 75 bp, synthetic construct
  source 1..75: mol_type = other DNA
ttttgcattttttcatccacaatcaggtatatacaggattcgttcgtctttggaaaaaaccagtaacaacgtttc

SEQ ID NO: 404426 - DNA, 75 bp, synthetic construct
  source 1..75: mol_type = other DNA
ataaaacacttccatttaaatcaaatattaaattgcttattgataagtgttttagattgaaaatggcggaatata

SEQ ID NO: 404427 - DNA, 75 bp, synthetic construct
  source 1..75: mol_type = other DNA
gaaaacggtgtgaccgagtggagtccgctgttcagcgagccgcatccttcccgtgagttttgtgtccagtacggt

SEQ ID NO: 404428 - DNA, 75 bp, synthetic construct
  source 1..75: mol_type = other DNA
gacagccagcaccgcctggtgttctacacgcggatacagcacggcgaaccacaggtggagagccggtacctctat

SEQ ID NO: 404429 - DNA, 75 bp, synthetic construct
  source 1..75: mol_type = other DNA
gggtggatgtcgctgtcgcgtaaaccggaggagacctggtacgggtgggacggtgacaggctgaccactgtacag

SEQ ID NO: 404430 - DNA, 75 bp, synthetic construct
  source 1..75: mol_type = other DNA
ttaaatgccgggcaaattgttgaatttgattttggtgatatcggcgcatcgttatttagtgcggcagggccgggt

SEQ ID NO: 404431 - DNA, 75 bp, synthetic construct
  source 1..75: mol_type = other DNA
ggttcggtgcatgttgacgctgtaaacaatggtggcgaaggcgacggtatacaggcttatacggcgattaaggaa

SEQ ID NO: 404432 - DNA, 75 bp, synthetic construct
  source 1..75: mol_type = other DNA
gctgaagtttgatgatgcgacagggagagaacaggtctacatccacgcgcagaagaacatggataccgaagtgct

SEQ ID NO: 404433 - DNA, 75 bp, synthetic construct
  source 1..75: mol_type = other DNA
gctgcggcagggcagcgtgagtgaagaaagccagcagtggcttgcacagtgtgggttgacggcggaacagatggc

SEQ ID NO: 404434 - DNA, 75 bp, synthetic construct
  source 1..75: mol_type = other DNA
caacgacaacaggacgacatgctgttacaagacagataactagcgttgcagcaggttctgtcgatacggatgctg

SEQ ID NO: 404435 - DNA, 75 bp, synthetic construct
  source 1..75: mol_type = other DNA
cgggagatcgtcaaaacaaaagccactgcgacaggcacgacgctcactggcggtgaacaaattgtcgagggtgtg

SEQ ID NO: 404436 - DNA, 75 bp, synthetic construct
  source 1..75: mol_type = other DNA
aaatgccgattactccaaaagctcaggtagcagctaatgcttttttgcaatatggcttcagcggcaatttgccac

SEQ ID NO: 404437 - DNA, 75 bp, synthetic construct
  source 1..75: mol_type = other DNA
atagcaccaataaccagccagggcagattgttgttttaccggaaaaatccggctgggtaggtgtctcagcaattt

SEQ ID NO: 404438 - DNA, 75 bp, synthetic construct
  source 1..75: mol_type = other DNA
tcaaaaacaccatcatacactaaatcagtaagttggcagcatcacctaaaggttattcgtccctttattaacatg

SEQ ID NO: 404439 - DNA, 75 bp, synthetic construct
  source 1..75: mol_type = other DNA
tttataccattagttttggtggccgggttgaagtaccgcaaaactgcgaattaaatgccgggcagattgttgaat

SEQ ID NO: 404440 - DNA, 75 bp, synthetic construct
  source 1..75: mol_type = other DNA
accggttttggccacctggcgataccgcgtgtgggtcaggaggtgattgtagacttcctcaacggcgatccggac

SEQ ID NO: 404441 - DNA, 75 bp, synthetic construct
  source 1..75: mol_type = other DNA
tggttcatttcactcgtttcagaaagaatgcttcaggacctcagttcctgttccagagcacttttacgctactgg

SEQ ID NO: 404442 - DNA, 75 bp, synthetic construct
  source 1..75: mol_type = other DNA
cgattgggctgaaggggggatggaacctgtatacatatccgctgagcccggtgaatagcatggatccattaggat

SEQ ID NO: 404443 - DNA, 75 bp, synthetic construct
  source 1..75: mol_type = other DNA
gaacccgcatcagctgcagcagctcatccgcctgccggggcagcagtatgatgaggagtccggcctgtattacaa

SEQ ID NO: 404444 - DNA, 75 bp, synthetic construct
  source 1..75: mol_type = other DNA
gcgagtacaacgtccgcttctttaaccgtaaacagtaacctgactatgggtacctgcagtgctcagataatggat

SEQ ID NO: 404445 - DNA, 75 bp, synthetic construct
  source 1..75: mol_type = other DNA
ggcggaaatgctgcaaaaaatgttaacaagggagttggccaggtgggagataatggtatcgtcctggtaattaga

SEQ ID NO: 404446 - DNA, 75 bp, synthetic construct
  source 1..75: mol_type = other DNA
ggcaaaaacttctgttcccgtatcaatagtagaaccaaaaaaaatcactggtaactttaaaacaattcgagaaaa

SEQ ID NO: 404447 - DNA, 75 bp, synthetic construct
  source 1..75: mol_type = other DNA
aggataatagtggcagatatttctcaacagcacctaaccgaggagaaagaaaaggatcatatccattcaatagcc

SEQ ID NO: 404448 - DNA, 75 bp, synthetic construct
  source 1..75: mol_type = other DNA
ctgtttaatgctgattacaggaaatggagtgattttaatgctgagctactgaagcgtagtttcacaaatgatgat

SEQ ID NO: 404449 - DNA, 75 bp, synthetic construct
  source 1..75: mol_type = other DNA
cacgcaaagtgttcttccatctgcatcgcaaattccacacaccgtggcgggccattttgttcgttgccaccatct

SEQ ID NO: 404450 - DNA, 75 bp, synthetic construct
  source 1..75: mol_type = other DNA
accggctgacacgatacagaacgacaggagccgcatccagacgatttatcagccggggagcttcacgccactcat

SEQ ID NO: 404451 - DNA, 75 bp, synthetic construct
  source 1..75: mol_type = other DNA
cactcaggatccgattggactgaaggggggatggaacctgtatggatatcaattgaatccgatatcagacatcga

SEQ ID NO: 404452 - DNA, 75 bp, synthetic construct
  source 1..75: mol_type = other DNA
ctacacgcggacacaatatgcagagccgctggtcgaaagtcgctatctttacgacccgctgggccgcagggtggc

SEQ ID NO: 404453 - DNA, 75 bp, synthetic construct
  source 1..75: mol_type = other DNA
ttctctggacgatctcgacccaactccatgtggtaaatgctcgtcctgtattggtcaaccaattataaatcaaat

SEQ ID NO: 404454 - DNA, 75 bp, synthetic construct
  source 1..75: mol_type = other DNA
gccatcagaaaatctgcaaggtttttatgaagctcatcgcgagcatttatctcgcgataaaaaattatcgggtaa

SEQ ID NO: 404455 - DNA, 75 bp, synthetic construct
  source 1..75: mol_type = other DNA
cactgttatgctgcgacgaggaaatgaactgaccgcaccgaacttcaaagacctctcggttaacaccgatgatga

SEQ ID NO: 404456 - DNA, 75 bp, synthetic construct
  source 1..75: mol_type = other DNA
atgcgctcaccaaaagttaaattcttaaccatcttcacgttttgtatatttattacaaaaatgtctttcgccagc

SEQ ID NO: 404457 - DNA, 75 bp, synthetic construct
  source 1..75: mol_type = other DNA
acaacctcaatcctatttttatacgtaataaaaaagagtttattaaaaatacaaaaataacaactcatgaactgc

SEQ ID NO: 404458 - DNA, 75 bp, synthetic construct
  source 1..75: mol_type = other DNA
aattaatctggcaggacctccggattttattcattcccggcttggggcagtaatggctccgttgatgaaggaggg

SEQ ID NO: 404459 - DNA, 75 bp, synthetic construct
  source 1..75: mol_type = other DNA
agacaggccagaggcgtgacggcgaccgaagccgcggatgagcttgcccgttcagtttcgcccttcattgatggt

SEQ ID NO: 404460 - DNA, 75 bp, synthetic construct
  source 1..75: mol_type = other DNA
aatgaaattgcagcagaacgtacaagccatttacatagaatgcaaagcgaaactggaggttgccagtgagcaaac

SEQ ID NO: 404461 - DNA, 75 bp, synthetic construct
  source 1..75: mol_type = other DNA
gcgatggcgagcgaagaagatgcgggtgatagcgacaaccgcaacggtcaggccctgctggatctgcaaagcaac

SEQ ID NO: 404462 - DNA, 75 bp, synthetic construct
  source 1..75: mol_type = other DNA
cttcatctctacgctggtgctgtcgctgctgttgccgtggctgttcgaaagcaaagttgtggcgatgacggtgct

SEQ ID NO: 404463 - DNA, 75 bp, synthetic construct
  source 1..75: mol_type = other DNA
gtcgaaagtcgctatctttacgacccgctgggccgcagggtggcaaaacgggtgtggcggcgtgaacgggacctg

SEQ ID NO: 404464 - DNA, 75 bp, synthetic construct
  source 1..75: mol_type = other DNA
ggtgtggcggcgtgaacgggacctgacgggctggatgtcgctgtcacggaaaccgcaagtgacctggtacggctg

SEQ ID NO: 404465 - DNA, 75 bp, synthetic construct
  source 1..75: mol_type = other DNA
tcaaagagattgcgctggtattagggctaaccgaggcccgaatttgtcaactgaataaacagatcgcgcagaaaa

SEQ ID NO: 404466 - DNA, 75 bp, synthetic construct
  source 1..75: mol_type = other DNA
gtataatttctgtaaaaaatgaattaatcgcaaattctattgtttcttctgaccttgataaggttctggttaata

SEQ ID NO: 404467 - DNA, 75 bp, synthetic construct
  source 1..75: mol_type = other DNA
tgacctgacggggtggatgtcgctgtcgcgtaaaccggaggagacctggtacgggtgggacggtgacaggctgac

SEQ ID NO: 404468 - DNA, 75 bp, synthetic construct
  source 1..75: mol_type = other DNA
gatgccattatcttcggtgctcccacctatatgggcggtgcgccatggcaattcaagaaatttgctgatgccagt

SEQ ID NO: 404469 - DNA, 75 bp, synthetic construct
  source 1..75: mol_type = other DNA
ctgacgccttatggggtaatggcactaatggcgaaagtcttctcaacgtatcagctttcacagtttaccaatttg

SEQ ID NO: 404470 - DNA, 75 bp, synthetic construct
  source 1..75: mol_type = other DNA
gtctatcactccgcaacatcgaggaaaaaactaacctacgccacggccagattgagaaagtacttaagttactga

SEQ ID NO: 404471 - DNA, 75 bp, synthetic construct
  source 1..75: mol_type = other DNA
gaccatggtgttaccggatcaggcatctcgtttggcttggttggcgcaggtgatacccacgttgccgggtacagg

SEQ ID NO: 404472 - DNA, 75 bp, synthetic construct
  source 1..75: mol_type = other DNA
cgcagcacctgcaacagccgtaccgtctgccgggacagcagtatgatgaggagtcggggctgtattacaaccgtc

SEQ ID NO: 404473 - DNA, 75 bp, synthetic construct
  source 1..75: mol_type = other DNA
tgactgagcaagatgaacgacaaggacaacgacatcagccgtatgaggagcaagaaaatgaaagcaaattcgaaa

SEQ ID NO: 404474 - DNA, 75 bp, synthetic construct
  source 1..75: mol_type = other DNA
tgtcgtgactggccgtaactctgagggtcacattgatgcatggctggcgcataagcacagcggacgccgggtgac

SEQ ID NO: 404475 - DNA, 75 bp, synthetic construct
  source 1..75: mol_type = other DNA
ttttattaaaaaacgaggaatattgccaggaactatagatgaagagcatttctggttgctcatggagatattacc

SEQ ID NO: 404476 - DNA, 75 bp, synthetic construct
  source 1..75: mol_type = other DNA
gaagcctgatcccgataaaaaagattgaaaccaagatcgattcggttgagtgcatatccattcatagggtagatt

SEQ ID NO: 404477 - DNA, 75 bp, synthetic construct
  source 1..75: mol_type = other DNA
ttaagcccccgaagttacctaaaaagaagcctgatcccgataaaaaagattgaaaccaagatcgattcggttgag

SEQ ID NO: 404478 - DNA, 75 bp, synthetic construct
  source 1..75: mol_type = other DNA
ctataacaaccggttcgctacgtcgcctcgtactactgataatgctcatcttgatgtgcaccattctgaagagga

SEQ ID NO: 404479 - DNA, 75 bp, synthetic construct
  source 1..75: mol_type = other DNA
ctgcggcggtagccttactggagcgacgcagtcaggcaattcatgccccggcgctggatcgcggcgcggctcatg

SEQ ID NO: 404480 - DNA, 75 bp, synthetic construct
  source 1..75: mol_type = other DNA
tatcagatgaaccggaaacgcctgaaaagcgcaaggaaactcacaatcgctattgctccgcatcaaagctatcaa

SEQ ID NO: 404481 - DNA, 75 bp, synthetic construct
  source 1..75: mol_type = other DNA
ggaacttcaactattcttttgggggaagcagataatgggcaagatgtccagtctgagacaatcggatctgatgga

SEQ ID NO: 404482 - DNA, 75 bp, synthetic construct
  source 1..75: mol_type = other DNA
cccggtcgtggtgtccttgcaaacacaggtatcgcaatgggtgggcattctttactgatggtccaaatacagctt

SEQ ID NO: 404483 - DNA, 75 bp, synthetic construct
  source 1..75: mol_type = other DNA
gtgggcttcttggactggcggccaatagtggttatcagttctatgatttgaaccagccgcagaatgcgaataagt

SEQ ID NO: 404484 - DNA, 75 bp, synthetic construct
  source 1..75: mol_type = other DNA
acgatgctggcgcagttatccccggcacaatccggcgaagcgctgcacggtttgctggcgctggcccgccatcaa

SEQ ID NO: 404485 - DNA, 75 bp, synthetic construct
  source 1..75: mol_type = other DNA
agacaaggtggtgtactcgccaattaaaactaaggccattcgagttatgggttaggccaatgcttgctgctggcc

SEQ ID NO: 404486 - DNA, 75 bp, synthetic construct
  source 1..75: mol_type = other DNA
gggtatgcttctaagcacaaaaatctaaaaatcgccctaccttttcgtgaaaatggtatagataaagctgctgtg

SEQ ID NO: 404487 - DNA, 75 bp, synthetic construct
  source 1..75: mol_type = other DNA
gaatctgacgatattaaaattcccgtctattgtgacaacaataccaacggcaactttgaaagcgaacatgtctac

SEQ ID NO: 404488 - DNA, 75 bp, synthetic construct
  source 1..75: mol_type = other DNA
tagctcagacctgcacagttaatacaagcgacaaagacttagcagtaactttacccactgttgccacttcatctc

SEQ ID NO: 404489 - DNA, 75 bp, synthetic construct
  source 1..75: mol_type = other DNA
agcaggatggccatcgataccggacctcctggctaatcaactgtgttgcactgatgacacaacctttcataaacc

SEQ ID NO: 404490 - DNA, 75 bp, synthetic construct
  source 1..75: mol_type = other DNA
cgacttgagggctacttaggcaagccaattattcgtctaaatccgcgtcgagattttagattctggctgaagcaa

SEQ ID NO: 404491 - DNA, 75 bp, synthetic construct
  source 1..75: mol_type = other DNA
gcgttacatcaaaagcaaatttttactatgataaaaaagtattacaaagggaaaatatatccacaagataatcca

SEQ ID NO: 404492 - DNA, 75 bp, synthetic construct
  source 1..75: mol_type = other DNA
actgggctttggcaggttagcggaagaagtgatgttgattatgatacccgtgtttattttgacgcatggtatgtt

SEQ ID NO: 404493 - DNA, 75 bp, synthetic construct
  source 1..75: mol_type = other DNA
gtatgactattgatgctccatcggtgacgctagcaaatttcatcattttatttgatggatttaaggattttaaag

SEQ ID NO: 404494 - DNA, 75 bp, synthetic construct
  source 1..75: mol_type = other DNA
aaaaaaactaccctttatatgcagaattgaatcgctggatcctaaaaccagttacaaatgacttaaacacttaca

SEQ ID NO: 404495 - DNA, 75 bp, synthetic construct
  source 1..75: mol_type = other DNA
aatttttgctgttattgaaatggccgtaatggcttttgctaaatggtatttttcacgatatgtgtggttattaac

SEQ ID NO: 404496 - DNA, 75 bp, synthetic construct
  source 1..75: mol_type = other DNA
attagcagactggtaaaaaaggatggtgggccagcaatatatggacatgagagaattgggcaagatgggaaacca

SEQ ID NO: 404497 - DNA, 75 bp, synthetic construct
  source 1..75: mol_type = other DNA
gtcatgaagttatgattttccgtgtccagcagaatctggccaagtggtcatctcggataattaagagatgttttg

SEQ ID NO: 404498 - DNA, 75 bp, synthetic construct
  source 1..75: mol_type = other DNA
agaccattatacgacactggcggagatgatcggtaaatgtgacgaagtgatgtacctgaagaaaaaaagaaagac

SEQ ID NO: 404499 - DNA, 75 bp, synthetic construct
  source 1..75: mol_type = other DNA
ttcagattgcgctggactacgacaaaggtgtcgatattcacctgcacgaaaccactccgtcgggcgtggcagcca

SEQ ID NO: 404500 - DNA, 75 bp, synthetic construct
  source 1..75: mol_type = other DNA
cattcgccggagctggaggcaattcctttactgacagaaagtttagcgttagtcgtggcgcaacatcatccgctg

SEQ ID NO: 404501 - DNA, 75 bp, synthetic construct
  source 1..75: mol_type = other DNA
agttagacaaacagattgatctagtaactgagttagccaaagaagatcccgccacagcaccagaaaaaacaacaa

SEQ ID NO: 404502 - DNA, 75 bp, synthetic construct
  source 1..75: mol_type = other DNA
ggctggttacccactggcgcaggctctgcagttaccgctggggcagtacctgtggaaagtgcacgctttgggctg

SEQ ID NO: 404503 - DNA, 75 bp, synthetic construct
  source 1..75: mol_type = other DNA
tgcgggtggcggaggcggctggtaataagctgatgttaatcgaaacaagctttaaccataaagatagtgtagtat

SEQ ID NO: 404504 - DNA, 75 bp, synthetic construct
  source 1..75: mol_type = other DNA
acgcccaatgtaccaaatcaccaaaaacggcttcgttttcctggtgatgggcttcactggcaaaaaagccgccgc

SEQ ID NO: 404505 - DNA, 75 bp, synthetic construct
  source 1..75: mol_type = other DNA
caaagaaattaaatatggttttgttcaaatagcattaaatgattcttgccataaaaccacagaaaaactgaatca

SEQ ID NO: 404506 - DNA, 75 bp, synthetic construct
  source 1..75: mol_type = other DNA
tcccggggcgatcaactggtcgtcaacaacaacgccactggtaattttaaaatctttgttcaggataccggcgtc

SEQ ID NO: 404507 - DNA, 75 bp, synthetic construct
  source 1..75: mol_type = other DNA
cctgcttaacgagcgcaaggttattcgtgcggcacaagaaaacggcacggttgccattaataaccgaatcccgct

SEQ ID NO: 404508 - DNA, 75 bp, synthetic construct
  source 1..75: mol_type = other DNA
cagaaatcgcttaatggcgagttacaacaaataaacggcgctgattattttatatttggacatatgatgtttgat

SEQ ID NO: 404509 - DNA, 75 bp, synthetic construct
  source 1..75: mol_type = other DNA
atattattgaaatcactaacgacataataaaatatgtcatcgcacatgcagattatccgggtgatgaatatctct

SEQ ID NO: 404510 - DNA, 75 bp, synthetic construct
  source 1..75: mol_type = other DNA
taaacctttgcgcattttctgatgcagaattaaacctttcatttcccagaaagctggttaactcaccaattgatg

SEQ ID NO: 404511 - DNA, 75 bp, synthetic construct
  source 1..75: mol_type = other DNA
cagtatgaagtgtatgactaccccggacgtttcaagggtgcccacgggcagaactttgcctgctggcagatggat

SEQ ID NO: 404512 - DNA, 75 bp, synthetic construct
  source 1..75: mol_type = other DNA
ttctcggtgggcaagacgatgaaggaaaacaccggacaaacagcagtttattctgccggtgagcatctggaactc

SEQ ID NO: 404513 - DNA, 75 bp, synthetic construct
  source 1..75: mol_type = other DNA
cagaagaacatgaacaccgaggtgctgaataaccgcaccactgatgtgataaacaaccatgccgaaaaaataggt

SEQ ID NO: 404514 - DNA, 75 bp, synthetic construct
  source 1..75: mol_type = other DNA
gagaaatctcagaagaatgacggaaaagcgagccatctgacgacagcaaaaacgatccctttcatacatcagcca

SEQ ID NO: 404515 - DNA, 75 bp, synthetic construct
  source 1..75: mol_type = other DNA
aagcactattaaaaagtcacgctgacggtgatgaagcacgtttttactccattgctctccaagtcgcagctaaag

SEQ ID NO: 404516 - DNA, 75 bp, synthetic construct
  source 1..75: mol_type = other DNA
cagcggaacgcaaaatatcaaaagcggcgggaaagctgacacaacaattatatcctccgggagccggcaggttgt

SEQ ID NO: 404517 - DNA, 75 bp, synthetic construct
  source 1..75: mol_type = other DNA
attaaagcatccattaagaatgatggaaggcgcggtaaagatgcattgctggaattgattccaacattaaataaa

SEQ ID NO: 404518 - DNA, 75 bp, synthetic construct
  source 1..75: mol_type = other DNA
tgagaggtgcaagtattataatgaatttagttatgatgattattggactggggtattcaataatacgtttttatt

SEQ ID NO: 404519 - DNA, 75 bp, synthetic construct
  source 1..75: mol_type = other DNA
ttattatccttttttattttccacctttctatattaaggcatcagaagtgctcgagaaaagtttagatctaaatc

SEQ ID NO: 404520 - DNA, 75 bp, synthetic construct
  source 1..75: mol_type = other DNA
ttacacgctcgatgagggagatgatccgtttgatgaaacggtctggcagaaagcgaatcctggcctgggcatctg

SEQ ID NO: 404521 - DNA, 75 bp, synthetic construct
  source 1..75: mol_type = other DNA
accctgacgtaaccatcgaaaatggtcgcgctgtcactacgtctgttgctattgcggagttcttcggcaaacgcc

SEQ ID NO: 404522 - DNA, 75 bp, synthetic construct
  source 1..75: mol_type = other DNA
atgaaagttgccttgcttggggaagcctgggatatcgtccagcgacaaccaaaaaaatcagaattcatttttcca

SEQ ID NO: 404523 - DNA, 75 bp, synthetic construct
  source 1..75: mol_type = other DNA
ccgcccgcataccgggtgctgacgggcgtggtggacggcttcgggcggacgctggcctttcaccgggcggcggag

SEQ ID NO: 404524 - DNA, 75 bp, synthetic construct
  source 1..75: mol_type = other DNA
aagtgcgccttgaaggggaagttgacaaagactggaatagcgttgaaattgatgtaaaaaatcttcgtgtactga

SEQ ID NO: 404525 - DNA, 75 bp, synthetic construct
  source 1..75: mol_type = other DNA
cggccagcagttcgccgatactctctgcgaccgggtggcccgcttccacggcaccgcctttcgtgcctggctggc

SEQ ID NO: 404526 - DNA, 75 bp, synthetic construct
  source 1..75: mol_type = other DNA
ctctgatagagcgtcaattcgaagttgctgacggtaatgtaagaagtcttaatttgccgaaatatgataaatata

SEQ ID NO: 404527 - DNA, 75 bp, synthetic construct
  source 1..75: mol_type = other DNA
ctatgagtatgtcctgaaaagcgacggcaacagcaactggaacctgaccaatgatgtcaaacccaacccggaccc

SEQ ID NO: 404528 - DNA, 75 bp, synthetic construct
  source 1..75: mol_type = other DNA
tgttgcgggcttgctggtaagaaaactttcacagcgtgcattcagcgatctgttgttctccccgccttcactgcc

SEQ ID NO: 404529 - DNA, 75 bp, synthetic construct
  source 1..75: mol_type = other DNA
ccaacaccattgctatctacaccacccatcgcattctggttgaaatattcagcttaactctgcttgcgcaaatga

SEQ ID NO: 404530 - DNA, 75 bp, synthetic construct
  source 1..75: mol_type = other DNA
tggtctaggctttaaacctagcacccaagttgccttgtggagtgagccaggtaaaggctccgaaactttggaact

SEQ ID NO: 404531 - DNA, 75 bp, synthetic construct
  source 1..75: mol_type = other DNA
aaaagtaacaccggtgaacttaacgttaatatcaaagctgcattgataagcaggaacataagaaagatcaaatca

SEQ ID NO: 404532 - DNA, 75 bp, synthetic construct
  source 1..75: mol_type = other DNA
atactcatgattacaccgatgttgcagtttctcttttatttatctctgggatgcagtctggtaattcgtcgaacc

SEQ ID NO: 404533 - DNA, 75 bp, synthetic construct
  source 1..75: mol_type = other DNA
tacgaattttttcatggcttgctgataatttccctgatttacaatattttaaacttcagctattagatgccagta

SEQ ID NO: 404534 - DNA, 75 bp, synthetic construct
  source 1..75: mol_type = other DNA
gtacattagaaaaaataaagaaagaacatctgctattaatgcctcatgtatgtgatgacacgattccatacttac

SEQ ID NO: 404535 - DNA, 75 bp, synthetic construct
  source 1..75: mol_type = other DNA
tccacaatagctcttgatacaacccaaagtgtgactgcacttaaacaaggtatagctaaatttctgaattctagg

SEQ ID NO: 404536 - DNA, 75 bp, synthetic construct
  source 1..75: mol_type = other DNA
gagcgtcaggctcgctacatcagcaaactcgaaagccatctcgccgatggcatcactcctgtgcagttctgcaaa

SEQ ID NO: 404537 - DNA, 75 bp, synthetic construct
  source 1..75: mol_type = other DNA
tgcaggatggatttctcctgcgttccggttgcaggtgaaccagacttttattgactatcgtactggtaaacttac

SEQ ID NO: 404538 - DNA, 75 bp, synthetic construct
  source 1..75: mol_type = other DNA
cctgaagaaaaaaggtgccgcctggttatatcgccattatctgaacggcgaactacctatgaagaaaacatggga

SEQ ID NO: 404539 - DNA, 75 bp, synthetic construct
  source 1..75: mol_type = other DNA
cagtctgaaatcgttcggattctggataaatttactgctcttacagctgagcttacagctgagcttacagctgag

SEQ ID NO: 404540 - DNA, 75 bp, synthetic construct
  source 1..75: mol_type = other DNA
atcgatctcttcggggaaaatttctgccatcaatgccaaaggctttgaaaaagtgattattccagttccttcacc

SEQ ID NO: 404541 - DNA, 75 bp, synthetic construct
  source 1..75: mol_type = other DNA
ggtctatcagtgtcctttcgagaggagggaggcattcatttctagaaaatatgctcctaacttctctaataacaa

SEQ ID NO: 404542 - DNA, 75 bp, synthetic construct
  source 1..75: mol_type = other DNA
tctgaaccgattgcaacaattgcaaattcctttgtctgatttacaaactgccttaacagagaataatgaaaaccg

SEQ ID NO: 404543 - DNA, 75 bp, synthetic construct
  source 1..75: mol_type = other DNA
aagcaatgggagaaatgcctgaagatgtgcaacctaacatgtcgcctatttcgacaggtttaggtgaaatctatc

SEQ ID NO: 404544 - DNA, 75 bp, synthetic construct
  source 1..75: mol_type = other DNA
ggggcgtgaagcagatatttcaggttcaaaagccgatcttgagcagcgtctggcggaatgggaggaggaggccgc

SEQ ID NO: 404545 - DNA, 75 bp, synthetic construct
  source 1..75: mol_type = other DNA
gttaatctctgctttatcgtggtattgcttttttccaccttgctcacctggcgtgaagtagtggtgctggaagat

SEQ ID NO: 404546 - DNA, 75 bp, synthetic construct
  source 1..75: mol_type = other DNA
ggtaaaactctccgactctcatggcctgtatctgctcgtcaatccgggcggttcacgcatctggtatctcaaata

SEQ ID NO: 404547 - DNA, 75 bp, synthetic construct
  source 1..75: mol_type = other DNA
tacgagcagtcacgccagtcatttggcattaacgttcttggcacgttgattgttgaagtcgaagcagaaaacggc

SEQ ID NO: 404548 - DNA, 75 bp, synthetic construct
  source 1..75: mol_type = other DNA
ctggcaaacccggccctgctgacaaaagcaggtccggaagatgacttcagtcttctgcttccgtccgttggtggg

SEQ ID NO: 404549 - DNA, 75 bp, synthetic construct
  source 1..75: mol_type = other DNA
gaaggttagaaaccagcaagaggaactgcttgaaaagcatcaggtactgataaaagatattgaaacattaactga

SEQ ID NO: 404550 - DNA, 75 bp, synthetic construct
  source 1..75: mol_type = other DNA
ttctaaagctcattcacagatgcgcaggttaagttttagaaatatatataaatttgtttatgtaagtcaggatga

SEQ ID NO: 404551 - DNA, 75 bp, synthetic construct
  source 1..75: mol_type = other DNA
tgatggcggcttaagtgcgatccttaaagttcaaaccgttcggttacacaatgacacgattgttgcccttgagga

SEQ ID NO: 404552 - DNA, 75 bp, synthetic construct
  source 1..75: mol_type = other DNA
aggaggttcttttgtctctcaatcatagtgctgttcataagacagagtttggatattgtgttcatgactatgctc

SEQ ID NO: 404553 - DNA, 75 bp, synthetic construct
  source 1..75: mol_type = other DNA
ctgacgacgcgatgacgctggtgaaaacagggggaggggatgcttcgtttacgctgggcaataccggcggtttcg

SEQ ID NO: 404554 - DNA, 75 bp, synthetic construct
  source 1..75: mol_type = other DNA
cgttctgggcaggttgagcaggaaaacggggaaatacgcgagattttcaaaccactcctgaagaaaaaaggtgcc

SEQ ID NO: 404555 - DNA, 75 bp, synthetic construct
  source 1..75: mol_type = other DNA
atatgggagggagtaatggtgcttttagcctggaagaggccattccggatatcattaaaacaatcgagcagaaac

SEQ ID NO: 404556 - DNA, 75 bp, synthetic construct
  source 1..75: mol_type = other DNA
gctttttgatgggaatgtccaccaggttgctgttgagcgcgtagtttcttctgatgggacaatgcagaaatcgcg

SEQ ID NO: 404557 - DNA, 75 bp, synthetic construct
  source 1..75: mol_type = other DNA
cgggaggatgcctttacctttaccaatctggttttaaagccactgattgaatacatccgttggattcatttactt

SEQ ID NO: 404558 - DNA, 75 bp, synthetic construct
  source 1..75: mol_type = other DNA
acgatgctgacagatatcacggagtttcagcttcctgcaggaaaagtctggctgtcaccggtggtggactgcttc

SEQ ID NO: 404559 - DNA, 75 bp, synthetic construct
  source 1..75: mol_type = other DNA
acgggagtttaaaacctttgatgagtttcgcgaggcgctgtggctggaggtgagtaaagactcagtgttattggc

SEQ ID NO: 404560 - DNA, 75 bp, synthetic construct
  source 1..75: mol_type = other DNA
gtggttgctcttaaaaaacaggtaaaaatactgaaatcattttatcaatttctcgcgttcaccgataccctttgg

SEQ ID NO: 404561 - DNA, 75 bp, synthetic construct
  source 1..75: mol_type = other DNA
tattttcgctgttattgaaatggcggtgatggcttttgcgaaatggtatttttctcgctatgtttggctattaac

SEQ ID NO: 404562 - DNA, 75 bp, synthetic construct
  source 1..75: mol_type = other DNA
ttaatatacattagttataaagtaaaaaaggacggtggacctgcaatatatggacatgagagagttgggaagaat

SEQ ID NO: 404563 - DNA, 75 bp, synthetic construct
  source 1..75: mol_type = other DNA
tatttttgctgtgattgaaatggctatatgtgcatttgcttcttggtcggtacctatttatatctggatggtgac

SEQ ID NO: 404564 - DNA, 75 bp, synthetic construct
  source 1..75: mol_type = other DNA
gcgacagcgtctgccgcattattcaaagcgatattcagcattactggaatctgcgaattgtcgccagttcgctat

SEQ ID NO: 404565 - DNA, 75 bp, synthetic construct
  source 1..75: mol_type = other DNA
tagctgggttaattcgacctgatgtgattaggtggatactctgtgaattacatttaggtaacagaagtccagacg

SEQ ID NO: 404566 - DNA, 75 bp, synthetic construct
  source 1..75: mol_type = other DNA
atggaatcatacttgcaaaacagcaataaattagattttcagcacgagaccaggatattaaacggtatatggctc

SEQ ID NO: 404567 - DNA, 75 bp, synthetic construct
  source 1..75: mol_type = other DNA
atggtatacagtattgtagacgataacatgaaaaaaatttatattgatggttactttttagcacaaagaattaca

SEQ ID NO: 404568 - DNA, 75 bp, synthetic construct
  source 1..75: mol_type = other DNA
gagatgacgtggtacgggtgggacggcgaccggctgacgacggtacagaccgacaccacgcgtatccagacggta

SEQ ID NO: 404569 - DNA, 75 bp, synthetic construct
  source 1..75: mol_type = other DNA
tgatacggacggacgacgagcggacccaccactaccactacgacagccagcaccgcctggtgttctacacgcgga

SEQ ID NO: 404570 - DNA, 75 bp, synthetic construct
  source 1..75: mol_type = other DNA
agagccgatacctttacgacccgctgggtcgccggacagggaaacgggtgtggcgtcgcgagcgtgacctgacgg

SEQ ID NO: 404571 - DNA, 75 bp, synthetic construct
  source 1..75: mol_type = other DNA
ttcttttaactggtgatgccctgaaagcatttaaggacagagtgactattggtcactctgttggaagaaatgcgc

SEQ ID NO: 404572 - DNA, 75 bp, synthetic construct
  source 1..75: mol_type = other DNA
tttaaaggatttaactttggggtatatcaggatttaaaggcatccgtgcggaataacgaaatcaacataaaaatg

SEQ ID NO: 404573 - DNA, 75 bp, synthetic construct
  source 1..75: mol_type = other DNA
tgggataaatgcggctatcacatattctgagaccaagtctttacctacatcgggagtcagcaattcagtaggtgt

SEQ ID NO: 404574 - DNA, 75 bp, synthetic construct
  source 1..75: mol_type = other DNA
gggtggaatgacaacggcgacctggtgcgcatcagcggtccgcgacagacgcgggaatacggctacagtgccacg

SEQ ID NO: 404575 - DNA, 75 bp, synthetic construct
  source 1..75: mol_type = other DNA
ggacctggacatccgcatcccgtatgccacggacccggcgggcaaccggctgccggacccggagctgcacccgga

SEQ ID NO: 404576 - DNA, 75 bp, synthetic construct
  source 1..75: mol_type = other DNA
tatagatgtctttaaagaaatttatggggatagttttgaatatgcaaaccccttaagtgtagagtcaattgctat

SEQ ID NO: 404577 - DNA, 75 bp, synthetic construct
  source 1..75: mol_type = other DNA
ccgcatcccgtatgccacggacccggcgggcaaccggctgccggacccggagctgcacccggacagtaccctcac

SEQ ID NO: 404578 - DNA, 75 bp, synthetic construct
  source 1..75: mol_type = other DNA
ggcgaccggctgacgacggtacagaccgacaccacgcgtatccagacggtatatcagccggggagcttcgcgccg

SEQ ID NO: 404579 - DNA, 75 bp, synthetic construct
  source 1..75: mol_type = other DNA
cggcggagctggcggtgatgctggggaggctggagcgggaactgcgcgcgggagcggtgagtgcggagagtgagg

SEQ ID NO: 404580 - DNA, 75 bp, synthetic construct
  source 1..75: mol_type = other DNA
aatttaagaattactgtgaaccttatagcgtttttgatgaagatgagttacagcttctatatatgaaaaaaatta

SEQ ID NO: 404581 - DNA, 75 bp, synthetic construct
  source 1..75: mol_type = other DNA
gtgtgtggttcaggaaattaaagatattcacgatttcttaacttatgaggaatttaagaattactgtgaacctta

SEQ ID NO: 404582 - DNA, 75 bp, synthetic construct
  source 1..75: mol_type = other DNA
tggatacactcaaagccatcgttgatggaagaaaatcagatggagctggcgttacgcaccagcgaagctttatta

SEQ ID NO: 404583 - DNA, 75 bp, synthetic construct
  source 1..75: mol_type = other DNA
tatcagcgaactgaacagcctgagcgataaaatccagaaactgtctgacgatgcggccacggcgaacgccgatcc

SEQ ID NO: 404584 - DNA, 75 bp, synthetic construct
  source 1..75: mol_type = other DNA
tggagaaaagcgtcaccacgcgggactacaactaccgcagcgccacagcggagatgatgacagagcagcatgacg

SEQ ID NO: 404585 - DNA, 75 bp, synthetic construct
  source 1..75: mol_type = other DNA
cccccgcaacattgcgcctcaccggaacccttccggcttgccgctgattctacgactgtttttctgttccggaat

SEQ ID NO: 404586 - DNA, 75 bp, synthetic construct
  source 1..75: mol_type = other DNA
agtatccaattgttctcattatcattgttgccatagttgtaggcggtattgttagcgccattgaagcacttagga

SEQ ID NO: 404587 - DNA, 75 bp, synthetic construct
  source 1..75: mol_type = other DNA
atgaatatgatgatctcatatcaggaacttgttcgcaccttccttaagcaacagaacaaaactcagcagggtgta

SEQ ID NO: 404588 - DNA, 75 bp, synthetic construct
  source 1..75: mol_type = other DNA
agaacagacttagtatcaacagagagtgggaggcatggggatcaagatatgtttctgttatgaatagtagtcttc

SEQ ID NO: 404589 - DNA, 75 bp, synthetic construct
  source 1..75: mol_type = other DNA
taacggtgaatcgttaagcgaacatatgctggatgtgtggttaaagggaaatatcagcccgtcggcggaactgtt

SEQ ID NO: 404590 - DNA, 75 bp, synthetic construct
  source 1..75: mol_type = other DNA
catgatcctggcttgcgaagcaatccgccgcgattttccctcgcaagatgtttacgacgaactggagcgtctcgt

SEQ ID NO: 404591 - DNA, 75 bp, synthetic construct
  source 1..75: mol_type = other DNA
tctctccagcaaccaatgccaccagggattaagcccccgcaacattgcgcctcaccggaacccttccggcttgac

SEQ ID NO: 404592 - DNA, 75 bp, synthetic construct
  source 1..75: mol_type = other DNA
atattgcaggcgtaaaacacgactcggcgcacaccgaccatgtgaccatccagaactacaagcgcaacgtgctgc

SEQ ID NO: 404593 - DNA, 75 bp, synthetic construct
  source 1..75: mol_type = other DNA
aggcagcggaaagcggcgcgttttacgcccgtatccgccacgaacgctacctgaatgaacaggctattctcaaag

SEQ ID NO: 404594 - DNA, 75 bp, synthetic construct
  source 1..75: mol_type = other DNA
gagccggagtcggtgctgatgcaggatggcgcattcagcctgagcgccccgccggtacagggaatgccggtacag

SEQ ID NO: 404595 - DNA, 75 bp, synthetic construct
  source 1..75: mol_type = other DNA
gcaaatcgtcgaaaaaatcctgcgcgagcggcaccagatgcgcggtcaggacttcgtgtttaacctcaaaagcga

SEQ ID NO: 404596 - DNA, 75 bp, synthetic construct
  source 1..75: mol_type = other DNA
catatcaaggtcagtaccgagtacggcggcaagagccagctaaacctcggccatctggtggatgccggaaaacag

SEQ ID NO: 404597 - DNA, 75 bp, synthetic construct
  source 1..75: mol_type = other DNA
ctacaactaccgcaccgccacagcagagatgatgacagagcagcatgacgccaccgggggcgataacaccaccta

SEQ ID NO: 404598 - DNA, 75 bp, synthetic construct
  source 1..75: mol_type = other DNA
atggatgccctgcaattattaacctggtcgctgatcctctatctgtttgccagtctggcttcgctgtttttactc

SEQ ID NO: 404599 - DNA, 75 bp, synthetic construct
  source 1..75: mol_type = other DNA
ccagcgataatctgactctgacagcaggtaagcaactggatattggcgtacagaaagactttacgctggcagcag

SEQ ID NO: 404600 - DNA, 75 bp, synthetic construct
  source 1..75: mol_type = other DNA
cggcgcgggtcaccagtacggtgaagaacgacatctacgcccatatcgacaaggacgggcgctaccgggtcaacc

SEQ ID NO: 404601 - DNA, 75 bp, synthetic construct
  source 1..75: mol_type = other DNA
catatcaaggtcagcaccgaatacggcggcaagagccagctaaacctcggtcatctggtggatgccgggaaacag

SEQ ID NO: 404602 - DNA, 75 bp, synthetic construct
  source 1..75: mol_type = other DNA
cgcgccgaaaggtgtggcggtcgccagcggcgagcacctgcaactggccgcagtgaaaaacctccagataaatgc

SEQ ID NO: 404603 - DNA, 75 bp, synthetic construct
  source 1..75: mol_type = other DNA
cgctgccgcttcgtcatccttcagggctgtttgatggtgagacggaagccgtatgggggctgaacacggcgtaca

SEQ ID NO: 404604 - DNA, 75 bp, synthetic construct
  source 1..75: mol_type = other DNA
cgggggctatatcaaaattaaaagtggcaatgtggagattggcggtccgggaaaactattggttaaaaatgccgg

SEQ ID NO: 404605 - DNA, 75 bp, synthetic construct
  source 1..75: mol_type = other DNA
ctgatagctgctgggctgagtgattaccaactaacggaaaaagattatcttatcctggaacattttaaaaatatt

SEQ ID NO: 404606 - DNA, 75 bp, synthetic construct
  source 1..75: mol_type = other DNA
gtgatcgaaatcttacatgaatactggaaaccactgctgtggaccgacggctatcgtttcactggcgtggcgatc

SEQ ID NO: 404607 - DNA, 75 bp, synthetic construct
  source 1..75: mol_type = other DNA
tagtgataggcggaattctggcgctgtttctggcgattggtcgcgtctcaagtaataaatacatccagtttccaa

SEQ ID NO: 404608 - DNA, 75 bp, synthetic construct
  source 1..75: mol_type = other DNA
gtttctggcgattggtcgcgtctccagcaataaatacatccagtttccaatctggttatttacctatatttttcg

SEQ ID NO: 404609 - DNA, 75 bp, synthetic construct
  source 1..75: mol_type = other DNA
ctgagcggggataccgacgaggcggatattgagcctgtcgatggcggaagtctgtttgtcacgaataacccggag

SEQ ID NO: 404610 - DNA, 75 bp, synthetic construct
  source 1..75: mol_type = other DNA
ccccgtttactggaaaacgggctgggaagaccccaaattgagcaattattgtccgtgcgttcgacattaaaacgg

SEQ ID NO: 404611 - DNA, 75 bp, synthetic construct
  source 1..75: mol_type = other DNA
actttgttctggaagattttattgatgaacttattggtcagttattacgtgaatgcccgttatccggatttgact

SEQ ID NO: 404612 - DNA, 75 bp, synthetic construct
  source 1..75: mol_type = other DNA
ttgagttattagaaaaagcgttaagagaaacgcaaagcgaactcaaaaaatataaagatgaagagaagaaaaagt

SEQ ID NO: 404613 - DNA, 75 bp, synthetic construct
  source 1..75: mol_type = other DNA
gggttaaaaactggctgagtatttacgggcgtctgacctgcggcattctggctgaaaaaatgaatatgccgccat

SEQ ID NO: 404614 - DNA, 75 bp, synthetic construct
  source 1..75: mol_type = other DNA
gcccgtgaacagcaaggtttttgcgaaggacgtatcaaagatatcgaagccaagctgtcgaacgcgcaggtgatt

SEQ ID NO: 404615 - DNA, 75 bp, synthetic construct
  source 1..75: mol_type = other DNA
tagttgtcggggagacagcaagaagtcaaaactatgctctgaatggatattctcgtggtaccaatgattttacaa

SEQ ID NO: 404616 - DNA, 75 bp, synthetic construct
  source 1..75: mol_type = other DNA
tatgtctgttgtactgtggtttttatttacgggtatacttccatgtggactattgttgttagtaaatatccgtta

SEQ ID NO: 404617 - DNA, 75 bp, synthetic construct
  source 1..75: mol_type = other DNA
atatatagctacgaaacaggcgcccactctgatttcgaatctattcgtgcggtggatttgcccctatatttccag

SEQ ID NO: 404618 - DNA, 75 bp, synthetic construct
  source 1..75: mol_type = other DNA
ctgagcggggataccgacgaagccggtattgatcctgacgtcgccggtgtcatgtctgtcccggataacgcagag

SEQ ID NO: 404619 - DNA, 75 bp, synthetic construct
  source 1..75: mol_type = other DNA
atagttaaaaattatggcgttactgatgtaataagttctattgcagtgaatggttatttttctgctgagccaatg

SEQ ID NO: 404620 - DNA, 75 bp, synthetic construct
  source 1..75: mol_type = other DNA
aggataaattaaaacataaagcagttcaatatattaatattgaagatctggagcttgatgttgaaaacccccgct

SEQ ID NO: 404621 - DNA, 75 bp, synthetic construct
  source 1..75: mol_type = other DNA
gtcacgcgcactttcagcacgaaatagaaaaccatcctgaatattttatcaaagttgacaatgtaacggtggcgt

SEQ ID NO: 404622 - DNA, 75 bp, synthetic construct
  source 1..75: mol_type = other DNA
tcgcccacgccggatcggtgctgattatgatcgccttcttgctgatggggcgcgaaagcggcagcctcgattttg

SEQ ID NO: 404623 - DNA, 75 bp, synthetic construct
  source 1..75: mol_type = other DNA
ttcggtcgcagtgctggccccgcgcctggaagcgctgatagcactccagcccgcagaaatgctccacgtactcgg

SEQ ID NO: 404624 - DNA, 75 bp, synthetic construct
  source 1..75: mol_type = other DNA
cacaagcgtccggtttgacgctggtttcggtcgcagtgctggccccgcgcctggaagcgctgatagcactccagc

SEQ ID NO: 404625 - DNA, 75 bp, synthetic construct
  source 1..75: mol_type = other DNA
tgcccccccccacaggggccacaccggcctacctgctggccccggaagtcagtgcccttcttttctatatgccgg

SEQ ID NO: 404626 - DNA, 75 bp, synthetic construct
  source 1..75: mol_type = other DNA
gaccatgtggaataccggcatccggattggtgaagcccggacgctgacaccggagtcatttgattgtcagcgcca

SEQ ID NO: 404627 - DNA, 75 bp, synthetic construct
  source 1..75: mol_type = other DNA
tgagaaatcgtcagttcgtgctgatagctctggtagtcgtggtaaggcgagtctggagctgtttgatgctgtgtt

SEQ ID NO: 404628 - DNA, 75 bp, synthetic construct
  source 1..75: mol_type = other DNA
atggacattcctcaaaaaattcgcgtcatgcgtaaatctgaagatctcactcagcgggaattcgctgatatgatt

SEQ ID NO: 404629 - DNA, 75 bp, synthetic construct
  source 1..75: mol_type = other DNA
gggcgatcgctacgccaatgaacggcatggatgatagcgacgtgaagcccgacgcggagccttcgattcctctgc

SEQ ID NO: 404630 - DNA, 75 bp, synthetic construct
  source 1..75: mol_type = other DNA
tagtgatattggcattgactccaatgatacagacgatattacttttgatattgatattgatattgaaaatcaaga

SEQ ID NO: 404631 - DNA, 75 bp, synthetic construct
  source 1..75: mol_type = other DNA
caccagcacggtgaaaaacgatatttatgcccatatagacaaagacgggcgctaccgggtcaacctcgattttga

SEQ ID NO: 404632 - DNA, 75 bp, synthetic construct
  source 1..75: mol_type = other DNA
ttcactgctgatgccggggctggaaatcagggttcagggcgacgacgcgcctgcggtattccgcaagggcgtgct

SEQ ID NO: 404633 - DNA, 75 bp, synthetic construct
  source 1..75: mol_type = other DNA
acacaccgaccatgtgaccattcagaactacaagcgcaacgtgctacgcaccccggcgaacaacaaaatccgcct

SEQ ID NO: 404634 - DNA, 75 bp, synthetic construct
  source 1..75: mol_type = other DNA
acaatattgttgttaatatcgttgtttgggatggcgcaggagatatgtttgccgattttaaggcagttaatatct

SEQ ID NO: 404635 - DNA, 75 bp, synthetic construct
  source 1..75: mol_type = other DNA
acaagcgatgatggtcgatcagaaatatttttttctgataaggatggggaaatattaatacatctatttgtcgag

SEQ ID NO: 404636 - DNA, 75 bp, synthetic construct
  source 1..75: mol_type = other DNA
atcgcccggcgcttatcccccgccccgtaatggccggaacactcccggcgcgggtcaccagcacggtgaaaaacg

SEQ ID NO: 404637 - DNA, 75 bp, synthetic construct
  source 1..75: mol_type = other DNA
ccggcgcttatcccccgcccggtaatggccggcacgctcccggcgcgggtcaccagcacagtgaagaacgatatt

SEQ ID NO: 404638 - DNA, 75 bp, synthetic construct
  source 1..75: mol_type = other DNA
ggcgccacggaagcggtatggggactgaacaccgcgtacagggtggtggaaaaaagcgtctccacgcgggactac

SEQ ID NO: 404639 - DNA, 75 bp, synthetic construct
  source 1..75: mol_type = other DNA
agaatgtgatagccaacgcaggcaacaacgccgatgttggcgtggtgaaaaatatgtttatcggcgtgggacagg

SEQ ID NO: 404640 - DNA, 75 bp, synthetic construct
  source 1..75: mol_type = other DNA
gcgcgggtcaccagcacggtgaaaaacgatatctatgcccatatcgacaaggacgggcgctaccgggtcaacctc

SEQ ID NO: 404641 - DNA, 75 bp, synthetic construct
  source 1..75: mol_type = other DNA
gcgtggtggaaaaaagtgtctccacgcgggactacaactaccgtgaagccacggcggaaatgaccacaggccagc

SEQ ID NO: 404642 - DNA, 75 bp, synthetic construct
  source 1..75: mol_type = other DNA
atcgccagcggagagcacctgcaactggcggcatcgaaaaacctgatcgcgaacgcaggaaatcacgctgacatc

SEQ ID NO: 404643 - DNA, 75 bp, synthetic construct
  source 1..75: mol_type = other DNA
taagcttatttctgaaaaatatgattggcaaaatattgtggacagatacgttacaaagctacaagatatttccga

SEQ ID NO: 404644 - DNA, 75 bp, synthetic construct
  source 1..75: mol_type = other DNA
tctgccgcatgtggcgaaggagtccggtttcgcattaaaaggcggcaccgcaatcaatttgtttgtgcaggattt

SEQ ID NO: 404645 - DNA, 75 bp, synthetic construct
  source 1..75: mol_type = other DNA
ccgtcccattgccgagttgctggcttcaaactgggatacagatcggattgccacgttatacgctcaggaattttc

SEQ ID NO: 404646 - DNA, 75 bp, synthetic construct
  source 1..75: mol_type = other DNA
gacgcggtcattaccgaggcgcaaaaagtaaaagccatgaaactgccggaggaagcccaggagaaaatgatcctg

SEQ ID NO: 404647 - DNA, 75 bp, synthetic construct
  source 1..75: mol_type = other DNA
acagggtaagccgcaggtctggctcgcgcttccggcttacgtcaaactgccgggatggttttctgcctttgaaca

SEQ ID NO: 404648 - DNA, 75 bp, synthetic construct
  source 1..75: mol_type = other DNA
atggcttcaccaccatgaatgtcgtctcgctggcagatctatacggcggtaaaatctgcgccgcgctcgatcgcc

SEQ ID NO: 404649 - DNA, 75 bp, synthetic construct
  source 1..75: mol_type = other DNA
cggtgctaaaagataaaaatcctgcgaagtatgtggcggcggtgagtaagctggagagggttctggagcagtatt

SEQ ID NO: 404650 - DNA, 75 bp, synthetic construct
  source 1..75: mol_type = other DNA
tacggtgcgtttgagtacaaaggcaaggttgttgagttcgaacaggacggcgagctgcgcgataacgaaaacgtg

SEQ ID NO: 404651 - DNA, 75 bp, synthetic construct
  source 1..75: mol_type = other DNA
aaaagcttgatgagaacgctgccgatgcaattcttcgccacgcttccgggcaacacttttacaatacttcgccgt

SEQ ID NO: 404652 - DNA, 75 bp, synthetic construct
  source 1..75: mol_type = other DNA
gatgatgcgccgtcaggttgcggccatcggcaacattcccggcccgctggacatgaaacagctgcgaatgctcca

SEQ ID NO: 404653 - DNA, 75 bp, synthetic construct
  source 1..75: mol_type = other DNA
tggtttaatcacccgcacgtttggcgatttcgaacccgttgccaccactacgcttgcggcgttaggcctggagaa

SEQ ID NO: 404654 - DNA, 75 bp, synthetic construct
  source 1..75: mol_type = other DNA
gacgcggtcattgctgaggcgcaaaaagtaaaagccatgaaactaccagaggacgctcaggagaaaatgatcctg

SEQ ID NO: 404655 - DNA, 75 bp, synthetic construct
  source 1..75: mol_type = other DNA
gggatatcgggattgtggggtatgaaattccgtttaatcgtcatttttatgtttatcagccgccaaggccgctgg

SEQ ID NO: 404656 - DNA, 75 bp, synthetic construct
  source 1..75: mol_type = other DNA
aagtcagcatcgcgtttgaggaaggcaacccggaccgaccttatatcgcaggcgtaaaacacgactcggcgcaca

SEQ ID NO: 404657 - DNA, 75 bp, synthetic construct
  source 1..75: mol_type = other DNA
gatgcacgctccgaaaggagtggcggtcgccagcggcgagcacctgcaactggccgccgtgaaaaacctccagat

SEQ ID NO: 404658 - DNA, 75 bp, synthetic construct
  source 1..75: mol_type = other DNA
gatgcacgcaccgaaaggcgtggcggtcgccagcggcgagcacctgcaactggccgctgtgaaaaacctccagat

SEQ ID NO: 404659 - DNA, 75 bp, synthetic construct
  source 1..75: mol_type = other DNA
ggcaatgtggagattggcggtccgggaaaactattggttaaaaatgccggtattaagaaagcaggctccggtagt

SEQ ID NO: 404660 - DNA, 75 bp, synthetic construct
  source 1..75: mol_type = other DNA
cgccatctaccagaatcagacggtgccgcaaatcgtcgaaaaaatcctgcgcgagcgacatcagatgcgcggtca

SEQ ID NO: 404661 - DNA, 75 bp, synthetic construct
  source 1..75: mol_type = other DNA
gatgcacgccccgaaaggagtggcggtcgccagcggcgagcacctgcaactggccgctgtgaaaaacctccagat

SEQ ID NO: 404662 - DNA, 75 bp, synthetic construct
  source 1..75: mol_type = other DNA
gatgcacgctccgaaaggcgtggcggtcgccagcggcgagcacctgcaactggccgcagtgaaaaacctccagat

SEQ ID NO: 404663 - DNA, 75 bp, synthetic construct
  source 1..75: mol_type = other DNA
ttgaccgcgacgcatggaaaccgggttatgaaagcctgtgggtacgccagtcgcgcccgtatgcgggagacacct

SEQ ID NO: 404664 - DNA, 75 bp, synthetic construct
  source 1..75: mol_type = other DNA
aggcgggatattacgggcgtaagccgaaggcgaagctgacgccggagctgatggcatttccggtgattaagtctg

SEQ ID NO: 404665 - DNA, 75 bp, synthetic construct
  source 1..75: mol_type = other DNA
aagggtgggaagatagagctggggagtcctgggaatatcctgctgaagtcagtgaatgtgcagaagatgagtaaa

SEQ ID NO: 404666 - DNA, 75 bp, synthetic construct
  source 1..75: mol_type = other DNA
acggcctgcacctgccgctgctggctggaacggaagtcagtatcgcctttgaggaaggcaacccggaccgacctt

SEQ ID NO: 404667 - DNA, 75 bp, synthetic construct
  source 1..75: mol_type = other DNA
gtcaggtgctggagatgcagccagctctggctcgcctttctgcagcgttggtgacaatggaatctctggctgcca

SEQ ID NO: 404668 - DNA, 75 bp, synthetic construct
  source 1..75: mol_type = other DNA
gtcaggcgctgagcgtgtttgtgcgcaaggcgggtatcaagctgattgccaataaaggtgcagtatcggtacagg

SEQ ID NO: 404669 - DNA, 75 bp, synthetic construct
  source 1..75: mol_type = other DNA
cgccatctaccagaaccagacggtgccgcaaatcgtcgaaaaaatcctgcgcgagcgtcatcacatgcgcggtca

SEQ ID NO: 404670 - DNA, 75 bp, synthetic construct
  source 1..75: mol_type = other DNA
cagctaaacctcggtcatctggtggatgccgggaaacagcagcgcggggaaggctttgaactgcgtactgatctg

SEQ ID NO: 404671 - DNA, 75 bp, synthetic construct
  source 1..75: mol_type = other DNA
gctacatccggctggatgcctgcggaatagaagcgggaacgccgggagaatataacgttaaggccggatattacg

SEQ ID NO: 404672 - DNA, 75 bp, synthetic construct
  source 1..75: mol_type = other DNA
tggcggcaagagccagttaaacctcggccatctggtggatgccgggaaacagcagcgcggggaaggttttgaact

SEQ ID NO: 404673 - DNA, 75 bp, synthetic construct
  source 1..75: mol_type = other DNA
ataaaatagtgcaaataaccgaagtattacttgcagaatcgggggaagcatccggggttttattcaacaggctgt

SEQ ID NO: 404674 - DNA, 75 bp, synthetic construct
  source 1..75: mol_type = other DNA
attcgtatctccagtaacagggggtgtattttattgtgccggttcaggcgtgcgtttcccggcgcgtctgcaccg

SEQ ID NO: 404675 - DNA, 75 bp, synthetic construct
  source 1..75: mol_type = other DNA
tgattttatgccaacagccccctgtgactgacaggctgcctcgtcattctgaaccgccccgggaatcctggagac

SEQ ID NO: 404676 - DNA, 75 bp, synthetic construct
  source 1..75: mol_type = other DNA
tcgggacgccaatcgtaccgcgcaataaagctgaccctacgcagtcctcgcggcaggtcagcaggattttcaacg

SEQ ID NO: 404677 - DNA, 75 bp, synthetic construct
  source 1..75: mol_type = other DNA
ggcacacactgaccatgtgaccattcagaactacaagcgcaacgtgctacgcaccccggcgaacaacaaaatccg

SEQ ID NO: 404678 - DNA, 75 bp, synthetic construct
  source 1..75: mol_type = other DNA
cgccatctaccagaagcagacggtgccgcaaatcgtcgaaaaaatcctgcgcgagcgacatcatatgcgcggtca

SEQ ID NO: 404679 - DNA, 75 bp, synthetic construct
  source 1..75: mol_type = other DNA
ggatttttatcagcgccgatacgcaggacaaggcgcagggtcaggtcagagagatggccgacattatcagcgaac

SEQ ID NO: 404680 - DNA, 75 bp, synthetic construct
  source 1..75: mol_type = other DNA
ggatacctacggcctgcacctgccgctgctggcaggaacggaagtcagcatcgcctttgaggaaggcaacccgga

SEQ ID NO: 404681 - DNA, 75 bp, synthetic construct
  source 1..75: mol_type = other DNA
gaagaaaaaaataacgattaatggtggtggaagttatatccggattgagggtagcggcattgagccgggaacgcc

SEQ ID NO: 404682 - DNA, 75 bp, synthetic construct
  source 1..75: mol_type = other DNA
ttaatggatgatattgcgcacctgaagcaggaaaaccgcctgctgcgccagcgactttcccggtttgtagctcat

SEQ ID NO: 404683 - DNA, 75 bp, synthetic construct
  source 1..75: mol_type = other DNA
gttggcggcgtttcgcaagtgtttacttacaacagcgttatcaatgaccttcactattactggcaagggactcct

SEQ ID NO: 404684 - DNA, 75 bp, synthetic construct
  source 1..75: mol_type = other DNA
ttccctggttcgggcaattatttcgtcatgacggaaaagaagatgaacgacgcgagttagtggtgtttatcacgc

SEQ ID NO: 404685 - DNA, 75 bp, synthetic construct
  source 1..75: mol_type = other DNA
ctctggcgaaataaaaaatgaaaaacctgtaaaagtactggaaaaactgtccaaactctatcatctcacatggta

SEQ ID NO: 404686 - DNA, 75 bp, synthetic construct
  source 1..75: mol_type = other DNA
tattgactcactgctaaaatatctgagtgatacaatctcagtaaacaaaaactcttgcaatgtgagaaaaattac

SEQ ID NO: 404687 - DNA, 75 bp, synthetic construct
  source 1..75: mol_type = other DNA
ggtaggggctgtcgttacactttctcactttttgacgaactctacaccgacagctgctgtttatttagccggtgg

SEQ ID NO: 404688 - DNA, 75 bp, synthetic construct
  source 1..75: mol_type = other DNA
cacattgtcactattaatgaaaaaagcctgcgggaactgggggtgaaatggacgctggccgatgcgcaacacgtt

SEQ ID NO: 404689 - DNA, 75 bp, synthetic construct
  source 1..75: mol_type = other DNA
tttggttcatcgacgattgaatatttttccctgacaggtgcaaccaccgttggtgccgctttgtatgtcgcacag

SEQ ID NO: 404690 - DNA, 75 bp, synthetic construct
  source 1..75: mol_type = other DNA
ggcgtagctcagtacgccgaccgcctgttcctctctgcaaccactgacggcatcaattacgggcgtgagcagatg

SEQ ID NO: 404691 - DNA, 75 bp, synthetic construct
  source 1..75: mol_type = other DNA
gaaacaggcactacaaaccgtagtgaaaagcgccgggctgataacgcgccaggaaggcaacattctttcagtgca

SEQ ID NO: 404692 - DNA, 75 bp, synthetic construct
  source 1..75: mol_type = other DNA
caccacgcttggtagcgacctctccgtagcgacggcgacaacgcatgtcggttttaacattgggcgcatcaacgg

SEQ ID NO: 404693 - DNA, 75 bp, synthetic construct
  source 1..75: mol_type = other DNA
caattatttcgtcatgatggaaaagaagatgaacgacgtgagttggtggtatttatcacgccacggcttgtttcc

SEQ ID NO: 404694 - DNA, 75 bp, synthetic construct
  source 1..75: mol_type = other DNA
aattaaactatgcatcagcgacagatataacgtataaataccgcgaccaaaatgttgtcgtgcctggcgtcgtct

SEQ ID NO: 404695 - DNA, 75 bp, synthetic construct
  source 1..75: mol_type = other DNA
caggatacaaaacgttgccgatggtcgtaccgttgttgttttaccacggcattgaaagcccctatccctattcgc

SEQ ID NO: 404696 - DNA, 75 bp, synthetic construct
  source 1..75: mol_type = other DNA
tgatggcacggttaaaacagtctcaaactggcctacagacagcggattcacgcagtatgagttaggttctgttcg

SEQ ID NO: 404697 - DNA, 75 bp, synthetic construct
  source 1..75: mol_type = other DNA
cagtagccagtatgggctacagcaagaacacctgctgtttactccactgttcaaagcggataacgccagatgctt

SEQ ID NO: 404698 - DNA, 75 bp, synthetic construct
  source 1..75: mol_type = other DNA
gatggatgttaatcccgctgctgtttgtcttgcaaaagtcagtgagttgacaggggttgagcctggctgccgttg

SEQ ID NO: 404699 - DNA, 75 bp, synthetic construct
  source 1..75: mol_type = other DNA
ttgttttatcacggtattgaaagcccctatccctattcgctgtgttggctggattgtttcgccgatcccaacctg

SEQ ID NO: 404700 - DNA, 75 bp, synthetic construct
  source 1..75: mol_type = other DNA
aacgattttatcgacggtgttgccgaacgttcaccgaaacacaaggagagtttaatgactattgcggaaagattg

SEQ ID NO: 404701 - DNA, 75 bp, synthetic construct
  source 1..75: mol_type = other DNA
tttggttcatcgacgattgaatatttttccctgactggggcaaccaccgttggtgccgctttgtatgtcgcacag

SEQ ID NO: 404702 - DNA, 75 bp, synthetic construct
  source 1..75: mol_type = other DNA
gaacacctgctgtttactccactgttcaaagcggataacgccagatgcttcgatctggaggtggaatcatccact

SEQ ID NO: 404703 - DNA, 75 bp, synthetic construct
  source 1..75: mol_type = other DNA
ggtggcaagctctacaaaggcgaaagcgaagtcggtgacgtcgccggaagtggtcgcgtatcaatggcacatggt

SEQ ID NO: 404704 - DNA, 75 bp, synthetic construct
  source 1..75: mol_type = other DNA
acgtgcggcgataagctggaatccgtgaccgggaaattgcagttcgacatcagcagccagtatgggctacagcaa

SEQ ID NO: 404705 - DNA, 75 bp, synthetic construct
  source 1..75: mol_type = other DNA
aacattggcttcaaattgcgcgttatcacgaagtcacctgtcactctgtctggctgccagataaggattgagtaa

SEQ ID NO: 404706 - DNA, 75 bp, synthetic construct
  source 1..75: mol_type = other DNA
aactggcctacagacagcggattcacgcagtatgagttaggctcagtccgcgatattacgcgcttacgtgggcgt

SEQ ID NO: 404707 - DNA, 75 bp, synthetic construct
  source 1..75: mol_type = other DNA
tcttcgctcattcccgggcattgccaaacgttctgatgtgaacggcgtatcgcgtggcgtcgagtacaacatggc

SEQ ID NO: 404708 - DNA, 75 bp, synthetic construct
  source 1..75: mol_type = other DNA
cgcgtcacgtcctcgtgtacgacgcatcttcaagcgccaatggtccgcaatggtgtgtgctgaaaacaggcctgt

SEQ ID NO: 404709 - DNA, 75 bp, synthetic construct
  source 1..75: mol_type = other DNA
catgagttgctgattatccatcttccgcgccatgttctcgtgtacgacgcatcttcaagcgccaatggtccgcaa

SEQ ID NO: 404710 - DNA, 75 bp, synthetic construct
  source 1..75: mol_type = other DNA
aaacgttctgatgtgaacggcgtatcgcggggcgtcgagtacaacatggcgcagaatgctgtttatcgcgtatgt

SEQ ID NO: 404711 - DNA, 75 bp, synthetic construct
  source 1..75: mol_type = other DNA
attgaacaaaacgagccgtttgtttatgacaagcgagtcatctggaagcgtgttggtcgaatccggcgaaacatt

SEQ ID NO: 404712 - DNA, 75 bp, synthetic construct
  source 1..75: mol_type = other DNA
tgaagggattcggcaaagacttcaaaaacgccgactatatcgactatctgccagtgaacatgctggcaactccca

SEQ ID NO: 404713 - DNA, 75 bp, synthetic construct
  source 1..75: mol_type = other DNA
ggtgtcaccaatcgccagcgcgagcattgagaaaattctccgctcctacactgctgatgaactggctgatggcgt

SEQ ID NO: 404714 - DNA, 75 bp, synthetic construct
  source 1..75: mol_type = other DNA
cagcgtgccgggcgcgtatttaaagacggcaggtatgttgatgcggaatatccggtacgtcaggaggtttacgac

SEQ ID NO: 404715 - DNA, 75 bp, synthetic construct
  source 1..75: mol_type = other DNA
gacgatatgctggcccgtcgccgtgagcttatccgtgaggccggactggaagagagcggtgtggtggatgcctgg

SEQ ID NO: 404716 - DNA, 75 bp, synthetic construct
  source 1..75: mol_type = other DNA
tacgttcagccgctggccaaattgctggcgaactacaaaatctctcaggccgatctggatgagtacctctacgcc

SEQ ID NO: 404717 - DNA, 75 bp, synthetic construct
  source 1..75: mol_type = other DNA
aatgttggcttcaaattgcgcgttatcacgaagtcacctgtaactctgtctggcgctcagataaggatcgagtaa

SEQ ID NO: 404718 - DNA, 75 bp, synthetic construct
  source 1..75: mol_type = other DNA
ccttcctccacgcaaaaggaactgggcgcaccaccttctgttggagatgcgattaaaaacattcccgatggaaca

SEQ ID NO: 404719 - DNA, 75 bp, synthetic construct
  source 1..75: mol_type = other DNA
ctgaagcgcaattgggtaaccagaaccgcagcagtctgaacattaagcagccgggagaaaattactggcaggatt

SEQ ID NO: 404720 - DNA, 75 bp, synthetic construct
  source 1..75: mol_type = other DNA
gcagagtgctgtttatcgcgtgtgtggtgggaagctttacaaaggcgaaagtgaagtcggtgatgttgccggaag

SEQ ID NO: 404721 - DNA, 75 bp, synthetic construct
  source 1..75: mol_type = other DNA
tatgcgtggtcaaaagacggcactgattcatggtttatcactgatcttgaagacgaatcgcatcctgaccgttac

SEQ ID NO: 404722 - DNA, 75 bp, synthetic construct
  source 1..75: mol_type = other DNA
aacatggcgagacttcatcgtctgttttggttcatcgacgattgagtatttttccctgactggtgcaaccaccgt

SEQ ID NO: 404723 - DNA, 75 bp, synthetic construct
  source 1..75: mol_type = other DNA
gcgaagtcggtgatgttgccggaagtggtcgtgtatcaatggcgcatggtcggacatctcaggctgtaggcgtta

SEQ ID NO: 404724 - DNA, 75 bp, synthetic construct
  source 1..75: mol_type = other DNA
tggtgctgctttgtatgtcgcgcagccatcactgatggtgcaaaaaggcatcgccgggacttactgcaaaacgcc

SEQ ID NO: 404725 - DNA, 75 bp, synthetic construct
  source 1..75: mol_type = other DNA
gggggcaagctgtataagggcgaaagcgaagtcggtgacgtcgccggaagtggtcgcgtatcaatggcgcatggt

SEQ ID NO: 404726 - DNA, 75 bp, synthetic construct
  source 1..75: mol_type = other DNA
agtcgggcgcatcaggaaaaatgtcggcttcaaattgcgcgttattacgaagtcaccagtcactctgtctggctg

SEQ ID NO: 404727 - DNA, 75 bp, synthetic construct
  source 1..75: mol_type = other DNA
cgtcgggcgaataaggaaaaatgtcggcttcaaattgcgcgttatcactaagtcacctgtcactctgtcaggctg

SEQ ID NO: 404728 - DNA, 75 bp, synthetic construct
  source 1..75: mol_type = other DNA
cagcagccagtacgacaagcaacaggaacacctgctgtttactccgttgttcaaagcggataacgccagatgctt

SEQ ID NO: 404729 - DNA, 75 bp, synthetic construct
  source 1..75: mol_type = other DNA
gcagagtgctgtttatcgcgtgtgtggcggcaagctgtacaaaggagaaagtgaagtcggtgatgttgccggaag

SEQ ID NO: 404730 - DNA, 75 bp, synthetic construct
  source 1..75: mol_type = other DNA
ggcggcaagctctacaaaggcgaaagcgaagtcggtgacgtcgccggaagtggtcgtgtatcaatggcgcatggt

SEQ ID NO: 404731 - DNA, 75 bp, synthetic construct
  source 1..75: mol_type = other DNA
atgccggttcagcaacttccgcttatgaaaggtgtcggcaaagatttccgaaacgccgactatatcgactatctg

SEQ ID NO: 404732 - DNA, 75 bp, synthetic construct
  source 1..75: mol_type = other DNA
ccatcactgatggtgcagaaaggaattgccggaacctactgcaaaacgccgtttgctgattcgtatgcgttcatc

SEQ ID NO: 404733 - DNA, 75 bp, synthetic construct
  source 1..75: mol_type = other DNA
taccgttttcgttcttctgacgggagcaagtctatggatttactattttataacgccacaaccagagatggtttt

SEQ ID NO: 404734 - DNA, 75 bp, synthetic construct
  source 1..75: mol_type = other DNA
atggtaggattgattcgcggtgtcagtgagggactcggcccggtcggcggcgcagctgctatctattcattaagc

SEQ ID NO: 404735 - DNA, 75 bp, synthetic construct
  source 1..75: mol_type = other DNA
atgacacgacaaaaagcaacgctcatagggctggtagcgatcgtcctgtggagcacgatggtaggattgattcgc

SEQ ID NO: 404736 - DNA, 75 bp, synthetic construct
  source 1..75: mol_type = other DNA
gagcccaatactatgccataaacagtgatgataaacgctcccgcatagacattgactctttatttttaaaaaagt

SEQ ID NO: 404737 - DNA, 75 bp, synthetic construct
  source 1..75: mol_type = other DNA
actgttggattcccacgtcttcggcagatcccgaaaggctatttacttgctggcagcgtattgtttgtcagctat

SEQ ID NO: 404738 - DNA, 75 bp, synthetic construct
  source 1..75: mol_type = other DNA
gcctcgcgctttccttaggttatgctgctacccgccatcaggcgatagaagtaggcatggtgaactatttatggc

SEQ ID NO: 404739 - DNA, 75 bp, synthetic construct
  source 1..75: mol_type = other DNA
gcttcagcgtggtttgaaagcagtaaagctatcatggcagaatcatttgcaacaggttccgatcatcaggttgta

SEQ ID NO: 404740 - DNA, 75 bp, synthetic construct
  source 1..75: mol_type = other DNA
tcgcctggcaacaactcgtcgaaaaaagccagctcatgttacgcctggcaacagaagaacaatgggacgaactca

SEQ ID NO: 404741 - DNA, 75 bp, synthetic construct
  source 1..75: mol_type = other DNA
atgaacgaatatcagtttgtgcttccgtacccgccgtcggtgaacacctactggcgaagaagggaaagccaatac

SEQ ID NO: 404742 - DNA, 75 bp, synthetic construct
  source 1..75: mol_type = other DNA
gcactcgataaaatgcaaatgggctggatatttagcgccggaatactcggtttgctacccggcgcgttggttggc

SEQ ID NO: 404743 - DNA, 75 bp, synthetic construct
  source 1..75: mol_type = other DNA
gtcgagcaataagatataattttcaagtggacgatgcaaaatttagacgcgataatgtaaaagaaataatttcta

SEQ ID NO: 404744 - DNA, 75 bp, synthetic construct
  source 1..75: mol_type = other DNA
cgacacccttgttgctgccggatatgagcatgacaaagcccgtgacctcatccagaaacaggtttacacgctgac

SEQ ID NO: 404745 - DNA, 75 bp, synthetic construct
  source 1..75: mol_type = other DNA
gtggttaagtggtattcctcagatagggtcgtatcttttttattttttaataccagttgttttgactaaagtcag

SEQ ID NO: 404746 - DNA, 75 bp, synthetic construct
  source 1..75: mol_type = other DNA
gaatcacgcgacgtttatgaaatcactttgcaggacgcaattaaaaacgctgcgggcatcatcaaagaaatcgaa

SEQ ID NO: 404747 - DNA, 75 bp, synthetic construct
  source 1..75: mol_type = other DNA
ttattctctatgcccccagcggggttattgccgataaattttcacatcgcaaaatgattacttccgcgatggtta

SEQ ID NO: 404748 - DNA, 75 bp, synthetic construct
  source 1..75: mol_type = other DNA
cagaagcctaccgcaatatgtggctgatgggcatggcggcgcttgccatggtgatcgtctttacctttttgctgt

SEQ ID NO: 404749 - DNA, 75 bp, synthetic construct
  source 1..75: mol_type = other DNA
gtgtgcgtacctggatcttacgtaatttgccgatggggatcgctcacggtacaggtatcggtatcggcctgtttc

SEQ ID NO: 404750 - DNA, 75 bp, synthetic construct
  source 1..75: mol_type = other DNA
agtgacctcgcggcagagctggcagacgtggaaatcatgacagagcagctgcgccttcagggatggaccggctga

SEQ ID NO: 404751 - DNA, 75 bp, synthetic construct
  source 1..75: mol_type = other DNA
atgagtaagaaactgattgccttatgtgcctgcccaatgggcctggctcacacctttatggccgctcaggcgctg

SEQ ID NO: 404752 - DNA, 75 bp, synthetic construct
  source 1..75: mol_type = other DNA
ttattttgcctgggcgaattatttccccgaacacgcaacttggcccgcgcgtgattgtagaacgtaatttaccta

SEQ ID NO: 404753 - DNA, 75 bp, synthetic construct
  source 1..75: mol_type = other DNA
tttttgtgcaaaatttgcgtcagggagaggctgctcatttcattaaacgcggcggtttgttatcttcgttgcgcc

SEQ ID NO: 404754 - DNA, 75 bp, synthetic construct
  source 1..75: mol_type = other DNA
ggcagaagtgccgctgctggataataacggcaaatttaacggtcagtacgaattgcgtctgatggtggcgctgga

SEQ ID NO: 404755 - DNA, 75 bp, synthetic construct
  source 1..75: mol_type = other DNA
aatcttccgcgcgctgtgcggtccgcttggcggcattatcaccacctacagcaaagtgaaatctcctacccgcgt

SEQ ID NO: 404756 - DNA, 75 bp, synthetic construct
  source 1..75: mol_type = other DNA
gtgattgtctttacctttttgctgttccaaaaaattcgtactgctgatagcgcccccgcaatggctagcagcaag

SEQ ID NO: 404757 - DNA, 75 bp, synthetic construct
  source 1..75: mol_type = other DNA
atgctctgtattcaggtcgcctttgcgataaccactattttaatgctgtggtcggtgtcgattaaagccgcctcg

SEQ ID NO: 404758 - DNA, 75 bp, synthetic construct
  source 1..75: mol_type = other DNA
accaaatcacgactccgtatcaaagtcatcgcagacgttccagactcccgccgccgcgacctcgataacatcctg

SEQ ID NO: 404759 - DNA, 75 bp, synthetic construct
  source 1..75: mol_type = other DNA
aggactctataacaaccccatctatcaatgaaggttacttgttcagtcctattagctcattaaagattagtgatt

SEQ ID NO: 404760 - DNA, 75 bp, synthetic construct
  source 1..75: mol_type = other DNA
ttgtaaattaacctatttagaaacagaagatgacgtcaatacttttaatgaagcccttaatgcaatgatgcgctg

SEQ ID NO: 404761 - DNA, 75 bp, synthetic construct
  source 1..75: mol_type = other DNA
gtggctttcctgcgttcggttaaatcccggctcggcatttttgccgggggatcacttattaagggcgcatggact

SEQ ID NO: 404762 - DNA, 75 bp, synthetic construct
  source 1..75: mol_type = other DNA
gtaaaacaacgcatatccttgaggtggcaccagaagcgcaggttcttgcggttgatattgacgaacagcgcctct

SEQ ID NO: 404763 - DNA, 75 bp, synthetic construct
  source 1..75: mol_type = other DNA
gtcgagcggttcgttaacatttggagattgctacatatcccttaacgagttcgccgcagagcttcgcaaaggagg

SEQ ID NO: 404764 - DNA, 75 bp, synthetic construct
  source 1..75: mol_type = other DNA
gcggcaatgcatgaaactattgaagccgttcgcagtgttgcggataactccagtggaattgccggatggcatttg

SEQ ID NO: 404765 - DNA, 75 bp, synthetic construct
  source 1..75: mol_type = other DNA
aaccagcaaaggcattctttctgtgcccgttcccgttggcaaattcctgttgattaacaacctgttctggctgca

SEQ ID NO: 404766 - DNA, 75 bp, synthetic construct
  source 1..75: mol_type = other DNA
gtctatttatgaagatgttcttactatgatccctcaacaatattcccatgataaagctgtggaaatcgggcgggc

SEQ ID NO: 404767 - DNA, 75 bp, synthetic construct
  source 1..75: mol_type = other DNA
gaatttgcctttatgggcggttcaatgggatctgtggtgggtgcgcgtttcgtgcgtgccgttgagcaggcgctg

SEQ ID NO: 404768 - DNA, 75 bp, synthetic construct
  source 1..75: mol_type = other DNA
cagatgataatggaattgattgggataacgtagacattattcatgcctggggcggctctaaaacagaaggtttat

SEQ ID NO: 404769 - DNA, 75 bp, synthetic construct
  source 1..75: mol_type = other DNA
gttgactatacggaattgccgttggtctctgtagattttaaccacgatccgcacagtgccattgtcgatggcact

SEQ ID NO: 404770 - DNA, 75 bp, synthetic construct
  source 1..75: mol_type = other DNA
ctatatcgaccagttcgttcagccgaaggatttcgaggaaggcgtgtggttgagcgagctttcagacgccattga

SEQ ID NO: 404771 - DNA, 75 bp, synthetic construct
  source 1..75: mol_type = other DNA
cccgcgatagctggattggacttctggaagaagcaggcatgaaaggcttcccacatgcggattacccggatgctg

SEQ ID NO: 404772 - DNA, 75 bp, synthetic construct
  source 1..75: mol_type = other DNA
ctgaaggcaacgcgctggtagctacgggcagcccgttcaatcccgtcgtgtggaaagataaagtctaccctatcg

SEQ ID NO: 404773 - DNA, 75 bp, synthetic construct
  source 1..75: mol_type = other DNA
gcgtggcggtgaaaacctccgctgaagctttacaacaagccattgacgataatttctggcaagccgaataccgcg

SEQ ID NO: 404774 - DNA, 75 bp, synthetic construct
  source 1..75: mol_type = other DNA
gcggtaacggtcggaacgctgatagcagccagtcgcgcggcgggtggtcagttaagcgagaaaaaaatcgtcttc

SEQ ID NO: 404775 - DNA, 75 bp, synthetic construct
  source 1..75: mol_type = other DNA
catcactgacgatgaatactatgaattcgttgacgaatttatccaggcagtgaagcaacgctggccgaacgtgtt

SEQ ID NO: 404776 - DNA, 75 bp, synthetic construct
  source 1..75: mol_type = other DNA
tcagtgactgggataccgacagcgatgtgctgtcactgctggatgtggtgcgcaatgtaaaaccagatattctga

SEQ ID NO: 404777 - DNA, 75 bp, synthetic construct
  source 1..75: mol_type = other DNA
accgccgtacctccatctaagcctgcgcccggtagtgaaggctaccgggctatttctctctccctttttcagatc

SEQ ID NO: 404778 - DNA, 75 bp, synthetic construct
  source 1..75: mol_type = other DNA
attaccacatgctatttatcttaaatggtaataaggcacaacaggatggcgtgattgctcatgctttcgggagat

SEQ ID NO: 404779 - DNA, 75 bp, synthetic construct
  source 1..75: mol_type = other DNA
atgatggtgagctagtgagtcttaaatatgcgacggacgccctgctgcattgtgcggaacagcttcgcaaaggag

SEQ ID NO: 404780 - DNA, 75 bp, synthetic construct
  source 1..75: mol_type = other DNA
ccgaacctgacttatcgcgttgtgtcgaattcccgattcagaacaacaatagaactggttgacggatcattgccg

SEQ ID NO: 404781 - DNA, 75 bp, synthetic construct
  source 1..75: mol_type = other DNA
tacagggatttattatcaacagatcaaataaaaagtgctctgaaaaagagagcaataaaaataatttccttcaag

SEQ ID NO: 404782 - DNA, 75 bp, synthetic construct
  source 1..75: mol_type = other DNA
tgatttttccagcacagccactgaccacgctaacaccggagcaggttgctgatatcactgatagtgtgcgcaaag

SEQ ID NO: 404783 - DNA, 75 bp, synthetic construct
  source 1..75: mol_type = other DNA
gcgatggccgaagaccagcagaaagcgattgagtcaattaagcaggctgatgcagctgttaagttggcacacgag

SEQ ID NO: 404784 - DNA, 75 bp, synthetic construct
  source 1..75: mol_type = other DNA
tgtttgtgggttaattggcactctggcacaaagccttgtggatctcactggtggagcctacctcttcattgctcc

SEQ ID NO: 404785 - DNA, 75 bp, synthetic construct
  source 1..75: mol_type = other DNA
acattctgtttggtaaattgcagaccactgcggctgaaaaattgcatgtggacccgctctggctggctgccgcaa

SEQ ID NO: 404786 - DNA, 75 bp, synthetic construct
  source 1..75: mol_type = other DNA
gaagcacaatatgtgacatttgtcgggcgattggaaaaaggaaaaggaatagatgatctgtattacatatgtaaa

SEQ ID NO: 404787 - DNA, 75 bp, synthetic construct
  source 1..75: mol_type = other DNA
tgtatacggcgcaatcaaaggactgtggccgatagtgattgtcatacttgcggccatttacagctataacctgat

SEQ ID NO: 404788 - DNA, 75 bp, synthetic construct
  source 1..75: mol_type = other DNA
agctgccagcaagttacatatcgatcccaactggctggcggcggccaatacctctggcgctacggggggcaaaat

SEQ ID NO: 404789 - DNA, 75 bp, synthetic construct
  source 1..75: mol_type = other DNA
aacgagcgcggtccaaagacaattagcggccgtccattctgggaagttgagccaggcccgcatgattatgaatat

SEQ ID NO: 404790 - DNA, 75 bp, synthetic construct
  source 1..75: mol_type = other DNA
agcaatatgatattgctgagagacaaatgaagtttgaacaggaagctgcatatgaatctcgacgcattaatatcg

SEQ ID NO: 404791 - DNA, 75 bp, synthetic construct
  source 1..75: mol_type = other DNA
aaacagttgaagaaggtgtaactagagcaaaagaagcagcggcaaacttacaacagttgaaagaacaatatgagc

SEQ ID NO: 404792 - DNA, 75 bp, synthetic construct
  source 1..75: mol_type = other DNA
gaaatacaggacgcagacggaaaagaaaatagtaccttacggagaatgggaacatatcaaagatatcgttctgaa

SEQ ID NO: 404793 - DNA, 75 bp, synthetic construct
  source 1..75: mol_type = other DNA
aacaaaaaaatacaagtagcactttatccaatattagtttctctttatttaaccttacaaaaattacgtggcgtg

SEQ ID NO: 404794 - DNA, 75 bp, synthetic construct
  source 1..75: mol_type = other DNA
ttacccagcggtcagacaacctcgcttacgcgttatcaaagcatcgataataaatccgggcaggcacaagatgat

SEQ ID NO: 404795 - DNA, 75 bp, synthetic construct
  source 1..75: mol_type = other DNA
aactagcatctaatcagatgtccgttgatgaaaatgctaggcaagaacaagctcgtaatgagtggctaagttctc

SEQ ID NO: 404796 - DNA, 75 bp, synthetic construct
  source 1..75: mol_type = other DNA
atgattacatatacgacgcgggacggtgaccgtctcgatcaaatctgctttgcggtctacgggagagcgtcaaaa

SEQ ID NO: 404797 - DNA, 75 bp, synthetic construct
  source 1..75: mol_type = other DNA
accgtgctgttaaccttcctgccacccgcgttgttgtatctgatcttcccgaacggcttcatttacgggatcggc

SEQ ID NO: 404798 - DNA, 75 bp, synthetic construct
  source 1..75: mol_type = other DNA
gcggcaatcttattccggcgattgtcattctctttggtataaccgtgattttgtgctggttcggcaacgtcttta

SEQ ID NO: 404799 - DNA, 75 bp, synthetic construct
  source 1..75: mol_type = other DNA
gcgcgatcattagcgaaacgatatcaatgaatctgggctaccatgccaatcctcgcattgtcgggatctgcacgg

SEQ ID NO: 404800 - DNA, 75 bp, synthetic construct
  source 1..75: mol_type = other DNA
gcggtaatgttattccagcgatagttattctctttggcataaccgtaattttgtgctggtttggtaacgtcttta

SEQ ID NO: 404801 - DNA, 75 bp, synthetic construct
  source 1..75: mol_type = other DNA
ggtgccgggctgtgcgccactatctgggcagtaattatccccgctgtactggcaatcaaagcccgcaagaagttt

SEQ ID NO: 404802 - DNA, 75 bp, synthetic construct
  source 1..75: mol_type = other DNA
aatatcccgcgagaaagctttaaggcgataatctcctcaggcggcaacgttgattcgctggtgaaatcgttcctc

SEQ ID NO: 404803 - DNA, 75 bp, synthetic construct
  source 1..75: mol_type = other DNA
gtcgtattacctcattgttcctcgggctgaagattatctcctttgtgatcgtgtttggttctttcttcttccagg

SEQ ID NO: 404804 - DNA, 75 bp, synthetic construct
  source 1..75: mol_type = other DNA
cgctgctggcgctggtgatttatctcttctggctctattgcacgatggggaatattccgcgagaaagctttaagg

SEQ ID NO: 404805 - DNA, 75 bp, synthetic construct
  source 1..75: mol_type = other DNA
cgcccactggccgctggtcagttggttaccgagcgtaatttcaacgtttttatgtttgattatcgcgggtttggt

SEQ ID NO: 404806 - DNA, 75 bp, synthetic construct
  source 1..75: mol_type = other DNA
gggcggtcattatccccgcggtgctggcaatcaaagctcgcaagaagtttcccaatcagatgttcacggtctggg

SEQ ID NO: 404807 - DNA, 75 bp, synthetic construct
  source 1..75: mol_type = other DNA
ggcaccaaacagcacggcattatcgagttttgcctgctggtgttctctaacttagggaaggtgcgaataagtggg

SEQ ID NO: 404808 - DNA, 75 bp, synthetic construct
  source 1..75: mol_type = other DNA
agattatctcctttgtaattgtttttggttctttcttcttccaggtcgattactccattctgcgcgattccacca

SEQ ID NO: 404809 - DNA, 75 bp, synthetic construct
  source 1..75: mol_type = other DNA
ggaaagcgatgcatctcatggactggtatctggaggaggcaagcacaatattttatcctatgtctgaacgatgcc

SEQ ID NO: 404810 - DNA, 75 bp, synthetic construct
  source 1..75: mol_type = other DNA
atgctgacggacgcgcagcgtgaaaccattttttctcgctggccaggtcctgtcacctttgtctttcccgcgtct

SEQ ID NO: 404811 - DNA, 75 bp, synthetic construct
  source 1..75: mol_type = other DNA
atggttaatcttgataccgtaacatttcttgatccagcaagtctatataacaagctggaactggatgtagacgat

SEQ ID NO: 404812 - DNA, 75 bp, synthetic construct
  source 1..75: mol_type = other DNA
atgtttctacggattatcgttatagcgatcaggatggcgatcaaacgtcatggcagttatcgcataccttttata

SEQ ID NO: 404813 - DNA, 75 bp, synthetic construct
  source 1..75: mol_type = other DNA
tctggcggatgcagaaaaggggaattgatccgtttaaagtagagaaaaccccctcccgccgtagacgaaaggggt

SEQ ID NO: 404814 - DNA, 75 bp, synthetic construct
  source 1..75: mol_type = other DNA
cctacgcacgcgcagcttatgggtgatgacaatcttcattgtgctcactggcggaattggcctggcgaagttcca

SEQ ID NO: 404815 - DNA, 75 bp, synthetic construct
  source 1..75: mol_type = other DNA
cagcgtccggttgataaggggctgattttaatcgcggcaagttacgagcagctcaaaccttatattgatgacagc

SEQ ID NO: 404816 - DNA, 75 bp, synthetic construct
  source 1..75: mol_type = other DNA
agttatgaccgtaagaatcatgatcatctttcggcctttacgggcacttatagctctacgctggctgtcagtcgc

SEQ ID NO: 404817 - DNA, 75 bp, synthetic construct
  source 1..75: mol_type = other DNA
atgtgtctacggattatcgttatagcgaacaggatggcgatcaaacgtcatggcagttatcgcataccttttata

SEQ ID NO: 404818 - DNA, 75 bp, synthetic construct
  source 1..75: mol_type = other DNA
tacatcagcaagacatcaatgttctggcacaggatgattaccaatcgttgtctattcagggaaacggtgcgctgg

SEQ ID NO: 404819 - DNA, 75 bp, synthetic construct
  source 1..75: mol_type = other DNA
ttaccaaaacaggcggtctgacggacggaaatgcgcaatggttcttacaggcaggtaaaactacatcacaggctt

SEQ ID NO: 404820 - DNA, 75 bp, synthetic construct
  source 1..75: mol_type = other DNA
tatgtgcaggcggggcggatggacaaccgcacattatttaatgcgcaaggtggaaactttacttttaacttcctg

SEQ ID NO: 404821 - DNA, 75 bp, synthetic construct
  source 1..75: mol_type = other DNA
gtacaacttagtgcttcccgcgcttttgtgatgcgtgactggattttgagtacttctgttggtgttttccatcgt

SEQ ID NO: 404822 - DNA, 75 bp, synthetic construct
  source 1..75: mol_type = other DNA
acggtacatttttatgataagcgtcatctgttccgcatggcagatgagcatctgcattataaagcgggcaatgcg

SEQ ID NO: 404823 - DNA, 75 bp, synthetic construct
  source 1..75: mol_type = other DNA
tatcaaaaattcgcacgttgataaatgaagcgaatctgctgattgattttgtcctggctgatacaggcaaaggaa

SEQ ID NO: 404824 - DNA, 75 bp, synthetic construct
  source 1..75: mol_type = other DNA
atgcgttctaacgatgcctttatggggctgcctcatgatgtatttgcgttcacgatgctacaggaattagttgcc

SEQ ID NO: 404825 - DNA, 75 bp, synthetic construct
  source 1..75: mol_type = other DNA
gctacccaagcgagaaatatcttaatgagctgatcaccaacattgagtttgctgcaagggcaccagttgaagtcg

SEQ ID NO: 404826 - DNA, 75 bp, synthetic construct
  source 1..75: mol_type = other DNA
ctttatgtttctgttcgttataataatggttgcatccctccttttggcgcaatgtcttacgaatcatttgagatt

SEQ ID NO: 404827 - DNA, 75 bp, synthetic construct
  source 1..75: mol_type = other DNA
caaccagaatggcataatcatcgcgccatataatgttcattacacggtgattcagtcccaggagaatacgtgggg

SEQ ID NO: 404828 - DNA, 75 bp, synthetic construct
  source 1..75: mol_type = other DNA
ctggcaacgctctcactctcctgtcagtcactggttgacgttgttcatcctcacaccaacatgccggaaccctgc

SEQ ID NO: 404829 - DNA, 75 bp, synthetic construct
  source 1..75: mol_type = other DNA
tcgatcatcggcttaatctttgacccagcggtgaaataccacggtctggtggcgatgccaagcctgactggcgaa

SEQ ID NO: 404830 - DNA, 75 bp, synthetic construct
  source 1..75: mol_type = other DNA
cttactgatttagtgtatgatggtgattttaaggtgcttgcgtggcttccatttccatcagatgtccttcctgct

SEQ ID NO: 404831 - DNA, 75 bp, synthetic construct
  source 1..75: mol_type = other DNA
tgattaatccacagggcgagattatcgctactgccgacgcgcatcaggcaacgcgcattgatgcggagctgtcga

SEQ ID NO: 404832 - DNA, 75 bp, synthetic construct
  source 1..75: mol_type = other DNA
cactgcccctgcactgatgtacgtgggtttgctgatgttaagtaacgtctcgaagctcgatttcaatgactttat

SEQ ID NO: 404833 - DNA, 75 bp, synthetic construct
  source 1..75: mol_type = other DNA
atggctggcctggtgtgtgccgtgttcatcgttctgacttgtaatatcgttaccggtattatgctgggctttgtg

SEQ ID NO: 404834 - DNA, 75 bp, synthetic construct
  source 1..75: mol_type = other DNA
cgctcacggtacaggtatcggtatcggcctgtttctgctgctgattgctgctaacggtgtgggaatggttatcaa

SEQ ID NO: 404835 - DNA, 75 bp, synthetic construct
  source 1..75: mol_type = other DNA
tgtctggtctgaaagctgcccgttcagcaaggagctggggaaactgacaaaaacagaatgtacggaagctggcgg

SEQ ID NO: 404836 - DNA, 75 bp, synthetic construct
  source 1..75: mol_type = other DNA
acactttcacccccattcagaagaaagaaagcttatttgccttattgggtataagtgatatcgataaatttgaaa

SEQ ID NO: 404837 - DNA, 75 bp, synthetic construct
  source 1..75: mol_type = other DNA
gaacaggacgctggtgaaagacggtcagtcatacagcatgtaccagagctgctgggcataccgggacacgtatgt

SEQ ID NO: 404838 - DNA, 75 bp, synthetic construct
  source 1..75: mol_type = other DNA
caaaaagcgcaggcagcgaagaaacacgccaggaaacacagccatcagcaaccggcaaaacctgctgcacaaccc

SEQ ID NO: 404839 - DNA, 75 bp, synthetic construct
  source 1..75: mol_type = other DNA
aagaaaagcatgggataattacttaattgttaaaccattggcgcaagttgcaggcattacaagaaaattaactag

SEQ ID NO: 404840 - DNA, 75 bp, synthetic construct
  source 1..75: mol_type = other DNA
atttttcatgttgaaggttctttgctgtctttattcttttttgtaattttatcattctcagtgagtggtattatc

SEQ ID NO: 404841 - DNA, 75 bp, synthetic construct
  source 1..75: mol_type = other DNA
cacagcagataaaccgcagtgagttcacaaactatacctgtgagcgggacacgatggtggaggaatactgctccc

SEQ ID NO: 404842 - DNA, 75 bp, synthetic construct
  source 1..75: mol_type = other DNA
cagtgcgccttttactccgaagaaggtgcctgtctgcatgaatatgccacgtactcctgtgagtcaaaaacatcc

SEQ ID NO: 404843 - DNA, 75 bp, synthetic construct
  source 1..75: mol_type = other DNA
cattactgggttttctggcgggtaactgcgtggggataatttcagaatatggcggacaaaaattaagcgaagcga

SEQ ID NO: 404844 - DNA, 75 bp, synthetic construct
  source 1..75: mol_type = other DNA
ctgtatcccggacgatcatgaactgatggccgggatggtgggcctgcaaaccgcgcatcgttacggtaatgcaac

SEQ ID NO: 404845 - DNA, 75 bp, synthetic construct
  source 1..75: mol_type = other DNA
gtcgcgatgtttgttatgtcaccaccattggtctgtcacaaatcgctgcggcacaaatgctgcatgtctttaaag

SEQ ID NO: 404846 - DNA, 75 bp, synthetic construct
  source 1..75: mol_type = other DNA
ggatggcgtgctgaaaggcactgagtgttcagagccgggtggtacgaaaaccggagtgatggaaggtaaaccctg

SEQ ID NO: 404847 - DNA, 75 bp, synthetic construct
  source 1..75: mol_type = other DNA
tgctggcgcagtatcgctatctcgggcttggcttttcgctttatgttggctgtgacaaccagtccagcgaaaatc

SEQ ID NO: 404848 - DNA, 75 bp, synthetic construct
  source 1..75: mol_type = other DNA
ttcaggggcagggtaccggcagtattcagaactttaagccgcaggagagcattcctggttataacgccagcccgg

SEQ ID NO: 404849 - DNA, 75 bp, synthetic construct
  source 1..75: mol_type = other DNA
cgaccggtgaaaccggaaaaaccatcacagagtcattcatgaacaagccgaaagacattctgtcaccggatgcgc

SEQ ID NO: 404850 - DNA, 75 bp, synthetic construct
  source 1..75: mol_type = other DNA
aaaacaggtgtgatggaaggtaaaccctggagcatcacacaggcgtgctgggcataccgggataaatatgtcaca

SEQ ID NO: 404851 - DNA, 75 bp, synthetic construct
  source 1..75: mol_type = other DNA
atgatttccgcttcgctgcaacaacgtaaaactcgcacccgccgcagcatgttgtttgtgcctggtgccaatgcc

SEQ ID NO: 404852 - DNA, 75 bp, synthetic construct
  source 1..75: mol_type = other DNA
acgaacggcgatttaagtgccgatatccggcagcttgagaacgcgctggcacgctgtgccagccaggtaaaaatg

SEQ ID NO: 404853 - DNA, 75 bp, synthetic construct
  source 1..75: mol_type = other DNA
gtctgtctgcagaaaaagcgcagctactgccagtttgattcgaagctggcgcagatagtccagcagcaggggcgt

SEQ ID NO: 404854 - DNA, 75 bp, synthetic construct
  source 1..75: mol_type = other DNA
ttcttctcatcaactgagttttctccgttccgatttgaatcggtccagttaaacttcaacaatcaggtaatgact

SEQ ID NO: 404855 - DNA, 75 bp, synthetic construct
  source 1..75: mol_type = other DNA
gcaagcagaagacacctgatgtaaatgcccgctcctctcagactcctgaagatagccgaagagccacgcaaagta

SEQ ID NO: 404856 - DNA, 75 bp, synthetic construct
  source 1..75: mol_type = other DNA
tgcgatgacaacacacaggattatcccacgaaaactgatctgggcggccgcagtcatttactggtatcaacggag

SEQ ID NO: 404857 - DNA, 75 bp, synthetic construct
  source 1..75: mol_type = other DNA
gcccgtcagatccaggggcagggtattggcagtattcagagttttaatccgcaggagagtatccccgggtataac

SEQ ID NO: 404858 - DNA, 75 bp, synthetic construct
  source 1..75: mol_type = other DNA
tgcttgttaaagttggtagtaaggcattaattcacggtggtgaatcaccagaggtactgcgtgtttggggctctt

SEQ ID NO: 404859 - DNA, 75 bp, synthetic construct
  source 1..75: mol_type = other DNA
atgaacccgaagaagctcgcctaatggcgggcttttttcgttctacgctccccgacgaaagatcgcaagtgaaat

SEQ ID NO: 404860 - DNA, 75 bp, synthetic construct
  source 1..75: mol_type = other DNA
aattactaccgtacccttctcggcggtagtggtctggcaagggcgtttctggttactgtcctttattcccggtgg

SEQ ID NO: 404861 - DNA, 75 bp, synthetic construct
  source 1..75: mol_type = other DNA
ggcaaattcgtaagctggaagatgagctgggcgtgatgttgctggagcggaccagccgtaaagtgttgttcaccc

SEQ ID NO: 404862 - DNA, 75 bp, synthetic construct
  source 1..75: mol_type = other DNA
gtaacccgacttccggcaaacgctgcccggactgtggctcttacgacactattccttggtccgatggctggatgt

SEQ ID NO: 404863 - DNA, 75 bp, synthetic construct
  source 1..75: mol_type = other DNA
ctcgtcttactggcaaacattgatcaccggcatcatcatcgttgccagcattagcgccacggcgtggagtcagca

SEQ ID NO: 404864 - DNA, 75 bp, synthetic construct
  source 1..75: mol_type = other DNA
gtaatggctacatctacattccatgcattgcgacgacaggaaacccggtgaaacttatgttgcagtggggaacgg

SEQ ID NO: 404865 - DNA, 75 bp, synthetic construct
  source 1..75: mol_type = other DNA
tgatatttctgatgtatcagccttccgaaatgcgctccagttagggaccgctgcaacacgagatgttggagcaga

SEQ ID NO: 404866 - DNA, 75 bp, synthetic construct
  source 1..75: mol_type = other DNA
atgaatattcgtgatcttgagtacctggtggcattggccgaacaccgccattttcggcgtgcggcagattcctgc

SEQ ID NO: 404867 - DNA, 75 bp, synthetic construct
  source 1..75: mol_type = other DNA
gaaagaccgcagtcgctggattgccgaatgtgccgagcgtaaacgcacaatgcttcgtcgttcagactttgactg

SEQ ID NO: 404868 - DNA, 75 bp, synthetic construct
  source 1..75: mol_type = other DNA
cgttaacgaaggaattcacccttccgaaaacagaggccgggactgaccgtatcatcaacctcattcagccagcga

SEQ ID NO: 404869 - DNA, 75 bp, synthetic construct
  source 1..75: mol_type = other DNA
gtaagttggcagcatcacctacctgttgatcttgccggtgcctggtttttctggggtgcctttatccttatcatt

SEQ ID NO: 404870 - DNA, 75 bp, synthetic construct
  source 1..75: mol_type = other DNA
ggcaatgaccatcattgcgcaatacggcatggtgctgttgctgcaaaaaattggtggcaactttgctgtcgcgtt

SEQ ID NO: 404871 - DNA, 75 bp, synthetic construct
  source 1..75: mol_type = other DNA
tgattaatccgcaaggcgagattatcgctactgccgacgcgcatcaggcaacgcgcattgatgcggagctgtcga

SEQ ID NO: 404872 - DNA, 75 bp, synthetic construct
  source 1..75: mol_type = other DNA
ttgctgacggcccgcgcgattgagaatcaggcgtatgtggcgggatgcaatcgcgtcggcagcgatggcaacggc

SEQ ID NO: 404873 - DNA, 75 bp, synthetic construct
  source 1..75: mol_type = other DNA
tgcaaaagatatcattctgggcgagttgaccaagagggttcaccggattttccccggcgctgatgtccgggttaa

SEQ ID NO: 404874 - DNA, 75 bp, synthetic construct
  source 1..75: mol_type = other DNA
ccggatggccattgccggcttcagtaactgctgtaaggactccggatgggggcagggtattggcctggcacattg

SEQ ID NO: 404875 - DNA, 75 bp, synthetic construct
  source 1..75: mol_type = other DNA
acaatcccgggttataccgataatccgccagagaccgggcattatggcggcgtgacgtcttccggctctgccagc

SEQ ID NO: 404876 - DNA, 75 bp, synthetic construct
  source 1..75: mol_type = other DNA
agtgatggtctgtgggggagacgtcttctgtctcgatggcgaatgcgataaggctcagagcgggcagagtaatga

SEQ ID NO: 404877 - DNA, 75 bp, synthetic construct
  source 1..75: mol_type = other DNA
gtgggcgtttttcgccgcgctggctgccggttggctggcctctgtaagtggactgtccgcgttctgggcgagcgt

SEQ ID NO: 404878 - DNA, 75 bp, synthetic construct
  source 1..75: mol_type = other DNA
gtgggcatttttcgctgcactggcttccggctggctggcctctgtgagtgggctttccggattctgggcaagcgt

SEQ ID NO: 404879 - DNA, 75 bp, synthetic construct
  source 1..75: mol_type = other DNA
gtgacacaagggcaggttctgaccggcagtggctgtactgctaacggtaactgtctttctggcgggaacggtgac

SEQ ID NO: 404880 - DNA, 75 bp, synthetic construct
  source 1..75: mol_type = other DNA
atgctctctcctgctgactttggcccgaaactgctggaagtgatcaaagcgcatttcccgcaggatgtgaagtaa

SEQ ID NO: 404881 - DNA, 75 bp, synthetic construct
  source 1..75: mol_type = other DNA
cggcaacaaatacgtggttggcgtgcgcaacatgctctctcctgccgactttggcccgaaactgctggaagtgat

SEQ ID NO: 404882 - DNA, 75 bp, synthetic construct
  source 1..75: mol_type = other DNA
attatcggtattgttctgctggcgctcggcggcctgaaaccgattcaaaccgccattatcgtcggaggatgcccg

SEQ ID NO: 404883 - DNA, 75 bp, synthetic construct
  source 1..75: mol_type = other DNA
accggttatgggcgagatcaaatccgaatgcaaccaagttatcacaagaaatatttttctgtgaaaggtaaaata

SEQ ID NO: 404884 - DNA, 75 bp, synthetic construct
  source 1..75: mol_type = other DNA
atgaccgttcgtattctggctgtgtgtggtaacggacaaggcagttccatgatcatgaaaatgaaagtggaccag

SEQ ID NO: 404885 - DNA, 75 bp, synthetic construct
  source 1..75: mol_type = other DNA
gatcatgaaaatgaaagtggaccagtatttaacccaatcaaacattgaccacacggtaaacagctgcgcggttgg

SEQ ID NO: 404886 - DNA, 75 bp, synthetic construct
  source 1..75: mol_type = other DNA
gtgaaaaacctccagataaatgcgggaaacaacgccgatatcggcgtagtgaagaatatgtttatcggcgtggga

SEQ ID NO: 404887 - DNA, 75 bp, synthetic construct
  source 1..75: mol_type = other DNA
atgatgagtattcctgccctaaactttgaccattcacaccacaaactcaaaatccgcggcctgcaaagtccggtg

SEQ ID NO: 404888 - DNA, 75 bp, synthetic construct
  source 1..75: mol_type = other DNA
gaccagagtggctatgagcgcgggctgacgttgccactgcgccatccttcagggctacacgacggagccacggaa

SEQ ID NO: 404889 - DNA, 75 bp, synthetic construct
  source 1..75: mol_type = other DNA
gttccgtctggttatgccctgatgcaggggcagacttttgacaaatctgcatacccgaaacttgcagccgcttat

SEQ ID NO: 404890 - DNA, 75 bp, synthetic construct
  source 1..75: mol_type = other DNA
acacagtagcaataggtgcgcatacacatacgctcgctattggttcgcacacacacaccattaccattgccgctt

SEQ ID NO: 404891 - DNA, 75 bp, synthetic construct
  source 1..75: mol_type = other DNA
aagtaataaaaccataaatattacggggcgtgttaatcccacagattacggtaactttgattcccgctatgtccg

SEQ ID NO: 404892 - DNA, 75 bp, synthetic construct
  source 1..75: mol_type = other DNA
tcgcccggcgcttatcccccgccccgtaatggccggaacactcccggcgcgggtcaccagcacggtgaaaaacga

SEQ ID NO: 404893 - DNA, 75 bp, synthetic construct
  source 1..75: mol_type = other DNA
tgttaacgttgttacagagaatagccagatggtggtaaaccacggcgttggcttctcagttcaaatcattgttaa

SEQ ID NO: 404894 - DNA, 75 bp, synthetic construct
  source 1..75: mol_type = other DNA
acaccacgtagcgtatcagcgtacaaaagagagcgtgttggctgcatctctgtttagcggtaaaacttacacgcc

SEQ ID NO: 404895 - DNA, 75 bp, synthetic construct
  source 1..75: mol_type = other DNA
gggaaaaatacctcttccattctttactatagataatgttctggagcctgatgcattgggagaacatatttataa

SEQ ID NO: 404896 - DNA, 75 bp, synthetic construct
  source 1..75: mol_type = other DNA
gaccttatattgcaggcgtaaaacacgactcggcacacactgaccatgtgaccattcagaactataagcgtaacg

SEQ ID NO: 404897 - DNA, 75 bp, synthetic construct
  source 1..75: mol_type = other DNA
atgggtattcagaatttcgatcattcacaccacaagctcaaaattcgcggcctgcaaagtccggtggatgtgctg

SEQ ID NO: 404898 - DNA, 75 bp, synthetic construct
  source 1..75: mol_type = other DNA
cacggcgatttaatcgcggtgggcaatactgccgaaagttacaaaccaaccgttgccgaagggtccggacgtgca

SEQ ID NO: 404899 - DNA, 75 bp, synthetic construct
  source 1..75: mol_type = other DNA
tccggtcgcggttgaaatcgacggcgttcccgtcccggcgtcagagtggccactgtgcgttatcaagcgagaaac

SEQ ID NO: 404900 - DNA, 75 bp, synthetic construct
  source 1..75: mol_type = other DNA
gaatccgggcgggaccaggattttctggtttatccggtgttgtttctctaccgacatcacttggagctccttatc

SEQ ID NO: 404901 - DNA, 75 bp, synthetic construct
  source 1..75: mol_type = other DNA
tgataaaaaaatcattgcagcgcgttactttaatgctaacaaggactatcagcgcgtagagtctctgcttaatgc

SEQ ID NO: 404902 - DNA, 75 bp, synthetic construct
  source 1..75: mol_type = other DNA
aactctctggtacaacagcattgattaccaactattcattgctgattttatacctcactctgagccagtcggcga

SEQ ID NO: 404903 - DNA, 75 bp, synthetic construct
  source 1..75: mol_type = other DNA
gagatcaacgatcagaaaactggttcaattccacagaggttgggggaaccgcatctggttctggtcttgatatgg

SEQ ID NO: 404904 - DNA, 75 bp, synthetic construct
  source 1..75: mol_type = other DNA
cctggtgttggtgaccttggcggttattcatcaggaacgggaaaccctcttgatgtaaatcctgctaaagcgaat

SEQ ID NO: 404905 - DNA, 75 bp, synthetic construct
  source 1..75: mol_type = other DNA
tatccgtcaggggtgattccagatatgcgcggctggacaatcaagggcaaacccgccagtggtcgcgccgtatta

SEQ ID NO: 404906 - DNA, 75 bp, synthetic construct
  source 1..75: mol_type = other DNA
acgggtacaacaactttccggtaggtgctccaatcccgtggccttctgattcagtacctacaggctatgccctga

SEQ ID NO: 404907 - DNA, 75 bp, synthetic construct
  source 1..75: mol_type = other DNA
actcaatatacatcagcaacaacaggttcctctggctcacattctcatactgtaggtattgtttctcatcagcac

SEQ ID NO: 404908 - DNA, 75 bp, synthetic construct
  source 1..75: mol_type = other DNA
tgattatggttcaaaaccaacaaccagttttgactacggcaataagtcctccactgaggggggatggcacgtaca

SEQ ID NO: 404909 - DNA, 75 bp, synthetic construct
  source 1..75: mol_type = other DNA
ggggacaggccgccgacggtaacgaaatagcgacgggaacgaaaacaacatcaactgcaggtaatcacgcgcata

SEQ ID NO: 404910 - DNA, 75 bp, synthetic construct
  source 1..75: mol_type = other DNA
gaaaaccaccagtgcttttgaccacggaacgaaaaccaccacgacctttgactacgggacaaaaaccactaatgc

SEQ ID NO: 404911 - DNA, 75 bp, synthetic construct
  source 1..75: mol_type = other DNA
actgattttcaggaaacactcactgatatctatgctgactatgttgctaaacaccacgtagcgtatcagcgcact

SEQ ID NO: 404912 - DNA, 75 bp, synthetic construct
  source 1..75: mol_type = other DNA
ggcaaacgcattccagtatgtaagcccactggaagaggggaatgttgtgtaccagcgtcgtgacctgctgccagg

SEQ ID NO: 404913 - DNA, 75 bp, synthetic construct
  source 1..75: mol_type = other DNA
agttgtggatcatgatgtatgcgctgctttcagtcttctcgttgctggatgttattttgaatctggcgcagaaat

SEQ ID NO: 404914 - DNA, 75 bp, synthetic construct
  source 1..75: mol_type = other DNA
agttgccgttaaaagggatatttcaggggatcaaactgatcggcgcgattctggtcggcatattaatgatctcac

SEQ ID NO: 404915 - DNA, 75 bp, synthetic construct
  source 1..75: mol_type = other DNA
cgctgatccttgcacagatgccagatgatgctgacatggtggcggttccggtgttcagtaaaggcacaaatgctt

SEQ ID NO: 404916 - DNA, 75 bp, synthetic construct
  source 1..75: mol_type = other DNA
tttgatgcgatcttagacaaagttcaggctgccgcaggtggattggctggacagattgaacgagtgatcgtattc

SEQ ID NO: 404917 - DNA, 75 bp, synthetic construct
  source 1..75: mol_type = other DNA
tggggcatgcggtgcaggctttccatttaaccaacgacacgctgggcgcgtttatgcgtgataacgactttgaca

SEQ ID NO: 404918 - DNA, 75 bp, synthetic construct
  source 1..75: mol_type = other DNA
actcagactgcggcaggagctgaaagccagcctggctgttttgctcagtggactgatgcaggggactgcggcctg

SEQ ID NO: 404919 - DNA, 75 bp, synthetic construct
  source 1..75: mol_type = other DNA
atgagacgccttcccgtgttttttgtcctggactgttcagagtccatgattggtgaaaacttgaaaaaaatgacc

SEQ ID NO: 404920 - DNA, 75 bp, synthetic construct
  source 1..75: mol_type = other DNA
caggaagaaaaaggtgactggaagccagttgtctacttacttactgacggtcgaccgacagatgacatttcagct

SEQ ID NO: 404921 - DNA, 75 bp, synthetic construct
  source 1..75: mol_type = other DNA
cgcatcagacagggagcgatatctctccggaggcgctgaagacccgcctgactgaacgctattttaccgattttg

SEQ ID NO: 404922 - DNA, 75 bp, synthetic construct
  source 1..75: mol_type = other DNA
cactggctgaacgcctgcgcagccagcttgtactccagcaggccattgcccgtctgcaacatcgtgaggcaaccg

SEQ ID NO: 404923 - DNA, 75 bp, synthetic construct
  source 1..75: mol_type = other DNA
ttaccgaaacgccggaatgtgccggatggcatatggcagaacgtcgcaccgaaactgctggggttttatgcgcaa

SEQ ID NO: 404924 - DNA, 75 bp, synthetic construct
  source 1..75: mol_type = other DNA
agcgttataccgccccttcagtcactgccagatggcacattcactcgcgaacaggctaaagcggtcgtagctcag

SEQ ID NO: 404925 - DNA, 75 bp, synthetic construct
  source 1..75: mol_type = other DNA
cggtactttacccacgccagacagtaagcagacccgtcttgtgcgtgaggtgtggcgacataccgttaatcgcgt

SEQ ID NO: 404926 - DNA, 75 bp, synthetic construct
  source 1..75: mol_type = other DNA
tgttctctggcaagacacataccccgaaaactgacgatgttctgatcgactacagcactctgttcggtgtgtctc

SEQ ID NO: 404927 - DNA, 75 bp, synthetic construct
  source 1..75: mol_type = other DNA
taatcattgttggcgcgatcgcgataatcgctttactggtacatggtttctggaccagccgtaaagaacgatctt

SEQ ID NO: 404928 - DNA, 75 bp, synthetic construct
  source 1..75: mol_type = other DNA
gaaaactgatgatgttcttatcgagtggggcaagctgtttaacgtatcagctatgaaagccactgtgaacgcttc

SEQ ID NO: 404929 - DNA, 75 bp, synthetic construct
  source 1..75: mol_type = other DNA
ctcagtagcgccaccaacagcgattcagaaacgctggcggcaacaccaatggcggtaaaggcagcatatgacctt

SEQ ID NO: 404930 - DNA, 75 bp, synthetic construct
  source 1..75: mol_type = other DNA
tcagcatacgcagaaactcccggtaccggtggtggaatgcatgcaactaacacaagcaaggcagcaagtaatcgc

SEQ ID NO: 404931 - DNA, 75 bp, synthetic construct
  source 1..75: mol_type = other DNA
ctatgttccgcgatcggccattaaaacgaatgaagtcaaaacgtgacgacgattcttatgacgaggatgtcgaag

SEQ ID NO: 404932 - DNA, 75 bp, synthetic construct
  source 1..75: mol_type = other DNA
atccgggaatgcatttccgtcgggttatccgcaacgcggaaggtcagcgacgctggcgctgccggaattctgaac

SEQ ID NO: 404933 - DNA, 75 bp, synthetic construct
  source 1..75: mol_type = other DNA
ggttcgtcagaacggcgaaatggtatggcgggtatggaattttgagccgggtggtgagtacctgatgaaccgtta

SEQ ID NO: 404934 - DNA, 75 bp, synthetic construct
  source 1..75: mol_type = other DNA
aaccggctccagttatggataaaccgaagcgcaaagaagcggtgattatcatgaacgtcgcggcgcatcacggta

SEQ ID NO: 404935 - DNA, 75 bp, synthetic construct
  source 1..75: mol_type = other DNA
ccaaccgccttatgcgtctgcgcagccgcgtcaaccggtccagcagccgcctgaagcgcaggtaccgccgcaaca

SEQ ID NO: 404936 - DNA, 75 bp, synthetic construct
  source 1..75: mol_type = other DNA
atgatgagggcgttggtgaggttcgtgttcaccgcgtgaatcatgccccggctaacgctcaggagcatgaggctg

SEQ ID NO: 404937 - DNA, 75 bp, synthetic construct
  source 1..75: mol_type = other DNA
gactgtactgactacccaagaggtgttggtcttctcatcgcaggttaaagacctggatgtatccaatcatcctga

SEQ ID NO: 404938 - DNA, 75 bp, synthetic construct
  source 1..75: mol_type = other DNA
aagatattgatgcggtgatggcggcacaaagcgatctggtggaagttatctataccctgcgtcaggtggtgtgcg

SEQ ID NO: 404939 - DNA, 75 bp, synthetic construct
  source 1..75: mol_type = other DNA
gacaccatgcgtgctatcggcaaaaataatatttcatatgttaccgcgtcgatgaattcgacgcggttttttagc

SEQ ID NO: 404940 - DNA, 75 bp, synthetic construct
  source 1..75: mol_type = other DNA
tggggctgccgatagttccgcgcagcaaggttgacccgacccgttcggcaaaacaggtcaccgcgatgttccggg

SEQ ID NO: 404941 - DNA, 75 bp, synthetic construct
  source 1..75: mol_type = other DNA
gctgatgttaccgcagagttatgccggacgaaaactggccaatctggcatcaatagaattatggccaacaaagga

SEQ ID NO: 404942 - DNA, 75 bp, synthetic construct
  source 1..75: mol_type = other DNA
gttccttttacagaaaaagattttcctgtgttgattaagtatgctactgatacagatatgaaactgctaagacac

SEQ ID NO: 404943 - DNA, 75 bp, synthetic construct
  source 1..75: mol_type = other DNA
tctccgctctcttacctcgttccgggttacgcaacagctccggcgctgatgtacgttggcctgttgatgttgagc

SEQ ID NO: 404944 - DNA, 75 bp, synthetic construct
  source 1..75: mol_type = other DNA
cggttttcgtagcgacctgtctggtcgccggactgggttctatcgcaatggggctgtgggccaatctgccgttgg

SEQ ID NO: 404945 - DNA, 75 bp, synthetic construct
  source 1..75: mol_type = other DNA
ggtaaagcgggcttcccgccagcggcagtttttgttgcaacttgtctggttgccgggattggttctatcgcgatg

SEQ ID NO: 404946 - DNA, 75 bp, synthetic construct
  source 1..75: mol_type = other DNA
atgaaaaaatttgctttactggcggggctgtttgtttttgcaccaatgacctgggcgcaggactacaatattaag

SEQ ID NO: 404947 - DNA, 75 bp, synthetic construct
  source 1..75: mol_type = other DNA
tcactttgatccgaataaaaccgggaaacatcttggaccctggtctcctgatgggcatctcggtgatctccccgc

SEQ ID NO: 404948 - DNA, 75 bp, synthetic construct
  source 1..75: mol_type = other DNA
ggcgtttaccgcattcagcctggtgctggggcaacatattagcgtacctgtcgcgctgggtgccgtgttcctgat

SEQ ID NO: 404949 - DNA, 75 bp, synthetic construct
  source 1..75: mol_type = other DNA
ttcactggtacaaatatccggtgacgtactggctgaacattatcacctctgccgggtgcctgatgggcggggata

SEQ ID NO: 404950 - DNA, 75 bp, synthetic construct
  source 1..75: mol_type = other DNA
aaagtgagccaggggaaggtgccggataccgcaaacccgtcgatgccgatccagttctgcccggctcctcccccc

SEQ ID NO: 404951 - DNA, 75 bp, synthetic construct
  source 1..75: mol_type = other DNA
ctgaccaccattctcaatccggaagccgttatctttgccaatccgatagcacagggggcctgtgctgcagatgcc

SEQ ID NO: 404952 - DNA, 75 bp, synthetic construct
  source 1..75: mol_type = other DNA
tgagtatgctatttatatgataaccatgttacgcgtttttgttatttctcgtcgtacattatttgaacgtgaggt

SEQ ID NO: 404953 - DNA, 75 bp, synthetic construct
  source 1..75: mol_type = other DNA
cagcagaacattgcaacttggtcaaaatgacagcgtattgtttccgtacgccgggttccagtcgggttttgtgga

SEQ ID NO: 404954 - DNA, 75 bp, synthetic construct
  source 1..75: mol_type = other DNA
gctcaccggatatatgtctgcttgaggcgcaccctgagaagttgtttacgcatgttttatatgctgactggcggg

SEQ ID NO: 404955 - DNA, 75 bp, synthetic construct
  source 1..75: mol_type = other DNA
gtttttaaacgtatcgggctggctattggttactgggagccgatggcactgacggatgtcacccgctcaccggga

SEQ ID NO: 404956 - DNA, 75 bp, synthetic construct
  source 1..75: mol_type = other DNA
tttcccgctgtcgctgggcagcacaaaagtgagtcagggaaaggtaccggatacggcaaacccgtcaatgccgat

SEQ ID NO: 404957 - DNA, 75 bp, synthetic construct
  source 1..75: mol_type = other DNA
caggtaaacgccggcaagttcatctacgacatgtcggcgcaggaactggcggacctgctggaagcggtgcaggcc

SEQ ID NO: 404958 - DNA, 75 bp, synthetic construct
  source 1..75: mol_type = other DNA
ccgtcatctttgccaatccgatagcacagggggcctgtgctgcagatgccattgccagcgcctttaacatgccca

SEQ ID NO: 404959 - DNA, 75 bp, synthetic construct
  source 1..75: mol_type = other DNA
atgattatccagccggaagcgattctctttggcaacatcatcgcccagggggcctgtgccgctgatgccgtggcc

SEQ ID NO: 404960 - DNA, 75 bp, synthetic construct
  source 1..75: mol_type = other DNA
gataccggtactgctcaacgacgacggcagaatcttcaacgaaggactggcggataagttggcgaaagaaagaaa

SEQ ID NO: 404961 - DNA, 75 bp, synthetic construct
  source 1..75: mol_type = other DNA
tgtgacacgctccccttactgcatggtgaatctggggggctttaatatcaatattggtaatgtgggcagcggcag

SEQ ID NO: 404962 - DNA, 75 bp, synthetic construct
  source 1..75: mol_type = other DNA
aatttcacaacgtggaagcaccgtccgtcaggaagtggttgccgggttaacaacgtttctggcgatggtctactc

SEQ ID NO: 404963 - DNA, 75 bp, synthetic construct
  source 1..75: mol_type = other DNA
tgtacggtgacagcccgtgaataccgggacagtttttatgactatgacaacgccacgtatcccggcgatgtgagc

SEQ ID NO: 404964 - DNA, 75 bp, synthetic construct
  source 1..75: mol_type = other DNA
ccgtcaccccgggtgctgatacgctatcaggacggaaccgtgtcggggttactggagccggtaaaagtaagccgg

SEQ ID NO: 404965 - DNA, 75 bp, synthetic construct
  source 1..75: mol_type = other DNA
gagaccgtatcattctgacggatgacatccccggcaaccttacgctgtcgtgtctgattaccgggatgaaaaccg

SEQ ID NO: 404966 - DNA, 75 bp, synthetic construct
  source 1..75: mol_type = other DNA
tgatgataaatgaggcgatggcgcagatccttatttttccatttggttcagagcttgctgccttttgtggtgcgc

SEQ ID NO: 404967 - DNA, 75 bp, synthetic construct
  source 1..75: mol_type = other DNA
ctgataaatatgcccgggaaaaatacgagaccacgattaatcagagctattacctgagtagtaagtttgctactg

SEQ ID NO: 404968 - DNA, 75 bp, synthetic construct
  source 1..75: mol_type = other DNA
gttgcagtccgtaacgtgcgccgtgacgcgaacgacaaagtgaaagcactgttgaaagaaaaagagatcagcgaa

SEQ ID NO: 404969 - DNA, 75 bp, synthetic construct
  source 1..75: mol_type = other DNA
gagaccgtcgatatgttcgaggtgaatttctctttcccgaacggtatttgcggctttgacagtaagggcaaaaaa

SEQ ID NO: 404970 - DNA, 75 bp, synthetic construct
  source 1..75: mol_type = other DNA
cgcgttaatttcagagattgcaccacaatctgacagtacatgtcaggtaactgccaaagaataccgcgattcatt

SEQ ID NO: 404971 - DNA, 75 bp, synthetic construct
  source 1..75: mol_type = other DNA
aaactacttactggactcctggcagtgaattttttgactttgccactacggattctgtttctgcacttgagatgc

SEQ ID NO: 404972 - DNA, 75 bp, synthetic construct
  source 1..75: mol_type = other DNA
gttcaactctaccgaggtggggggaacatcatccggtaccggcctggatatggcacagaccgctccgacgtcggc

SEQ ID NO: 404973 - DNA, 75 bp, synthetic construct
  source 1..75: mol_type = other DNA
cgctggggctggagatggacgtcgacaccatcaacgcgctggaatccgcgtactggacgccacggggcgaaaatt

SEQ ID NO: 404974 - DNA, 75 bp, synthetic construct
  source 1..75: mol_type = other DNA
atagccagtgccgggaaatcccgcttcctgttaagcgatggtcttgcgacggtcaaccgcgaggggattaagccc

SEQ ID NO: 404975 - DNA, 75 bp, synthetic construct
  source 1..75: mol_type = other DNA
atgaaggtcgtggcgaatatgattctcatcattaccacagccatgagaactatatcgcgacgaaccgggaaggaa

SEQ ID NO: 404976 - DNA, 75 bp, synthetic construct
  source 1..75: mol_type = other DNA
ttttccggaaatcagcgaagcgaatatcctgagtacatttgaacagttgcatcagaataagggggaagtgtctga

SEQ ID NO: 404977 - DNA, 75 bp, synthetic construct
  source 1..75: mol_type = other DNA
atgatgaaacgccttatcgttcttgttttgcttgccagcacgctgctcacgggctgtaacaccgctcgcggtttc

SEQ ID NO: 404978 - DNA, 75 bp, synthetic construct
  source 1..75: mol_type = other DNA
atcggttacgcaatgtttgctgtactgtgggctgtgttctgtggcgcaaccgcgctggcaggtagctggggtggc

SEQ ID NO: 404979 - DNA, 75 bp, synthetic construct
  source 1..75: mol_type = other DNA
tttgatcttcgatcctaacgtccatttctccggcgttttcgccatgccttcattgagcgatgaaaacggcaattc

SEQ ID NO: 404980 - DNA, 75 bp, synthetic construct
  source 1..75: mol_type = other DNA
tgcgcaacttgccgcacggtgtggcgcacggcacggggattggtatcggtctgttcctgctgctcattgccgcta

SEQ ID NO: 404981 - DNA, 75 bp, synthetic construct
  source 1..75: mol_type = other DNA
atgcagtttctgcgattgcagctatcgcatctgcggtagcaacttatttagcatggcgatcctcagaagctagca

SEQ ID NO: 404982 - DNA, 75 bp, synthetic construct
  source 1..75: mol_type = other DNA
ttgctcacggtgatgagagcacttctcgtgttgttggtcgggttattgatgaaattaaactgccgcctgggacaa

SEQ ID NO: 404983 - DNA, 75 bp, synthetic construct
  source 1..75: mol_type = other DNA
tgttggcgtttcctcacttcgccgtggtgtagcagaagctattgaagccgttgctcacggtgacgaaagtacctc

SEQ ID NO: 404984 - DNA, 75 bp, synthetic construct
  source 1..75: mol_type = other DNA
gcgtaaacagtgagatagagcgcggacttctgctgagagaagatgaaccgccccgggtttcctggagagtgtttt

SEQ ID NO: 404985 - DNA, 75 bp, synthetic construct
  source 1..75: mol_type = other DNA
tcgccctattcgtccgcaaggttcgaccattgttgaagcgggtgatgaagtgttctttattgccgcttcacaaca

SEQ ID NO: 404986 - DNA, 75 bp, synthetic construct
  source 1..75: mol_type = other DNA
accgattgatcatctgatcgctccagaacaattggttatcgataatatttatcgactaatcgaatatcctggcgc

SEQ ID NO: 404987 - DNA, 75 bp, synthetic construct
  source 1..75: mol_type = other DNA
gccaggttggcggcacactggcggaaaacctggttggcgagaacaacgatattactgttgtcgataccaacggtg

SEQ ID NO: 404988 - DNA, 75 bp, synthetic construct
  source 1..75: mol_type = other DNA
agaaattacgctatgcccgttatattccaccaaaacaaaaaatctccaggctgtattatgttgaaaaagctctat

SEQ ID NO: 404989 - DNA, 75 bp, synthetic construct
  source 1..75: mol_type = other DNA
tgctcaggaaagcgtcggcgcttacgtcaacatcggttatatgtataaacacggacaaggcgttgagaaagatta

SEQ ID NO: 404990 - DNA, 75 bp, synthetic construct
  source 1..75: mol_type = other DNA
ttgctgaattaatccttaatacattaaataagatggctgaaagctttggctttacggataaccctcgatacattg

SEQ ID NO: 404991 - DNA, 75 bp, synthetic construct
  source 1..75: mol_type = other DNA
ccaggtctcagagcttcgcttgcatttatttaccgctgacctgtggagagcttcccatgaaggggatgcagaaga

SEQ ID NO: 404992 - DNA, 75 bp, synthetic construct
  source 1..75: mol_type = other DNA
caagcttgtggctcatcttgatagcaagagctatgaaagccctctgacgcaaactgaactcttcgccgtaaagcg

SEQ ID NO: 404993 - DNA, 75 bp, synthetic construct
  source 1..75: mol_type = other DNA
atgtcacaaacgctggatgacgaagtctttaaaaagctgggagcgcacggcgtcttccgtagtggcgatgccatt

SEQ ID NO: 404994 - DNA, 75 bp, synthetic construct
  source 1..75: mol_type = other DNA
ttggtctggttcaattacagcccctgacggaggaattgacatccatgttcaggttccaattgatcaactgaaagc

SEQ ID NO: 404995 - DNA, 75 bp, synthetic construct
  source 1..75: mol_type = other DNA
tccgcagaatcgcggaacgggaaacgcgaagtcgcggaacctattccgcaaaatcacggaaccgaaaacgcagaa

SEQ ID NO: 404996 - DNA, 75 bp, synthetic construct
  source 1..75: mol_type = other DNA
ttctactttactttcgctcttgggaactatttctgcaagatatattgttaagtactctggttattcttacttatc

SEQ ID NO: 404997 - DNA, 75 bp, synthetic construct
  source 1..75: mol_type = other DNA
tagccgatgtggctgacaaacgggagcttcgccagttcaaagaaacgccggaacagcgcttcgcgctggagcagg

SEQ ID NO: 404998 - DNA, 75 bp, synthetic construct
  source 1..75: mol_type = other DNA
gatcaaacaccatggtccgatgtgcaatggaatggcggttatgttgcaggttataatgatactgatacattcaag

SEQ ID NO: 404999 - DNA, 75 bp, synthetic construct
  source 1..75: mol_type = other DNA
aatctcagccccaggcgtaaccattactttaccatcgggaaaggggcaaaaactcaaaattgatgaagcaattaa

SEQ ID NO: 405000 - DNA, 75 bp, synthetic construct
  source 1..75: mol_type = other DNA
ggttctcttgccaacattcgcgagtacgccaaattcaactacggcgtaggcatgatgccttacgacgctgacgcg

SEQ ID NO: 405001 - DNA, 75 bp, synthetic construct
  source 1..75: mol_type = other DNA
tcccaacgacagttgattattatggttcagtattaatatctggaaatgctaatctcagtgctcctcaagtaaata

SEQ ID NO: 405002 - DNA, 75 bp, synthetic construct
  source 1..75: mol_type = other DNA
attgggtcgtatggatggcggagacgcgaatgccctgactgtgaatgtgacaaacagcaccctgacagccagcaa

SEQ ID NO: 405003 - DNA, 75 bp, synthetic construct
  source 1..75: mol_type = other DNA
tattgcaatacaattgatgcaaaatatactgccgttggaaataagtacgggaatgatgtagtacgtttcccttcc

SEQ ID NO: 405004 - DNA, 75 bp, synthetic construct
  source 1..75: mol_type = other DNA
acggcgcccgcattgacgtttctgcaacgcagcagggtaacggcggtacggccgtgctgtggtcagacagctaca

SEQ ID NO: 405005 - DNA, 75 bp, synthetic construct
  source 1..75: mol_type = other DNA
agccggtgctgccagtgttgcgctgacgccgttcatcggtgttccggtaggcattttcgtggggatttatgtctt

SEQ ID NO: 405006 - DNA, 75 bp, synthetic construct
  source 1..75: mol_type = other DNA
agccggtgctgccagtgtcgcgctgacaccgttcgtcggcgtgccggtgggtattttcgtcggcatttatgtctt

SEQ ID NO: 405007 - DNA, 75 bp, synthetic construct
  source 1..75: mol_type = other DNA
agtttttcagcaacagggagaattgtaaccattacaagccagggcacaggcacttttaattggacctacacaaaa

SEQ ID NO: 405008 - DNA, 75 bp, synthetic construct
  source 1..75: mol_type = other DNA
tttaagcgagatattttcaacactatcagccgctcagatggtatatccatttgtttcatctctatctcaatctgt

SEQ ID NO: 405009 - DNA, 75 bp, synthetic construct
  source 1..75: mol_type = other DNA
tcgccaaatatcgtgctaccgggcgtcgggttactggcggcatcgccaatgcacaggcctggttctctttaacct

SEQ ID NO: 405010 - DNA, 75 bp, synthetic construct
  source 1..75: mol_type = other DNA
caaagcgatggcccactgccagtggtcattgtagtgcaggaaatttttggcgtgcatgaacatatccgcgacatt

SEQ ID NO: 405011 - DNA, 75 bp, synthetic construct
  source 1..75: mol_type = other DNA
taacggaaaagagcagcgtccgctgtccgaacgggacaagattgatatcaataaaaacaacttcaacagcgtcat

SEQ ID NO: 405012 - DNA, 75 bp, synthetic construct
  source 1..75: mol_type = other DNA
gccgctgataacaatggatcttgccaataacgttgctgctgttgttactgaacgcgatgctaaggaaggtgcgaa

SEQ ID NO: 405013 - DNA, 75 bp, synthetic construct
  source 1..75: mol_type = other DNA
tatggacaaattgtttttgcaacagcattttttcaaatcttccagatagtagcacagttaggtagcgatgttata

SEQ ID NO: 405014 - DNA, 75 bp, synthetic construct
  source 1..75: mol_type = other DNA
agtggaagaaattgcggctaaaattagtgcacttaatgtacctcaagtgcgacgacttttggatgggaaaacata

SEQ ID NO: 405015 - DNA, 75 bp, synthetic construct
  source 1..75: mol_type = other DNA
agctactccccgaagcggagtacctaaccttcttatttcgggattatggaaagaagacagttacgcagcaaaaat

SEQ ID NO: 405016 - DNA, 75 bp, synthetic construct
  source 1..75: mol_type = other DNA
gtaagactcttaaacaaccaaataaaaaacttcgttatattgacccattaaaagttaaacgcctgatcggtggtt

SEQ ID NO: 405017 - DNA, 75 bp, synthetic construct
  source 1..75: mol_type = other DNA
gatggccaagtattaaaatcaacgactgaaattaaaaattatgatgggtccacgcgtgtcggcggtgaggcgtag

SEQ ID NO: 405018 - DNA, 75 bp, synthetic construct
  source 1..75: mol_type = other DNA
ctggcagcggtggcggttatcggttcgctgattatctttactctgcgtgtaaatcgcacggttgcgcagaccgac

SEQ ID NO: 405019 - DNA, 75 bp, synthetic construct
  source 1..75: mol_type = other DNA
aagtatcttatggaatgtgggccttgctctttttatctgttccatttattttggttttagctgttttactgggtg

SEQ ID NO: 405020 - DNA, 75 bp, synthetic construct
  source 1..75: mol_type = other DNA
gacagcgatgacaaaaagaaaaagccagccgaagacgaagacgatgaagacgacaaagtctccaaaacggcaatg

SEQ ID NO: 405021 - DNA, 75 bp, synthetic construct
  source 1..75: mol_type = other DNA
aagaaaattcacgccctgtcattgcgcaggattccgcttccgtcagtgagttcgaaaaagcattcccgaccgctg

SEQ ID NO: 405022 - DNA, 75 bp, synthetic construct
  source 1..75: mol_type = other DNA
gctccacgggattgaagtcgcgctgaagaaaggggatgtggctgaggcttcgaagctaattcataaggcaagtga

SEQ ID NO: 405023 - DNA, 75 bp, synthetic construct
  source 1..75: mol_type = other DNA
taaataatgttaatggattagagaaaacattatcatcgctacgttcacaagacttatcacgagataaatggaagt

SEQ ID NO: 405024 - DNA, 75 bp, synthetic construct
  source 1..75: mol_type = other DNA
atacatgttctgccttttcggatgtagtgaactttgttgtgggtagaacgcaggattttgcagggagtgccgtgg

SEQ ID NO: 405025 - DNA, 75 bp, synthetic construct
  source 1..75: mol_type = other DNA
aattgttaacctttgttcaaagattgctaatgaacgtagcgatatattagagaaattatatgaaaagtcaaaaga

SEQ ID NO: 405026 - DNA, 75 bp, synthetic construct
  source 1..75: mol_type = other DNA
gtttcgttttcaatcgtgctctggcgcttcagaatgagaatcataaggccggtaagaaatacatcccttacggga

SEQ ID NO: 405027 - DNA, 75 bp, synthetic construct
  source 1..75: mol_type = other DNA
atatgtgatgctttcagatcaagatgatgtatggaataatcaaaaattattagcttgcatggatgcaataaaaaa

SEQ ID NO: 405028 - DNA, 75 bp, synthetic construct
  source 1..75: mol_type = other DNA
gcgtctgtcgaagtatatctttgatgaagttcaggctggccgtcagcctaacctgtgggtgcgtttcgacttcgc

SEQ ID NO: 405029 - DNA, 75 bp, synthetic construct
  source 1..75: mol_type = other DNA
atgagcgatctgcataacgagtccatctttattactggtggcggatcgggattaggactggcactggtcgagcga

SEQ ID NO: 405030 - DNA, 75 bp, synthetic construct
  source 1..75: mol_type = other DNA
aggaaccatgacgctggaagagtacgtcgccgatcagattgcaaaaattaagcgcgatgcacgccatgtgcaaat

SEQ ID NO: 405031 - DNA, 75 bp, synthetic construct
  source 1..75: mol_type = other DNA
ccaggtgctgttcacgatagatgacagaacctatcgcgccgcgctggagcaggcgcaggcggcgttggcaagagc

SEQ ID NO: 405032 - DNA, 75 bp, synthetic construct
  source 1..75: mol_type = other DNA
atagggatttaaatcttattgcagaatcatttcaagagtaccaatcaataccctatgattggtataaaaatatta

SEQ ID NO: 405033 - DNA, 75 bp, synthetic construct
  source 1..75: mol_type = other DNA
aatggtgctatgccatacccaaatggcgctcgcgtgccttgggcaccaagccaaaccgacgtcttggctgatgac

SEQ ID NO: 405034 - DNA, 75 bp, synthetic construct
  source 1..75: mol_type = other DNA
cggtgtatcaggatggtacccgtaatatcggagaggtcaaaactggtgtggaaggtcaaataaatccccatctga

SEQ ID NO: 405035 - DNA, 75 bp, synthetic construct
  source 1..75: mol_type = other DNA
ccactacccgcagggcgttaagctcgatcaggaaaacagccgtatttttctgccgaaacttggctggatgcgcta

SEQ ID NO: 405036 - DNA, 75 bp, synthetic construct
  source 1..75: mol_type = other DNA
gaaaagaaaattaaactttcaaatatatcaaaaactcgtgcaaaagaatttcatatagacaagatttttagtgaa

SEQ ID NO: 405037 - DNA, 75 bp, synthetic construct
  source 1..75: mol_type = other DNA
caaaaatcgcattagtcatcggtttattcggaacagcgataactgctaatgctgcaacaagcaatgttactgcaa

SEQ ID NO: 405038 - DNA, 75 bp, synthetic construct
  source 1..75: mol_type = other DNA
gaaaagtttttttaagctaccaccatgatggtgaccaatattactatgatgaattctcaaaaaaatttcatgatg

SEQ ID NO: 405039 - DNA, 75 bp, synthetic construct
  source 1..75: mol_type = other DNA
ggacgttgtgctgaaactcatcagaaaagctatcaagaaatccccgctctgtgctgacgcatactcattctactg

SEQ ID NO: 405040 - DNA, 75 bp, synthetic construct
  source 1..75: mol_type = other DNA
gacgcagaacgatccgcgcgtcaccaaagtggggaactttctgcgccgcacctcgctggatgaactgccgcagtt

SEQ ID NO: 405041 - DNA, 75 bp, synthetic construct
  source 1..75: mol_type = other DNA
gcggaagacattgtgctggcgacgcttatcctgctgctgatctccccggtgctgtgctgtattgcgctggcggtg

SEQ ID NO: 405042 - DNA, 75 bp, synthetic construct
  source 1..75: mol_type = other DNA
aaaaagaattatacactctattccaggtggtacatggaaggactggccggaagaacttattgctgcttgtcatat

SEQ ID NO: 405043 - DNA, 75 bp, synthetic construct
  source 1..75: mol_type = other DNA
attgccggggacgtgggaaagccgtagaccagaaggaaacgaagaaacagggtgtgccggttatgactgactgca

SEQ ID NO: 405044 - DNA, 75 bp, synthetic construct
  source 1..75: mol_type = other DNA
aaaccagcatctctggctgcgcaaaagacatcattcaaaaatcaaaaaaatgggggctgaaggttatcccttcgc

SEQ ID NO: 405045 - DNA, 75 bp, synthetic construct
  source 1..75: mol_type = other DNA
cagggtgaacatgtcgaatttgccctgatcccggtcaccgcggtgaaatacacctacacggtgatcccggcgctg

SEQ ID NO: 405046 - DNA, 75 bp, synthetic construct
  source 1..75: mol_type = other DNA
cagcgatgcggcgggattactgacgctggcagcggtggcggtcatcggttcgctgattattttcactctgcgtgt

SEQ ID NO: 405047 - DNA, 75 bp, synthetic construct
  source 1..75: mol_type = other DNA
tttggcttggtaaaagtgaaatccctaaaatatatttagattgtatggagtcgtggaaagaacatgctgtaaatt

SEQ ID NO: 405048 - DNA, 75 bp, synthetic construct
  source 1..75: mol_type = other DNA
tacacccgccgttaccatcaacctggtatgtggttccggtctgaaagccgtacaccaggcagtgcaggcgatccg

SEQ ID NO: 405049 - DNA, 75 bp, synthetic construct
  source 1..75: mol_type = other DNA
tttacctaaagacagagaatcgattttctggcttaatgttcaggagatccctccagctccaaagggagatggggg

SEQ ID NO: 405050 - DNA, 75 bp, synthetic construct
  source 1..75: mol_type = other DNA
ctttctctcttcacaaagtccaaacataaaataatactatcttgggttattggcattatcgcattattaatgtct

SEQ ID NO: 405051 - DNA, 75 bp, synthetic construct
  source 1..75: mol_type = other DNA
tacatttttactgcacctaatgagaagatctctgtgaagaacgttggcaggatgatcggtaatgccgtgccggta

SEQ ID NO: 405052 - DNA, 75 bp, synthetic construct
  source 1..75: mol_type = other DNA
cacatccatacacccgattattgctggattccctccccgccattgataaaccgctggaggaagaatgggcattac

SEQ ID NO: 405053 - DNA, 75 bp, synthetic construct
  source 1..75: mol_type = other DNA
gcggcgagcgttggcagaggagttggctgtgcaggtgggtattcgtccggagtatctcgaccgcctgcctcatgc

SEQ ID NO: 405054 - DNA, 75 bp, synthetic construct
  source 1..75: mol_type = other DNA
cctataagggggaatgggttgattatttttcggaaggattaacaccagaagatgcgtttataaaaagaatggctc

SEQ ID NO: 405055 - DNA, 75 bp, synthetic construct
  source 1..75: mol_type = other DNA
gcacggacctggagcgcgccggagcattatgatctgtacattccctccattacctggcatgcgcggtttgcctat

SEQ ID NO: 405056 - DNA, 75 bp, synthetic construct
  source 1..75: mol_type = other DNA
acagaaaaatgttggtattgcgttgtttttcatcgttttttctttggattctggtaaccggaaacgtctgtgcgt

SEQ ID NO: 405057 - DNA, 75 bp, synthetic construct
  source 1..75: mol_type = other DNA
ggttctttatcaggatgtcgctcttcctgtttattatggattttctcatcggtatatacattcgtatttccggga

SEQ ID NO: 405058 - DNA, 75 bp, synthetic construct
  source 1..75: mol_type = other DNA
aagctgcaggtgctgcgtcaggtctgtctggtaccttttcatatatctttggttctatagtcgctacattaggaa

SEQ ID NO: 405059 - DNA, 75 bp, synthetic construct
  source 1..75: mol_type = other DNA
tggcgacgcagatcgcgctactggttggtgaggggtacagcctgagaaaaatagccagcatggagggatacccat

SEQ ID NO: 405060 - DNA, 75 bp, synthetic construct
  source 1..75: mol_type = other DNA
gacggtggagcagatacaaaaccagatggacccggtgtacacgccggcgcgaaaaatccacctgtaccactgcga

SEQ ID NO: 405061 - DNA, 75 bp, synthetic construct
  source 1..75: mol_type = other DNA
ccttgtatggctgtgggattatgccaaccgctcacaggcattgttccgtgagttgtatcccgcattaaaactgat

SEQ ID NO: 405062 - DNA, 75 bp, synthetic construct
  source 1..75: mol_type = other DNA
ggggggttttctgtttttgaaatcggtggtgtggctggtatgcttcttgccggatacctgtctgtcagactgttc

SEQ ID NO: 405063 - DNA, 75 bp, synthetic construct
  source 1..75: mol_type = other DNA
atggggtgcaacatttattattctgatactttccgctgttttcgctatcatgtttacattaatgagtcgagaacg

SEQ ID NO: 405064 - DNA, 75 bp, synthetic construct
  source 1..75: mol_type = other DNA
agccaaaaaagatgatgttagggtgacaaaagttggtaagtttctacgtagcacttcgcttgatgagctaccgca

SEQ ID NO: 405065 - DNA, 75 bp, synthetic construct
  source 1..75: mol_type = other DNA
caggcctaacggcgggtcgtatattcggactgacctcggctctgagtatcacgtcctggtcgacgtcgtaggcgc

SEQ ID NO: 405066 - DNA, 75 bp, synthetic construct
  source 1..75: mol_type = other DNA
cagatggatggctggcgcaacaacgcagaagtggcgcgcggaacaagccgttctccggagatatggccgggacgg

SEQ ID NO: 405067 - DNA, 75 bp, synthetic construct
  source 1..75: mol_type = other DNA
accagaagcgattatggcaaactaccaactggatgaacaattactggagggatgcaggccctggattgttatttt

SEQ ID NO: 405068 - DNA, 75 bp, synthetic construct
  source 1..75: mol_type = other DNA
atggaacatgacacgcggggcggcattcgtatggacagtcgctatgttagctgggaacgtctggaccatttcgac

SEQ ID NO: 405069 - DNA, 75 bp, synthetic construct
  source 1..75: mol_type = other DNA
gagtaaccttcctcggaaaaaatgtcaccatggggaaaactgattcatttacttatattatgaatcagactaaaa

SEQ ID NO: 405070 - DNA, 75 bp, synthetic construct
  source 1..75: mol_type = other DNA
ccgtctcagtatttaattgattggatgttgagtaagcactggaatgttcctgaagaacgtcatgtaattttaaat

SEQ ID NO: 405071 - DNA, 75 bp, synthetic construct
  source 1..75: mol_type = other DNA
agtgtgaatatatctattaataacactaccctgaatgcgtcaaatggcaacatccagttgaccgggaccgggacc

SEQ ID NO: 405072 - DNA, 75 bp, synthetic construct
  source 1..75: mol_type = other DNA
atattgtgctggcagcagacagggtcagcaacagtggcaccatccgtacgccgggcggcaagaccgtcctggcgg

SEQ ID NO: 405073 - DNA, 75 bp, synthetic construct
  source 1..75: mol_type = other DNA
agtaacattactcttaccgggagcagtacgagtgggaatgccatcaaccttacaggcactgccacgctgaatgcc

SEQ ID NO: 405074 - DNA, 75 bp, synthetic construct
  source 1..75: mol_type = other DNA
atgcactatcactcagattcggtgttttatgctgaggttgaaaagtgccaactactatgttctgcatgccacatt

SEQ ID NO: 405075 - DNA, 75 bp, synthetic construct
  source 1..75: mol_type = other DNA
aattcattacacgctttaagtctgtaagctgtttatttacggccagcgttcttttccccctacaaatctctgcgg

SEQ ID NO: 405076 - DNA, 75 bp, synthetic construct
  source 1..75: mol_type = other DNA
atgccatcaaccttaaaggcaacaacacgctgacggccagtaacattactcttaccggggaaagtacgagtggga

SEQ ID NO: 405077 - DNA, 75 bp, synthetic construct
  source 1..75: mol_type = other DNA
agtggcaggcgtggcacgacaccttaacgcgtttatataaccgtggcgcactgttcgaaaaagcccgtccgctcg

SEQ ID NO: 405078 - DNA, 75 bp, synthetic construct
  source 1..75: mol_type = other DNA
ggctcattacctgcaggcattaatttgctaaaaagctttattgagcagccttggctaggcttcgttgttaaaggt

SEQ ID NO: 405079 - DNA, 75 bp, synthetic construct
  source 1..75: mol_type = other DNA
ggtaggcaaatttttacgtagcacttcgcttgatgagttaccgcaattctttaatgtttggtgtgggcaaatgtc

SEQ ID NO: 405080 - DNA, 75 bp, synthetic construct
  source 1..75: mol_type = other DNA
agctttaggtattatttcattagttcatgactttgatcttaatataacagttgctgtaatatggtatgtaatagt

SEQ ID NO: 405081 - DNA, 75 bp, synthetic construct
  source 1..75: mol_type = other DNA
cacgtgtaaatgcaaatgcttcattaatatctatggtccaaaggttttcggatattctgattatttttttgggct

SEQ ID NO: 405082 - DNA, 75 bp, synthetic construct
  source 1..75: mol_type = other DNA
atgctgtctctcataacgaacagtatagatctcttattcaaggttacatgcttcgacataaggttaaaccgggta

SEQ ID NO: 405083 - DNA, 75 bp, synthetic construct
  source 1..75: mol_type = other DNA
ttttatttttcattcagtggtacttgctagttgatgttggtttttttgtatgtcgctcagttatcagattgatct

SEQ ID NO: 405084 - DNA, 75 bp, synthetic construct
  source 1..75: mol_type = other DNA
aacactttctgatccagcggaagagaaagcggtagtgcgttatgcccgtgaacataatctcggcaagattattct

SEQ ID NO: 405085 - DNA, 75 bp, synthetic construct
  source 1..75: mol_type = other DNA
aaataatacaccctattacattagcttttctgaggttttttttgattcagataaagtaaacaatgcaaaagatat

SEQ ID NO: 405086 - DNA, 75 bp, synthetic construct
  source 1..75: mol_type = other DNA
aataagacacgagtaatttactctgacagcacaccatcagttcaaatatcaaataataaagcatatcctttaatt

SEQ ID NO: 405087 - DNA, 75 bp, synthetic construct
  source 1..75: mol_type = other DNA
tccagcttgagcgggacaaagccgtactggctgaccgtcaggctgcccaccatgaacagcaggaaaccatccgta

SEQ ID NO: 405088 - DNA, 75 bp, synthetic construct
  source 1..75: mol_type = other DNA
accgtcattactgcgtaccgtgggaggctggttcggtggcgacaccgccagaacggcagattctgtggcggggat

SEQ ID NO: 405089 - DNA, 75 bp, synthetic construct
  source 1..75: mol_type = other DNA
gtccgttaaactcaggctacctcagggcactggacaatgtgttacaggagctggggcgcgaacgcacgattgcta

SEQ ID NO: 405090 - DNA, 75 bp, synthetic construct
  source 1..75: mol_type = other DNA
cgttttgatcaggaaggccagtaccaggattaccagcgcacgcagtatgaagtgtatgactaccccggacgtttc

SEQ ID NO: 405091 - DNA, 75 bp, synthetic construct
  source 1..75: mol_type = other DNA
aggtcggggaatcaacggtaatcaggctgtcgaaggatggcatcaccatcgtgggcggttctgttttcatcaact

SEQ ID NO: 405092 - DNA, 75 bp, synthetic construct
  source 1..75: mol_type = other DNA
gcctgtacaacatcgaagaaattatgcgatggatcgaaaaccagaaacaaccaggtgtcaaaaatgcaagttccg

SEQ ID NO: 405093 - DNA, 75 bp, synthetic construct
  source 1..75: mol_type = other DNA
atatagccctgagaaagttggagagctaaacatttctttggttggtatgaaggcaacgcttgaaggaataaagca

SEQ ID NO: 405094 - DNA, 75 bp, synthetic construct
  source 1..75: mol_type = other DNA
gttgtacatgcatgcccagaagaacatggataccgaggtgctgaataaccggaccacggatgtgaaggtaaacca

SEQ ID NO: 405095 - DNA, 75 bp, synthetic construct
  source 1..75: mol_type = other DNA
ggtccgcagagcgccgtcgtgacggggccggagggtgaggaaatcttctgtgatgaacatggccgagtgcgggtg

SEQ ID NO: 405096 - DNA, 75 bp, synthetic construct
  source 1..75: mol_type = other DNA
ctgatagaagactggcgcagtggtaagttgcagttgctcaaaactgaaaccagcagcggtgctaacgttacaacg

SEQ ID NO: 405097 - DNA, 75 bp, synthetic construct
  source 1..75: mol_type = other DNA
ccgggaaattattgaacgtgattatcacctgagcgcggctatgtactgcgaaaccgcagcgctggatcagttctt

SEQ ID NO: 405098 - DNA, 75 bp, synthetic construct
  source 1..75: mol_type = other DNA
gaagcgcaatctgacgaaccagctgttgtttatcccgcttatttcgagccaggccgctatgaagggctgccaaac

SEQ ID NO: 405099 - DNA, 75 bp, synthetic construct
  source 1..75: mol_type = other DNA
tgggcaacgcgtatggctggaaacttaagtctcgtgtggcgagaatcatcggtgaaaccactcgggcaacaaggt

SEQ ID NO: 405100 - DNA, 75 bp, synthetic construct
  source 1..75: mol_type = other DNA
caacgttggcctgctgccaggataacgggcatcgactcgtctccggcgatgattgctgaagcgcgcagtgctttg

SEQ ID NO: 405101 - DNA, 75 bp, synthetic construct
  source 1..75: mol_type = other DNA
tatatcgacaggatcggccgacggaaagggctgatggtcaccctggcgattatgggctgcggcacgctgctcatc

SEQ ID NO: 405102 - DNA, 75 bp, synthetic construct
  source 1..75: mol_type = other DNA
cagggaagagaaccggggaaatcagcccttgaatctgaagtacctaaattactatacccaacagaaccaatggct

SEQ ID NO: 405103 - DNA, 75 bp, synthetic construct
  source 1..75: mol_type = other DNA
actcattcatttatttaggcccacttgagtatattaagaagaaagtttcatcctctgttgtaatctatccttggc

SEQ ID NO: 405104 - DNA, 75 bp, synthetic construct
  source 1..75: mol_type = other DNA
aatttgaattgttagacataagtaacttcaatgttgatatatctcatcgtctccttttcgtatgtggtggcaaag

SEQ ID NO: 405105 - DNA, 75 bp, synthetic construct
  source 1..75: mol_type = other DNA
tgtgccgggccataactggcgcaaaaggcgatccgtggcttatgggaaagaacccttccagaaagcgctatgacg

SEQ ID NO: 405106 - DNA, 75 bp, synthetic construct
  source 1..75: mol_type = other DNA
ctgtgcgcaggagacttatccacaaacaacaagccttaatgcatttccaatttttcctagatcgtgggttaacga

SEQ ID NO: 405107 - DNA, 75 bp, synthetic construct
  source 1..75: mol_type = other DNA
cggcctgaaagagagcgctaaaaagcacggtaaagattaccgtaagattaaaaaaatggactttaatggcctgct

SEQ ID NO: 405108 - DNA, 75 bp, synthetic construct
  source 1..75: mol_type = other DNA
cggaagtgttcctatcgctggttgaccagtatgaagcgccgtacccggaaaatctgcgccacatcaccatcacgg

SEQ ID NO: 405109 - DNA, 75 bp, synthetic construct
  source 1..75: mol_type = other DNA
tccgtatcgaaacagacaacggtgaacgggagaaagcgcagtgccgcagcctggcggagaagctgcagcaggaag

SEQ ID NO: 405110 - DNA, 75 bp, synthetic construct
  source 1..75: mol_type = other DNA
acaacgtcatcggaccgaattttgcggtgattggctggggctgtaacccactatggggcatgagcgaggcgcaga

SEQ ID NO: 405111 - DNA, 75 bp, synthetic construct
  source 1..75: mol_type = other DNA
tcaaagatgcgtttgcggtggacatgaaaccgtggaaaaacgtcaagatcgcgtcaattggcatcctgttcgcga

SEQ ID NO: 405112 - DNA, 75 bp, synthetic construct
  source 1..75: mol_type = other DNA
atggcggaaacgctgggtgagcaagatgaggcggccctgccatccgccctgcgccagtcttcagcccgtacaccg

SEQ ID NO: 405113 - DNA, 75 bp, synthetic construct
  source 1..75: mol_type = other DNA
gcgccagtcttcagcccgtaaaccgttaccggcctcacttccccgtgaaacccgggttatccggccggaagaaga

SEQ ID NO: 405114 - DNA, 75 bp, synthetic construct
  source 1..75: mol_type = other DNA
acctggatttggataatagatacaacagatgaagaagaacaatgtatgatgaataaggcaatagaccttaataaa

SEQ ID NO: 405115 - DNA, 75 bp, synthetic construct
  source 1..75: mol_type = other DNA
gtttaatgctgctgttgagttattgccattgcatgaagctgagcccgcaacacaggaaattccccaacctgaaag

SEQ ID NO: 405116 - DNA, 75 bp, synthetic construct
  source 1..75: mol_type = other DNA
cggctgcgcttttcgcgatcgttgctatgcggcaggtgcacagtgtgaaaacgtcccggcgctgacagcgtgtgg

SEQ ID NO: 405117 - DNA, 75 bp, synthetic construct
  source 1..75: mol_type = other DNA
acgagtggcgatgatctttcaggaaccgatgaccgccctcaatccgacacttcgaataggtcttcagatgatgga

SEQ ID NO: 405118 - DNA, 75 bp, synthetic construct
  source 1..75: mol_type = other DNA
taccgacgggcagttattgcgtacatcgggggcagatttccctgctgggagaagatgttcttaacgcgcgggaaa

SEQ ID NO: 405119 - DNA, 75 bp, synthetic construct
  source 1..75: mol_type = other DNA
gatatttgggcgaagttttttctgaggcaggaaaacagttcccgtgcgcaggttaacgaagcgttacgtgtttat

SEQ ID NO: 405120 - DNA, 75 bp, synthetic construct
  source 1..75: mol_type = other DNA
tcttctaaacacatggagctactagctcatagtattgtaaaattaatttgtaaggaagctgcatcagagacgtat

SEQ ID NO: 405121 - DNA, 75 bp, synthetic construct
  source 1..75: mol_type = other DNA
ctaactgcagtttgcgtgacaccagagcaattaacattattaggatttactgatgaattcattgaaaaaacttag

SEQ ID NO: 405122 - DNA, 75 bp, synthetic construct
  source 1..75: mol_type = other DNA
tgcttacccgcctgacagccgaaggtgaacgcagtattgtcttcatcacttcttgttctgcggaaatggcgtcgg

SEQ ID NO: 405123 - DNA, 75 bp, synthetic construct
  source 1..75: mol_type = other DNA
gcatccgcgtcaggcggtatggcttacagccgtgtgtcgactttctccggggattatctccgcgtaactgacaac

SEQ ID NO: 405124 - DNA, 75 bp, synthetic construct
  source 1..75: mol_type = other DNA
ggccacgcgagcgtcaccaccactcagcagtatgaccgtcgcggggagcaacgcctgcaggacgcgcgggataga

SEQ ID NO: 405125 - DNA, 75 bp, synthetic construct
  source 1..75: mol_type = other DNA
tcgggggcagatttccctgctgggagaagatgttcttaacgcgcgggaaaaacagcttcgtcagtggcgcggcgc

SEQ ID NO: 405126 - DNA, 75 bp, synthetic construct
  source 1..75: mol_type = other DNA
aacaactgcatttgagtttccccggttttaacggtgatgttcacgcgctcaacaatgtgtccttgcagattaacc

SEQ ID NO: 405127 - DNA, 75 bp, synthetic construct
  source 1..75: mol_type = other DNA
acgtcccggcgctgacagcgtgtggtgacaacaaccagcgctgcgcctgttggtatccgcagcaggaggtcataa

SEQ ID NO: 405128 - DNA, 75 bp, synthetic construct
  source 1..75: mol_type = other DNA
tgtaccagctactttggtcattccagcgatacgccggaaaagaatccacagtggcttcagctacgcacgcaaatt

SEQ ID NO: 405129 - DNA, 75 bp, synthetic construct
  source 1..75: mol_type = other DNA
ggagccggagatcccggaagatgcttttactaccaccgccaccctgcgcgagttcatcgattcgcacaacgccac

SEQ ID NO: 405130 - DNA, 75 bp, synthetic construct
  source 1..75: mol_type = other DNA
atgtacttcaacgcgcgccacgtcgccaaaactatcccgcgggccccttccaaggtgctggacatgggtaatctg

SEQ ID NO: 405131 - DNA, 75 bp, synthetic construct
  source 1..75: mol_type = other DNA
ccgtgaaggcagtcaaaccagatgcagtgttcgccgacgagctgctcgatgcttggcgcaacaacccggaaggga

SEQ ID NO: 405132 - DNA, 75 bp, synthetic construct
  source 1..75: mol_type = other DNA
aatcaacccggcgttcttggcgttaaccgcacagctatttttaacctgatacgtatcgcgccggaaaatattcat

SEQ ID NO: 405133 - DNA, 75 bp, synthetic construct
  source 1..75: mol_type = other DNA
ggtgcgcgtaggtgccgacctgaaaaccatcagcatgtggaacgtgaagcagtccggcctgcgcgcccgcctgca

SEQ ID NO: 405134 - DNA, 75 bp, synthetic construct
  source 1..75: mol_type = other DNA
gcgctggaaatggataccgacaatggttatgtccaggatctgctgctcgctgctgaaaatttcccggaagttaaa

SEQ ID NO: 405135 - DNA, 75 bp, synthetic construct
  source 1..75: mol_type = other DNA
acacgctgcccgccggtacagaatacggtgccgataacggtatccggctggaggcggtgtggctgacacacgacc

SEQ ID NO: 405136 - DNA, 75 bp, synthetic construct
  source 1..75: mol_type = other DNA
atatggcgtctggaaagctgacttcagtgatacttccggacggcaggacggtacggtatggttacaacaaccagt

SEQ ID NO: 405137 - DNA, 75 bp, synthetic construct
  source 1..75: mol_type = other DNA
ctctactcactcaaccgaattgaggggtggatgagccgatatgacgaagaacttcgtaagctgggtattgattac

SEQ ID NO: 405138 - DNA, 75 bp, synthetic construct
  source 1..75: mol_type = other DNA
ataccggccagcaagccgatgtgagccagaatgcggattctgttagccaaaacagcgattctgtaaaccaaaccg

SEQ ID NO: 405139 - DNA, 75 bp, synthetic construct
  source 1..75: mol_type = other DNA
tcctgactgtgtggttcaacactgattacatcgaccgtggcctgctggtcaaggaatggcagaaaggtaaccgcg

SEQ ID NO: 405140 - DNA, 75 bp, synthetic construct
  source 1..75: mol_type = other DNA
agaactcagcaactcatggcacgaaaaaggctacggagaccaccagcaatgtgcaggttcaagaaactgtcagtg

SEQ ID NO: 405141 - DNA, 75 bp, synthetic construct
  source 1..75: mol_type = other DNA
aaagtgatattcgaagctgtcatgatcctgcgcgacagcggcggagcccccttctgcagcaacggtatggctacg

SEQ ID NO: 405142 - DNA, 75 bp, synthetic construct
  source 1..75: mol_type = other DNA
atcggcaccagcggcaacgcgccgcgcagtatcagcttcagcgggccgtgggcgcagttccgcctgttcggggcc

SEQ ID NO: 405143 - DNA, 75 bp, synthetic construct
  source 1..75: mol_type = other DNA
ggctgaaaatatgtccgctctggagcaggatatcaccaatctggaaaaagcagcggcattaagcattgccagaat

SEQ ID NO: 405144 - DNA, 75 bp, synthetic construct
  source 1..75: mol_type = other DNA
aaaacatttcgggcgggatcgagtatacacaactaaagcatgcgaattacggcgcggggaattagcgatggcgtt

SEQ ID NO: 405145 - DNA, 75 bp, synthetic construct
  source 1..75: mol_type = other DNA
ccaaactccagaaccaataaatctcactttgagagggtgattaacccactagactggccccctgaatctccagac

SEQ ID NO: 405146 - DNA, 75 bp, synthetic construct
  source 1..75: mol_type = other DNA
acgaagaacgattatatccacgagtccaaactccaggaccaataaatctcactttgagagggtgattaatccact

SEQ ID NO: 405147 - DNA, 75 bp, synthetic construct
  source 1..75: mol_type = other DNA
cggcgcttctgttacttatagtaaatgtgggaacatcaaagagctatgctggtagtaagctcatgagttcaactt

SEQ ID NO: 405148 - DNA, 75 bp, synthetic construct
  source 1..75: mol_type = other DNA
cagctacatgatatcgtggtaaatgtgaacaccagtagccgacaaccgattgattctacgtgccgattccagtat

SEQ ID NO: 405149 - DNA, 75 bp, synthetic construct
  source 1..75: mol_type = other DNA
aaagctagtgctggctgactggggccgcacagatagctcaaactgcccaggtatgaatacgactatatatgtctg

SEQ ID NO: 405150 - DNA, 75 bp, synthetic construct
  source 1..75: mol_type = other DNA
actatgcagcaggtttttgttccgctaccccggcgttaaggggaaatgaggtcaacatgggtatacgggagcaac

SEQ ID NO: 405151 - DNA, 75 bp, synthetic construct
  source 1..75: mol_type = other DNA
gaaatatcaggaactacgggcagaactccatgaagcccggaaaaacattccgcccaaaaatcctgtcgatgcaga

SEQ ID NO: 405152 - DNA, 75 bp, synthetic construct
  source 1..75: mol_type = other DNA
ttacacgacattgtggtgaaggtaaataccagcagtcggcaaccgattgattctacgtgccgtttccagtatgtg

SEQ ID NO: 405153 - DNA, 75 bp, synthetic construct
  source 1..75: mol_type = other DNA
atctgggtttatttaaagagaagaatatggaaggcaaggaaatatacgagcatgagttttcaggtttgttaacta

SEQ ID NO: 405154 - DNA, 75 bp, synthetic construct
  source 1..75: mol_type = other DNA
tcaggccttcaaatatcggtaggatataaggtatggctgtttatacccggcaaatctcctttaaagggacagata

SEQ ID NO: 405155 - DNA, 75 bp, synthetic construct
  source 1..75: mol_type = other DNA
ttgtgcttgataaggcggataaaatcagagttaaaatcatccgaaacggtccgcaacaggatgaggatcgcgtgt

SEQ ID NO: 405156 - DNA, 75 bp, synthetic construct
  source 1..75: mol_type = other DNA
tggaaattcaggatttacagaaaacataccttatgtagcagttataacaagtgatcttagagcattttattctac

SEQ ID NO: 405157 - DNA, 75 bp, synthetic construct
  source 1..75: mol_type = other DNA
tgttgaaaaacaagaaaggtgttgtaacagaaatacaacatgatgagcatctgcgcccggaaacgacgctggaac

SEQ ID NO: 405158 - DNA, 75 bp, synthetic construct
  source 1..75: mol_type = other DNA
cggcgtaacggtcgttacgcattgtgcaccatgtgcatcggtgtcggtcagggcatcgccatgattctggagcgt

SEQ ID NO: 405159 - DNA, 75 bp, synthetic construct
  source 1..75: mol_type = other DNA
atataacaattgaaaatatgaccaataaaatattaagaattgttcccgatgattgtttagaaaaaaataaatctg

SEQ ID NO: 405160 - DNA, 75 bp, synthetic construct
  source 1..75: mol_type = other DNA
accctgtctgggtcaccaccagtgagccaggcgtctccggtggtggcgttaacctgcttatcacgaagcggagcg

SEQ ID NO: 405161 - DNA, 75 bp, synthetic construct
  source 1..75: mol_type = other DNA
ctgcgctcgccccttcaatggtggctcaggcaggggcttcgaaagaagcgccgggtcgtgataaccggtacgcca

SEQ ID NO: 405162 - DNA, 75 bp, synthetic construct
  source 1..75: mol_type = other DNA
atcctgcaagggactttctgtttgagttgtcaatggctgcaagatttctacgtgcaggatataaaatttctctta

SEQ ID NO: 405163 - DNA, 75 bp, synthetic construct
  source 1..75: mol_type = other DNA
aaattcaatctttgataagccttgagttgaattttttacacgattattggaggtttaaaaaatattacacgaagg

SEQ ID NO: 405164 - DNA, 75 bp, synthetic construct
  source 1..75: mol_type = other DNA
aatttcttatataacattgagttatagatataacaacaaatgtcaacacgcatatcgtgatgcatattacataat

SEQ ID NO: 405165 - DNA, 75 bp, synthetic construct
  source 1..75: mol_type = other DNA
gccacatcacaaacagcgatcactgacgtgtatgcggcgttgcttgaagaaacaacaaaagaaacacatgagcaa

SEQ ID NO: 405166 - DNA, 75 bp, synthetic construct
  source 1..75: mol_type = other DNA
ccgcgcgtgattgtagaacgtaatttacctaccggaacttattcactccgacaagaacttatccgtacaggagat

SEQ ID NO: 405167 - DNA, 75 bp, synthetic construct
  source 1..75: mol_type = other DNA
tccattttggaaatggcaagaaagcataaatgatataatgacaatcttgttagaaaataaagaccatgatgactt

SEQ ID NO: 405168 - DNA, 75 bp, synthetic construct
  source 1..75: mol_type = other DNA
tgtaacattgattcggcagtgttgttacctgaagtgtgggtgggacgttcgtgccgcttacgtcgttgcattatt

SEQ ID NO: 405169 - DNA, 75 bp, synthetic construct
  source 1..75: mol_type = other DNA
tcccgattaccgcaaaatacgttcgcgtgaaagaggaagctttacagcctggggaagttcaaggccaggcgatat

SEQ ID NO: 405170 - DNA, 75 bp, synthetic construct
  source 1..75: mol_type = other DNA
actttcatgtggatcgatatttttggcttggatatggagtgccggtgctagatatttggttatatatagagctaa

SEQ ID NO: 405171 - DNA, 75 bp, synthetic construct
  source 1..75: mol_type = other DNA
gatgaagaggtctttactcctaatggttttatgcagtttattcaccgtctcggctaccgggtaaccccaccttct

SEQ ID NO: 405172 - DNA, 75 bp, synthetic construct
  source 1..75: mol_type = other DNA
atgaagacattctgaatattgtcaggaagcggctgaaaaatcctgccagacgcatcagggttaatattgatgatc

SEQ ID NO: 405173 - DNA, 75 bp, synthetic construct
  source 1..75: mol_type = other DNA
accgcctgtaaagtgttgcgtgatcaaataggcaagcatcacaaatgggtgtttgtacataccaaggcggctaag

SEQ ID NO: 405174 - DNA, 75 bp, synthetic construct
  source 1..75: mol_type = other DNA
tccggcagcaggccatttccggcggggcggaaccgtccgtttttcctgataccctgccgggttacaccgaatatg

SEQ ID NO: 405175 - DNA, 75 bp, synthetic construct
  source 1..75: mol_type = other DNA
gcagctttacttacgatgataaataccggggccgggatggtggcgcaccgtcacacgggccggccggaaatccgt

SEQ ID NO: 405176 - DNA, 75 bp, synthetic construct
  source 1..75: mol_type = other DNA
ttcaaacagtatattctaattcattcatcttgaatgctcctgcggttgtctttccatttgaaaatggttcagcaa

SEQ ID NO: 405177 - DNA, 75 bp, synthetic construct
  source 1..75: mol_type = other DNA
ggttacattttctcctaatctgacgggggaattcacatgtaattcgactcaagataaggtaaatgtgcttaagac

SEQ ID NO: 405178 - DNA, 75 bp, synthetic construct
  source 1..75: mol_type = other DNA
acacactgatactcagtgataacggcggcagaagcctgtattttgagcacctgtttcccggtgaggacggttatg

SEQ ID NO: 405179 - DNA, 75 bp, synthetic construct
  source 1..75: mol_type = other DNA
ttatcgctaaccccacctgttcgtgatgatttatataatcgactgcgcagctacgaattcaaggacgttgtcagt

SEQ ID NO: 405180 - DNA, 75 bp, synthetic construct
  source 1..75: mol_type = other DNA
atatcaccgtgaagcccggcagcgtggcagacggcgaacctggctttgctatcgggctgtcaccggattatcagc

SEQ ID NO: 405181 - DNA, 75 bp, synthetic construct
  source 1..75: mol_type = other DNA
ggggccgttccggggcaacagcagattaacgcaaagctgccaggtaaaaacttccaggctgatttaactgccctt

SEQ ID NO: 405182 - DNA, 75 bp, synthetic construct
  source 1..75: mol_type = other DNA
acttatacagcgatttacgattcatcatcatacaacagcaatcaggcagactggatccaacacgtgcaagcaagg

SEQ ID NO: 405183 - DNA, 75 bp, synthetic construct
  source 1..75: mol_type = other DNA
gtgccccaggcgcaatcggcccttatgttcaaggcgttgatttaggcagcatggtcttcacctaccgggcaaatt

SEQ ID NO: 405184 - DNA, 75 bp, synthetic construct
  source 1..75: mol_type = other DNA
ataacaacactatttatagtgataatccagaaaagctcgatcttgaaaatacacgacatttagtgaagttaggct

SEQ ID NO: 405185 - DNA, 75 bp, synthetic construct
  source 1..75: mol_type = other DNA
attccgaagccgccccgactactaagcaggggcggcgtttccgtgtgcctcagtatggctggtttcattatctgt

SEQ ID NO: 405186 - DNA, 75 bp, synthetic construct
  source 1..75: mol_type = other DNA
cgccacacgaaaacggtaagctctctgaatacaaagctaatattgtaatatcagagatgaaaacagaggttgtat

SEQ ID NO: 405187 - DNA, 75 bp, synthetic construct
  source 1..75: mol_type = other DNA
tgatgcaaaccatctaacgaaatatggagcaagttacattggagaagtcttagacaaaaaaacagacttacttca

SEQ ID NO: 405188 - DNA, 75 bp, synthetic construct
  source 1..75: mol_type = other DNA
caggctgtttgcaaaactcaggaggcaagcaatgaggaaactactttcggtgaagagagggagttaaagtcacct

SEQ ID NO: 405189 - DNA, 75 bp, synthetic construct
  source 1..75: mol_type = other DNA
gcagttacgtgatttagtgaaaaccggggcaacgcggaaaattcgcagtgaagcgcgtcaccggcttgaggaaaa

SEQ ID NO: 405190 - DNA, 75 bp, synthetic construct
  source 1..75: mol_type = other DNA
caactgatggagcgcatcacgctggctaacgaagcgggcgggattggcatctgggagtgggagttgaagccgaat

SEQ ID NO: 405191 - DNA, 75 bp, synthetic construct
  source 1..75: mol_type = other DNA
tcgaagaaaacagacctgtcaacgttgaaagggttttcggtgccagttacaacacccgctcggtattggagagct

SEQ ID NO: 405192 - DNA, 75 bp, synthetic construct
  source 1..75: mol_type = other DNA
cacgttataacgtggagcttattcgcgcgccggaaggttttttctatttgcgcccacgttctaccactattatcc

SEQ ID NO: 405193 - DNA, 75 bp, synthetic construct
  source 1..75: mol_type = other DNA
gctggcgaatccgttatttccggcgctggacagcgccttacgttcaggacgccatattggcctcgaggaactgga

SEQ ID NO: 405194 - DNA, 75 bp, synthetic construct
  source 1..75: mol_type = other DNA
aagcaatgtcgctggaaattcacctgcaactcaacgatgaaactgaagagaatcagccagatagcggagaggaag

SEQ ID NO: 405195 - DNA, 75 bp, synthetic construct
  source 1..75: mol_type = other DNA
tttcatttttaccgtggcgctgaacaaagcggttccgctgatgtacaacgcactggcggctttgttgaataaatc

SEQ ID NO: 405196 - DNA, 75 bp, synthetic construct
  source 1..75: mol_type = other DNA
gatttaaccgaggcaaccgaggatgactgcgcccgcctgatggacggctgcgatgccgtctggcactgtgcggca

SEQ ID NO: 405197 - DNA, 75 bp, synthetic construct
  source 1..75: mol_type = other DNA
gctggcgaatccattatttccggcgctggatagcgccttacgttcaggccgtcatattggcctcgacgaactgga

SEQ ID NO: 405198 - DNA, 75 bp, synthetic construct
  source 1..75: mol_type = other DNA
ggctcgagcgtatcaacacctccggacttataaggtccatgtcgcgcaaaggatgctcgtcggataatgctgcgt

SEQ ID NO: 405199 - DNA, 75 bp, synthetic construct
  source 1..75: mol_type = other DNA
tggatgattattttttcagtaaatctttgcgcccggctacggagtggagctacaggaaggtagtcagatcattca

SEQ ID NO: 405200 - DNA, 75 bp, synthetic construct
  source 1..75: mol_type = other DNA
acagcagcatgttcaatggtcgcagaaatgcactacgcccggtgtggttctggctgacggtaatgaatgtttttc

SEQ ID NO: 405201 - DNA, 75 bp, synthetic construct
  source 1..75: mol_type = other DNA
catgatggtcgggaaaatcctttgttatctttatcttagcccggagcggctggcgaacgagggaatctttaccca

SEQ ID NO: 405202 - DNA, 75 bp, synthetic construct
  source 1..75: mol_type = other DNA
taatcatgcattcctgatggattttcaggaatatctggaagagttttacgcgcgttataacgttgagcttattcg

SEQ ID NO: 405203 - DNA, 75 bp, synthetic construct
  source 1..75: mol_type = other DNA
gctggcgaatccgttatatccggcgctggatagcgccttacgttcaggccgccatattggcctcgacgaactgga

SEQ ID NO: 405204 - DNA, 75 bp, synthetic construct
  source 1..75: mol_type = other DNA
catgttgatgagtcaggaatatttcgtccagataatgcgttctatcttcgccgcctgacgttaaaggattttcgc

SEQ ID NO: 405205 - DNA, 75 bp, synthetic construct
  source 1..75: mol_type = other DNA
tgatcctgaggaattagcaaatatatttaataaaaaacataaagaacatatgaatgatcctctattacatctaat

SEQ ID NO: 405206 - DNA, 75 bp, synthetic construct
  source 1..75: mol_type = other DNA
tggatgatcctctattccatctaatccgaagcaatattatgaaacccacagatttatatgctgattattttaata

SEQ ID NO: 405207 - DNA, 75 bp, synthetic construct
  source 1..75: mol_type = other DNA
ttttaaacctgactggcgttgggatgtctctactgagatgctcactaaggaaaagtttgataactatgttaaatc

SEQ ID NO: 405208 - DNA, 75 bp, synthetic construct
  source 1..75: mol_type = other DNA
tgaaatttgtcggcgcgttgattattacttcactgctgattattcctgctgctactgcacgtcgctttgcccgca

SEQ ID NO: 405209 - DNA, 75 bp, synthetic construct
  source 1..75: mol_type = other DNA
atggataaggcactttttgagcggttgactcacagcatggcccagatgaatgaaattattgaaggaacgcgacag

SEQ ID NO: 405210 - DNA, 75 bp, synthetic construct
  source 1..75: mol_type = other DNA
atgaaagtagttcacaatatatttaagcacatcccttcaaaccataaagataagcattcagataaagttaataat

SEQ ID NO: 405211 - DNA, 75 bp, synthetic construct
  source 1..75: mol_type = other DNA
atgacaattattttaataacactactgctttcagaccaaaacctgaagatatcttcaaatgtggacagacgctca

SEQ ID NO: 405212 - DNA, 75 bp, synthetic construct
  source 1..75: mol_type = other DNA
gacatgatcttgaatgagttgcatcaacatgtttttttaaaaggcgatgcgattaccccttgtatcttccttggg

SEQ ID NO: 405213 - DNA, 75 bp, synthetic construct
  source 1..75: mol_type = other DNA
taaatcagacataatttataaatcagacatgatttataaagttaatgggctctctatcatacctgaaaatttctt

SEQ ID NO: 405214 - DNA, 75 bp, synthetic construct
  source 1..75: mol_type = other DNA
atgtatcatttattttttttactaacaggtcaaaaatatcgcgggttatttatgaaagcaattgacaatatattt

SEQ ID NO: 405215 - DNA, 75 bp, synthetic construct
  source 1..75: mol_type = other DNA
ttattatgtgaattattaaaacacgaaaacatggcttcatctgcatacataaaaataataaattgctctacaatt

SEQ ID NO: 405216 - DNA, 75 bp, synthetic construct
  source 1..75: mol_type = other DNA
ggctaaactccaagatggcagtatttgatgaaaataaaaaaataataggctcttcctcagggcttagttgttttc

SEQ ID NO: 405217 - DNA, 75 bp, synthetic construct
  source 1..75: mol_type = other DNA
cactgccggtgctttcaccgcggattctgtcggcaatatctacgtgcaggggcacgaagatgaaatgctggtgca

SEQ ID NO: 405218 - DNA, 75 bp, synthetic construct
  source 1..75: mol_type = other DNA
cacatgaaggctgtccggtcgcgtctggaaatcaacaaggtggcttctgtttacggtacggaaggaggaatgagt

SEQ ID NO: 405219 - DNA, 75 bp, synthetic construct
  source 1..75: mol_type = other DNA
cagtatgctgatgcggatatggcacatgagggagacacgtctgccgttcatcgccgggaagccgccagccagctg

SEQ ID NO: 405220 - DNA, 75 bp, synthetic construct
  source 1..75: mol_type = other DNA
tggacctggcaaaagagcgtgttgccgatgaggtgcgcgcgcagctggcaaccgatcctgaattgctggctgtga

SEQ ID NO: 405221 - DNA, 75 bp, synthetic construct
  source 1..75: mol_type = other DNA
gcggcagggatgcagccggaaagagctaccgcactggcagcagaagctgtcgataaaaaaatgccggattttttc

SEQ ID NO: 405222 - DNA, 75 bp, synthetic construct
  source 1..75: mol_type = other DNA
tagataaaccgagcactcaccagcaggcgcgtggtgcgaaaattgaagactttggtgaagaaattaagggcgcgg

SEQ ID NO: 405223 - DNA, 75 bp, synthetic construct
  source 1..75: mol_type = other DNA
ggtgaggtgaagggccagagtttccagaaaggacgtgcgcaggcaccggaaaatgccgctggtcgccggggggaa

SEQ ID NO: 405224 - DNA, 75 bp, synthetic construct
  source 1..75: mol_type = other DNA
agaaattgtcctggtggcggataacatccctgacgggcggaccgtacgcgagaagttgcgtcacgagattatcca

SEQ ID NO: 405225 - DNA, 75 bp, synthetic construct
  source 1..75: mol_type = other DNA
tgaaatcgatgttcgggggcaaggccggtgagtactggagtattcctctgccttacgggtacaacgtgttcttcc

SEQ ID NO: 405226 - DNA, 75 bp, synthetic construct
  source 1..75: mol_type = other DNA
acactgaaaacccgtgagacggacaagggagttgcgttttattcccgtaagggcgtgacccgcacacctgaaggc

SEQ ID NO: 405227 - DNA, 75 bp, synthetic construct
  source 1..75: mol_type = other DNA
tctggacagaacgcggggcagcccgtcacgcaaaaatgctcgaaactgatcaggcatgggaagtgttcgaaaaac

SEQ ID NO: 405228 - DNA, 75 bp, synthetic construct
  source 1..75: mol_type = other DNA
tgcgtccgtttgcgaaccttgccatgaatgaaaacttcatgggggcgcagatttaccaggagaacatgccgtttg

SEQ ID NO: 405229 - DNA, 75 bp, synthetic construct
  source 1..75: mol_type = other DNA
tgtcactgccccgtacaggtaaaggcttcactatcggcggacgtgaaagcaggcaggccatggggcgtgcatccc

SEQ ID NO: 405230 - DNA, 75 bp, synthetic construct
  source 1..75: mol_type = other DNA
ggtacagggcgcttcatttccaaaaccacggatgcggcggtgaaatcgctgaacggtattgatataccggagcag

SEQ ID NO: 405231 - DNA, 75 bp, synthetic construct
  source 1..75: mol_type = other DNA
gctccgggttttattgaacaacttgaaaaccactcattttctgcagtctgggaaaagtgctaccaaaaagagacg

SEQ ID NO: 405232 - DNA, 75 bp, synthetic construct
  source 1..75: mol_type = other DNA
aaaattgcccgtaacgttcgctccctcatcctatggacagaacgcggcgcagcccgtcacgcaaaaatgctcgaa

SEQ ID NO: 405233 - DNA, 75 bp, synthetic construct
  source 1..75: mol_type = other DNA
gacaaaaggatccgtcagcgccagtttcatgccagaaaagttacgacacgcgagttctctgttatcagcaaggcg

SEQ ID NO: 405234 - DNA, 75 bp, synthetic construct
  source 1..75: mol_type = other DNA
atttgcaaccatctttaagagggttacaaatttccccgaaagcccgctccctcatcctctggacagaacgcggag

SEQ ID NO: 405235 - DNA, 75 bp, synthetic construct
  source 1..75: mol_type = other DNA
gcaccgcgtacaaagcacctcatcctctggacagaacgcggcgcagcccgtcacgcaaaaatgctcgaaaccgat

SEQ ID NO: 405236 - DNA, 75 bp, synthetic construct
  source 1..75: mol_type = other DNA
aagaaatgggagagacgcatggtcttacatacccacaggaacatttattgattctgcgcgaagacatttacgaag

SEQ ID NO: 405237 - DNA, 75 bp, synthetic construct
  source 1..75: mol_type = other DNA
atgggaaaaatgaatatcgattttcacctggcgatccgtgacgataaaaccgccttcatccgaagttatgcgcct

SEQ ID NO: 405238 - DNA, 75 bp, synthetic construct
  source 1..75: mol_type = other DNA
agatgaggtcttcgatactctgcctgatggcaagaacgcggtgactgatactgtcggtaaaggtctgaaggcaac

SEQ ID NO: 405239 - DNA, 75 bp, synthetic construct
  source 1..75: mol_type = other DNA
aatcgcgcttgcagctgtgggagcgggttatctgcttggctcgcttaaccgcagtgttgcgggggaggatgatga

SEQ ID NO: 405240 - DNA, 75 bp, synthetic construct
  source 1..75: mol_type = other DNA
gatgaagagcgtccgattattctgattgcgggtggcaccgggttctcttatgcccgttcgattttgctgacggcg

SEQ ID NO: 405241 - DNA, 75 bp, synthetic construct
  source 1..75: mol_type = other DNA
gccgtcatggatcgcatccttaaagatcaccaaatcgtggtggatattcctcacggtgaagcctggttgcgcgat

SEQ ID NO: 405242 - DNA, 75 bp, synthetic construct
  source 1..75: mol_type = other DNA
gcccgtgacctgttttgcagtgagcgtaatgcgcgggaagatcgcctgtttggcgatgcgtttgcatttatctga

SEQ ID NO: 405243 - DNA, 75 bp, synthetic construct
  source 1..75: mol_type = other DNA
tcaaagcagataacgccagagttttcgaccttgaagttgaatcttcaactggcgttgcgcagtatgctgaccgcc

SEQ ID NO: 405244 - DNA, 75 bp, synthetic construct
  source 1..75: mol_type = other DNA
tgcggcattcgtttcgggcgtggtgaaagatgccttcatcctgtggctgaaccagaacgttcaggcggcggagtt

SEQ ID NO: 405245 - DNA, 75 bp, synthetic construct
  source 1..75: mol_type = other DNA
ctgctctgcgctttgtttgtaaaacacttccgcgcgttggtgaaacacggtcacgtttacgtcgcactgccaccg

SEQ ID NO: 405246 - DNA, 75 bp, synthetic construct
  source 1..75: mol_type = other DNA
agtcaccgaaatttcagcagacctttttgtcaattgatgcagatccgcagcacgcgcagcttactgaccgccaga

SEQ ID NO: 405247 - DNA, 75 bp, synthetic construct
  source 1..75: mol_type = other DNA
gcaagatgtcgccgggggcgcagcgggcgctgaatacaccgatgactgaaggatatgatgattcagcggtctggg

SEQ ID NO: 405248 - DNA, 75 bp, synthetic construct
  source 1..75: mol_type = other DNA
tggtgctgctttgtatgtcgcacagccatcactgatggtgcaaaaaggcatcgccgggacttactgcaaaacacc

SEQ ID NO: 405249 - DNA, 75 bp, synthetic construct
  source 1..75: mol_type = other DNA
ggaacgctgatcctcatcgcgttctttaagccatggcgactgcgctttgccaaagagcaacggttaccgctgttg

SEQ ID NO: 405250 - DNA, 75 bp, synthetic construct
  source 1..75: mol_type = other DNA
aacgcaagcagttcctgtggctggggattgtgattgtcggatcggtatcagcaattggtggtgcgctgtatctgt

SEQ ID NO: 405251 - DNA, 75 bp, synthetic construct
  source 1..75: mol_type = other DNA
atggccagtatcaataccattgtgaaacgcaagcagtacctgtggctggggattgtggttgtcggtgcagcctcc

SEQ ID NO: 405252 - DNA, 75 bp, synthetic construct
  source 1..75: mol_type = other DNA
gcccagcgtcgtatgcgtgcggctaagaaagtggtgcgtaaaaagctgaccagcggcccggcgctgcctggcaaa

SEQ ID NO: 405253 - DNA, 75 bp, synthetic construct
  source 1..75: mol_type = other DNA
gtgatcctgccgaccggcgcgttgataatgccgctgttggtggtgttttttggcggcacttttctgacccgtatc

SEQ ID NO: 405254 - DNA, 75 bp, synthetic construct
  source 1..75: mol_type = other DNA
catccctgatcacggtgtctcagggctggtttttacgccggacgcaggcgatgtcactgtgccggtattttgccg

SEQ ID NO: 405255 - DNA, 75 bp, synthetic construct
  source 1..75: mol_type = other DNA
ggacagaagaggtgcaccagttgtggtagccatacacatgaaagccaaagaggcatttatggaggttaataaaat

SEQ ID NO: 405256 - DNA, 75 bp, synthetic construct
  source 1..75: mol_type = other DNA
tggcgaaggggggatggaaaggccagagtatcggtgcatggaattcgttcctgaaccttgtggaggatgccaacg

SEQ ID NO: 405257 - DNA, 75 bp, synthetic construct
  source 1..75: mol_type = other DNA
gtaaacctgatccgttcaaagtgccggaaggtgagggcgagcgttatcgtgatgaccttgccagaatgatgaagt

SEQ ID NO: 405258 - DNA, 75 bp, synthetic construct
  source 1..75: mol_type = other DNA
gggaatgaatcgcgagcagcttctggaacagtatgctgatgcggatatggcacctgagggagacacgtctgccgt

SEQ ID NO: 405259 - DNA, 75 bp, synthetic construct
  source 1..75: mol_type = other DNA
gtcgtggtctgccgtcaccggatgagcagagtgttaccgccccggtacgtgaaggtctaccggctcctgacatta

SEQ ID NO: 405260 - DNA, 75 bp, synthetic construct
  source 1..75: mol_type = other DNA
tcatgcgtgacccgcgattccggggttttacgggagatgatacagaagtgcaggcccgccttgcccgtggcaacg

SEQ ID NO: 405261 - DNA, 75 bp, synthetic construct
  source 1..75: mol_type = other DNA
cacatgaaggcaacagataaacgaatagaaattaacaaggtggcttctgtatatggaacaaaaggagggatgaac

SEQ ID NO: 405262 - DNA, 75 bp, synthetic construct
  source 1..75: mol_type = other DNA
agcaacatggagcgccagggcttaaccctgtatagaagagaaaaattaaccccagatgaggaccttccccggggg

SEQ ID NO: 405263 - DNA, 75 bp, synthetic construct
  source 1..75: mol_type = other DNA
ggtgaggttaagggccagagtttccagaaaggacaagctccggcaccggaaaacgccgctggtcgccagggggaa

SEQ ID NO: 405264 - DNA, 75 bp, synthetic construct
  source 1..75: mol_type = other DNA
atgacaaaccggacaccatgcgggcgattgcagagcgtgttgatccggaaaccggcgaaacccgtcgcgaagttg

SEQ ID NO: 405265 - DNA, 75 bp, synthetic construct
  source 1..75: mol_type = other DNA
ggacaagggcgttgcgttttattcccgtaagggcgttacccgcacacctgaaggtaatctcatttcggatgttaa

SEQ ID NO: 405266 - DNA, 75 bp, synthetic construct
  source 1..75: mol_type = other DNA
tatcgtggcagacgtcaggccgcagaagaaaccgccatgcgtgatgctgaaaccgtgcagcaggacgacgcagcc

SEQ ID NO: 405267 - DNA, 75 bp, synthetic construct
  source 1..75: mol_type = other DNA
accggcataaggccagtggcgacatttttatcggttatggcaaaaacaggcagaaactgaagggcggttttgagt

SEQ ID NO: 405268 - DNA, 75 bp, synthetic construct
  source 1..75: mol_type = other DNA
ggcttatctgacgtggtgcctggcgatgaagtagtggtggaagtagaaggcgtgggccgcctggtgaaccgaatt

SEQ ID NO: 405269 - DNA, 75 bp, synthetic construct
  source 1..75: mol_type = other DNA
ccttacaaaaaagcatcacggaaaacaaatataaatcagcctcgcttgctgaaatatcagcgacatctcccgtcg

SEQ ID NO: 405270 - DNA, 75 bp, synthetic construct
  source 1..75: mol_type = other DNA
ttggctgactgtaccgcgcaggatcttaaccgtaccgaactattccttgtggaaggtgactccgcaggcggatct

SEQ ID NO: 405271 - DNA, 75 bp, synthetic construct
  source 1..75: mol_type = other DNA
tggtttgccagcctttcgacttaattatctttaagaagcctgtatcattcaggaaaaatactgttttacttctgg

SEQ ID NO: 405272 - DNA, 75 bp, synthetic construct
  source 1..75: mol_type = other DNA
cgcgtccgtggatgcgcactatactctgctcgcgttttcatgcaaccttttttttaccccgatcacggatttggc

SEQ ID NO: 405273 - DNA, 75 bp, synthetic construct
  source 1..75: mol_type = other DNA
tatgagcccgacgagctaccaggctgctccaccccgcgtccgtggatgcgcactatactccgctcgcgttttcat

SEQ ID NO: 405274 - DNA, 75 bp, synthetic construct
  source 1..75: mol_type = other DNA
atgttcgttatcgcaatatcccgttatgggatgatgcgacattatcattaatggctaaatattccgcacctaata

SEQ ID NO: 405275 - DNA, 75 bp, synthetic construct
  source 1..75: mol_type = other DNA
tgcggcatttgtttctggcgtggtgaaagatgcgttcactctgtggctgaaccagaacgttcaggcggctgaact

SEQ ID NO: 405276 - DNA, 75 bp, synthetic construct
  source 1..75: mol_type = other DNA
aaagatgccttcaccctgtggctgaaccagaacgtccaggcggcggaactacttgctgagatggcgatttccagc

SEQ ID NO: 405277 - DNA, 75 bp, synthetic construct
  source 1..75: mol_type = other DNA
tgcaaatatctttattccaagcttcgtcaaagataatggcgaaacgaaggaaattattgaaaaacagggcgttga

SEQ ID NO: 405278 - DNA, 75 bp, synthetic construct
  source 1..75: mol_type = other DNA
gcaataccggtaccagcgtgcacttctggccggatgaagccttctttgacagcccgcgcttctctgtttcacgcc

SEQ ID NO: 405279 - DNA, 75 bp, synthetic construct
  source 1..75: mol_type = other DNA
ctgctttgcgctttgtttgtaaaacacttccgcgcgttggtgaaacacggtcacgtttacgttgctttgccacca

SEQ ID NO: 405280 - DNA, 75 bp, synthetic construct
  source 1..75: mol_type = other DNA
gatccgcagtttgccgggcagaccaaagagcgtctctcttcgcgtcagtgcgcggcattcgtttctggcgtggtg

SEQ ID NO: 405281 - DNA, 75 bp, synthetic construct
  source 1..75: mol_type = other DNA
atgatgcgctcaaagaatggctgaaactggataagaccattcaacaacagtttgtgaaaaaactaaaaaaatgca

SEQ ID NO: 405282 - DNA, 75 bp, synthetic construct
  source 1..75: mol_type = other DNA
atgacttatacggttaaattcagggatgatgcactgaaagaatggctcagactggataaggccattcagcagcag

SEQ ID NO: 405283 - DNA, 75 bp, synthetic construct
  source 1..75: mol_type = other DNA
tggcagtgctgctcttatcgggttgtgataatacgcaaagcaacaatatatccgtggcggaaacagaagtggggg

SEQ ID NO: 405284 - DNA, 75 bp, synthetic construct
  source 1..75: mol_type = other DNA
tccccgtcagaaacagaagtcggcgttgttacagtcaaatctcaaccggtctcggtagtcagtgaattaaccgga

SEQ ID NO: 405285 - DNA, 75 bp, synthetic construct
  source 1..75: mol_type = other DNA
agccgcgacggactgacgccgatgctttcaaccatcgtgccgaaagaggcgatcccggacccgcataatctgacc

SEQ ID NO: 405286 - DNA, 75 bp, synthetic construct
  source 1..75: mol_type = other DNA
ccctgagcgaatttgccacgctgaatccaggcgatgccattctgctcggcacgccacaggcgcgcgtggaaatac

SEQ ID NO: 405287 - DNA, 75 bp, synthetic construct
  source 1..75: mol_type = other DNA
atgaaaggcactatcttcgccgtagcattgaaccatcgcagccaacttgatgcctggcaggaagcgttccagcaa

SEQ ID NO: 405288 - DNA, 75 bp, synthetic construct
  source 1..75: mol_type = other DNA
ggtttcatagcaagattgtttgaaaaaatacctttcctttctttaaccgtaaatgaaatggagttattggattta

SEQ ID NO: 405289 - DNA, 75 bp, synthetic construct
  source 1..75: mol_type = other DNA
aaccgtagcactaagaaacaaaatggtgacggctatgcgttgtctgtagactataacatcaatggttttggtatc

SEQ ID NO: 405290 - DNA, 75 bp, synthetic construct
  source 1..75: mol_type = other DNA
atgaggtatcaggtaaaattcagggaagatgcgctgaaagagtggcaaaaactggacaagactattcagcaacag

SEQ ID NO: 405291 - DNA, 75 bp, synthetic construct
  source 1..75: mol_type = other DNA
gacgataaatttgcttaatgcccttgtttggctggcgatcaatctggttaatcgattaagggaaagactcgtcag

SEQ ID NO: 405292 - DNA, 75 bp, synthetic construct
  source 1..75: mol_type = other DNA
gacgataaatttgcttaatgcccttgtttggctggcgatcaatctggttaatcgattaagagaaagactcgtcaa

SEQ ID NO: 405293 - DNA, 75 bp, synthetic construct
  source 1..75: mol_type = other DNA
tgcaaaacaaacagcagattaataccaataccattgatttacgttataaagatatcccgttatgggataaagcca

SEQ ID NO: 405294 - DNA, 75 bp, synthetic construct
  source 1..75: mol_type = other DNA
gactcatcactcataaaaatggcatcagacgcgtgcgtctctatgaaacatccacatcctggtgcgtcagtcacc

SEQ ID NO: 405295 - DNA, 75 bp, synthetic construct
  source 1..75: mol_type = other DNA
agcataaggctaagggattgtcacaaagtcaggttgcaaagcttctgaatctctctgtaagaacggttagccgtc

SEQ ID NO: 405296 - DNA, 75 bp, synthetic construct
  source 1..75: mol_type = other DNA
atgtcacgcatctttgcttactgtcgtgtatcagttgatgactccactaatgagaaccagattgaagctatcagg

SEQ ID NO: 405297 - DNA, 75 bp, synthetic construct
  source 1..75: mol_type = other DNA
aggcagtttgttcatgaagggcagttgataaaaaaaggggatcctgtttatctgattgacatcagtaaaagtaca

SEQ ID NO: 405298 - DNA, 75 bp, synthetic construct
  source 1..75: mol_type = other DNA
tcttccggactccaagcgctgcgcttacacttttaatgtatttttctattgttttttttaacaaaaacatctatt

SEQ ID NO: 405299 - DNA, 75 bp, synthetic construct
  source 1..75: mol_type = other DNA
ggtaacatcagatataattgctatagagcatgtaagggatctacaaatgactaagtggtttataagaccaaatgt

SEQ ID NO: 405300 - DNA, 75 bp, synthetic construct
  source 1..75: mol_type = other DNA
ttcaggcaatttataacatgacgacagagcatggcgatgattttgccatgctgtatttttctgatcatgggcaat

SEQ ID NO: 405301 - DNA, 75 bp, synthetic construct
  source 1..75: mol_type = other DNA
attgctgcttttacattctggttctggcgtaagcgtgataaaagccagcggggatttatctttctgttgttcttt

SEQ ID NO: 405302 - DNA, 75 bp, synthetic construct
  source 1..75: mol_type = other DNA
ccctgtgaccgactttttaatgatgcacagccattcagggaattattcggaaataaagtatcctgttatttatca

SEQ ID NO: 405303 - DNA, 75 bp, synthetic construct
  source 1..75: mol_type = other DNA
ttcccatcacttgcgatgagcgtacaaacaacaccggttggtattgatacacttataaatgtttccccaaaggct

SEQ ID NO: 405304 - DNA, 75 bp, synthetic construct
  source 1..75: mol_type = other DNA
atcgtattgtcagtaaatgcatggccaaaacgtatggttacgaatgtaatgacagggatagctgaaaccagagaa

SEQ ID NO: 405305 - DNA, 75 bp, synthetic construct
  source 1..75: mol_type = other DNA
ctgtatttttctgatcatgggcaatccgtcagttcagacagcacccctgtgcatcatgcgccaggtttgcgttcg

SEQ ID NO: 405306 - DNA, 75 bp, synthetic construct
  source 1..75: mol_type = other DNA
gctggaacaggaggtgtggggcatgttgctggcttacaacctgatacggcgtgaggcaacaaaagcggctgagaa

SEQ ID NO: 405307 - DNA, 75 bp, synthetic construct
  source 1..75: mol_type = other DNA
gccatggaacagcaggcgcgggcggaacattcgctgctggagtgcgtgcgtaccgtgctggtggcgcaggcgggc

SEQ ID NO: 405308 - DNA, 75 bp, synthetic construct
  source 1..75: mol_type = other DNA
ttgagtcacttacccgccagcattttccagatttcacgtagcgacgcctggaatttaaccatctctcccgatgca

SEQ ID NO: 405309 - DNA, 75 bp, synthetic construct
  source 1..75: mol_type = other DNA
cctggaaaaagcggatcaaacatcagcctgtgtgggacataacatcgagacagacaccgctgaactggatcaaca

SEQ ID NO: 405310 - DNA, 75 bp, synthetic construct
  source 1..75: mol_type = other DNA
agtaaaagacggaactccaggtgtaattgctggagcagtgacaaacctgttgactcttggcgttaattttgtgac

SEQ ID NO: 405311 - DNA, 75 bp, synthetic construct
  source 1..75: mol_type = other DNA
tctaaaggcagcgctggccgctttcgatagcctagacgagaacctgaaaaaccactggctgcttgaatctgcaaa

SEQ ID NO: 405312 - DNA, 75 bp, synthetic construct
  source 1..75: mol_type = other DNA
gttaacgttgagaaatttatcgtacttatcatctcccgcaaaacaagaaccccagttggtttatatctaaaagat

SEQ ID NO: 405313 - DNA, 75 bp, synthetic construct
  source 1..75: mol_type = other DNA
aactttaccattcacgatgggaaatcgaagtcgggttcagaaacctgaaaagcagcctgctgaacaatgccctgg

SEQ ID NO: 405314 - DNA, 75 bp, synthetic construct
  source 1..75: mol_type = other DNA
gcagcagattttgataatcgtatctatcagatggaactgcaacaactcgaattgcagaaagaactggttaacact

SEQ ID NO: 405315 - DNA, 75 bp, synthetic construct
  source 1..75: mol_type = other DNA
tcgcgacagaaatgatagtgctgggaaatacggcatcaccggggaccatcccgaaacgactggagcatctgcggg

SEQ ID NO: 405316 - DNA, 75 bp, synthetic construct
  source 1..75: mol_type = other DNA
gctggacgtcctgacaggaagtggcctgtctttcacctgcgatccacagcgcgcaaaacaacttctcggataccc

SEQ ID NO: 405317 - DNA, 75 bp, synthetic construct
  source 1..75: mol_type = other DNA
taaacgcagtgatgaaatgtttgaacatgtttatcagctgatggaaaaagccgttatacagtggcaagggaaaat

SEQ ID NO: 405318 - DNA, 75 bp, synthetic construct
  source 1..75: mol_type = other DNA
gtggcaccttacacattgtcacaaggtttagatcgcactttgcaatatgagtttgtccacgacaagaaagacgac

SEQ ID NO: 405319 - DNA, 75 bp, synthetic construct
  source 1..75: mol_type = other DNA
gccctggcggatagcggttacctcaagaatgtaaaaccactgcatggggagaaaaagggcggtaagttgtaccaa

SEQ ID NO: 405320 - DNA, 75 bp, synthetic construct
  source 1..75: mol_type = other DNA
atgagcgtaggctaatgctacagtggtgggctgactatcttgatgccaaccgtaaagggatattacgaccttacg

SEQ ID NO: 405321 - DNA, 75 bp, synthetic construct
  source 1..75: mol_type = other DNA
acgatgccgacacaactgctttccggtacggcgctggctgcggggattggttttataaacctgtttggtgcagtg

SEQ ID NO: 405322 - DNA, 75 bp, synthetic construct
  source 1..75: mol_type = other DNA
tcatggacaatgccggaaaaaatcgccacttacccggggcgtgaaaaggtcaacgaaccggtaaaaaatgcgcct

SEQ ID NO: 405323 - DNA, 75 bp, synthetic construct
  source 1..75: mol_type = other DNA
atgagctgtttaaaacagtgcgctcactcgggattatcagtgtcgttgttggcgtaccgggtgtcggaaaaacct

SEQ ID NO: 405324 - DNA, 75 bp, synthetic construct
  source 1..75: mol_type = other DNA
accgtgcggcattcatcgctggcgaaataggcggtgcagttgtcgagttgataatcaacggtgtggtgataagtc

SEQ ID NO: 405325 - DNA, 75 bp, synthetic construct
  source 1..75: mol_type = other DNA
tcctggcgaagatgacaccgggcgtaccacggctgagatcattcaggatgaagtaaaggatactccgcgttgcat

SEQ ID NO: 405326 - DNA, 75 bp, synthetic construct
  source 1..75: mol_type = other DNA
tggttattggtcatcatgttcgccgtaaacaggcattgattttggctgaatctattggtgcaaccctgatgattg

SEQ ID NO: 405327 - DNA, 75 bp, synthetic construct
  source 1..75: mol_type = other DNA
cagaccgaggtttcagcgattgctacaggactccagcaagcacgacagcgaattcttgcactggaatcagcattg

SEQ ID NO: 405328 - DNA, 75 bp, synthetic construct
  source 1..75: mol_type = other DNA
agtaaaagattttgaagaaaaacacggcagtcagctgttgttgctgattcgttttttaatgcacgcgagaaattc

SEQ ID NO: 405329 - DNA, 75 bp, synthetic construct
  source 1..75: mol_type = other DNA
ggttaatgtggagcttccggcacgagtgacaccaggagtgaaagtcggggcagattctcgtcttgtactgaccaa

SEQ ID NO: 405330 - DNA, 75 bp, synthetic construct
  source 1..75: mol_type = other DNA
aaacttcaagacacatgctccgaatgttttacgaaacaagcttcatgaggagctaaggaagaatcgtaaaacggc

SEQ ID NO: 405331 - DNA, 75 bp, synthetic construct
  source 1..75: mol_type = other DNA
attaataggtgcaactcactaaacaacgcaattctgatctctcgatcacctcccaagccacacaaccctgcaaaa

SEQ ID NO: 405332 - DNA, 75 bp, synthetic construct
  source 1..75: mol_type = other DNA
gcaacccgaaacagatggcggatgccacccgtcgtgggactgatgaactggcccgtctgttcagccgttttgcca

SEQ ID NO: 405333 - DNA, 75 bp, synthetic construct
  source 1..75: mol_type = other DNA
cctacactcgttttgtcgaagagctaaaccgaataaagccgctttgtgcatggagcagtggcgtatggaacttcg

SEQ ID NO: 405334 - DNA, 75 bp, synthetic construct
  source 1..75: mol_type = other DNA
tggtgttttaactactaccattcccggcgttgtctggcgccttgatggatttacctgtttggggaatgggttaaa

SEQ ID NO: 405335 - DNA, 75 bp, synthetic construct
  source 1..75: mol_type = other DNA
ccgtctgacttgcagttacgtaagttcccatcacttctgactcagcgcctgaattttggagaaggtcctctggct

SEQ ID NO: 405336 - DNA, 75 bp, synthetic construct
  source 1..75: mol_type = other DNA
agctgagttagttgataaaacttgctataaagacaggcaagggtcttacgacattgctctaactctcgctcagtg

SEQ ID NO: 405337 - DNA, 75 bp, synthetic construct
  source 1..75: mol_type = other DNA
agtatttggacgaaaagtatcctgttatttatcgacgctggttaaactggataaatttctccgggatatttatga

SEQ ID NO: 405338 - DNA, 75 bp, synthetic construct
  source 1..75: mol_type = other DNA
tgaaacatggtggatatcaaatcagggggctttaggggtacatgatacgttgatttctgttgttgccagcaatgc

SEQ ID NO: 405339 - DNA, 75 bp, synthetic construct
  source 1..75: mol_type = other DNA
gtgaaatcgagttgcgccagaaacaatacgagtactatcgtgatttactgttcagttttcccaaacctgaaacta

SEQ ID NO: 405340 - DNA, 75 bp, synthetic construct
  source 1..75: mol_type = other DNA
cataaaatatttggtccgatgttgatggctgcgggagtgccgcctcagggaacaacggcagtattattagcctca

SEQ ID NO: 405341 - DNA, 75 bp, synthetic construct
  source 1..75: mol_type = other DNA
cgcccgtgttcgccgtcgcaagctcagcgcgctggcatttgccgcaaccattattgttatggcggttatcggtgt

SEQ ID NO: 405342 - DNA, 75 bp, synthetic construct
  source 1..75: mol_type = other DNA
ggtaaaaagacaattattttccctcagtcaatttgttatattgaaaaaaatacaactgtagatataattatatgt

SEQ ID NO: 405343 - DNA, 75 bp, synthetic construct
  source 1..75: mol_type = other DNA
agggatacaagcaaatccatctgaagaaattcagcaaaaccatttcgcacaatcttaagctactggctctctcgc

SEQ ID NO: 405344 - DNA, 75 bp, synthetic construct
  source 1..75: mol_type = other DNA
gacaatcagatgctcagggtttacctggttgtgcagaggtttgcagaagcggaagagcagaacatggtgaattga

SEQ ID NO: 405345 - DNA, 75 bp, synthetic construct
  source 1..75: mol_type = other DNA
gatgcttgctgctctgttcatcgtcggagtggttgcctggaatatacacggcagccgccagtacgatgccgggta

SEQ ID NO: 405346 - DNA, 75 bp, synthetic construct
  source 1..75: mol_type = other DNA
gggatcgcagatttgattgtgtctgcaatgatggcagaaggcctgaatgagcaggaagctcgccgccatatttat

SEQ ID NO: 405347 - DNA, 75 bp, synthetic construct
  source 1..75: mol_type = other DNA
gcagaaaagcggtaaaatcattaatatctgttcattgttctcttacttaggtggtcaatggtcacctgcttattc

SEQ ID NO: 405348 - DNA, 75 bp, synthetic construct
  source 1..75: mol_type = other DNA
ctgtttttttatccaaagcgtattacactgaagtgatagagcttgacccaacacatcttagcgatgcgggtatgg

SEQ ID NO: 405349 - DNA, 75 bp, synthetic construct
  source 1..75: mol_type = other DNA
tttgcttacctgccatctcgacggtgtaactgaaacatatgctgatggctggaacgcctgccgcgccgccatgct

SEQ ID NO: 405350 - DNA, 75 bp, synthetic construct
  source 1..75: mol_type = other DNA
ggcatggttgcctggaatattcatggaagccgccagtacgacgccggatatgcgcaggcgcaggcagaccagaaa

SEQ ID NO: 405351 - DNA, 75 bp, synthetic construct
  source 1..75: mol_type = other DNA
gccggttatcaggaagagatagaccatcgttcatacgagcgacaggggcttgagaaaacgcctggtattcacctc

SEQ ID NO: 405352 - DNA, 75 bp, synthetic construct
  source 1..75: mol_type = other DNA
aaattgaactcgccatcccccgcgaactgccgcaggatgccgcacgggaaaccgttctcgcctttgtcagagaaa

SEQ ID NO: 405353 - DNA, 75 bp, synthetic construct
  source 1..75: mol_type = other DNA
tcgcaacgctttgcggctgtggttggtcacaatcggctgcgcggtggtcgttatcgcaggccaactgtggtggga

SEQ ID NO: 405354 - DNA, 75 bp, synthetic construct
  source 1..75: mol_type = other DNA
cgtttcgattgtgtgcgccctgcggggctgaaagaaaactgcaaaaaggcattacggcagaaatggcgatttatc

SEQ ID NO: 405355 - DNA, 75 bp, synthetic construct
  source 1..75: mol_type = other DNA
actcgccatcccccgtgaactggcgcaggatgccgcacgggaaacagttctcaacttcgtaagggaaaactttgt

SEQ ID NO: 405356 - DNA, 75 bp, synthetic construct
  source 1..75: mol_type = other DNA
ccagtctctgagccagcaaatggaaaaattgcgacagcattaccggaaggtggagaaacaggacattcccgcgag

SEQ ID NO: 405357 - DNA, 75 bp, synthetic construct
  source 1..75: mol_type = other DNA
gttgctcctcaattgagcatattttgtttgtaatcaacaagatgttagagtcactatcaagcatacagagaaagc

SEQ ID NO: 405358 - DNA, 75 bp, synthetic construct
  source 1..75: mol_type = other DNA
caacagtcggcgatggtgaaatcggtagagcgggatatgaaaattgccgtggatcggtttaaccgcgagtacaac

SEQ ID NO: 405359 - DNA, 75 bp, synthetic construct
  source 1..75: mol_type = other DNA
ccgtggttttacgggggatgatacagaagtgcaggcccgtcttgcccgtggcaacgcgccgacggcggaagaact

SEQ ID NO: 405360 - DNA, 75 bp, synthetic construct
  source 1..75: mol_type = other DNA
cttttaggttataaacaccaacatattggagaaatagattgggtaataactgataataaatcagatcttgaactg

SEQ ID NO: 405361 - DNA, 75 bp, synthetic construct
  source 1..75: mol_type = other DNA
tatatgacggaagcacagcgtgccgggcgcgtatttaaagacggcaggtatgttgatgcggaatatccggtacgt

SEQ ID NO: 405362 - DNA, 75 bp, synthetic construct
  source 1..75: mol_type = other DNA
gctgcatgacctggctgacgtgctgaacgtgccgacaaaagcgctttctctgaacggtcgtcttgggcttgcttt

SEQ ID NO: 405363 - DNA, 75 bp, synthetic construct
  source 1..75: mol_type = other DNA
tttgaactccatatcggtgggatgaaggaaatgggggagacgcacggtctcacctacccacaggaacatttattg

SEQ ID NO: 405364 - DNA, 75 bp, synthetic construct
  source 1..75: mol_type = other DNA
ggctggctgattgtggtcagtggccacacggacaataccggtgacccgcagcgcaaccaggctctgtccctgaag

SEQ ID NO: 405365 - DNA, 75 bp, synthetic construct
  source 1..75: mol_type = other DNA
agcacttttatttccggccggttgccgttggattctgtctgacgtcggttgcggcccgccccggtaatctctggc

SEQ ID NO: 405366 - DNA, 75 bp, synthetic construct
  source 1..75: mol_type = other DNA
gtttgccggtacggcagtcgggttccttgcttcagcagctctggttgtttccgtgacactgccgaagatgaaagc

SEQ ID NO: 405367 - DNA, 75 bp, synthetic construct
  source 1..75: mol_type = other DNA
attgtaaaaagagatctatatagaagattttatataaggcatttgaaagggtttaaaaaaatagatttaaaagaa

SEQ ID NO: 405368 - DNA, 75 bp, synthetic construct
  source 1..75: mol_type = other DNA
gttcgctttatattccttacgctggccctgtactgctggaatttccgttgttgaataaaggcagcgccttcagca

SEQ ID NO: 405369 - DNA, 75 bp, synthetic construct
  source 1..75: mol_type = other DNA
acagcactgcaacatcttaacactgaccgccagttacttgaggactggcagcagcgtggcgcgccgcagcgttac

SEQ ID NO: 405370 - DNA, 75 bp, synthetic construct
  source 1..75: mol_type = other DNA
tggggagcgatggcatggtgcgcctgccggttgaacagcttcgtgacggtaaactgcatcgtttcgtctgggtgg

SEQ ID NO: 405371 - DNA, 75 bp, synthetic construct
  source 1..75: mol_type = other DNA
cttttctgctgaactggcaggcaaataccagtcgttcagaatatcgtggatacgggaaatcggttactgacaatt

SEQ ID NO: 405372 - DNA, 75 bp, synthetic construct
  source 1..75: mol_type = other DNA
ttgatgaactggcaagctaatgtcagtcagtcagaatacagaaaatatgggcattcagtcagtgacaacttctgg

SEQ ID NO: 405373 - DNA, 75 bp, synthetic construct
  source 1..75: mol_type = other DNA
gggaaacagttggcgcatccgttatgacaaatcctttgaactgacagacactagtttttcagctgcgagttatca

SEQ ID NO: 405374 - DNA, 75 bp, synthetic construct
  source 1..75: mol_type = other DNA
tttctggtggggctgctggaatatgtcgatcaacattggcggagcgattattccgctgattagcgcctttgccgc

SEQ ID NO: 405375 - DNA, 75 bp, synthetic construct
  source 1..75: mol_type = other DNA
cgctgccggacgtgctggacacctggcgtgatgaccggtacgcataccgtcacacggagaaccggagtcgccgta

SEQ ID NO: 405376 - DNA, 75 bp, synthetic construct
  source 1..75: mol_type = other DNA
gcgcaggttttcacggtgccgttcaccacgccggccattgcgctgcgtgaggggtacctgaagtacaacgtcacg

SEQ ID NO: 405377 - DNA, 75 bp, synthetic construct
  source 1..75: mol_type = other DNA
aaccgatttccgcggatatgccctagccggttatgcatcaccgtaccaggagaacgttatcacactggacccgac

SEQ ID NO: 405378 - DNA, 75 bp, synthetic construct
  source 1..75: mol_type = other DNA
gacagtgcgggaatcagacgggacagtccaggttttcactgtaccattcaccacacctgctattgcactgcgtga

SEQ ID NO: 405379 - DNA, 75 bp, synthetic construct
  source 1..75: mol_type = other DNA
tgggtgagaactacacgccgtcagacatctttgacagcgttccttttcgaggggggatgttgagttctgatgaga

SEQ ID NO: 405380 - DNA, 75 bp, synthetic construct
  source 1..75: mol_type = other DNA
atgaaagaatacatctgtaatgcctctctatgcagtacatctttgtgtactcaaaaaaataagctctcatataca

SEQ ID NO: 405381 - DNA, 75 bp, synthetic construct
  source 1..75: mol_type = other DNA
gcgggacgtatatcaggtgctgccggtgtggtgggtgataacggtgaggtgtatatgagcggtctgtctgaaacc

SEQ ID NO: 405382 - DNA, 75 bp, synthetic construct
  source 1..75: mol_type = other DNA
tcctttcgtgggcgtgagtgtgggctctgatgagaatatggttccgtataatcaacgtgagttcgctccagttgt

SEQ ID NO: 405383 - DNA, 75 bp, synthetic construct
  source 1..75: mol_type = other DNA
atggtgaattaccgtcttatatcactggcgctgacacgtacggctcctttaagctcgttcagcacgcaaaattcg

SEQ ID NO: 405384 - DNA, 75 bp, synthetic construct
  source 1..75: mol_type = other DNA
aaactgcatcgtttcgtctgggtggcggacgatggcaaagcggtgcgcttcttcgtgattaaccgctatcccgac

SEQ ID NO: 405385 - DNA, 75 bp, synthetic construct
  source 1..75: mol_type = other DNA
gttatttgccggatggggatcggatttgctgtttagcgggcaacgagcgccaatgattttgctgttcacgctggg

SEQ ID NO: 405386 - DNA, 75 bp, synthetic construct
  source 1..75: mol_type = other DNA
ccaccgtgtgcccgcttactgacccattggtactcccgtaatgaacgtggtttctggtggggctgctggaatatg

SEQ ID NO: 405387 - DNA, 75 bp, synthetic construct
  source 1..75: mol_type = other DNA
ctggagcagcagttgctcgattatcgtcatagccagcgtaagggcgggcaggcgcagagtacggcgctgatgcag

SEQ ID NO: 405388 - DNA, 75 bp, synthetic construct
  source 1..75: mol_type = other DNA
tggcgaatctggtacacaaccccacgccgggaactcggatgttcagcgtctctgatgggcggcagacccagcttt

SEQ ID NO: 405389 - DNA, 75 bp, synthetic construct
  source 1..75: mol_type = other DNA
atgctggacaaacgcgccgcgctttccggcggcgcggtggaccgccagttacaaccagtgttgcagggcgaagcg

SEQ ID NO: 405390 - DNA, 75 bp, synthetic construct
  source 1..75: mol_type = other DNA
tgtcggacctgctggattcggtggaaaggtcagggactggaacgaccggacacatgccgagacgtggcgtgcatc

SEQ ID NO: 405391 - DNA, 75 bp, synthetic construct
  source 1..75: mol_type = other DNA
agtcagacggcatttgaaacacagtggcaacagtggggcgcatccggccttgtagctctcagagcccagctgctt

SEQ ID NO: 405392 - DNA, 75 bp, synthetic construct
  source 1..75: mol_type = other DNA
aaacgtgaagaggaattgcgccggaaggaacaggaagatactgaacgtagtcgcgcggagcagctcaggaaaaat

SEQ ID NO: 405393 - DNA, 75 bp, synthetic construct
  source 1..75: mol_type = other DNA
cacatgccgagacgtggcgtgcatcatgggctgaccatgcaaacagagcactggcgaacgccggttatcaggaag

SEQ ID NO: 405394 - DNA, 75 bp, synthetic construct
  source 1..75: mol_type = other DNA
ggatcatctgttccgctcgctgggctttgagcgcacctgggatgaatggcaacgtgatgaatatgcccgaacaca

SEQ ID NO: 405395 - DNA, 75 bp, synthetic construct
  source 1..75: mol_type = other DNA
atgactctatgggcggtgttgtccggcttaatggtacgctgtatcccgcgtttgccgtccccacagccgacaaca

SEQ ID NO: 405396 - DNA, 75 bp, synthetic construct
  source 1..75: mol_type = other DNA
atggttctttgacagtattaaaattaaagaaaacagagaaaagaaagaaagacaaaggaactctgacattaatct

SEQ ID NO: 405397 - DNA, 75 bp, synthetic construct
  source 1..75: mol_type = other DNA
gctatcaaaactggtgataaatcagcacttgaagcatatgaacgtggcctaaatggttttgtacgtgccgtagta

SEQ ID NO: 405398 - DNA, 75 bp, synthetic construct
  source 1..75: mol_type = other DNA
taagtaccctacgtcagattgcagtacttgataacactgctgctaaagcaatggttgaaggttatcgcagtactg

SEQ ID NO: 405399 - DNA, 75 bp, synthetic construct
  source 1..75: mol_type = other DNA
attaagtgatgaagaacttttagaaattatctctactcgacctgatttgctcaataaagtacatggtgaagaacc

SEQ ID NO: 405400 - DNA, 75 bp, synthetic construct
  source 1..75: mol_type = other DNA
acatcaggagacagcgttacccctggcgcgtttacagggagagcgggcaagaaccagcgggcagatgcgcatgtt

SEQ ID NO: 405401 - DNA, 75 bp, synthetic construct
  source 1..75: mol_type = other DNA
ggatcagtacattccagaactactaaaactatcctcactcggtgaacttaacccgactgtgtacagtggccttgc

SEQ ID NO: 405402 - DNA, 75 bp, synthetic construct
  source 1..75: mol_type = other DNA
tcgttcttctgcaacaattgtataccgcgtttgggattataccgatgttgcaattgctcatgataacgcattcat

SEQ ID NO: 405403 - DNA, 75 bp, synthetic construct
  source 1..75: mol_type = other DNA
ttatgatgcaaatggtggtgttgttgagttttcagaaacagaaaagtttaaagagtatatgacagaacttttttc

SEQ ID NO: 405404 - DNA, 75 bp, synthetic construct
  source 1..75: mol_type = other DNA
tcaggtgaaaaagtgtgtccagagcggcatcaaagtgctgggactggcggcgctcgatagcaccgcaacaccttg

SEQ ID NO: 405405 - DNA, 75 bp, synthetic construct
  source 1..75: mol_type = other DNA
tgatggcggcctgtttatggcagttacccggtattcgtacccatctggtggcgtttgacaccagcgtggttgatc

SEQ ID NO: 405406 - DNA, 75 bp, synthetic construct
  source 1..75: mol_type = other DNA
aaatttatgaaatctcattagtaacagtacctgccgatcctaccgttggggtaggtcgttcaatggactcacaac

SEQ ID NO: 405407 - DNA, 75 bp, synthetic construct
  source 1..75: mol_type = other DNA
gtagtaatacaggatatgagcgagcacgtgcagctgcggatgcatggtcacaacgtgaaaacgatgtttcctcat

SEQ ID NO: 405408 - DNA, 75 bp, synthetic construct
  source 1..75: mol_type = other DNA
ttatggcatgagcctttagcgagaacagtttttgaatcgtatttttacggactacctgttataggctcaaatcgt

SEQ ID NO: 405409 - DNA, 75 bp, synthetic construct
  source 1..75: mol_type = other DNA
tcaggatgctattgccaatctggtgtatagcaaccgcctgggtaacaaagcgcccggcgacggctggaaatatcg

SEQ ID NO: 405410 - DNA, 75 bp, synthetic construct
  source 1..75: mol_type = other DNA
cgcgtttttattcagaattccgtggcgatggtaaatcatgggccacaattcacctacagaatggagataaaaacc

SEQ ID NO: 405411 - DNA, 75 bp, synthetic construct
  source 1..75: mol_type = other DNA
caacgagctacgcgaagaaacgcgctatcttaatgttgactatgcggctgtgactggtttacttgttcaggtggc

SEQ ID NO: 405412 - DNA, 75 bp, synthetic construct
  source 1..75: mol_type = other DNA
tgacgctactgaagcaatccgtaaaatgaacgggtacacctacacgcttaaggaaaatggcctgccttacgctgg

SEQ ID NO: 405413 - DNA, 75 bp, synthetic construct
  source 1..75: mol_type = other DNA
tttcattttctgtcggcggtgacggagacatacatcagatggaaaaatcacaacaggtgtgtcatacaccacgtc

SEQ ID NO: 405414 - DNA, 75 bp, synthetic construct
  source 1..75: mol_type = other DNA
ttgcagcactttatttccggtgtgttcttttggcgtcttttgcacagcagggtggtttccgaggggccagaagca

SEQ ID NO: 405415 - DNA, 75 bp, synthetic construct
  source 1..75: mol_type = other DNA
agccatccttcacactataacggcgatttccttgttgaaattgcaatgagaactaagtcaatatctggcagtgaa

SEQ ID NO: 405416 - DNA, 75 bp, synthetic construct
  source 1..75: mol_type = other DNA
ctggctggtctggcgtcgcggtgcgaaaacgcgtccgcttgaggcatttattcaactactggatgtgtctgactc

SEQ ID NO: 405417 - DNA, 75 bp, synthetic construct
  source 1..75: mol_type = other DNA
gatcagcaagcctctaccattaaatccaacgcctggaattgctgggaatataggttcttcaattggtacagaagg

SEQ ID NO: 405418 - DNA, 75 bp, synthetic construct
  source 1..75: mol_type = other DNA
cggcagccactacaagtctgataggtgcaggagcgaatgccggcatcgggttactgattaacggtgaagtgaatc

SEQ ID NO: 405419 - DNA, 75 bp, synthetic construct
  source 1..75: mol_type = other DNA
caaccactgacggcaacgagctacgcgaggaaacgcgttacctcaatgttgactacgctgcggtgactggtttac

SEQ ID NO: 405420 - DNA, 75 bp, synthetic construct
  source 1..75: mol_type = other DNA
ttaacgccgaatccttgctggaagcgtataaaacgtcttgaagatgaggggatcatcactggtcgggttgcgctg

SEQ ID NO: 405421 - DNA, 75 bp, synthetic construct
  source 1..75: mol_type = other DNA
aactatccgtttaatccgcgttctgcacaggatgcctcactggatgccttcaaacgcttctttaaaccggatggc

SEQ ID NO: 405422 - DNA, 75 bp, synthetic construct
  source 1..75: mol_type = other DNA
gtgttcttcccggagttcgcccacgccacgccaagggtgcagttagacttgcatccaacaggaagcgttaacggc

SEQ ID NO: 405423 - DNA, 75 bp, synthetic construct
  source 1..75: mol_type = other DNA
atgagcctgtataacgatttagtgtcctgcgactttgatggttgtacacctgatgatctgaacggaattgagagc

SEQ ID NO: 405424 - DNA, 75 bp, synthetic construct
  source 1..75: mol_type = other DNA
ctaaggctgatatgtacagattaggcgcaatgctgggacatatcggagaagttgcgcgggcgctgaacgatagcg

SEQ ID NO: 405425 - DNA, 75 bp, synthetic construct
  source 1..75: mol_type = other DNA
gccatgccgggcgcatgtggccggggattgcgctgagctgctcgctgggaaatatcgccgcatccatcctgcttt

SEQ ID NO: 405426 - DNA, 75 bp, synthetic construct
  source 1..75: mol_type = other DNA
ttcagatgaacgagattaccagacgattagcgctatatggagctctctagaaccaacagaacttgatgaattatc

SEQ ID NO: 405427 - DNA, 75 bp, synthetic construct
  source 1..75: mol_type = other DNA
acacacatcaatggtggcacgcaaaccgttcagaattatggtaaggcaatcaataccgatatcgtctctggccta

SEQ ID NO: 405428 - DNA, 75 bp, synthetic construct
  source 1..75: mol_type = other DNA
cttttggtgctatgtgtagtgcttcttttctaattacgaccgagaatattaaactcgattatttagggcgttcct

SEQ ID NO: 405429 - DNA, 75 bp, synthetic construct
  source 1..75: mol_type = other DNA
aaagccttagaactgtgtttagataaatcagcaaagaaaggtttcgaaagtagttattatatgtacaaggaagat

SEQ ID NO: 405430 - DNA, 75 bp, synthetic construct
  source 1..75: mol_type = other DNA
aaatatagattagaaatcataaaagaaaataatataggttttgttaaaggaaataacttagctctccagagcgat

SEQ ID NO: 405431 - DNA, 75 bp, synthetic construct
  source 1..75: mol_type = other DNA
acactcaataagaacgccaccaatgatgaggttgacgaggaaatacagaacgagctggaggcctggaatgactaa

SEQ ID NO: 405432 - DNA, 75 bp, synthetic construct
  source 1..75: mol_type = other DNA
actctagctaaagttgactgggaaaagctaagtgcacaaacaaaatccaatgcaggctaccaagatttaacgtgg

SEQ ID NO: 405433 - DNA, 75 bp, synthetic construct
  source 1..75: mol_type = other DNA
catcagctacgaaactgccaccttcccgtgggctgcttctggtcgtgctatcgcttccgactgcgcagacggtat

SEQ ID NO: 405434 - DNA, 75 bp, synthetic construct
  source 1..75: mol_type = other DNA
caatagccttcaagcatttcattgcagaggttggaataaaccaagaaaagaaattagtcattgggctaaatatca

SEQ ID NO: 405435 - DNA, 75 bp, synthetic construct
  source 1..75: mol_type = other DNA
agcaggagaacatcaacggtctgggggcgtcgtccgagatttccatgtcgggtaatttttatctgaatcaggccc

SEQ ID NO: 405436 - DNA, 75 bp, synthetic construct
  source 1..75: mol_type = other DNA
aaaggtatcgacgttgaagttcgtgaatggtcgcatgattcgatcgaaaaattgcaggaggataatctgcgggtc

SEQ ID NO: 405437 - DNA, 75 bp, synthetic construct
  source 1..75: mol_type = other DNA
aattggtagcggggcacttcgtggtgcagggaatacgaaaataccgctactgattaacggtagcctgaatattct

SEQ ID NO: 405438 - DNA, 75 bp, synthetic construct
  source 1..75: mol_type = other DNA
catattgccccgtcaacgtattaccattgtcagcaacagcgacatcatccggataaacgcagtgcccgtgcgcag

SEQ ID NO: 405439 - DNA, 75 bp, synthetic construct
  source 1..75: mol_type = other DNA
tgtcgcggcggtgaccaggcccgctggcagggggatgaggccgggaaaaatacctcacttcatcatggtgtgggg

SEQ ID NO: 405440 - DNA, 75 bp, synthetic construct
  source 1..75: mol_type = other DNA
agcaatgcccatgaggccgggctggcgcttgcaagggcgcaacagctgatggcgaaacacggtatcacggagcag

SEQ ID NO: 405441 - DNA, 75 bp, synthetic construct
  source 1..75: mol_type = other DNA
gtaaccatcaccccgcatattgcgggcagtacgctcgacgccttcagtaattcacccaaactattcgctgagatc

SEQ ID NO: 405442 - DNA, 75 bp, synthetic construct
  source 1..75: mol_type = other DNA
aacgggagatctggatgaaatttgaaggtgaatgcgaatgtgaacatgatgttgaaataatgcttaatcaaacag

SEQ ID NO: 405443 - DNA, 75 bp, synthetic construct
  source 1..75: mol_type = other DNA
atggttttatatgtgtgcagtagttgcaaaaaaaaacataaaattaatttaaatgattttgatatttgggaggag

SEQ ID NO: 405444 - DNA, 75 bp, synthetic construct
  source 1..75: mol_type = other DNA
ccatcaatcagaccgtggatctgaaatccgggcagacggtcattatcagtggcttccagcagtcaggacgtcgca

SEQ ID NO: 405445 - DNA, 75 bp, synthetic construct
  source 1..75: mol_type = other DNA
ctccggcaggcacaacccgggtcatacctgagcgcacgccattcagggagaggtcaaaagctgcatggccgaggg

SEQ ID NO: 405446 - DNA, 75 bp, synthetic construct
  source 1..75: mol_type = other DNA
gcgtaaagtctggcgccagttgttacgcgaaggtatcagggtggccagatgtacagtggcccgtctcatggcggt

SEQ ID NO: 405447 - DNA, 75 bp, synthetic construct
  source 1..75: mol_type = other DNA
gcgtttgcatgctacctacgatgaaaccatttcccgcgctctggatgtttttgagaaggttaatcaggacattcc

SEQ ID NO: 405448 - DNA, 75 bp, synthetic construct
  source 1..75: mol_type = other DNA
gataatttacccgctgttgtcctcaaggaattacagcaaaatacgccacgcaatgatatttgggcgaagtttttt

SEQ ID NO: 405449 - DNA, 75 bp, synthetic construct
  source 1..75: mol_type = other DNA
tttcagctaacctacgcaaacaacttattaatagcaatgatgaacaaacgattgaaagtatggcgagatatatgc

SEQ ID NO: 405450 - DNA, 75 bp, synthetic construct
  source 1..75: mol_type = other DNA
cgcaactggataagctggcaaaacagccggatcgtatttggtggagtacgcttgcgaaaagcaagcggacatatt

SEQ ID NO: 405451 - DNA, 75 bp, synthetic construct
  source 1..75: mol_type = other DNA
atgttatccaccttgcaattagttgccacaccggcagcaccggcagcaccggcagcacaggcgctggctgatgcg

SEQ ID NO: 405452 - DNA, 75 bp, synthetic construct
  source 1..75: mol_type = other DNA
atagagagtaatcaaaaattgattgttcttggcaatttgacagtcaaaggtaatatttccactttctctctttct

SEQ ID NO: 405453 - DNA, 75 bp, synthetic construct
  source 1..75: mol_type = other DNA
acgtttggaagactgggactttttagagagtgcattagttagttgggataatttacccgctgttgtcctcaagga

SEQ ID NO: 405454 - DNA, 75 bp, synthetic construct
  source 1..75: mol_type = other DNA
gccattaacgagatgaatcagttaagtgagcatattctggttgagcgcgcaacaggcggtaaaggtggcggcggc

SEQ ID NO: 405455 - DNA, 75 bp, synthetic construct
  source 1..75: mol_type = other DNA
atgcagctcatgttatttaatttgttttccccagcacttaagcttaatactggcctggcaattctttcgcctggt

SEQ ID NO: 405456 - DNA, 75 bp, synthetic construct
  source 1..75: mol_type = other DNA
agcgtacgtttaatcgtgcggctcctgctccggtccccactccggcggcctccggtagttcaccacaaaccaccg

SEQ ID NO: 405457 - DNA, 75 bp, synthetic construct
  source 1..75: mol_type = other DNA
atttatcttacctcgcaatggtttccacaacgtaatcgcgccagcatcatgggactgttctatatgggggcgccg

SEQ ID NO: 405458 - DNA, 75 bp, synthetic construct
  source 1..75: mol_type = other DNA
tagtaagcgtcatcattcattcattaatttttacgttagcagcgggttatgcaaagtttgtgccattgaatccac

SEQ ID NO: 405459 - DNA, 75 bp, synthetic construct
  source 1..75: mol_type = other DNA
atgagtgttaatgattctattgatgtttttttaagtttgtttttcatctttttgcatttttattctaaaaaaaat

SEQ ID NO: 405460 - DNA, 75 bp, synthetic construct
  source 1..75: mol_type = other DNA
aattttctgcatgaccaacctgaaatagacgttattcgtcctgagttttcaacagcctggtatccgaaaaatgat

SEQ ID NO: 405461 - DNA, 75 bp, synthetic construct
  source 1..75: mol_type = other DNA
accattaacgggggcagacagtcaattcatgacgggggtatttccacaggtacgataatcgagagtggcaatcag

SEQ ID NO: 405462 - DNA, 75 bp, synthetic construct
  source 1..75: mol_type = other DNA
ccgggatgcgatttaccgatggtaactggaacctgacgccgtatgcatcgttaacggggttcaccgctgataacc

SEQ ID NO: 405463 - DNA, 75 bp, synthetic construct
  source 1..75: mol_type = other DNA
ttcacgcgtagagggggggactgcgaatggaacaatcattgatggtggtagccagatagtaacaattcaagggca

SEQ ID NO: 405464 - DNA, 75 bp, synthetic construct
  source 1..75: mol_type = other DNA
ggtaaacaaacagtaacagctcaggggcatgttgacggtacgacgataaatacatctggttctcagaacatcaca

SEQ ID NO: 405465 - DNA, 75 bp, synthetic construct
  source 1..75: mol_type = other DNA
ttatcaggggcaagctaataatacaatccttcatgggggtacacaggtaatttataatggtgggaattctagcgg

SEQ ID NO: 405466 - DNA, 75 bp, synthetic construct
  source 1..75: mol_type = other DNA
taccgatggtaactggaacctgaaccgccccgggtttcctggagagtgttttatctgtgaactcaggctgccaga

SEQ ID NO: 405467 - DNA, 75 bp, synthetic construct
  source 1..75: mol_type = other DNA
atttgcaacaggttctgatcatcaagttgtaaacgaactcaaaggggaaagactgagagaacctaacgaagcttt

SEQ ID NO: 405468 - DNA, 75 bp, synthetic construct
  source 1..75: mol_type = other DNA
aacaggattgagcattttgtggcggatgcaccgcctgttgtggaatttttttctttctactgtccgccatgtgcc

SEQ ID NO: 405469 - DNA, 75 bp, synthetic construct
  source 1..75: mol_type = other DNA
gctgcagccacacatcctgaaattaaattattacaatttaaattaataccagggcagggtattaataaggcttgg

SEQ ID NO: 405470 - DNA, 75 bp, synthetic construct
  source 1..75: mol_type = other DNA
tttatgtctcctcaccgtctggtcggtgttttgctgagacttctaacttcctgtttttgttggtgttgtccttac

SEQ ID NO: 405471 - DNA, 75 bp, synthetic construct
  source 1..75: mol_type = other DNA
ctcatattatcaaccatggccagcagaatgtttatggtgggatatctaatgaaagtcttattgaatctggtggat

SEQ ID NO: 405472 - DNA, 75 bp, synthetic construct
  source 1..75: mol_type = other DNA
tgattttttgcgattttccaatcccaaacagctcatggcttttctgggactggtgccgaatattccagtggaaac

SEQ ID NO: 405473 - DNA, 75 bp, synthetic construct
  source 1..75: mol_type = other DNA
acaaaacgctgccacaacgcagcgcgatactctgctgggtgagctggcgaaactggcgcagtgctggcagtcaca

SEQ ID NO: 405474 - DNA, 75 bp, synthetic construct
  source 1..75: mol_type = other DNA
acggtcagctaagccagcgcattccttacggcggctattatcgtgaccgtaccatcaaaattctgcgttataagg

SEQ ID NO: 405475 - DNA, 75 bp, synthetic construct
  source 1..75: mol_type = other DNA
ctgctgaggcgacgaatttcagtgattttgatatccgggatattcgtaaaaagcccatgtcaatttatcttggtc

SEQ ID NO: 405476 - DNA, 75 bp, synthetic construct
  source 1..75: mol_type = other DNA
tttcaatgtttacggagcatggatgaaagataacaatatcgggcagatagaactgctcaataaggagttaactga

SEQ ID NO: 405477 - DNA, 75 bp, synthetic construct
  source 1..75: mol_type = other DNA
caagacgatgttgggcatatttcgcgtgcagtgctacacgaacaggcagcgctggagcaggatctacgtaggcat

SEQ ID NO: 405478 - DNA, 75 bp, synthetic construct
  source 1..75: mol_type = other DNA
gaaatcgattctaagaaaaataaacaataaaattttcagccaaattaatttcccagattacctttacggctctat

SEQ ID NO: 405479 - DNA, 75 bp, synthetic construct
  source 1..75: mol_type = other DNA
aattatccaggcgataaaacatcaagagttcacaccatactttcagcccatattctgttctggcagtgggcgtct

SEQ ID NO: 405480 - DNA, 75 bp, synthetic construct
  source 1..75: mol_type = other DNA
ggcgttaccggaagcaaaagggcgtgaacaactcgcgcaggcgctggctgaacagccgggaatgaccgttgacca

SEQ ID NO: 405481 - DNA, 75 bp, synthetic construct
  source 1..75: mol_type = other DNA
gaatgactgtggagtctgcccgagacatgctggcctcatcgtcggataaagcagaaccggtctctgcatccacaa

SEQ ID NO: 405482 - DNA, 75 bp, synthetic construct
  source 1..75: mol_type = other DNA
ggagaacgcccgggctgtgctggctgcgggatcaggtaaggccgaaccggtctctgcatccacaaccgccctgtt

SEQ ID NO: 405483 - DNA, 75 bp, synthetic construct
  source 1..75: mol_type = other DNA
gacaattgcaggaatgtttcaatttgcggctgataacggctatatcgggtcaaacccatttaacgggctgacacc

SEQ ID NO: 405484 - DNA, 75 bp, synthetic construct
  source 1..75: mol_type = other DNA
tccggcaaacgcatggcatcgaactccatgattaccgcgtcgattatccctggtgggaaaacgactatccggaca

SEQ ID NO: 405485 - DNA, 75 bp, synthetic construct
  source 1..75: mol_type = other DNA
atcgctttatggcacagcatgctgccagtgcggtttccggtggcggaactgccgggcacggagaagaagatctgc

SEQ ID NO: 405486 - DNA, 75 bp, synthetic construct
  source 1..75: mol_type = other DNA
cttaaccggctaacttccataatgggaaaaacatgtaagtatataattattataactctctcagttccaaatgtt

SEQ ID NO: 405487 - DNA, 75 bp, synthetic construct
  source 1..75: mol_type = other DNA
gtaaacgaactcaacggggaaagactgaaagaaccaaacgaagtttttaaacgttatggtcgagcaataagatat

SEQ ID NO: 405488 - DNA, 75 bp, synthetic construct
  source 1..75: mol_type = other DNA
tatgattttcaagtggacgatgcaaaatttagacgcgataatgtaaaagaaataatttctaatttattcgctaac

SEQ ID NO: 405489 - DNA, 75 bp, synthetic construct
  source 1..75: mol_type = other DNA
ccgatattactagtggtatctataatcaagaaccaataaaatcacctacgaacgatgaaaacaaaaaagtcggcc

SEQ ID NO: 405490 - DNA, 60 bp, synthetic construct
  source 1..60: mol_type = other DNA
atgagcggaaaaccggcggcgcgtcagggcgacatgacgcagtatggcggtagcattgtt

SEQ ID NO: 405491 - DNA, 75 bp, synthetic construct
  source 1..75: mol_type = other DNA
attatcgatttgctgtgagtcaggcaggatttaaacaagcatgcagaaaataccaacgggtttcggttaaaaacc

SEQ ID NO: 405492 - DNA, 75 bp, synthetic construct
  source 1..75: mol_type = other DNA
catcaatgaaaataacaatgatgaagttaatggattagtacaagagctcaaaaacctttttaatggtaaggaagg

SEQ ID NO: 405493 - DNA, 75 bp, synthetic construct
  source 1..75: mol_type = other DNA
accggtacaactgctactgcagccagatcccagtgctgctcaacgacgacggcagcatcttcaatgaggggctgg

SEQ ID NO: 405494 - DNA, 75 bp, synthetic construct
  source 1..75: mol_type = other DNA
tgatggggcgcgaaagcggcagcctcgattttgccagtttccgcacgctttcactttctccggggctggcgtcgg

SEQ ID NO: 405495 - DNA, 75 bp, synthetic construct
  source 1..75: mol_type = other DNA
atgaagaatctccttttggtagcgatgaaggtgctgatgctctaaacgaacttgaaaatagcctccgttctggac

SEQ ID NO: 405496 - DNA, 75 bp, synthetic construct
  source 1..75: mol_type = other DNA
cggtgttcctgctggcctttttcggttttggcgcgaaagccgggatgatgccgttgcacagctggttgccgcgcg

SEQ ID NO: 405497 - DNA, 75 bp, synthetic construct
  source 1..75: mol_type = other DNA
gaccagcgcctgaccgggcgtgagcgcgaggtaaacagccataactggcacttcctgtgccacgaccacggcgag

SEQ ID NO: 405498 - DNA, 75 bp, synthetic construct
  source 1..75: mol_type = other DNA
ggattacgttgttgcagaagcgcagcgcggaacgctggaggcattcaataacctctcgcagcagtcgcaggtata

SEQ ID NO: 405499 - DNA, 75 bp, synthetic construct
  source 1..75: mol_type = other DNA
gtttacttaactgcgatggttaaagctggcagtaatgccggcttttttacggtcgcacacgtcttcctctcatcc

SEQ ID NO: 405500 - DNA, 75 bp, synthetic construct
  source 1..75: mol_type = other DNA
aaaaaagactttaactttggggaaattacggcggcggatattggtcgtatgaatgtgactaaagaagagcgtgat

SEQ ID NO: 405501 - DNA, 75 bp, synthetic construct
  source 1..75: mol_type = other DNA
gctgcagtgaaaatgactgccctgatgatcctcatcactctgatgaactctgccggtggtaaagcatctgacctg

SEQ ID NO: 405502 - DNA, 75 bp, synthetic construct
  source 1..75: mol_type = other DNA
tgcataaattaggcacggggacgttgaaaattgatggctccgggattaatggtggaagcctgaatactggtgatg

SEQ ID NO: 405503 - DNA, 75 bp, synthetic construct
  source 1..75: mol_type = other DNA
aattcgcaccgcaaaaacgttttcggtcaccccagatcagatctatgacccggcatgctatccggggggagccct

SEQ ID NO: 405504 - DNA, 75 bp, synthetic construct
  source 1..75: mol_type = other DNA
ctggtcatcggacagatcaagacggataagaaatccaatgagatcacagctatccctgaacttcttaacatgctg

SEQ ID NO: 405505 - DNA, 75 bp, synthetic construct
  source 1..75: mol_type = other DNA
accattgcatttattgtagcttacattgccgctcactttattaaaccacaaaaattatccaactttattgcactg

SEQ ID NO: 405506 - DNA, 75 bp, synthetic construct
  source 1..75: mol_type = other DNA
atgttcagcatctggctcaagttataaaggatgtagaatattagagtctgaaacatggacaaaatatttcgaaaa

SEQ ID NO: 405507 - DNA, 75 bp, synthetic construct
  source 1..75: mol_type = other DNA
gtgggtcgaaatatcactcaggacccgcgaccagacagagtggtcgcaggcctgaatgctatcgtccacgaaaat

SEQ ID NO: 405508 - DNA, 75 bp, synthetic construct
  source 1..75: mol_type = other DNA
accaactatccggcaattcctagtgaggtgttgtccgcaatcctgaaggttgccaggattcgtgccgatttcgat

SEQ ID NO: 405509 - DNA, 75 bp, synthetic construct
  source 1..75: mol_type = other DNA
gcgatcggtttttctgtcagcgttgcccaatatttgccaacgctctatgccggagcggggaggtttgccacggtc

SEQ ID NO: 405510 - DNA, 75 bp, synthetic construct
  source 1..75: mol_type = other DNA
tactacatcagattcagaattaacctaaatgaatctgatgttgaagcaattgttaaaacattctatcccaaagat

SEQ ID NO: 405511 - DNA, 75 bp, synthetic construct
  source 1..75: mol_type = other DNA
atttgtctgtgacaaataacgccaccaataattcaggtgattttattgttgatggtggtataaatataaatgata

SEQ ID NO: 405512 - DNA, 75 bp, synthetic construct
  source 1..75: mol_type = other DNA
tttacggtgaaagcgtggctcgagcgctacgaagtaattcttgagcgaagagaattgaagcccaacacgatgaag

SEQ ID NO: 405513 - DNA, 75 bp, synthetic construct
  source 1..75: mol_type = other DNA
ttgtcggttttacgctgctggtggcggtgatcacctggtggaaggtccgcaaaacagataccggatcgcaacaag

SEQ ID NO: 405514 - DNA, 75 bp, synthetic construct
  source 1..75: mol_type = other DNA
ttccaaagtgaaatatcttataaaaattatgtcattgcggggattgctctcagctgagaaaaaaaataatgagag

SEQ ID NO: 405515 - DNA, 75 bp, synthetic construct
  source 1..75: mol_type = other DNA
gatacaattgatgggttgaaagagttcgataaatataaaacacggatactggattcggggattaactgtaaaaaa

SEQ ID NO: 405516 - DNA, 75 bp, synthetic construct
  source 1..75: mol_type = other DNA
ctgtagctgcatctgcggcagtatccggctctgctatggcatggtcgaatggggattttaatggttctgttgata

SEQ ID NO: 405517 - DNA, 75 bp, synthetic construct
  source 1..75: mol_type = other DNA
atatttcaggcgcggaaaaattatgcgtgagtctccgtaaacaacgcaatgtaactatagattatcatctatggg

SEQ ID NO: 405518 - DNA, 75 bp, synthetic construct
  source 1..75: mol_type = other DNA
caaatattatgttactgaaaaatttgatagaaacaataatctaaaagcaagttacgagcaagtaaaggaagaaca

SEQ ID NO: 405519 - DNA, 75 bp, synthetic construct
  source 1..75: mol_type = other DNA
ttcgacgtaactaagtgctctcaggaactaaattctgactatggatttgatatacctgaagctgtagtgaaatca

SEQ ID NO: 405520 - DNA, 75 bp, synthetic construct
  source 1..75: mol_type = other DNA
ggcaacggttgctgccggcctggccggtggtctggtgggagactcgggggcttcagcggtagccggcgcacagtc

SEQ ID NO: 405521 - DNA, 75 bp, synthetic construct
  source 1..75: mol_type = other DNA
ctggcagcggcagtcacaggtgtcgcagtatatgcactccacgataataataatcatcatgacgatccgtctccg

SEQ ID NO: 405522 - DNA, 75 bp, synthetic construct
  source 1..75: mol_type = other DNA
tttgtgttgccatggcgttaagtagccagacatgggctgcggatacttcaatccccgactcaaccgaaaaaacac

SEQ ID NO: 405523 - DNA, 75 bp, synthetic construct
  source 1..75: mol_type = other DNA
tcgcgtatcaggtcgattttccacggctggaaattgtgctggaaggtgagtttgttgataccggcgctgggcaac

SEQ ID NO: 405524 - DNA, 75 bp, synthetic construct
  source 1..75: mol_type = other DNA
tgaaaaattttcgtgagccattaaattcggttcctgttgtattacgcgtcgatagtacagtcagtatttttgata

SEQ ID NO: 405525 - DNA, 75 bp, synthetic construct
  source 1..75: mol_type = other DNA
aatgtaacatttgaatataaggaacttgcacccatttttgaaggtgttgaagaaaaacaaattaaagcactatca

SEQ ID NO: 405526 - DNA, 75 bp, synthetic construct
  source 1..75: mol_type = other DNA
ggcatgaaactcggcgacacaccgctggtggagtacacccgcgaccgcctgcaccgggaaacgctgcgcagcttc

SEQ ID NO: 405527 - DNA, 75 bp, synthetic construct
  source 1..75: mol_type = other DNA
ccggcgcgaaaagctcatctttatcactgcgaccaccggggactgccgctggcgcttatcagcgaagacggcaat

SEQ ID NO: 405528 - DNA, 75 bp, synthetic construct
  source 1..75: mol_type = other DNA
caggtccgaggggacctgccggagagagagggccgcaaggattgcagggtgtggcaggggagagaggcgatacag

SEQ ID NO: 405529 - DNA, 75 bp, synthetic construct
  source 1..75: mol_type = other DNA
tatattgatatatacatttatcaatatgtattagttgtaattttcctaagtctatggcttattgtcggggtgatt

SEQ ID NO: 405530 - DNA, 75 bp, synthetic construct
  source 1..75: mol_type = other DNA
gcgaaagcgttcacctatctgctgaagcaatgggacgctctgaacgaatactgccgcaatggctgggtggagatc

SEQ ID NO: 405531 - DNA, 75 bp, synthetic construct
  source 1..75: mol_type = other DNA
aacttgattccacccggcgtctatagcgttgatatttttattaacgggaaaatgtttgaacgtcaggatgttacc

SEQ ID NO: 405532 - DNA, 75 bp, synthetic construct
  source 1..75: mol_type = other DNA
ggctgactgcggggacgtttctgattttctcgcaaagccttatggccgagatcagtgtgttcaatccggcgctac

SEQ ID NO: 405533 - DNA, 75 bp, synthetic construct
  source 1..75: mol_type = other DNA
aaatccttccggccagtgctgaatcttgctgcaggagtataccggcgagatgaacgggatttaacaccattgagg

SEQ ID NO: 405534 - DNA, 75 bp, synthetic construct
  source 1..75: mol_type = other DNA
atgggaaataagttaaacttacttgttcgcacaacctccttatttttagtattggccatggctgggtgccaaaat

SEQ ID NO: 405535 - DNA, 75 bp, synthetic construct
  source 1..75: mol_type = other DNA
tattccgcaaatttatctcaacaatgcagttaatggttatatcagcccttcccgttgggatcaggggatcaatgc

SEQ ID NO: 405536 - DNA, 75 bp, synthetic construct
  source 1..75: mol_type = other DNA
atcaaagaagaagacggtagcgaacaacgattcacccaaccttatgcttcattggcgattcttaaacgtgaaggt

SEQ ID NO: 405537 - DNA, 75 bp, synthetic construct
  source 1..75: mol_type = other DNA
ccggcccggcaggccctgccggtgagcgggggccgcaaggtgagcgaggtgcaacggggcccgtggggccgcagg

SEQ ID NO: 405538 - DNA, 75 bp, synthetic construct
  source 1..75: mol_type = other DNA
actctttttagcggagggtattttgaacagcttaaaattcagccagtaatgaatggaatagaagatgtattaaag

SEQ ID NO: 405539 - DNA, 75 bp, synthetic construct
  source 1..75: mol_type = other DNA
atgcttgaacattttggagccgaagcttcggtattagacatgacgattattgttcgttcaaatccgagtaaagcc

SEQ ID NO: 405540 - DNA, 75 bp, synthetic construct
  source 1..75: mol_type = other DNA
cccataccaacctttatcaaaactaccaagcggctaagcgggcagtggcacagcctgagtttggcgaagcagata

SEQ ID NO: 405541 - DNA, 75 bp, synthetic construct
  source 1..75: mol_type = other DNA
tgtgcgttggtcacgtacggtatgctgaaaaattttcgtgagccattaaattcggttcctgttgtattacgcgtc

SEQ ID NO: 405542 - DNA, 75 bp, synthetic construct
  source 1..75: mol_type = other DNA
ttgatgatttttatgttcctcctggagatgaaatcgatactcaagatgaaagagagctatcagttcgtgtaaaat

SEQ ID NO: 405543 - DNA, 75 bp, synthetic construct
  source 1..75: mol_type = other DNA
cttatttttaggaagaggtaagccattatcgcataattatgttctatccaaaatggaagacgataggttaagaga

SEQ ID NO: 405544 - DNA, 75 bp, synthetic construct
  source 1..75: mol_type = other DNA
gcgcgacgcacaacggagacggtgattgtcaccacggtggcgtatggtcagccgggggaaaccggcagttacagt

SEQ ID NO: 405545 - DNA, 75 bp, synthetic construct
  source 1..75: mol_type = other DNA
atggggtcatgggagaatgcgatagtccggatcagcgcaggtgatgaccggccctgggatatgttttatggcacg

SEQ ID NO: 405546 - DNA, 75 bp, synthetic construct
  source 1..75: mol_type = other DNA
cttttgagggcccttactgggtaatgaccacgacgcggttactcaacagtaaccgtgtgatcacggatgtggata

SEQ ID NO: 405547 - DNA, 75 bp, synthetic construct
  source 1..75: mol_type = other DNA
tcgcgcaatgaatcaacgaaatgaaattgctgatttggtaaagcgtggtatgcatgattatcttaactttacatt

SEQ ID NO: 405548 - DNA, 75 bp, synthetic construct
  source 1..75: mol_type = other DNA
tctggcgcaagggtgaaagggctgttgatgttccatcagaccaaaatgtagcaaataaaggcgtaaaacctaaac

SEQ ID NO: 405549 - DNA, 75 bp, synthetic construct
  source 1..75: mol_type = other DNA
gcaacaattccagcggcgcaaaaaggtaaatatgaatatgtattagcggaaattgttgaaccagacccgaacaat

SEQ ID NO: 405550 - DNA, 75 bp, synthetic construct
  source 1..75: mol_type = other DNA
ttcattaccgcccggatgatgccgcagtccagtacggtcaggaaaggttttactggcagtcggtatatggtgacg

SEQ ID NO: 405551 - DNA, 75 bp, synthetic construct
  source 1..75: mol_type = other DNA
taacggtgaaatttttgtccagcccgtttgggatgcggaatccacatcgttattcagaacgaaattcaaaaccat

SEQ ID NO: 405552 - DNA, 75 bp, synthetic construct
  source 1..75: mol_type = other DNA
ccgggaatgatccatgtgtttcagccacaggaagacgggcagacccgcggggccaaccagttttattccgtgatg

SEQ ID NO: 405553 - DNA, 75 bp, synthetic construct
  source 1..75: mol_type = other DNA
atggacatctgagccagcgcgtgccgtatggtggctactggcaggaaaggacgatgaagattctacgtcacagat

SEQ ID NO: 405554 - DNA, 75 bp, synthetic construct
  source 1..75: mol_type = other DNA
agttaatcaaatctatggtccggctatcgaattagttaaaaacctggcaaaaaaataccatattgaatatgacat

SEQ ID NO: 405555 - DNA, 75 bp, synthetic construct
  source 1..75: mol_type = other DNA
ctgcggcaggcaggagcttcataaacataaaactcatcagaaaaaattgccatacaatattgaattagagtataa

SEQ ID NO: 405556 - DNA, 75 bp, synthetic construct
  source 1..75: mol_type = other DNA
aagatataattttcaagtggacgatgcaaaatttagacgcgataatgtaaaagaaataatttctactttagtcga

SEQ ID NO: 405557 - DNA, 75 bp, synthetic construct
  source 1..75: mol_type = other DNA
ggctaccacattcaaaaaggatttcgtattgatggtgataatctcacccaatattgtagtaaaaatgccaggagt

SEQ ID NO: 405558 - DNA, 75 bp, synthetic construct
  source 1..75: mol_type = other DNA
tgctattgactccaatgatacagccgatattactagtggtatctataatcaagaaccaacaaaatcacctgcgaa

SEQ ID NO: 405559 - DNA, 75 bp, synthetic construct
  source 1..75: mol_type = other DNA
attcaacgttaaacggcaggtgattaagcccggcgatccgcttgccattccgccagtggagcctgaactggaaga

SEQ ID NO: 405560 - DNA, 75 bp, synthetic construct
  source 1..75: mol_type = other DNA
gtcatacactgacagcgtccaccggattggctcggtggcatcccgttctggcatggatggtgcccttcaccagac

SEQ ID NO: 405561 - DNA, 75 bp, synthetic construct
  source 1..75: mol_type = other DNA
accatattaaaagaggaattcgtattaatggtgatagtctcacacaatattgtagtgaaaacgccaggaatgctt

SEQ ID NO: 405562 - DNA, 75 bp, synthetic construct
  source 1..75: mol_type = other DNA
gtaaagtatttacttgtaacaccatcttttctcaataattccccattgaattggactactagtgtttgggcgggg

SEQ ID NO: 405563 - DNA, 75 bp, synthetic construct
  source 1..75: mol_type = other DNA
agcgtgaggcagaagaaccttaccggcagatgctgagccaggctctggccgatggaaatattggccagcctaatc

SEQ ID NO: 405564 - DNA, 75 bp, synthetic construct
  source 1..75: mol_type = other DNA
actaaaactggaaaaaaatttgacgctgctttagttttacaggataaaaacacgggaaaagtaggttttgaattc

SEQ ID NO: 405565 - DNA, 75 bp, synthetic construct
  source 1..75: mol_type = other DNA
tgacgccatacgcaacaaaaccaagacgtacttcagtattgaagatcatgtgttcactgcaactcaaagtgttct

SEQ ID NO: 405566 - DNA, 75 bp, synthetic construct
  source 1..75: mol_type = other DNA
tgggaaaagatgattacccctggctgacgcatgtcacgaaaaccgatgtacattcgcaccgggtagcgacgcgca

SEQ ID NO: 405567 - DNA, 75 bp, synthetic construct
  source 1..75: mol_type = other DNA
ataataatctgcggcttctggggctgagtaacaaaatcctgctggctgatgagatccacgcctgtgacgcttaca

SEQ ID NO: 405568 - DNA, 75 bp, synthetic construct
  source 1..75: mol_type = other DNA
acgaatggtttggcagtgccatgcgtaacagtgcatttgtctatcccgatcatgggcgaatctggctgacgcagc

SEQ ID NO: 405569 - DNA, 75 bp, synthetic construct
  source 1..75: mol_type = other DNA
taccgcctacatttttatgctgacgcagtaaatcagcggatatatgtggcgtatttagggccgcatttaacttta

SEQ ID NO: 405570 - DNA, 75 bp, synthetic construct
  source 1..75: mol_type = other DNA
tcgtgccgttgcttttgtcgagagtgaagttgacgagtggattctatcagttatcgaaacaaacagaattaaagt

SEQ ID NO: 405571 - DNA, 75 bp, synthetic construct
  source 1..75: mol_type = other DNA
tccgtctaccagaagtcatcgctcgaaccggttacggcaaggcatggatctaccacctgatcagcaaaggtcgct

SEQ ID NO: 405572 - DNA, 75 bp, synthetic construct
  source 1..75: mol_type = other DNA
cagaaattagtgcattaatgcttgagattggtgcgaaattagataattccgtttcacttgttcagcaaacttgcg

SEQ ID NO: 405573 - DNA, 75 bp, synthetic construct
  source 1..75: mol_type = other DNA
cggaaattagtgcattaatgcttgagattggtgcgaaattagataattccgtttcagttgttcagataagttgtg

SEQ ID NO: 405574 - DNA, 75 bp, synthetic construct
  source 1..75: mol_type = other DNA
ctttgaaaccgtggatattgaaactttaggtgatgtattagaagttggcttgccaggggaagatacaggtaaagc

SEQ ID NO: 405575 - DNA, 75 bp, synthetic construct
  source 1..75: mol_type = other DNA
taaacgtttaggtcgagcaataagatacaattttcaagtggacgatgcaaaatttagacgcgataatgtaaaaga

SEQ ID NO: 405576 - DNA, 75 bp, synthetic construct
  source 1..75: mol_type = other DNA
ccggcttgccgatgcaggtgaagcggtgttctggcgggtgaataaatcggcaaactacggagtactggataagtt

SEQ ID NO: 405577 - DNA, 75 bp, synthetic construct
  source 1..75: mol_type = other DNA
cctcactcagctcaaccggggagaaggacgccatgcagtggctcgagccatttgctacggacaacgtggtgagat

SEQ ID NO: 405578 - DNA, 75 bp, synthetic construct
  source 1..75: mol_type = other DNA
tgagctatccactcccccctatggcattagtaaatttgtttgaatcatcagccttgcttttgcatcagcgtgcac

SEQ ID NO: 405579 - DNA, 75 bp, synthetic construct
  source 1..75: mol_type = other DNA
atgaaaattaaaagatcaacttttatctcgaatattttttacattatcagttggtttcttatgaatgacaattca

SEQ ID NO: 405580 - DNA, 75 bp, synthetic construct
  source 1..75: mol_type = other DNA
caaattcgctcgagagttatatctgcgcagcaatattccactaaaaggatatctttcaattgaggcggccaaaga

SEQ ID NO: 405581 - DNA, 75 bp, synthetic construct
  source 1..75: mol_type = other DNA
cggccccggctggaaaatgcctgcggatatccgcttacagctgcgcgataacacactgatacggatatccgctta

SEQ ID NO: 405582 - DNA, 75 bp, synthetic construct
  source 1..75: mol_type = other DNA
ggccaataaattcaccgtattaaccaattctgaaggtgagcgcgttcgctactggatagtgagcgataacccacg

SEQ ID NO: 405583 - DNA, 75 bp, synthetic construct
  source 1..75: mol_type = other DNA
tcgattgtgcgcgccgtcgctattatgcaccggggagatgcctttgcccgtagtgaaggtggcatcaatacattt

SEQ ID NO: 405584 - DNA, 75 bp, synthetic construct
  source 1..75: mol_type = other DNA
acctggcgctgatgtttgccttatccgcgctgctgattgtttccgttattggcatcctgctcagaagctctttgc

SEQ ID NO: 405585 - DNA, 75 bp, synthetic construct
  source 1..75: mol_type = other DNA
agtggccccaacggtactcataatgtggcaatggctaaagctccgggcgttataactggtcgttctggtgtgctt

SEQ ID NO: 405586 - DNA, 75 bp, synthetic construct
  source 1..75: mol_type = other DNA
tgggtggatatgatttttacactgatgcggttgttgattggatttgcccctatatttccagacacctgttatcac

SEQ ID NO: 405587 - DNA, 75 bp, synthetic construct
  source 1..75: mol_type = other DNA
tggaaaatagcgcaagacactcatcatccaacagcacggttacggtgcggttaagcgaaaccggtaatcaagcct

SEQ ID NO: 405588 - DNA, 75 bp, synthetic construct
  source 1..75: mol_type = other DNA
gccgctcgcgaagcgcgtcaggcgctgcaaaacgatctcaacgtgatgctgttttccgataacgtctcagttgaa

SEQ ID NO: 405589 - DNA, 75 bp, synthetic construct
  source 1..75: mol_type = other DNA
cagcaggctgctgtgcaaccagcagcgttgtagtcagtgacgaagccgtcaaatggaacgccagcgccgaatggg

SEQ ID NO: 405590 - DNA, 75 bp, synthetic construct
  source 1..75: mol_type = other DNA
cgcccgctgggcaggtattccgctgacgcaggactggaccgacgacagcacgcaaccacgctgctgctgcattcc

SEQ ID NO: 405591 - DNA, 75 bp, synthetic construct
  source 1..75: mol_type = other DNA
cgcccgttgggccggtattcagcttcctcaggactggagtgaagacagcacgcaaccaagctgctgctgcattcc

SEQ ID NO: 405592 - DNA, 75 bp, synthetic construct
  source 1..75: mol_type = other DNA
tatctcttgtgtctagcgtgatatttcaatcattaaataggttttggacccctttctttattaaaaaattaaagg

SEQ ID NO: 405593 - DNA, 75 bp, synthetic construct
  source 1..75: mol_type = other DNA
atacaggcactgcgtcccgatggttcgccattaacttttggctatgacgtactggatctccaggaaaacaatatt

SEQ ID NO: 405594 - DNA, 75 bp, synthetic construct
  source 1..75: mol_type = other DNA
tccatgcattttatttggacatcaggaagggcggaataatatcagatatccttttacctggatttctccgtcaca

SEQ ID NO: 405595 - DNA, 75 bp, synthetic construct
  source 1..75: mol_type = other DNA
taccaacgcttgttgccttacttgcgccagctaaagggcgatttaacgttactgccaagggcgggttaataaaaa

SEQ ID NO: 405596 - DNA, 75 bp, synthetic construct
  source 1..75: mol_type = other DNA
caaacctttactgaaggtcgcagtcagcatgaatggatcaaatatctccatgcgaaaacgaaggaacgtaaccct

SEQ ID NO: 405597 - DNA, 75 bp, synthetic construct
  source 1..75: mol_type = other DNA
ggtcgatgggttatgacacaaccgttgaggtatgtgggcatggattcagggcgatggcttgtagtgccttaatcg

SEQ ID NO: 405598 - DNA, 75 bp, synthetic construct
  source 1..75: mol_type = other DNA
cagcagttccttaagacgccggtcatcaaagagtttctgaatgcctctggaatggaatccctccctgtgaccctg

SEQ ID NO: 405599 - DNA, 75 bp, synthetic construct
  source 1..75: mol_type = other DNA
caacagttcctgaatacccctgtcattaaagagtttcttaacacatcagggatggaatccctccctgtcaccttg

SEQ ID NO: 405600 - DNA, 75 bp, synthetic construct
  source 1..75: mol_type = other DNA
ctcgatgggcagctcgtgatggcaggcaaactcccgacgcgtgaagatatcgcccgttggtcaggtattccgctt

SEQ ID NO: 405601 - DNA, 75 bp, synthetic construct
  source 1..75: mol_type = other DNA
gtgaatgcggagatattcagaacaagtatgctgtaataagtgctgataaccgactgaaattgcatattgatgtag

SEQ ID NO: 405602 - DNA, 75 bp, synthetic construct
  source 1..75: mol_type = other DNA
ttgctgtaattatgagtgtatataaatcagattcactcaaatatgtaaaagaagcgctggagagtattttaaatc

SEQ ID NO: 405603 - DNA, 75 bp, synthetic construct
  source 1..75: mol_type = other DNA
agagcagtggccagcgtacggaaaaaacattttccctgccggcgatgctctaccgtggtgtgttcagaatcggtg

SEQ ID NO: 405604 - DNA, 75 bp, synthetic construct
  source 1..75: mol_type = other DNA
ggattatgcaaaagcttggatgcagtgaacttgaggcagccattaaaatctcaaggataggaaaaatcaattctt

SEQ ID NO: 405605 - DNA, 75 bp, synthetic construct
  source 1..75: mol_type = other DNA
cagcgggcgtatgaaatggcggaatccatcaacctgttctgcgccgggtttgaaggcgaactgtttaaccgtgaa

SEQ ID NO: 405606 - DNA, 75 bp, synthetic construct
  source 1..75: mol_type = other DNA
agttggagtcactaccagaaattacacattgatgtggccacagatcctctgacggctctgtccggggaagataaa

SEQ ID NO: 405607 - DNA, 75 bp, synthetic construct
  source 1..75: mol_type = other DNA
ccgggcgggagttccgtctggtgctgaccacgcaggcgcagcgggcggaagaggcccgtaaacagcacaccgctt

SEQ ID NO: 405608 - DNA, 75 bp, synthetic construct
  source 1..75: mol_type = other DNA
gcaggggctggcaaaccgcgtcacgccggacagcctgccgccggtggagtggctgacgtatggcagcggttacct

SEQ ID NO: 405609 - DNA, 75 bp, synthetic construct
  source 1..75: mol_type = other DNA
gccgtggtggatactcggctggtcagagcgggtgccgggtgctgaggacgtgctgccagcgccgctgccgccgta

SEQ ID NO: 405610 - DNA, 75 bp, synthetic construct
  source 1..75: mol_type = other DNA
tggatgaatattatgctgcgactggttcacaaccgcatcaacagaaaattcagcaacaaaaacttcagcaacagg

SEQ ID NO: 405611 - DNA, 75 bp, synthetic construct
  source 1..75: mol_type = other DNA
ttgctgtaattatgagtgtttataagtcagatatgctggataattttcgagatgcgattgaaagtattttgaaac

SEQ ID NO: 405612 - DNA, 75 bp, synthetic construct
  source 1..75: mol_type = other DNA
tatggatatcaaagatatattatgcctaaaggtcctttcactggattcccatttaaatttcaagaggtaaagtaa

SEQ ID NO: 405613 - DNA, 75 bp, synthetic construct
  source 1..75: mol_type = other DNA
gcctgaacagcctgctgctgaacgcgggtatggttccggtacaggagaatgacgaactcgccccgctcagttcgt

SEQ ID NO: 405614 - DNA, 75 bp, synthetic construct
  source 1..75: mol_type = other DNA
tggcgaaacggatcgaagcgctgtttcgtgccgtgccgcccagtctcttcctggcactgggcatgacggaaaaag

SEQ ID NO: 405615 - DNA, 75 bp, synthetic construct
  source 1..75: mol_type = other DNA
caccatttgcgcgccgtctcccggcagggagggctgttcgaggatcgcacagtcacacgcttgccctggcgcggg

SEQ ID NO: 405616 - DNA, 75 bp, synthetic construct
  source 1..75: mol_type = other DNA
cgccgcattcttcgagttgatgccgatcggcacggaaggaagggaagcatcctggctggctcaggtccgggacgc

SEQ ID NO: 405617 - DNA, 75 bp, synthetic construct
  source 1..75: mol_type = other DNA
tgcccttgctggcatggtttacaaagacatggccgcaaaaaaaccgcaagaagttgaagcattggtttatcaaac

SEQ ID NO: 405618 - DNA, 75 bp, synthetic construct
  source 1..75: mol_type = other DNA
caccgttaattaatgcgattacatctataaaaatacatattatgattatatgtggttttactatcataggtgtgg

SEQ ID NO: 405619 - DNA, 75 bp, synthetic construct
  source 1..75: mol_type = other DNA
atcactaccgaccctgatctggttgtaacaatcagagaattaacagcacaagaacctgaagatagaacgggtgat

SEQ ID NO: 405620 - DNA, 75 bp, synthetic construct
  source 1..75: mol_type = other DNA
gaaaagcacgaaaaggcagtgcggatgcggattatgagggagtttggatgtagtgaactggaggcggcgatgagg

SEQ ID NO: 405621 - DNA, 75 bp, synthetic construct
  source 1..75: mol_type = other DNA
cgagcgcgaccagcacttggcacagcccattgttaatattaccgatgaggcgcatatcatcaccgtcaacccgct

SEQ ID NO: 405622 - DNA, 75 bp, synthetic construct
  source 1..75: mol_type = other DNA
gagggcgaggcatggccagaggcggatatcaccctggtagatctggcgatgtttgcccgcgaagggtatgaagcg

SEQ ID NO: 405623 - DNA, 75 bp, synthetic construct
  source 1..75: mol_type = other DNA
tcagtgcagcgaactggaagccgcatttcatgtggcccggaagctggacaggctgcgtgggctgactgacgggga

SEQ ID NO: 405624 - DNA, 75 bp, synthetic construct
  source 1..75: mol_type = other DNA
aaacgggccgacagggcgatgatccgtgaagccctgctgatagccacgcacaccacgtaccgtgagggacgtcag

SEQ ID NO: 405625 - DNA, 75 bp, synthetic construct
  source 1..75: mol_type = other DNA
tggcgctgaccatggtgtcaatgaccaacatgattaacaatattgcggagcgggatcagtatctcggccgcgata

SEQ ID NO: 405626 - DNA, 75 bp, synthetic construct
  source 1..75: mol_type = other DNA
aggaaaacccgcatcacctgcaccagccgtaccgtctgccagggcagcaacacgatgaggagtcagggctgtatt

SEQ ID NO: 405627 - DNA, 75 bp, synthetic construct
  source 1..75: mol_type = other DNA
gttagcggcgcagaaagaacaggccggacgctttacgcagcaggtgatgacggaatatcaaacgaccgtggatcc

SEQ ID NO: 405628 - DNA, 75 bp, synthetic construct
  source 1..75: mol_type = other DNA
gatagctttcggtggcgctcgctacaacggcggcgcggtggctgcgggcagcctctataaggtcggcgaacacgg

SEQ ID NO: 405629 - DNA, 75 bp, synthetic construct
  source 1..75: mol_type = other DNA
ctaaccaaaacatcaacagcggttaaatccaacctatctccagccattcgcaacgcatcatttcagatcgcagac

SEQ ID NO: 405630 - DNA, 75 bp, synthetic construct
  source 1..75: mol_type = other DNA
atacgatggggcttgggcatttacggcgaaatcttttgcttgcaggagcagttcagaaaaggttttctgatactg

SEQ ID NO: 405631 - DNA, 75 bp, synthetic construct
  source 1..75: mol_type = other DNA
ataattttttttgttagcctttttatatgcacaagagaaaagattcttactataaaaaatattattttattaatt

SEQ ID NO: 405632 - DNA, 75 bp, synthetic construct
  source 1..75: mol_type = other DNA
tggtgaaccagttattttgctacggtgtgaaaatgttaaaggagggatcgacagatcccttcacctttcagaacg

SEQ ID NO: 405633 - DNA, 75 bp, synthetic construct
  source 1..75: mol_type = other DNA
acatacaggccaacaacggttggaccgagcaggacagcaaagcgttgcagcagacgattgagaatacagccatgc

SEQ ID NO: 405634 - DNA, 75 bp, synthetic construct
  source 1..75: mol_type = other DNA
tattctaataatcttagtaaagatttttgtagatactatttcatttgggagaaagaccctctggtacgtttttca

SEQ ID NO: 405635 - DNA, 75 bp, synthetic construct
  source 1..75: mol_type = other DNA
ctctaaatcattcattaaaagagatatcggaaactctgggaagaatgaatgaggcatataagaccctccaaaatg

SEQ ID NO: 405636 - DNA, 75 bp, synthetic construct
  source 1..75: mol_type = other DNA
tcgtgatattggcagtggtggcggcatcacactgaacgtaacaaacaacatccaggcgacaaacggctggactga

SEQ ID NO: 405637 - DNA, 75 bp, synthetic construct
  source 1..75: mol_type = other DNA
gcggaagaggcgttcgatcgcattgaacgaggagcgcggaaggctgatagcggcgtcaaaaagttaaatacgcag

SEQ ID NO: 405638 - DNA, 75 bp, synthetic construct
  source 1..75: mol_type = other DNA
gcgcggtagctggcgcggtactggctatcgctggcgctatgggcggaagcctggcacaaggcgctgatagtgcag

SEQ ID NO: 405639 - DNA, 75 bp, synthetic construct
  source 1..75: mol_type = other DNA
gaacgctcagatattcttacgttaccagcctatgccaaaacgttgtgcggcaaatatcacccccggtcactgggc

SEQ ID NO: 405640 - DNA, 75 bp, synthetic construct
  source 1..75: mol_type = other DNA
acggtgcgcagcttcggcagcatggcaggcagtaatgccgcatacgaactgaccagcacatacacccccgcaggc

SEQ ID NO: 405641 - DNA, 75 bp, synthetic construct
  source 1..75: mol_type = other DNA
ggagacgggggaactgctgtggcagcatgagacgaaacacgcctacaacgaacaggggctggcaaaccgcgtcac

SEQ ID NO: 405642 - DNA, 75 bp, synthetic construct
  source 1..75: mol_type = other DNA
ttctggcgcatgccgccgcatccttccccgaggagtgctgtggcgtggttattcagaaggggcgggtggagaaat

SEQ ID NO: 405643 - DNA, 75 bp, synthetic construct
  source 1..75: mol_type = other DNA
ggacagtacactcacagtgtggccggataaccgcatcgcggaggatgcgcactatgtctaccgccacgatgaata

SEQ ID NO: 405644 - DNA, 75 bp, synthetic construct
  source 1..75: mol_type = other DNA
ccagcacatacacccccgcaggccagttacagagccagcacctgaacagcctggtgtatgaccgtgactacgggt

SEQ ID NO: 405645 - DNA, 75 bp, synthetic construct
  source 1..75: mol_type = other DNA
agttaccggcgacgacaacggatgcgacgggcagcacccggcagatgacgtggagccgctacgggcagttgctgg

SEQ ID NO: 405646 - DNA, 75 bp, synthetic construct
  source 1..75: mol_type = other DNA
ggagggtgtcagtgcagacagacccgttcgctatcgggaagagtgggtcacgctgcaggatgcttttggctctga

SEQ ID NO: 405647 - DNA, 75 bp, synthetic construct
  source 1..75: mol_type = other DNA
gtcgttattgcacttccccacatgcagccaggcgttgccaacgttgagcaggagggtgtcagtgcagacagaccc

SEQ ID NO: 405648 - DNA, 75 bp, synthetic construct
  source 1..75: mol_type = other DNA
atgtcttacagggggagggcaggatggctaccaccttgcatctgtatttgcagagacattgttaccgccagggat

SEQ ID NO: 405649 - DNA, 75 bp, synthetic construct
  source 1..75: mol_type = other DNA
gcgatgaaaaggagatatttgctcagtgagactgaccgggacgtttccgcctgcatcatcggcttcagcccagta

SEQ ID NO: 405650 - DNA, 75 bp, synthetic construct
  source 1..75: mol_type = other DNA
atgttgttcgcatttttgcacggcggagaatattcagattttgggaaatccatatttttcccgtgcgcggttaca

SEQ ID NO: 405651 - DNA, 75 bp, synthetic construct
  source 1..75: mol_type = other DNA
ggagcagggagtgtgtatgttctatgtgcctgagttacttggtgccctggaacttgaactgtttgcggtattgcg

SEQ ID NO: 405652 - DNA, 75 bp, synthetic construct
  source 1..75: mol_type = other DNA
cctttgagtgtgagattatccggggcgaactggacatacggacaaaatggtgaactttacttcgatactgagcgc

SEQ ID NO: 405653 - DNA, 75 bp, synthetic construct
  source 1..75: mol_type = other DNA
gctggtgcagatgctcgaccggctggaaagtgaaatcctggctgaccgggtgagtgaggaaagccgccgctggct

SEQ ID NO: 405654 - DNA, 75 bp, synthetic construct
  source 1..75: mol_type = other DNA
ttaccaccaggatatacttgtgcagaaccctatttattcccagacattaataaacccgatgggccagcaacagca

SEQ ID NO: 405655 - DNA, 75 bp, synthetic construct
  source 1..75: mol_type = other DNA
aacctgccagccgcgccgctggtacgctatggctggacgccgcgtggcgaactggcggcggtgtatgaccgcagc

SEQ ID NO: 405656 - DNA, 75 bp, synthetic construct
  source 1..75: mol_type = other DNA
cttaaatcttgatacttcccagaatactgtatgccagaattactggtcaccatccggaaaggttggatttgaaat

SEQ ID NO: 405657 - DNA, 75 bp, synthetic construct
  source 1..75: mol_type = other DNA
agatttacactgaatgcccttccgggagtgtcaactcaaccgttagctgcagagcccggttatggtgagcacacg

SEQ ID NO: 405658 - DNA, 75 bp, synthetic construct
  source 1..75: mol_type = other DNA
cttcggcggggaggcctgtgaacttgccaccgcctggaataccagcggccagctacagagcaggcacctgaacct

SEQ ID NO: 405659 - DNA, 75 bp, synthetic construct
  source 1..75: mol_type = other DNA
tacacggagggcgaaggtggcctgaagcgggtggtgaaaaaggagcatgcggacgggagcatcacccgcagcgag

SEQ ID NO: 405660 - DNA, 75 bp, synthetic construct
  source 1..75: mol_type = other DNA
gacgactacatcgttttccgcgtttcttttgaacaggatattcctgtcggggcggatccgttcgcggttccggga

SEQ ID NO: 405661 - DNA, 75 bp, synthetic construct
  source 1..75: mol_type = other DNA
ttcacgccactcatcagggttgaaaccgccaccggtgagcaggcgaaaacgcagcgccgcagcctggcggatacc

SEQ ID NO: 405662 - DNA, 75 bp, synthetic construct
  source 1..75: mol_type = other DNA
gggaagatgcgtgatctgatccttcaactcagcaaaagttcgatttattcaacaaagccccgccaccgctattat

SEQ ID NO: 405663 - DNA, 75 bp, synthetic construct
  source 1..75: mol_type = other DNA
tgctggggaggctggagcgggaactgcgtgcgggtgcggtgagtgcggagagtgaggcatggcttgcgcagtgcg

SEQ ID NO: 405664 - DNA, 75 bp, synthetic construct
  source 1..75: mol_type = other DNA
tacttattatctcgatagcctttgtgctcgactgcatcttcacaggggcaatccgtaaagcgctggcgcctgtta

SEQ ID NO: 405665 - DNA, 75 bp, synthetic construct
  source 1..75: mol_type = other DNA
tctgcaaacatcgaaagcggaaatcattgggaatggcgtggatgagacgactctgacggcaacagtgaaagatcc

SEQ ID NO: 405666 - DNA, 75 bp, synthetic construct
  source 1..75: mol_type = other DNA
gataaacgcaggggggacctccactggggcaggttcacctggagggggaacgaatactggcatttcattaaccgc

SEQ ID NO: 405667 - DNA, 75 bp, synthetic construct
  source 1..75: mol_type = other DNA
tggtttttatagtgaaagagaaaagatcgaaatctatagggagattattgatagccgctttccttctgataaatc

SEQ ID NO: 405668 - DNA, 75 bp, synthetic construct
  source 1..75: mol_type = other DNA
cgaacccggcatttatagccagccagatggggcatgaaactgcgcagatggtgtatgaaatttacggtatgtgga

SEQ ID NO: 405669 - DNA, 75 bp, synthetic construct
  source 1..75: mol_type = other DNA
cgaaaacgcagcgccgcagcctggcggatgcgcttcagcagtccggcggcgaagacggtggcagtgtggtgttcc

SEQ ID NO: 405670 - DNA, 75 bp, synthetic construct
  source 1..75: mol_type = other DNA
aatggggaagcgcatgtcacgctcaaaggtaaaaaagcgggcacgcatacggttaccgcaacgctgggtaataca

SEQ ID NO: 405671 - DNA, 75 bp, synthetic construct
  source 1..75: mol_type = other DNA
agactcaaagaagattaatcaaccatctgaatttgaaattaactttatttccgaaggcatcagataccagtatgg

SEQ ID NO: 405672 - DNA, 75 bp, synthetic construct
  source 1..75: mol_type = other DNA
ttgaaaccgatattcacggtgcataccgtcaggctgatggccgctataccgttaaggtattgaaagaagaaagca

SEQ ID NO: 405673 - DNA, 75 bp, synthetic construct
  source 1..75: mol_type = other DNA
acaatacagatcataaatggtgttttctcatagggatgaaagagtgttatcattttaatatttttcattttattt

SEQ ID NO: 405674 - DNA, 75 bp, synthetic construct
  source 1..75: mol_type = other DNA
caactacaataagtggttggagcttcttgagcaaaatattgatgcctacaaaaccttccctaagaaggaaaagaa

SEQ ID NO: 405675 - DNA, 75 bp, synthetic construct
  source 1..75: mol_type = other DNA
cctgcaacacctgaatatactgtaagaagaagcgactacagagccacttttggtagaactcaacccatagatatt

SEQ ID NO: 405676 - DNA, 75 bp, synthetic construct
  source 1..75: mol_type = other DNA
ataaaagccatctacaatcaagtaatagcgatgttgttgctgctgcagctataagtattgcagcgacagagataa

SEQ ID NO: 405677 - DNA, 75 bp, synthetic construct
  source 1..75: mol_type = other DNA
ggaaagtaccggaaaccggtaaaaagcatgtgcaggattatcgtcttatctggaaagcggagggcaccggcgatg

SEQ ID NO: 405678 - DNA, 75 bp, synthetic construct
  source 1..75: mol_type = other DNA
agatgcgcactatatctatcgctacgatgaatacggcaggctggcggagaagacggaccgtatcccggaaggggt

SEQ ID NO: 405679 - DNA, 75 bp, synthetic construct
  source 1..75: mol_type = other DNA
tgacggcggaacagatggccgcgcaactggaggcggaatacatcccggagaggaaacttcatctttaccactgtg

SEQ ID NO: 405680 - DNA, 75 bp, synthetic construct
  source 1..75: mol_type = other DNA
gtggtcgtgcgcttaacgctgtggtgtatcgttgttggcctctacccgacgttattaatgacgttaatcggcgta

SEQ ID NO: 405681 - DNA, 75 bp, synthetic construct
  source 1..75: mol_type = other DNA
ccactgcgaccaccggggactgccgcaggcgctcatcagcccggaaggggaaacggcgtggcagggggagtatga

SEQ ID NO: 405682 - DNA, 75 bp, synthetic construct
  source 1..75: mol_type = other DNA
ctccggggatgttagtcggtgcggcagtcggtacggtggttattggtggtggtataataatatacaacaatcgcg

SEQ ID NO: 405683 - DNA, 75 bp, synthetic construct
  source 1..75: mol_type = other DNA
acagcgaacaggggctggcgacccgtcaggagccggacggtctgccgccggtagagtggctgacgtatggcagcg

SEQ ID NO: 405684 - DNA, 75 bp, synthetic construct
  source 1..75: mol_type = other DNA
catgtatcaggtcagtttgcctggcggcgtgctcaggtccgtgcggagatccgcgatccgttactgcgtaaactg

SEQ ID NO: 405685 - DNA, 75 bp, synthetic construct
  source 1..75: mol_type = other DNA
cagtatgtttttgccattcacagggatacggaacatgtgcactgtcacatcaccgtgaaccgtattaacccgaaa

SEQ ID NO: 405686 - DNA, 75 bp, synthetic construct
  source 1..75: mol_type = other DNA
accggccagcccgcagaaggatgagccggaaattgcccgggagtcattgcgctggctgatggaaggggcgccaaa

SEQ ID NO: 405687 - DNA, 75 bp, synthetic construct
  source 1..75: mol_type = other DNA
agatgctgacggtagctatcacgataatggcattcgcatcgaatacggtattgcgaccggctccaaaaagtttat

SEQ ID NO: 405688 - DNA, 75 bp, synthetic construct
  source 1..75: mol_type = other DNA
cgtaaccgaaggccgtaacagtgggatgacgaaaagtgaaccgccccgggtttcctggagagtgttttatctgtg

SEQ ID NO: 405689 - DNA, 75 bp, synthetic construct
  source 1..75: mol_type = other DNA
gacgtttttatatgcagaagaagatgcagcaggaaaacagcctcagtgagaacgcgatagtgtgtgcggtggcgg

SEQ ID NO: 405690 - DNA, 75 bp, synthetic construct
  source 1..75: mol_type = other DNA
ggagattatattactgacatgacttctagtgaagcggtagataaatttaaaggtgatgataaaaaagatgccgat

SEQ ID NO: 405691 - DNA, 75 bp, synthetic construct
  source 1..75: mol_type = other DNA
ggacgtgaaacccgttatgagtacagcgccgcaggcgacctcaccgctatcattgccccgaacggcagccggagt

SEQ ID NO: 405692 - DNA, 75 bp, synthetic construct
  source 1..75: mol_type = other DNA
ccgggtcagcagtacgatgaggagtcggggctgtactacaaccgtcaccgatactatgacccgttgcagggacgg

SEQ ID NO: 405693 - DNA, 75 bp, synthetic construct
  source 1..75: mol_type = other DNA
tatacgtggaacgacaacgggcaactggtgcgcatcagcggcccgcaggagagccgggagtaccgttacagcgac

SEQ ID NO: 405694 - DNA, 75 bp, synthetic construct
  source 1..75: mol_type = other DNA
acaccacccctgatatttttgccaccgtggttactccggtttatccccgctggcgcggggaacacagaaatcaaa

SEQ ID NO: 405695 - DNA, 75 bp, synthetic construct
  source 1..75: mol_type = other DNA
aacggacagctaatccgcatcagcggcccgcaggagagccgggagtaccgttacagcgacacggggaggctgacg

SEQ ID NO: 405696 - DNA, 75 bp, synthetic construct
  source 1..75: mol_type = other DNA
actaccactacgacagccagcaccgtctggtgttctacacgcggatacagcacggtgagccgcaggtggagagcc

SEQ ID NO: 405697 - DNA, 75 bp, synthetic construct
  source 1..75: mol_type = other DNA
gacccggcgggaaaccgcctgccggacccggagctgcacccggacagcacgctcacggcgtggccggataaccgc

SEQ ID NO: 405698 - DNA, 75 bp, synthetic construct
  source 1..75: mol_type = other DNA
agattgtttaagaatgagacaagaatgggatgataaatggtggcctggcaaacatgcggatgaaataaaaaatgt

SEQ ID NO: 405699 - DNA, 75 bp, synthetic construct
  source 1..75: mol_type = other DNA
atgaatacgaccgcttcggccagatgacggcggtccaccgcgaggaaggcatcagccgttaccgccgctatgaca

SEQ ID NO: 405700 - DNA, 75 bp, synthetic construct
  source 1..75: mol_type = other DNA
tttccaacgggttttacagttggaggtcatggttcgcctacatctatgagtgatgacagaatcaaaaaaggaagt

SEQ ID NO: 405701 - DNA, 75 bp, synthetic construct
  source 1..75: mol_type = other DNA
acacaggcgcagcgggcggaagaggcccgtaaaccgcacaccgcttcgttatcttcccctgacagtccccgccct

SEQ ID NO: 405702 - DNA, 75 bp, synthetic construct
  source 1..75: mol_type = other DNA
atgacccgctgggccgccggacgggaaaacgggtatggcggcgggagcgtgacctgacggggtggatgtcgctgt

SEQ ID NO: 405703 - DNA, 75 bp, synthetic construct
  source 1..75: mol_type = other DNA
taggccatttggctcgacctgaaaatagcaatgatccgctgcacaatatattagaaagaagaactgagaaggtta

SEQ ID NO: 405704 - DNA, 75 bp, synthetic construct
  source 1..75: mol_type = other DNA
catcaataatattgaacggttgaaattgttggcagatgaacgattatacaaaagtaagcaaaatggtagagctca

SEQ ID NO: 405705 - DNA, 75 bp, synthetic construct
  source 1..75: mol_type = other DNA
ccaggaaccgctgctttttccaagccagaaaacatcctgtttgggctggcaaaaaaacagctctccatgcagaaa

SEQ ID NO: 405706 - DNA, 75 bp, synthetic construct
  source 1..75: mol_type = other DNA
aacttgacgagttaaataaagtcattccatatcaagtaagcaatcgcaacttggtaccaatagtatgcattgatg

SEQ ID NO: 405707 - DNA, 75 bp, synthetic construct
  source 1..75: mol_type = other DNA
atcatcgcaccgctaatggtccggctgggctatgacagtattaccaccgtcctggtgacctatattgccacgtaa

SEQ ID NO: 405708 - DNA, 75 bp, synthetic construct
  source 1..75: mol_type = other DNA
ggaatgcattgccccctgaattcattaagcatcatgctgaacttatcaaagaacatataactaaaaacgaggcgg

SEQ ID NO: 405709 - DNA, 75 bp, synthetic construct
  source 1..75: mol_type = other DNA
atggccagctaagtcagcgcattccatacggtggctattatcgtgaccgtaccatcaaaattctgcgctataagg

SEQ ID NO: 405710 - DNA, 75 bp, synthetic construct
  source 1..75: mol_type = other DNA
agctgtacccgcagatgaacaccgacgaccttacagaacggctggcgcgtgtgttgtttgtggcgaatatctggg

SEQ ID NO: 405711 - DNA, 75 bp, synthetic construct
  source 1..75: mol_type = other DNA
tgggcatacctgcgggatttagtcagcttggcatcagcaaagaggatatcgaaggctggttagataaagccctgg

SEQ ID NO: 405712 - DNA, 75 bp, synthetic construct
  source 1..75: mol_type = other DNA
tgtaaaacatgtgtttagccatccggatgtcgagcagcttgaattgcagggctatcgggtcattagcggattatt

SEQ ID NO: 405713 - DNA, 75 bp, synthetic construct
  source 1..75: mol_type = other DNA
tgttgtctccattacctctcccgttaccggtgaaattgtcgatgcgcattacagctggagtcgtacttacttgca

SEQ ID NO: 405714 - DNA, 75 bp, synthetic construct
  source 1..75: mol_type = other DNA
cgtattcaaaaggccaggggggaacaggccagagatgaaagtgcttcatctgcatctcagtttatccgtggactg

SEQ ID NO: 405715 - DNA, 75 bp, synthetic construct
  source 1..75: mol_type = other DNA
cccgcaaccttaaccgccatgctggtgggaattaccgaaccgctggaatttaccttcctgttcatttcaccgttg

SEQ ID NO: 405716 - DNA, 75 bp, synthetic construct
  source 1..75: mol_type = other DNA
aatataccgccgggcagctacggatcatgggggaaacctctcagagatggctgcagacggtgggggacgatgccg

SEQ ID NO: 405717 - DNA, 75 bp, synthetic construct
  source 1..75: mol_type = other DNA
gacggtatcaacggacaggcggggccgcagctgatgaaggcggtgtatgacatggcccgcaagggggcgcaggat

SEQ ID NO: 405718 - DNA, 75 bp, synthetic construct
  source 1..75: mol_type = other DNA
ggtgaggttaaggagtataataagggggagtctaatcgctactttggtgtgaagcttgaaggagattctaagttt

SEQ ID NO: 405719 - DNA, 75 bp, synthetic construct
  source 1..75: mol_type = other DNA
atgcaaactttgttacaacaaaccgcccaaccggactaccacggcccacggatttacttctccatgagtgacgga

SEQ ID NO: 405720 - DNA, 75 bp, synthetic construct
  source 1..75: mol_type = other DNA
gtgataacgcatatggtttataaatctgacagcgatgaactagcagtactgcgggcagaaaatacccggctggtc

SEQ ID NO: 405721 - DNA, 75 bp, synthetic construct
  source 1..75: mol_type = other DNA
acacgctgaagaggcacaggaagtgccaaatacgatgatcgtcgccatgctactgctcgcggcactctgcgtatt

SEQ ID NO: 405722 - DNA, 75 bp, synthetic construct
  source 1..75: mol_type = other DNA
agcgaaaaattcgaacgcaaaccaatttactggatcctgagtgaagtcgcgaaacgtcttggacctgacgtctat

SEQ ID NO: 405723 - DNA, 75 bp, synthetic construct
  source 1..75: mol_type = other DNA
gagcgattctccacgtgcactctggacagctacaagcctgttgggaaggattctgagcgagcattacgggtctgc

SEQ ID NO: 405724 - DNA, 75 bp, synthetic construct
  source 1..75: mol_type = other DNA
gatcagtgcatcaatgatcagacccgagccggagcaaagaaggaggtgatgcgcaagcgtgaacagcagaagtca

SEQ ID NO: 405725 - DNA, 75 bp, synthetic construct
  source 1..75: mol_type = other DNA
accgggtggagcgctcctacggcagctttcagcgcgctctgaacctgccgaccgatgccaaccaggacacgatca

SEQ ID NO: 405726 - DNA, 75 bp, synthetic construct
  source 1..75: mol_type = other DNA
gtaactatagattatcatctatggggaggtgatacccactctgagtctgcatgggcaaaacgttttccagaaatg

SEQ ID NO: 405727 - DNA, 75 bp, synthetic construct
  source 1..75: mol_type = other DNA
gaagtacggctcgccgtgggttgttggcaagcatccgcgcggtacgtcgcagggcgagattaaccagttactgga

SEQ ID NO: 405728 - DNA, 75 bp, synthetic construct
  source 1..75: mol_type = other DNA
cgagtcgacagccagcaggcgcaaagcagaggggcattttagcaccatggcgaaagagctggccttcttgggtat

SEQ ID NO: 405729 - DNA, 75 bp, synthetic construct
  source 1..75: mol_type = other DNA
ggaagaaatgaaaacagaaatcgtggaagacattgtgaagttacagccatcggtcaccgaaacgaaagcagatga

SEQ ID NO: 405730 - DNA, 75 bp, synthetic construct
  source 1..75: mol_type = other DNA
cgttactgcataccgggcgctgatttaccggcagagccggaagctgcatccgtagcggaaaccgatggtaaagcc

SEQ ID NO: 405731 - DNA, 75 bp, synthetic construct
  source 1..75: mol_type = other DNA
ttgaacgaattagccttaatagcagtgcatttcccgagttagcccagcagcaaaacaataaatgcatcaatttac

SEQ ID NO: 405732 - DNA, 75 bp, synthetic construct
  source 1..75: mol_type = other DNA
cacggcagttagaacagttatctgctgaaaagccagtacaaccgaaagccaaaaggtatatttataataatgtca

SEQ ID NO: 405733 - DNA, 75 bp, synthetic construct
  source 1..75: mol_type = other DNA
caacacgggactgggcatcagacatgtttatcatttgagccctcagccttggcggcgtggaaagaaattcacgat

SEQ ID NO: 405734 - DNA, 75 bp, synthetic construct
  source 1..75: mol_type = other DNA
ttgtcggctgggtcatatttatgtatgtattgaaaaaagattttgatccaccagaaacaattatcattgcgctta

SEQ ID NO: 405735 - DNA, 75 bp, synthetic construct
  source 1..75: mol_type = other DNA
ggcgggaaagctgacacgacaattatatcctccgggagccggcaggttgttgagaaagatggtacggcaactggc

SEQ ID NO: 405736 - DNA, 75 bp, synthetic construct
  source 1..75: mol_type = other DNA
caataccgatatcgtctctggcctacaacaaattatggcaaacgggacagcggaaggttccattattaatggcgg

SEQ ID NO: 405737 - DNA, 75 bp, synthetic construct
  source 1..75: mol_type = other DNA
gaatgggcagagttcgaagctaggtatcagtcaggtgatatattagaaggtactgtacggaattgcgatcataga

SEQ ID NO: 405738 - DNA, 75 bp, synthetic construct
  source 1..75: mol_type = other DNA
accctaatgcaacgggaggtgtttttgtaataaaaatagataaggtaaacgggagaatcatatcatttactcatg

SEQ ID NO: 405739 - DNA, 75 bp, synthetic construct
  source 1..75: mol_type = other DNA
gagtgggctgcccgagccgggtataacactctcagaacgaacctgccgtttattgtctggctgtatgatcgggat

SEQ ID NO: 405740 - DNA, 75 bp, synthetic construct
  source 1..75: mol_type = other DNA
ttttttttagcgttgtccttcactcccgcaccgaaaaatcgggtaaaaggggcgggtttgctgatccccgcaacc

SEQ ID NO: 405741 - DNA, 75 bp, synthetic construct
  source 1..75: mol_type = other DNA
taattttcttaagaatccaactgtgctctggttgtctgaatctgggaataaagttgttgctcaggatgatgtatt

SEQ ID NO: 405742 - DNA, 75 bp, synthetic construct
  source 1..75: mol_type = other DNA
cttatgcatggtttgcttctgaaccggagcacttaattgatcttcgggatggttatccggtaaagatcagccaga

SEQ ID NO: 405743 - DNA, 75 bp, synthetic construct
  source 1..75: mol_type = other DNA
acggtgccgacggcactattaaaccaggttcaatcaaacgcgcctccagctctaacgataaaatctggggcgaag

SEQ ID NO: 405744 - DNA, 75 bp, synthetic construct
  source 1..75: mol_type = other DNA
aagttcctgttgccgcgtcaggatgcgacctacgataacccgtatggcttccctgatttgtcgatgtgcttctgg

SEQ ID NO: 405745 - DNA, 75 bp, synthetic construct
  source 1..75: mol_type = other DNA
ggcgcgggtgtttcgctttgtgcgtgatctgtttgatgatttggatatttcacgcattacgggcgagatgaccga

SEQ ID NO: 405746 - DNA, 75 bp, synthetic construct
  source 1..75: mol_type = other DNA
gaagttgttcacaagaaaaaatcaatgcattttttgatcccagaagaatactcaaataataaacacatacagaat

SEQ ID NO: 405747 - DNA, 75 bp, synthetic construct
  source 1..75: mol_type = other DNA
ttgcttttataaataaggtatggtctggcgttccagggacagcatcccaggatgctggtgaatctgttttttatc

SEQ ID NO: 405748 - DNA, 75 bp, synthetic construct
  source 1..75: mol_type = other DNA
aacaacctaagccatttggagttaatggacagagagtggcaatattgccaaccacccctgcaggtgataactcag

SEQ ID NO: 405749 - DNA, 75 bp, synthetic construct
  source 1..75: mol_type = other DNA
gccgctgatttttgctgtcggtttacccattggccttgctaagcaagcgcagggacgtgcttgtctggcggtgat

SEQ ID NO: 405750 - DNA, 75 bp, synthetic construct
  source 1..75: mol_type = other DNA
gctgttgaacttgttgtttacctggtggatccctgtttggtacggtgcgagccaccaactggagttgccgggact

SEQ ID NO: 405751 - DNA, 75 bp, synthetic construct
  source 1..75: mol_type = other DNA
ttcgcggctgaattgttccgccagagtaatatccccaaacggcttataccggcaacggtggccctcggagcattc

SEQ ID NO: 405752 - DNA, 75 bp, synthetic construct
  source 1..75: mol_type = other DNA
ttcatggaaaaaatggtcggcttcgtgaaattgtacttcccggtgtttctgctcggggccgtgttcggaaaactg

SEQ ID NO: 405753 - DNA, 75 bp, synthetic construct
  source 1..75: mol_type = other DNA
ccgtgcggcagggacgttctacaacaactatgccaccacgtacagcgccggtaatctcgacgtttatgcggcgtc

SEQ ID NO: 405754 - DNA, 75 bp, synthetic construct
  source 1..75: mol_type = other DNA
aacaatctgaacaacgataacggtgaaattcgtggttatggcgatgtcacgctggcactgacgggcaactacgac

SEQ ID NO: 405755 - DNA, 75 bp, synthetic construct
  source 1..75: mol_type = other DNA
gtggcgatgataaatttaagtaaggaagcaacggtggggaaagcattaacccctattgctatacttatgatgttg

SEQ ID NO: 405756 - DNA, 75 bp, synthetic construct
  source 1..75: mol_type = other DNA
atgaataaaaccatattggcagctatccgtgctcatgcgctggaggaatccccgcgcgagagctgcggattcgtt

SEQ ID NO: 405757 - DNA, 75 bp, synthetic construct
  source 1..75: mol_type = other DNA
gaacgattttcgcgtcgattacccgtggtgggaaagccagtacccggacaatctctatttcgaaaactgggagcg

SEQ ID NO: 405758 - DNA, 75 bp, synthetic construct
  source 1..75: mol_type = other DNA
cccgcgcgagagctgcggattcgttattcagtctggccgtcgccagcgctatattcctgtaccaaacactcacga

SEQ ID NO: 405759 - DNA, 75 bp, synthetic construct
  source 1..75: mol_type = other DNA
gtggtgacgggactcatcacgcgcatcaccacgccggatggcagggcatcggcgttttactataaccaccacaac

SEQ ID NO: 405760 - DNA, 75 bp, synthetic construct
  source 1..75: mol_type = other DNA
ttttatttaggtacgcccagtggtaattttaaagcaatagataaccacgggaaggaaataacaaacagaaaagga

SEQ ID NO: 405761 - DNA, 75 bp, synthetic construct
  source 1..75: mol_type = other DNA
ttccggcgggacggaaccgtccgcttttcctgataccctgccgggttacaccgaatatggccgggacaacggcat

SEQ ID NO: 405762 - DNA, 75 bp, synthetic construct
  source 1..75: mol_type = other DNA
ggacggcgaccggctgaccacaatacagaacgacagaacccgcatccagacgatttatcagccggggagcttcac

SEQ ID NO: 405763 - DNA, 75 bp, synthetic construct
  source 1..75: mol_type = other DNA
acggaagatgccaccggcagccggaaaaccatgacgtggagccgttacggtcagttgctgagcttcaccgactgt

SEQ ID NO: 405764 - DNA, 75 bp, synthetic construct
  source 1..75: mol_type = other DNA
caaaagaaaatgatgtttatgatagtctaaatttttcaagcaaagatttaacgaattcttatatgaatggaatgg

SEQ ID NO: 405765 - DNA, 75 bp, synthetic construct
  source 1..75: mol_type = other DNA
gtgccgaatcctctggggtatgttgatcctttggggctggctatatgtcctgtgatgtatgattggtataaatac

SEQ ID NO: 405766 - DNA, 75 bp, synthetic construct
  source 1..75: mol_type = other DNA
atgagcaacaacacactctctcaagcgaagctctaccggaaagtcatccaggccctggcaggtcacagggatcca

SEQ ID NO: 405767 - DNA, 75 bp, synthetic construct
  source 1..75: mol_type = other DNA
aaaaaaggacagtccaaactatggcagcccggtgaacccggtgctgggtgcaaaggtgctgccgggcgagacgga

SEQ ID NO: 405768 - DNA, 75 bp, synthetic construct
  source 1..75: mol_type = other DNA
gatacagaagcaaaaataaaggatctggatcttcttcattcgccggaaactattggctcgcgtcctgatcttgct

SEQ ID NO: 405769 - DNA, 75 bp, synthetic construct
  source 1..75: mol_type = other DNA
cctggccttcacccgagacgagcgccagttcagcaacttattgttggttgaacagccaaacggcaattttgccga

SEQ ID NO: 405770 - DNA, 75 bp, synthetic construct
  source 1..75: mol_type = other DNA
ctttattgcccggactgaaatggatgtcattaacggagagctcaccgctgctcaggcaagaggaattcatgacgc

SEQ ID NO: 405771 - DNA, 75 bp, synthetic construct
  source 1..75: mol_type = other DNA
atggaggtttataccagagtgtttgcactggatatggctgccacgctggcagtgcctttcacaggtgacgggcgg

SEQ ID NO: 405772 - DNA, 75 bp, synthetic construct
  source 1..75: mol_type = other DNA
ggcagtggctgatactcggctggccggagcgggtgccggaggcggacgaggtgccgccggagctgcccgcatacc

SEQ ID NO: 405773 - DNA, 75 bp, synthetic construct
  source 1..75: mol_type = other DNA
attctcgtgtatacgagttgaaaaaaatggaagggattaaaaaagctttgtgtagcattgtcattcaggcagaag

SEQ ID NO: 405774 - DNA, 75 bp, synthetic construct
  source 1..75: mol_type = other DNA
tgcctcaccgcaggatgtgttaaattatgctttacatcggcaaggcttgtctgggcataactaccctataaaatt

SEQ ID NO: 405775 - DNA, 75 bp, synthetic construct
  source 1..75: mol_type = other DNA
ggagcaatggctgtggtcgctgggccaatgggatatgaccttctcgctaatgatgggcgtgccgggaaggctctg

SEQ ID NO: 405776 - DNA, 75 bp, synthetic construct
  source 1..75: mol_type = other DNA
tgcggggagtatgacgaatggggaaacctgctgggcgaaaccagtgcgcagcaccttcaacagtcactccgtctg

SEQ ID NO: 405777 - DNA, 75 bp, synthetic construct
  source 1..75: mol_type = other DNA
aacggacaactaatccgcatcagcggcccgcaggagagccgggagtaccgttacagcgacacgggaaggctgacg

SEQ ID NO: 405778 - DNA, 75 bp, synthetic construct
  source 1..75: mol_type = other DNA
ggacgcctgcgccggtggggatttttggccccggctggaaagcgccttctgatatccgcttacagctacgcgatg

SEQ ID NO: 405779 - DNA, 75 bp, synthetic construct
  source 1..75: mol_type = other DNA
ttgccgcttcttattccctatgaaaatcaagaggtgacgttttattgtgatgaattatatgtattcgactccgat

SEQ ID NO: 405780 - DNA, 75 bp, synthetic construct
  source 1..75: mol_type = other DNA
tgcccgaggcgtttggtgtgtattcatgggcgtcgggttgtggcgcatataccacaggaaactattccactgcat

SEQ ID NO: 405781 - DNA, 75 bp, synthetic construct
  source 1..75: mol_type = other DNA
aaaggctttaacgagataatgggtaaatggattgaaagctttgaaggatacagagataaacttggaaataacaac

SEQ ID NO: 405782 - DNA, 75 bp, synthetic construct
  source 1..75: mol_type = other DNA
cgcgctctggcaggtgctgccggaagatgttcgcctgagtccgcatgtgtacctggcgacaaacagccttcaggg

SEQ ID NO: 405783 - DNA, 75 bp, synthetic construct
  source 1..75: mol_type = other DNA
cagggcggctttgacgggcggacgcaacgttatcattatgacctgaccggaaaactcacacagagtgaggatgag

SEQ ID NO: 405784 - DNA, 75 bp, synthetic construct
  source 1..75: mol_type = other DNA
ttgggaccagtattcccccggcaattggaaggcggaatgttataggaagaatgaaagcttcgcttacaaaacctc

SEQ ID NO: 405785 - DNA, 75 bp, synthetic construct
  source 1..75: mol_type = other DNA
ctgggattaattaaaaacagcgtcgcaggtacaccatgggatttctcagttgaagataatcgccgtatttatgac

SEQ ID NO: 405786 - DNA, 75 bp, synthetic construct
  source 1..75: mol_type = other DNA
aaatcctcatcagcaaaataacgcatcgctacagcagctacaggaagaggcaaaagttattgccagccagcacca

SEQ ID NO: 405787 - DNA, 75 bp, synthetic construct
  source 1..75: mol_type = other DNA
cgtgaagcgtgaaattgtgagttatgacaacgcattgaaagatgagcgtgagcgggaaagaagcagagataacac

SEQ ID NO: 405788 - DNA, 75 bp, synthetic construct
  source 1..75: mol_type = other DNA
gatggaaccggcgatgatgatagctgtgtttcaattattgatctttctttagtaccaacagaaattactcatctt

SEQ ID NO: 405789 - DNA, 75 bp, synthetic construct
  source 1..75: mol_type = other DNA
agaagatggtgaaaaccaattacaggtaccttcatggttttggaatagttcagaatgggcatcattcacgcaagc

SEQ ID NO: 405790 - DNA, 75 bp, synthetic construct
  source 1..75: mol_type = other DNA
ctcaatgtaatacttttcttctgcatcgaattagtaatgacaaagatcaggagcaagttcataaaatggtacctg

SEQ ID NO: 405791 - DNA, 75 bp, synthetic construct
  source 1..75: mol_type = other DNA
ctctcaatccggttcataaagtggatcctttggggttatcagcatgggatgatgcaaaatctggtgcgtgtcatg

SEQ ID NO: 405792 - DNA, 75 bp, synthetic construct
  source 1..75: mol_type = other DNA
catcccggaaggggtgatacggatgcacgacgagcggacccaccactaccactacgacagccagcaccgtctggt

SEQ ID NO: 405793 - DNA, 75 bp, synthetic construct
  source 1..75: mol_type = other DNA
ccgcacggtgaacggcgaaccggcagagcagtggcagtatgatgaccacggctggctgacagacatcagccacct

SEQ ID NO: 405794 - DNA, 75 bp, synthetic construct
  source 1..75: mol_type = other DNA
cccggctctggcgggcgttgccggaagcggtccgcctgagtccacacacctatatgatggctgtcagcacaaccg

SEQ ID NO: 405795 - DNA, 75 bp, synthetic construct
  source 1..75: mol_type = other DNA
acagccagcaccgtctggtgttctacacgcggatacagcatggcgagccactggtcgagagccgctacctctacg

SEQ ID NO: 405796 - DNA, 75 bp, synthetic construct
  source 1..75: mol_type = other DNA
cagccagcggcaggtgacgtcggtgacgtacccggacgggcttcgcagcagccgggagtatgatgagaagggaag

SEQ ID NO: 405797 - DNA, 75 bp, synthetic construct
  source 1..75: mol_type = other DNA
tagggctgagaggtgaatggaatctgtataaatatccattaaaccctgttcggtttatagattctttgggtttaa

SEQ ID NO: 405798 - DNA, 75 bp, synthetic construct
  source 1..75: mol_type = other DNA
ctgaccgcgattacacctggaacgacaacggcgaactcatccgcatcagcagcccgcgccagacccggagttaca

SEQ ID NO: 405799 - DNA, 75 bp, synthetic construct
  source 1..75: mol_type = other DNA
ctgacagacatcagccatatcagcgaagggcaccgggtggcggtgtattacggatatgatgagaaaggccggctg

SEQ ID NO: 405800 - DNA, 75 bp, synthetic construct
  source 1..75: mol_type = other DNA
aatggcggatatggagcgagacccaacaaaccgcctacgcccgatccaagtaaattgccggacatagcgaaacaa

SEQ ID NO: 405801 - DNA, 75 bp, synthetic construct
  source 1..75: mol_type = other DNA
atatcccgtatgcgacggacccggcaggaaaccggctgccggacccggaactgcacccggacagcaccctcacgg

SEQ ID NO: 405802 - DNA, 75 bp, synthetic construct
  source 1..75: mol_type = other DNA
tcaggagccggacggtctgccgccggtggagtggctgacgtatggcagcggttatcttgcgggaatgaagctggg

SEQ ID NO: 405803 - DNA, 75 bp, synthetic construct
  source 1..75: mol_type = other DNA
cggcttcgggcggacgctggccttccaccgggcggcagagggggaagcggcgggcgcggtgacgggggtgacgga

SEQ ID NO: 405804 - DNA, 75 bp, synthetic construct
  source 1..75: mol_type = other DNA
aatagcgacgggaacgaaaacaacatcaactgcaggtaatcacgcgcataccgtggcgattggtgcccacaatca

SEQ ID NO: 405805 - DNA, 75 bp, synthetic construct
  source 1..75: mol_type = other DNA
gacaccgaaagcggttaaggcggcgtatgaccttgcgaaaggtaaatactcggctcaggatgcgaccacggcgca

SEQ ID NO: 405806 - DNA, 75 bp, synthetic construct
  source 1..75: mol_type = other DNA
taacggcgatgatatcgctaagacgccagcactgattgctatcgtggcgaatacagcatcccgcgctgactccac

SEQ ID NO: 405807 - DNA, 75 bp, synthetic construct
  source 1..75: mol_type = other DNA
acgttgggcagaccgcaacgcaaaacgtggtggtcgacaccaccagcccggaagcggcgaaaagtatcaccatta

SEQ ID NO: 405808 - DNA, 75 bp, synthetic construct
  source 1..75: mol_type = other DNA
aagagctaactacggctcgctgttattcaacaccaacggcgtactgggtagcccggtggcggtgggcgcaacggc

SEQ ID NO: 405809 - DNA, 75 bp, synthetic construct
  source 1..75: mol_type = other DNA
ttacttgttacgcattgttcgcggtcgtaacccagaacatatgcgccacctcaagcaggacgaaacaaaacaccg

SEQ ID NO: 405810 - DNA, 75 bp, synthetic construct
  source 1..75: mol_type = other DNA
gctggaagcagaaccgatagcgtgggaatgcggtgaaaacataatcctgtttaaccctgacacagttgaagcata

SEQ ID NO: 405811 - DNA, 75 bp, synthetic construct
  source 1..75: mol_type = other DNA
gaattttttatggctattttcttgagcaactgttttctgtagcgactggtcgtctcgataaacttctctcagtag

SEQ ID NO: 405812 - DNA, 75 bp, synthetic construct
  source 1..75: mol_type = other DNA
agccgttctccggagatatggccgggacggcgaattgtgctgacggggcatccgcaggcgaacctgaaccgggaa

SEQ ID NO: 405813 - DNA, 75 bp, synthetic construct
  source 1..75: mol_type = other DNA
gtagccttgtgggcagtcgctatgacctggtcgatcgtaataacaatattgtcctcgaatatcgcaagaaagagc

SEQ ID NO: 405814 - DNA, 75 bp, synthetic construct
  source 1..75: mol_type = other DNA
cggcaaaaactcaatcaacgattgtcgcggacaaaacgatatatatcgctggggatagcataacggtgaccgttg

SEQ ID NO: 405815 - DNA, 75 bp, synthetic construct
  source 1..75: mol_type = other DNA
actattaccaaagagcgactgctgacaatcaagcagtggcgcgaaacatacggaccgggtagcaacgttgtactg

SEQ ID NO: 405816 - DNA, 75 bp, synthetic construct
  source 1..75: mol_type = other DNA
gaatcaccagagctgcaactcttttaaaatttacgcaactatctattctggccatatcagaacagttgttttatg

SEQ ID NO: 405817 - DNA, 75 bp, synthetic construct
  source 1..75: mol_type = other DNA
caggtgctggaaacgttgggcggtgaaacggccgttcaacaagttctgatgtcgttgccagccggtaaattgttc

SEQ ID NO: 405818 - DNA, 75 bp, synthetic construct
  source 1..75: mol_type = other DNA
ggtgagacagatgatgagtttctacgggatattgcaagggtaatagcatggaaatctcaaagcgtcgatcctagt

SEQ ID NO: 405819 - DNA, 75 bp, synthetic construct
  source 1..75: mol_type = other DNA
ggtgtatttgtatctgtagtaaatagagacaaagaaacaatattagagtattgtagaataataaaagagaacaat

SEQ ID NO: 405820 - DNA, 75 bp, synthetic construct
  source 1..75: mol_type = other DNA
ttatcgctttaacatctctttttatattttttttctctatatttattccggtgcaaaaagtttattctaatccat

SEQ ID NO: 405821 - DNA, 75 bp, synthetic construct
  source 1..75: mol_type = other DNA
aagagcatgggcgctggctttatctggctgatttggagcatgcactgcgtgttgcaggtattcgtatcggaggga

SEQ ID NO: 405822 - DNA, 75 bp, synthetic construct
  source 1..75: mol_type = other DNA
attgcagagctggaagcaagggcagtgcatttaccgacttgctatgaccttcgaaggggtcatccgataaatgcc

SEQ ID NO: 405823 - DNA, 75 bp, synthetic construct
  source 1..75: mol_type = other DNA
atgacatctcgaagtagctatgatgtcttatttaaaatacggaatccaggagctttttctgctgatgttcgtata

SEQ ID NO: 405824 - DNA, 75 bp, synthetic construct
  source 1..75: mol_type = other DNA
tagagaaataaaacctatgttttggcttttgcatccatcagaattatatgctggttattgtttaggtagtacttt

SEQ ID NO: 405825 - DNA, 75 bp, synthetic construct
  source 1..75: mol_type = other DNA
aatcgttggttcctttgctgaatttgaacgcgccatgcttcgtgaacggacaaagagtggacttgcagcggcacg

SEQ ID NO: 405826 - DNA, 75 bp, synthetic construct
  source 1..75: mol_type = other DNA
ggtcagctaattactcaggctaaccgctatgtattgcagctaggcggcgatttggcgcagtggagtagcaacgcg

SEQ ID NO: 405827 - DNA, 75 bp, synthetic construct
  source 1..75: mol_type = other DNA
tcacctatctgctgaagcaatgggacgctctgaacgaatactgccgcaatggctgggtggagatcgacaataacc

SEQ ID NO: 405828 - DNA, 75 bp, synthetic construct
  source 1..75: mol_type = other DNA
aaaggacgcattcatcattaaatgacatgactccggctgaattcatccgaagtctccggaaagacgaagatctct

SEQ ID NO: 405829 - DNA, 75 bp, synthetic construct
  source 1..75: mol_type = other DNA
agtcagtgcagtcactgcaaccatcaacagcagtagtcagagtcagaacgtgacatttatcgccgatgtcagcac

SEQ ID NO: 405830 - DNA, 75 bp, synthetic construct
  source 1..75: mol_type = other DNA
atatcgccggggagccattaaccgtcacaataacgttgcgggatgagtttggtaaccctgctttagggctgacat

SEQ ID NO: 405831 - DNA, 75 bp, synthetic construct
  source 1..75: mol_type = other DNA
agactctcaccacgcgacgctgaagttgtctgaatggggcagcagtaaacaatcagagagttattccatccacag

SEQ ID NO: 405832 - DNA, 75 bp, synthetic construct
  source 1..75: mol_type = other DNA
caacggtcgccccgacggtcaccacgcagccggacggtacggtggagatctctgttaccagccagacggcgggga

SEQ ID NO: 405833 - DNA, 75 bp, synthetic construct
  source 1..75: mol_type = other DNA
gagtcgctgagtgttaatggtgcaaaattcagggcggcagatggttttccagaaacagggtttgatggtgcaaaa

SEQ ID NO: 405834 - DNA, 75 bp, synthetic construct
  source 1..75: mol_type = other DNA
gtgcaaaattcacgctgttactaacccataatatgaaaaatacggattataattggacggctgggatttatggaa

SEQ ID NO: 405835 - DNA, 75 bp, synthetic construct
  source 1..75: mol_type = other DNA
gttgttcttaaagatgcccagggtaactttattactgatggtgttgttcagcttaatgaggaaaacgtacaagtc

SEQ ID NO: 405836 - DNA, 75 bp, synthetic construct
  source 1..75: mol_type = other DNA
tcaatcaagctttggtagtaaagatgtggagcggctactacaggcagatattgagacagctaaaaaaagtgaatg

SEQ ID NO: 405837 - DNA, 75 bp, synthetic construct
  source 1..75: mol_type = other DNA
taattcacgaaggtgtcccggcgcgtcaatcaagctttggtagtaaagatgtggagcggctactacaggcagata

SEQ ID NO: 405838 - DNA, 75 bp, synthetic construct
  source 1..75: mol_type = other DNA
tgaaacgtttttcggtgctggcggcggggcaggtgggacagtaatcaccacgctgatcctgacgaaggatagtta

SEQ ID NO: 405839 - DNA, 75 bp, synthetic construct
  source 1..75: mol_type = other DNA
tgagggtcaccgatgcgttcggtaatgcgcttgccgggcagacggtcagcgtgttggcggacaacggcgcaacgg

SEQ ID NO: 405840 - DNA, 75 bp, synthetic construct
  source 1..75: mol_type = other DNA
acggtgcaatggcgaatacgttgcgggtgagggtgaccgatgcgttcggtaatgcgcttgccggacagacggtca

SEQ ID NO: 405841 - DNA, 75 bp, synthetic construct
  source 1..75: mol_type = other DNA
acgcgactgcattcggtcagattaaagtcatgggtaaaatctcccataaacttaaaaagatgggactcaatgcac

SEQ ID NO: 405842 - DNA, 75 bp, synthetic construct
  source 1..75: mol_type = other DNA
gttcgacggcgaatacgctgcaggtgaaggtcaccgatgctaacggtaatacgcttgccgggcagacggtcagcg

SEQ ID NO: 405843 - DNA, 75 bp, synthetic construct
  source 1..75: mol_type = other DNA
caaacaaattcagccatcaggacagataaaacgacatatatcgccggggagtcattaactgtcacagtaacgttg

SEQ ID NO: 405844 - DNA, 75 bp, synthetic construct
  source 1..75: mol_type = other DNA
gtgtttatactgctacatggtcggcgcaaatggcgggagactctcaccacgcgacgttgactttgcctgagtggg

SEQ ID NO: 405845 - DNA, 75 bp, synthetic construct
  source 1..75: mol_type = other DNA
ggtggagctctctgtcaccagccagaccgccggaaccagtgcggtcaccgccagcattaacaacagcagccagag

SEQ ID NO: 405846 - DNA, 75 bp, synthetic construct
  source 1..75: mol_type = other DNA
agatcgcggacctggtggtcattaaggacgactcagtggcagacggtgcaatggcgaatatgctgcgggcgagag

SEQ ID NO: 405847 - DNA, 75 bp, synthetic construct
  source 1..75: mol_type = other DNA
gagatctctgttaccagccagacggcggggatcagtgcggtcacagccagcatcaacaacagcagtctgagccgg

SEQ ID NO: 405848 - DNA, 75 bp, synthetic construct
  source 1..75: mol_type = other DNA
atggtgttgttcagcttaatgaggaaaacgtacaagtcaggaatgcggatcctatccagggcaataattgggttt

SEQ ID NO: 405849 - DNA, 75 bp, synthetic construct
  source 1..75: mol_type = other DNA
gtgaagcgagtccgcatggttcacagcttcgtataagagatgatgttgtggttgttggggcggatttacctgtca

SEQ ID NO: 405850 - DNA, 75 bp, synthetic construct
  source 1..75: mol_type = other DNA
caacggcaatgggcaatatcaaagacagtatatggcgcatttcgcggaagtgtatttgaatgcacaactgaagat

SEQ ID NO: 405851 - DNA, 75 bp, synthetic construct
  source 1..75: mol_type = other DNA
actatcaacaacagcaccgcgagccagaacgtgatgtttatcgccgatgtcaggacggcgcagatagcgagtctg

SEQ ID NO: 405852 - DNA, 75 bp, synthetic construct
  source 1..75: mol_type = other DNA
gcgaacacgctgcgggcgagggtgaccgatgcgttcgggaacatgctagccgggcagacggtcagcgtgttggcg

SEQ ID NO: 405853 - DNA, 75 bp, synthetic construct
  source 1..75: mol_type = other DNA
ccagcattaacggtagcagccagagtcagagcatcacctttgtaccgggtgatgcatcgcagctcacttcaaccg

SEQ ID NO: 405854 - DNA, 75 bp, synthetic construct
  source 1..75: mol_type = other DNA
ggacggcaccgtggaaatctccgtcaccagccagacggcgggcatcagtgccgtcactgccagcatcaacaacag

SEQ ID NO: 405855 - DNA, 75 bp, synthetic construct
  source 1..75: mol_type = other DNA
tgacatggtacgggtgggacggtgacaggctgacgacggtacagaccggcaccacgcgtatccagacggtatacc

SEQ ID NO: 405856 - DNA, 75 bp, synthetic construct
  source 1..75: mol_type = other DNA
tatataggaacgcgcaatccaatacagtgaaagtgattaaggatgttgatgctgcaattattcaaaacttcagat

SEQ ID NO: 405857 - DNA, 75 bp, synthetic construct
  source 1..75: mol_type = other DNA
gcttcaatgacaccgtggccgccaaagccggtgtggctgtcagtgacggcgatccgtcatggaacgttggcgtga

SEQ ID NO: 405858 - DNA, 75 bp, synthetic construct
  source 1..75: mol_type = other DNA
actctgtacttcaggctacctctgtgaacatgaagaaggtgctctgtgataaagggatgatggtaagcgtcaacg

SEQ ID NO: 405859 - DNA, 75 bp, synthetic construct
  source 1..75: mol_type = other DNA
agatactgacagttataacttgcctgttgataacaggctggattatcccgttctggtcgaaacaaagataatgga

SEQ ID NO: 405860 - DNA, 75 bp, synthetic construct
  source 1..75: mol_type = other DNA
gtgcttaacggagaactgaacttaaatgatgcgacagcgcctgcaacatattactatttagaaagtgattataat

SEQ ID NO: 405861 - DNA, 75 bp, synthetic construct
  source 1..75: mol_type = other DNA
tgaatttaggtcttacaacatcaccttcgatggggaattatgtttcattcagtaccggctctctggatgcgatac

SEQ ID NO: 405862 - DNA, 75 bp, synthetic construct
  source 1..75: mol_type = other DNA
aaaagcacagcaacgtcgtgctttcactgactggctgaaaacgctcaatatccgggtaacaacgcgtaatggggt

SEQ ID NO: 405863 - DNA, 75 bp, synthetic construct
  source 1..75: mol_type = other DNA
ctatccggttttctgatgtaccggttgaagatttaataaaatcaacgaaaagagattacaataaaaattttattg

SEQ ID NO: 405864 - DNA, 75 bp, synthetic construct
  source 1..75: mol_type = other DNA
aagcaggcaccctggcgatgtccgtcgttgctgcattgctgtcctccggtgtttcagctcaggatgacacaataa

SEQ ID NO: 405865 - DNA, 75 bp, synthetic construct
  source 1..75: mol_type = other DNA
ctggcgtggcttcaaaaatcactggtgctgttgagttcttggggagcgttaaggctaacggcaagccaatcgatg

SEQ ID NO: 405866 - DNA, 75 bp, synthetic construct
  source 1..75: mol_type = other DNA
agacggtcgatgacagaatgcatgatttatcggatgcgttttgtattgtcggtccccagtcgcaggcgaggaaga

SEQ ID NO: 405867 - DNA, 75 bp, synthetic construct
  source 1..75: mol_type = other DNA
ctctgagcttcggttgcttccgtcacgatggcgagaatattacggtcgtcctttcacgtgatggcgactctcagt

SEQ ID NO: 405868 - DNA, 75 bp, synthetic construct
  source 1..75: mol_type = other DNA
ttgtcaataaaagtggagtccggtgataatgatgcatgctcttatgttttaaagagaacccaaaaaatcaagctc

SEQ ID NO: 405869 - DNA, 75 bp, synthetic construct
  source 1..75: mol_type = other DNA
ggcaagaaatacaaaattatagcatggaaattcgtaatgcatttagccaaatcaggagtggcgcacctgacttaa

SEQ ID NO: 405870 - DNA, 75 bp, synthetic construct
  source 1..75: mol_type = other DNA
acttacttcggcatcgaagaagtattctggcatgtattttaatgatttgcccgatgatgcaaaaagatgttttat

SEQ ID NO: 405871 - DNA, 75 bp, synthetic construct
  source 1..75: mol_type = other DNA
aatagagtgttacctatcatagagtcgtggcagagggaaaaactggttcatccttggtattacttcaaccttctc

SEQ ID NO: 405872 - DNA, 75 bp, synthetic construct
  source 1..75: mol_type = other DNA
ttgggttgctgctcctgaagatctatatatagaactaataattgtaccgtcatcaccagatgattatttacttga

SEQ ID NO: 405873 - DNA, 75 bp, synthetic construct
  source 1..75: mol_type = other DNA
ggctaattcatttctcaacagattgtatttttaacggtgagaaaggaaattatgatgatggtagtttatcaaatg

SEQ ID NO: 405874 - DNA, 75 bp, synthetic construct
  source 1..75: mol_type = other DNA
tgactgacgcgctggcgcacctgcagcgtgcgatccagttagagcgggctatcggtgtgaaaaaggatattgagc

SEQ ID NO: 405875 - DNA, 75 bp, synthetic construct
  source 1..75: mol_type = other DNA
ccgctttccgagccagcgagtaaaagtggatcaggaaaagcaacttgttcttcttccgaagcttggctgggttaa

SEQ ID NO: 405876 - DNA, 75 bp, synthetic construct
  source 1..75: mol_type = other DNA
aattacaatcaactagcatcagaactagttaattggaaaaacgaagagtgccttgcatggctaaaaatggctcca

SEQ ID NO: 405877 - DNA, 75 bp, synthetic construct
  source 1..75: mol_type = other DNA
gtaattccgattctcttagagatggctgatgcccatgaaattcaggacgaagatggcccttatgcggcctatgta

SEQ ID NO: 405878 - DNA, 75 bp, synthetic construct
  source 1..75: mol_type = other DNA
ctggagattgcccgttatgccctgaagtacggtctgaccatgccgggtaaacaccgccgtaccccgccgtacatg

SEQ ID NO: 405879 - DNA, 75 bp, synthetic construct
  source 1..75: mol_type = other DNA
gcagctcgaccgcaatgccggtgtgcgcaaagagattgagcgactggagcgggcattgaagcctaagcccgatgc

SEQ ID NO: 405880 - DNA, 75 bp, synthetic construct
  source 1..75: mol_type = other DNA
tggactttagcgaggctaatctttcaaacactattcttcctgacatcgtcaggatgaaaggcacgaaactttacc

SEQ ID NO: 405881 - DNA, 75 bp, synthetic construct
  source 1..75: mol_type = other DNA
taaggcaataaaaaacaggaaagcaattcagagctttatacaacaaagcaccaaagatatcagtagttacgaaaa

SEQ ID NO: 405882 - DNA, 75 bp, synthetic construct
  source 1..75: mol_type = other DNA
atagctttatttaattatgggattaataaaaatgcattaataattggctttttatccttagtttatttaatatac

SEQ ID NO: 405883 - DNA, 75 bp, synthetic construct
  source 1..75: mol_type = other DNA
gtgttctatgaagatgaggtggatatccacctcaatcccaagctgggggcggactggatgatgcgagggaagcag

SEQ ID NO: 405884 - DNA, 75 bp, synthetic construct
  source 1..75: mol_type = other DNA
acctggctgcgctgtacatgctgaaggtgcagaaaacgaaaaacggcattccgtatgttgccggtattggtgcgg

SEQ ID NO: 405885 - DNA, 75 bp, synthetic construct
  source 1..75: mol_type = other DNA
tacccttgggtccagagccgcaagagagggatgtgatgcttacatgatagctcatttgttagatcattcatcgac

SEQ ID NO: 405886 - DNA, 75 bp, synthetic construct
  source 1..75: mol_type = other DNA
gaatttttgctcttaatggtggcgatcttggggaagatactggctgcgtttattattttgcgccagatacgctga

SEQ ID NO: 405887 - DNA, 75 bp, synthetic construct
  source 1..75: mol_type = other DNA
cacgcggatcaacagcgtttgagaaagccatgcagcaggcacaaaaggtaattaacgctatgacgcagggggcta

SEQ ID NO: 405888 - DNA, 75 bp, synthetic construct
  source 1..75: mol_type = other DNA
ttcagcgcgtttacaaggcaatgaccgacgatatcaatggtgccattggtcagaatcttggcaacgatactctcc

SEQ ID NO: 405889 - DNA, 69 bp, synthetic construct
  source 1..69: mol_type = other DNA
tacaaccagaaactaaaaaaacgtcagggcgttgataataatgaataccaactttctgcccatttatag

SEQ ID NO: 405890 - DNA, 75 bp, synthetic construct
  source 1..75: mol_type = other DNA
ggatttatgtctgatcttggcgaagcagtaaaagagactggtcgcggactggtgcaggctggcgtgaacgtggca

SEQ ID NO: 405891 - DNA, 75 bp, synthetic construct
  source 1..75: mol_type = other DNA
aaagccatgcagcaggcacaaaaggccattaacgccctgactcagggggctaagtctgatgcgttgtcagaatag

SEQ ID NO: 405892 - DNA, 75 bp, synthetic construct
  source 1..75: mol_type = other DNA
taagctacggacttcttactcgcgcctatgagagcgagccattcagaaatgcaatgctccgaatggcaaacaccc

SEQ ID NO: 405893 - DNA, 75 bp, synthetic construct
  source 1..75: mol_type = other DNA
atttattcaggggtttcaggaggtattacatatactatacaagatgttgaagatgttgaagatgttgaagatgtt

SEQ ID NO: 405894 - DNA, 75 bp, synthetic construct
  source 1..75: mol_type = other DNA
gattcagaaggcgtgttgcttgagctgcaggcatccggcacggttattgccagaatcatggacaaactggtgacc

SEQ ID NO: 405895 - DNA, 75 bp, synthetic construct
  source 1..75: mol_type = other DNA
tttaaatataatgctaaattcgtagccggagataaagtgggtacctttgaaactgccgctgcttacgccattgta

SEQ ID NO: 405896 - DNA, 75 bp, synthetic construct
  source 1..75: mol_type = other DNA
caaacaatgcggttgaattcgatattgctgatgctactgagggcttcgagtatcaggctgaattaaatgcaggtc

SEQ ID NO: 405897 - DNA, 75 bp, synthetic construct
  source 1..75: mol_type = other DNA
ttctcacgccgctgttcagaaaaccgtattcagtgctgacgtggtggcctcggcctgtcatgtggtggtggatgc

SEQ ID NO: 405898 - DNA, 75 bp, synthetic construct
  source 1..75: mol_type = other DNA
gtggattatcgcccgatgataagggaactggtgcaatgcttcagccagcccggttttgatatggccgaactaagt

SEQ ID NO: 405899 - DNA, 75 bp, synthetic construct
  source 1..75: mol_type = other DNA
ataatcatcgttatcgttacgctttcaccaattgcaccaattgtgggccgcgctattccattattcttggtatgc

SEQ ID NO: 405900 - DNA, 75 bp, synthetic construct
  source 1..75: mol_type = other DNA
atggatattgtctgttaagagctatactggtagactggccccctgaatctccagacaaccagtatcacttaaata

SEQ ID NO: 405901 - DNA, 75 bp, synthetic construct
  source 1..75: mol_type = other DNA
gttgataaaaaaacgatcgaggctcttgttgatacggcattctataatctcagggaagatgtaaagacgttattt

SEQ ID NO: 405902 - DNA, 75 bp, synthetic construct
  source 1..75: mol_type = other DNA
tctgttaagagctatactggttttaaaacaacatgattattcatgggcgctggtcagttataagatgcaaaagga

SEQ ID NO: 405903 - DNA, 75 bp, synthetic construct
  source 1..75: mol_type = other DNA
caattgcaatgactatggctgcaggttctgctatggctgcactgggggatataggctctcagggtcaggttcagt

SEQ ID NO: 405904 - DNA, 75 bp, synthetic construct
  source 1..75: mol_type = other DNA
gctttcagatagcatttgttcattgtttattgttgcctgtaatgtgggatcaatctccttgggaagtgaatcctt

SEQ ID NO: 405905 - DNA, 75 bp, synthetic construct
  source 1..75: mol_type = other DNA
agttgcttgaataacgaaaaatgtatcctgcatttacccgagtttatatttaatgataacaagaatttgcttgct

SEQ ID NO: 405906 - DNA, 75 bp, synthetic construct
  source 1..75: mol_type = other DNA
cgtgaagtgctccggcacagtaaccggggttttgcctgtgaacagggctggaatgcagccggtcagcctgtcagc

SEQ ID NO: 405907 - DNA, 75 bp, synthetic construct
  source 1..75: mol_type = other DNA
cacgactaataccgcatccgtctcccccgcgaccgttgttccaggcgttgccggtgcgattttaacgccgccggt

SEQ ID NO: 405908 - DNA, 75 bp, synthetic construct
  source 1..75: mol_type = other DNA
atgaaatatacaagggattaagagcacaaggatttaacccagcagaagctagagatctagcaaaatggttcaata

SEQ ID NO: 405909 - DNA, 75 bp, synthetic construct
  source 1..75: mol_type = other DNA
tgctaagcaatttgcgaaaattggacgagaagcatacgaagcactaggacgtttatctagggaggaacacgttct

SEQ ID NO: 405910 - DNA, 75 bp, synthetic construct
  source 1..75: mol_type = other DNA
ccggaaacacgcagtatgactatgacgccgcaggccggatggtcagccggacaaaacaccgtgacggctatcgcc

SEQ ID NO: 405911 - DNA, 75 bp, synthetic construct
  source 1..75: mol_type = other DNA
atgttatcgagtcaaaaaaaagaaacaaattctcctattaactttatgaccaggcgttttttcaggatttaccct

SEQ ID NO: 405912 - DNA, 75 bp, synthetic construct
  source 1..75: mol_type = other DNA
gtgggttttcagttatgtggccaccgtgtcgtgtgcgggctgtgccgtgcctccatcttagccgggctggcgttg

SEQ ID NO: 405913 - DNA, 75 bp, synthetic construct
  source 1..75: mol_type = other DNA
tgcggtaagcgacctgacaggccgcccggtgatgctctttaacagtcagggtaacgtggtgtggcgtgcggagca

SEQ ID NO: 405914 - DNA, 75 bp, synthetic construct
  source 1..75: mol_type = other DNA
tgattctcgactggtcaccgctggagttgttctatagcgccttttccagtgtgatgaattggtttggtgtcgaga

SEQ ID NO: 405915 - DNA, 75 bp, synthetic construct
  source 1..75: mol_type = other DNA
ggtgcaaaacattgcgaaaatcgtcggggcggtttggctgtttaacggcgcgctgaatgttttaaagctgggcgc

SEQ ID NO: 405916 - DNA, 75 bp, synthetic construct
  source 1..75: mol_type = other DNA
tatcccatgcgatagtaatgctatttttaattaattttaaggatttcattccgctttatgaaaaacctgggttct

SEQ ID NO: 405917 - DNA, 75 bp, synthetic construct
  source 1..75: mol_type = other DNA
cacaaggaatacccttccttctgatgtttccggcgaactggaacccattaatcacagccaggtaatcagttatga

SEQ ID NO: 405918 - DNA, 75 bp, synthetic construct
  source 1..75: mol_type = other DNA
aagagcaacttatttctggacttttatagcggcaactttagctggttttgttgctatacagacttcctcttctac

SEQ ID NO: 405919 - DNA, 75 bp, synthetic construct
  source 1..75: mol_type = other DNA
tataaagccacccgcaaatacggggaagttgaccgggtatcgttctttaaggacattgccggagaagaggctttc

SEQ ID NO: 405920 - DNA, 75 bp, synthetic construct
  source 1..75: mol_type = other DNA
atcgtggctgcgcttgccggagctgccgttctcatctggaaatactgggatcccatcagggcattttttgccggg

SEQ ID NO: 405921 - DNA, 75 bp, synthetic construct
  source 1..75: mol_type = other DNA
ccggatggttggataagctgtagtgagcgaatgccggatgatggtcagcacgtaattattttatgtgatggcgca

SEQ ID NO: 405922 - DNA, 75 bp, synthetic construct
  source 1..75: mol_type = other DNA
gagttgcacaggccggagcaatcccaacagatacttttgcaataatagctgagttgatgcgaacctggaacagag

SEQ ID NO: 405923 - DNA, 75 bp, synthetic construct
  source 1..75: mol_type = other DNA
ttcatttacttactggtccatctccaatatcagtatctaagataaaccaaattattagtttatttataactattg

SEQ ID NO: 405924 - DNA, 75 bp, synthetic construct
  source 1..75: mol_type = other DNA
ttggttctgaaacacagtttactgcgagtgatgccgccagtgggcagagctttctggcaatggctggttttactc

SEQ ID NO: 405925 - DNA, 75 bp, synthetic construct
  source 1..75: mol_type = other DNA
taaacaatgatgatgagttaataaagctcatcgatgatatagcagagaaaaataagcgtgagaggaaggagtcag

SEQ ID NO: 405926 - DNA, 75 bp, synthetic construct
  source 1..75: mol_type = other DNA
ggctacctgaaggcgcagtctgcgggcaggcaccggataagtgaagagactgaccagtatgccggaggccaccgg

SEQ ID NO: 405927 - DNA, 75 bp, synthetic construct
  source 1..75: mol_type = other DNA
agcaataccggtacgctacgcagactcagcaaaattgctgataacacaggtaagctggttgatgagacgaaaaaa

SEQ ID NO: 405928 - DNA, 75 bp, synthetic construct
  source 1..75: mol_type = other DNA
attgttgccgcgtttgtggctgcggcagttctcatctggaaatactgggaacccatcaaggcgttttatatcggg

SEQ ID NO: 405929 - DNA, 75 bp, synthetic construct
  source 1..75: mol_type = other DNA
cgaccagaacagcccacagtttaaggcgctgcgtgagcaggcgttaaaacttggctctgaaacgcagttcaccgc

SEQ ID NO: 405930 - DNA, 75 bp, synthetic construct
  source 1..75: mol_type = other DNA
tcctccgcctgtgcgcgtcagagtttagcgaatttttcgagggtgcgaataagctgagcctgtacatagatttgt

SEQ ID NO: 405931 - DNA, 75 bp, synthetic construct
  source 1..75: mol_type = other DNA
aattcaactgcgcaacaaactgacccagcgcgcaattgcaaaagagtgtgcggactggatgcggcgtaagacaac

SEQ ID NO: 405932 - DNA, 75 bp, synthetic construct
  source 1..75: mol_type = other DNA
gtcggtgaccgtggcgaactttatctttctggtctaccagaaaaaggacaggttacgttatcctggggagaaaac

SEQ ID NO: 405933 - DNA, 75 bp, synthetic construct
  source 1..75: mol_type = other DNA
ataaagcaaaccgtattcaggatgaaaaaattgcagaagaaaaacacgagcgtattaaaggcgatgaaagtacat

SEQ ID NO: 405934 - DNA, 75 bp, synthetic construct
  source 1..75: mol_type = other DNA
cagccgtggacagttaattgccgtgaaagacacgcagggccatgaaacgcggtatgaatacaacgccgccggtga

SEQ ID NO: 405935 - DNA, 75 bp, synthetic construct
  source 1..75: mol_type = other DNA
caacgtagctccacctattttgaataactcgattaatgaaaaaattaatgaatttattacatcagtaatacgaag

SEQ ID NO: 405936 - DNA, 75 bp, synthetic construct
  source 1..75: mol_type = other DNA
gtgatgacaacgttctaagttgtcaagcgaatgatgtgtcgtaccgtaaagagcagttaaagaaactacaagaag

SEQ ID NO: 405937 - DNA, 75 bp, synthetic construct
  source 1..75: mol_type = other DNA
caacatccctcaaagatatttttattcgccctcatacgaacgcagatgatgagagttttactaaagagcagaaaa

SEQ ID NO: 405938 - DNA, 75 bp, synthetic construct
  source 1..75: mol_type = other DNA
ctgaaggtatgattttaaccgtaagcgatgctgacgcaatcaatatattacatattctcgtatctcccgcacgta

SEQ ID NO: 405939 - DNA, 75 bp, synthetic construct
  source 1..75: mol_type = other DNA
ttgatgggaagtcattctctcttgcggtagagaaagcggatgatatatatgggtctctggctgaaaatattcaaa

SEQ ID NO: 405940 - DNA, 75 bp, synthetic construct
  source 1..75: mol_type = other DNA
atgtgtattattctatcacaatactattgataagtttaatgaatacataacaaatttaaaagagttgaccagaaa

SEQ ID NO: 405941 - DNA, 75 bp, synthetic construct
  source 1..75: mol_type = other DNA
aagagaagttaacgcatatggcggcaatcgttcaatctcaaacacacgctatggccgtccgcttgaggataaaaa

SEQ ID NO: 405942 - DNA, 75 bp, synthetic construct
  source 1..75: mol_type = other DNA
taataaatttaaaagagttggccagaaagtataattttagccatggcgatctggaaaatatactccttgcgcaag

SEQ ID NO: 405943 - DNA, 75 bp, synthetic construct
  source 1..75: mol_type = other DNA
ggtatgatgagaaaggccggctgaccggtgagcgtcagacggtgcatcacccgcagacggaagcactgctctggc

SEQ ID NO: 405944 - DNA, 75 bp, synthetic construct
  source 1..75: mol_type = other DNA
gtgatattgtcattcgtcgaaacggtgatgagtttgatgaggcgaaggtgtggttcggccttaacgccatcaaag

SEQ ID NO: 405945 - DNA, 75 bp, synthetic construct
  source 1..75: mol_type = other DNA
attgactgaatcagttattgacaccatacctgataatggtcaggaacgttatatccacattacgttatccttttt

SEQ ID NO: 405946 - DNA, 75 bp, synthetic construct
  source 1..75: mol_type = other DNA
accgaagcagccgaacacgctcgcgaaatgttcggtcaaaaaggcggtgcgcaaaaaagccaaaaccaacgcgat

SEQ ID NO: 405947 - DNA, 75 bp, synthetic construct
  source 1..75: mol_type = other DNA
gttggtggctggagtgcgattgagcaggcgatggacccaaaagcgatgagcctgtttgcgattgataaaatgggc

SEQ ID NO: 405948 - DNA, 75 bp, synthetic construct
  source 1..75: mol_type = other DNA
cagcaagtcaggtcagccgggaagaagctttggctattatcaccaatgagcgtgaaaaccagagtgtcgtgatca

SEQ ID NO: 405949 - DNA, 75 bp, synthetic construct
  source 1..75: mol_type = other DNA
acatcagacaggatattacaaactcaatgacagcctggatattaaaaccatgaaccgccccggaaatcctggaga

SEQ ID NO: 405950 - DNA, 75 bp, synthetic construct
  source 1..75: mol_type = other DNA
tagaaaagggcgtgatgacactaacgctcaaccgcccggaacgcctgaacagttttaatgatgagatgcacgcac

SEQ ID NO: 405951 - DNA, 75 bp, synthetic construct
  source 1..75: mol_type = other DNA
accacaatacagaacgacagaacccgcatccagacgatttatcagccggggagcttcacgccactcatcagggtc

SEQ ID NO: 405952 - DNA, 75 bp, synthetic construct
  source 1..75: mol_type = other DNA
tactgttgatcctgtctctcgcagcgtgtcggcattaaatcgcacaatcgaaaattcacgtcctgactttgtgac

SEQ ID NO: 405953 - DNA, 75 bp, synthetic construct
  source 1..75: mol_type = other DNA
atggaaagaaaaaacgccaacattgacgatgtgataaggacggttgaaaccgccagcgcaaaagagctggaagag

SEQ ID NO: 405954 - DNA, 75 bp, synthetic construct
  source 1..75: mol_type = other DNA
cagtactatatatactatcactatggcttctatttttatcattattaattatgtcctacgataaggttttgataa

SEQ ID NO: 405955 - DNA, 75 bp, synthetic construct
  source 1..75: mol_type = other DNA
ttgccccacgcatgggcgttgttctgcttcgcccaggtgctgatctcatgccgatgttcaggagagggcgggtac

SEQ ID NO: 405956 - DNA, 75 bp, synthetic construct
  source 1..75: mol_type = other DNA
gaaacgctggatatacgcaaactggccgctgagtttgacgtgtcagttcgtaccctgcgccgggattttcgtgaa

SEQ ID NO: 405957 - DNA, 75 bp, synthetic construct
  source 1..75: mol_type = other DNA
aaagccgccgcagccaaccaggtgtgttgtggcgctcatgtgggttacccggatatacagggctttggccgccgg

SEQ ID NO: 405958 - DNA, 75 bp, synthetic construct
  source 1..75: mol_type = other DNA
gggatggaggcgctggtctgccagatcaagttttacggtctggatacggatatgctggccagttttggctttgtc

SEQ ID NO: 405959 - DNA, 75 bp, synthetic construct
  source 1..75: mol_type = other DNA
acatcggtaaaatagatacatttaactacattatgacgtattttaaagtatgtaatgatttcctcggtgatattt

SEQ ID NO: 405960 - DNA, 75 bp, synthetic construct
  source 1..75: mol_type = other DNA
gtggctggttataaacaatctggcgcacgtcattcctgaatcgctggcccggaaagccctgcgattgccggaaat

SEQ ID NO: 405961 - DNA, 75 bp, synthetic construct
  source 1..75: mol_type = other DNA
taatcaatccagaacatctacggcaaacacttgagcgtaaatctcttactgctgttcagaaatcacaatgtgaaa

SEQ ID NO: 405962 - DNA, 75 bp, synthetic construct
  source 1..75: mol_type = other DNA
ttaaaaattataatgagcggttacacaatactaacttatttaacccaaaatatcataaaaaagccgttatgaatt

SEQ ID NO: 405963 - DNA, 75 bp, synthetic construct
  source 1..75: mol_type = other DNA
acggacgcatatcgcagcactgtatatcagggctgtttacgcacgtgcaaaagcagatcttattcctgaagctgt

SEQ ID NO: 405964 - DNA, 75 bp, synthetic construct
  source 1..75: mol_type = other DNA
gcgctcttcttttagggaaaactggagaaccgctagactggccccctgaatctccagacaaccaatatcacttaa

SEQ ID NO: 405965 - DNA, 75 bp, synthetic construct
  source 1..75: mol_type = other DNA
accccaccgcttaaaaattataatgagcggttgcacaatacaaatttatttaatccaaaatatcaaaaaaaagct

SEQ ID NO: 405966 - DNA, 75 bp, synthetic construct
  source 1..75: mol_type = other DNA
ttaaccatcaacaagatgaacaattagcaatggcatatatggccgctctcccgttcagcaggcctttagtttact

SEQ ID NO: 405967 - DNA, 75 bp, synthetic construct
  source 1..75: mol_type = other DNA
agacgctggacggacgcgaactattcatgatcgacacagaaagatttgaacgccgggttaacggcgtgaatgttc

SEQ ID NO: 405968 - DNA, 75 bp, synthetic construct
  source 1..75: mol_type = other DNA
gtggtctttgctacacttgcattgtatgcgatgtctgtagggattggcttaggtgcaatgttgctttcaccaatt

SEQ ID NO: 405969 - DNA, 75 bp, synthetic construct
  source 1..75: mol_type = other DNA
ttgaagccgtaggtcttaacaaaaaaataataacaactaatgctgacattaaaaaatacgatttttatgatccga

SEQ ID NO: 405970 - DNA, 75 bp, synthetic construct
  source 1..75: mol_type = other DNA
aacatctcgcgcaacaaatgggggctgattgtgggaaccgcaaaaaggcgagtatctgccagataacacagaaga

SEQ ID NO: 405971 - DNA, 75 bp, synthetic construct
  source 1..75: mol_type = other DNA
tggtagtttgaacggtaatgctgcaactgcaacaaaactgcaaacagcacgcacaatcggcggagtgtcattcga

SEQ ID NO: 405972 - DNA, 75 bp, synthetic construct
  source 1..75: mol_type = other DNA
aaaaaagtaccgaccagagcctggtcctgtgcgataccgtgcgttatctgccggagtcctttgagatcccctgga

SEQ ID NO: 405973 - DNA, 75 bp, synthetic construct
  source 1..75: mol_type = other DNA
ggaataccgacttcaccattatttgccgggttctcaaaaaatgcatggaactaaaacgggtctatttacaatgtc

SEQ ID NO: 405974 - DNA, 75 bp, synthetic construct
  source 1..75: mol_type = other DNA
gaagttgaagcagttgaagaaaaatccattgatgaagaactggaagaactccttaactatcgctggggtaacggt

SEQ ID NO: 405975 - DNA, 75 bp, synthetic construct
  source 1..75: mol_type = other DNA
tcacgttaaacctacactggtagaaggtgaatccgtttattgcttcgctcgtgctgttaaagccgatgaaactta

SEQ ID NO: 405976 - DNA, 75 bp, synthetic construct
  source 1..75: mol_type = other DNA
ttcgcggcagggacgtcgcctacctggtaatttccattgttttagtgggcgtaggttacgcagcctaccgcggct

SEQ ID NO: 405977 - DNA, 75 bp, synthetic construct
  source 1..75: mol_type = other DNA
aacaaggaacaagccgaaatgctcaaagaaggcattgtcgagcagatcagtgaattaccgctatcagtcagcttt

SEQ ID NO: 405978 - DNA, 75 bp, synthetic construct
  source 1..75: mol_type = other DNA
caggcgcttgcctccgctattgtgactggtgaggtagtaagaattagctatttagaagtgaccgaaaacggacat

SEQ ID NO: 405979 - DNA, 75 bp, synthetic construct
  source 1..75: mol_type = other DNA
tcgctggggtaacggtgaagaagtagaacaagaagctgatccggtagttgttccggttccggttgaagcagaatc

SEQ ID NO: 405980 - DNA, 75 bp, synthetic construct
  source 1..75: mol_type = other DNA
ggcggatcatgtgattgccgatgaagacgcgttccgcgccgccgtacgtaacgccatgccgtatgccgaagcggg

SEQ ID NO: 405981 - DNA, 75 bp, synthetic construct
  source 1..75: mol_type = other DNA
ataccacacttatcagtgaatttggttccacggcctgcaaagcattgtatcgctgcgatagttgccgcgaacctt

SEQ ID NO: 405982 - DNA, 75 bp, synthetic construct
  source 1..75: mol_type = other DNA
atttaggcatggtgcgtaatgtgacacagatgggagaaggatgggtgatcggctttacgccgacttattccggtt

SEQ ID NO: 405983 - DNA, 75 bp, synthetic construct
  source 1..75: mol_type = other DNA
cagccggattggataggtgacgagcggaatgtagtgcttactttgtctcgtatttggtacagcgcagcaaccggc

SEQ ID NO: 405984 - DNA, 75 bp, synthetic construct
  source 1..75: mol_type = other DNA
tacggctacgacgataagggccgcctgacgggcgaacggcagacggtggagaacccggagacgggggaactgctg

SEQ ID NO: 405985 - DNA, 75 bp, synthetic construct
  source 1..75: mol_type = other DNA
gtgcgggctgacggtggagcggctggcggcacagatagagccggtttatttgcctgagcgaaaaatacatcttta

SEQ ID NO: 405986 - DNA, 75 bp, synthetic construct
  source 1..75: mol_type = other DNA
ggtgaacatgcgttaattagagatgttgttattcctaaaaaaaagtctgattattatctttctttgtgccgtatt

SEQ ID NO: 405987 - DNA, 75 bp, synthetic construct
  source 1..75: mol_type = other DNA
gaatctttagcaggtaaaagggagatggttattatttcatttagtaatggcgcaacatttcaagtagaagtacca

SEQ ID NO: 405988 - DNA, 75 bp, synthetic construct
  source 1..75: mol_type = other DNA
ggaatcaaaatcagcaaactctgtgtttggactaataagtcacctaattcaattgcagcaatagaattgagtaat

SEQ ID NO: 405989 - DNA, 75 bp, synthetic construct
  source 1..75: mol_type = other DNA
cgaaccctgaaaccccccctgccgcaacggttgtcgcccaggagggcgaagatgaatatcagttgattgtgcgcg

SEQ ID NO: 405990 - DNA, 75 bp, synthetic construct
  source 1..75: mol_type = other DNA
agttcaacatcagcccgtgctgcttgaagcccggcaggcttatcttggacaaggagaagattgcttggcttcgct

SEQ ID NO: 405991 - DNA, 75 bp, synthetic construct
  source 1..75: mol_type = other DNA
tttcggtacagctatcacaggcactcaacgtcatcgagcatcatctgggatcgacgttgctggccgtgcatttgt

SEQ ID NO: 405992 - DNA, 75 bp, synthetic construct
  source 1..75: mol_type = other DNA
gcaggaattcgtcaacaatgtggatgagacgcggttcctgtcacgtaaggacaaccatttgatcacggaaaaaac

SEQ ID NO: 405993 - DNA, 75 bp, synthetic construct
  source 1..75: mol_type = other DNA
tgcaggggcggtatatcaccccggacccgattgggttgagaggtggatggaatatgtatcagtatccgttgaatc

SEQ ID NO: 405994 - DNA, 75 bp, synthetic construct
  source 1..75: mol_type = other DNA
gttgacgatggtaccgctgctcataacgctctttctgttgatctacagaaaggaactgttggaaaagcattatct

SEQ ID NO: 405995 - DNA, 75 bp, synthetic construct
  source 1..75: mol_type = other DNA
tttgtctgtcaggatgtatttgtttctaaaaacagttatgtcaactcgggcgatcttattatgagaattgagatg

SEQ ID NO: 405996 - DNA, 75 bp, synthetic construct
  source 1..75: mol_type = other DNA
atttaccagactgctgatgggaagatgacgactgaagcgaaaaccaaatctgaagcgactgaggatccgctgaaa

SEQ ID NO: 405997 - DNA, 75 bp, synthetic construct
  source 1..75: mol_type = other DNA
atttcctataagcgtgacggtgttttgccagatatatttggtcgcgatgcactctacgacgactcctttacctgc

SEQ ID NO: 405998 - DNA, 75 bp, synthetic construct
  source 1..75: mol_type = other DNA
atgacttgcttaataaaatttttcctgacttaaccccggtgcaagcacagtgtgtattgctgtattcatttggga

SEQ ID NO: 405999 - DNA, 75 bp, synthetic construct
  source 1..75: mol_type = other DNA
ttgtcgatgggacaccgtttgaatatacagtgaactacttccgcttatatcagtacagctttgaattcatcgctc

SEQ ID NO: 406000 - DNA, 75 bp, synthetic construct
  source 1..75: mol_type = other DNA
agattggaatttattgattggacaggagaacttgctgtcgatttccggaactgcattttcatataaaataaatag

SEQ ID NO: 406001 - DNA, 75 bp, synthetic construct
  source 1..75: mol_type = other DNA
aattctatatactagggtctatacatcctttaagggatgacattgaaatattacatgaatcaggcgttactatga

SEQ ID NO: 406002 - DNA, 75 bp, synthetic construct
  source 1..75: mol_type = other DNA
gcggcccgcaggagtgccgggagtaccgttacagcggcacgggaaggctgacgggcgtccacactacggcagcga

SEQ ID NO: 406003 - DNA, 75 bp, synthetic construct
  source 1..75: mol_type = other DNA
gcttacaatgagggattgatcgcgaaaaatgaactcagagatattgataataaaatgaaagatgccgttataaat

SEQ ID NO: 406004 - DNA, 75 bp, synthetic construct
  source 1..75: mol_type = other DNA
tcgaagaggtaattaccatccagaaaacaacccttccgaagagcggagaacctgatcgagggaagttggagggcg

SEQ ID NO: 406005 - DNA, 75 bp, synthetic construct
  source 1..75: mol_type = other DNA
ttgatgaggttattgcgattcagaaaagtacgctgccgaacagcgggcagcctgatataggtaagctcgaaggtg

SEQ ID NO: 406006 - DNA, 75 bp, synthetic construct
  source 1..75: mol_type = other DNA
cactattgacctccttagcaaaatggacaaacttgatataattgacccatccgatctatttaaatatggcgatat

SEQ ID NO: 406007 - DNA, 75 bp, synthetic construct
  source 1..75: mol_type = other DNA
tcaaaaccgtggatctactgcgcagcgccctacagcaccagtcagtgggcagatgtattatgatacaacgctagg

SEQ ID NO: 406008 - DNA, 75 bp, synthetic construct
  source 1..75: mol_type = other DNA
gtgggctatcgttggtaaactgtaaagaaatatctgttattggcggctctatgggtacgtcttatatcagaggtg

SEQ ID NO: 406009 - DNA, 75 bp, synthetic construct
  source 1..75: mol_type = other DNA
gacacaggacagtccacgcgttgatgtccaaacttttattgattggcacgaacctaatgtttctctcaaagtaaa

SEQ ID NO: 406010 - DNA, 75 bp, synthetic construct
  source 1..75: mol_type = other DNA
agggtgctttacatcagagtcagcaactaaagcccataatcgaattatggaaaataaactccatgatgctgaatt

SEQ ID NO: 406011 - DNA, 75 bp, synthetic construct
  source 1..75: mol_type = other DNA
tcgattgaagcatggataacaaaagaaccgcagccttttgtttatcgccgtagcggcgcttaccagaaactcacc

SEQ ID NO: 406012 - DNA, 75 bp, synthetic construct
  source 1..75: mol_type = other DNA
gctgaatctagccaatgttctttttaccattgatggtcataaaaatccgagcacctctgaagcgaaagctatgga

SEQ ID NO: 406013 - DNA, 75 bp, synthetic construct
  source 1..75: mol_type = other DNA
gtagagaagagattcttaccagagagctaaaaggacggctgaattcttatgcagaactgcagaatattttccgta

SEQ ID NO: 406014 - DNA, 75 bp, synthetic construct
  source 1..75: mol_type = other DNA
ttcttcaaagatgacactatctttcccttggctaaagatgctgttgctagggagctggcctttgctcaagagcag

SEQ ID NO: 406015 - DNA, 75 bp, synthetic construct
  source 1..75: mol_type = other DNA
tactgcgccagcgtctggcagcaatgccgcagattacccaagctctggcggcccagatgcaagcggaaagtattg

SEQ ID NO: 406016 - DNA, 75 bp, synthetic construct
  source 1..75: mol_type = other DNA
cgcgctggagttaggggcaacagcgctccttaccaagcctattacacagcgagccatctataccaccctgatgat

SEQ ID NO: 406017 - DNA, 75 bp, synthetic construct
  source 1..75: mol_type = other DNA
tgagattaggagaacgtttgaccgtaacaaccttgcacactttagacacaatgatgaaaagtctataatcgattt

SEQ ID NO: 406018 - DNA, 75 bp, synthetic construct
  source 1..75: mol_type = other DNA
gaaaagcgccaaaattaaacgttctgagcttgatttgcgtagtttctggactttaggtattaccccgatgatcga

SEQ ID NO: 406019 - DNA, 75 bp, synthetic construct
  source 1..75: mol_type = other DNA
tcgatgatattttatttatggatgatgactttgatgatagttcctctgaggatgatcccgttgagaatagtcctg

SEQ ID NO: 406020 - DNA, 75 bp, synthetic construct
  source 1..75: mol_type = other DNA
ggtttatataatttaggtgggttggattttaagggatgcttcttttctggacagaacttccgtaactatgatatt

SEQ ID NO: 406021 - DNA, 75 bp, synthetic construct
  source 1..75: mol_type = other DNA
tttttccatcttccgttcatctactttgaataataatgatgtagggtttaatttcaaattattcccagaagtcaa

SEQ ID NO: 406022 - DNA, 75 bp, synthetic construct
  source 1..75: mol_type = other DNA
agtaatgaaaaatcattagaacgcgtcagcgaaaacggtttaagtggagtcttgtctgatcgtaataaaaaaata

SEQ ID NO: 406023 - DNA, 75 bp, synthetic construct
  source 1..75: mol_type = other DNA
agaagctgcctcagggacgtataacggtgctcttgaaattttacaaaaaatgatgtctgaatgtaaatatcatga

SEQ ID NO: 406024 - DNA, 75 bp, synthetic construct
  source 1..75: mol_type = other DNA
tcgatggtatttcatctatggatgatgactttgatgatagttcctctgaggaaaattcccctgaggatagtccca

SEQ ID NO: 406025 - DNA, 75 bp, synthetic construct
  source 1..75: mol_type = other DNA
gtatgtgaatattcatttcgctgttatctggagcattttttcactggctctctatggcggacgttttattttgtt

SEQ ID NO: 406026 - DNA, 75 bp, synthetic construct
  source 1..75: mol_type = other DNA
tatccactgtgcgtattactaatgcttagtgccgttgttgcgctatatttccacaccccatcactcctcgcattt

SEQ ID NO: 406027 - DNA, 75 bp, synthetic construct
  source 1..75: mol_type = other DNA
cgcgcttgaaataaaacaaaacagagacgcgaccagttgtgttaaaaatatgatcgcagacttagaaaaaagcgc

SEQ ID NO: 406028 - DNA, 75 bp, synthetic construct
  source 1..75: mol_type = other DNA
aataaaaataatgttgatcagtttattgaatgcgctaagagaaatgaacagaccctattcggcaatataagaaaa

SEQ ID NO: 406029 - DNA, 75 bp, synthetic construct
  source 1..75: mol_type = other DNA
tgcacactggacgctaccttttgcttatccgctatgtgtattattaatgcttagcgccattgttgcattgtattt

SEQ ID NO: 406030 - DNA, 75 bp, synthetic construct
  source 1..75: mol_type = other DNA
ttcatcgcctcgatgcattagctcatcgcgatcccttaactggagtggcaaaccgacgagcgttggatagtattt

SEQ ID NO: 406031 - DNA, 75 bp, synthetic construct
  source 1..75: mol_type = other DNA
tgaatgattttctgggcgcaaccgatattgacctgcgcccggaagccctgaagaaattcgaagagctggcgcaac

SEQ ID NO: 406032 - DNA, 75 bp, synthetic construct
  source 1..75: mol_type = other DNA
gtgtgccccggcggagtgacgtccggccatccggtcaatcctctgctcggtgcaaaggtccttcccggtgaaacc

SEQ ID NO: 406033 - DNA, 75 bp, synthetic construct
  source 1..75: mol_type = other DNA
tatttaattagcgaaatactggggaaagtttcggccagccaattccgcatgttctgtgaccgaattggtgcagac

SEQ ID NO: 406034 - DNA, 75 bp, synthetic construct
  source 1..75: mol_type = other DNA
gacagcatatgtgcaacatcatgcgtcatgccatacatcaggagttgatagagaacaatccggcagcaaatctgg

SEQ ID NO: 406035 - DNA, 75 bp, synthetic construct
  source 1..75: mol_type = other DNA
tctgtatgcgtatccgctgaatccggtgaatggtattgatccattagggttaagtcccgcagatgtagcgctaat

SEQ ID NO: 406036 - DNA, 75 bp, synthetic construct
  source 1..75: mol_type = other DNA
actggaggaagaaatccgggcagaccgcgtgagcagtgaaagccgggtgtggcttgcgcagtgcgggctgacggt

SEQ ID NO: 406037 - DNA, 75 bp, synthetic construct
  source 1..75: mol_type = other DNA
ccaagtgattttaatcaggctgttgagtatttaaaacaagattcacgaatgaaagaagctatagattttttatca

SEQ ID NO: 406038 - DNA, 75 bp, synthetic construct
  source 1..75: mol_type = other DNA
tggatgataatattcaggaattacatgcgcttagcggttttcgccgagagcttgctttaaggttaaaggatatgt

SEQ ID NO: 406039 - DNA, 75 bp, synthetic construct
  source 1..75: mol_type = other DNA
ttaaccgccatgctggtgggaattaccgaaccgctggaatttaccttcctgttcatttcaccgttgctgtttgcg

SEQ ID NO: 406040 - DNA, 75 bp, synthetic construct
  source 1..75: mol_type = other DNA
ggtttatacattctcatccttaatattattcacatcatattaataactgtaattacactcggtcaaatgcagaaa

SEQ ID NO: 406041 - DNA, 75 bp, synthetic construct
  source 1..75: mol_type = other DNA
atgaacgaattagatgatctgcataataaaataggccagttattagtggatgccggtcctgccaatgcgatgaag

SEQ ID NO: 406042 - DNA, 75 bp, synthetic construct
  source 1..75: mol_type = other DNA
ggagtgaaatagatcttatctggggctacgaatttagtaaaaatataaaaactgagctattgctagggatgttta

SEQ ID NO: 406043 - DNA, 75 bp, synthetic construct
  source 1..75: mol_type = other DNA
ttcagatgaacgagattaccagacaattagcgctatatggagctctctggaaccaacagaacttgatgaattatc

SEQ ID NO: 406044 - DNA, 75 bp, synthetic construct
  source 1..75: mol_type = other DNA
atatatccgcgctggcgagcctactggcgcgcctttcgggaagtgtcgctagtttcctcattgaggaagaaagta

SEQ ID NO: 406045 - DNA, 75 bp, synthetic construct
  source 1..75: mol_type = other DNA
agctgggacgatttatgtcggtggcccgtgtggcggcaggtggcggggttgccgtactggccgcgcttgctgccg

SEQ ID NO: 406046 - DNA, 75 bp, synthetic construct
  source 1..75: mol_type = other DNA
tggcggcagtgatgttgccattgaaaccgcggcgattaccctgatgcgccatagcctgatgggcgttgcggatgc

SEQ ID NO: 406047 - DNA, 75 bp, synthetic construct
  source 1..75: mol_type = other DNA
aatattattttctgtgggattgtattttgatgatatcgcgctaaagaataaattagttttactattgtgtatgag

SEQ ID NO: 406048 - DNA, 75 bp, synthetic construct
  source 1..75: mol_type = other DNA
catggcccgcaagggggcgcaggatgagctccggctgcagttgcgtgatggcggtatgttatcagggagcgggcg

SEQ ID NO: 406049 - DNA, 75 bp, synthetic construct
  source 1..75: mol_type = other DNA
atacatctataagctatcgcagaagtataaatcttatccgaaacttagtgcggtactattacacaaatcacaata

SEQ ID NO: 406050 - DNA, 75 bp, synthetic construct
  source 1..75: mol_type = other DNA
cagcttatgttgctggacgtaagtcatacatctataagctatcgcagaagtataaatcttatccgaaacttagtg

SEQ ID NO: 406051 - DNA, 75 bp, synthetic construct
  source 1..75: mol_type = other DNA
gccgtgctgcatactccgcccgtctggccggttaagccgctggacattattgcagactggcgaaacgaccttgtg

SEQ ID NO: 406052 - DNA, 75 bp, synthetic construct
  source 1..75: mol_type = other DNA
cgtcagccgagcggttcctctgtgtttgcgctctcaaccaaaggtgcaaccagtactgcggcaaaatatctggca

SEQ ID NO: 406053 - DNA, 75 bp, synthetic construct
  source 1..75: mol_type = other DNA
aaaacaaacacaaagaaaactaatagtgtagccgccgaagttttggtgtgttttttcatccaaaattgcgaggtt

SEQ ID NO: 406054 - DNA, 75 bp, synthetic construct
  source 1..75: mol_type = other DNA
tcattttttttgattccgataatgtttggtgaatattatgcttgttcatatacaatattaattgtattattgtta

SEQ ID NO: 406055 - DNA, 75 bp, synthetic construct
  source 1..75: mol_type = other DNA
gttggattttttttgaaaaatttgtgcgaatagctatcagctttatgctcttcgcgtttgtttcaagagtcttga

SEQ ID NO: 406056 - DNA, 75 bp, synthetic construct
  source 1..75: mol_type = other DNA
ctatttcggaaactggcgtagtgaggaaaaccgggaaatcattgcttcagcgctgaacatatcaacagacagaga

SEQ ID NO: 406057 - DNA, 75 bp, synthetic construct
  source 1..75: mol_type = other DNA
tgactgatggcgctgggctacccatgtcagggcaccatattattctgaaagcccgacagaatacatctgcagtgg

SEQ ID NO: 406058 - DNA, 75 bp, synthetic construct
  source 1..75: mol_type = other DNA
gcatccggtgggttgaggcacgcaataatccaccggaaccgcgatatacatcaaaggccattattttctacggta

SEQ ID NO: 406059 - DNA, 75 bp, synthetic construct
  source 1..75: mol_type = other DNA
tttgaagctcagaccggaaaatatgaagtttatcttcggtcgtgtattgaaagggaatactgtgtcggtgatatt

SEQ ID NO: 406060 - DNA, 75 bp, synthetic construct
  source 1..75: mol_type = other DNA
ctctccccaaacggggcgaggggactgaccgagtcttttttgatgttgtcatcagtctggaagccgcacgttggc

SEQ ID NO: 406061 - DNA, 75 bp, synthetic construct
  source 1..75: mol_type = other DNA
gtcttaaagcgcttgagacttcgaacaaatcgacattactttctatgcctcgcatacttacaatgtcaggccagc

SEQ ID NO: 406062 - DNA, 75 bp, synthetic construct
  source 1..75: mol_type = other DNA
agaacgcagaggccgttgccgaagacaaaaaacaggttgaaattctggcctctcagattgaggataccgcctcaa

SEQ ID NO: 406063 - DNA, 75 bp, synthetic construct
  source 1..75: mol_type = other DNA
tacaggacataccttatgtctttatcctaaataataacatgtctctcagtggcaagactaatcaggatggcgaga

SEQ ID NO: 406064 - DNA, 75 bp, synthetic construct
  source 1..75: mol_type = other DNA
taaactaaagctggagaacaaagaaaatgcggtttctgaaactgacctttcatcgaataaaaataatgttgatca

SEQ ID NO: 406065 - DNA, 75 bp, synthetic construct
  source 1..75: mol_type = other DNA
tgaaacggtattcaaatacaaaaatggcaattttgtctgggagatagccagaattaaaattactctcccaaaaga

SEQ ID NO: 406066 - DNA, 75 bp, synthetic construct
  source 1..75: mol_type = other DNA
tgattgatggcgcaggcatccccatgtccggatgccacattattctgaaatcccgggtaaacacctcagaggtgg

SEQ ID NO: 406067 - DNA, 75 bp, synthetic construct
  source 1..75: mol_type = other DNA
gctccggcagtacgctacaccgcagtggtcagacaacatattgagcgtcttcatcgtgatgcggtgaagaccgca

SEQ ID NO: 406068 - DNA, 75 bp, synthetic construct
  source 1..75: mol_type = other DNA
ggccgttgcgcagaccattccggacggctatgtgcaggtggcccgtgcacatgggattccggcagaagtgctgta

SEQ ID NO: 406069 - DNA, 75 bp, synthetic construct
  source 1..75: mol_type = other DNA
gtaggcgctgcggtaaatggcctggatgctagtatccgcaaaggcgatacgaaagttgacatccctgtgaagaac

SEQ ID NO: 406070 - DNA, 75 bp, synthetic construct
  source 1..75: mol_type = other DNA
atgagccataaacctgcgcatttattactggtcgatgacgatccgggattgctgaaactgcttggcctgcgtctg

SEQ ID NO: 406071 - DNA, 75 bp, synthetic construct
  source 1..75: mol_type = other DNA
ttttcctgccggtccccggacagagcacaaaggaagtcgccgccggctccgctttacccggccatgcagggcatg

SEQ ID NO: 406072 - DNA, 75 bp, synthetic construct
  source 1..75: mol_type = other DNA
gtacaagatttctttggaggttcccggcgtcgaggaaaaagacatccatatcacgctcgacaacgacgtgctgct

SEQ ID NO: 406073 - DNA, 75 bp, synthetic construct
  source 1..75: mol_type = other DNA
ttcagtccttaccccattttcgctttatccagcagtcattgcttacgtttgttccggctgacagcccaccagaat

SEQ ID NO: 406074 - DNA, 75 bp, synthetic construct
  source 1..75: mol_type = other DNA
ccagccaccgacgaacgttggcgcgaggcgattgtcacccgcagcccgctgatgctgcgcttgctggaacaggcg

SEQ ID NO: 406075 - DNA, 75 bp, synthetic construct
  source 1..75: mol_type = other DNA
cgtttgtgcgtaggtaaagtatttgatggagtattgagcccagctcaaccactaataagaatatggacaggggaa

SEQ ID NO: 406076 - DNA, 75 bp, synthetic construct
  source 1..75: mol_type = other DNA
gcagtgctcttcgatggtagcctgaaaaataagatgataaacgaatacggagaaaatgattttttaattacctac

SEQ ID NO: 406077 - DNA, 75 bp, synthetic construct
  source 1..75: mol_type = other DNA
tggatggctgttggggagggagaaagggaaagaagaaggggaacaacgcctccttagattgttgttgcagaatgg

SEQ ID NO: 406078 - DNA, 75 bp, synthetic construct
  source 1..75: mol_type = other DNA
gtacgaggaagattttgaaacagatgattttgatatcaaaaaaaacgagagtgagatttatgatgaaaatgacga

SEQ ID NO: 406079 - DNA, 75 bp, synthetic construct
  source 1..75: mol_type = other DNA
aaagcatcctgaactaaaatataatcgtttgcgcgtaggtaaagtatttgatggagtattgagccctgctcaacc

SEQ ID NO: 406080 - DNA, 75 bp, synthetic construct
  source 1..75: mol_type = other DNA
atagtattataaaattaatttgtaaggaagctgcctcagggacgtataacggtgctcttgaaattttacaaaaaa

SEQ ID NO: 406081 - DNA, 75 bp, synthetic construct
  source 1..75: mol_type = other DNA
tatctgtcggtgcagttggatggaccacgctcaatagtcgggggggaaatatggttgatcaagactggatggatc

SEQ ID NO: 406082 - DNA, 75 bp, synthetic construct
  source 1..75: mol_type = other DNA
tggaaactatgctattatggggcaaacagctaggataacaataggcggtaaggacaacggggcgtttgaattggt

SEQ ID NO: 406083 - DNA, 75 bp, synthetic construct
  source 1..75: mol_type = other DNA
gtataatcccttcgaatgtgtaaaaacaaatatcaatggtgcgatgaatgtgattgatgcttgtatcgataaagg

SEQ ID NO: 406084 - DNA, 75 bp, synthetic construct
  source 1..75: mol_type = other DNA
agcgattcctcgccagcgtagactgcatcgtcgcctcgtcgcccaactacgtggcctccagccagaccctgaaaa

SEQ ID NO: 406085 - DNA, 75 bp, synthetic construct
  source 1..75: mol_type = other DNA
attcttactttttcagatgcacgtattaaatttataaataataagtatgaaaaaggtgcagcaggggcgcgaaat

SEQ ID NO: 406086 - DNA, 75 bp, synthetic construct
  source 1..75: mol_type = other DNA
tgccagaaaaaggaaatgcaacggtgcgctcttcagcgggatgaaactgaacaggaagaaaatggtaatggaaag

SEQ ID NO: 406087 - DNA, 75 bp, synthetic construct
  source 1..75: mol_type = other DNA
cgacggcaaccaatgcgcgcaatttcactcagtgcgactcaatgctgattggcgctaattgtggggcgcatacct

SEQ ID NO: 406088 - DNA, 75 bp, synthetic construct
  source 1..75: mol_type = other DNA
gtttcctgtaaccattgcgcggatccgatctgtaccaaaaattgcccgacgatggcgatgcataagcgtcccgga

SEQ ID NO: 406089 - DNA, 75 bp, synthetic construct
  source 1..75: mol_type = other DNA
gtaaagacaaaaacaaccttgaggttgggcgacgttttcgccgcgtgtatgaagtgaacggaggtggcttcatcg

SEQ ID NO: 406090 - DNA, 75 bp, synthetic construct
  source 1..75: mol_type = other DNA
agatgatcagtgctgaagacgcttattacacctatgaatatccagaacattttaagattcttccggcgattcata

SEQ ID NO: 406091 - DNA, 75 bp, synthetic construct
  source 1..75: mol_type = other DNA
atctgtatggtgcaactaagctagcatctgataaactttttgttgcaggtaactcctattctggcgcgacaaaaa

SEQ ID NO: 406092 - DNA, 75 bp, synthetic construct
  source 1..75: mol_type = other DNA
gtgatggggaaggtcgccgctggcgatttaatctgcccaccaccggtctggaaagtcaggcattaatggatatcg

SEQ ID NO: 406093 - DNA, 75 bp, synthetic construct
  source 1..75: mol_type = other DNA
gatgaagaaattgcggcggttgcgagaaaattcggcgcagaagttccgtttatgcgacctgatgctctatcaaat

SEQ ID NO: 406094 - DNA, 75 bp, synthetic construct
  source 1..75: mol_type = other DNA
gaacacaccatagatattcaaaaaataacggatgcctttgtgaaggagttccggggggtattaattgataaaaat

SEQ ID NO: 406095 - DNA, 75 bp, synthetic construct
  source 1..75: mol_type = other DNA
gcaacgcctttgtcattatgggagctggagaacaattaaaacgtattaaatatgaagttggtgaaaataacttaa

SEQ ID NO: 406096 - DNA, 75 bp, synthetic construct
  source 1..75: mol_type = other DNA
accagatgagcaatgcacttcaacaggctccatctttgtcagagtcaaaggaacacaccatagatattcaaaaaa

SEQ ID NO: 406097 - DNA, 75 bp, synthetic construct
  source 1..75: mol_type = other DNA
gatattcaagaaaaaacagatgcatttgtgaagaagttcaaggggatattatttgataaaaatggaaggtcttca

SEQ ID NO: 406098 - DNA, 75 bp, synthetic construct
  source 1..75: mol_type = other DNA
caccatagatattcaagaaaaaacagatgcgtttgtgaagaagttcaagggggtattatttgataaaaatacaag

SEQ ID NO: 406099 - DNA, 75 bp, synthetic construct
  source 1..75: mol_type = other DNA
ctgaggatgatcccgttgagaatagtcctgttgtgactagtcccgttgtatcaagttctaaaagcagttttcaat

SEQ ID NO: 406100 - DNA, 75 bp, synthetic construct
  source 1..75: mol_type = other DNA
cccgacgtggcttaaagatcatcaccgtttccggtgaatcgctccctcctgcgcccccacgttcccgccatatcg

SEQ ID NO: 406101 - DNA, 75 bp, synthetic construct
  source 1..75: mol_type = other DNA
tctgatgaatgcggattgtaattacgaaatgcctgcagaaattttgagtaatacatatgatttattaaacctgcg

SEQ ID NO: 406102 - DNA, 75 bp, synthetic construct
  source 1..75: mol_type = other DNA
tagcaatggcaacgtggcgaattttatttgttgtatttatgccactgcaccttttatttgtcctaaagatattat

SEQ ID NO: 406103 - DNA, 75 bp, synthetic construct
  source 1..75: mol_type = other DNA
gtcttatctgatcgtaataaaaaaataaaaatgatcacgggcgtggcaccattcgatgatattttatttatggat

SEQ ID NO: 406104 - DNA, 75 bp, synthetic construct
  source 1..75: mol_type = other DNA
gcaacaggtaaacctttcaatcacaagagatgacgttaaggtgacatgtcgttgctgcacacacacttatattgg

SEQ ID NO: 406105 - DNA, 75 bp, synthetic construct
  source 1..75: mol_type = other DNA
tgatattattatctggttgcaaatctttgccaactccgctttgccatggtaaagcatatttaggtggggaagaaa

SEQ ID NO: 406106 - DNA, 75 bp, synthetic construct
  source 1..75: mol_type = other DNA
caagcaaacggtatatggtttagccactgaggcaaatattgaaagtggtgaacaaattgttgatggtgggtcaac

SEQ ID NO: 406107 - DNA, 75 bp, synthetic construct
  source 1..75: mol_type = other DNA
ccaacccggatcccaacccaaatcccaacccaaatccgaagccggatccaaaaccagacccaaaaccggatccga

SEQ ID NO: 406108 - DNA, 75 bp, synthetic construct
  source 1..75: mol_type = other DNA
gttgctggcgggacggcaatcgtctacgcaggtacgctggcggatgcatcggtcagtggcgcgacaggaagcctg

SEQ ID NO: 406109 - DNA, 75 bp, synthetic construct
  source 1..75: mol_type = other DNA
tggggatggtgaaacagtggcaggacatgatctattccggccgtcattcacaatcttatatgcaatcactacccg

SEQ ID NO: 406110 - DNA, 75 bp, synthetic construct
  source 1..75: mol_type = other DNA
aagcgctatactggttacataaagcagaagcagctggcgcaatcactgatgtcgagattaacaccattctgtttc

SEQ ID NO: 406111 - DNA, 75 bp, synthetic construct
  source 1..75: mol_type = other DNA
cggtgaacaaattgtcgagggtgtggcgaatgagacaacaattaacgacggcggaggtgatgctgccaacttact

SEQ ID NO: 406112 - DNA, 75 bp, synthetic construct
  source 1..75: mol_type = other DNA
gaagtctggcaacgaacacaaccataaatggtggtcgacagtatgttgaacagagcacagtagaaacaacaacca

SEQ ID NO: 406113 - DNA, 75 bp, synthetic construct
  source 1..75: mol_type = other DNA
tgtattccggtagaaaaagaggatgaggcttacattaccacgctgaccggagatacggtgcgttgtatctgtcgc

SEQ ID NO: 406114 - DNA, 75 bp, synthetic construct
  source 1..75: mol_type = other DNA
taactgaagatggtcgccaggttgaggaagtgcatgtcctgggggatatgtatcgtctggagttctatccgcgtg

SEQ ID NO: 406115 - DNA, 75 bp, synthetic construct
  source 1..75: mol_type = other DNA
caccagacttaacaatggcggcgttctggaggttcaggacggtggagaggctaagcatgtagagcaacaatccgg

SEQ ID NO: 406116 - DNA, 75 bp, synthetic construct
  source 1..75: mol_type = other DNA
cagaatattaataatcatggtattgccacgggcaccaatatcaacggcggaacgcaaaatatcaagagcggcggc

SEQ ID NO: 406117 - DNA, 75 bp, synthetic construct
  source 1..75: mol_type = other DNA
tagttaatgagggcggtctggctgaaaactcggtgcttaatgacggcggcacactcgatgtgcgggagaaaggca

SEQ ID NO: 406118 - DNA, 75 bp, synthetic construct
  source 1..75: mol_type = other DNA
agatgtttgctgcactttattatccattcgacaaaccgcgtcgctggatcaattccggtggcctcggcacgatgg

SEQ ID NO: 406119 - DNA, 75 bp, synthetic construct
  source 1..75: mol_type = other DNA
gatggcgtggaagaaaggggagatgaagccggcattacgcgatttcatcgccattgtgcaggaacgtttggcaag

SEQ ID NO: 406120 - DNA, 75 bp, synthetic construct
  source 1..75: mol_type = other DNA
tctcaattgtcagggaaattagcgtgaatactatctgttctttaattgttgtggttgcactgtctttattatcat

SEQ ID NO: 406121 - DNA, 75 bp, synthetic construct
  source 1..75: mol_type = other DNA
gctctggatgatcccgcaatggcacaaaccgtcgccatcgaattacgtaatagcgatcgctcccggctcgcactg

SEQ ID NO: 406122 - DNA, 75 bp, synthetic construct
  source 1..75: mol_type = other DNA
caatttagataaactgaatacccttcgacagcgtggtagggagtcttttggagctcgtgaggcacaattaagaga

SEQ ID NO: 406123 - DNA, 75 bp, synthetic construct
  source 1..75: mol_type = other DNA
agactggatgaaggtcaccggctggccgcactctggcaggcgctgccggaagaactccgcttaagtccgcatcgt

SEQ ID NO: 406124 - DNA, 75 bp, synthetic construct
  source 1..75: mol_type = other DNA
cgtggtaacagtctgaatttacatctaaatgtccgacaaagccgtttactgccgacgctaaatgaagattcagcg

SEQ ID NO: 406125 - DNA, 75 bp, synthetic construct
  source 1..75: mol_type = other DNA
cgatccaacgccgacacccgttccggagaaacgcatcacgccttctaccgcagccgtactcaatatggcagcaac

SEQ ID NO: 406126 - DNA, 75 bp, synthetic construct
  source 1..75: mol_type = other DNA
ctccgggagccggcaggttgttgagaaagatggtacggcaattggcagcaatattagcgccggaggctcgctgat

SEQ ID NO: 406127 - DNA, 75 bp, synthetic construct
  source 1..75: mol_type = other DNA
actcaatatggcagcaacattaccgttggtatttgatgctgagctaaacagtattcgcgagcggttgaacataat

SEQ ID NO: 406128 - DNA, 75 bp, synthetic construct
  source 1..75: mol_type = other DNA
cagcaattattatttcttcattatctttgagcgccacggcccaaactgttacggcagtcgattcaactatcgagg

SEQ ID NO: 406129 - DNA, 75 bp, synthetic construct
  source 1..75: mol_type = other DNA
ctttgacaacaggggttcgtatggataagcacgaaaattatggaaccaactggagtccaagagcatatcttgtat

SEQ ID NO: 406130 - DNA, 75 bp, synthetic construct
  source 1..75: mol_type = other DNA
cagaaaactcgtaaatataaggggactgggcggaggatacaccctcattcttgtggatggtaaacgggtcagttc

SEQ ID NO: 406131 - DNA, 75 bp, synthetic construct
  source 1..75: mol_type = other DNA
agggccgcctgacgggcgaacggcagacggtggagaacccggagacgggggaactgctgtggcagcatgagacgt

SEQ ID NO: 406132 - DNA, 75 bp, synthetic construct
  source 1..75: mol_type = other DNA
ctttactccttcacctataacgttggctctggtgcttttgccagctcgacgctgctgaagaagctgaacgccgga

SEQ ID NO: 406133 - DNA, 75 bp, synthetic construct
  source 1..75: mol_type = other DNA
cgaccgacatcgaaaagtaaagccagcttcaggccaattatacttggcgtgaactctgcgaaagatgttgtccgt

SEQ ID NO: 406134 - DNA, 75 bp, synthetic construct
  source 1..75: mol_type = other DNA
cgggaaatatttccggccgtcgttccggacggggtggcattgttaacagctggagttgatacccaggacgatcgc

SEQ ID NO: 406135 - DNA, 75 bp, synthetic construct
  source 1..75: mol_type = other DNA
gaaatttctttcaggcgcaacggcggctgcaggcattgccattattaattcactggcaaatctggggggattttt

SEQ ID NO: 406136 - DNA, 75 bp, synthetic construct
  source 1..75: mol_type = other DNA
tgattttttattacggttctttataagtattggtgtgataggagcattggtttatcattctatatttttgttttt

SEQ ID NO: 406137 - DNA, 75 bp, synthetic construct
  source 1..75: mol_type = other DNA
attgaacttaacgaagataccgttagaaactatttatcgtattacaaccactgtgagaaacagtttctggagaac

SEQ ID NO: 406138 - DNA, 75 bp, synthetic construct
  source 1..75: mol_type = other DNA
tcccattaatgctgacccataacctcccgctgaaggcgcgccagcagttcttctcggatatcaacaacaacgtgt

SEQ ID NO: 406139 - DNA, 75 bp, synthetic construct
  source 1..75: mol_type = other DNA
cgagaactcaatccagcacgtgcgaagaagttttatgagtatctgcgaacagcttacgagaaaaaagagccgttc

SEQ ID NO: 406140 - DNA, 75 bp, synthetic construct
  source 1..75: mol_type = other DNA
ttgaattcccggcatcaagaggcttacagggaaatacggttgtgttgatgatgacagtcccagcgcgcgcgctaa

SEQ ID NO: 406141 - DNA, 75 bp, synthetic construct
  source 1..75: mol_type = other DNA
cttgcgcgtcgtccgattcgtgtcctgctggcggatgaagtggacaagtacccgataacccgcgaaggcgatcca

SEQ ID NO: 406142 - DNA, 75 bp, synthetic construct
  source 1..75: mol_type = other DNA
agcaatcaatacggcaaccgatatatgtacaaaggctttaacgaaatgtgggtagaagcaagaaatcgcgcaggc

SEQ ID NO: 406143 - DNA, 75 bp, synthetic construct
  source 1..75: mol_type = other DNA
ggccaagtttgccagcgcaggcaataagcctctggaaatgggcgatatcgaatccatctgggaggcctggttagc

SEQ ID NO: 406144 - DNA, 75 bp, synthetic construct
  source 1..75: mol_type = other DNA
gggtgatacctcgaataatgggtatacgggcagcgccacggcaaactggcaggccacttacggtacgctgggggt

SEQ ID NO: 406145 - DNA, 75 bp, synthetic construct
  source 1..75: mol_type = other DNA
caattgaattcttaaaagaccataattttgaaaactcctatcatgataataatacaaaagatattagtaatcttg

SEQ ID NO: 406146 - DNA, 75 bp, synthetic construct
  source 1..75: mol_type = other DNA
aatgaatgaagacgactgcaaaataagaagaggaaacgcagcagaattattttcacggatgcggtacatcgctat

SEQ ID NO: 406147 - DNA, 75 bp, synthetic construct
  source 1..75: mol_type = other DNA
agactatcacttatttaagtgatattggttgtctggagattcagggggccagtctacctggtctgagtatcgtag

SEQ ID NO: 406148 - DNA, 75 bp, synthetic construct
  source 1..75: mol_type = other DNA
taccgcgctgacgaattactggtttaagcgcaaaacctaccgctacctgacctcactcggactcgataaggaggc

SEQ ID NO: 406149 - DNA, 75 bp, synthetic construct
  source 1..75: mol_type = other DNA
taccgcactgacgaactactggtttaagcgcaaaacctttcgctatctgaaatcactcggactcgataagggggc

SEQ ID NO: 406150 - DNA, 75 bp, synthetic construct
  source 1..75: mol_type = other DNA
ataaaaatagccaatgagtggagttctacaattcatcagctttactgtgactttatctccacatgtaggaataac

SEQ ID NO: 406151 - DNA, 75 bp, synthetic construct
  source 1..75: mol_type = other DNA
taaaggcgggattgtcccggtcgtcggcgttgatggatgggctcgcattatcaacgagcatcctcagtttgacgg

SEQ ID NO: 406152 - DNA, 75 bp, synthetic construct
  source 1..75: mol_type = other DNA
atgcgcactcaccctcacttaataaaacaaactattgatccacgactcattaatgaaataaacaaaagaacacaa

SEQ ID NO: 406153 - DNA, 75 bp, synthetic construct
  source 1..75: mol_type = other DNA
ataaccaattggaagcggtgatcaacctgccttccggcgtatttaaaccttacgctggcgtggcgacggcgatcc

SEQ ID NO: 406154 - DNA, 75 bp, synthetic construct
  source 1..75: mol_type = other DNA
attcagatccaagaaaaagaaaatatattctggaaaaaattaaagatttaagattggaaattgaatacatattaa

SEQ ID NO: 406155 - DNA, 75 bp, synthetic construct
  source 1..75: mol_type = other DNA
ttgtcggaacagtgctggattatgccgggcgcggcagtcagcgctggtcgaaatggcgtccgtcactctgtatat

SEQ ID NO: 406156 - DNA, 75 bp, synthetic construct
  source 1..75: mol_type = other DNA
tgattgatcgactggaattattacacgacgcccgctcacgctcgctgtttgaaacgcttaaacgcgatatcgcca

SEQ ID NO: 406157 - DNA, 75 bp, synthetic construct
  source 1..75: mol_type = other DNA
tttgatatttgtaaccctaccaataaaggaacaaaagggaaaccagtattaaaaaaattcatgagccgagcaaat

SEQ ID NO: 406158 - DNA, 75 bp, synthetic construct
  source 1..75: mol_type = other DNA
aagcattaatgaaaagcatgggtgttgataataaaataaacattgaagatgtggattttattagtattaaaagaa

SEQ ID NO: 406159 - DNA, 75 bp, synthetic construct
  source 1..75: mol_type = other DNA
tggctgcaacgcctgtgaaatcgaaatttttgccgccattacaccagtattcgacgcagaacgttttggcattaa

SEQ ID NO: 406160 - DNA, 75 bp, synthetic construct
  source 1..75: mol_type = other DNA
tacggtggcctacaccatggcggcaaccagtacgcgtaatctccaggaaggtgacgatcctgaccgtgggctgcg

SEQ ID NO: 406161 - DNA, 75 bp, synthetic construct
  source 1..75: mol_type = other DNA
ggaaatgcagcaagtatttacgcctgctttaatggagcctgtactgaaatactggcaagagtcacccaaaacgtg

SEQ ID NO: 406162 - DNA, 75 bp, synthetic construct
  source 1..75: mol_type = other DNA
tatcagtacgccagaattgctaacgcaagagcgacatgcggctcgttcggctgcgtggtacttcacgttacgcgg

SEQ ID NO: 406163 - DNA, 75 bp, synthetic construct
  source 1..75: mol_type = other DNA
cactaacagcaccgaaagcgatggtcggtgtataacctttcatggcgatgccgaatacactggccaggctggtga

SEQ ID NO: 406164 - DNA, 75 bp, synthetic construct
  source 1..75: mol_type = other DNA
agctatgggttgtaaaatagaaaccgcttactataaatggaactcttcggatcaagttgaaaactggggggcggt

SEQ ID NO: 406165 - DNA, 75 bp, synthetic construct
  source 1..75: mol_type = other DNA
ttgctacaggatatccgtcgctcggcttacgtttatcgcgtcgattgcggtggctgcaacgcctgtgaaatcgaa

SEQ ID NO: 406166 - DNA, 75 bp, synthetic construct
  source 1..75: mol_type = other DNA
gcgggattctctgcgctggtggagagcttcaactacaccccagccgctctgctgaccacatttggacgccgcatt

SEQ ID NO: 406167 - DNA, 75 bp, synthetic construct
  source 1..75: mol_type = other DNA
agccaatcagccagccattgcaaatctggtgtacagcaatcgcctcggtaacaaagcatcaggcgatgggtggaa

SEQ ID NO: 406168 - DNA, 75 bp, synthetic construct
  source 1..75: mol_type = other DNA
acctgaacacgtttcttgatggcgtcagctatctcggcgttatcgagtccgtcaccctgccaaagctgacccgta

SEQ ID NO: 406169 - DNA, 75 bp, synthetic construct
  source 1..75: mol_type = other DNA
tttgcgttggcactatcgttcacgacatgaaaagttgattgcatactctaaccgccatttttataacagtgattt

SEQ ID NO: 406170 - DNA, 75 bp, synthetic construct
  source 1..75: mol_type = other DNA
attacctagaacctggacgaatggaatttgatctggtggtgatggacgaagcgtctcaggtgaagccagaggatg

SEQ ID NO: 406171 - DNA, 75 bp, synthetic construct
  source 1..75: mol_type = other DNA
acaaacgatattgtattgacgagggataaagattctaacggtgaaaatgtttctttgatttatcatttaacaccg

SEQ ID NO: 406172 - DNA, 75 bp, synthetic construct
  source 1..75: mol_type = other DNA
atgtacttcactgccgcaccggaaaatcggttaaaagtggcgggcttgctgattcccgcacccttaaccgccatg

SEQ ID NO: 406173 - DNA, 75 bp, synthetic construct
  source 1..75: mol_type = other DNA
tattatgatggtggctaacctttgtattgggctgttaacaccgccggtgggtagtgcgctatttgttggttgttc

SEQ ID NO: 406174 - DNA, 75 bp, synthetic construct
  source 1..75: mol_type = other DNA
ttggagtcactaccgactcattcctccgagattttgcaaaacataaacgatcttcagatatcccttgaaaatgac

SEQ ID NO: 406175 - DNA, 75 bp, synthetic construct
  source 1..75: mol_type = other DNA
gattattccatccgtatccatgaagctgttttcatgatccacaacgatagcgctatcgctgaaggaaatgaggtg

SEQ ID NO: 406176 - DNA, 75 bp, synthetic construct
  source 1..75: mol_type = other DNA
atatcgcggagtaaccgcgagcgaactacgcaaaataagccgcacgcaaaattctcgcttatttcgcacacatat

SEQ ID NO: 406177 - DNA, 75 bp, synthetic construct
  source 1..75: mol_type = other DNA
ggcccggtagtgattggtgcaaactgcctgataggtaattatgcgtttattcgccccggtacggtaatcaacaat

SEQ ID NO: 406178 - DNA, 75 bp, synthetic construct
  source 1..75: mol_type = other DNA
aagtgcctgcacctatcgttactctgcaacaatttgcagagcttgagggtgtttctgaacgcaccgcttaccgct

SEQ ID NO: 406179 - DNA, 75 bp, synthetic construct
  source 1..75: mol_type = other DNA
tacgcacgctggaaagaagaacagttgcgtaaggcgttgggtcattcccgttttcaactcgtcatcggcgcttaa

SEQ ID NO: 406180 - DNA, 75 bp, synthetic construct
  source 1..75: mol_type = other DNA
aaagagcgtaaaaaattatctggatacgaagcgaacattatttaaatttgatccgaattatgactcaattgaaga

SEQ ID NO: 406181 - DNA, 75 bp, synthetic construct
  source 1..75: mol_type = other DNA
ttatgatgagtcaaatggtggggcgagctatgggttgtaaaatagaaaccgcttactataaatggaactcttcgg

SEQ ID NO: 406182 - DNA, 75 bp, synthetic construct
  source 1..75: mol_type = other DNA
cgggttcttcccgttactgctggcctactcgctaacctatatgccgaccattgcgctgactaacagtatcgcttt

SEQ ID NO: 406183 - DNA, 75 bp, synthetic construct
  source 1..75: mol_type = other DNA
atccagaatggaaaggtgacgttggttttcgtgttttcaaactcgatacatctaatatccgtccgtgggaagcta

SEQ ID NO: 406184 - DNA, 75 bp, synthetic construct
  source 1..75: mol_type = other DNA
gaaggtcgtagtgaagaagacttgctgactgaactgatgcttaagcgtggtattgatctgagtgtaaacgttgaa

SEQ ID NO: 406185 - DNA, 75 bp, synthetic construct
  source 1..75: mol_type = other DNA
cgcataaagattattcaatacaaagtctaatcaagcctcgtctatgggatagaacacgctggcaaggagtaggct

SEQ ID NO: 406186 - DNA, 75 bp, synthetic construct
  source 1..75: mol_type = other DNA
aaaatatgaagagttaaccgagtatattagagagaaaataaaccctgctgaaatttcatatgaacaggtggatat

SEQ ID NO: 406187 - DNA, 75 bp, synthetic construct
  source 1..75: mol_type = other DNA
ggtcacggattggttttgcgtgcagtgtcgtgagtattttacaagtaatcaaaaatgttgcccgaagtgccatga

SEQ ID NO: 406188 - DNA, 75 bp, synthetic construct
  source 1..75: mol_type = other DNA
ataattttcaagataatatgaaaaattatcttgaaattactggtcaaatagaaaatggcaagaaaataagttcta

SEQ ID NO: 406189 - DNA, 75 bp, synthetic construct
  source 1..75: mol_type = other DNA
ggtccattgatttgcttccaagaactgatagccaaaataaagcctataaaaattatgataatgaccctagaggag

SEQ ID NO: 406190 - DNA, 75 bp, synthetic construct
  source 1..75: mol_type = other DNA
cagccggtcggctgcggcaagaacaatggcgctccaggatttggctaaggaagtttttcaagacaagacattcga

SEQ ID NO: 406191 - DNA, 75 bp, synthetic construct
  source 1..75: mol_type = other DNA
gtcagccgaaaaagaaactcaaaaaacggcagtagaatattgtagaaaaaataatttaaaacataatgttgccga

SEQ ID NO: 406192 - DNA, 75 bp, synthetic construct
  source 1..75: mol_type = other DNA
aaccttgaagtgttaaagcttcttcaaaaaagttatgccggaaaagttaagcttatttatattgatccaccttac

SEQ ID NO: 406193 - DNA, 75 bp, synthetic construct
  source 1..75: mol_type = other DNA
tgagcgcagtctggcggctattccagttgaagtgaaaagcgtgcgatgctgcaccgaccctgcgttgtcgcagtg

SEQ ID NO: 406194 - DNA, 75 bp, synthetic construct
  source 1..75: mol_type = other DNA
aatgatgttgattgtattggggttaatttaaaagaagatgacccctatattcctagtgatgtagctgagatccca

SEQ ID NO: 406195 - DNA, 75 bp, synthetic construct
  source 1..75: mol_type = other DNA
gctgatgcaattcatagcgctgaaatttttattgcatcgaataatgaaagctcaaaaccaagtgtttcatatgac

SEQ ID NO: 406196 - DNA, 75 bp, synthetic construct
  source 1..75: mol_type = other DNA
tcagaacttaattacctggaaagatacgccggtctataacgcgccgagtgctttggggtactggcggacaatttg

SEQ ID NO: 406197 - DNA, 75 bp, synthetic construct
  source 1..75: mol_type = other DNA
agtggaaatgctaaagattaccaattcagttattccaatagctggcaacgcattagttatactttctctgccagc

SEQ ID NO: 406198 - DNA, 75 bp, synthetic construct
  source 1..75: mol_type = other DNA
gagagcagagcacttgcgggttacttctcaaaaatttttagtggcaatccttttttaattgaagaaggacaactg

SEQ ID NO: 406199 - DNA, 75 bp, synthetic construct
  source 1..75: mol_type = other DNA
tagttggtgccttgatagggggattgttcaccctgtggggtactctgatcgatggacgtaggcaagacagagctt

SEQ ID NO: 406200 - DNA, 75 bp, synthetic construct
  source 1..75: mol_type = other DNA
gtcgtaagatcaaagaagttatctgggggctgatcctcggtagcaccgtcggctgctggttcttcttcggcgtga

SEQ ID NO: 406201 - DNA, 75 bp, synthetic construct
  source 1..75: mol_type = other DNA
agccagcaccgtctggtgttctacacgcggatacagcacggtgagccgcaggtggagagccgctacctctatgac

SEQ ID NO: 406202 - DNA, 75 bp, synthetic construct
  source 1..75: mol_type = other DNA
tccccgtgcagaccatttaaaccatagtcgttcccgaggcatcgggtcactgtacagtgaatggggagatatggg

SEQ ID NO: 406203 - DNA, 75 bp, synthetic construct
  source 1..75: mol_type = other DNA
aagatgcgtggttattgcccgaatccattattgatggctatatccgcagtgatgattcctctattcgtcaggtcg

SEQ ID NO: 406204 - DNA, 75 bp, synthetic construct
  source 1..75: mol_type = other DNA
tttgacgactccatgccggagctgcttaaaaaggcggggatctatacccacctgataagcgatcatttgcattaa

SEQ ID NO: 406205 - DNA, 75 bp, synthetic construct
  source 1..75: mol_type = other DNA
aggcggggatctataccataagcgctaacttaagggttgaaccatctgaagaatgcgacgcctcggtgcctcgtt

SEQ ID NO: 406206 - DNA, 75 bp, synthetic construct
  source 1..75: mol_type = other DNA
gagacccgttatgagtacagcgccgcaggcgacctgacagcaacggtatcaccggacggtaaacgcagcaccatc

SEQ ID NO: 406207 - DNA, 75 bp, synthetic construct
  source 1..75: mol_type = other DNA
ccattatttcttcagacaactgagtttttgcctgattatatatctggcattgtgtgtcagaaaccgaagaaaaaa

SEQ ID NO: 406208 - DNA, 75 bp, synthetic construct
  source 1..75: mol_type = other DNA
tagctggggcaatatcttgggtgatgaattttattattgttctcacatgtggattgttattttatcatagaagga

SEQ ID NO: 406209 - DNA, 75 bp, synthetic construct
  source 1..75: mol_type = other DNA
tatactgtatattaccatccagaaacaacagactttattggcgtaagtgattacgatatagagttggcatcaatc

SEQ ID NO: 406210 - DNA, 75 bp, synthetic construct
  source 1..75: mol_type = other DNA
aaacacaggctgggctggataagatagcgaaaggtgatatgccggacagtaccaatatcacgaaagtgatcgtgg

SEQ ID NO: 406211 - DNA, 75 bp, synthetic construct
  source 1..75: mol_type = other DNA
ttggtggagtaattaacccggtacaagatcttgctgccagtttacagctcgccttcgacagcggcgcaaaacgag

SEQ ID NO: 406212 - DNA, 75 bp, synthetic construct
  source 1..75: mol_type = other DNA
ccaaacgcgtataccgcatcatgcgtcagaatgcgctgctgcttgagcgtaaaccggaaataccgccatcgaagc

SEQ ID NO: 406213 - DNA, 75 bp, synthetic construct
  source 1..75: mol_type = other DNA
cgaccctaacgtcgcagaacaactggtgctgttggatctctctactaacgcaggcggtggttctgacagcgatga

SEQ ID NO: 406214 - DNA, 75 bp, synthetic construct
  source 1..75: mol_type = other DNA
tcgtcagtatccggatgacagtcgtctgcatcatgtcctgaaatcggcagtggcgcggggaccaccacggatccg

SEQ ID NO: 406215 - DNA, 75 bp, synthetic construct
  source 1..75: mol_type = other DNA
agttttgaaaacaagcgtgcagcactggcagcctcccttgaggaggtcatgaccaaagccgcagaggaagggcgc

SEQ ID NO: 406216 - DNA, 75 bp, synthetic construct
  source 1..75: mol_type = other DNA
tatagcgaccaggcggggggtgatccgaaagagatcggtacaacgggcagtgacacctataccattgccgcagcg

SEQ ID NO: 406217 - DNA, 75 bp, synthetic construct
  source 1..75: mol_type = other DNA
gctgctatggcagaagggcagggcaaccttagggcgggtcagtggcaatcagagacagaaactaccggaacgatt

SEQ ID NO: 406218 - DNA, 75 bp, synthetic construct
  source 1..75: mol_type = other DNA
gacggcgggggggattgtcaacccgagctacaacaacagcgacctggttatcccggttaccaatgccgaagcgaa

SEQ ID NO: 406219 - DNA, 75 bp, synthetic construct
  source 1..75: mol_type = other DNA
tgtacttaacttacgaagaaagacagttatttatggtttggaacttttttttgatgctgccgttggtggtaaaca

SEQ ID NO: 406220 - DNA, 75 bp, synthetic construct
  source 1..75: mol_type = other DNA
tgaacttctttgtgatgaatataatccgcataacgattatgactacatccggtataatgacgggtttctttatcg

SEQ ID NO: 406221 - DNA, 75 bp, synthetic construct
  source 1..75: mol_type = other DNA
tctatcagaagcttaccagaagtaatgtaaaggatagtaaaataaattactatcaacttagggggctattcactc

SEQ ID NO: 406222 - DNA, 75 bp, synthetic construct
  source 1..75: mol_type = other DNA
atgaaatataagtttttagtttctgcaattttcgcagctatgccattcatggctttttcatccacatctgtagat

SEQ ID NO: 406223 - DNA, 75 bp, synthetic construct
  source 1..75: mol_type = other DNA
gtgtttacatctctggaagcgttgcagaaacgaacattaacagcggtggcatgctgcaggtagagggcggtggct

SEQ ID NO: 406224 - DNA, 75 bp, synthetic construct
  source 1..75: mol_type = other DNA
cgcacaggggatttcagtattttacggtgcaacctcagtgaatttggcaattgctgaagtaaggccgcccgtcgg

SEQ ID NO: 406225 - DNA, 75 bp, synthetic construct
  source 1..75: mol_type = other DNA
ttgttccggaaattcagttgatagttgaggaacaaataaaaccgagacatatgggttcattttcatcctcgcatg

SEQ ID NO: 406226 - DNA, 75 bp, synthetic construct
  source 1..75: mol_type = other DNA
tcgtaattcgtaagaagatgaccttgcctgacttgtaccacgatctcactcatgttgaacacatctgcactattg

SEQ ID NO: 406227 - DNA, 75 bp, synthetic construct
  source 1..75: mol_type = other DNA
aacagggcgtattcgtctgggagttcctgatgactatgcagcaaaataccttacccctgcgctgaagagatttgc

SEQ ID NO: 406228 - DNA, 75 bp, synthetic construct
  source 1..75: mol_type = other DNA
gcagctatctcggtgattatctggggggctggctgacgcaggcctggcagaaactgcgtggtagcagtgacgaaa

SEQ ID NO: 406229 - DNA, 75 bp, synthetic construct
  source 1..75: mol_type = other DNA
aatgcattaaagattgaaagtcttgaccttagactaatggataataatcgaatggcgtatggttctactggtaca

SEQ ID NO: 406230 - DNA, 75 bp, synthetic construct
  source 1..75: mol_type = other DNA
tccaggtgggcgcgaagcaatggctggcgcactgggaatgaccgtgacgcagtttaacaacaacctttacgagaa

SEQ ID NO: 406231 - DNA, 75 bp, synthetic construct
  source 1..75: mol_type = other DNA
acaagttgaaacgttactatgaccggattttacacaatgccccggctaatgtagcatatagagtaatcaaagatg

SEQ ID NO: 406232 - DNA, 75 bp, synthetic construct
  source 1..75: mol_type = other DNA
tacatgcaaaaatgaaagaattattaagttttgtcagagaatccatcgccctaacaggcgaattgccggaagtat

SEQ ID NO: 406233 - DNA, 75 bp, synthetic construct
  source 1..75: mol_type = other DNA
tttgaggtggctaaaaggattattgaagccagggccgttcagtacagtgatgatgaactgctggataaactacgc

SEQ ID NO: 406234 - DNA, 75 bp, synthetic construct
  source 1..75: mol_type = other DNA
gttccttgcggtcactgtcgttactgtctggaaggcaaatataacatctgcccggacgttgattttatggcgaca

SEQ ID NO: 406235 - DNA, 75 bp, synthetic construct
  source 1..75: mol_type = other DNA
ggctggattatcgccggctctgttgacggaattatggttgaaatctggagctaccatgcgttgttctggctggcg

SEQ ID NO: 406236 - DNA, 75 bp, synthetic construct
  source 1..75: mol_type = other DNA
aatgccatctcactttcatggataatttggtgcaggatatataccgatatggcggttgggcagagatgcatcaga

SEQ ID NO: 406237 - DNA, 75 bp, synthetic construct
  source 1..75: mol_type = other DNA
tcaggatattgaagaggctgctcattactcgtggctgctgaagcgtaatggtgtgcgcattatttattgcgcgga

SEQ ID NO: 406238 - DNA, 75 bp, synthetic construct
  source 1..75: mol_type = other DNA
gctggccgaagtgggctgagtctggataacaggcctggcctgcgttcgctgttatatgatgttgaaaacggaata

SEQ ID NO: 406239 - DNA, 75 bp, synthetic construct
  source 1..75: mol_type = other DNA
tggagttttcggacagcagtaagtggacacaggcagcaatgctggatgagtacaagaaaattgtgaactcagggg

SEQ ID NO: 406240 - DNA, 75 bp, synthetic construct
  source 1..75: mol_type = other DNA
atgaaaaagacagctatcgcgattgcagtggcactggctggtttcgctaccgtagcgcaggccgctccgaaagat

SEQ ID NO: 406241 - DNA, 75 bp, synthetic construct
  source 1..75: mol_type = other DNA
aggtgcaggccggacgcgaccagaagttatcgcaggcaggtgtgaaattcaccccgcagtactggaagcgcgagt

SEQ ID NO: 406242 - DNA, 75 bp, synthetic construct
  source 1..75: mol_type = other DNA
tattgatgaactgcatctaaccgataaactggctggagaaatgattggtatcgctgccggtctggaaattccgat

SEQ ID NO: 406243 - DNA, 75 bp, synthetic construct
  source 1..75: mol_type = other DNA
tgttttacaccctgggaggcgggtcagtgatatcgcagccggcgacccggagcaacatgaagaagctcggggtgg

SEQ ID NO: 406244 - DNA, 75 bp, synthetic construct
  source 1..75: mol_type = other DNA
atgaagcataaaccacaactgataaatgtcgtggcactggccgtcatgctggcctgcagcacaatggccggcgcg

SEQ ID NO: 406245 - DNA, 75 bp, synthetic construct
  source 1..75: mol_type = other DNA
agaggctgcaaggcgctatatccgcacatcactaaaacgggagtatgccaccgaaaatgggacggagctaaatga

SEQ ID NO: 406246 - DNA, 75 bp, synthetic construct
  source 1..75: mol_type = other DNA
tcacgcccgcagatgaaagtacctggtgtataggaaaaggccggtgtgttgatgacttcctgttcaaagatgttt

SEQ ID NO: 406247 - DNA, 75 bp, synthetic construct
  source 1..75: mol_type = other DNA
taatgaaattgttaaggcaaaagaaaaagtagtatcaggtgatatttcagatgttccaaactcggtaatgaaaat

SEQ ID NO: 406248 - DNA, 75 bp, synthetic construct
  source 1..75: mol_type = other DNA
aaaataaatattctttatagcaataagactgagcataatatttttataaaggatttattctccttcgcagttatg

SEQ ID NO: 406249 - DNA, 75 bp, synthetic construct
  source 1..75: mol_type = other DNA
gtatcaccgttaaacaagtgcccgtcgaagaggacgcttataacaccaaagtcatcactctttcacgtagcggct

SEQ ID NO: 406250 - DNA, 75 bp, synthetic construct
  source 1..75: mol_type = other DNA
ctgtgtgaactgagcgatatcgacgatcttcttgaggtcaacccgaccttaccggccaagattcaccgtccctat

SEQ ID NO: 406251 - DNA, 75 bp, synthetic construct
  source 1..75: mol_type = other DNA
ggtggtatttatacagacacagatatgatgcctgcatactctaaacaagtaatttttaaaattatgatgcagaca

SEQ ID NO: 406252 - DNA, 75 bp, synthetic construct
  source 1..75: mol_type = other DNA
atttcaattaaagatgttaactctttaacctctctttcaaaatcagaaaataatcacaattatcaaactgaaatg

SEQ ID NO: 406253 - DNA, 75 bp, synthetic construct
  source 1..75: mol_type = other DNA
gcgtggtatgctgctggcactgatgacaggccagcgcctttcagatatttgcaaaatgaaattttcggatatcag

SEQ ID NO: 406254 - DNA, 75 bp, synthetic construct
  source 1..75: mol_type = other DNA
tgactcgtcgactatcgactttaaaaatctatatgaaatagatcaaatgctccatatgattatgctagagatgaa

SEQ ID NO: 406255 - DNA, 75 bp, synthetic construct
  source 1..75: mol_type = other DNA
ttctcacgaactttattttgaaaaaataaaaaagaacaaaacacatggcaggatctgtccacaaaagaacaaaaa

SEQ ID NO: 406256 - DNA, 75 bp, synthetic construct
  source 1..75: mol_type = other DNA
caggccagaatcaggcttacagggaactaagaagaataagagataatattcatagtgaaatatacttcaaacaaa

SEQ ID NO: 406257 - DNA, 75 bp, synthetic construct
  source 1..75: mol_type = other DNA
tcttacagcaggtaaaagtttcattcttggctataccaatgaagaacatggtatttatcatgcacctttgcctgc

SEQ ID NO: 406258 - DNA, 75 bp, synthetic construct
  source 1..75: mol_type = other DNA
gtgacggaaaagcttctcaccaacagtcagcagcagaaaaaagccctgatgcagcaattgcttaccgggaaaaag

SEQ ID NO: 406259 - DNA, 75 bp, synthetic construct
  source 1..75: mol_type = other DNA
aaaaagacattgataatcaatttgtgcttaccccgcctgttgctgaacaaaagaaaatatcccaaatcctgtcaa

SEQ ID NO: 406260 - DNA, 75 bp, synthetic construct
  source 1..75: mol_type = other DNA
aaaattcacactttcacattttggtaagtgtattagaggggttagttacaagcctgagaatatatgtgaaaacga

SEQ ID NO: 406261 - DNA, 75 bp, synthetic construct
  source 1..75: mol_type = other DNA
atttcggtgacggaaaagcttctcaccaacagccagcagcagaaaaaagccctgatgcagcaattgcttaccggg

SEQ ID NO: 406262 - DNA, 75 bp, synthetic construct
  source 1..75: mol_type = other DNA
ccatataaaccaaatgatgctgactatacagtaggtgcattttgcgcactttttcgaccactgaagtccgttagt

SEQ ID NO: 406263 - DNA, 75 bp, synthetic construct
  source 1..75: mol_type = other DNA
cctgcctgaaagacgagaaaaaagccctgatgcaacagctactgactggcaaacgtcgtgttaaggtcgatgagg

SEQ ID NO: 406264 - DNA, 75 bp, synthetic construct
  source 1..75: mol_type = other DNA
agttgcctgccctgacagtgttgtagcgattcaaccatataaacatgtagccgatgtttactggctaaaaaaata

SEQ ID NO: 406265 - DNA, 75 bp, synthetic construct
  source 1..75: mol_type = other DNA
aatgtttggcactggaattctatagctaactgttatgagtggtacttaaagatcactagtaaagatttatattag

SEQ ID NO: 406266 - DNA, 75 bp, synthetic construct
  source 1..75: mol_type = other DNA
agccattctgggaggtttcttttctacatgattgattatcttaaagtttattttcttaaccaagctgtggggtca

SEQ ID NO: 406267 - DNA, 75 bp, synthetic construct
  source 1..75: mol_type = other DNA
ctgcagaggacagcgcctgaaatacattataagtacagacgttcagctgtgcaccctggggatattatattctcc

SEQ ID NO: 406268 - DNA, 75 bp, synthetic construct
  source 1..75: mol_type = other DNA
aaaatagtagatgagttttatatgcaatattacaaatcttacgattttattgggcatcttgccgtcgcagttatt

SEQ ID NO: 406269 - DNA, 75 bp, synthetic construct
  source 1..75: mol_type = other DNA
cagcaacaggtccggcagtctgacggaggcaaaaccgcccacgacctgctgcacgagaaaagtgaccgcgagtcc

SEQ ID NO: 406270 - DNA, 75 bp, synthetic construct
  source 1..75: mol_type = other DNA
gttttttcaaaattaagggagcagtcaataaatcgtaaaactcagctagaatttcctcaaaggctaatgataaca

SEQ ID NO: 406271 - DNA, 75 bp, synthetic construct
  source 1..75: mol_type = other DNA
ggcgcgccatgcattgcacagcaacatgcggcaaaagtgtttaatgccgataaaaccggtgatgctgccaactta

SEQ ID NO: 406272 - DNA, 75 bp, synthetic construct
  source 1..75: mol_type = other DNA
attgcgaatcacggaaagagttttacggacgtcagttagaaaccgctgccagccattatgaaacgcaactgctgt

SEQ ID NO: 406273 - DNA, 75 bp, synthetic construct
  source 1..75: mol_type = other DNA
cgaagaaataaattataaaaatattcaaaaaataacggtgataataggtagtaaatgtcctcacagaacagaaat

SEQ ID NO: 406274 - DNA, 75 bp, synthetic construct
  source 1..75: mol_type = other DNA
gacttttataaatttagaaatgaatctataatacgcaaaaaaaacttgaaacgccccctcaaactaatgataaca

SEQ ID NO: 406275 - DNA, 75 bp, synthetic construct
  source 1..75: mol_type = other DNA
cctctgatcaaatatgtagccagaacaggtaaaccgatgattatctctacaggtatggctaatgaacaagaaatt

SEQ ID NO: 406276 - DNA, 75 bp, synthetic construct
  source 1..75: mol_type = other DNA
tattgtcaggaataactttgttctttccacaccttatttaaagcaagatcttaatctgtctgcgactcaaatagg

SEQ ID NO: 406277 - DNA, 75 bp, synthetic construct
  source 1..75: mol_type = other DNA
atttagcattcgatatcgaaactgactcaatgacagctaagaatgatattattaatgaatgtactccattaaaag

SEQ ID NO: 406278 - DNA, 75 bp, synthetic construct
  source 1..75: mol_type = other DNA
cgctggatgcccgttgccccaactgggatttgtgggaagagtgccgtacgatttccgaactggagaatgccagtg

SEQ ID NO: 406279 - DNA, 75 bp, synthetic construct
  source 1..75: mol_type = other DNA
ttatatttcaactgccattgaaagctttttagcacaaaaaacagattttccatttgaaattataatttctgatga

SEQ ID NO: 406280 - DNA, 75 bp, synthetic construct
  source 1..75: mol_type = other DNA
attaaaaatattgggtatatccccccttttgctgacaaaacactaaatatgtcaaatggttcccgtggtgatgtt

SEQ ID NO: 406281 - DNA, 75 bp, synthetic construct
  source 1..75: mol_type = other DNA
caatttgtccatcagcacctgtgacaagctgatttttcgcccaaatgccgtaaagggaacgccggtagatgttgc

SEQ ID NO: 406282 - DNA, 75 bp, synthetic construct
  source 1..75: mol_type = other DNA
agtattccttatttgtatatgattggtagctcaatgcgtgacggtcacttgcctctaagactatccgattttgat

SEQ ID NO: 406283 - DNA, 75 bp, synthetic construct
  source 1..75: mol_type = other DNA
cctgtcagccagcggaaaaaatgtcactctgctcccggacgacagcggcatacaaaaagaaagtcattcaaaaaa

SEQ ID NO: 406284 - DNA, 75 bp, synthetic construct
  source 1..75: mol_type = other DNA
actctgctcccggacgacagcggtatacaaaaagaaagtcattcaaaaaaatatccgttctccctgatttatatc

SEQ ID NO: 406285 - DNA, 75 bp, synthetic construct
  source 1..75: mol_type = other DNA
taacactaatttgatacaactggtcgcagctatcgacccagattatttggacgaatatcaagaagaagtaatgaa

SEQ ID NO: 406286 - DNA, 75 bp, synthetic construct
  source 1..75: mol_type = other DNA
gtgccgcgcaaaaaggccgcgcgtcactcgttcccgcctcgcaagccaccgcagcccgccctggtccgtgtggtc

SEQ ID NO: 406287 - DNA, 75 bp, synthetic construct
  source 1..75: mol_type = other DNA
ttggttgggtactggcttattatggctatgcaaccagtagcacaactcaatccgctaattcagtacagggcgtag

SEQ ID NO: 406288 - DNA, 75 bp, synthetic construct
  source 1..75: mol_type = other DNA
caacaaagcgagtgttgcaacaagctgagtatatgagaagcaatgaagctaagttggcgcaaatagcatgtataa

SEQ ID NO: 406289 - DNA, 75 bp, synthetic construct
  source 1..75: mol_type = other DNA
ttaataacagtaacgctacttttgcaaatatcctcacgggtacggggaacctgattcaggaaggcggaagtaccc

SEQ ID NO: 406290 - DNA, 75 bp, synthetic construct
  source 1..75: mol_type = other DNA
tgggcagaagccatctatcagaaaggaagtaatattgaatcgccggtaatgggtagtattggtttcaggattaat

SEQ ID NO: 406291 - DNA, 75 bp, synthetic construct
  source 1..75: mol_type = other DNA
aatgccgacttcaccctaaagggagggaaagtagattacgggacttgggaatattacctgaacaaggaaaacacg

SEQ ID NO: 406292 - DNA, 75 bp, synthetic construct
  source 1..75: mol_type = other DNA
cggtgtgggaacgacacagcatatgggattatactttcccggggccaggtatcaccgtcacggttccgagcaaac

SEQ ID NO: 406293 - DNA, 75 bp, synthetic construct
  source 1..75: mol_type = other DNA
gatctagacaataagctattaaaaaacataaatattcgtattgatgctttatctgacgccgaatcgaaagctcaa

SEQ ID NO: 406294 - DNA, 75 bp, synthetic construct
  source 1..75: mol_type = other DNA
gcaaatgatgccactattgacgctattgcaagtgttagcggccttaagactgttaaggagggtaatcaaaaagta

SEQ ID NO: 406295 - DNA, 75 bp, synthetic construct
  source 1..75: mol_type = other DNA
ccgccatgccgccggaggcggcctggcggccccccgtcacgggttgccggaaacggacttagtggaaagcggaat

SEQ ID NO: 406296 - DNA, 75 bp, synthetic construct
  source 1..75: mol_type = other DNA
gatgacagcagtgagcgcgtccagaaagttctggcgatgctgaagcctgattcattttacagccgaccacacaaa

SEQ ID NO: 406297 - DNA, 75 bp, synthetic construct
  source 1..75: mol_type = other DNA
atggtgacagccagttttatgccgccaatggacgctatgggattttaaatacctgtaataaatggacggcaaaag

SEQ ID NO: 406298 - DNA, 75 bp, synthetic construct
  source 1..75: mol_type = other DNA
tatgtgagaaaaggcttacgttgctatgctatagcgttgaattaagagggaagttaaatattcttaactataatc

SEQ ID NO: 406299 - DNA, 75 bp, synthetic construct
  source 1..75: mol_type = other DNA
atcgacgacacgccgggattatctctggctcaaatcgtcagcgaaagccgtcgaatcaagcgagaaaaaggatgt

SEQ ID NO: 406300 - DNA, 75 bp, synthetic construct
  source 1..75: mol_type = other DNA
caagtttagccgcaaattatctcttacgcgggttatgcaacggcttggtatctacggccggatgtcagagattaa

SEQ ID NO: 406301 - DNA, 75 bp, synthetic construct
  source 1..75: mol_type = other DNA
cgtcaggcgaacaacgaggaatgagcacagggatcccatcgctggacaggatgctgtcaccgaaaggtctggtga

SEQ ID NO: 406302 - DNA, 75 bp, synthetic construct
  source 1..75: mol_type = other DNA
atgagaatgaccaggcacaaaaaacagattcttgaactctacaaacctgagtatcgcgattgggtgcgggtggag

SEQ ID NO: 406303 - DNA, 75 bp, synthetic construct
  source 1..75: mol_type = other DNA
ttccgaatatcagcgatatcacatagaggcaacacgaaggacgctaaacgctatggttcgtgataagttgctgga

SEQ ID NO: 406304 - DNA, 75 bp, synthetic construct
  source 1..75: mol_type = other DNA
tatggacgcagagggtcaggaaaaacacatttactgaaagccctttctgaggtggttatagatgaatttgaacaa

SEQ ID NO: 406305 - DNA, 75 bp, synthetic construct
  source 1..75: mol_type = other DNA
gtgcagacgatctgtttctctggcaacgcgaccttacttgcatctaacggctgcgaatctgcgctccttataccg

SEQ ID NO: 406306 - DNA, 75 bp, synthetic construct
  source 1..75: mol_type = other DNA
aaaaaatggcgcgccatatgaatcgttcaattgacgccatcccgaccgaggcgctacgccagttgatgtcgtggg

SEQ ID NO: 406307 - DNA, 75 bp, synthetic construct
  source 1..75: mol_type = other DNA
cgtgacggtgagggccggaatggtgcaattgacggcgaatgtatacgcatcaatgctacagatgtggtgctggtg

SEQ ID NO: 406308 - DNA, 75 bp, synthetic construct
  source 1..75: mol_type = other DNA
ggcgctcatcagcacggaaggggcaacagcgtggtgcgcagaatatgatgaatggggcaacctgctgaatgaaga

SEQ ID NO: 406309 - DNA, 75 bp, synthetic construct
  source 1..75: mol_type = other DNA
cactgtattgcaggaagtgggtaaaaccaaatctgacttgtacgccacaggatgattcccagtatccagggatgg

SEQ ID NO: 406310 - DNA, 75 bp, synthetic construct
  source 1..75: mol_type = other DNA
tggctgacgtatggcagcggttacctggcgggaatgaagctgggcgggacgccgctggtcgagtatacgcgggac

SEQ ID NO: 406311 - DNA, 75 bp, synthetic construct
  source 1..75: mol_type = other DNA
cttttcctgataccctgccgggttacaccgaatatggccgggacaacggcatccgtctgtctgccgtgtggctga

SEQ ID NO: 406312 - DNA, 75 bp, synthetic construct
  source 1..75: mol_type = other DNA
gaacagaccggcaggaccctgtgatgtttatgcacaaattcttaaatatcacagccccacaattattcagtttct

SEQ ID NO: 406313 - DNA, 75 bp, synthetic construct
  source 1..75: mol_type = other DNA
ggtgcattacaggtatgatgagaaaggccggctgaccggtgagcgtcagacggtgcatcacccgcagacggaagc

SEQ ID NO: 406314 - DNA, 75 bp, synthetic construct
  source 1..75: mol_type = other DNA
gcaggcattatggatggagaatatgccgcagcggcggatcgtgggtggttgcgtcagcatcatggatttgatgct

SEQ ID NO: 406315 - DNA, 75 bp, synthetic construct
  source 1..75: mol_type = other DNA
atttaagtaatccgtatgcagtaataaaaaaaagcaaaggggtaattttatgctctgaaagtgaggggttcccta

SEQ ID NO: 406316 - DNA, 75 bp, synthetic construct
  source 1..75: mol_type = other DNA
ctgcactatgcctttgatatgtggatgcaacgtcagtttcccggcgttcccttcgaaaggtacgccgatgatgtt

SEQ ID NO: 406317 - DNA, 75 bp, synthetic construct
  source 1..75: mol_type = other DNA
gactgctcgggctaccagacccgctatgagtatgaccgcttcggccagatgacggcggtccaccgcgaggaaggc

SEQ ID NO: 406318 - DNA, 75 bp, synthetic construct
  source 1..75: mol_type = other DNA
accaacagcgcacagggaccgtggtggatactggggtggtcagagcgggtgccgggtgctgaggacgtactgcca

SEQ ID NO: 406319 - DNA, 75 bp, synthetic construct
  source 1..75: mol_type = other DNA
tgctggcagcgttaaaaggatgcaaagcagtgatgacggttgaagagcataacgtcaatggcggccttggtagcc

SEQ ID NO: 406320 - DNA, 75 bp, synthetic construct
  source 1..75: mol_type = other DNA
atgatccaaaaattcccgaaaccgatcatttcgatggtggaaggtagtgtttggggtggcgcatttgaaatgatc

SEQ ID NO: 406321 - DNA, 75 bp, synthetic construct
  source 1..75: mol_type = other DNA
cacgacccggaatacccggagaatctgcccgccgcccccctggtacgctacgactggacggcacgcggtgagctg

SEQ ID NO: 406322 - DNA, 75 bp, synthetic construct
  source 1..75: mol_type = other DNA
gctgcagaaagcgcagcgccgcagcctggcggagaagctgcagcaggaagggagcgaggacgggcacggcgtggt

SEQ ID NO: 406323 - DNA, 75 bp, synthetic construct
  source 1..75: mol_type = other DNA
aagcacagtgccgtcttgaagtggattttaaggacgaggattctctgctgaccttgcttggtgaagcggcagagg

SEQ ID NO: 406324 - DNA, 75 bp, synthetic construct
  source 1..75: mol_type = other DNA
ggtcgagagccgctatctctacgacccgctgggccgccggacggggaaacgggtgtggcgtcgcgagcgtgacct

SEQ ID NO: 406325 - DNA, 75 bp, synthetic construct
  source 1..75: mol_type = other DNA
actgctctggcagcatgagacgcaacacacttacaacgagcaggggctggcaaaccgctttcaggcagacagcct

SEQ ID NO: 406326 - DNA, 75 bp, synthetic construct
  source 1..75: mol_type = other DNA
ggtgcattacggttataaccgtaagggacgtctcacaggcgagcgccagacggtacatcacccggagacggggga

SEQ ID NO: 406327 - DNA, 75 bp, synthetic construct
  source 1..75: mol_type = other DNA
aaaatgcggtatcgatgagatttggcgcgcaattatcgatttcaaaaccgcacttaccgccagcggtcgtttgca

SEQ ID NO: 406328 - DNA, 75 bp, synthetic construct
  source 1..75: mol_type = other DNA
ggtcgatcccagcagcccggtcactggcggtagcattctcggggataaaacccgcatgaatgacctggcgcgtgc

SEQ ID NO: 406329 - DNA, 75 bp, synthetic construct
  source 1..75: mol_type = other DNA
atgacctggcgcgtgccgaggcggcgtttattcgcccggtaccatcctccggccatctgggcggtgccagtcagc

SEQ ID NO: 406330 - DNA, 75 bp, synthetic construct
  source 1..75: mol_type = other DNA
ccgaagccgagacattgcaggatatggtcactggtgggttaagcattgacgctattctcaatgtactggatgcca

SEQ ID NO: 406331 - DNA, 75 bp, synthetic construct
  source 1..75: mol_type = other DNA
gacgggaaatttacccagcctttctctctggtgaaccagccagatgccgttggcgcgccgattaacgccggtgat

SEQ ID NO: 406332 - DNA, 75 bp, synthetic construct
  source 1..75: mol_type = other DNA
aagaagtgctgcaccacctgttcgcgaatgaagatttcgatcgctattaccgccagacgctattagcagtcaaaa

SEQ ID NO: 406333 - DNA, 75 bp, synthetic construct
  source 1..75: mol_type = other DNA
aacacccgtaccgaggtgagcaccctctgcatcagccagttccgctacagtgcacaaatccgcccttcttccgtg

SEQ ID NO: 406334 - DNA, 75 bp, synthetic construct
  source 1..75: mol_type = other DNA
ccgccgccacggcagcggcacttacctggtgcgcaaagatgtgctgcatcaaaccgccagcctgaccggactggt

SEQ ID NO: 406335 - DNA, 75 bp, synthetic construct
  source 1..75: mol_type = other DNA
gccagttacggattcaaatcaacgagcagatctacttctcccgtcgcgttcgttttgtggaagggaaaccgctga

SEQ ID NO: 406336 - DNA, 75 bp, synthetic construct
  source 1..75: mol_type = other DNA
gggagtttttgaattattcagtaatgttcagaaatgccaacgaataccaggtggagtaccatttacggcgactcc

SEQ ID NO: 406337 - DNA, 75 bp, synthetic construct
  source 1..75: mol_type = other DNA
tggagcgtgtctgtgccgcgctgcgggagctgaacaaacacagggatatcatgcagcaaatcacgaccggaggcg

SEQ ID NO: 406338 - DNA, 75 bp, synthetic construct
  source 1..75: mol_type = other DNA
accgttactatagctcaaactattacgggacacagcctaataaaatcatggctcctcacaaagaaaacatcattg

SEQ ID NO: 406339 - DNA, 75 bp, synthetic construct
  source 1..75: mol_type = other DNA
gggagtttttgaattattcagtgatgttcagaaatgccagcgaataccaggtggagtaccatttacggcgactcc

SEQ ID NO: 406340 - DNA, 75 bp, synthetic construct
  source 1..75: mol_type = other DNA
tggctatgactctttcgacagtgttaataaagcttatgagaacataaaaaaagttattgagattagaagaggggg

SEQ ID NO: 406341 - DNA, 75 bp, synthetic construct
  source 1..75: mol_type = other DNA
agactttctagataatccatcagaaagttcaatagtcgattttatttataaatcaattctggaatatatcaataa

SEQ ID NO: 406342 - DNA, 75 bp, synthetic construct
  source 1..75: mol_type = other DNA
catgtgactgaagatggtttgacaacttatgctgattatatactaaaaacagctaatattgctcttgttgttgaa

SEQ ID NO: 406343 - DNA, 75 bp, synthetic construct
  source 1..75: mol_type = other DNA
cacggctaacggtactgccacagcaaacggcaaggccacgcatctggacggcaacgtcaccctgaatgcgtcaaa

SEQ ID NO: 406344 - DNA, 75 bp, synthetic construct
  source 1..75: mol_type = other DNA
ggtcagtgcgaatacctatgctgaccagaaagaaaccgacatcaataaccgtactgacggattactggcgaccga

SEQ ID NO: 406345 - DNA, 75 bp, synthetic construct
  source 1..75: mol_type = other DNA
catcagagtcaaacagtctggttgtgggtaacagtaattccgtggagggagggtataacaacattgttattggta

SEQ ID NO: 406346 - DNA, 75 bp, synthetic construct
  source 1..75: mol_type = other DNA
attggtattgttgcagccgggctttccagccagttcccaaatttgctgttaacgccctggctgctggctgactgg

SEQ ID NO: 406347 - DNA, 75 bp, synthetic construct
  source 1..75: mol_type = other DNA
gttattgggtactactgggtaattgaatacagacagcgtaaggggttgcatgtgcatgccatgatttatcttgat

SEQ ID NO: 406348 - DNA, 75 bp, synthetic construct
  source 1..75: mol_type = other DNA
atgtcgccttccgtaagttcggatttgccggtaccccatgggtgctgtccgacaccggctggcatctgcctacag

SEQ ID NO: 406349 - DNA, 75 bp, synthetic construct
  source 1..75: mol_type = other DNA
tgcgggcagaggcccgcataacgcgactttttgcgcagccataccccgcagtgttgtacatcggtaatgaatgtc

SEQ ID NO: 406350 - DNA, 75 bp, synthetic construct
  source 1..75: mol_type = other DNA
atgtggttaaaaacgtacttaccgcatttaaagtcgcgctggtatcgctggaagtattgatgatactttgtcgat

SEQ ID NO: 406351 - DNA, 75 bp, synthetic construct
  source 1..75: mol_type = other DNA
tgctcatctgtccccgttgggatgggagcacataaatctgagtggggattacgtctggcgaacaaatctcaagct

SEQ ID NO: 406352 - DNA, 75 bp, synthetic construct
  source 1..75: mol_type = other DNA
ttacttaaccgccgcttcctgccgactatcttcaaacgcgaaattgcccatgccaacctgaccggtacaccgctg

SEQ ID NO: 406353 - DNA, 75 bp, synthetic construct
  source 1..75: mol_type = other DNA
atgcttctcatcttggaccttcatgggggacagagtataaagtcaagactaatggaaagattgaggtttcgggtg

SEQ ID NO: 406354 - DNA, 75 bp, synthetic construct
  source 1..75: mol_type = other DNA
ttgactttgccagaggattactgcctatcaaaatttgaagaacgattactagactcgctaaatatacgagccatc

SEQ ID NO: 406355 - DNA, 75 bp, synthetic construct
  source 1..75: mol_type = other DNA
atatttctaatgaattgagaattgagtttggtgttatccctccatgtttattacccattggtaatcgtactttat

SEQ ID NO: 406356 - DNA, 75 bp, synthetic construct
  source 1..75: mol_type = other DNA
tggcggttcttattgccagtccgatagtaaacgctgcgggtatacccgtatttgatgcaacagccagactggaga

SEQ ID NO: 406357 - DNA, 75 bp, synthetic construct
  source 1..75: mol_type = other DNA
ggctgccgctggctcagaaggccagcaaaaacatgactctcgataccgggttccagaccgatcagccagcggtcg

SEQ ID NO: 406358 - DNA, 75 bp, synthetic construct
  source 1..75: mol_type = other DNA
atgccggtgcaaaccagtatcgacggcggggtggtgacctggacagggacggttatcgcgaaccacctttacaac

SEQ ID NO: 406359 - DNA, 75 bp, synthetic construct
  source 1..75: mol_type = other DNA
tctggcacgccatcatcgacttcaaaaccgcgctaactgccagtggtcgtttacaacaagtgcggcaacaacaat

SEQ ID NO: 406360 - DNA, 75 bp, synthetic construct
  source 1..75: mol_type = other DNA
aaactatttgaaagtgatagtaaagttaaagatatcgtcgatgatatgtctaatcatgatgtggagagcgaaaaa

SEQ ID NO: 406361 - DNA, 75 bp, synthetic construct
  source 1..75: mol_type = other DNA
gcagacgaatctttcaatgaaaatactgataacatacaaacagtaaaagatttgttaacgcaattaactgatggc

SEQ ID NO: 406362 - DNA, 75 bp, synthetic construct
  source 1..75: mol_type = other DNA
agaacatgactgagggtctggagcttaaagtccctcagcgtaaagcctcaggggcccgtaacgccttctctacgg

SEQ ID NO: 406363 - DNA, 75 bp, synthetic construct
  source 1..75: mol_type = other DNA
cgcttgcgcaggcgcgggaagagttcgccgccaacacgcttaagaatccttcgtttgactggtcagtgtatgacc

SEQ ID NO: 406364 - DNA, 75 bp, synthetic construct
  source 1..75: mol_type = other DNA
accggcggtactgatttttacgccgatatttttaccggttgtcaccgaactgggcatggacccgattcactttgg

SEQ ID NO: 406365 - DNA, 75 bp, synthetic construct
  source 1..75: mol_type = other DNA
cgataaagttggtgtctggcaaatcgtggatggtgatctgcatttctccccggtcaagctcggcacttccgacct

SEQ ID NO: 406366 - DNA, 75 bp, synthetic construct
  source 1..75: mol_type = other DNA
cccggatattacctttactatcccagccgtaagcagcatccgcctgcttttgcgctgttgattgatgcacttcgc

SEQ ID NO: 406367 - DNA, 75 bp, synthetic construct
  source 1..75: mol_type = other DNA
atctgattcccagtggcaggttcatcacatcatacggcgagtcgatggagggagcaactgcctctccaatttgat

SEQ ID NO: 406368 - DNA, 75 bp, synthetic construct
  source 1..75: mol_type = other DNA
caacccacatcctgcggcatacattcgcaagccatttcatgatgaatgggggcaatataatcgcactgcaacaga

SEQ ID NO: 406369 - DNA, 75 bp, synthetic construct
  source 1..75: mol_type = other DNA
tgttccccaggatgaagtgcttagcgtcgaagacgaagcgcaggttgatgaagctctggcatggcttaatgatta

SEQ ID NO: 406370 - DNA, 75 bp, synthetic construct
  source 1..75: mol_type = other DNA
gaacccgagcccgcctcagacaactggacgggttatggtgggacagtcggcgtgtactgccggataaatggttgt

SEQ ID NO: 406371 - DNA, 75 bp, synthetic construct
  source 1..75: mol_type = other DNA
gataaaaccgattgtctggatattgttaccatcaataataaatatctcattaagatggcggctgttttcaagtgg

SEQ ID NO: 406372 - DNA, 75 bp, synthetic construct
  source 1..75: mol_type = other DNA
agctgaaagtcccgcagcgtaaagcctccgacgctcgtgatgctttcagtcctgagcaggtagggcaactactgg

SEQ ID NO: 406373 - DNA, 75 bp, synthetic construct
  source 1..75: mol_type = other DNA
accgttacgcgaaagaggtcgaggtggaaacgctgaaagaaaaattagcggagtcattgtcagtaaaaaaaatag

SEQ ID NO: 406374 - DNA, 75 bp, synthetic construct
  source 1..75: mol_type = other DNA
tgggcggtacgcaatgacctgatagctaagaacctgacagaaggtcttgaactgaaagtcccgcagcgtaaagcc

SEQ ID NO: 406375 - DNA, 75 bp, synthetic construct
  source 1..75: mol_type = other DNA
tcacgccactcatcagggttgaaaccgccaccggtgagctggcgaaaacgcagcgccgcagcctggcggataccc

SEQ ID NO: 406376 - DNA, 75 bp, synthetic construct
  source 1..75: mol_type = other DNA
tgagtcagggttgtggagtgatgacgcgatagagcgacagctgagccattcagaacgtaataacgtgcgtgcagc

SEQ ID NO: 406377 - DNA, 75 bp, synthetic construct
  source 1..75: mol_type = other DNA
atgaaatttgccctatatgcggatgggaagatgaccctgttcaatcggctgatccagatttttctggcggggcaa

SEQ ID NO: 406378 - DNA, 75 bp, synthetic construct
  source 1..75: mol_type = other DNA
aacttccagcagtctactatctctaccagcgtaacggcgtctactacttccgtcttagggtcagacaatcaaaca

SEQ ID NO: 406379 - DNA, 75 bp, synthetic construct
  source 1..75: mol_type = other DNA
ccgtttatatccatatcaatgaggacgacagtagcttacccggtaagagtatcaagaacgcccacagtgatcgct

SEQ ID NO: 406380 - DNA, 75 bp, synthetic construct
  source 1..75: mol_type = other DNA
cgtagcggcttagcgtttcactcgtttagacatacagttgcgacccagttaaaacaacatggggtcgagttggcg

SEQ ID NO: 406381 - DNA, 75 bp, synthetic construct
  source 1..75: mol_type = other DNA
attggctgattttatgtcactcgtggaagaccgtagaaagactgtgggcgataatgctatggtattcgatggcct

SEQ ID NO: 406382 - DNA, 75 bp, synthetic construct
  source 1..75: mol_type = other DNA
atcactacggaccaaggatagacgtaccgctatggctcactcccggcacatcaagtcagcacttaaagcaataca

SEQ ID NO: 406383 - DNA, 75 bp, synthetic construct
  source 1..75: mol_type = other DNA
atggctcactcaaggcacataaaggcagcactcaaggcaatacacgcagacagacccaacgctacctatgaggaa

SEQ ID NO: 406384 - DNA, 75 bp, synthetic construct
  source 1..75: mol_type = other DNA
caaagttgacaatgagatctggctggctttatggcgttgggctgttcggcgtcatcccaataagggaaagaagtg

SEQ ID NO: 406385 - DNA, 75 bp, synthetic construct
  source 1..75: mol_type = other DNA
aggatgccagacggggacaccgccgcgcgcgcgggtattcccgacagtgggacaaataccgcgccctgtacctga

SEQ ID NO: 406386 - DNA, 75 bp, synthetic construct
  source 1..75: mol_type = other DNA
gacgaagcagcagcgtaaagccggtaagttccgcgagcaggaagaagcagcacgtcatcgcaccgactggatcta

SEQ ID NO: 406387 - DNA, 75 bp, synthetic construct
  source 1..75: mol_type = other DNA
cgggcgtctcacgcaggaaaccgcccgcaacggcgatgtcacccgctacagttatgataatccgcacagtgaatt

SEQ ID NO: 406388 - DNA, 75 bp, synthetic construct
  source 1..75: mol_type = other DNA
gcgaccatcgcggcctgccgctggcgcttgtcagcacggaaggggcaacagaatggtgcgcagaatacgatgaat

SEQ ID NO: 406389 - DNA, 75 bp, synthetic construct
  source 1..75: mol_type = other DNA
ggcacagtcaatatttccaataatggactgattaataacaaagaatattcattggtgggcgttcaggacggttcc

SEQ ID NO: 406390 - DNA, 75 bp, synthetic construct
  source 1..75: mol_type = other DNA
gactaattaataacaaagaatattcattggtgggcgttcaggacggttcccacggtgtcgtcaacgtgaccgata

SEQ ID NO: 406391 - DNA, 75 bp, synthetic construct
  source 1..75: mol_type = other DNA
ccacggacccggcgggcaaccggctgccggacccggagctgcacccggacagtacactcacagtgtggccggata

SEQ ID NO: 406392 - DNA, 75 bp, synthetic construct
  source 1..75: mol_type = other DNA
gccgttacgggcagttactgactttcaccgactgctcaggctaccagacccgttatgaatacgaccgctttggtc

SEQ ID NO: 406393 - DNA, 75 bp, synthetic construct
  source 1..75: mol_type = other DNA
agcaggaaggaagcgaggacggccacggtgtggtgttcccggcagaacttgtgaggatgctggacaggctggagg

SEQ ID NO: 406394 - DNA, 75 bp, synthetic construct
  source 1..75: mol_type = other DNA
aaattcgatagcaccgatgatgcggcattcgaagcattaaaaaaaacaaatggacattcaatatgccaaggtgtt

SEQ ID NO: 406395 - DNA, 75 bp, synthetic construct
  source 1..75: mol_type = other DNA
ctggagggggaaatccgggcaaactgcgtgagcagtgaaagccgccagtggcttgcacagtgcgggctgacggtg

SEQ ID NO: 406396 - DNA, 75 bp, synthetic construct
  source 1..75: mol_type = other DNA
gcgcagcggcgaagcctggcggagaagttacagcaggaagggagtaaagatggtcacggcgtggtgttcccgcct

SEQ ID NO: 406397 - DNA, 75 bp, synthetic construct
  source 1..75: mol_type = other DNA
aagaaaagattttgtttattagatgattgtgttatttctatacgttcggcaagagctgaagatagaatagaaaaa

SEQ ID NO: 406398 - DNA, 75 bp, synthetic construct
  source 1..75: mol_type = other DNA
ttattttaatccacggtttttaagcaatgaccttgctgaatctgtcgatttatctgcctttactaagggacgcta

SEQ ID NO: 406399 - DNA, 75 bp, synthetic construct
  source 1..75: mol_type = other DNA
atggtgggcgcagcgaaacggaattaaccaccgcccaactgacgctgatcaccgatgaaggatcggtcaatgaga

SEQ ID NO: 406400 - DNA, 75 bp, synthetic construct
  source 1..75: mol_type = other DNA
gcgcctgccacaactaacggtatctacaatacgctgaccaccagtgaactttccggcagcggtaatttctacctg

SEQ ID NO: 406401 - DNA, 75 bp, synthetic construct
  source 1..75: mol_type = other DNA
tgctgtccgcctgcgtacttctgactggctgtcaggggcagcaaaaactgctgcagcgggatgcggctgttccgg

SEQ ID NO: 406402 - DNA, 75 bp, synthetic construct
  source 1..75: mol_type = other DNA
tttttatgtccaaaaatattttttttaaccaatttattattaatacaataaaagtaaacacaaaagatatggtga

SEQ ID NO: 406403 - DNA, 75 bp, synthetic construct
  source 1..75: mol_type = other DNA
cggttacaccacaacaaataaacagtcgagttctgggttcattgttgtatccataattattttccttacatattg

SEQ ID NO: 406404 - DNA, 75 bp, synthetic construct
  source 1..75: mol_type = other DNA
gataatgctggcgtaatgtatttagaaaaacacacaaaaaaaagtgtattccatcttggaattttttccagaata

SEQ ID NO: 406405 - DNA, 75 bp, synthetic construct
  source 1..75: mol_type = other DNA
tggcatgtcaaaaatagataccaatgcttgtagaagcatgtcaagaaaaataatgacaacagaggtgaataaaac

SEQ ID NO: 406406 - DNA, 75 bp, synthetic construct
  source 1..75: mol_type = other DNA
gtgggttttaaacatacagaagaaaaagaaataataaaaataaataatattaggattcataaatacactctgtta

SEQ ID NO: 406407 - DNA, 75 bp, synthetic construct
  source 1..75: mol_type = other DNA
gtgaagctgaaccgctttgaaagtaacgtagccggtaaaatgagcagcggtggagccgccaacggcagttatcgc

SEQ ID NO: 406408 - DNA, 75 bp, synthetic construct
  source 1..75: mol_type = other DNA
aatatgattgggatttctagtgcatcttattttattaggattttcaataaacattttggcgttacgccgaagcag

SEQ ID NO: 406409 - DNA, 75 bp, synthetic construct
  source 1..75: mol_type = other DNA
aatgattcataagtatactatattatatacatcgaattgtattttggatatatcttttggtgaagataagattac

SEQ ID NO: 406410 - DNA, 75 bp, synthetic construct
  source 1..75: mol_type = other DNA
aacatggaagcgacgtttaatgtcggccaagaagtacccgtgttgtcaggttcacagaccacatcaggggacaat

SEQ ID NO: 406411 - DNA, 75 bp, synthetic construct
  source 1..75: mol_type = other DNA
ctgctcctgacaggggctcccgatgtcattcgcgaccttgaaaacgtgattgcacagttggatattcgccgtcca

SEQ ID NO: 406412 - DNA, 75 bp, synthetic construct
  source 1..75: mol_type = other DNA
aaggtggattgattgctaatgagataacgtcaaaaggttttgcttttttgagtgagattggcgctgaaaaaaatt

SEQ ID NO: 406413 - DNA, 75 bp, synthetic construct
  source 1..75: mol_type = other DNA
tgtaattatgactcagaaatgaaagttttaaccagtcatcacggaataataagaaatgaagaaaatgaatgttat

SEQ ID NO: 406414 - DNA, 75 bp, synthetic construct
  source 1..75: mol_type = other DNA
gcgctatctctgctctcattgccgtaaaacatggcaattacagttcacttacaccgcctctcagcccggtacgca

SEQ ID NO: 406415 - DNA, 75 bp, synthetic construct
  source 1..75: mol_type = other DNA
cgactggcggtaaatcctgtcgaggaagcagatgatgaagaaaaagatgccgccgctgaacatgaaatactgcgt

SEQ ID NO: 406416 - DNA, 75 bp, synthetic construct
  source 1..75: mol_type = other DNA
caagatcaggctgctgagaataaaagccaagggctaccgcaaccgggagcgctttaagctgggagtgatgttcca

SEQ ID NO: 406417 - DNA, 75 bp, synthetic construct
  source 1..75: mol_type = other DNA
gagcttcacgccgctcatccgggtcgaaacagacaacggtgaacgggagaaagcgcagcgccgcagcctggcgga

SEQ ID NO: 406418 - DNA, 75 bp, synthetic construct
  source 1..75: mol_type = other DNA
agcggttacctggcgggcatgaagctgggcgggacgccgctggtcgagtatacgcgggacaggctgcaccgtgag

SEQ ID NO: 406419 - DNA, 75 bp, synthetic construct
  source 1..75: mol_type = other DNA
tactgatgatatctgtgttcctgaaaggtttgagaaacaaataagttattttcagaaaaatccaagtacgattat

SEQ ID NO: 406420 - DNA, 75 bp, synthetic construct
  source 1..75: mol_type = other DNA
atgcaattgagcagcagtgaaccttgcgtggtgatcctgaccgaaaaagaggtagaggtaagcgtcaataaccat

SEQ ID NO: 406421 - DNA, 75 bp, synthetic construct
  source 1..75: mol_type = other DNA
atactattaaatcagtcaggaaagttccattatccgaggctcaaattcgtgagtgttgtaaaataaagaacccat

SEQ ID NO: 406422 - DNA, 75 bp, synthetic construct
  source 1..75: mol_type = other DNA
gtctgattgaccaggttttaccgcaaaactggatcccgatgttcagcaaccacgcggatatgatgctgacccaaa

SEQ ID NO: 406423 - DNA, 75 bp, synthetic construct
  source 1..75: mol_type = other DNA
cctgaacgcctgccatgcgggagccattcatctctccggcccaatccctaaacttcacgacctgtacggcgacct

SEQ ID NO: 406424 - DNA, 75 bp, synthetic construct
  source 1..75: mol_type = other DNA
cggggaacacggggcgatcaattgagccgtacttttctgaaacggtttatccccgctggcgcggggaacacacta

SEQ ID NO: 406425 - DNA, 75 bp, synthetic construct
  source 1..75: mol_type = other DNA
tggccgaaagttgttcttgaaaagcgaggcgctgctggcgcccctcgccccccaagcggtgaaacgcgcccggtt

SEQ ID NO: 406426 - DNA, 75 bp, synthetic construct
  source 1..75: mol_type = other DNA
caaaaggatatatggctattaaaaggatgggtgacagatattgatggaaacaaaactgataaatttataatcaca

SEQ ID NO: 406427 - DNA, 75 bp, synthetic construct
  source 1..75: mol_type = other DNA
acacaatatacctgttggtcacactggcgcggggaatggtgtatcagccggttataacgctgcgttaggtactgg

SEQ ID NO: 406428 - DNA, 75 bp, synthetic construct
  source 1..75: mol_type = other DNA
ttaaaaatgcgtttcatggtcgcacgctgtttactgtcagtgcgggtgggcaggccagcctattcacaggatttt

SEQ ID NO: 406429 - DNA, 75 bp, synthetic construct
  source 1..75: mol_type = other DNA
gctggcgcggggaacacctgctgctcgagctggtggagtgctgctatagcggtttatccccgctggcgcggggaa

SEQ ID NO: 406430 - DNA, 75 bp, synthetic construct
  source 1..75: mol_type = other DNA
gaatacacaccggcgcgaaaagttcatttttaccactgcgaccaccggggcctgccgctggcgcttatcagtgaa

SEQ ID NO: 406431 - DNA, 75 bp, synthetic construct
  source 1..75: mol_type = other DNA
gtgaataacttgtacgaactaaaacattttgcgaaaggtgacaggattcatgtgcaagcccaacaaatctggtta

SEQ ID NO: 406432 - DNA, 75 bp, synthetic construct
  source 1..75: mol_type = other DNA
gggaactcggcacatgcctgatcatatgtgtagcaacggtcggtttatccccgctggcgcggggaactcacgaac

SEQ ID NO: 406433 - DNA, 75 bp, synthetic construct
  source 1..75: mol_type = other DNA
agccgtttttcgttaagcgtggaaggtgatgaccttttgttcacgctacaactggagacgccgcatgagggttaa

SEQ ID NO: 406434 - DNA, 75 bp, synthetic construct
  source 1..75: mol_type = other DNA
acgcaatgtcagcgtgagccgtttttcgttaagcgtggaaggtgatgaacttttgttcacgctacaactggagac

SEQ ID NO: 406435 - DNA, 75 bp, synthetic construct
  source 1..75: mol_type = other DNA
agctctcgatacaactataatggatcttgccgatgaaatttcgtattcgctgcacgatttggaggatgctatttc

SEQ ID NO: 406436 - DNA, 75 bp, synthetic construct
  source 1..75: mol_type = other DNA
cgacaacatgaaagcgcgctgttggtacgaacaccatttcccgctgctgctcgataaaaaagaaggccagatacc

SEQ ID NO: 406437 - DNA, 75 bp, synthetic construct
  source 1..75: mol_type = other DNA
actttattaagcgtggcgtgactgaacacgtatgccctcattgttccgcgttagctctgttctccctacagttaa

SEQ ID NO: 406438 - DNA, 75 bp, synthetic construct
  source 1..75: mol_type = other DNA
gcacacgtcagttagatgtggcggtgcagcgtattacaacgcttcgcgaaaacatgaatacggtctacgaacaga

SEQ ID NO: 406439 - DNA, 75 bp, synthetic construct
  source 1..75: mol_type = other DNA
agctgattcaacaatgcgggcaaatggctgatcgagcattggaactggctaacgatgggaagctaaaagacgcgg

SEQ ID NO: 406440 - DNA, 75 bp, synthetic construct
  source 1..75: mol_type = other DNA
cagggaattacacgctgtcgctgttcaaagtcgggatgaaggctatttatttctgcaacaacgtcccttacgcgt

SEQ ID NO: 406441 - DNA, 75 bp, synthetic construct
  source 1..75: mol_type = other DNA
atgcgtgatcatttaatgacagacaaaatttggctttgtactaatgttctgcgcacagtaataacccgcattgag

SEQ ID NO: 406442 - DNA, 75 bp, synthetic construct
  source 1..75: mol_type = other DNA
tccggcagagcagtggcagtatgatgatcacggttggtttactttcttcagccattttagtgaaggccaccgtgt

SEQ ID NO: 406443 - DNA, 75 bp, synthetic construct
  source 1..75: mol_type = other DNA
gttgctggcgttcaccgactgctcgggctaccagacccgctatgaatacgaccgcttcggccagatgacggcggt

SEQ ID NO: 406444 - DNA, 75 bp, synthetic construct
  source 1..75: mol_type = other DNA
ggacgcctgcaccggtgggcgttttcggccccggctggaaagcgccttctgatatccgcttacagctacgtgatg

SEQ ID NO: 406445 - DNA, 75 bp, synthetic construct
  source 1..75: mol_type = other DNA
attggtggtgggataaatgcggctatcacatattctgagaccaagtctttacctacatcgggagtcagcaattca

SEQ ID NO: 406446 - DNA, 75 bp, synthetic construct
  source 1..75: mol_type = other DNA
ctctcagcctcagcgttccccgacacactgcccggtacggaatacggcactgacagcggtatccgtctttcggcg

SEQ ID NO: 406447 - DNA, 75 bp, synthetic construct
  source 1..75: mol_type = other DNA
ggcaggcctgagttaccgctaccagtatgagcaggaccgcatcaccgtcacggacagcctgaaccggcgtgaggt

SEQ ID NO: 406448 - DNA, 75 bp, synthetic construct
  source 1..75: mol_type = other DNA
cgacgcttgcagagggatatatcagcgtcgatacgctggttgtcggcgcgggtgactacacctggaaaggccgta

SEQ ID NO: 406449 - DNA, 75 bp, synthetic construct
  source 1..75: mol_type = other DNA
tcaagctgtaggcgtcgggatggttaatgttgagggagaggactcggttctgacgacggagttattcgaaatagg

SEQ ID NO: 406450 - DNA, 75 bp, synthetic construct
  source 1..75: mol_type = other DNA
gcgtgtcgctaaaaccactatcggcggcaacctggagaatggcggcacggttcaaatgaatagcgaaggggggaa

SEQ ID NO: 406451 - DNA, 75 bp, synthetic construct
  source 1..75: mol_type = other DNA
tcaggcgggcagtaatggccaggttgtcgttgaaaagggcggtgagtggctaataaaaaataacgattcctcaat

SEQ ID NO: 406452 - DNA, 75 bp, synthetic construct
  source 1..75: mol_type = other DNA
atggtcggaaagatggccgacaaatatatactatctctttatgtactcacgaaccagtacaatagtacaataagc

SEQ ID NO: 406453 - DNA, 75 bp, synthetic construct
  source 1..75: mol_type = other DNA
tgaagcaaatcgaagagcttcactccccgctgggtctcagtaaggtggttctggtaagccctgatgatgtttgtg

SEQ ID NO: 406454 - DNA, 75 bp, synthetic construct
  source 1..75: mol_type = other DNA
ttgtgaccaatggcctgaatgaactgagcaaagcagccggtcgcggctttacctgtatcactcgaggattcgcac

SEQ ID NO: 406455 - DNA, 75 bp, synthetic construct
  source 1..75: mol_type = other DNA
tatcaccaatgcgacgaaagtggagtttggtcttggcgaaggcgtttttgtctttaatcataccaataacagtga

SEQ ID NO: 406456 - DNA, 75 bp, synthetic construct
  source 1..75: mol_type = other DNA
acattacgtaccgatgcggatggtgcacttggcaacacccgggaactgaacatcagcaacgcggccatcgtcgat

SEQ ID NO: 406457 - DNA, 75 bp, synthetic construct
  source 1..75: mol_type = other DNA
cttaacaacgattccgcggcgtatcagggtacgacggatatcgtgggggggaaattgctttcggttccgactctg

SEQ ID NO: 406458 - DNA, 75 bp, synthetic construct
  source 1..75: mol_type = other DNA
atgtctggaaatataggggcaaatccaagcggcacgctgaatgtcgaaggtggagaagtttacttaggtgttttt

SEQ ID NO: 406459 - DNA, 75 bp, synthetic construct
  source 1..75: mol_type = other DNA
agccgcagtatacagattcactgcattctcagggttcggcaagcagtatgtggatgcgtcatgtcggggggcacg

SEQ ID NO: 406460 - DNA, 75 bp, synthetic construct
  source 1..75: mol_type = other DNA
ctggtgcaagtctggaagttgataatgatcagattaccaatattgatactgatgttgcttatgatgcctacctgg

SEQ ID NO: 406461 - DNA, 75 bp, synthetic construct
  source 1..75: mol_type = other DNA
cgaatggtgcacatgggctatacagcaagatggtctgcaagaaaacctgcaagaaactctgaaagaaacccagca

SEQ ID NO: 406462 - DNA, 75 bp, synthetic construct
  source 1..75: mol_type = other DNA
gatgccccccagaggatcattgacctcagtaacgcggacaaagtgaaaatacagatggaaaacaatattaccatc

SEQ ID NO: 406463 - DNA, 75 bp, synthetic construct
  source 1..75: mol_type = other DNA
atcctgtctgtttctatgaccccaaatataaaataatggcaaatcatcatgggataactttcgacatacaacgcg

SEQ ID NO: 406464 - DNA, 75 bp, synthetic construct
  source 1..75: mol_type = other DNA
tattcgccccatcttcctataacacaggcgtacacccgtcagggcggcgcttactgacggtggaattcaagaatc

SEQ ID NO: 406465 - DNA, 75 bp, synthetic construct
  source 1..75: mol_type = other DNA
cgttttgatcttgttaccaaaggtgcagcccccgaaactgatgatactgaagtgctgtgaaaactatattatctg

SEQ ID NO: 406466 - DNA, 75 bp, synthetic construct
  source 1..75: mol_type = other DNA
ctggtgcttgactgtacagataacgtcttgatcttgttacccgaaggtgcagccctcaaaactgatggtactgaa

SEQ ID NO: 406467 - DNA, 75 bp, synthetic construct
  source 1..75: mol_type = other DNA
atcacattggctatgactcaggtgcagaatcgcaatacgaaagcgatgtagaggctatccgcgccgctggaatca

SEQ ID NO: 406468 - DNA, 75 bp, synthetic construct
  source 1..75: mol_type = other DNA
atagagaattgcactatagtaaaaatgcaaaagaactaatcgagatgctttacgttaatataaaccgattacaga

SEQ ID NO: 406469 - DNA, 75 bp, synthetic construct
  source 1..75: mol_type = other DNA
ttacgctgttgttacaggcatcggtcggtatgacgttgtggctggcgtttcttcatcgtcatattttaatcacct

SEQ ID NO: 406470 - DNA, 75 bp, synthetic construct
  source 1..75: mol_type = other DNA
agtctctattgatgaaatgaccaatgctctcgatccggtcgaattagcggcaattattaataagaagcatcatgc

SEQ ID NO: 406471 - DNA, 75 bp, synthetic construct
  source 1..75: mol_type = other DNA
tgcttaatatagaagatgaagttctcaacgttttattaagggaaaaaactaatgaggaactagacattaatgtta

SEQ ID NO: 406472 - DNA, 75 bp, synthetic construct
  source 1..75: mol_type = other DNA
atgagtcggtgtctcacccagcttaccgacaggacaatgctcggtgaggttgtggaaaaaatagatgattggcaa

SEQ ID NO: 406473 - DNA, 75 bp, synthetic construct
  source 1..75: mol_type = other DNA
ctgatgaaaattggtccaatgctagattttttatttatagattacgttgatacggaatggtgtttacgtgctttc

SEQ ID NO: 406474 - DNA, 75 bp, synthetic construct
  source 1..75: mol_type = other DNA
tcttcgatgaggtgacattagcttatcgtggtttaaccgatgaacaaaagaaagtagttgatgctttaggttctg

SEQ ID NO: 406475 - DNA, 75 bp, synthetic construct
  source 1..75: mol_type = other DNA
gccaccggcaaagaaaaaacggagttctggcacgtcagattgacgtatcactacaccccacataacgagctgacg

SEQ ID NO: 406476 - DNA, 75 bp, synthetic construct
  source 1..75: mol_type = other DNA
ccactactcgcagggcgttaagctcgatcaggaaaacagccgtatttttctgccgaaactgggctggatgcgcta

SEQ ID NO: 406477 - DNA, 75 bp, synthetic construct
  source 1..75: mol_type = other DNA
ggtcaggtcgctgatactacagcagataacgtaaataaaaagaatgggaaaccatcaaggtttaatcttgagaat

SEQ ID NO: 406478 - DNA, 75 bp, synthetic construct
  source 1..75: mol_type = other DNA
ggtatggacacaaccgaaacacaagcgcaatttgcttcatttggtgcatctgcaaagaacacgatgggtcttgaa

SEQ ID NO: 406479 - DNA, 75 bp, synthetic construct
  source 1..75: mol_type = other DNA
agtttatgagtacgatcccggtgagctgaagccacaagatgttgaagtgcaggtggattactgcgggtttgtcat

SEQ ID NO: 406480 - DNA, 75 bp, synthetic construct
  source 1..75: mol_type = other DNA
cagcggaacgcaaaatatcaaaagcggcgggaaagctgacacaacaattatatcctccgggagccgggtgatgct

SEQ ID NO: 406481 - DNA, 75 bp, synthetic construct
  source 1..75: mol_type = other DNA
tataggtgataacactatttctttaatcggttttaatgtaccaattcactctcctcttcgacgttattatcgaat

SEQ ID NO: 406482 - DNA, 75 bp, synthetic construct
  source 1..75: mol_type = other DNA
ctatgtagaacgccgcgaagggtacaactattttgctcttcagcgtgactacaacacgacgaagctcttcagcaa

SEQ ID NO: 406483 - DNA, 75 bp, synthetic construct
  source 1..75: mol_type = other DNA
atatgagagccgtgcgctggacactacgattgaaggcggaactcagtctctgaatagtaattcaacggcaaaaaa

SEQ ID NO: 406484 - DNA, 75 bp, synthetic construct
  source 1..75: mol_type = other DNA
gatgaacgaggtacaacaaataacactcatattatcaaccatggccagcagaatgtttatggtgggatatctaat

SEQ ID NO: 406485 - DNA, 75 bp, synthetic construct
  source 1..75: mol_type = other DNA
gttaccgataccgtgatggagcagattgtagaatggcaaaaccgaccactggatgctgtttaccccattgtttat

SEQ ID NO: 406486 - DNA, 75 bp, synthetic construct
  source 1..75: mol_type = other DNA
cggaattggttatggtctgcgccaaattctcgacgctcaaacagcgcagggagtagtgagtaaaaatatcgttat

SEQ ID NO: 406487 - DNA, 75 bp, synthetic construct
  source 1..75: mol_type = other DNA
cggaagccgcgtggaacagtccagccaggagatctggcaggcggtctgttcatgtattcgtaatgcgctcactct

SEQ ID NO: 406488 - DNA, 75 bp, synthetic construct
  source 1..75: mol_type = other DNA
tccctcgtttgtaccgggtgtctgggggccgtattacagtgcgatggttccaggtctgtggttagttgaaggcgg

SEQ ID NO: 406489 - DNA, 75 bp, synthetic construct
  source 1..75: mol_type = other DNA
tgtcacaaacgctggatgacgaagtctttaaaaagctgggagcgcacggcgtcttccgtagtggcgatgccattc

SEQ ID NO: 406490 - DNA, 75 bp, synthetic construct
  source 1..75: mol_type = other DNA
taatcctaaacccgacaaggcaatcataactaaaattagcgtagaagagggaatacccataacattcagtgtcca

SEQ ID NO: 406491 - DNA, 75 bp, synthetic construct
  source 1..75: mol_type = other DNA
catatacaaatgcagactactcaaaagttgtggctcaacttgtaagtcttattactaacattgaaacgataagtt

SEQ ID NO: 406492 - DNA, 75 bp, synthetic construct
  source 1..75: mol_type = other DNA
gagagcctgttatcagaattatagagttaaatccatatggtgatctgtatggttcaatatctaatagaactgata

SEQ ID NO: 406493 - DNA, 75 bp, synthetic construct
  source 1..75: mol_type = other DNA
tgaaatgttgcttcgatggaactatcctgccgcctcagacctgctcaggatgtatatccttaaagagcatggtgg

SEQ ID NO: 406494 - DNA, 75 bp, synthetic construct
  source 1..75: mol_type = other DNA
atgcaaattctaaacaaaatacttccacaggttgaattcgcgattcctcgcccatcatttgattcgttaagtcac

SEQ ID NO: 406495 - DNA, 75 bp, synthetic construct
  source 1..75: mol_type = other DNA
gtgttgatgtgggatcaggcagtgtccgcgccgggatttttgatctcaacggatctctgctatcccatgccacag

SEQ ID NO: 406496 - DNA, 75 bp, synthetic construct
  source 1..75: mol_type = other DNA
atggctgaactgacattccctctggtacacggtctgcgcaccggcaaaggtactaccgacgaaatgcttcacaag

SEQ ID NO: 406497 - DNA, 75 bp, synthetic construct
  source 1..75: mol_type = other DNA
tcagcaggccggacaaccattaccggtatggcttgccgaccaaatcctggcaaaaacggcgcaaccgtccgatgc

SEQ ID NO: 406498 - DNA, 75 bp, synthetic construct
  source 1..75: mol_type = other DNA
tcctcgtgatgtgaaagggatcaccgtcagaatagataatattaatggaaagaaaagcaactctaatttgtcaga

SEQ ID NO: 406499 - DNA, 75 bp, synthetic construct
  source 1..75: mol_type = other DNA
gtcagttcaatcccacactgtggctggctctgctgagtggtggcattaagcccagccagtttttctggcatatct

SEQ ID NO: 406500 - DNA, 75 bp, synthetic construct
  source 1..75: mol_type = other DNA
accgttcaggagctgggcgcagcggttattaccagcagaccaccactgactacgcgagtggtattgtccgacact

SEQ ID NO: 406501 - DNA, 75 bp, synthetic construct
  source 1..75: mol_type = other DNA
ttcaggaggcaatcgaccagacgcgggacacctttgctgctgatacgcaaaacctgagtgccggtgaaacacctg

SEQ ID NO: 406502 - DNA, 75 bp, synthetic construct
  source 1..75: mol_type = other DNA
cggttattccacaaagaccgttatcacaggcgacggtccactggaactgcgtactccgcgcgatcgtgacggtac

SEQ ID NO: 406503 - DNA, 75 bp, synthetic construct
  source 1..75: mol_type = other DNA
actggatttgtattgccacgtccggtaaggcagtggacggtcgcactattgagccgcaatggttgatcgatgcgg

SEQ ID NO: 406504 - DNA, 75 bp, synthetic construct
  source 1..75: mol_type = other DNA
gtggcagagctggcagaagaggtggaagccgccccggaagatgaggttaaggctgaagccttcagcgccgcgaaa

SEQ ID NO: 406505 - DNA, 75 bp, synthetic construct
  source 1..75: mol_type = other DNA
cagagggcaacgtggccggatccggacagcgggcagacattaactattaacgcgccgcaggtgccggaaccgctg

SEQ ID NO: 406506 - DNA, 75 bp, synthetic construct
  source 1..75: mol_type = other DNA
aatgaatttgggttatcacgctaatccacgtattgtcgggatctgcacagccattttcgttgccagcgtattgtg

SEQ ID NO: 406507 - DNA, 75 bp, synthetic construct
  source 1..75: mol_type = other DNA
taagctcccagcgcttacatgatatgttgaatcctacaaaagataccaattggaattccacgtatatctacaaat

SEQ ID NO: 406508 - DNA, 75 bp, synthetic construct
  source 1..75: mol_type = other DNA
actcccgcaagccggatatggcgcgagaaaaacttgtgcaacttcttggcgatgttccccggatagaactgttcg

SEQ ID NO: 406509 - DNA, 75 bp, synthetic construct
  source 1..75: mol_type = other DNA
aataaatcataaaaatcaactctatttaaggggagggtatttcggatatgttttccaagactcgcttataaacga

SEQ ID NO: 406510 - DNA, 75 bp, synthetic construct
  source 1..75: mol_type = other DNA
gcaatcaaataccacggaacgcagcaattacgggagcgtattgcaacaacagtcatttattcagaactggtttca

SEQ ID NO: 406511 - DNA, 75 bp, synthetic construct
  source 1..75: mol_type = other DNA
ccggacatgcgtacaacgaacaggggctggcaaaccgcgtcacgccggacagtctgccgccggtggagtggctga

SEQ ID NO: 406512 - DNA, 75 bp, synthetic construct
  source 1..75: mol_type = other DNA
gaaagcgctggaaaaatttggtcgctatcttaaaacggaatctatggtcactcccgtttttgcaacaccgatttt

SEQ ID NO: 406513 - DNA, 75 bp, synthetic construct
  source 1..75: mol_type = other DNA
agacaactgaggatatcgtgcccatccccttctgccagcggtgcgattatattgagaaaagcttcttatgaattc

SEQ ID NO: 406514 - DNA, 75 bp, synthetic construct
  source 1..75: mol_type = other DNA
ttatttctgaagatggcacacataaagagcttatctccaaaaaagacagtttatatgcatatttatatcagttgc

SEQ ID NO: 406515 - DNA, 75 bp, synthetic construct
  source 1..75: mol_type = other DNA
tcggaatagcagtagatcttgataaggatccacaaacatttaatcaaggtctgtctatatttttatcaggtatgg

SEQ ID NO: 406516 - DNA, 75 bp, synthetic construct
  source 1..75: mol_type = other DNA
gattattgtcggaaagtgatgagcagaaatctcgcagagtgtttcagtattcataatgataattgcagtgagctg

SEQ ID NO: 406517 - DNA, 75 bp, synthetic construct
  source 1..75: mol_type = other DNA
acaaccccaccacggatatccggaaggacagatgcagtaaatgcatgcgcgggtgtgaactgcgcaggaatgtcg

SEQ ID NO: 406518 - DNA, 75 bp, synthetic construct
  source 1..75: mol_type = other DNA
tcgcagtacggtgacaccgggcggtgtcgcctgtaaatataacgacatcattccggcggaccattgtctgcatga

SEQ ID NO: 406519 - DNA, 75 bp, synthetic construct
  source 1..75: mol_type = other DNA
aaaacaccttcaccattaccggtgcggagtataacgcgtcgaaatacgacgccgttgataacaatgctcgcctcg

SEQ ID NO: 406520 - DNA, 75 bp, synthetic construct
  source 1..75: mol_type = other DNA
ttaagatatggttttcagacaagcattttatctgttgatgaattgtcacgttatttatttgtctggttaacgttt

SEQ ID NO: 406521 - DNA, 75 bp, synthetic construct
  source 1..75: mol_type = other DNA
tggtgggctatttatatgatggggagctattgctggtattgagtaatctcatcggagtgactatttttctccttt

SEQ ID NO: 406522 - DNA, 75 bp, synthetic construct
  source 1..75: mol_type = other DNA
tccgcgcattaaacagctggcgcgccgcagtacagtgacgccgggcggggctgtctgcagatataacgatattat

SEQ ID NO: 406523 - DNA, 75 bp, synthetic construct
  source 1..75: mol_type = other DNA
ttcctggttcggctcgcgttaataatgggataactatagggctgtctcctgatcaatataaagagacgctacgaa

SEQ ID NO: 406524 - DNA, 75 bp, synthetic construct
  source 1..75: mol_type = other DNA
ctgatataggtggaggattagtatattctgaacatggtttaacatttggacaagaaattacacaatcttctgcta

SEQ ID NO: 406525 - DNA, 75 bp, synthetic construct
  source 1..75: mol_type = other DNA
tccacagataacagtggcatcaaccaggtcattacccgcgaagccgttccacagggaaccctgacacccgaactg

SEQ ID NO: 406526 - DNA, 75 bp, synthetic construct
  source 1..75: mol_type = other DNA
tcgggttaatttcgatgaggctagcgtccaaggaatgggcatttccattctccgtgggaggaaaatatccccatt

SEQ ID NO: 406527 - DNA, 75 bp, synthetic construct
  source 1..75: mol_type = other DNA
caatggcgttcgccagcatttaaatggagagccggatgcgctgaaaggtgcacgtccggttcggggaggagaggc

SEQ ID NO: 406528 - DNA, 75 bp, synthetic construct
  source 1..75: mol_type = other DNA
acaggaaagacatggataaaaactaattcgcaaggtcgtgttctggtatctggtttgcaaccttatcgcgaaaac

SEQ ID NO: 406529 - DNA, 75 bp, synthetic construct
  source 1..75: mol_type = other DNA
gtaagaaccaacttacaggggcgcgctttagttacggggttacaaccttaccgagaaaacattttgtctcttgat

SEQ ID NO: 406530 - DNA, 75 bp, synthetic construct
  source 1..75: mol_type = other DNA
ggatacggtgcgggggtttcgcccgatgccactaaacattgatgcgatctcccgtgagttgactgaactgcggga

SEQ ID NO: 406531 - DNA, 75 bp, synthetic construct
  source 1..75: mol_type = other DNA
agtgattttatgataagaacaatagatccatctacgatgcattatgtgaattttcctgtatccataatggatgct

SEQ ID NO: 406532 - DNA, 75 bp, synthetic construct
  source 1..75: mol_type = other DNA
attaaaagaggccgttaaagacagaaccataaacaatcgctatttgaactccgaagttccgcaaattttattcaa

SEQ ID NO: 406533 - DNA, 75 bp, synthetic construct
  source 1..75: mol_type = other DNA
acatgctgatctgtctcgcgtcaatctgaacaaagcaatcctccagaatataaacttaattgatagcaaactctt

SEQ ID NO: 406534 - DNA, 75 bp, synthetic construct
  source 1..75: mol_type = other DNA
aatataaacttaattgatagcaaactctttttttacgcggttaacaaatacgttcctcgaaatggttatatgtac

SEQ ID NO: 406535 - DNA, 75 bp, synthetic construct
  source 1..75: mol_type = other DNA
gtgaatgatctgcttgagcagctggaaaatagccctctaccaccacggttattacatctgattattccggctgaa

SEQ ID NO: 406536 - DNA, 75 bp, synthetic construct
  source 1..75: mol_type = other DNA
gctctatgaactaacccaccgtattaatcttcccaaagccagcactggctggcaaattcgagtggtgcgtgacac

SEQ ID NO: 406537 - DNA, 75 bp, synthetic construct
  source 1..75: mol_type = other DNA
tccgaaccgctcacggtcattgcccagacttttgcgctgcgtgagttgctgcatcgccagcgtattaatgagggc

SEQ ID NO: 406538 - DNA, 75 bp, synthetic construct
  source 1..75: mol_type = other DNA
cgtctgtctgccatttatgccgctttgcatgtggaaggcgtgcagcgtgtcgaactggctgcaccgctggccgac

SEQ ID NO: 406539 - DNA, 75 bp, synthetic construct
  source 1..75: mol_type = other DNA
cgggcagcaagcggaaaaattacggaatctgtttctgaaatgggtggattttattgagcatgagatcattgagtc

SEQ ID NO: 406540 - DNA, 75 bp, synthetic construct
  source 1..75: mol_type = other DNA
gcatacccgaaacttgcagtcgcttatccgtcaggcgtgatccctgatatgcgtggctggactatcaagggcaaa

SEQ ID NO: 406541 - DNA, 75 bp, synthetic construct
  source 1..75: mol_type = other DNA
atttcctttgtgtctcctgagcctcaagagatgcctgatgtatgcaaaactgaattattacttgagcttgaaaag

SEQ ID NO: 406542 - DNA, 75 bp, synthetic construct
  source 1..75: mol_type = other DNA
cctcatggtcatatagtgaagattattccattttatccagagataggatcatcgcaatgatgggccaattatcaa

SEQ ID NO: 406543 - DNA, 75 bp, synthetic construct
  source 1..75: mol_type = other DNA
gttaattcatttccggataatgtaaaaataagtatcagacagacaagcggagtgtcaaaaaataatgttgatttt

SEQ ID NO: 406544 - DNA, 75 bp, synthetic construct
  source 1..75: mol_type = other DNA
gatggctgtacccgacatggatatcgttatccggtgggcaaacaaaattcaacaggcagcgcggaaggttcgtaa

SEQ ID NO: 406545 - DNA, 75 bp, synthetic construct
  source 1..75: mol_type = other DNA
ttgccagtaagcgcttttcctgaagcagtaaaactcacactccgacatgtcagtgaaacctcccggaacaatgtc

SEQ ID NO: 406546 - DNA, 75 bp, synthetic construct
  source 1..75: mol_type = other DNA
agcacataaccaaggagtaaaagcgctaatcatgaagaatcttgaggccaatcttcgagagaaagaggaaggttc

SEQ ID NO: 406547 - DNA, 75 bp, synthetic construct
  source 1..75: mol_type = other DNA
gtatctaacaattcccctcactatataactttagctggagtaaagataaatggagttaatataagttcagatagc

SEQ ID NO: 406548 - DNA, 75 bp, synthetic construct
  source 1..75: mol_type = other DNA
gcgctgcctgcggcgtgtctggcgatgtaccatgaagcacacaccaaaaataagaaaattgccgccggtattctg

SEQ ID NO: 406549 - DNA, 75 bp, synthetic construct
  source 1..75: mol_type = other DNA
cctgttgagcacggctaacacatggagtgcgcgccagactttcaacggcgggatcaccggagcgctgacagggaa

SEQ ID NO: 406550 - DNA, 75 bp, synthetic construct
  source 1..75: mol_type = other DNA
gctgtgcgccgatgcctgatgcgacgcagacgcgtcttatcatgcctacaaaaccgcgctcacccgtaggccgga

SEQ ID NO: 406551 - DNA, 75 bp, synthetic construct
  source 1..75: mol_type = other DNA
acctgtgcgggagtggtgcgccagtgaccacgacatgccattgttgtgccgtcgtttttcttcagtcgcgccgtg

SEQ ID NO: 406552 - DNA, 75 bp, synthetic construct
  source 1..75: mol_type = other DNA
cacctgacggtgtgtaaggccactgcgcctgatggcgcagtcaacccttccgccgccacccctgcggcctgtttc

SEQ ID NO: 406553 - DNA, 75 bp, synthetic construct
  source 1..75: mol_type = other DNA
acgatcaccaatgccaaaatcggtaactttatccagtccaacaattacgttgccgggcaatctggatggaaactg

SEQ ID NO: 406554 - DNA, 75 bp, synthetic construct
  source 1..75: mol_type = other DNA
ttacagcagcaggaaaacgatggggatatcgtcggcactacggttcagtaccatattgatctggcggtggacggt

SEQ ID NO: 406555 - DNA, 75 bp, synthetic construct
  source 1..75: mol_type = other DNA
tcagcgcgatgtataacatcaaggtgggggtgtccagtaacgggcagtattacgctgccgggatgggtattgggg

SEQ ID NO: 406556 - DNA, 75 bp, synthetic construct
  source 1..75: mol_type = other DNA
ccattaatagcgcattactgcgtctctccgccggtgcagatagtgcgactggactgggaatagaaatattggata

SEQ ID NO: 406557 - DNA, 75 bp, synthetic construct
  source 1..75: mol_type = other DNA
ggcggtttgccgccaaaaggccaggatatgaaccaaattttatacgaactttctgctctgggtagatggtcgagc

SEQ ID NO: 406558 - DNA, 75 bp, synthetic construct
  source 1..75: mol_type = other DNA
gaatggtcccggctggtctgacaggtcaggttatgtcgttacgggttcagttaacggaaaccgtgatgaattaat

SEQ ID NO: 406559 - DNA, 75 bp, synthetic construct
  source 1..75: mol_type = other DNA
accatgagcatgcgcctgaatgccccatgtatcgtcagttttccggaaatgaagaggaaacctcctccggagcag

SEQ ID NO: 406560 - DNA, 75 bp, synthetic construct
  source 1..75: mol_type = other DNA
cttatcactgccagaccatgttttttgcttgcggctgtctggatgtcgtccgaaggtcatcgaatagtagttcaa

SEQ ID NO: 406561 - DNA, 75 bp, synthetic construct
  source 1..75: mol_type = other DNA
tgtgacagacattaccaggaatgcgacttacccggtgctgattgacagcattgcggtggaagtgaacaacgcgga

SEQ ID NO: 406562 - DNA, 75 bp, synthetic construct
  source 1..75: mol_type = other DNA
catcctggaatacataagccttaaaaagggtgaggctattgagcatgtattgaacggcgacaagtggttgtatgc

SEQ ID NO: 406563 - DNA, 75 bp, synthetic construct
  source 1..75: mol_type = other DNA
gtcgagttatcaaaaaagttgctggtgaaacaactacttccaacttatcaattgaatattgcctgttctttcttg

SEQ ID NO: 406564 - DNA, 75 bp, synthetic construct
  source 1..75: mol_type = other DNA
agagtccgtaacgttaatataccttaaaatcgctcaagacgaacctacaggcgatgaaatttatgaagatatcct

SEQ ID NO: 406565 - DNA, 75 bp, synthetic construct
  source 1..75: mol_type = other DNA
gaaccggtactatgacccgctacaggggaggtatattacacaagaccccattgggctggcggggggatggaacct

SEQ ID NO: 406566 - DNA, 75 bp, synthetic construct
  source 1..75: mol_type = other DNA
tgaggatgaggggcttgtcaccctctggtactacgatgaatcggaccgtatcactcaccgcacggtgaacggcga

SEQ ID NO: 406567 - DNA, 75 bp, synthetic construct
  source 1..75: mol_type = other DNA
tgctctcacaatgacgcggagcacaaatatgagaagcaaaatcagaccgcagaaaattttgttctggaaccctga

SEQ ID NO: 406568 - DNA, 75 bp, synthetic construct
  source 1..75: mol_type = other DNA
aggtgattgtggacttcctcaacggcgatccggaccagccgattattatggggcgtacctaccaccaggaaaacc

SEQ ID NO: 406569 - DNA, 75 bp, synthetic construct
  source 1..75: mol_type = other DNA
atgaagtgtatgactaccccggacgtttcaagggtgcccacgggcagaactttgcccgctggcagatggacggct

SEQ ID NO: 406570 - DNA, 75 bp, synthetic construct
  source 1..75: mol_type = other DNA
gcgatagaggggagcgcgctggaagaggtggaagtgattggtcgtgtaacgtacttcatcaaccgggcgttgagc

SEQ ID NO: 406571 - DNA, 75 bp, synthetic construct
  source 1..75: mol_type = other DNA
atggcagccccgagattcagtggtttgtgtgccatcacgcatatcctccctgtccgtcattttcagagggcgtaa

SEQ ID NO: 406572 - DNA, 75 bp, synthetic construct
  source 1..75: mol_type = other DNA
accgtggccggttaacctcggtgaaagacgcacagggccgtgaaacgcggtatgaatacaacgccgcaggcgacc

SEQ ID NO: 406573 - DNA, 75 bp, synthetic construct
  source 1..75: mol_type = other DNA
aagctggcttcatcagcatgtcagcgaacgtcgcagcgtcgccatcagtttgttactgattgccgtcggtgcatt

SEQ ID NO: 406574 - DNA, 75 bp, synthetic construct
  source 1..75: mol_type = other DNA
gggcggacgcaacgttatcattatgacctgaccggaaaactcacgcagagtgaggatgagggacttatcatcctc

SEQ ID NO: 406575 - DNA, 75 bp, synthetic construct
  source 1..75: mol_type = other DNA
cgagcggacccaccactaccactacgacagccagcaccgcctggtgttctacacgcggatacagcatggcgagcc

SEQ ID NO: 406576 - DNA, 75 bp, synthetic construct
  source 1..75: mol_type = other DNA
atcttcccctgacacaccccgccctctctcagcctcagcgttccccgacacactgcccggtaccgaatacggccc

SEQ ID NO: 406577 - DNA, 75 bp, synthetic construct
  source 1..75: mol_type = other DNA
actaccactacgacagccagcaccgtctggtgttcaacacgcggatacagcaaggggagccacaggtcgagagcc

SEQ ID NO: 406578 - DNA, 75 bp, synthetic construct
  source 1..75: mol_type = other DNA
cgggcatgaagcttggcgacacgccgctgctggagtacacgcgcgaccgcatgcaccgggagacggtgcgcagct

SEQ ID NO: 406579 - DNA, 75 bp, synthetic construct
  source 1..75: mol_type = other DNA
ggacatccgcatcccgtatgccacggacccggcgggcaaccgcctgccggacccggagctgcacccggacagtac

SEQ ID NO: 406580 - DNA, 75 bp, synthetic construct
  source 1..75: mol_type = other DNA
tgaagctgggcgggacgccgctggtcgagtatacgcgggacaggctgcaccgtgagacggtgcgcagcttcggca

SEQ ID NO: 406581 - DNA, 75 bp, synthetic construct
  source 1..75: mol_type = other DNA
accaccggggactgccgctggcgcttatcagcgaagacggcaatacggcgtggagcgcggaatatgatgaatggg

SEQ ID NO: 406582 - DNA, 75 bp, synthetic construct
  source 1..75: mol_type = other DNA
ttcccggctgaactggtgcggctgctggacaggctggaggaagaaatccgggcagaccgcgtgagcagtgaaagc

SEQ ID NO: 406583 - DNA, 75 bp, synthetic construct
  source 1..75: mol_type = other DNA
accggggcctgccgctggcgctcatcagcgaagaaggcaatacggtgtggagcgcggaatatgatgaatggggca

SEQ ID NO: 406584 - DNA, 75 bp, synthetic construct
  source 1..75: mol_type = other DNA
actaccactacgacagccagcaccgactggtgttccacacgcggatacagcaaggggagccactggtcgagagcc

SEQ ID NO: 406585 - DNA, 75 bp, synthetic construct
  source 1..75: mol_type = other DNA
actaccactacgacagccagcaccgactggtgttctacacgcggatacagcaaggggagccaccggtcgagagcc

SEQ ID NO: 406586 - DNA, 75 bp, synthetic construct
  source 1..75: mol_type = other DNA
cggtatatcaccccggacccgattgggttgagaggtggatggaatatgtatcagtatccgttgaatcccatacaa

SEQ ID NO: 406587 - DNA, 75 bp, synthetic construct
  source 1..75: mol_type = other DNA
cccaaacggagggctataacgtgggatttccgtcgccagctgctgactatgttgaacggcgtctgaccgttgatt

SEQ ID NO: 406588 - DNA, 75 bp, synthetic construct
  source 1..75: mol_type = other DNA
cgccgctttattcaggcggggatgagcgagtgcgagatagccgctgaactggagtggtttatgcgccagcagggc

SEQ ID NO: 406589 - DNA, 75 bp, synthetic construct
  source 1..75: mol_type = other DNA
gtggattcgcgctattacgcggatgtagaagcccgcacgcaaggctaccagctgcatttgcttgacgcgacgcac

SEQ ID NO: 406590 - DNA, 75 bp, synthetic construct
  source 1..75: mol_type = other DNA
cgattcgccccggtgtgcgttgtcagcaggttgacgacgccgcgcgtcgggtgattaccgaggctggttatggcg

SEQ ID NO: 406591 - DNA, 75 bp, synthetic construct
  source 1..75: mol_type = other DNA
ttcgtaagattataccatccagacctcccagaacatacgattagagcgcctcaccctaaaacaatcagaataaaa

SEQ ID NO: 406592 - DNA, 75 bp, synthetic construct
  source 1..75: mol_type = other DNA
agctaattcaagaaattcgctttgcctcaaatgataataataattttttcgcatgggcagacccgttatcgcaaa

SEQ ID NO: 406593 - DNA, 75 bp, synthetic construct
  source 1..75: mol_type = other DNA
caattcgccccggcgtgcgctgccagcagattgacgacgcccgcgcgccgggtcattaccgaggctggatttggc

SEQ ID NO: 406594 - DNA, 75 bp, synthetic construct
  source 1..75: mol_type = other DNA
tagcgccacgccggatgtgctgcggcaaatcaaaacgccagaggaggtggagaaaatccgcctcgcctgtgggat

SEQ ID NO: 406595 - DNA, 75 bp, synthetic construct
  source 1..75: mol_type = other DNA
cgcaccttgctggtgaatggcgaaggggtgagcgccgaatctcacccgctgtttgacgtctatcagattgtcctg

SEQ ID NO: 406596 - DNA, 75 bp, synthetic construct
  source 1..75: mol_type = other DNA
tcagggacactgaagtactgctttgcttatattgttattcttggactgaaagtcggccttgtctaccacctgttc

SEQ ID NO: 406597 - DNA, 75 bp, synthetic construct
  source 1..75: mol_type = other DNA
caggcacagctcgcagcaatctccgcgattcgccccggcgtgcgctgccagcaggttgacgacgccgcgcgccgg

SEQ ID NO: 406598 - DNA, 75 bp, synthetic construct
  source 1..75: mol_type = other DNA
gcgagcgcgagatagccgctgaactggagtggtttatgcgccagcagggcgcagaaaaagcctcttttgacacca

SEQ ID NO: 406599 - DNA, 75 bp, synthetic construct
  source 1..75: mol_type = other DNA
cgcaccttgctggtgaatggcgaaggggtgagcgccgaatctcacccgctgtttaacgtctatcagattgttttg

SEQ ID NO: 406600 - DNA, 75 bp, synthetic construct
  source 1..75: mol_type = other DNA
ccgcgccctgctcgctggcgcgtctggtcagttacgcaatcaggcaaccaccgcaggtaatctgctccagcgcac

SEQ ID NO: 406601 - DNA, 75 bp, synthetic construct
  source 1..75: mol_type = other DNA
gttcctgaagcgcctgacagcccccaccattaccagcggtggcagccctccggtattttccctgacatcagacgg

SEQ ID NO: 406602 - DNA, 75 bp, synthetic construct
  source 1..75: mol_type = other DNA
aaagctactgacatagcacaggctcttcttgagaatggaggtaaattactttgtaagtttaaattatctggaaac

SEQ ID NO: 406603 - DNA, 75 bp, synthetic construct
  source 1..75: mol_type = other DNA
agcgaaatcatctgcttttgtgaatggcgttacaggtgagattattaaacaagaacaacctactcaacctaaaaa

SEQ ID NO: 406604 - DNA, 75 bp, synthetic construct
  source 1..75: mol_type = other DNA
gttacagttgtcggggtggtgacattcgtcatcaatcgagcttggcctactgatgacgaatgtcctgtcatataa

SEQ ID NO: 406605 - DNA, 75 bp, synthetic construct
  source 1..75: mol_type = other DNA
caaaaaacaatactgaactccccgcacaggtcgtgaaacttttgaatgccagcaatctaaagcagacaagggtgg

SEQ ID NO: 406606 - DNA, 75 bp, synthetic construct
  source 1..75: mol_type = other DNA
gttgggatgatatctgggaagacggactggaagctgaaaagctaagggaagcattgctgtctttagaacatgctt

SEQ ID NO: 406607 - DNA, 75 bp, synthetic construct
  source 1..75: mol_type = other DNA
ttgctgctataacggacgcggcgacggtcggctttcgcggcaggctaattgcacgaggtcaggcacgtgcaatga

SEQ ID NO: 406608 - DNA, 75 bp, synthetic construct
  source 1..75: mol_type = other DNA
atggccgcggtaattctacgcaaagttgaaaaaatttatgacaatggattcaaagctgttcacggcattgatctc

SEQ ID NO: 406609 - DNA, 75 bp, synthetic construct
  source 1..75: mol_type = other DNA
ggttatatcgtcagttccgccattgccaaaggacgcctcaccgcccttgatacggacgccgcgcaaaaagcgccg

SEQ ID NO: 406610 - DNA, 75 bp, synthetic construct
  source 1..75: mol_type = other DNA
actgcctatgccaaaaacttttgatcggccacatcctcgcgtaaaacagttagctcgacgcagcaatattaaacc

SEQ ID NO: 406611 - DNA, 75 bp, synthetic construct
  source 1..75: mol_type = other DNA
tgtcagcatcatcaagcaaagagcttagagaaaaacttgcggagaaaatcgcagagggttggcaacctttcgagt

SEQ ID NO: 406612 - DNA, 75 bp, synthetic construct
  source 1..75: mol_type = other DNA
attcgccgacagcgcgcctaaatcttcgcgttggtgaggaaaggccatttgtgcccagatttctgactggtgcgg

SEQ ID NO: 406613 - DNA, 75 bp, synthetic construct
  source 1..75: mol_type = other DNA
aacttcgcttagcgaagaacattaaaatcgcagagcttgcagaagctgtgggcgttgatgctgccaatatttcca

SEQ ID NO: 406614 - DNA, 75 bp, synthetic construct
  source 1..75: mol_type = other DNA
ttggcaaaaggcggtcaacttttaaatttctttgtgcatattccagaacatattcccgttctggcgaccatgctg

SEQ ID NO: 406615 - DNA, 75 bp, synthetic construct
  source 1..75: mol_type = other DNA
ttggtaaaaatcagccgcgcttttcacatgcgttggcaacggccctcctgcgttacaacctgcacatctactcaa

SEQ ID NO: 406616 - DNA, 75 bp, synthetic construct
  source 1..75: mol_type = other DNA
tctttaatgaaatttgaagagcatgaatctgacagatacggtatccgcaaaggtgatttgattatttgtgaaggt

SEQ ID NO: 406617 - DNA, 75 bp, synthetic construct
  source 1..75: mol_type = other DNA
gcgatcgaagatgctctgtacgaaatcgcctccatgcgtctgtttgcccggttacatgaaagccagcatccgggc

SEQ ID NO: 406618 - DNA, 75 bp, synthetic construct
  source 1..75: mol_type = other DNA
agaatggtgcgcagaatacgatgaatggggtaaccagctgaatgaagagaacccgcaccagctgcagcagctcat

SEQ ID NO: 406619 - DNA, 75 bp, synthetic construct
  source 1..75: mol_type = other DNA
attgtggtgatattagtgctaaagatgcaaaaagcacacagaaagcctggaattgtcgtcactccagacagtcaa

SEQ ID NO: 406620 - DNA, 75 bp, synthetic construct
  source 1..75: mol_type = other DNA
taaaaccattccgcgaaaaggcgtcagatatcttggaaaggtcgagaaacatgtctgtgagaatgagcgtggcag

SEQ ID NO: 406621 - DNA, 75 bp, synthetic construct
  source 1..75: mol_type = other DNA
acagtaaaaaccaggcggaaagccaaaggcggagtaagaaaggctaaataccgctttaaggatgaaaatggcgag

SEQ ID NO: 406622 - DNA, 75 bp, synthetic construct
  source 1..75: mol_type = other DNA
gatgccccgcttaaagtgctattaggtgatgctgacagcaaatatattccagccagtttatgtcgtaccaacgct

SEQ ID NO: 406623 - DNA, 75 bp, synthetic construct
  source 1..75: mol_type = other DNA
ctgcctcctgctcgttatgtgcgttcctatgcacctgcacagcaaagtgttgcggcagggagcgaatggaccggg

SEQ ID NO: 406624 - DNA, 75 bp, synthetic construct
  source 1..75: mol_type = other DNA
gttactttgttgcggttgcagaagagctgcatttcgggcgcgccgctgcccgcctgaatatttcgcaaccaccgc

SEQ ID NO: 406625 - DNA, 75 bp, synthetic construct
  source 1..75: mol_type = other DNA
ctacatcgctggaagtgctctcagtaagaaataaccagctgacatttctccctgagttacctgaatcactggaag

SEQ ID NO: 406626 - DNA, 75 bp, synthetic construct
  source 1..75: mol_type = other DNA
tctttcgctgttgctgctgatgccactgagagctgtgaggaccgtgtcgcgctcacatggaacaatctccggaaa

SEQ ID NO: 406627 - DNA, 75 bp, synthetic construct
  source 1..75: mol_type = other DNA
acggcccgcagatttacttctccatgagtgacggacaacagaatacactccatcgccccctggctgatgccgtga

SEQ ID NO: 406628 - DNA, 75 bp, synthetic construct
  source 1..75: mol_type = other DNA
gtatgttacgcagatgactgaaaagtctgaggcattgcgtagcggggctgggttaagtagtcgcatggcccagcg

SEQ ID NO: 406629 - DNA, 75 bp, synthetic construct
  source 1..75: mol_type = other DNA
tttggagaggcagggccggaagctattatgccgttagctaaagattcagcagggcggttgggtgtgcgtgcccaa

SEQ ID NO: 406630 - DNA, 75 bp, synthetic construct
  source 1..75: mol_type = other DNA
tcaaggagcagcagaacgcgctcaaagggctgctggagaatatcgacccggttaccaaggccttaaaccgcctgg

SEQ ID NO: 406631 - DNA, 75 bp, synthetic construct
  source 1..75: mol_type = other DNA
ttaactacatctcctggcaattacaaacgcgtgctggcgtgacggtttatgcctggatgccggtgctggcgttcg

SEQ ID NO: 406632 - DNA, 75 bp, synthetic construct
  source 1..75: mol_type = other DNA
agtcaatgccgttgcacaaacgcccggcgcgctggacaaaaccgtgtttgaactgcaggcacgagattggcgtaa

SEQ ID NO: 406633 - DNA, 75 bp, synthetic construct
  source 1..75: mol_type = other DNA
cgcactgcgatcaatcacgagaactatgtgcgtctgtctccctgggacagcgaagcgcgtaaacgtatcactgaa

SEQ ID NO: 406634 - DNA, 75 bp, synthetic construct
  source 1..75: mol_type = other DNA
cattgccccaaaattctttttataacactatttccggtacatatgctgattacttttcagcatgggataaatggg

SEQ ID NO: 406635 - DNA, 75 bp, synthetic construct
  source 1..75: mol_type = other DNA
cattcagaatttgccagccgttcaatggaagctgcgcaatattggacagatgtcggaggaaaagcgcgcgcagtc

SEQ ID NO: 406636 - DNA, 75 bp, synthetic construct
  source 1..75: mol_type = other DNA
gctgggcgcaggcagaagagcagaaatatgagatgctggagaatgagtaccctcagagggtggctgaccggctga

SEQ ID NO: 406637 - DNA, 75 bp, synthetic construct
  source 1..75: mol_type = other DNA
taaacccggcgcgcgcctgtctggctggtatgattttaatgataactggcgtattggttcgcaactggaacgcct

SEQ ID NO: 406638 - DNA, 75 bp, synthetic construct
  source 1..75: mol_type = other DNA
gtgaacccggtgctgggtgcaaaggtgctgccgggcgagacggacattgcgctgcccggcccgctgccgtttatt

SEQ ID NO: 406639 - DNA, 75 bp, synthetic construct
  source 1..75: mol_type = other DNA
atcacaatcgcctgcattaggtttgggacatgagtttgctcatgcgcagtattaccttcttgataaggaaaattt

SEQ ID NO: 406640 - DNA, 75 bp, synthetic construct
  source 1..75: mol_type = other DNA
ctgttcggtttatagattctttgggtttaaaattccatgttaacggtgatccaagtgattttaatcaggctgttg

SEQ ID NO: 406641 - DNA, 75 bp, synthetic construct
  source 1..75: mol_type = other DNA
tgtgatacggacggacgacgagcgcacccatcactaccattacgacagcctgcaccgcctggtccattacatccg

SEQ ID NO: 406642 - DNA, 75 bp, synthetic construct
  source 1..75: mol_type = other DNA
ggcgacctggtgcgcatcagcggcccgcgacagacgcgggaatacggctacagtgccacgggcaggctggagagc

SEQ ID NO: 406643 - DNA, 75 bp, synthetic construct
  source 1..75: mol_type = other DNA
gcggaacagtggcagtatgatgaacacgggtggctaaccaccatcagccataccagtgacggccaccgagtgtcg

SEQ ID NO: 406644 - DNA, 75 bp, synthetic construct
  source 1..75: mol_type = other DNA
gggtggcctgaagcgggtggtgaagaaggagcatgccgacgggagcatcacccgcagcgagtatgatgaggcggg

SEQ ID NO: 406645 - DNA, 75 bp, synthetic construct
  source 1..75: mol_type = other DNA
gagtatacgtggaacgacaacgggcaactggtgcgcatcagcggcccgcaggagagccgggagtaccgttacagc

SEQ ID NO: 406646 - DNA, 75 bp, synthetic construct
  source 1..75: mol_type = other DNA
gctggtggcgggatgaaattttagcaaatagtgcgatcgccggtgtttatgcaaaatctgatgacggaaaatcag

SEQ ID NO: 406647 - DNA, 75 bp, synthetic construct
  source 1..75: mol_type = other DNA
tgatgaggagtcggggctgtactacaaccgcaaccggtactatgatccgttgcaggggagatatatcacccagga

SEQ ID NO: 406648 - DNA, 75 bp, synthetic construct
  source 1..75: mol_type = other DNA
ctgcgaccaccggggactgccgcaggcgctcatcagcccggaaggggaaacggcgtggcagggggagtatgacga

SEQ ID NO: 406649 - DNA, 75 bp, synthetic construct
  source 1..75: mol_type = other DNA
tgccacggacccggcgggcaaccggctgccggacccggagctgcacccggacagtacactcacagtgtggccgga

SEQ ID NO: 406650 - DNA, 75 bp, synthetic construct
  source 1..75: mol_type = other DNA
ccgataataaggatggatcctttgggtttgtataatttatatcaattattatatgatgtttggcatgatgattca

SEQ ID NO: 406651 - DNA, 75 bp, synthetic construct
  source 1..75: mol_type = other DNA
tgatattaaattcgaaacaatgataaaaccccagttcgctgacagaatctatttctccaattgttcacccgttga

SEQ ID NO: 406652 - DNA, 75 bp, synthetic construct
  source 1..75: mol_type = other DNA
gtgcagttttgttcgcgcttttcgcaacgggacatttgggaatcatggctgaaggagaaaatttccttagccagt

SEQ ID NO: 406653 - DNA, 75 bp, synthetic construct
  source 1..75: mol_type = other DNA
caaaagctaacgtcgctggatgaagataacgagatactaccctcaccgcccactgaacatttgggaggagtgcac

SEQ ID NO: 406654 - DNA, 75 bp, synthetic construct
  source 1..75: mol_type = other DNA
ttgatattagtataccgcaggcttatttggggcaagctgcacaactgaagtctatgcctgagcattgggatcaag

SEQ ID NO: 406655 - DNA, 75 bp, synthetic construct
  source 1..75: mol_type = other DNA
atgaagtctcacttgagggtcaggaacgcatctggtcttcaccatatttgattgtcgatttcctacccagtctgt

SEQ ID NO: 406656 - DNA, 75 bp, synthetic construct
  source 1..75: mol_type = other DNA
acgttcgatattgttccggcatttgaggcaagccatttgttatggcgaagctatgaaaatagctgggagcaaata

SEQ ID NO: 406657 - DNA, 75 bp, synthetic construct
  source 1..75: mol_type = other DNA
cagcacggtgagccgcaggtggagagccgctacctctatgacccgctgggccgccggacgggaaaacgggtgtgg

SEQ ID NO: 406658 - DNA, 75 bp, synthetic construct
  source 1..75: mol_type = other DNA
cagcagtatgataaggagtcggggctgtactataaccgtcaccggtactacgatccgttgcaggggcggtatatc

SEQ ID NO: 406659 - DNA, 75 bp, synthetic construct
  source 1..75: mol_type = other DNA
cctgaccggaaaactcacgcagagtgaagatgaggggcttatcaccctctggcattacgatgcgtcagaccgtat

SEQ ID NO: 406660 - DNA, 75 bp, synthetic construct
  source 1..75: mol_type = other DNA
atatggcgtctggaaagctgacttcagtgatactgccggacggcaggacggtgcggtatggctataacagccagc

SEQ ID NO: 406661 - DNA, 75 bp, synthetic construct
  source 1..75: mol_type = other DNA
ggatactcggctggccggagcgggtgccggaggcggacgaggtgccgccggagctgcccgcataccgggtgctga

SEQ ID NO: 406662 - DNA, 75 bp, synthetic construct
  source 1..75: mol_type = other DNA
tacagctatgatgacccggcgagtgagctgccgacagggatacaggacgcgacgggcagtacaaaacagatggca

SEQ ID NO: 406663 - DNA, 75 bp, synthetic construct
  source 1..75: mol_type = other DNA
gccgttggccgatctgttcactggcggctatcagcccttgatgcaggccatggcggcggctgggctgcgcgccag

SEQ ID NO: 406664 - DNA, 75 bp, synthetic construct
  source 1..75: mol_type = other DNA
aagagttcgcgaggcaggaaaacgtctgaggaagattgagaacagtcacaccacgtcgcagagcgactgcgactt

SEQ ID NO: 406665 - DNA, 75 bp, synthetic construct
  source 1..75: mol_type = other DNA
tacctggacactgactataccgatcgaggcctgctgacaaaagagtggtgtaacggaaaccgcatatcccgcgtt

SEQ ID NO: 406666 - DNA, 75 bp, synthetic construct
  source 1..75: mol_type = other DNA
gaacttcaacactcgcatggttgttacctcgttacctttggtcgaaaaaaaagcccgcactgtcaggtgcgggct

SEQ ID NO: 406667 - DNA, 75 bp, synthetic construct
  source 1..75: mol_type = other DNA
gctttctgttggcataacatttggtatttttgtcttaacgttactggcagcagatttaaccgccccgtatttaca

SEQ ID NO: 406668 - DNA, 75 bp, synthetic construct
  source 1..75: mol_type = other DNA
ttaaaacaactattggagcattaaaaaaacaaaatgattcgggtgagccaaacgagaagagtgtaaagattacaa

SEQ ID NO: 406669 - DNA, 75 bp, synthetic construct
  source 1..75: mol_type = other DNA
atgtgtattacgtctaatgttttagtgatgttcaatagtcttgatttatttaatgttatttttacgcaaaataac

SEQ ID NO: 406670 - DNA, 75 bp, synthetic construct
  source 1..75: mol_type = other DNA
agctttaccatgcggtgctgcgccatcaggtggtgtttctgcgcgatcaaactattgcgccgcagcagcaacgcg

SEQ ID NO: 406671 - DNA, 75 bp, synthetic construct
  source 1..75: mol_type = other DNA
gatgccgtgcataacgccgtagtactcgaagaatgcgcctatatgggtctattctcgcgccagcttgcgccgcag

SEQ ID NO: 406672 - DNA, 75 bp, synthetic construct
  source 1..75: mol_type = other DNA
tgccgctttcaggtcaggagttgcctgttcgctgggtggcgcaacacgggaaggagaaccctgttactcacgttt

SEQ ID NO: 406673 - DNA, 75 bp, synthetic construct
  source 1..75: mol_type = other DNA
tacacaaccgcccgttctgcggacagctacccggcgttttccccgatgctggttgagtggcttaaagagggctgg

SEQ ID NO: 406674 - DNA, 75 bp, synthetic construct
  source 1..75: mol_type = other DNA
tggctatagagggacttccagggaattatttcaacgccggtgtagtatatctgcagcttgaagcatgggcgaaaa

SEQ ID NO: 406675 - DNA, 75 bp, synthetic construct
  source 1..75: mol_type = other DNA
tatgagttacaaaaatcatatggcccgaaacatgcgaagatcctggaagcgcaggctcaggtgaaggctattcag

SEQ ID NO: 406676 - DNA, 75 bp, synthetic construct
  source 1..75: mol_type = other DNA
ggattcacgccgatgctggaagaagcggtgaaagtgaatacggagcaactggtaaagctggttaatggtactgaa

SEQ ID NO: 406677 - DNA, 75 bp, synthetic construct
  source 1..75: mol_type = other DNA
aagcaaagaatatcatcaataacagtgacggggatgcggtaaaaactgaccagcaaattcagcaaagcagtggcg

SEQ ID NO: 406678 - DNA, 75 bp, synthetic construct
  source 1..75: mol_type = other DNA
agccgtggcgagtctgccggcaatggtgatacagcgggctaatccggggctgtatgacatgctgaccaacggtgt

SEQ ID NO: 406679 - DNA, 75 bp, synthetic construct
  source 1..75: mol_type = other DNA
atgaatcaaattcacaaatttttttgtaatatgacccaatgttcacaggggggggccggagaattacctacggta

SEQ ID NO: 406680 - DNA, 75 bp, synthetic construct
  source 1..75: mol_type = other DNA
tacaagtcactggtcaacagtggtgaagcggatgccattcgtattgatcatcaggcgcagaattttaaaggaaat

SEQ ID NO: 406681 - DNA, 75 bp, synthetic construct
  source 1..75: mol_type = other DNA
ctaacggggtgcttcaggcgaatgtggcgttcgacaaggcacagctgaactgccagaacatggtgaaacgcatga

SEQ ID NO: 406682 - DNA, 75 bp, synthetic construct
  source 1..75: mol_type = other DNA
gcacaggcgtttatcgattatacgttggaccaaaagcggctgaagacagaaaaagccagagaagtaaaccttcag

SEQ ID NO: 406683 - DNA, 75 bp, synthetic construct
  source 1..75: mol_type = other DNA
ggagcggtactcaatctggttgaggaaaaaaatctgcagacgaaagagagtcttcgctcgctcaatatcactact

SEQ ID NO: 406684 - DNA, 75 bp, synthetic construct
  source 1..75: mol_type = other DNA
gatgcagtcgcgtattgttctggagaaagcggttcgcgagttaaagctggatcaaaacccagactttattggcaa

SEQ ID NO: 406685 - DNA, 75 bp, synthetic construct
  source 1..75: mol_type = other DNA
agtaggaaaccagctcaacgggatcactgacggctttaaaaacctgatgggggatgtgattcagggggcgaccgg

SEQ ID NO: 406686 - DNA, 75 bp, synthetic construct
  source 1..75: mol_type = other DNA
gccaatccaccctccaagccatcgccagcgccaccagtccgcacgaactgcaagccacgtggacacacctggccg

SEQ ID NO: 406687 - DNA, 75 bp, synthetic construct
  source 1..75: mol_type = other DNA
taacttcctggcgaaagagggcttattaacgttccgcggcattgatggcttcgaaaccgagcaactcagcattgt

SEQ ID NO: 406688 - DNA, 75 bp, synthetic construct
  source 1..75: mol_type = other DNA
gcgtatcgatgcgatcctcgttgatcgtctggcggcgctggatctggtgaagaaaaccaacgatacgctggcagt

SEQ ID NO: 406689 - DNA, 75 bp, synthetic construct
  source 1..75: mol_type = other DNA
actgcttacggatctgaatggcagctttcgcggaaagcgcgttccggtgtcaagtctgatgaagctggaaaaagg

SEQ ID NO: 406690 - DNA, 75 bp, synthetic construct
  source 1..75: mol_type = other DNA
gattcgccagagcgatgccctgggtgagtttatcgagaatgatcacctgcgccgctatttaggcgaacgaccttt

SEQ ID NO: 406691 - DNA, 75 bp, synthetic construct
  source 1..75: mol_type = other DNA
tcaattcttgcaagtgtggttcacatttagctacgctgatacattcgcctgatgccggtgaattaattttaaaat

SEQ ID NO: 406692 - DNA, 75 bp, synthetic construct
  source 1..75: mol_type = other DNA
tagagctggagttctatttactggatcgccagcgcgacgctgaagggtatctgcaaccgccctgcgcgcccggca

SEQ ID NO: 406693 - DNA, 75 bp, synthetic construct
  source 1..75: mol_type = other DNA
tcatcacagaaacagaaattgagtggatgaaccgccccgggtttcctggagagtattttatctgtgaactcaggc

SEQ ID NO: 406694 - DNA, 75 bp, synthetic construct
  source 1..75: mol_type = other DNA
gatgccgtcatcaatggcattgctggcgccgaacgtgaactcatatcgccgcttccagccgggcatgtatgtgcc

SEQ ID NO: 406695 - DNA, 75 bp, synthetic construct
  source 1..75: mol_type = other DNA
ccgcaagcggctgccgatgaaattgttgcctgtgccagaattgaacgtctggatatgggacttgttctggaacag

SEQ ID NO: 406696 - DNA, 75 bp, synthetic construct
  source 1..75: mol_type = other DNA
atacgccaaaagcggctttttctggctggatgaagcggtggatttgcaggagaaaaatcaacgcgtacggtattt

SEQ ID NO: 406697 - DNA, 75 bp, synthetic construct
  source 1..75: mol_type = other DNA
caagatgatcctggatgttacgaaccgcctcatggttgcctacgcagtgcaggccgcaatgggatgggtaaacgg

SEQ ID NO: 406698 - DNA, 75 bp, synthetic construct
  source 1..75: mol_type = other DNA
tttatacatcacttttacatcattccttcagctcatacgtcacttttacgtcagttccatcctctgtgccatttg

SEQ ID NO: 406699 - DNA, 75 bp, synthetic construct
  source 1..75: mol_type = other DNA
aaaaacgcttggtgaggaaaaaataccagaatacaatattataacagctcttgatgtaagaagcaccgtcgacaa

SEQ ID NO: 406700 - DNA, 75 bp, synthetic construct
  source 1..75: mol_type = other DNA
actccatacaggatatttttcaggcatatcagaaggcgtgcataagcgtttgtggctcactgttgccgcagtgtt

SEQ ID NO: 406701 - DNA, 75 bp, synthetic construct
  source 1..75: mol_type = other DNA
gtggaagacccggaagccatactgcgctacgggcgcaacctgctgaagatggatgcgttcggttgcaccagtcgc

SEQ ID NO: 406702 - DNA, 75 bp, synthetic construct
  source 1..75: mol_type = other DNA
aatgcaatgttaatgtatggtgcttttttactagcagcatattgggtagctcgggataaaatagagataacaaag

SEQ ID NO: 406703 - DNA, 75 bp, synthetic construct
  source 1..75: mol_type = other DNA
ggaccaacgtaaatattgtcatgaactacattcgtaacctggatagtgaaacaggggcaatggtgcgcctgctgg

SEQ ID NO: 406704 - DNA, 75 bp, synthetic construct
  source 1..75: mol_type = other DNA
cgatgaagagcagatgatcctcaagacggtcgtgaagcaggcagcaaaatactggcctcgccgtgagcgcctgga

SEQ ID NO: 406705 - DNA, 75 bp, synthetic construct
  source 1..75: mol_type = other DNA
gctggataagcactacctgcgtaagcatggggccaatgcctattacgggcagtcatccctcacgccggggcttca

SEQ ID NO: 406706 - DNA, 75 bp, synthetic construct
  source 1..75: mol_type = other DNA
ggcaggagtccggcacaaatcccggcggtgctggtgcattctcatggcccgttcgcatggggtaaaaacgccgcc

SEQ ID NO: 406707 - DNA, 75 bp, synthetic construct
  source 1..75: mol_type = other DNA
ttatgctgaggcctaaagaaatatgtctgatatataaaataattcctgttattctgattattgtaagtgcaatta

SEQ ID NO: 406708 - DNA, 75 bp, synthetic construct
  source 1..75: mol_type = other DNA
aagactgggcactgtttgaccaaaatggctctatgcaggcggaatgtagaactggacatattccgcgccagagtt

SEQ ID NO: 406709 - DNA, 75 bp, synthetic construct
  source 1..75: mol_type = other DNA
acctgaaaacgctgtacgcacgttaccctggcggttcgttaatgacggaggccggttggccggcgctgcatactt

SEQ ID NO: 406710 - DNA, 75 bp, synthetic construct
  source 1..75: mol_type = other DNA
ggaaaactgggatagttcgttgccggccggaaaagcgcataaaggctcaccgctgccgctgacgattacggtgac

SEQ ID NO: 406711 - DNA, 75 bp, synthetic construct
  source 1..75: mol_type = other DNA
cactgggcgctctgtctgtggatatgacgcaggctaattccacacttcccgatgacagtcagcatgacggacaat

SEQ ID NO: 406712 - DNA, 75 bp, synthetic construct
  source 1..75: mol_type = other DNA
gtgccacgccagtcacagcttaccgctctgtacaacgccaacagtaacaatacgattcaaaccgttcatggctgg

SEQ ID NO: 406713 - DNA, 75 bp, synthetic construct
  source 1..75: mol_type = other DNA
tcaggctgcgaaagtgaagaaaggggaatctatgcctgtgactgtcaccgtgagagacagcgccgggaactcagt

SEQ ID NO: 406714 - DNA, 75 bp, synthetic construct
  source 1..75: mol_type = other DNA
acagtacaacattcagacttaagcgacactctaaatggcaaggaatactttatttgtgctgctacttgtacttca

SEQ ID NO: 406715 - DNA, 75 bp, synthetic construct
  source 1..75: mol_type = other DNA
atgatgttgctactatatgtatggaacccaaatatatttttgatgaattacttgcttttttaggacagcggcgta

SEQ ID NO: 406716 - DNA, 75 bp, synthetic construct
  source 1..75: mol_type = other DNA
ccggtcgctattcagaatctgaaccaccatgtgttgatgatgttgtggggcaggatgcgtggtttgaaactgcaa

SEQ ID NO: 406717 - DNA, 75 bp, synthetic construct
  source 1..75: mol_type = other DNA
attactggcgaaaacacaactggatttgcccctatatttccagacacctgttatcacttaacccattactggctt

SEQ ID NO: 406718 - DNA, 75 bp, synthetic construct
  source 1..75: mol_type = other DNA
tgacatggggattgttttagtcagcgaccgcaatatgcaatcgttagctaattactggcgaaaaacacaactcag

SEQ ID NO: 406719 - DNA, 75 bp, synthetic construct
  source 1..75: mol_type = other DNA
ccgacaccacgcgtatccagacggtataccagccggggagcttcacgccgctcatccgggtcgagacagagaacg

SEQ ID NO: 406720 - DNA, 75 bp, synthetic construct
  source 1..75: mol_type = other DNA
agtccgtccgccgtactgcggatgtgattgaagacagtattcaggaagcgatgctggcatatgttgaccgcccgc

SEQ ID NO: 406721 - DNA, 75 bp, synthetic construct
  source 1..75: mol_type = other DNA
cctcggtgagcgtaactgcgatgccaacctgcttaatatgcagaatgtctccaccctgatccgccgcgccggatt

SEQ ID NO: 406722 - DNA, 75 bp, synthetic construct
  source 1..75: mol_type = other DNA
cctcggggatgagaactgcgatgcaaacctgctcaacatgcagaacgtgtccaccattatccgccgggcgggttt

SEQ ID NO: 406723 - DNA, 75 bp, synthetic construct
  source 1..75: mol_type = other DNA
aaagaaccttgcagaggcgttcgggtattataacgaatggcatctgcatagtgcgctggggtatcctcgccacgg

SEQ ID NO: 406724 - DNA, 75 bp, synthetic construct
  source 1..75: mol_type = other DNA
atgactatcatgacttggttgttaaaaacaatattaaaatcaaagattataaagttattggtggcataggtgtaa

SEQ ID NO: 406725 - DNA, 75 bp, synthetic construct
  source 1..75: mol_type = other DNA
cgccgtctggtggcagaaggggccatcttcggggggcgggcatggctggatccggaactgaataccgccgaaacg

SEQ ID NO: 406726 - DNA, 75 bp, synthetic construct
  source 1..75: mol_type = other DNA
ggaatttttatcagtatccgctgaatccggttcagtatatagattcaatgggactggcatcaaaatatggacact

SEQ ID NO: 406727 - DNA, 75 bp, synthetic construct
  source 1..75: mol_type = other DNA
tctggtcagcctgtcggacgatgaactccctcccgccgctcttgcagcccgcgtgatacttacaaaagtcatgcg

SEQ ID NO: 406728 - DNA, 75 bp, synthetic construct
  source 1..75: mol_type = other DNA
tagggagaaaggcgttgttattgattttgatgccattactgcttgccagcataagcttgaatttcatcggcctaa

SEQ ID NO: 406729 - DNA, 75 bp, synthetic construct
  source 1..75: mol_type = other DNA
aaaagatccggaggaaatggaaggcgctgaacatccgcacaatgagaatgctggcagcgatccgcatcgcgattg

SEQ ID NO: 406730 - DNA, 75 bp, synthetic construct
  source 1..75: mol_type = other DNA
ggttttggtaatatctttgtatcgtggaaagaaagtaccgaacgcgattatgcaggtgcaattattcaggtcaca

SEQ ID NO: 406731 - DNA, 75 bp, synthetic construct
  source 1..75: mol_type = other DNA
ttatgcgttaatattcatgatgctctagctaatagcatttttgatggattagaaaactaccacaagttcctttat

SEQ ID NO: 406732 - DNA, 75 bp, synthetic construct
  source 1..75: mol_type = other DNA
gcgtgatacttacaaaagtcatgcgtgaacttgttgaaaccggccactggccgggcgcaaccctttacgctccct

SEQ ID NO: 406733 - DNA, 75 bp, synthetic construct
  source 1..75: mol_type = other DNA
tttccagtcatgccgggcagcctgagcaggcatcgtcgctgcttgatcaaatcatggcacagacccgtattcagc

SEQ ID NO: 406734 - DNA, 75 bp, synthetic construct
  source 1..75: mol_type = other DNA
attaatgatcaatatacctgtagttataataaccctgacaggatgtctcccctgccgacagatattgccatcgcg

SEQ ID NO: 406735 - DNA, 75 bp, synthetic construct
  source 1..75: mol_type = other DNA
tgatcgttaccgatgggcaactagttaagttgggattactggacagcctgtttatcgcactggatcaatacgaaa

SEQ ID NO: 406736 - DNA, 75 bp, synthetic construct
  source 1..75: mol_type = other DNA
ccgacccatgcgcaccatgtaatccgcgtaccgccagccgcgacgacgtgcgtgagctttatctggaggcgttat

SEQ ID NO: 406737 - DNA, 75 bp, synthetic construct
  source 1..75: mol_type = other DNA
cagttttctctatcactaaaaaacatcagccctatgaatttaagaatttcatttcagcctggctggataccgaac

SEQ ID NO: 406738 - DNA, 75 bp, synthetic construct
  source 1..75: mol_type = other DNA
gaacgctatcaactcagcaaagactccatgacatgggaactaaaaccgggagcagcgccagacgacgttcaccac

SEQ ID NO: 406739 - DNA, 75 bp, synthetic construct
  source 1..75: mol_type = other DNA
ctattgaactcacctcgggtacggtggcggttaccacgattcagaccgccattatcggcctggtgggaactgcac

SEQ ID NO: 406740 - DNA, 75 bp, synthetic construct
  source 1..75: mol_type = other DNA
aaggaaaaagatccggtggaaatggaaggcgctgaacatccgcacaatgagaatgctggcagcgatccgcatcgt

SEQ ID NO: 406741 - DNA, 75 bp, synthetic construct
  source 1..75: mol_type = other DNA
aggaaccggaaatagtctgcaatgcctgcggtcagactggcggagataactgccctgactgtggggcggtgacgg

SEQ ID NO: 406742 - DNA, 75 bp, synthetic construct
  source 1..75: mol_type = other DNA
aatgaatttgaaagaggcattattagcttaaaaaataagtgctatgtttattatgctcatcccattgcaaaacgt

SEQ ID NO: 406743 - DNA, 75 bp, synthetic construct
  source 1..75: mol_type = other DNA
tgaagacatgactgagattgaggagaatatgctcctgccagtttcaggtcagattctgcctgttcgatggctggc

SEQ ID NO: 406744 - DNA, 75 bp, synthetic construct
  source 1..75: mol_type = other DNA
tcagaaactgcgggcagaactccatgaagcccggaaaaacattccgccccaaaatcctgtcgatgcagataaatt

SEQ ID NO: 406745 - DNA, 75 bp, synthetic construct
  source 1..75: mol_type = other DNA
ccgtggtgctgttgcgattgacgatgctggctacgatgaagatgacttcaaaaaacctgttcgcgtcaatttgcc

SEQ ID NO: 406746 - DNA, 75 bp, synthetic construct
  source 1..75: mol_type = other DNA
cgaatgatccgaaatgggtaaaggggattgaaacccgcgattctgtaaaccagaaccagcaagaatcggaacaga

SEQ ID NO: 406747 - DNA, 75 bp, synthetic construct
  source 1..75: mol_type = other DNA
ttactattgtggagaataaaataaaaatattgttggtttcacttttatctatagacaggacgcgtccctatattt

SEQ ID NO: 406748 - DNA, 75 bp, synthetic construct
  source 1..75: mol_type = other DNA
tctgccagagtgtcacaaagaagtatcgctgaatttatgaatgttaatgtaaaagcgatagaaaaaagagcttca

SEQ ID NO: 406749 - DNA, 75 bp, synthetic construct
  source 1..75: mol_type = other DNA
gttaccgctgacgaagtaaacaaaattatgcaggcagccaatatcaaccagcctgatgccgacaaaatactggca

SEQ ID NO: 406750 - DNA, 75 bp, synthetic construct
  source 1..75: mol_type = other DNA
gagtcaattcggtaaaggtatcgatcatagatagtgggcttgctatagctaatgtgtctgagtatcggcgcttag

SEQ ID NO: 406751 - DNA, 75 bp, synthetic construct
  source 1..75: mol_type = other DNA
ttagtaagactatcgatctggaaactgctggcggagtcattgatcgggacaccattaaacggtggcttaagcaat

SEQ ID NO: 406752 - DNA, 75 bp, synthetic construct
  source 1..75: mol_type = other DNA
aaaaaacctgcaccgcctgcggtcagactggcggcggcaactgccctgattgtggcccagtgatgggcaacgcaa

SEQ ID NO: 406753 - DNA, 75 bp, synthetic construct
  source 1..75: mol_type = other DNA
actatgactttggaccgaaatcgccgactgaacttatcagtttgcgcgtccgggtgaataataactatgcgcttg

SEQ ID NO: 406754 - DNA, 75 bp, synthetic construct
  source 1..75: mol_type = other DNA
ggatgacgttacgcacaaactgacggtgacactgggctgtgatgagcagggggtgatcacggcgcgacctgctga

SEQ ID NO: 406755 - DNA, 75 bp, synthetic construct
  source 1..75: mol_type = other DNA
gccgggacattatacccggcccttcgcgatatttttgaccagaccggggcgctggtgattgtggtgcgggcggag

SEQ ID NO: 406756 - DNA, 75 bp, synthetic construct
  source 1..75: mol_type = other DNA
cactgtattacgaagcaaaaaatgacaaagtaagaaaacgtctcggtattaaaggcggtttctactggactgaag

SEQ ID NO: 406757 - DNA, 75 bp, synthetic construct
  source 1..75: mol_type = other DNA
tcgacgttaatgaagattattgccggtattacccctgctgatagcggtacgctggagattggggcaacaactaca

SEQ ID NO: 406758 - DNA, 75 bp, synthetic construct
  source 1..75: mol_type = other DNA
aggtaaattctgttgatgcgaaatatcaggaactgcgggcagaactccatgaagcccggaaaaacattccatcaa

SEQ ID NO: 406759 - DNA, 75 bp, synthetic construct
  source 1..75: mol_type = other DNA
ggtgattgtggtgcgtgcggaaagtaaaccgaaagcgaaagaggctgaacaacgtgcggcggtgattaaggccat

SEQ ID NO: 406760 - DNA, 75 bp, synthetic construct
  source 1..75: mol_type = other DNA
aaagtcgccgctggagcgcctgacgctgcgggcaatgatcaacaacaaactggcactggaggagctgacagtatg

SEQ ID NO: 406761 - DNA, 75 bp, synthetic construct
  source 1..75: mol_type = other DNA
aagaggctatctacaaaaacattgtggtcagtttcagcagcaaggcatttcgcagaaccggcgatccaacgtttc

SEQ ID NO: 406762 - DNA, 75 bp, synthetic construct
  source 1..75: mol_type = other DNA
ctgtcggggaaggagtggtatctccctttaccctgacgttgtccggcggtgaggatgaggcatttccggttaata

SEQ ID NO: 406763 - DNA, 75 bp, synthetic construct
  source 1..75: mol_type = other DNA
ttgagttccgcgctggattttacagcgaaaaaagccgggcggtccggcaatgagatttcagttgtggccaacgga

SEQ ID NO: 406764 - DNA, 75 bp, synthetic construct
  source 1..75: mol_type = other DNA
gctgaatgatgaactgaacacggcagaaaacctggcagccgggtggttgtatatcgactatgacttcggaccaaa

SEQ ID NO: 406765 - DNA, 75 bp, synthetic construct
  source 1..75: mol_type = other DNA
gtgcgaactgcaggtatccgcctttacagcagcgaattccatgccgattttgccgccatcaccctgaacacgctg

SEQ ID NO: 406766 - DNA, 75 bp, synthetic construct
  source 1..75: mol_type = other DNA
aatcagtgttaatgcagattctgtctaaaaaaattatattttatagcaaatttcttttgctatttaatacgctga

SEQ ID NO: 406767 - DNA, 75 bp, synthetic construct
  source 1..75: mol_type = other DNA
caataggttcatgcaactggttagcgagcggattcaatcgatatgaatgctctgtatttacgacaaataatgtct

SEQ ID NO: 406768 - DNA, 75 bp, synthetic construct
  source 1..75: mol_type = other DNA
aaggcactcttggaattatatgtattctaaaggaatagaaggcgctgaattagaatatagtagaaggaaagattt

SEQ ID NO: 406769 - DNA, 75 bp, synthetic construct
  source 1..75: mol_type = other DNA
tatataatctttcaggtcataggttaaggcactcttggaattatatgtattctaaaggaatagaaggcgctgaat

SEQ ID NO: 406770 - DNA, 75 bp, synthetic construct
  source 1..75: mol_type = other DNA
cagctggcggtgaaaaaacgcatcgagattgatgagccagaacagcagttcctgctgtggtttcctcatgatgcg

SEQ ID NO: 406771 - DNA, 75 bp, synthetic construct
  source 1..75: mol_type = other DNA
aagaacactacaactacagctcaccatatacactggcaaaatgtgaaaccttcgaggctattgagcaacttatta

SEQ ID NO: 406772 - DNA, 75 bp, synthetic construct
  source 1..75: mol_type = other DNA
cctgctcgcgagcaggactggttgctggatatccgcctctatagtaccgaattccacgctgattatgcggcgatc

SEQ ID NO: 406773 - DNA, 75 bp, synthetic construct
  source 1..75: mol_type = other DNA
atgtacctggtgagtgatccgctggggttgcaggggggtgagcagacttaccggtatgtgccgaatccttgtggg

SEQ ID NO: 406774 - DNA, 75 bp, synthetic construct
  source 1..75: mol_type = other DNA
aagtcaaatcttccgcagagactaatcattgaaataataataccgtttatgaaattgggttgggtcgaattagta

SEQ ID NO: 406775 - DNA, 75 bp, synthetic construct
  source 1..75: mol_type = other DNA
aaccccgggaaatcatgaaattgtacagccgtcgcatgcaaatcgagcagaacttccgggatgaaaaaagcgagc

SEQ ID NO: 406776 - DNA, 75 bp, synthetic construct
  source 1..75: mol_type = other DNA
aaagtaaagccaaagacacgattgaagcgaataagcgttttattgtaggccatcaactgcctgaaagtgaatttt

SEQ ID NO: 406777 - DNA, 75 bp, synthetic construct
  source 1..75: mol_type = other DNA
gcctaaaagaccggccaaaccgtaacacccgggatgtgcagtacgaggcgcgcccgttgctcggcgcttcacatg

SEQ ID NO: 406778 - DNA, 75 bp, synthetic construct
  source 1..75: mol_type = other DNA
ttgtatcgatgccttcgcaactcttcactatggctcgttcttttaaagcggttgccaatggcaaaatttatatcg

SEQ ID NO: 406779 - DNA, 75 bp, synthetic construct
  source 1..75: mol_type = other DNA
aacaaatgagaaaccgctatactaaacgtgcaaatacactatgggctatcatgaacaataaaccaagttccggta

SEQ ID NO: 406780 - DNA, 75 bp, synthetic construct
  source 1..75: mol_type = other DNA
tttcgaattattagaactattgaaagagataaatattatcatcgaagaaaggatcaaaactggtggagtacatac

SEQ ID NO: 406781 - DNA, 75 bp, synthetic construct
  source 1..75: mol_type = other DNA
aaatatacctggttgaaagatggtgatgtaaaagatgactggacaccggaagaaaaatcgttattcataactaat

SEQ ID NO: 406782 - DNA, 75 bp, synthetic construct
  source 1..75: mol_type = other DNA
aacgatctaccagtaaatggtaatggtaaaccatttaagagcgtaaccatattccgtgatcctaattatcctaac

SEQ ID NO: 406783 - DNA, 75 bp, synthetic construct
  source 1..75: mol_type = other DNA
ctctttgcctcgatcatgcttgatatggaaaagctgattagcgcgtatcgacgtatgctgcgacaagggaatcat

SEQ ID NO: 406784 - DNA, 75 bp, synthetic construct
  source 1..75: mol_type = other DNA
taccgcgtagtaaccgaccgcaccatcgacagccacattaaaaacctgcgccgcaagctggaatctctcgacgcc

SEQ ID NO: 406785 - DNA, 75 bp, synthetic construct
  source 1..75: mol_type = other DNA
tacaaaagaagctgctggccgttgtgacctcgttgaaaccgataatagttgtgtggagaactgtttaaaagggaa

SEQ ID NO: 406786 - DNA, 75 bp, synthetic construct
  source 1..75: mol_type = other DNA
gcgcgtcccctgctcggctttaccggtgaggatgtgcagatgattgaagagattattctggcgcacctcgaccgt

SEQ ID NO: 406787 - DNA, 75 bp, synthetic construct
  source 1..75: mol_type = other DNA
ggaatcggcatcgccaaccttgtgcccattgtcttttccgcagcgggaaatcagcccaatatttccaccaacaca

SEQ ID NO: 406788 - DNA, 75 bp, synthetic construct
  source 1..75: mol_type = other DNA
gggcagcagtatgatgaggagtccggcctgtattacaaccgccaccgctattatgacccgctgcaggggaggtat

SEQ ID NO: 406789 - DNA, 75 bp, synthetic construct
  source 1..75: mol_type = other DNA
tgaagagaacccgcatcagctgcagcagcttatccggctgccggggcagcagtatgatgaggagtccggcctgta

SEQ ID NO: 406790 - DNA, 75 bp, synthetic construct
  source 1..75: mol_type = other DNA
aactttgatagcgtgagtaaagttatggatgagcgtactcgcgaagctaggttaaagcttattggctctcagttc

SEQ ID NO: 406791 - DNA, 75 bp, synthetic construct
  source 1..75: mol_type = other DNA
tctcgcaggaagtctatcatgatgcagaagtcacacgccaaccgctacggaaaagtatcaaaggtgcggcctcga

SEQ ID NO: 406792 - DNA, 75 bp, synthetic construct
  source 1..75: mol_type = other DNA
ttcccgaaagcattactgtactaactatgcaaataaacagggccaacggtgaatctaaacgtaagtctattatga

SEQ ID NO: 406793 - DNA, 75 bp, synthetic construct
  source 1..75: mol_type = other DNA
ttgtctggtgatcttgatgatgatgctttagagtattggaagaatgtagtagatggtgcaatggcattagctact

SEQ ID NO: 406794 - DNA, 75 bp, synthetic construct
  source 1..75: mol_type = other DNA
atgcgctgttgttgactggtcgtcacgctatttgattaaaaatctcaatgcaaaaacagaaatcgccagccttgc

SEQ ID NO: 406795 - DNA, 75 bp, synthetic construct
  source 1..75: mol_type = other DNA
ggagagcaaatttgcccaggccacgttgcagtggggcggaccgtggggaacgacctggtatggtggtggacaata

SEQ ID NO: 406796 - DNA, 75 bp, synthetic construct
  source 1..75: mol_type = other DNA
tacagcaaaggcgatccagcgtatgtataatgattatattaatggcattggtgcggctcagattgtccgtactta

SEQ ID NO: 406797 - DNA, 75 bp, synthetic construct
  source 1..75: mol_type = other DNA
agaaaagagacttaaggctaaatcactttaaagccttctctcataaatgcgagacaaaacctgacgtgttaatta

SEQ ID NO: 406798 - DNA, 75 bp, synthetic construct
  source 1..75: mol_type = other DNA
atgagtacaaaagctagtaagaactctgtaaatagttcatatacgcttgcatgtaatgccaatggtacagtagct

SEQ ID NO: 406799 - DNA, 75 bp, synthetic construct
  source 1..75: mol_type = other DNA
ggttttggtaatatctttgtttcatggaaagaaagtaccgaacgcgattatgcaggtgcaattattcaagttaca

SEQ ID NO: 406800 - DNA, 75 bp, synthetic construct
  source 1..75: mol_type = other DNA
tacaccatatactgtactatcaagtattggtctgatgcactaagccatctagtgattattgatgtagatatacag

SEQ ID NO: 406801 - DNA, 75 bp, synthetic construct
  source 1..75: mol_type = other DNA
agagtctattgatcgtctgactcgtcttgacccctacaaagctgtagaaattttgtcgggattaattaaccgggg

SEQ ID NO: 406802 - DNA, 75 bp, synthetic construct
  source 1..75: mol_type = other DNA
tactgtcatacccaatgatttttttagtgctaaaataaggaataattgccagttgtcgctaccacttattttgtc

SEQ ID NO: 406803 - DNA, 75 bp, synthetic construct
  source 1..75: mol_type = other DNA
atggaaataaaacgaattgaaaatgcgcgttatcttgagaatggcgcgattgactgcgaggtgttgtttgatggc

SEQ ID NO: 406804 - DNA, 75 bp, synthetic construct
  source 1..75: mol_type = other DNA
caccccattagtgttgatgccagcgttatttgttcttggtgcgatgattggtgccatgaatgtagcgatgaactc

SEQ ID NO: 406805 - DNA, 75 bp, synthetic construct
  source 1..75: mol_type = other DNA
cacctcagttcggcctttgcatggatcttgcactggtaacaggacagcgcgaaggagatctggcggctatgagat

SEQ ID NO: 406806 - DNA, 75 bp, synthetic construct
  source 1..75: mol_type = other DNA
gacgtggtcatgccgggcatcgggctttaccgcattcaggcagaccgttccggcgattatgccggggctcgggag

SEQ ID NO: 406807 - DNA, 75 bp, synthetic construct
  source 1..75: mol_type = other DNA
ctggcgcgatagaagccaagaaacgttatatcgttggtaataacttgccttcagatgaagcctgttggaaaggct

SEQ ID NO: 406808 - DNA, 75 bp, synthetic construct
  source 1..75: mol_type = other DNA
atgaagcataaaaattttattcagaaatggtatgattcaacttttgagtcaattctccatgatgttaacacgatt

SEQ ID NO: 406809 - DNA, 75 bp, synthetic construct
  source 1..75: mol_type = other DNA
gcccaacacccgcgctttcaaaaatacacgctatggctgatgtctgacatcaccgcaccagaagcaggtcagata

SEQ ID NO: 406810 - DNA, 75 bp, synthetic construct
  source 1..75: mol_type = other DNA
cgcattactctcggccagcctttctcattcggcggacatgttcagaaaactgtactacgacaacggatcccacgc

SEQ ID NO: 406811 - DNA, 75 bp, synthetic construct
  source 1..75: mol_type = other DNA
ggaagcggaatgaccgccgggacatacgaatacggttatgtggatgaccggggaattattgattacgggagggtg

SEQ ID NO: 406812 - DNA, 75 bp, synthetic construct
  source 1..75: mol_type = other DNA
atggtatggcgcgatgcggaaaatcggcaggtaaagttgtcaatgcaacaactggatgagctgcttactgcaatg

SEQ ID NO: 406813 - DNA, 75 bp, synthetic construct
  source 1..75: mol_type = other DNA
cgagtgcgctggcggaaaaaggtatcgacgtcgctacctggagcgcgctgaagaacagtatctacccaggcgcca

SEQ ID NO: 406814 - DNA, 75 bp, synthetic construct
  source 1..75: mol_type = other DNA
ttgcaaaaacgggagtgaccatagattccgtttgccaagcggcccccatattgaatggctgacggtactggattt

SEQ ID NO: 406815 - DNA, 75 bp, synthetic construct
  source 1..75: mol_type = other DNA
cattcggcggacatgttcagaaaactgtactacgacaacggatcccacgccgggtgcatcatctacatcggtgca

SEQ ID NO: 406816 - DNA, 75 bp, synthetic construct
  source 1..75: mol_type = other DNA
catgtgcagaaattggtgaggcgatggctcgggcggtcgtaaagcctgcatcccgtgctcgtcggcgtctttcgt

SEQ ID NO: 406817 - DNA, 75 bp, synthetic construct
  source 1..75: mol_type = other DNA
gaaaaagagttgctgcaactcagtttgcaacaagggaaatataaccagaagcgcgcggctgaattactggggtta

SEQ ID NO: 406818 - DNA, 75 bp, synthetic construct
  source 1..75: mol_type = other DNA
tgcaacaagggaaatataaccagaagcgcgcggctgaattactggggttaacctatcatcagttccgcgcgttgt

SEQ ID NO: 406819 - DNA, 75 bp, synthetic construct
  source 1..75: mol_type = other DNA
tagctgaaatatatgttaggtatcgctatggcgaacggattgcagaagaagaaaaaccatatttaattacggaac

SEQ ID NO: 406820 - DNA, 75 bp, synthetic construct
  source 1..75: mol_type = other DNA
gtgcgtcatttaatatgagctcatcagcatcgataagcactttggacggcaataagtttattgcttcagttatgg

SEQ ID NO: 406821 - DNA, 75 bp, synthetic construct
  source 1..75: mol_type = other DNA
cgatcggtttagaagttatataagagcgggtatctatcaaaaaaagagcagtgatccagttcagttgttggcagt

SEQ ID NO: 406822 - DNA, 75 bp, synthetic construct
  source 1..75: mol_type = other DNA
caacgcgacgctgggcggcgataattcgcccaccgataagatgaacgtaaaaggcgatacccaagggaatagccg

SEQ ID NO: 406823 - DNA, 75 bp, synthetic construct
  source 1..75: mol_type = other DNA
ggttcctgatgtgctaaggaattatttatcagcgataccggtggaaataaatgaaaaggcacgatataaacctgg

SEQ ID NO: 406824 - DNA, 75 bp, synthetic construct
  source 1..75: mol_type = other DNA
acatgtggtttttcaacgttgttaccctatgtaaggcaacaaccgttggcaatgcagcaacgatttaatttatta

SEQ ID NO: 406825 - DNA, 75 bp, synthetic construct
  source 1..75: mol_type = other DNA
atgcgaaaaataacaattattctactgctgacattctcatgtacaaaaggtctggcatttgacatttccatgtct

SEQ ID NO: 406826 - DNA, 75 bp, synthetic construct
  source 1..75: mol_type = other DNA
ggtggcacctgactatcgcattatactgaaggatcgccgtcagatctttgtggaagtaaaaaactttaacgcgga

SEQ ID NO: 406827 - DNA, 75 bp, synthetic construct
  source 1..75: mol_type = other DNA
cgtcgatacgctggttgtcggcgcgggtgactacacctggaaaggccgtaactatcaggtaaacgggacgggcga

SEQ ID NO: 406828 - DNA, 75 bp, synthetic construct
  source 1..75: mol_type = other DNA
tcgtcactcagagcgtggaggatgccaaattcgcgtatcaacaaaatggtccaaacacggctttaaagagaaata

SEQ ID NO: 406829 - DNA, 75 bp, synthetic construct
  source 1..75: mol_type = other DNA
gggaaaaaagcgttggatatgtttggtttattcaatgtcactcagatggcattagaaatacccagcaccgttccg

SEQ ID NO: 406830 - DNA, 75 bp, synthetic construct
  source 1..75: mol_type = other DNA
ctaatactaaatatgccgttcttaccaatgctgccgcaaatgcgcttggtgctttagggggatttgcagtatcca

SEQ ID NO: 406831 - DNA, 75 bp, synthetic construct
  source 1..75: mol_type = other DNA
atgtcggtcattgttggccgtgcgctgccagatgtccgagatggcctgaagccggtacaccgtcgcgtactttac

SEQ ID NO: 406832 - DNA, 75 bp, synthetic construct
  source 1..75: mol_type = other DNA
cttgagatatttcgtcagaccaataaaggttatccgtgtgaagttttacgtaattgggcctcaatgactcctgtg

SEQ ID NO: 406833 - DNA, 75 bp, synthetic construct
  source 1..75: mol_type = other DNA
aatgtgttgttaaagtctcaattttcggttgaatcggcggcacatactatcgaagtccgactggaggctggagaa

SEQ ID NO: 406834 - DNA, 75 bp, synthetic construct
  source 1..75: mol_type = other DNA
cagcagggcatgccatacagtgtaatacccccggattaaagccagacactattttatggtgggctggtacgactc

SEQ ID NO: 406835 - DNA, 75 bp, synthetic construct
  source 1..75: mol_type = other DNA
ctggattctgcgaccaccgaaagcctgcgtgcggcaacgcacgacgtgctggctggcctgaccgcgcgtgaagcg

SEQ ID NO: 406836 - DNA, 75 bp, synthetic construct
  source 1..75: mol_type = other DNA
tcgcctctttttaccaaaaccagtacacgccgaagtaatccagtacctgcgcgtaatggggctgacaggagttaa

SEQ ID NO: 406837 - DNA, 75 bp, synthetic construct
  source 1..75: mol_type = other DNA
gtcgctggaaagccgtccggttgtccgaccggattttcaatggccgggtgcatccggtacgcaagactcctgatg

SEQ ID NO: 406838 - DNA, 75 bp, synthetic construct
  source 1..75: mol_type = other DNA
aggaagagttccaggcactgtctgccgagctttcacgaaagcttgagcagatggcggttgaagcggaaaaaagcg

SEQ ID NO: 406839 - DNA, 75 bp, synthetic construct
  source 1..75: mol_type = other DNA
atagaggattttggggaaacacatctcgattttttgaagcaatatggtgattttgaaaatggtattcctgttcac

SEQ ID NO: 406840 - DNA, 75 bp, synthetic construct
  source 1..75: mol_type = other DNA
ctggatgcgtgacttccattattcagaagataaagaatacattgaaattgctggaaacaagatcaggccctcata

SEQ ID NO: 406841 - DNA, 75 bp, synthetic construct
  source 1..75: mol_type = other DNA
gcgcggtgattaatattgagtacacctcattgtcgagtggtcatgggagcaggcaaatagttcctcataccttga

SEQ ID NO: 406842 - DNA, 75 bp, synthetic construct
  source 1..75: mol_type = other DNA
ggaaaaccgcgatttaatgcagcgtgctgaaatggttcaaaagaaacgaggtaggccaccgaagataaaaccgaa

SEQ ID NO: 406843 - DNA, 75 bp, synthetic construct
  source 1..75: mol_type = other DNA
tatattggcgtgataactcaggcccttacggcatcagtaaatcgattttttattgcaaatttacaaactaataac

SEQ ID NO: 406844 - DNA, 75 bp, synthetic construct
  source 1..75: mol_type = other DNA
agggccaaagatacatttgctgtagctataaaagtattaagctacatgctcccctgtacggcaattatcatggct

SEQ ID NO: 406845 - DNA, 75 bp, synthetic construct
  source 1..75: mol_type = other DNA
catctggctcgaaaacagcgatcgctggggaaatccccgcgagaagctgttgcagggggaagaatggcaggctca

SEQ ID NO: 406846 - DNA, 75 bp, synthetic construct
  source 1..75: mol_type = other DNA
gcttgttctggctactgggataccaattttcacctcgtctggcggatgctggtgaggcggtgttctggcgggctg

SEQ ID NO: 406847 - DNA, 75 bp, synthetic construct
  source 1..75: mol_type = other DNA
ctatcggccgaatgctcgatatgagcgatattatgcggatgctctactccaccattgacgtagtggtgcatatgg

SEQ ID NO: 406848 - DNA, 75 bp, synthetic construct
  source 1..75: mol_type = other DNA
tcgttctgcctcctgctcgttatgtgcgttcctatgcacctgcgcagcaaagtgttgcggcagggagtgaatgga

SEQ ID NO: 406849 - DNA, 75 bp, synthetic construct
  source 1..75: mol_type = other DNA
tcaataaacccaacgccgcgaaacagcaggggcaattgctggaaaaagcgcgaaatgaaatgggcgaactggcct

SEQ ID NO: 406850 - DNA, 75 bp, synthetic construct
  source 1..75: mol_type = other DNA
ctgacagcagttttagcagcagtgaagagtcgaaagtgcgactggaagcgccggggcgtgattatcggcgctatc

SEQ ID NO: 406851 - DNA, 75 bp, synthetic construct
  source 1..75: mol_type = other DNA
ccctgaattcagcgaagcagagttacgaccagtacacgacgaatatgacccgcagccatgaatatgctgaaatgg

SEQ ID NO: 406852 - DNA, 75 bp, synthetic construct
  source 1..75: mol_type = other DNA
aaatgggcgaactggcctatatggtgccggtgaaagaactgacgggaacggtcactttgaaccgccccgggaatc

SEQ ID NO: 406853 - DNA, 75 bp, synthetic construct
  source 1..75: mol_type = other DNA
agatgaatctgccgtgcaaaacgttgttgaaagggttggatgaagctatcgcccggcgcggaactaaaactgaag

SEQ ID NO: 406854 - DNA, 75 bp, synthetic construct
  source 1..75: mol_type = other DNA
gcgtgcaacagttggcggtccagctagatgaaacctggaaaaccgtcgcatcccgctttgaaggaaatgcggagg

SEQ ID NO: 406855 - DNA, 75 bp, synthetic construct
  source 1..75: mol_type = other DNA
ggcggggcagccctcgggctggccggtttccgataacgccggtattctcacccccgtctgggctatcgccactga

SEQ ID NO: 406856 - DNA, 75 bp, synthetic construct
  source 1..75: mol_type = other DNA
ggaggctgccatcatggctacaatcctcaccccgtcatacccgcaatatatctttgtgtttgccgcaatccgccg

SEQ ID NO: 406857 - DNA, 75 bp, synthetic construct
  source 1..75: mol_type = other DNA
catttttcgggctgtggtgtttatgtgtacaccgtggttctttcgagataatggcagtccgggcggggcagcctt

SEQ ID NO: 406858 - DNA, 75 bp, synthetic construct
  source 1..75: mol_type = other DNA
ctcgagagcatccttattataactttgatttcccctgtggagtggaaaatatacgaaggattattcccctaaatt

SEQ ID NO: 406859 - DNA, 75 bp, synthetic construct
  source 1..75: mol_type = other DNA
tggctgagagaaaaatttcatatataaaaaaaattaaccgctatctcaaattgcgagtttttactcatgttacgt

SEQ ID NO: 406860 - DNA, 75 bp, synthetic construct
  source 1..75: mol_type = other DNA
gtcaaaaaagattctttactgtcccacatggagaaattatgcaaaaacgaggttttttccttttactgattttga

SEQ ID NO: 406861 - DNA, 75 bp, synthetic construct
  source 1..75: mol_type = other DNA
ctttctggtgacggatatggaggtcgttgtgatccgttatctattttggttcttactgcaaaacaccttgaaaac

SEQ ID NO: 406862 - DNA, 75 bp, synthetic construct
  source 1..75: mol_type = other DNA
ccgcgaccgcttcatccgctcggttaatccgattgtggcagagaagatgcgcgccattctggaagaactgaaacg

SEQ ID NO: 406863 - DNA, 75 bp, synthetic construct
  source 1..75: mol_type = other DNA
agccaccatcgttgcttcgtctaaataatcggatcaaacagctactcccaccggtagatttaacggaactgttac

SEQ ID NO: 406864 - DNA, 75 bp, synthetic construct
  source 1..75: mol_type = other DNA
tctattgtgaagcagaaacaagttcatactgaaaagaaaagaatcattgcgaagcagccttctatttcgcgtacc

SEQ ID NO: 406865 - DNA, 75 bp, synthetic construct
  source 1..75: mol_type = other DNA
tcctacccccgtctgggctatcgccatcgagcgtaggaactccggcgatagcagttatttgctactcgaaggaga

SEQ ID NO: 406866 - DNA, 75 bp, synthetic construct
  source 1..75: mol_type = other DNA
tagtcttttttctaattatcgaatggactcaattatccccaaaaaatacagtacgctttttatttctggtccgga

SEQ ID NO: 406867 - DNA, 75 bp, synthetic construct
  source 1..75: mol_type = other DNA
ccggacggggaataaacagtgtggaaaaaattatctctacctgggcacctgcctctgataataacaacacaactg

SEQ ID NO: 406868 - DNA, 75 bp, synthetic construct
  source 1..75: mol_type = other DNA
gggcttgcgggttcgctagacaccctgcgccgccatatcctggacaacttccctcgtatcgagcagaccctgacg

SEQ ID NO: 406869 - DNA, 75 bp, synthetic construct
  source 1..75: mol_type = other DNA
tctctcattacacttaactcatacggtgaaatggactgaatctctcgatacatttctgaatatgccaaccccggt

SEQ ID NO: 406870 - DNA, 75 bp, synthetic construct
  source 1..75: mol_type = other DNA
ctattccagagcagactgccgaaagcgaagctgccccatcaggccctgtcgatttctatcagatgtttatctccg

SEQ ID NO: 406871 - DNA, 75 bp, synthetic construct
  source 1..75: mol_type = other DNA
tgtgctaatatcccctttttaccctgaggctggtttctatgcgggaaatgccatggctcgcaataaatatatcta

SEQ ID NO: 406872 - DNA, 75 bp, synthetic construct
  source 1..75: mol_type = other DNA
gttgcggcagaacggcggagaccttagcaaagcactggcatcatataactgggggatcgggaatgttaagcgtta

SEQ ID NO: 406873 - DNA, 75 bp, synthetic construct
  source 1..75: mol_type = other DNA
cgcaaaaagataattgaaaattttcccaaaattgaagtcaccatcacaaaggtcataaaggggatcctctggctg

SEQ ID NO: 406874 - DNA, 75 bp, synthetic construct
  source 1..75: mol_type = other DNA
atgatgcaggagcgaaaaagttcggttctgtcctcgccggtacaactgcaaatgtcatcaaaatggggctggctg

SEQ ID NO: 406875 - DNA, 75 bp, synthetic construct
  source 1..75: mol_type = other DNA
gcggcgaaaaatacttaacaaggaaatagttcaacagcaagcacaaagaaaacactggtggctaaaaggagaaaa

SEQ ID NO: 406876 - DNA, 75 bp, synthetic construct
  source 1..75: mol_type = other DNA
gtaaatcctgggcggtgtctgatgtggtgggtaagcctccggagtggttccagttcgatatggaaaaccgcctgc

SEQ ID NO: 406877 - DNA, 75 bp, synthetic construct
  source 1..75: mol_type = other DNA
caaggtattgctcgactggatggggccaatgttcaataaactggagtcgctttatcagctgccagctggcctgtt

SEQ ID NO: 406878 - DNA, 75 bp, synthetic construct
  source 1..75: mol_type = other DNA
tcgcctgggcgtacagacccgtgatgcccgcggtaacatgcgtgacatggctgctatctttacgggcgttggaca

SEQ ID NO: 406879 - DNA, 75 bp, synthetic construct
  source 1..75: mol_type = other DNA
gttttggcaattcagcgttattgcgtcatcactttcaccaacgttttttattatctccttcgcaatatcgcaaaa

SEQ ID NO: 406880 - DNA, 75 bp, synthetic construct
  source 1..75: mol_type = other DNA
atacggacggacgacgagcggacccaccactaccactacgacagccagcaccgcctggtgttctacacgcggata

SEQ ID NO: 406881 - DNA, 75 bp, synthetic construct
  source 1..75: mol_type = other DNA
gagacaggctgacgacggtgcagactgacaccacacgtatccagacggtatacgagccgggaagcttcacgccgc

SEQ ID NO: 406882 - DNA, 75 bp, synthetic construct
  source 1..75: mol_type = other DNA
ggggcggtatatcactcaggatccgattgggctgaaggggggatggaatttttatcagtatccgttgaatccgat

SEQ ID NO: 406883 - DNA, 75 bp, synthetic construct
  source 1..75: mol_type = other DNA
acagtttagatgagagtatgcgagtacaggtttcagaagcggtcaacggtagcgggatcgtcggtaggttgtttt

SEQ ID NO: 406884 - DNA, 75 bp, synthetic construct
  source 1..75: mol_type = other DNA
accgtgactacgactggaatgacaatggcgacctggtgcgcatcagcggcccgcgacagacgcgggaatatggct

SEQ ID NO: 406885 - DNA, 75 bp, synthetic construct
  source 1..75: mol_type = other DNA
cggtgcataacccggagacgggggaactgctgtggcagcatgagacagagcacgcatacaacgaacagggtctgg

SEQ ID NO: 406886 - DNA, 75 bp, synthetic construct
  source 1..75: mol_type = other DNA
cggaatatcatcgcgagaagaaaaccatttactggcggcaccggacaaaaaccgcactgttacgtgaaacaccgg

SEQ ID NO: 406887 - DNA, 75 bp, synthetic construct
  source 1..75: mol_type = other DNA
ctcagtaaatatcaatacggttctggcgagccgcttacgtttgtacgtgttgatgacgaagagtatccggaaatc

SEQ ID NO: 406888 - DNA, 75 bp, synthetic construct
  source 1..75: mol_type = other DNA
cttgccggtatcagcgtcggcggtatgtactgcccggagtgtggcacggttcactggccggacggagtcgccccg

SEQ ID NO: 406889 - DNA, 75 bp, synthetic construct
  source 1..75: mol_type = other DNA
accgcaaaattgaatgggaacacgtcaaatctggcacctccggtgccgacgactggcgcgcaccgctggaagcat

SEQ ID NO: 406890 - DNA, 75 bp, synthetic construct
  source 1..75: mol_type = other DNA
ggagcgccgaattatttactggaagcacagcgttcgtcgttcgctgcttagtgtcaatccggctcattttatttc

SEQ ID NO: 406891 - DNA, 75 bp, synthetic construct
  source 1..75: mol_type = other DNA
gataacctcaacctgacgctgaacgatagcgtgcttaactaccgtaaaacgctgcaacctgaagccaatgcctct

SEQ ID NO: 406892 - DNA, 75 bp, synthetic construct
  source 1..75: mol_type = other DNA
caccggtcaacattgaggaagagctgaagagctcctatctggattatgcgatgtcggtcattgttggccgtgcgc

SEQ ID NO: 406893 - DNA, 75 bp, synthetic construct
  source 1..75: mol_type = other DNA
gcatcaagaagacattttggccaaaatgaaagaagtgtttttggttttttaacttcgtcagagccctacgctttc

SEQ ID NO: 406894 - DNA, 75 bp, synthetic construct
  source 1..75: mol_type = other DNA
gacacactcagtttaatcgacacttaatcggtaacagcggctggatccgccagacacgccaacaacttgaaacac

SEQ ID NO: 406895 - DNA, 75 bp, synthetic construct
  source 1..75: mol_type = other DNA
gcttatctggaacaaaaaaaatggcgacacgctcagtttaatcggcacttaatcggtaacagtggttggattcgc

SEQ ID NO: 406896 - DNA, 75 bp, synthetic construct
  source 1..75: mol_type = other DNA
gtacctgatgagccatatgccgtggctaccgtttttgctgatcctgctgcccgccaacatcatgacgatggtgat

SEQ ID NO: 406897 - DNA, 75 bp, synthetic construct
  source 1..75: mol_type = other DNA
acaaaaatgttaaaagcactggatgtctctgaaagtaactataatgatcttaaaatgagagccaaagtcgtttct

SEQ ID NO: 406898 - DNA, 75 bp, synthetic construct
  source 1..75: mol_type = other DNA
ggtgtttaaagaatagcctacctgttacctcagataaattcggggggttttacattatatttccagataatggaa

SEQ ID NO: 406899 - DNA, 75 bp, synthetic construct
  source 1..75: mol_type = other DNA
ttacttaagtgaaaaattaggtgtagagataagagattatatacttggttactttaacgaagaaaaagcattagc

SEQ ID NO: 406900 - DNA, 75 bp, synthetic construct
  source 1..75: mol_type = other DNA
gttactatggtagctccagcatttcatttgaagatggggtgatgcatggaaaactcgaatgtataaatgatctcg

SEQ ID NO: 406901 - DNA, 75 bp, synthetic construct
  source 1..75: mol_type = other DNA
ttatctaagaaacatactgcccataatttccctggcaagttacttggctatatgaaaaatagcttacccatacta

SEQ ID NO: 406902 - DNA, 75 bp, synthetic construct
  source 1..75: mol_type = other DNA
tatgatataaaatcatccgatacaaaagttgtagaatatatttcacaaaaaattctcagtgaaatacacgataaa

SEQ ID NO: 406903 - DNA, 75 bp, synthetic construct
  source 1..75: mol_type = other DNA
aaagcccccctttggtgtaaagaatggaatccaaccagttctctttttggtatatattttagccaacaaagataa

SEQ ID NO: 406904 - DNA, 75 bp, synthetic construct
  source 1..75: mol_type = other DNA
aattctcagtgaaatacacgataaagattatagcaaaaatattttactggcagctcttgcaaaagttagtattgc

SEQ ID NO: 406905 - DNA, 75 bp, synthetic construct
  source 1..75: mol_type = other DNA
ctgtaggcatcacgatttatcagttaccgcgctcaaaatacgaggagctaacgaatgttaattttccagattgcc

SEQ ID NO: 406906 - DNA, 75 bp, synthetic construct
  source 1..75: mol_type = other DNA
ctgaaacgctggattgcggcctttaacaaggcgcagaacgccgctgaacgcctgcttttactggcaccgggtaag

SEQ ID NO: 406907 - DNA, 75 bp, synthetic construct
  source 1..75: mol_type = other DNA
tttttccctaaactgatcgaaaactttggaaatcaagcaccgcaaggaacaacgttatttaacaagtatcagcaa

SEQ ID NO: 406908 - DNA, 75 bp, synthetic construct
  source 1..75: mol_type = other DNA
attggccaacaactcaattaccaccaggatatacttgtgcagaaccctatttattcccagacattaataaacccg

SEQ ID NO: 406909 - DNA, 75 bp, synthetic construct
  source 1..75: mol_type = other DNA
cggggtctgaagctcagaggaacgaaagctcacgttaagcaatgtctccctcttccgacgcctcatttaatggac

SEQ ID NO: 406910 - DNA, 75 bp, synthetic construct
  source 1..75: mol_type = other DNA
tcttccgacgcctcatttaatggacgcagatgctcttcgcaatcagctttgtcagaggcttataagtcggttgaa

SEQ ID NO: 406911 - DNA, 75 bp, synthetic construct
  source 1..75: mol_type = other DNA
caaggagaactctgaggaatttgaccgctttttcgcagttttaatgcaaatgtacatggcaaaaaaccctataat

SEQ ID NO: 406912 - DNA, 75 bp, synthetic construct
  source 1..75: mol_type = other DNA
aagcctgtatatactgtattggaactggcattctggatttcagtggttctcctgattatatacatatcaggcaat

SEQ ID NO: 406913 - DNA, 75 bp, synthetic construct
  source 1..75: mol_type = other DNA
cgagcaaaaaatttctggtgaatgcctcccgctaaaaaaagtatcgctgtacctgaataacgaaacaccggctgg

SEQ ID NO: 406914 - DNA, 75 bp, synthetic construct
  source 1..75: mol_type = other DNA
gccgtggtcggggcagtgctactgcgtaaattgctgccgtggtataaccccttgcaaaatctggctgactggctg

SEQ ID NO: 406915 - DNA, 75 bp, synthetic construct
  source 1..75: mol_type = other DNA
gccctctgttattacagtgatgatggtctggcagaggcggataataacacagcggaaagagcgcttcgtgccgtc

SEQ ID NO: 406916 - DNA, 75 bp, synthetic construct
  source 1..75: mol_type = other DNA
atggaaattttatctgtaatgaattctgttgtgaccagattacgtgaacacaactccgaaatggatatatttatt

SEQ ID NO: 406917 - DNA, 75 bp, synthetic construct
  source 1..75: mol_type = other DNA
ttttattcatcctggataaacatgaacgggcatacagatgccagtaccccgtatatatttttttagctatagtat

SEQ ID NO: 406918 - DNA, 75 bp, synthetic construct
  source 1..75: mol_type = other DNA
ggtttattgccctactgatgtatatcttacgcagcagcgtccgcgacagcgtctgccgcattattcaaagcgata

SEQ ID NO: 406919 - DNA, 75 bp, synthetic construct
  source 1..75: mol_type = other DNA
attcaaagcgatattcagcactactggaatctgcgaattgtcgccagttcgctatgtttaagccccagcctgctc

SEQ ID NO: 406920 - DNA, 75 bp, synthetic construct
  source 1..75: mol_type = other DNA
ttgcggcacactatccgctatgataggtccagataaatttgattctatagatagcaccgcatatgacgccttaaa

SEQ ID NO: 406921 - DNA, 75 bp, synthetic construct
  source 1..75: mol_type = other DNA
tcgcagccgggcgtgaatgaaaccacactgaatgccattgcgtatgcgctggcgggactgtcggcacaggagcat

SEQ ID NO: 406922 - DNA, 75 bp, synthetic construct
  source 1..75: mol_type = other DNA
aaaagaggtaaggaatgcgacgatagaatatggaaatataaatgaagaattaattagatcttatataatgggatg

SEQ ID NO: 406923 - DNA, 75 bp, synthetic construct
  source 1..75: mol_type = other DNA
agaaacagaaacctaatcgatgcgctgatggttgccgaggcgtgcggagaggagcatttcacgtcaatcctgatg

SEQ ID NO: 406924 - DNA, 75 bp, synthetic construct
  source 1..75: mol_type = other DNA
tacataaaatatacaatcctgtatatgggttgagtaatatcgtattacttgctaaagagtgtcagtctacagatc

SEQ ID NO: 406925 - DNA, 75 bp, synthetic construct
  source 1..75: mol_type = other DNA
aaataatattataaaatcatttcttctcatccctttagatggctcaactctaccgccatattatgggtggggaac

SEQ ID NO: 406926 - DNA, 75 bp, synthetic construct
  source 1..75: mol_type = other DNA
gcttcatttcttgtaaagagattttttagaatttatcctgtttacgcaatagtattaagcgtttatgtttttctt

SEQ ID NO: 406927 - DNA, 75 bp, synthetic construct
  source 1..75: mol_type = other DNA
agtcagcaccggctggtgcactacacgcggacacaatatgcagagccgcgggtcgaaagtcgctatctttacgac

SEQ ID NO: 406928 - DNA, 75 bp, synthetic construct
  source 1..75: mol_type = other DNA
tacgtaatgaccagactctgaaggtgacgaatgaccggacggtgagcgtgagtcacgatgacggtctgtacgtca

SEQ ID NO: 406929 - DNA, 75 bp, synthetic construct
  source 1..75: mol_type = other DNA
acttgcaagggaagcacgcagcctttttatgaaatacaaattagaaagtgctgtaaaaataaaaaatggtgaacc

SEQ ID NO: 406930 - DNA, 75 bp, synthetic construct
  source 1..75: mol_type = other DNA
cgctatgaatacgaccgcttcggccagatgacggcggttcaccgcgaggaaggtatcagcctttaccgccactat

SEQ ID NO: 406931 - DNA, 75 bp, synthetic construct
  source 1..75: mol_type = other DNA
ctttaacagacaagatcgactcgtcatttctaattgcttatctagcaacaaagtatgcacaaaaatcactactaa

SEQ ID NO: 406932 - DNA, 75 bp, synthetic construct
  source 1..75: mol_type = other DNA
ccgaaaaggcaatccaggaactggggaccggcgaggcgttaatctcgtttctcgatgcaaaaggaagtccttctg

SEQ ID NO: 406933 - DNA, 75 bp, synthetic construct
  source 1..75: mol_type = other DNA
ggcgtcaggcaaaggggacccgcttcctgtggcagtacagcgataaatggatgaccgaatctaggcaggaaaagc

SEQ ID NO: 406934 - DNA, 75 bp, synthetic construct
  source 1..75: mol_type = other DNA
atgccgatcatagcaccaatccccagaaccgaacgacgcctgatgcagaaaactatccataaaacaaaggacaaa

SEQ ID NO: 406935 - DNA, 75 bp, synthetic construct
  source 1..75: mol_type = other DNA
gcttcctgcgccgcagcttgccgcagttagtggtcctgtcgaatctggaactgtctgataaccgacatatccgca

SEQ ID NO: 406936 - DNA, 75 bp, synthetic construct
  source 1..75: mol_type = other DNA
accggggtgaatgatacaccgacgctcattaaacgtgagcttgataccacgctgacgcttaaggatggtgatgtg

SEQ ID NO: 406937 - DNA, 75 bp, synthetic construct
  source 1..75: mol_type = other DNA
ctctccggcaaaccttaactttcaacaggtcagctttagtcagtttgaaaatagtgcaacaacagctcagaccgt

SEQ ID NO: 406938 - DNA, 75 bp, synthetic construct
  source 1..75: mol_type = other DNA
agggttttggcaatggcatgagtgccgcagacaatggtcaggtcatctctcaggggatactggctgacggtcggg

SEQ ID NO: 406939 - DNA, 75 bp, synthetic construct
  source 1..75: mol_type = other DNA
gatttcttttccggttcaggctcctcttatgtgatggggaaagcggttgaaacagaagatgaagactggaatttc

SEQ ID NO: 406940 - DNA, 75 bp, synthetic construct
  source 1..75: mol_type = other DNA
atatcttcgccagcgagctggacaacttccgccactacccgctggaagccgacaacattttcgccgccatcgctg

SEQ ID NO: 406941 - DNA, 75 bp, synthetic construct
  source 1..75: mol_type = other DNA
ccgttaatcgacaaactggcggcaaaagccaatacccaactggcaatcatcaccgaagtgctggcgggggcgtag

SEQ ID NO: 406942 - DNA, 75 bp, synthetic construct
  source 1..75: mol_type = other DNA
ttgctggcatgcatacgctttctggcgttggcgacgtaacattcattgatgccaagcgacaccttaaaggttcgc

SEQ ID NO: 406943 - DNA, 75 bp, synthetic construct
  source 1..75: mol_type = other DNA
aacgttttgaatctaccggtagccagctcactttcgctggctaccgtttctctgataaaaactttgtgtcgatga

SEQ ID NO: 406944 - DNA, 75 bp, synthetic construct
  source 1..75: mol_type = other DNA
acggtcagtacgaattggccgtaggaaagagatattcagacgagaatactcgtgagtgggccagagctgcgccac

SEQ ID NO: 406945 - DNA, 75 bp, synthetic construct
  source 1..75: mol_type = other DNA
cgattgttgagcgtttaagccaggtgggagtgcatcagtcttggcgccgagctgcgttgctcgcattagctcggt

SEQ ID NO: 406946 - DNA, 75 bp, synthetic construct
  source 1..75: mol_type = other DNA
ttaacagcgatgggacggagccattgtggccagtttttccagaagagcgcgcacggccgggaaggcgactacgct

SEQ ID NO: 406947 - DNA, 75 bp, synthetic construct
  source 1..75: mol_type = other DNA
cccagtttgctcaagaaaaaattgaaaagtgagaacaccacttacagtcagatcgtcacacattgccgcatgcgc

SEQ ID NO: 406948 - DNA, 75 bp, synthetic construct
  source 1..75: mol_type = other DNA
taaaaaatggtcaggaatttatatgttcggcaatatcttctatactatcacagcaatcagttgatatagagattg

SEQ ID NO: 406949 - DNA, 75 bp, synthetic construct
  source 1..75: mol_type = other DNA
caatatgcacagcgataacctggcccgcctggtggaggtgaagtttccgggagataggctgtatgaagaccaata

SEQ ID NO: 406950 - DNA, 75 bp, synthetic construct
  source 1..75: mol_type = other DNA
cctctctgtaatcaataagggcacgttcgctggaggcaacggaggtgctgcttacggttatggttatgatggcta

SEQ ID NO: 406951 - DNA, 75 bp, synthetic construct
  source 1..75: mol_type = other DNA
ggtgatgccgtcacaggagtcaatctacccataatcaacaaagggactatttccggtggtaatggaggtaacaat

SEQ ID NO: 406952 - DNA, 75 bp, synthetic construct
  source 1..75: mol_type = other DNA
tcatggtggtgctggtgataataatgatggtaatagttgtggcggtaatggtggtgactctattaccggatctga

SEQ ID NO: 406953 - DNA, 75 bp, synthetic construct
  source 1..75: mol_type = other DNA
gagtcagatttcgccacatgctctgtgttgacactcgcgatcgacgatccatctcagttactgccggaaggtcga

SEQ ID NO: 406954 - DNA, 75 bp, synthetic construct
  source 1..75: mol_type = other DNA
ccgatccggagtccatgggtatccagattgacggcgacaaggcggttgttaataacgaaggcgagagcaccatca

SEQ ID NO: 406955 - DNA, 75 bp, synthetic construct
  source 1..75: mol_type = other DNA
gattcggcttttcccagtgctattcagcaatcgatttcttctgtacgtgattcaaagcccgagttttcaaacacg

SEQ ID NO: 406956 - DNA, 75 bp, synthetic construct
  source 1..75: mol_type = other DNA
tcctactttatctctgtgtttaaagcattttatggcatgacaccactgaactatctgacagaacaacgcctacag

SEQ ID NO: 406957 - DNA, 75 bp, synthetic construct
  source 1..75: mol_type = other DNA
cagtacgctcctaaatattttgctgaacgagaccaaagggcattgacgttgattgagaaaatcatgctacctgac

SEQ ID NO: 406958 - DNA, 75 bp, synthetic construct
  source 1..75: mol_type = other DNA
tgtattacaaccgccaccgctattatgacccgctgcaggggcgatatatcactcaggatccgattggactgaagg

SEQ ID NO: 406959 - DNA, 75 bp, synthetic construct
  source 1..75: mol_type = other DNA
cgtagcgacgcagagcatgaggttctcccggaaaccactcatcaaacacgagagacggctatggcagaaaaaagc

SEQ ID NO: 406960 - DNA, 75 bp, synthetic construct
  source 1..75: mol_type = other DNA
aaccgtattatttatcaagaaaacgttcctccaggcccattttctattaccaatttattcaatacattacagggg

SEQ ID NO: 406961 - DNA, 75 bp, synthetic construct
  source 1..75: mol_type = other DNA
ggatttggatcacaacgtggatcaccgtctgcgccacagtgaataccgtgtacgggggcacgggcgtggtggtgg

SEQ ID NO: 406962 - DNA, 75 bp, synthetic construct
  source 1..75: mol_type = other DNA
acagcaaaacctgaaaccgcaatggacgccgttcttgcaggatatggagaagaagctgggcgtgaaggtcaacgc

SEQ ID NO: 406963 - DNA, 75 bp, synthetic construct
  source 1..75: mol_type = other DNA
aattaacggtggcccgtcgcggaccattctgattaatccggtaccggtaccttctgtcccgaccgatacagggaa

SEQ ID NO: 406964 - DNA, 75 bp, synthetic construct
  source 1..75: mol_type = other DNA
atggataatgggcggcctgtcatcaggttctttaatacgggagctacagggcgtttcccgtttgtcccagttctg

SEQ ID NO: 406965 - DNA, 75 bp, synthetic construct
  source 1..75: mol_type = other DNA
gttcgtccgattgaaacttcattcccgccgtcactgagcacgcaggatggtctgtacaccaccattatccgtggc

SEQ ID NO: 406966 - DNA, 75 bp, synthetic construct
  source 1..75: mol_type = other DNA
ccattaaatccacttatcgcctgaatgatattactaaaccggtggcagaatcttttgaaggaagtggtgtgttgc

SEQ ID NO: 406967 - DNA, 75 bp, synthetic construct
  source 1..75: mol_type = other DNA
agaagctgggcgtgaaggtcaacgccttctttgccccggactatgcgggcattatccagggaatgcgtttcaaca

SEQ ID NO: 406968 - DNA, 75 bp, synthetic construct
  source 1..75: mol_type = other DNA
gggtacgacggatatcgtggggggggaaattgctttcggttccgactctgccattaatatggcaagtcaacacat

SEQ ID NO: 406969 - DNA, 75 bp, synthetic construct
  source 1..75: mol_type = other DNA
ccgccaggacagatgtagagctggatggcgataatagccgctttgtggggcaattcaacattgatacaggcagcg

SEQ ID NO: 406970 - DNA, 75 bp, synthetic construct
  source 1..75: mol_type = other DNA
ggtcatcgttgacgctcgatgccgctcctgatgagctggcggcgttgtaccgccctgaaaactgcaattggggtt

SEQ ID NO: 406971 - DNA, 75 bp, synthetic construct
  source 1..75: mol_type = other DNA
ttgcgcaggctgccgacgctgacccgctcaataccgcaaacgcagatgtacagcaaatggtcgctgacgggattg

SEQ ID NO: 406972 - DNA, 75 bp, synthetic construct
  source 1..75: mol_type = other DNA
tggctaaagggaaggggaatgacgagaaaaactggtatctgaccagtaaatgggacggcgtaacgccagcggata

SEQ ID NO: 406973 - DNA, 75 bp, synthetic construct
  source 1..75: mol_type = other DNA
taacattggcggcgtcggtgcacaaacggtcaacggtattgaactcattgaggttggcggtaattctgcaggtaa

SEQ ID NO: 406974 - DNA, 75 bp, synthetic construct
  source 1..75: mol_type = other DNA
ttgacgagttcagggacgccaggaatgagcgaatgcttgaggatgatgtacaacgtgagcaactgaaggcattgc

SEQ ID NO: 406975 - DNA, 75 bp, synthetic construct
  source 1..75: mol_type = other DNA
tttctggtgtccgtggttctggtcatgcccggctttatattaaagcttcagactcaggagcccaaacggtggtaa

SEQ ID NO: 406976 - DNA, 75 bp, synthetic construct
  source 1..75: mol_type = other DNA
taaatttgaggattatcctgttattggaaataatgttactatttatgccggagcaatcataataggtaaagtaat

SEQ ID NO: 406977 - DNA, 75 bp, synthetic construct
  source 1..75: mol_type = other DNA
ggtcatcgttggcgctgggggatgcgcctgatgatttggcggcgttgtaccagccccacaatgctaactggggtt

SEQ ID NO: 406978 - DNA, 75 bp, synthetic construct
  source 1..75: mol_type = other DNA
gcccgtgaaaacatccagcttgttcctgttcggcaatgtgaaacccagcgccgggctgccgttggtctggttgat

SEQ ID NO: 406979 - DNA, 75 bp, synthetic construct
  source 1..75: mol_type = other DNA
gtgggtgaagaaagcctcaaaaaagaattaaattatgctgctgatatgatgaggaaaatcgccagtgattttgaa

SEQ ID NO: 406980 - DNA, 75 bp, synthetic construct
  source 1..75: mol_type = other DNA
tggtgtggagagtcgaaacctaccgaggataaatttaacagtacaaatcatcattgtgacccaaacggcttggca

SEQ ID NO: 406981 - DNA, 75 bp, synthetic construct
  source 1..75: mol_type = other DNA
gcagaagttgtaaggttcttcgctatcaatggtttcttttattttattttaaaaaatggtccggccatatcaaaa

SEQ ID NO: 406982 - DNA, 75 bp, synthetic construct
  source 1..75: mol_type = other DNA
ggtctgctattcctgattattattacactctcgcgattgattattacgcacccgccaactacggtgagtggtctg

SEQ ID NO: 406983 - DNA, 75 bp, synthetic construct
  source 1..75: mol_type = other DNA
gataaggaacgcaatccagtaaatgcagggggagagagcgtaacgtacacgctgcggaatattccggctgaactt

SEQ ID NO: 406984 - DNA, 75 bp, synthetic construct
  source 1..75: mol_type = other DNA
ttttccgcaacaatcttgatgcgttagtcgatgaaccgtggggggggcccctattaagttgtcaagcatgttatg

SEQ ID NO: 406985 - DNA, 75 bp, synthetic construct
  source 1..75: mol_type = other DNA
ctgacgctgcacaaaggggcgaattatatttcgctggcgcagaacattcagcaatctggcttgttaagcgcagaa

SEQ ID NO: 406986 - DNA, 75 bp, synthetic construct
  source 1..75: mol_type = other DNA
ccggcaaaaacggctcaacaaagtcacattccggtgaccgttgaacgacagttgtatcggcttatcccgggtgaa

SEQ ID NO: 406987 - DNA, 75 bp, synthetic construct
  source 1..75: mol_type = other DNA
cggcgtaacgccagcggatacacccgatcccatcaataatccccctgttgtggatccggaaggcccatcagttta

SEQ ID NO: 406988 - DNA, 75 bp, synthetic construct
  source 1..75: mol_type = other DNA
tttgttttttggttcgtcatatggagttttcatcgatattatccagataaaagacgagttggcaggaagcacaat

SEQ ID NO: 406989 - DNA, 75 bp, synthetic construct
  source 1..75: mol_type = other DNA
ccttgaggctggatgtgttgacttctttgttttttggttcgtcatatggagttttcatcgatattatccagataa

SEQ ID NO: 406990 - DNA, 75 bp, synthetic construct
  source 1..75: mol_type = other DNA
ccttaaagcgcaagcgccgctggccacaattctggcccggcacagcggcaaaatgagagccaaggatttgtggca

SEQ ID NO: 406991 - DNA, 75 bp, synthetic construct
  source 1..75: mol_type = other DNA
acgaatcatgcggtgagcgacctgacgggccgtccgctgatgctctttaacagtgaaggtaaaaccgtctggcga

SEQ ID NO: 406992 - DNA, 75 bp, synthetic construct
  source 1..75: mol_type = other DNA
cgtgtattttatattttgacttcttaggggattttggtcgggtggttgaattatcttttttttttcagattagat

SEQ ID NO: 406993 - DNA, 75 bp, synthetic construct
  source 1..75: mol_type = other DNA
aaggcataatacgaagaatagcttttcattttaaaatgaaattgagagaatgtcgtgaatactattatagtatta

SEQ ID NO: 406994 - DNA, 75 bp, synthetic construct
  source 1..75: mol_type = other DNA
gaaggtatgaagttggattaatcgtccaaaattcaaaaggtgtacattataaaatgactgacactacagtaatta

SEQ ID NO: 406995 - DNA, 75 bp, synthetic construct
  source 1..75: mol_type = other DNA
gccagctgttttaagtgaatatgataaactcctttatctcgatgccgacattattgttgacaatgatattctgga

SEQ ID NO: 406996 - DNA, 75 bp, synthetic construct
  source 1..75: mol_type = other DNA
agttatcccctgattttatccctgccggtgtttttcctgcctcgcattacggacgcgatcagctaaatttagcga

SEQ ID NO: 406997 - DNA, 75 bp, synthetic construct
  source 1..75: mol_type = other DNA
ggccgatttaacagtggattaaatttatttagttggcagttacactctgatgccagctatagcaaacccgatgat

SEQ ID NO: 406998 - DNA, 75 bp, synthetic construct
  source 1..75: mol_type = other DNA
gtgaactccattttgtcaacgctgggcgtggtgggaaccgcagcatttcttttactgggctttggcgtttcttta

SEQ ID NO: 406999 - DNA, 75 bp, synthetic construct
  source 1..75: mol_type = other DNA
ctggcagggaaaaggcacctttgtacaaagccagaaagttgaaaacgccctgcttactgtcagtggttttaccga

SEQ ID NO: 407000 - DNA, 75 bp, synthetic construct
  source 1..75: mol_type = other DNA
tcgttgattgccacaacaagaccgctccatatgtcagcgaaggcattcacctcattcgaacgacagacattcgta

SEQ ID NO: 407001 - DNA, 75 bp, synthetic construct
  source 1..75: mol_type = other DNA
aaactaagagatatagatggtttttcctatgatgatttgtatgtagtcggcggtaagggaaatgtctggcatttt

SEQ ID NO: 407002 - DNA, 75 bp, synthetic construct
  source 1..75: mol_type = other DNA
ttttccgagagtttgcacgctatgagtactgtctaaaagccactggttttcgattcaataccagagatgctaaag

SEQ ID NO: 407003 - DNA, 75 bp, synthetic construct
  source 1..75: mol_type = other DNA
gatgttcgcctgggtacgcgtgttgttcaattgatggcgcgtggtggtcgttatgaaaaagccggacacgcaatt

SEQ ID NO: 407004 - DNA, 75 bp, synthetic construct
  source 1..75: mol_type = other DNA
aaccatgcaggaatagaaaaaaccattgattttatgaactgccctgttttttttgaaacatacgatttcgatata

SEQ ID NO: 407005 - DNA, 75 bp, synthetic construct
  source 1..75: mol_type = other DNA
gttcaggaggtgcgtgggaagatgccttgcatcttagcgccttgggcgcatatgtactaacgagaaagatcaaaa

SEQ ID NO: 407006 - DNA, 75 bp, synthetic construct
  source 1..75: mol_type = other DNA
tttggtggtgacaaggacgataaaaagaaaattgaatcaatcctccaggatacctgggaaagcgctgacgactgg

SEQ ID NO: 407007 - DNA, 75 bp, synthetic construct
  source 1..75: mol_type = other DNA
ctgcgttaacttcctcaaacagaatgccgccgattcgcctgatacaacctttaacaatgtattcccggaggatga

SEQ ID NO: 407008 - DNA, 75 bp, synthetic construct
  source 1..75: mol_type = other DNA
tttagaccgttgcaaaacggaaggcttgatatttgataaatgttacatagttagtagcgataatttaattaaccg

SEQ ID NO: 407009 - DNA, 75 bp, synthetic construct
  source 1..75: mol_type = other DNA
ggacttctattttcataatgacaccattcccgatcaaagccactcgaaaaaagtaaacataacaattccggcgac

SEQ ID NO: 407010 - DNA, 75 bp, synthetic construct
  source 1..75: mol_type = other DNA
taattggtgccggatgtattgtaacaaaagacgttcctgaggataagattgctgttggctcaccgatgaaaataa

SEQ ID NO: 407011 - DNA, 75 bp, synthetic construct
  source 1..75: mol_type = other DNA
acatcccttcatttgaatataacaatcaaggaactatggactgaacttggaataaaagagaatgagataccaaaa

SEQ ID NO: 407012 - DNA, 75 bp, synthetic construct
  source 1..75: mol_type = other DNA
atgagagatttagtgctatggaatattgttattctgttgaatatttatatcccggactgctatagaaaaggcttt

SEQ ID NO: 407013 - DNA, 75 bp, synthetic construct
  source 1..75: mol_type = other DNA
gagaaatgacgtttaaagttatgcaaacacctgtgtatcaggataaaacgatgaattgtggctgggttgctcatc

SEQ ID NO: 407014 - DNA, 75 bp, synthetic construct
  source 1..75: mol_type = other DNA
gtaccgagaacatctgcgatcgacaatatattaaaaaccattccgagcgtgcgctttctgcaactttcgggctgc

SEQ ID NO: 407015 - DNA, 75 bp, synthetic construct
  source 1..75: mol_type = other DNA
ttgttttaagtacgcacgatttatcgagtgaattaacaaataaattaaagcagattcagtctttactggacgata

SEQ ID NO: 407016 - DNA, 75 bp, synthetic construct
  source 1..75: mol_type = other DNA
tgggcggaaacacgaatatcaaaggtttccatctgatcaagaaggtattttctagcattccggcaagtcaggcct

SEQ ID NO: 407017 - DNA, 75 bp, synthetic construct
  source 1..75: mol_type = other DNA
actgttgttgctgaagcactaaataaacgcttaaatacaaatgaacagtttgatattcatgtgtttacggcgtta

SEQ ID NO: 407018 - DNA, 75 bp, synthetic construct
  source 1..75: mol_type = other DNA
gctcagtttctttgcgctgatttccgttacaccatccctgttgctagtcgcatatttgagcgcacagtaatttac

SEQ ID NO: 407019 - DNA, 75 bp, synthetic construct
  source 1..75: mol_type = other DNA
gaaaaagacaccgcccgccgcatggtttaccacgcgctgcaacatccgctgtatcgcgatattgaaaccattgtg

SEQ ID NO: 407020 - DNA, 75 bp, synthetic construct
  source 1..75: mol_type = other DNA
gaagacatcatttccgatatttcaagagtaatagtttcaccaactacacactttatccatataatccagcaaaga

SEQ ID NO: 407021 - DNA, 75 bp, synthetic construct
  source 1..75: mol_type = other DNA
gacgcggcaagcatcgcatccggcaattgcaccgcgccactggcggatgcggcgtgaacgccttatccgccctac

SEQ ID NO: 407022 - DNA, 75 bp, synthetic construct
  source 1..75: mol_type = other DNA
gggtgaaaatagttgttactgtttctgatggacagtcacttcatttatcacaacaatggccgccctcttcagaaa

SEQ ID NO: 407023 - DNA, 75 bp, synthetic construct
  source 1..75: mol_type = other DNA
aacgggtttatgccatgctgcaaacggtgatggatctttatcatcagcgacctgtcttacattcgctggtcagtc

SEQ ID NO: 407024 - DNA, 75 bp, synthetic construct
  source 1..75: mol_type = other DNA
taccaaaaccaatagactcagcatcagagcgaaaaaaacacaaaaaagaggctgaaaaattagcaaattatatca

SEQ ID NO: 407025 - DNA, 75 bp, synthetic construct
  source 1..75: mol_type = other DNA
gtcaagtgaaattccttgaacgtgatgcaagtgatatcagcacttatgtgcaatgtcttgaggagctaagttcat

SEQ ID NO: 407026 - DNA, 75 bp, synthetic construct
  source 1..75: mol_type = other DNA
cgcagagctggtgggaagccgaccagatagtgttaagagaactattgaaacactggctaaaaagggaatcatcca

SEQ ID NO: 407027 - DNA, 75 bp, synthetic construct
  source 1..75: mol_type = other DNA
aagcatctatgaccagcgttgagattgctgagttggttggtaagcgccatgacaatgtaaaacgcactattgaaa

SEQ ID NO: 407028 - DNA, 75 bp, synthetic construct
  source 1..75: mol_type = other DNA
tgcaggataccgtcagctggtggcgaaaacaggtatgtcagatgcgaaatgccgcaatctggtgaacgcatatca

SEQ ID NO: 407029 - DNA, 75 bp, synthetic construct
  source 1..75: mol_type = other DNA
cagatccctaccgatacccatgaatttatgacgccggatggattgttgtctcgtcgagcgattgttgcagtagaa

SEQ ID NO: 407030 - DNA, 75 bp, synthetic construct
  source 1..75: mol_type = other DNA
aggcgaacaaggcaagcgcgacagcattattgttgtcgcacagctttgccctgaattcaccgcccgcctggtaga

SEQ ID NO: 407031 - DNA, 75 bp, synthetic construct
  source 1..75: mol_type = other DNA
gtgaatacagcaatttttaccgacaaagcatctatgaccagcgttgagattgctgagttggttggtaagcgccat

SEQ ID NO: 407032 - DNA, 75 bp, synthetic construct
  source 1..75: mol_type = other DNA
cggttcctggcagaaccacgcgatttccctcggcctgccgccaaacaccccggttaaaaaacagattgatgagtt

SEQ ID NO: 407033 - DNA, 75 bp, synthetic construct
  source 1..75: mol_type = other DNA
gtctttatgactggacgggtgcgttgattgcgctttgcggaatgttgatcattgttgcgggttgggggcgcacgt

SEQ ID NO: 407034 - DNA, 75 bp, synthetic construct
  source 1..75: mol_type = other DNA
tagcaactaaaccgttacgccctcgattgccatcaagaccaagggtcattaaaggaagctctgcggaggtagcct

SEQ ID NO: 407035 - DNA, 75 bp, synthetic construct
  source 1..75: mol_type = other DNA
taccagcaactgaaagcggagttcccggaagttcaggcggtgaacgccatgtacacccacggcctgctggcaatt

SEQ ID NO: 407036 - DNA, 75 bp, synthetic construct
  source 1..75: mol_type = other DNA
agccaaccggtggtggatttaccggaaaccaaagcctgggctgaaaaactgaccgctatgctggctgcacgtaaa

SEQ ID NO: 407037 - DNA, 75 bp, synthetic construct
  source 1..75: mol_type = other DNA
caactcaactccaaaacaccaaagaaatcaatgtgttaataaaaaaaatagataaaagtcttaatgatgagattg

SEQ ID NO: 407038 - DNA, 75 bp, synthetic construct
  source 1..75: mol_type = other DNA
acgtttctatataaagtatttccttctgcaatgcactctcgctttgaacactctgtcggtgtaatgcatttatcg

SEQ ID NO: 407039 - DNA, 75 bp, synthetic construct
  source 1..75: mol_type = other DNA
atatcgccctgcatctgcataaagcggaagaacgtggtgaagatttgccaattgccatcacgctgggtaacgatc

SEQ ID NO: 407040 - DNA, 75 bp, synthetic construct
  source 1..75: mol_type = other DNA
tttgacaatattcgcggctttatcgatgcccgcgtggcaatgaacaccatcggttcctggcagaaccacgcgatt

SEQ ID NO: 407041 - DNA, 75 bp, synthetic construct
  source 1..75: mol_type = other DNA
cgccccggacaaccgtggtcactacagccagccggtggtggatttgccggaaaccaaagcctgggctgaaaaact

SEQ ID NO: 407042 - DNA, 75 bp, synthetic construct
  source 1..75: mol_type = other DNA
tccctcggcctgccgccaaacaccccggtcaaaaagcagattgatgagtttatccgccgctgggataacttcccg

SEQ ID NO: 407043 - DNA, 75 bp, synthetic construct
  source 1..75: mol_type = other DNA
ggaagtgaaaggcaaacgtaagctcggcctgcaaccggtgccgatgcacgatattgccctgcatctgcataaagc

SEQ ID NO: 407044 - DNA, 75 bp, synthetic construct
  source 1..75: mol_type = other DNA
cgatcatcaccctgatgggggccacgccgctgaaatacgatcagtctgagtatgaaatggcaggcgcgctgcgcg

SEQ ID NO: 407045 - DNA, 75 bp, synthetic construct
  source 1..75: mol_type = other DNA
aacaaataaaaagggggactattcgcgaaggctttgttggttaccgccaattggtggcaaaaagtggaatgtcag

SEQ ID NO: 407046 - DNA, 75 bp, synthetic construct
  source 1..75: mol_type = other DNA
gatatccatctatgaagaaattggcggcttcggtattaccgcgaagcagttctcggaagatctgaaagcccttgg

SEQ ID NO: 407047 - DNA, 75 bp, synthetic construct
  source 1..75: mol_type = other DNA
aggggatggacacaatagaagtcgcttatcttgatgggatggatacgccatatcttgaggagcaggtgggcttta

SEQ ID NO: 407048 - DNA, 75 bp, synthetic construct
  source 1..75: mol_type = other DNA
ctgtggacggtattgcatggaaggtgcgtatcgatgctggcgtggcggcgctggattatcggggcatggtgaagt

SEQ ID NO: 407049 - DNA, 75 bp, synthetic construct
  source 1..75: mol_type = other DNA
tgtcatcgtcatcactctttccggttgatggtgagggcactatcaatcagaaccccggcatcattaacgtggtga

SEQ ID NO: 407050 - DNA, 75 bp, synthetic construct
  source 1..75: mol_type = other DNA
aaccgtgggggatctctggcggaaatgctggcgatatgcgtgattatgctgatttgctggataaggtggaaaccg

SEQ ID NO: 407051 - DNA, 75 bp, synthetic construct
  source 1..75: mol_type = other DNA
gatttgctggataaggtggaaaccgtgttaatccctgcttatgccagaaaaacgggcaaatcagcacaggaaatt

SEQ ID NO: 407052 - DNA, 75 bp, synthetic construct
  source 1..75: mol_type = other DNA
aaaacaggctatgaattaccggcggaactggatgccgacaaagcattattagcccgcattgaatctatccgtcta

SEQ ID NO: 407053 - DNA, 75 bp, synthetic construct
  source 1..75: mol_type = other DNA
attaactggaaatcaggaagtttttcaccagaacgcaggcttactgacaacccggagatgaatcgggtggatgat

SEQ ID NO: 407054 - DNA, 75 bp, synthetic construct
  source 1..75: mol_type = other DNA
ctggaagcgcgcaataatccggtagcagaacttcaatctcctccggctatcccgccagttgataaagcagaataa

SEQ ID NO: 407055 - DNA, 75 bp, synthetic construct
  source 1..75: mol_type = other DNA
cggccagcgatggcaccagcgccaatatcagcatctacgaagagatcggcggctggggtattacggcgcagcagt

SEQ ID NO: 407056 - DNA, 75 bp, synthetic construct
  source 1..75: mol_type = other DNA
acctgtatcgatatggcgatgccagtcgtcagtggccagatgcactgtggcacgtctcatggcggttatgggact

SEQ ID NO: 407057 - DNA, 75 bp, synthetic construct
  source 1..75: mol_type = other DNA
ccattgaaaatggtttgattgcagcgacttcgccagttacccgcgtacgtatccgcaacgtcaatacgggtacgt

SEQ ID NO: 407058 - DNA, 75 bp, synthetic construct
  source 1..75: mol_type = other DNA
cgcaaggagaccattgcactggccacttacggggagattttctccatcacccgccaggccattatcaatgatgat

SEQ ID NO: 407059 - DNA, 75 bp, synthetic construct
  source 1..75: mol_type = other DNA
tttcaggaagtgttcaacggtgtctgggatgcgctttccgacgggcgcgtggaactggcgattggcgcaacacgc

SEQ ID NO: 407060 - DNA, 75 bp, synthetic construct
  source 1..75: mol_type = other DNA
tatgcaggctatcgtcagctggtggcgaaaacgggtatgtcagatgcgaaatgccgcaatctggtgaacgcatat

SEQ ID NO: 407061 - DNA, 75 bp, synthetic construct
  source 1..75: mol_type = other DNA
tcagcgaacgcttaacgggtgaagatgccgacatcgcccgtcgtatttgggataccgataatcacatattgaacc

SEQ ID NO: 407062 - DNA, 75 bp, synthetic construct
  source 1..75: mol_type = other DNA
cattcagcgatgatacgttgcgcaactggccatcgctggtgcgcgaagacacctcgcggacgctaccaaaacgta

SEQ ID NO: 407063 - DNA, 75 bp, synthetic construct
  source 1..75: mol_type = other DNA
acagttagccatcgcggtggataatattgtcaggccagagcgtactcgtcagttgatcgttgatttttatcgcca

SEQ ID NO: 407064 - DNA, 75 bp, synthetic construct
  source 1..75: mol_type = other DNA
gcagcaaaatgatatgtcgcctgcgttaacctggttgcttgagtatctcggcgatagtgagacgctgaataagga

SEQ ID NO: 407065 - DNA, 75 bp, synthetic construct
  source 1..75: mol_type = other DNA
gatcacctcacaaaaccgtattccgctgctgcaaaacggcactttcgattttgaatgtggttctaccaccaacaa

SEQ ID NO: 407066 - DNA, 75 bp, synthetic construct
  source 1..75: mol_type = other DNA
cttcagcggtagccggcgcacagtcaggcaagacaacggttgagaataatgcgctcagcttcggtgatggttttg

SEQ ID NO: 407067 - DNA, 75 bp, synthetic construct
  source 1..75: mol_type = other DNA
aggcctttttgcatcagcattccaaattcgcttccgaccggtcagccaaaagtacgctctactcccgtctctata

SEQ ID NO: 407068 - DNA, 75 bp, synthetic construct
  source 1..75: mol_type = other DNA
agtgaccaaagcctctggcgataaaggcgtggacgtgattggtcaggtgcaggtcggcatcaccaccataaccga

SEQ ID NO: 407069 - DNA, 75 bp, synthetic construct
  source 1..75: mol_type = other DNA
ggttgcatatggatcggtttattcctgactggcgtgagcgtcgggatttgttaaataatatgccgttagcgtttg

SEQ ID NO: 407070 - DNA, 75 bp, synthetic construct
  source 1..75: mol_type = other DNA
ttaacggtgattacatagtaaaaccggacgctgatcagacttgggtagggggcggtattattgtcaatggtgatc

SEQ ID NO: 407071 - DNA, 75 bp, synthetic construct
  source 1..75: mol_type = other DNA
acgcaacatccaatgtgaataatacattcgtggttgatggcggaattaatacgccagcgggtagtatgacgcagc

SEQ ID NO: 407072 - DNA, 75 bp, synthetic construct
  source 1..75: mol_type = other DNA
aacggcgctactgaagaagaagtccgccactgagcttggcgagctggcgaccagtatcaacaccatcgtccgcga

SEQ ID NO: 407073 - DNA, 75 bp, synthetic construct
  source 1..75: mol_type = other DNA
cgctgacagagcgggaaatagcggaagcggaacaggtgacaaccatcaacgttaaaaccggagaacagacagcat

SEQ ID NO: 407074 - DNA, 75 bp, synthetic construct
  source 1..75: mol_type = other DNA
gcaaactttgccacgctgacagagcgggagattgcagaagcggaacaggtaacaaccatcaacgttaaaagcact

SEQ ID NO: 407075 - DNA, 75 bp, synthetic construct
  source 1..75: mol_type = other DNA
gggctatgccaacgccagccatttctctgccgccttccagaaacagtttggcgtaactccttcgacctttaaacg

SEQ ID NO: 407076 - DNA, 75 bp, synthetic construct
  source 1..75: mol_type = other DNA
atgaaatccgtttttacgatttccgccagcctggcgattagtctgatgctgtgctgcacggcgcaggcaaacgac

SEQ ID NO: 407077 - DNA, 75 bp, synthetic construct
  source 1..75: mol_type = other DNA
tggtggagctcgcgccagtgttcgactcgctcgataacaaaattattattaccgggcataccgatgcgatggcct

SEQ ID NO: 407078 - DNA, 75 bp, synthetic construct
  source 1..75: mol_type = other DNA
cgtcgggtgctggaagaggccggaatgccggaagataaagtgatgcaggtgagcgcaatggcggaccagatgctg

SEQ ID NO: 407079 - DNA, 75 bp, synthetic construct
  source 1..75: mol_type = other DNA
cgcgtgctgattaaagacgaccagaaccgcaatatgtttgaacgcggcagcgcgaagattatgccgttctttaaa

SEQ ID NO: 407080 - DNA, 75 bp, synthetic construct
  source 1..75: mol_type = other DNA
acatgcaggggatgcgtaaggcagatatcatcaggcgtctggaaaatgaactgggggaaacggcagggaatgtgt

SEQ ID NO: 407081 - DNA, 75 bp, synthetic construct
  source 1..75: mol_type = other DNA
tgacctgctgcctcacatgcaggggatgcgtaaggcagatatcatcaggcgactggaaaatgaactgggggaaac

SEQ ID NO: 407082 - DNA, 75 bp, synthetic construct
  source 1..75: mol_type = other DNA
ttgccacgctgaccgaacgggagattgccgaagcggaggaagtgacaaccatcaatattaagtccggagagcagg

SEQ ID NO: 407083 - DNA, 75 bp, synthetic construct
  source 1..75: mol_type = other DNA
ctacaggcgcattcactggtttcaaggggctaccgctgcgagcaggttaattttgattttgcgctgaactacgac

SEQ ID NO: 407084 - DNA, 75 bp, synthetic construct
  source 1..75: mol_type = other DNA
aagtgcgcgggccgcttttgaacgccggaaatggctggatttaattcagattggttttaacggcacacattatgc

SEQ ID NO: 407085 - DNA, 75 bp, synthetic construct
  source 1..75: mol_type = other DNA
gaccagaaaaaccagagataagacagcaccaaaatatcgcgcattagacatgacagagcacgccttaaaggtggc

SEQ ID NO: 407086 - DNA, 75 bp, synthetic construct
  source 1..75: mol_type = other DNA
ggcattaccaccggaaaaagtgagagagattttgtctcagtatgaaggcaaagaacataatttccctgtaagaga

SEQ ID NO: 407087 - DNA, 75 bp, synthetic construct
  source 1..75: mol_type = other DNA
tcaggaaccggtcctggtttcggctttgctggaaggtatcgcatggaaaatggaacaacagttgcctttaagcga

SEQ ID NO: 407088 - DNA, 75 bp, synthetic construct
  source 1..75: mol_type = other DNA
gggcactgttgttcttaatcccgtttatcggctggcttattatcatcgtctttaactgccaggcggctttgttga

SEQ ID NO: 407089 - DNA, 75 bp, synthetic construct
  source 1..75: mol_type = other DNA
gcggcaaactttgccacgctgacagaacgggagattgccgaagcggaacaggtaacaaccatcaacgtaaaaacc

SEQ ID NO: 407090 - DNA, 75 bp, synthetic construct
  source 1..75: mol_type = other DNA
gctgcaaactttgccacgatgacagaacgggagattgccgaagcggaacaggtaacaaccatcaacgttaaaacc

SEQ ID NO: 407091 - DNA, 75 bp, synthetic construct
  source 1..75: mol_type = other DNA
ttgccacgctgacagaatgggagattgccgaagcggaacaggtaacaaccatcaacgttaaaaccggagaggtgg

SEQ ID NO: 407092 - DNA, 75 bp, synthetic construct
  source 1..75: mol_type = other DNA
acggcggcaaactttgccacgctgacagagcgggagattgccgaagcggaacaggttacaaccatcaacgttaaa

SEQ ID NO: 407093 - DNA, 75 bp, synthetic construct
  source 1..75: mol_type = other DNA
gagcacgccttaaaggtggcaatcagaacgatagaccgccacgccggagaaggatacgcgaaagcacatcccgaa

SEQ ID NO: 407094 - DNA, 75 bp, synthetic construct
  source 1..75: mol_type = other DNA
ttcatgaccacagcggcggcaaactttgccacgctgacagaatgggagattgccgaagcggaacaggtaacaacc

SEQ ID NO: 407095 - DNA, 75 bp, synthetic construct
  source 1..75: mol_type = other DNA
aagatgaccagaaccgcaatatgtttgaacgcggcagcgcacagattatgccgttctttaaaactttgctggtgg

SEQ ID NO: 407096 - DNA, 75 bp, synthetic construct
  source 1..75: mol_type = other DNA
gaagacctatgatgatccgttcagcttccaaatgagcgacgggacaacaattggttaccacattggtgtagctta

SEQ ID NO: 407097 - DNA, 75 bp, synthetic construct
  source 1..75: mol_type = other DNA
cggactggtggttgtgcacccaatgaccgcactgggccgtgaaatgggcctggaagagatgaccgggttttcaaa

SEQ ID NO: 407098 - DNA, 75 bp, synthetic construct
  source 1..75: mol_type = other DNA
atgaaaaaaattatttttgctttagccattgttctgccgaccattggtcttgtcggttgcgatcgcgttgagccc

SEQ ID NO: 407099 - DNA, 75 bp, synthetic construct
  source 1..75: mol_type = other DNA
ttaatgccaaagtcacggcgaaccagaaaacactgcagcgcgagcaggaagttaaacagcgcgaagcggaagcca

SEQ ID NO: 407100 - DNA, 75 bp, synthetic construct
  source 1..75: mol_type = other DNA
acgttgattagtgcagcgattatttttggttctttatgtctgaccggatgcgatcgggtagagccaggtaacgta

SEQ ID NO: 407101 - DNA, 75 bp, synthetic construct
  source 1..75: mol_type = other DNA
tttacatcttcccgaccttcaaacaaatgaagacctacgatgagccgttcagcttccagatgagtgacggcacaa

SEQ ID NO: 407102 - DNA, 75 bp, synthetic construct
  source 1..75: mol_type = other DNA
cgcgttgtggatggcgtgaaactgactctttatgactggacgggggcgttgattgcgctttgcggcatgttgatc

SEQ ID NO: 407103 - DNA, 75 bp, synthetic construct
  source 1..75: mol_type = other DNA
ttgtggatggcgtgaaactaagtctttatgactggacgggggcgttgattgcgctttgcggcatgttgatcattg

SEQ ID NO: 407104 - DNA, 75 bp, synthetic construct
  source 1..75: mol_type = other DNA
gcaaacacttaccttgattgctcaaccagtatgtggtagtagcgttactcctgaattagatcaggcagctggtcg

SEQ ID NO: 407105 - DNA, 75 bp, synthetic construct
  source 1..75: mol_type = other DNA
ctcaaccgactggccagcaaaatgaccaccgacaaatttatcgacggcggtaagtctgaacttctggatgcagct

SEQ ID NO: 407106 - DNA, 75 bp, synthetic construct
  source 1..75: mol_type = other DNA
ctcaaccgactggccagcaaaatgaccaccgacaaatttatcgacggcgggaagtctgaactactggatgcagct

SEQ ID NO: 407107 - DNA, 75 bp, synthetic construct
  source 1..75: mol_type = other DNA
ccagaaaacactgcaacgcgagcaggaagttaaacaacgcgaagcagaagccaacatgctgcgtgcagaagctgc

SEQ ID NO: 407108 - DNA, 75 bp, synthetic construct
  source 1..75: mol_type = other DNA
atatttcggaacggacgccagaaactatattgccacgcgcgtggatatgaaacggatgcgttcttattcttataa

SEQ ID NO: 407109 - DNA, 75 bp, synthetic construct
  source 1..75: mol_type = other DNA
tcacagcgaaccacctatggattttgacgacgatatcccctttgcaccagtaactctccccttccctcgtcacgc

SEQ ID NO: 407110 - DNA, 75 bp, synthetic construct
  source 1..75: mol_type = other DNA
gatggtatttctctgtatcggcagttatctgttaagcccaaaatggcaggcggtacgtgcggagtatcagcgtca

SEQ ID NO: 407111 - DNA, 75 bp, synthetic construct
  source 1..75: mol_type = other DNA
atgaaacagcctcaagtgccggtaaaaacgctggtggcgctggcggttgtgatggcgctgctctgtatcggcggt

SEQ ID NO: 407112 - DNA, 75 bp, synthetic construct
  source 1..75: mol_type = other DNA
ctttcagtccgtgacctgctgcctcacatgcaggggatgcgtaaggcagatatcatcaggcgtctggaaaatgaa

SEQ ID NO: 407113 - DNA, 75 bp, synthetic construct
  source 1..75: mol_type = other DNA
acaaggcggattatgacaccctgtttatgcaggaagagaagacgctggagaaggacgtactggcaaaacacaccg

SEQ ID NO: 407114 - DNA, 75 bp, synthetic construct
  source 1..75: mol_type = other DNA
tataacgaaggtgaactggttggtgagtggcgattcaaaacagggaaattagcccattcactgtttggcttctcg

SEQ ID NO: 407115 - DNA, 75 bp, synthetic construct
  source 1..75: mol_type = other DNA
atcccggagagtggttactcgacctgccaatgttggcgcaggattatttaagctggtcgcggcagatgacgggcc

SEQ ID NO: 407116 - DNA, 75 bp, synthetic construct
  source 1..75: mol_type = other DNA
cacccaacctgtctctttcacgcaaagtgactggcaaacacggcaatttaatctgaagtcgctggatctcaacaa

SEQ ID NO: 407117 - DNA, 75 bp, synthetic construct
  source 1..75: mol_type = other DNA
tccaggcaagagacgagcaaaaaatttctggtgaatgcctcccggtaaaaaaagtatcgctgtacctgaataacg

SEQ ID NO: 407118 - DNA, 75 bp, synthetic construct
  source 1..75: mol_type = other DNA
cggggccgatctctgggaagagctgatggcgcgcgcaggcaaagaagggacgccggtatttcttgtgggcggtaa

SEQ ID NO: 407119 - DNA, 75 bp, synthetic construct
  source 1..75: mol_type = other DNA
cagatgtcgatgcctggggcgagtctaaactggcgcaggccgataaacacaccaacgccggaatgttgcgcgagc

SEQ ID NO: 407120 - DNA, 75 bp, synthetic construct
  source 1..75: mol_type = other DNA
tgcttaatggtcagcgcggcgagtggtcggcaaaatggcggatgatgtgcgaaggacttgatccgttagcgcctg

SEQ ID NO: 407121 - DNA, 75 bp, synthetic construct
  source 1..75: mol_type = other DNA
cctgttcccaaccattttgctgatcaccaccttaatgcgcctgacgctcaacgtcgcctccacgcgcgtggtgct

SEQ ID NO: 407122 - DNA, 75 bp, synthetic construct
  source 1..75: mol_type = other DNA
atggcgaaaacaactaaatcattcctcgcgcgtatgcgcggcggcaatctcggcgtgccgctggtgatactgtgt

SEQ ID NO: 407123 - DNA, 75 bp, synthetic construct
  source 1..75: mol_type = other DNA
gaattaacgcagaggtgatggttgctgaaacgccacatgatgagcgtcagttaatgatcagtcgttttgaaacgg

SEQ ID NO: 407124 - DNA, 75 bp, synthetic construct
  source 1..75: mol_type = other DNA
gaagtgtaagttgtatttctttactgagtgctgttgcttctggattttatcttctctggagcgagtggtctgcgg

SEQ ID NO: 407125 - DNA, 75 bp, synthetic construct
  source 1..75: mol_type = other DNA
gcctttatgatggatgatgctctgctggccggtgaacgtgcgaaagcgaagaaaccagacaactgggaaatcgtc

SEQ ID NO: 407126 - DNA, 75 bp, synthetic construct
  source 1..75: mol_type = other DNA
atatctctcagctccaaaacaataaagagaagggcttctactttaaggcagtggtgtgaaaaattgcaacctgct

SEQ ID NO: 407127 - DNA, 75 bp, synthetic construct
  source 1..75: mol_type = other DNA
caatcaactttatcgtcgtcaccaaaggggccgagcgtatttccgaggtttctgcccgctttaccctggacgcga

SEQ ID NO: 407128 - DNA, 75 bp, synthetic construct
  source 1..75: mol_type = other DNA
ttgacccgaatatgctcaaccagttccagagtacgatgccgcaggtgaaggagcagatgaaagcagcggggaaag

SEQ ID NO: 407129 - DNA, 75 bp, synthetic construct
  source 1..75: mol_type = other DNA
gattattgtcacccgcgtcagcgataacggcgatatcgcccacgacgtgcgtaaccagttgctggcaagcccgtc

SEQ ID NO: 407130 - DNA, 75 bp, synthetic construct
  source 1..75: mol_type = other DNA
aaaaatcccccgaagcgctttctctgtccctgcttcatggtgtccggtctggggtgccggaaggcagtgagtcgt

SEQ ID NO: 407131 - DNA, 75 bp, synthetic construct
  source 1..75: mol_type = other DNA
aaacacagctggctgaaatcatgtgcggctctacgctggtgggcgacatcgtacagaactggctggagaatggtc

SEQ ID NO: 407132 - DNA, 75 bp, synthetic construct
  source 1..75: mol_type = other DNA
agccgtggtatgcgcgttctgttctgtgttccgtacaccatcctgattggtcagacggctaatcggttcgtgcag

SEQ ID NO: 407133 - DNA, 75 bp, synthetic construct
  source 1..75: mol_type = other DNA
cgctatgccggcaccattcaggtgcgggttgaaggcgcgcactccggtgaacatgccatggtactgccttatggt

SEQ ID NO: 407134 - DNA, 75 bp, synthetic construct
  source 1..75: mol_type = other DNA
gccgcttggctatctgattgaggtgagggagtggtggcagctcaacgaggagccggggacgttccgcatcgttgt

SEQ ID NO: 407135 - DNA, 75 bp, synthetic construct
  source 1..75: mol_type = other DNA
atttcccgggacattcccggctacctgttcgccggtggtgtggcttacgacggcgatgtaattacggtttacccc

SEQ ID NO: 407136 - DNA, 75 bp, synthetic construct
  source 1..75: mol_type = other DNA
aaaattaccttccgtcagcgctgcttgaccgcataaaggaaacaccaacatttacggtgaaagcgtggctcgagc

SEQ ID NO: 407137 - DNA, 75 bp, synthetic construct
  source 1..75: mol_type = other DNA
gttacatccagtggtttaccccgcaaccggagaaaaccattcaggtttcgatggttcagggcgatattccgcaat

SEQ ID NO: 407138 - DNA, 75 bp, synthetic construct
  source 1..75: mol_type = other DNA
accccggagtccattattgtcgaaggggattatttccctgccccagccattcatttaattgataatctgagagta

SEQ ID NO: 407139 - DNA, 75 bp, synthetic construct
  source 1..75: mol_type = other DNA
gttcggctatttcatccgggttaacgagtggtggaacatcgacaccgacccaggcacgtttacgctggatattgg

SEQ ID NO: 407140 - DNA, 75 bp, synthetic construct
  source 1..75: mol_type = other DNA
attttatttatttagaaactaacaagttaattccctctaaggaattgttagaaaatgtaaagctaagtcataaat

SEQ ID NO: 407141 - DNA, 75 bp, synthetic construct
  source 1..75: mol_type = other DNA
gaagccatcattatgctggaactcaaaggcgtactgaatgtgaagcaaggttcagggatcttttttgttgattcc

SEQ ID NO: 407142 - DNA, 75 bp, synthetic construct
  source 1..75: mol_type = other DNA
aaatatgaatcgaaaaacattgaagttacccgtggtatttccaccatcctctatcagctggcggtgggtgcaaaa

SEQ ID NO: 407143 - DNA, 75 bp, synthetic construct
  source 1..75: mol_type = other DNA
atgaaggcgggggtaataagaaataagcacgcagagtacttcagaataatatgtcttctgtttatcaggttaatg

SEQ ID NO: 407144 - DNA, 75 bp, synthetic construct
  source 1..75: mol_type = other DNA
caaacttgaccgtgatatccgcgacccgatggaactgctcgatgaagttgagaacgagctgaaaattggctgcgc

SEQ ID NO: 407145 - DNA, 75 bp, synthetic construct
  source 1..75: mol_type = other DNA
tactcaagaagaaagaattatgacgtttctccttatttgcaagaggtggcgaagcgccgcacttttgccattatt

SEQ ID NO: 407146 - DNA, 75 bp, synthetic construct
  source 1..75: mol_type = other DNA
ctgaatatggggtatcaggtgatcgacagcgccagcgtgattgctacccatgtaaataagattgtgcgcagctat

SEQ ID NO: 407147 - DNA, 75 bp, synthetic construct
  source 1..75: mol_type = other DNA
gaatggggagcgcagctaccggaggtgttggtatggctggtgcctcaaccggaacagcagtatttcccggtgcag

SEQ ID NO: 407148 - DNA, 75 bp, synthetic construct
  source 1..75: mol_type = other DNA
ccttcatcagcgacacagaagacatcagcaaccagggacttgtcgtttccgttctctcaacgctgattgccattg

SEQ ID NO: 407149 - DNA, 75 bp, synthetic construct
  source 1..75: mol_type = other DNA
attattaactctgtatatgctagaaatgttgtttgcaaggaatttattgatgtattcaaacaaaaatgccattgt

SEQ ID NO: 407150 - DNA, 75 bp, synthetic construct
  source 1..75: mol_type = other DNA
aggaaacagtgcgatcggaatgggccacatgaccagggcgaatagcgaagacgtactctttgcggtacgcggaaa

SEQ ID NO: 407151 - DNA, 75 bp, synthetic construct
  source 1..75: mol_type = other DNA
acgctgatccgccttgggtctaccgcgataaagccgccgacggcgagcgcggtgccgggtttaaatacccagtaa

SEQ ID NO: 407152 - DNA, 75 bp, synthetic construct
  source 1..75: mol_type = other DNA
ctaggtatgatcagttttttatcagctctcgacaaaaaaaacattggtggaaaggtgacaggagcgcaatgaatc

SEQ ID NO: 407153 - DNA, 75 bp, synthetic construct
  source 1..75: mol_type = other DNA
gccaaccttacgggggaagatttagatattcaggcaaattcagtgatcgctgcgatgaaagcctgtgatgttaaa

SEQ ID NO: 407154 - DNA, 75 bp, synthetic construct
  source 1..75: mol_type = other DNA
ttgatggtgcattacagattgatcccaaaggtaatatttttctgccaaacgttggtccggtgaaagttgccgggg

SEQ ID NO: 407155 - DNA, 75 bp, synthetic construct
  source 1..75: mol_type = other DNA
tctgaatccgggtgatagcattcaggttcgcttgtggggtgcgttcacctttgatggtgcgttacaggttgatcc

SEQ ID NO: 407156 - DNA, 75 bp, synthetic construct
  source 1..75: mol_type = other DNA
accggaatcgttgatcgctttttctccctcgaatcaaatcctcgtcgtgacacacctcgctcacgcaatgccgtt

SEQ ID NO: 407157 - DNA, 75 bp, synthetic construct
  source 1..75: mol_type = other DNA
atcataaagcgaaagatctcaatgcgccgcaactggatgcactcgcacacgcgttactggatattccgcgacttt

SEQ ID NO: 407158 - DNA, 75 bp, synthetic construct
  source 1..75: mol_type = other DNA
atatcatcgataaacctgagaaacacattggtgagaatataggcatcaatcaacccgggactgatggcgataagc

SEQ ID NO: 407159 - DNA, 75 bp, synthetic construct
  source 1..75: mol_type = other DNA
gctcaaacatacatggatgcagcagaactggtacgccagcgtgtggttcatgatgtgtacaagaaaagacagcgt

SEQ ID NO: 407160 - DNA, 75 bp, synthetic construct
  source 1..75: mol_type = other DNA
aacccgcagccggtctcggtattaaactggcaacaggtgctaatgcgcttgataccgccaaagccatcaaggcca

SEQ ID NO: 407161 - DNA, 75 bp, synthetic construct
  source 1..75: mol_type = other DNA
atgggtgctggccattattctgatgatggcgggcgcactggcgatctacaattacccgtcgctcagtatccaacc

SEQ ID NO: 407162 - DNA, 75 bp, synthetic construct
  source 1..75: mol_type = other DNA
atgtcgataaactttatgtccgcagcgccaacggcgaaatggtgccattctcggcctttaccactgcacattggg

SEQ ID NO: 407163 - DNA, 75 bp, synthetic construct
  source 1..75: mol_type = other DNA
aaacccgacgtaaagatgttgccagcgaggccgatttctacggcgagatagacggcgtgctggggaacgacccgg

SEQ ID NO: 407164 - DNA, 75 bp, synthetic construct
  source 1..75: mol_type = other DNA
ggtatcggggtaatgggcggaatggtctctgcaacgttgctggcaatcttcttcgtaccggtgttctttgtggtg

SEQ ID NO: 407165 - DNA, 75 bp, synthetic construct
  source 1..75: mol_type = other DNA
tccggaagagttcggcaaagttaccctgcgcgtgaacagcgacggttcggttgtgcgcctgaaagatgtcgcacg

SEQ ID NO: 407166 - DNA, 75 bp, synthetic construct
  source 1..75: mol_type = other DNA
cactggtgcacagttagagcatctgctgaaaaacttaccggatggtgttacttactctcttgatttggataaaga

SEQ ID NO: 407167 - DNA, 75 bp, synthetic construct
  source 1..75: mol_type = other DNA
atcaggataaggatgcaacagtaaactggttgaatgactggtctgcccgactgaaaaatcctgacattgcaggtc

SEQ ID NO: 407168 - DNA, 75 bp, synthetic construct
  source 1..75: mol_type = other DNA
acgcagaggctgagcagaccatcacgcgcatgattcgtaatgcacgcgctgaagcagcccagaaattgctgggaa

SEQ ID NO: 407169 - DNA, 75 bp, synthetic construct
  source 1..75: mol_type = other DNA
caccacacaggacgatatctcggactatgtggcctctaacgttaaagatacgcttagccgtctgaatggcgtcgg

SEQ ID NO: 407170 - DNA, 75 bp, synthetic construct
  source 1..75: mol_type = other DNA
agccattatgctggtgttcctggtgatgtatctgttcttgcagaatatgcgagcaacgctgatccccaccattgc

SEQ ID NO: 407171 - DNA, 75 bp, synthetic construct
  source 1..75: mol_type = other DNA
atgacctctctcgcctttattctcggcgtattaccgctagctatcagtaacggtgccggcagtggcgcgcagaac

SEQ ID NO: 407172 - DNA, 75 bp, synthetic construct
  source 1..75: mol_type = other DNA
aagtattgaacagtgaaatgcggcagacgttgattaccgtagcaaaagatgtcaaagcgcaaattgagtttaacc

SEQ ID NO: 407173 - DNA, 75 bp, synthetic construct
  source 1..75: mol_type = other DNA
agcatcaattgataagttacgctatgccccggataacaaatcagcgaaatcggacaaaacgaaagaactggcctg

SEQ ID NO: 407174 - DNA, 75 bp, synthetic construct
  source 1..75: mol_type = other DNA
ctgtgcgggtggaggagatagtcaattatttcccgtatgactggggtatcaaagacaaacaatctattccggcca

SEQ ID NO: 407175 - DNA, 75 bp, synthetic construct
  source 1..75: mol_type = other DNA
tgttatgcgccacgaactggcaccggcgccatggaatgagcagcgaaccttactgaaagtggatattctggcgaa

SEQ ID NO: 407176 - DNA, 75 bp, synthetic construct
  source 1..75: mol_type = other DNA
ttattttccgtcagactgggttattaatgataaaagcaataataaagaacctgttcccgccagtaagccaatacc

SEQ ID NO: 407177 - DNA, 75 bp, synthetic construct
  source 1..75: mol_type = other DNA
gtggctgagcaaagagccgccgctgctaaagctgctgcagacgcgaaagcaaaagccttagtccagcaagaagcg

SEQ ID NO: 407178 - DNA, 75 bp, synthetic construct
  source 1..75: mol_type = other DNA
agccagagttgcacaatcgctcggcgtcccgcgcgagcaaattatcaccctggatttaccaaaggatacgccgca

SEQ ID NO: 407179 - DNA, 75 bp, synthetic construct
  source 1..75: mol_type = other DNA
ttcacgggaggcgtggcaaaaaccaatacggtgagtacagccgaagtgggtgccagagtagcgcaatcgctgggc

SEQ ID NO: 407180 - DNA, 75 bp, synthetic construct
  source 1..75: mol_type = other DNA
ccgaccgcctgctgcgtcccatcgaaagcacctatccgacatggaataattcgcaaaaagtggactatatcgtgg

SEQ ID NO: 407181 - DNA, 75 bp, synthetic construct
  source 1..75: mol_type = other DNA
ttgcgacagattcttgtacggatttaagtgattatacggcttttaatcctgacggcacgcgttcatcaattgtta

SEQ ID NO: 407182 - DNA, 75 bp, synthetic construct
  source 1..75: mol_type = other DNA
aaggatatgcgagcacaggctaaaaaaatagccaagttgttgggtaaatctttacgaggtgatgaattacatgat

SEQ ID NO: 407183 - DNA, 75 bp, synthetic construct
  source 1..75: mol_type = other DNA
cggcgtggtgacacgctgaccattaacggcgggatgttctgggtggatcgtgtttctccggatgacgggggcagc

SEQ ID NO: 407184 - DNA, 75 bp, synthetic construct
  source 1..75: mol_type = other DNA
atgataatccggttaagcaggtagcgcaaaatccgttggcgacgtttagtcttgacgttgacactggcagttatg

SEQ ID NO: 407185 - DNA, 75 bp, synthetic construct
  source 1..75: mol_type = other DNA
tttttaccgggaaggatttgaacataatgagaactgagggggggtcaggctactggcatgccagaacagacaggc

SEQ ID NO: 407186 - DNA, 75 bp, synthetic construct
  source 1..75: mol_type = other DNA
aaaccatgaccacagacccggttacaggtgaggtgaataaggctgcaaatgtggctgctcatgccgtggtgaatg

SEQ ID NO: 407187 - DNA, 75 bp, synthetic construct
  source 1..75: mol_type = other DNA
aagatgtaatagaaaatgcacttaggacaaaatctttactcgaaattcgggctaagcaaggtatcgaaagtgaaa

SEQ ID NO: 407188 - DNA, 75 bp, synthetic construct
  source 1..75: mol_type = other DNA
attactggagcagcgcatcagtgaactggaagcgcgcaataattcggtagcagaccttcaatctcctccggctat

SEQ ID NO: 407189 - DNA, 75 bp, synthetic construct
  source 1..75: mol_type = other DNA
aagagctacaaggggttgctggtcttccgtcttcagcaagtagtattagccgcaaagcaactaatgagggatgga

SEQ ID NO: 407190 - DNA, 75 bp, synthetic construct
  source 1..75: mol_type = other DNA
gctcttacccataaataaagaccgcaggacttattatccaagcacatttcttaatgaacggtggtgtgcaagagg

SEQ ID NO: 407191 - DNA, 75 bp, synthetic construct
  source 1..75: mol_type = other DNA
cggcttctaagccaatacctttcgctatgcgctatgaactggcgccagcgccatggaatgagcagcgtaccttac

SEQ ID NO: 407192 - DNA, 75 bp, synthetic construct
  source 1..75: mol_type = other DNA
ggtagtcacaaggcggaaattaatgctgcaattgattcgctggatgcagaaggcagtaccaatggcggtgccggg

SEQ ID NO: 407193 - DNA, 75 bp, synthetic construct
  source 1..75: mol_type = other DNA
cgtcagataggttatgaaaagcgccaacttaaggcagaggattttaataacgacaacgttgatgcgggtgatatt

SEQ ID NO: 407194 - DNA, 75 bp, synthetic construct
  source 1..75: mol_type = other DNA
gaacagctcgctaccagcagttcgatgataatccggttaagcaggtagcgcaaaacccgttggcgacgtttagcc

SEQ ID NO: 407195 - DNA, 75 bp, synthetic construct
  source 1..75: mol_type = other DNA
gttactctgtcgacgcttggcgtgggggatagcaattataacgaggcaatgatggtaagaattgccgatgttggt

SEQ ID NO: 407196 - DNA, 75 bp, synthetic construct
  source 1..75: mol_type = other DNA
tgattcgctgaatgccagaggcagtactaatggcggcgccgggctggagatggcttatcagcaggcagcgaaggg

SEQ ID NO: 407197 - DNA, 75 bp, synthetic construct
  source 1..75: mol_type = other DNA
atgctgccctcgccggggtggacagtacgatcgttgaagtgatggggatccgtgcgcagttcacctccggagcac

SEQ ID NO: 407198 - DNA, 75 bp, synthetic construct
  source 1..75: mol_type = other DNA
tctgaatcgactgcaacttgattacgttgacctgtacttgattcaccagccatatggcgatgtccacggggcctg

SEQ ID NO: 407199 - DNA, 75 bp, synthetic construct
  source 1..75: mol_type = other DNA
aacatcgtcacccagcagccggacagcacgccgcgcggctatattgaaggcggcgtcagtagccgcgacagttat

SEQ ID NO: 407200 - DNA, 75 bp, synthetic construct
  source 1..75: mol_type = other DNA
gtttaattaaaagagagctacaaattaaaggctataaacgattattgttcaaaggtgctaactgcccatcctacc

SEQ ID NO: 407201 - DNA, 75 bp, synthetic construct
  source 1..75: mol_type = other DNA
gaccacgcatccgtttttacaacgcgttggtcccgatgtgctggatccgaatctgacgccggaggtggtgaaaga

SEQ ID NO: 407202 - DNA, 75 bp, synthetic construct
  source 1..75: mol_type = other DNA
gagggaacatgtattatctcaataaaagaggagccccctctaaaaaattaccatatagtgtttcacttctgctcg

SEQ ID NO: 407203 - DNA, 75 bp, synthetic construct
  source 1..75: mol_type = other DNA
caatcattctttttatgaatgtggcagttgctagatatccagaaactcatccaaattctataaacataaataaat

SEQ ID NO: 407204 - DNA, 75 bp, synthetic construct
  source 1..75: mol_type = other DNA
atcggcaattaccgatctggagattaatcagcaaccattcctcaaagccctggacaatgagttgcgcgagaaagg

SEQ ID NO: 407205 - DNA, 75 bp, synthetic construct
  source 1..75: mol_type = other DNA
atggcttttgcctcattaattgaacgccagtgcattcgcctgctgctggcgttattatgcggtgcctgcggaacg

SEQ ID NO: 407206 - DNA, 75 bp, synthetic construct
  source 1..75: mol_type = other DNA
cacgtaccggcaactggccgctgtgggtactgacggcactgtttggttttgccgctgtgttgatgagtctgcgag

SEQ ID NO: 407207 - DNA, 75 bp, synthetic construct
  source 1..75: mol_type = other DNA
gagaaatccatcaactatgaacttggcacccgctacgaaaccgctgacgtcacgctgcaagccgcgacgttttat

SEQ ID NO: 407208 - DNA, 75 bp, synthetic construct
  source 1..75: mol_type = other DNA
gtgacctgacctggcatttaaccgatcgttttgatatcggcggcggcgtgcgcttctcgcatgataaatccagta

SEQ ID NO: 407209 - DNA, 75 bp, synthetic construct
  source 1..75: mol_type = other DNA
atcattacgaaggatctaccgtataattcaagcaccaaagttctatggccatcgccgaacggtgttatctacccg

SEQ ID NO: 407210 - DNA, 75 bp, synthetic construct
  source 1..75: mol_type = other DNA
tggcaattatttgcgggtggagatcctctggcaggttgggttgactggaaatcataaagcgaaagacctcaatgc

SEQ ID NO: 407211 - DNA, 75 bp, synthetic construct
  source 1..75: mol_type = other DNA
tactttaatggtttacgctatgatatctggaatggagtgacggtgattgctttttgtgccgtactgtacaatatc

SEQ ID NO: 407212 - DNA, 75 bp, synthetic construct
  source 1..75: mol_type = other DNA
aaggctcaatcagcatcagcccaaaaaacgtcttattgtgtcatgattatggatatcgatcacttcaaaaaagtt

SEQ ID NO: 407213 - DNA, 75 bp, synthetic construct
  source 1..75: mol_type = other DNA
cttttctgagttgtttgatttactttgttaaaaccgtcattatcattcagcaaattattgaggggcgtttgacaa

SEQ ID NO: 407214 - DNA, 75 bp, synthetic construct
  source 1..75: mol_type = other DNA
cgttgccgctggtggctggaatttcccacaatggaaaacacccgctaccacctttagcgtgctgtttggcaaata

SEQ ID NO: 407215 - DNA, 75 bp, synthetic construct
  source 1..75: mol_type = other DNA
tttagtgcttgggttgttatttgcattgaacatctagctgccattgaaaaaaacaaaaaagtgccagacaatgat

SEQ ID NO: 407216 - DNA, 75 bp, synthetic construct
  source 1..75: mol_type = other DNA
aaaatgttgagcgtttaactggcgataatcctgaatacgccataccacaaaaagtgacgattagtattggcgctg

SEQ ID NO: 407217 - DNA, 75 bp, synthetic construct
  source 1..75: mol_type = other DNA
tacgttttaaatcgaacgattcgctgctacgccactttaaggacacctccacgctgtatctggaaattgtggatt

SEQ ID NO: 407218 - DNA, 75 bp, synthetic construct
  source 1..75: mol_type = other DNA
cgtgatgcgactgctttaaaatttgggcctaacccgcctccgtaccatgagatcaggagcttggcgagcagactc

SEQ ID NO: 407219 - DNA, 75 bp, synthetic construct
  source 1..75: mol_type = other DNA
cgtggtaaggcgttgttaactcatttttccaacgacttaacgctctacagccataatcagctttacggcgtctgg

SEQ ID NO: 407220 - DNA, 75 bp, synthetic construct
  source 1..75: mol_type = other DNA
tatttcatttatgaccgtaggcaattttcaaactgtgtacttagtttggcttttctgagttgtttgatttacttt

SEQ ID NO: 407221 - DNA, 75 bp, synthetic construct
  source 1..75: mol_type = other DNA
atgcgtgattttcagaatgcctttgatgctgcccttgccgggctggacagtacgattgttgaagtgatggggctc

SEQ ID NO: 407222 - DNA, 75 bp, synthetic construct
  source 1..75: mol_type = other DNA
aatcgactcagcgatggcgcaccgctcactgtttatcctggcgaagttcccgcgcgtttacctggtcaggcgttc

SEQ ID NO: 407223 - DNA, 75 bp, synthetic construct
  source 1..75: mol_type = other DNA
ttactcaatctaccgtgtattcgctgatggcggtggtattggtggcctttcttgagtcgctggcgttagtcggct

SEQ ID NO: 407224 - DNA, 75 bp, synthetic construct
  source 1..75: mol_type = other DNA
cgcgtggcgatcgtggtagataaatcgacctggaccagagagttgattgaacacagcggtaagtttggcatcgtg

SEQ ID NO: 407225 - DNA, 75 bp, synthetic construct
  source 1..75: mol_type = other DNA
cctggtgatgagagcgggcctgagcaaaatcacacagacgatggtgagcagttgcacaacactgatgctacggat

SEQ ID NO: 407226 - DNA, 75 bp, synthetic construct
  source 1..75: mol_type = other DNA
cccggagacaggccgtcctgttgagctgacgttccgggggatgcgtgttctggtgccatcaccactggcgacagc

SEQ ID NO: 407227 - DNA, 75 bp, synthetic construct
  source 1..75: mol_type = other DNA
gccatcggcgtgggggcgctgggggggttaatttgccacccgttgatgccggtgtatatcgatattttgcgtaaa

SEQ ID NO: 407228 - DNA, 75 bp, synthetic construct
  source 1..75: mol_type = other DNA
gatggcggtggtgttggtggcctttctggagtcgctggcgctggtcggtttgattttacccggtacggtgctaat

SEQ ID NO: 407229 - DNA, 75 bp, synthetic construct
  source 1..75: mol_type = other DNA
atgaacaaaaacacgtatgacacgattcactcactaattaattattatgaggatgattaccttctacctttaaac

SEQ ID NO: 407230 - DNA, 75 bp, synthetic construct
  source 1..75: mol_type = other DNA
tttattcactaattaattattatgaggatgattacctcctgcctttaaaccgcgctgaacttgaagcatacaaag

SEQ ID NO: 407231 - DNA, 75 bp, synthetic construct
  source 1..75: mol_type = other DNA
tttcagacgttggctcctgcagtttgtccaggaacaccttagatcgtttagctactgactggaaggtgacactgt

SEQ ID NO: 407232 - DNA, 75 bp, synthetic construct
  source 1..75: mol_type = other DNA
tagcattccttgctctaaaccaacctatgccaaatgattatgacatcactcaggaacttatcaataaatataaca

SEQ ID NO: 407233 - DNA, 75 bp, synthetic construct
  source 1..75: mol_type = other DNA
gtggaagagaaaatcgaaaaaacggcgatttccatccgtgctgtgctgaccaactacgtgaaagccatccgttac

SEQ ID NO: 407234 - DNA, 75 bp, synthetic construct
  source 1..75: mol_type = other DNA
ggatctgacctgttatgtcaccctgcccggaccgtatccggcagtaaaactctctctgaaatatcagacacgacc

SEQ ID NO: 407235 - DNA, 75 bp, synthetic construct
  source 1..75: mol_type = other DNA
aatgcctgcatgtgatggggtattgcccggagacaggccgtcccgttgaactgacgtaccggggcatgcgtgtta

SEQ ID NO: 407236 - DNA, 75 bp, synthetic construct
  source 1..75: mol_type = other DNA
ccgggatgtaaggggcaacgccgtttcgcgcacgcgctcttcgtcgttgtggcgggcccctgctcattgcctgcc

SEQ ID NO: 407237 - DNA, 75 bp, synthetic construct
  source 1..75: mol_type = other DNA
gcgcgtcgcccgttacccttcccgtttgtgatgtgtccggaatgtttttttctgatgttatttttctgtggttac

SEQ ID NO: 407238 - DNA, 75 bp, synthetic construct
  source 1..75: mol_type = other DNA
ggggctgatacagccacaacctgccgcactgactgtccagggtatataaacagcccacaaaattttttacccaga

SEQ ID NO: 407239 - DNA, 75 bp, synthetic construct
  source 1..75: mol_type = other DNA
cccagagattaagcccgaagttctagacattttagaacataatgaagtgcggatagcaatgattctgactcgtca

SEQ ID NO: 407240 - DNA, 75 bp, synthetic construct
  source 1..75: mol_type = other DNA
ttcaagttcacggaaagtgaaatccatgcctccattaatactatcgctcaggctgtaaccgaggatgcattgaac

SEQ ID NO: 407241 - DNA, 75 bp, synthetic construct
  source 1..75: mol_type = other DNA
accaatgtaaaacagtcacgaaaaaaaactatataattgatgattttacaaatgacatgattttgttgttaccga

SEQ ID NO: 407242 - DNA, 75 bp, synthetic construct
  source 1..75: mol_type = other DNA
tcggttgccagtgattttgtgcatacgttgcaggatacctggcgggccggaaccagactggtggataacacacag

SEQ ID NO: 407243 - DNA, 75 bp, synthetic construct
  source 1..75: mol_type = other DNA
cgtacacggaggatctcgggcgtgccacgcgacggctgacgattaatgcgtatctcgttggtgatgattacgcag

SEQ ID NO: 407244 - DNA, 75 bp, synthetic construct
  source 1..75: mol_type = other DNA
atctgaatctcagttcagtgcaccgggtgtgcgcagcgtggtgatttatccccgtgcagaaaccctgttacccgg

SEQ ID NO: 407245 - DNA, 75 bp, synthetic construct
  source 1..75: mol_type = other DNA
gaaaccgctcaccaccgcgcagattgttgatgaaatctgtgattttgtggcgaatcaacaggctgttttcctggg

SEQ ID NO: 407246 - DNA, 75 bp, synthetic construct
  source 1..75: mol_type = other DNA
cccgttccccttcctgtttgtgatgtgcccggaatgtttttttctgatgttatttttctgtggttaccgtgcttg

SEQ ID NO: 407247 - DNA, 75 bp, synthetic construct
  source 1..75: mol_type = other DNA
agcgaggctgcaagggcggtcacttcactgccgcaacccggaagtctggtgaaaaatcagcaggcggttgtggct

SEQ ID NO: 407248 - DNA, 75 bp, synthetic construct
  source 1..75: mol_type = other DNA
ggaatagtggccagcgcatcagataaggttaattacattactgaacagaaaaatcgccagccaatggtgatcatt

SEQ ID NO: 407249 - DNA, 75 bp, synthetic construct
  source 1..75: mol_type = other DNA
tatgtgtatgttggctgctgctgtcggccttgccctttccgcatttgcggggcctgttgtggcgattggtgcact

SEQ ID NO: 407250 - DNA, 75 bp, synthetic construct
  source 1..75: mol_type = other DNA
ggagaaagccttggctttaagcagtcattagtcgcggcaataccatgggcgtgctctgcttgtggcgtctattac

SEQ ID NO: 407251 - DNA, 75 bp, synthetic construct
  source 1..75: mol_type = other DNA
ggggcgtgatgaagataagtttaattgctatggtattccggttgtgaaaggtccggtgcttggtttgccgctggt

SEQ ID NO: 407252 - DNA, 75 bp, synthetic construct
  source 1..75: mol_type = other DNA
atgtcaagtagttttgttttgctgggtgataaaacaactcatggtggcgaagtgatctcagcttcttcaacaatg

SEQ ID NO: 407253 - DNA, 75 bp, synthetic construct
  source 1..75: mol_type = other DNA
tgaagagaaatgtctggcatggatggagtgtcgattgctaccagcgacttctgcgcaagaaaaatacgatacgct

SEQ ID NO: 407254 - DNA, 75 bp, synthetic construct
  source 1..75: mol_type = other DNA
ctgtaattactatcggctgcgcattattgattggattgctgcaaaagagccaacaggcagcaaaagcatacagtt

SEQ ID NO: 407255 - DNA, 75 bp, synthetic construct
  source 1..75: mol_type = other DNA
accggacaagggcacatagcgctaacggacgccagaaacagggtgaaagagctgttcggtgaacttgttgaaggc

SEQ ID NO: 407256 - DNA, 75 bp, synthetic construct
  source 1..75: mol_type = other DNA
tggtgatattatttgtaagtgcattattaattattaatagtaataataatgtaaggttgtattcagagcgtgagt

SEQ ID NO: 407257 - DNA, 75 bp, synthetic construct
  source 1..75: mol_type = other DNA
gaaccgtaaatgtatcattgaagatggggaatttgccgtcgcagttgttttaatattatctggtatagcagggta

SEQ ID NO: 407258 - DNA, 75 bp, synthetic construct
  source 1..75: mol_type = other DNA
cgcgtggcgattgtggtagataaatcgacatggaccagggagttgattgaacgtaatggtaagtttggcatcgtt

SEQ ID NO: 407259 - DNA, 75 bp, synthetic construct
  source 1..75: mol_type = other DNA
cctcgcccacttcctcggcaataaaagcgaacaggctctggagttcaccccggtacgcaaaattattctggtgat

SEQ ID NO: 407260 - DNA, 75 bp, synthetic construct
  source 1..75: mol_type = other DNA
ctggatatcgaagggatcgtgctgaaacaaggtgcaccgaccgatctgccgaaagccctcgccgcgctgcaaaaa

SEQ ID NO: 407261 - DNA, 75 bp, synthetic construct
  source 1..75: mol_type = other DNA
tcatggcccaactattttgataacaacttttgatgaaaaatcacagcgacgtaatgtgatggctgcggcctggtc

SEQ ID NO: 407262 - DNA, 75 bp, synthetic construct
  source 1..75: mol_type = other DNA
cccagcagcttattcgccgcccatccttaagccctgatgatgcgggatgtcaggcaatcatgatcgaacgtctgc

SEQ ID NO: 407263 - DNA, 75 bp, synthetic construct
  source 1..75: mol_type = other DNA
atttttgactgcgcgcggtaaactggtagatgcggtcgtcaacgcggttgagcactataatgaaattaaaccgca

SEQ ID NO: 407264 - DNA, 75 bp, synthetic construct
  source 1..75: mol_type = other DNA
caggctttgttgattgaacgtttgcaggcgatcggttttaccgttgaacgcatggactttgccgatacgcagaat

SEQ ID NO: 407265 - DNA, 75 bp, synthetic construct
  source 1..75: mol_type = other DNA
cgatatgatcgaccagctggaagcgcgcattcgtgcgaaagccagccaactggatgaagcgcgtcgaattgacgt

SEQ ID NO: 407266 - DNA, 75 bp, synthetic construct
  source 1..75: mol_type = other DNA
cttcaggctattgcccgacgttttgatactgcggcaatgttgatccttgaagccaataacactatcgccccggtg

SEQ ID NO: 407267 - DNA, 75 bp, synthetic construct
  source 1..75: mol_type = other DNA
attacgctttcctctttcagagtcaaccctgaatttcaggatttttttctcttcgttgttccgaccatcctgtga

SEQ ID NO: 407268 - DNA, 75 bp, synthetic construct
  source 1..75: mol_type = other DNA
cggcgcgcgggatctccttggtgtggcactgattatcggcatcgcccgcggtattgtggtcgtgatggataacgg

SEQ ID NO: 407269 - DNA, 75 bp, synthetic construct
  source 1..75: mol_type = other DNA
cgacatggaccagggagttgattgaacgtaacggtaagtttggcatcgttatcccgggtgttgcagcaactaact

SEQ ID NO: 407270 - DNA, 75 bp, synthetic construct
  source 1..75: mol_type = other DNA
gggtcgtgaagaagataaatttaattgctacggcattccggtagtgagaggcccggtgcttggtttgccgctggt

SEQ ID NO: 407271 - DNA, 75 bp, synthetic construct
  source 1..75: mol_type = other DNA
aaatcagggacgagaatttgtctgccgaccgggtgatattttgctgttcccgccaggagagattcatcactacgg

SEQ ID NO: 407272 - DNA, 75 bp, synthetic construct
  source 1..75: mol_type = other DNA
gtgataaaacaacacatggcggaaaggtaatttctgcttcatcaaatattactgttaatggtaagaaggttgccc

SEQ ID NO: 407273 - DNA, 75 bp, synthetic construct
  source 1..75: mol_type = other DNA
gttcgcaacagtccggaaagctctatcgtggcggataagatggctgaaaaccaggcgcattttctgggaaatcgt

SEQ ID NO: 407274 - DNA, 75 bp, synthetic construct
  source 1..75: mol_type = other DNA
gattcaggagtggaatcaaagaaacaaagtgggtgaaacgactcgattatctagtttgatagccctaaaatatta

SEQ ID NO: 407275 - DNA, 75 bp, synthetic construct
  source 1..75: mol_type = other DNA
tacttgttgttctgtcaagaattcaaaatgcccgcaggtatatttagatataagaatcaatctggtatcgaaact

SEQ ID NO: 407276 - DNA, 75 bp, synthetic construct
  source 1..75: mol_type = other DNA
ggtcctggaggactcagggaacgattatcaaagtggtgtcgtgatgatgggaatggaagacgtggacagtattac

SEQ ID NO: 407277 - DNA, 75 bp, synthetic construct
  source 1..75: mol_type = other DNA
tctgaaaattcagaaatattttttgatttctttaaggggaatctgcttggtcatgaccagggtatattaaaaaga

SEQ ID NO: 407278 - DNA, 75 bp, synthetic construct
  source 1..75: mol_type = other DNA
ggcattggaaaaattttttcttgagaattttaaaaatgcagactcgaaagtgttggaaagttggcttcttttctt

SEQ ID NO: 407279 - DNA, 75 bp, synthetic construct
  source 1..75: mol_type = other DNA
cctacttactttcatcaattcatatggcattggaaaaattttttcttgagaattttaaaaatgcagactcgaaag

SEQ ID NO: 407280 - DNA, 75 bp, synthetic construct
  source 1..75: mol_type = other DNA
tctggcgatcaacctgatcggcggcgtctgtatcgggatcttcaaatacaacctgagcgccgatgccgccttcca

SEQ ID NO: 407281 - DNA, 75 bp, synthetic construct
  source 1..75: mol_type = other DNA
ggatgccgcacctgccgtttttgctgttcagcgccctgcttggttttaccggctggcggatgagcaaacgcccgc

SEQ ID NO: 407282 - DNA, 75 bp, synthetic construct
  source 1..75: mol_type = other DNA
cccagggcaacccgctcacccagcggatccgcggcgtgcgacaggtgatatccgacggcaacggcgtgctgctgc

SEQ ID NO: 407283 - DNA, 75 bp, synthetic construct
  source 1..75: mol_type = other DNA
gatggcaccgcgcctggcggaggatttgagcgcggcgctgaattacagccagttgctgaaagtgtaccgtgcgct

SEQ ID NO: 407284 - DNA, 75 bp, synthetic construct
  source 1..75: mol_type = other DNA
ccagtggacccgaatatgcttaaccagttccagagtacgatgccacaggtgaaagagcagatgaaagcggcgggg

SEQ ID NO: 407285 - DNA, 75 bp, synthetic construct
  source 1..75: mol_type = other DNA
gtgcgcctggcgctgcggcgcagcattacccatccgttcgttcgcaagcaaggagctgacggtgtataccctgaa

SEQ ID NO: 407286 - DNA, 75 bp, synthetic construct
  source 1..75: mol_type = other DNA
gtcgtcgataatgaaatgtctataaatgatctaggaactatagataagattgatctagatattttaaatacagct

SEQ ID NO: 407287 - DNA, 75 bp, synthetic construct
  source 1..75: mol_type = other DNA
aagtggttgagtggctgcgtcagcgttctcgtccttacctgttctccaactcactggcacctgccattgtggctg

SEQ ID NO: 407288 - DNA, 75 bp, synthetic construct
  source 1..75: mol_type = other DNA
ccgtgagctgcaaaaagagggcatttacgtcaccggtttcttctatccggtcgttccgaaaggtcaggcgcgtat

SEQ ID NO: 407289 - DNA, 75 bp, synthetic construct
  source 1..75: mol_type = other DNA
gcactcaggacagccataaagagcttgaacaaaaactggcggcattcctggggatggaagatgcgattctctact

SEQ ID NO: 407290 - DNA, 75 bp, synthetic construct
  source 1..75: mol_type = other DNA
atttactgccgcaggccggacaaaacctggtactggcaggggcgatcctgtcgattatgctcaacccggtactgt

SEQ ID NO: 407291 - DNA, 75 bp, synthetic construct
  source 1..75: mol_type = other DNA
tgggtgagcgtgaaattgctcgtactatgctggaactgcttgaaacgccaccgccgagtgaggtggtgacgaggt

SEQ ID NO: 407292 - DNA, 75 bp, synthetic construct
  source 1..75: mol_type = other DNA
atgctgattgccaccgatggtgtgttctcaatggacggcgtgattgccaacctgaaaggtgtttgcgatctcgcc

SEQ ID NO: 407293 - DNA, 75 bp, synthetic construct
  source 1..75: mol_type = other DNA
catattcgtgaacgtaaggaagcgcgccagagaatgttggatacggtaactattaaccccggatttcgtgaatat

SEQ ID NO: 407294 - DNA, 75 bp, synthetic construct
  source 1..75: mol_type = other DNA
atcaaggaataacttggatttcaggagtattatcggttaacaaagaattatgggaaataaaattggaggataata

SEQ ID NO: 407295 - DNA, 75 bp, synthetic construct
  source 1..75: mol_type = other DNA
ctggcatacatttaaagatagtaatagtaaatttttttcagaggtgtccaatagtatggggcattgcccttcaac

SEQ ID NO: 407296 - DNA, 75 bp, synthetic construct
  source 1..75: mol_type = other DNA
tcctacgttgctgttaatccattaaacaacaaagaaagcgattatgaagtttctggtaaaatgattgagcagtta

SEQ ID NO: 407297 - DNA, 75 bp, synthetic construct
  source 1..75: mol_type = other DNA
ctgctcagcgaacaattttaaaaatttacactgtccgtccgctattgcattgtaaatggaacatcatgaaccccg

SEQ ID NO: 407298 - DNA, 75 bp, synthetic construct
  source 1..75: mol_type = other DNA
atgtatttcatcggttatcatggcacgagtgaggcgtcagcccagaatattctttccgtcggagttcaggagcgc

SEQ ID NO: 407299 - DNA, 75 bp, synthetic construct
  source 1..75: mol_type = other DNA
gcaaggttgtttgcaccagggctgcatgtgctgtcgtataacgaagtgccggatgagctggagttgaagataatg

SEQ ID NO: 407300 - DNA, 75 bp, synthetic construct
  source 1..75: mol_type = other DNA
atgatggcgtcttcccgcttgtttgcctggctgctgtttatgtctgtggctggcgcatttctggtactggtcaat

SEQ ID NO: 407301 - DNA, 75 bp, synthetic construct
  source 1..75: mol_type = other DNA
tctccatcggtgaaccgttcttcaacaccatgtttacctggctgatggtgccgtttgcgctgctgctcggtattg

SEQ ID NO: 407302 - DNA, 75 bp, synthetic construct
  source 1..75: mol_type = other DNA
tccagggctgatcttccatccgcctctgctctatatggggtacgtcggtttctcggtggcgtttgcttttgccat

SEQ ID NO: 407303 - DNA, 75 bp, synthetic construct
  source 1..75: mol_type = other DNA
gacgttgttgctgccaggaatcggcactattcacgatctgaaaaatgcctggcaggctggcgcgcgggtggttcg

SEQ ID NO: 407304 - DNA, 75 bp, synthetic construct
  source 1..75: mol_type = other DNA
aacctgagtcttggggtggcgaactcgattgccgcagtagaagaggggtgtgactgtgtcgacgccagcctggca

SEQ ID NO: 407305 - DNA, 75 bp, synthetic construct
  source 1..75: mol_type = other DNA
atggttgtgatcagactatggcgcggagttagtaggcttgatggcacatacagccgtgtaattgagagtgttaac

SEQ ID NO: 407306 - DNA, 75 bp, synthetic construct
  source 1..75: mol_type = other DNA
ggactgctgtgtttgtttgatcctcgctatcgtaagcgcgtgaacccgcagaaaactgcgccggaggctgtatga

SEQ ID NO: 407307 - DNA, 75 bp, synthetic construct
  source 1..75: mol_type = other DNA
ccgtttgcgctgctgcttggtgtcggtcctctggtgcgctggggcgcgatcgcccacgtaaaatccgcaatttat

SEQ ID NO: 407308 - DNA, 75 bp, synthetic construct
  source 1..75: mol_type = other DNA
gattgagtattatgctaaaaaatatgaaaactattttgataatttaaaaataggtgaggatcctttgaatcttaa

SEQ ID NO: 407309 - DNA, 75 bp, synthetic construct
  source 1..75: mol_type = other DNA
cgcggcacgaaaaccaccttcagttattggggaatggtggcggctcacctggggctggcagtgacaattgttggt

SEQ ID NO: 407310 - DNA, 75 bp, synthetic construct
  source 1..75: mol_type = other DNA
tctcggtggcgtttgcttttgccattgcttctttgttgagcgggcgtctggacagcacttatgcgcgttttactc

SEQ ID NO: 407311 - DNA, 75 bp, synthetic construct
  source 1..75: mol_type = other DNA
tggggcgtggcgcgcggagatgcgcgcatgatggcgtcttcccgcttgtttgcctggctgctgtttatgtctgtg

SEQ ID NO: 407312 - DNA, 75 bp, synthetic construct
  source 1..75: mol_type = other DNA
ggcgcttcttggttatttctacatcatgttctgcagcggacgatggctgtcactgttgttcatgaaaaaatggaa

SEQ ID NO: 407313 - DNA, 75 bp, synthetic construct
  source 1..75: mol_type = other DNA
attctgggagaatggatagcagtacaggagttgtaagttcggttctgggatggtggaaagtaaattctgatgaca

SEQ ID NO: 407314 - DNA, 75 bp, synthetic construct
  source 1..75: mol_type = other DNA
aagagtcaggtttgtcactgattgaagcgtcattagtgattattttatctggcctggttattgtgcttgttcagt

SEQ ID NO: 407315 - DNA, 75 bp, synthetic construct
  source 1..75: mol_type = other DNA
caaagaagaaaaccagtggatgattaagaaaattagtgaaggtggctttggtgtgtctgggcaaaaaaacaagca

SEQ ID NO: 407316 - DNA, 75 bp, synthetic construct
  source 1..75: mol_type = other DNA
ttggtcaggtggtgattggcggcaactttgtcgtcggctttgtggtgtttatcatcctgatgatcatcaacttta

SEQ ID NO: 407317 - DNA, 75 bp, synthetic construct
  source 1..75: mol_type = other DNA
agctggaaaatctgctgaccaacgtggtgaatcaggcgcaacagggcgggaaagtgatgctcgacagcgtgccgg

SEQ ID NO: 407318 - DNA, 75 bp, synthetic construct
  source 1..75: mol_type = other DNA
agcggattcgcggcgtgcggcaggtgatatccgacggtaacggcgtgctgctgccggagatccgcattcgggaaa

SEQ ID NO: 407319 - DNA, 75 bp, synthetic construct
  source 1..75: mol_type = other DNA
tggcatttacccatcaggaagcgaagcagttttttgattgccgtctgtcatcgccgattgagcagtcggatttgc

SEQ ID NO: 407320 - DNA, 75 bp, synthetic construct
  source 1..75: mol_type = other DNA
caaagccacagctttggcccgcataacatcctcaacggcaccttttgctatcaccgtaactacctgaaaaagcac

SEQ ID NO: 407321 - DNA, 75 bp, synthetic construct
  source 1..75: mol_type = other DNA
cgcgttatccccgtaggtgatgtcgtgattttggtataccggagtgaaaaaaatgaacaggaggcggcgcagtga

SEQ ID NO: 407322 - DNA, 75 bp, synthetic construct
  source 1..75: mol_type = other DNA
ggcgcaattatcttaattgccagcctggcctttaatctactgggcgatggcttgcgcgatgttctggagccacaa

SEQ ID NO: 407323 - DNA, 75 bp, synthetic construct
  source 1..75: mol_type = other DNA
ttccagataatgtaaaagcagactatgtgcgtaccgctcaaaagttgggattcaatgtcaatgaactattatggg

SEQ ID NO: 407324 - DNA, 75 bp, synthetic construct
  source 1..75: mol_type = other DNA
aagcgggcgggcgaggcggggaaagcactgcgcgctggcggtggtgctgattttattttttcagcgtctgagcgc

SEQ ID NO: 407325 - DNA, 75 bp, synthetic construct
  source 1..75: mol_type = other DNA
atgagaaaaacgggcaaccgccgcgagcgtgggacaaaaactaccattgtccggcggcagatcaaaaagaatcat

SEQ ID NO: 407326 - DNA, 75 bp, synthetic construct
  source 1..75: mol_type = other DNA
tcagcatggggataaagtggtgcagccgctggtgcaaaagctggataagcagcaggtgctttcgcagcgaacgcg

SEQ ID NO: 407327 - DNA, 75 bp, synthetic construct
  source 1..75: mol_type = other DNA
aggtttttctaatattgttattacgcatcctcactttgggtctgccccggttgaagtattcgcaattcatgtgaa

SEQ ID NO: 407328 - DNA, 75 bp, synthetic construct
  source 1..75: mol_type = other DNA
ttatcgttgagctaggcttcaatgaaaacgttattaaaggtctgcaaagagttgaaaaggcagctttgcagtcag

SEQ ID NO: 407329 - DNA, 75 bp, synthetic construct
  source 1..75: mol_type = other DNA
gccaccagcattaataatacaagcgacgcatttaataatcttgcaagcaatgcaattaagttatctggcgcattt

SEQ ID NO: 407330 - DNA, 75 bp, synthetic construct
  source 1..75: mol_type = other DNA
agagcttgataaagcgatgaaagacgggaagattttaagtagtgatactctccctaaagtcgctaaacagatggg

SEQ ID NO: 407331 - DNA, 75 bp, synthetic construct
  source 1..75: mol_type = other DNA
gtgaacaccgccattggtgctctgggtacgatggccggtcagaacagtgacgcggtgaatatcaccggcggcgcg

SEQ ID NO: 407332 - DNA, 75 bp, synthetic construct
  source 1..75: mol_type = other DNA
ttcaaaattaggctttacgacgacattgtgacaaatgaggatttaaccattcctctcctttcgaattttgatgat

SEQ ID NO: 407333 - DNA, 75 bp, synthetic construct
  source 1..75: mol_type = other DNA
aaatcaccgaaattttcgataatttctcaggtataagaattatctttatagttaaaactgaagataattatgaat

SEQ ID NO: 407334 - DNA, 75 bp, synthetic construct
  source 1..75: mol_type = other DNA
atttccgccttgcgcgtgctggcactgctgacacttctctttgctgtcgccttctgggcgggggcgcacgtagcg

SEQ ID NO: 407335 - DNA, 75 bp, synthetic construct
  source 1..75: mol_type = other DNA
cggttggtcagcgtggttggcgctggttcgccagaaactggcgctttctggcctgcgtttgtttattgcaggggg

SEQ ID NO: 407336 - DNA, 75 bp, synthetic construct
  source 1..75: mol_type = other DNA
atgatggtaaatctatcctcagcctttttgataagaagggttatccggtattgagtgaatcaggagaacccggtt

SEQ ID NO: 407337 - DNA, 75 bp, synthetic construct
  source 1..75: mol_type = other DNA
cgcagacaatgttagggaacttaaagaatacttggaacaattcattaacggatattttcagaggttctgaaagtg

SEQ ID NO: 407338 - DNA, 75 bp, synthetic construct
  source 1..75: mol_type = other DNA
acccacctcgaaaaaaagagttggtgcattctatacaaagtttacatgctcaagtagataaaattaatctttgcc

SEQ ID NO: 407339 - DNA, 75 bp, synthetic construct
  source 1..75: mol_type = other DNA
gcgcaggtgaaagtgcttaaacgcaataaagcgccggctcgtgaaaaagcattgaaattgctggagcgcgtcggg

SEQ ID NO: 407340 - DNA, 75 bp, synthetic construct
  source 1..75: mol_type = other DNA
tgattctggagacaggtatagcagtgaaagatgccggtcatgctgtccgtgagatggaaagatggatggtgccga

SEQ ID NO: 407341 - DNA, 75 bp, synthetic construct
  source 1..75: mol_type = other DNA
atgttgaccgtagacgtagccgccgacattgtcgccagcggcataaaagtggtgattttactggtttcggtactg

SEQ ID NO: 407342 - DNA, 75 bp, synthetic construct
  source 1..75: mol_type = other DNA
cagattatccgaaccaagtacatcaactttctgttgctgtttcaaagcattattatgcgggagttgatggattgc

SEQ ID NO: 407343 - DNA, 75 bp, synthetic construct
  source 1..75: mol_type = other DNA
gcacagcatgtctgcctgtcgccgtcgcgtctgtcgcatttgttccgccagcagttagggattagcgtattaagc

SEQ ID NO: 407344 - DNA, 75 bp, synthetic construct
  source 1..75: mol_type = other DNA
aactctttagccgctgttttatgggctatggttcagggcaaatcaaaagatgttccacagttttcacctgaagca

SEQ ID NO: 407345 - DNA, 75 bp, synthetic construct
  source 1..75: mol_type = other DNA
catgatttcataaaaagaagaatgctcgttaatccagcgacacatcctgtcggcgtgagtgtgtcagaacagacg

SEQ ID NO: 407346 - DNA, 75 bp, synthetic construct
  source 1..75: mol_type = other DNA
aacaatgtgaagaaggtagcagccccccctgaaggatacgatgaaatgtacagaagaaaacatcacctaataaaa

SEQ ID NO: 407347 - DNA, 75 bp, synthetic construct
  source 1..75: mol_type = other DNA
gaagatctggcggtgcattacctagagcgggtgagaattgccgaacatgcgcataagtttcccggacagatttca

SEQ ID NO: 407348 - DNA, 75 bp, synthetic construct
  source 1..75: mol_type = other DNA
agcatggataaggatttaacagcctctttgggaaatatggaaaagaagattaaccagacttttaataagctggag

SEQ ID NO: 407349 - DNA, 75 bp, synthetic construct
  source 1..75: mol_type = other DNA
aggtgacagaatggcaggtgcttttcagttatttgccagaagtcttgggatgactacggaagaattagacaaggc

SEQ ID NO: 407350 - DNA, 75 bp, synthetic construct
  source 1..75: mol_type = other DNA
aacataaatatttatctgcaatacttcagattaatgaagcaggaaataagttattaattaaaaccaagacatcac

SEQ ID NO: 407351 - DNA, 75 bp, synthetic construct
  source 1..75: mol_type = other DNA
tacgaagcaatcaatggttttcatgacacggcgaatgcggtggcaaccgttatttatactcgtgccatgcaacca

SEQ ID NO: 407352 - DNA, 75 bp, synthetic construct
  source 1..75: mol_type = other DNA
aagacgtgatgacccgcacagtgaaaatcagcggtgtggggcgtccgtatctggcagaggaaggcactgaaaccg

SEQ ID NO: 407353 - DNA, 75 bp, synthetic construct
  source 1..75: mol_type = other DNA
ttccttaacctggatgcttgatgaattcctgggcaaaacagtcttccgtgctgaagaactggatatgtatgtcac

SEQ ID NO: 407354 - DNA, 75 bp, synthetic construct
  source 1..75: mol_type = other DNA
atgggtatatggtgtgacagggaaaataatatctgaattgtctgaacgttgtgaaccgccccgggtttcctggag

SEQ ID NO: 407355 - DNA, 75 bp, synthetic construct
  source 1..75: mol_type = other DNA
aataatgctgcactcaatgaaagtcaacgttttatggatatccgttacaggaacttcttatctgaggtgaataac

SEQ ID NO: 407356 - DNA, 75 bp, synthetic construct
  source 1..75: mol_type = other DNA
cactctattttgccgctgcgatgaaagataatggtggcggactggtgattggttctgaaatggttcgggaaaagg

SEQ ID NO: 407357 - DNA, 75 bp, synthetic construct
  source 1..75: mol_type = other DNA
atgccggtgaaaggggccgggaccacactgtgggtttataaggggaacggtgacccttatgcgaacccgctttca

SEQ ID NO: 407358 - DNA, 75 bp, synthetic construct
  source 1..75: mol_type = other DNA
tggcgaagagtttgatggcgagtatacaaacgaagttgttcagtttgagatggaaagactttctaataatggaga

SEQ ID NO: 407359 - DNA, 75 bp, synthetic construct
  source 1..75: mol_type = other DNA
tcacatggggagagccagttcgcagacgagagattccattagctcttcagaaatcgtttactgcataccagaccg

SEQ ID NO: 407360 - DNA, 75 bp, synthetic construct
  source 1..75: mol_type = other DNA
ggggccacagccacgctgacctttacggtaaaacctgaggacgccggagacaaaaacatccgtgtgctttctacg

SEQ ID NO: 407361 - DNA, 75 bp, synthetic construct
  source 1..75: mol_type = other DNA
accgcggatgccgaggatgatgactatcttgatgatgaaaatgccgactggaaaagcaccacacaggggcagaaa

SEQ ID NO: 407362 - DNA, 75 bp, synthetic construct
  source 1..75: mol_type = other DNA
ctgactggctgcgtcttgcgatggtgaaggatctgcaacctggcgaaatgaccgctgatgcagaagatgacactt

SEQ ID NO: 407363 - DNA, 75 bp, synthetic construct
  source 1..75: mol_type = other DNA
tgatattgacggcccatcaggcaacgtaaaaacacttgatgaaggtgtcacaaaagtgagtctggttcacatcgg

SEQ ID NO: 407364 - DNA, 75 bp, synthetic construct
  source 1..75: mol_type = other DNA
ccaattgctgtgccggaaggggcggaaatcactattgctgccgatggcacaatctcggcgctgaatccgggcgat

SEQ ID NO: 407365 - DNA, 75 bp, synthetic construct
  source 1..75: mol_type = other DNA
gttaaaacacttcacgaaggtgtcaaaaaaatgtgcctgtttcacatcggaaagaatctgcccgcagaaaaaaaa

SEQ ID NO: 407366 - DNA, 75 bp, synthetic construct
  source 1..75: mol_type = other DNA
aaataatctaccagcagaaaaaaaagctgagtttctggcaactctgattgcaatgaaattaaaaggtgaaattta

SEQ ID NO: 407367 - DNA, 75 bp, synthetic construct
  source 1..75: mol_type = other DNA
tgaaattcacaccagttgatattgatggcgtcatggctaatttaaagatgctggaacgtatgcacgatatcgtta

SEQ ID NO: 407368 - DNA, 75 bp, synthetic construct
  source 1..75: mol_type = other DNA
ctaaagatatcgacgaagaactggctaaaatcggcatgcttgagcgtatgcgggacattatcgaatatgcgataa

SEQ ID NO: 407369 - DNA, 75 bp, synthetic construct
  source 1..75: mol_type = other DNA
tctgccggcatccccgtatgtcagtgacagcgatgccttacttgcacaggctcagctgagcggtgccattaaccc

SEQ ID NO: 407370 - DNA, 75 bp, synthetic construct
  source 1..75: mol_type = other DNA
gttaaaacacttcacgaaggtgtaaaaaaaatgtgcatggtgcacatcataaagaatattccagcagagaaaaaa

SEQ ID NO: 407371 - DNA, 75 bp, synthetic construct
  source 1..75: mol_type = other DNA
atgattaccagttatgaagtcactactgttactactgatgacattgttcacgaagtaagtcttgaaggaaagcgt

SEQ ID NO: 407372 - DNA, 75 bp, synthetic construct
  source 1..75: mol_type = other DNA
attggctacgtgattaagacagaaaataaagaaaccccattcactgtggttgatatcgacggtccatcaggcaac

SEQ ID NO: 407373 - DNA, 75 bp, synthetic construct
  source 1..75: mol_type = other DNA
gtcaaaaaaatgtgcctggtgcatatcggaaagaatctgcccgcagaaaaaaagccgaatttctggcaactctaa

SEQ ID NO: 407374 - DNA, 75 bp, synthetic construct
  source 1..75: mol_type = other DNA
aaagaatctgcccgcagaaaataaagccgaatttctggcaactctaattgcaatgaaattaaaaggtgaaatctg

SEQ ID NO: 407375 - DNA, 75 bp, synthetic construct
  source 1..75: mol_type = other DNA
gttaaaacacttaacgaaggcgtcaaaaaaaatgtgcctggtgcatatcggaaagaatctgcccgcagaaaaaaa

SEQ ID NO: 407376 - DNA, 75 bp, synthetic construct
  source 1..75: mol_type = other DNA
agctgccgtttttgctatatttcgtgtttctagttggtataatacttttatgaccttacgaaacaaacaagataa

SEQ ID NO: 407377 - DNA, 75 bp, synthetic construct
  source 1..75: mol_type = other DNA
atgtattcgttcttctggattttgaggttgtacatccatcctgctttacccggatgaaaaatgtttatggactgg

SEQ ID NO: 407378 - DNA, 75 bp, synthetic construct
  source 1..75: mol_type = other DNA
tgcttcagtgttctccgcattttcatcagtcggttctgttgcagttatcccagagcggtatcgcttactacaatc

SEQ ID NO: 407379 - DNA, 75 bp, synthetic construct
  source 1..75: mol_type = other DNA
atgatcattacgcgagagaacctgcgagagtggcgtgtaggagcggtcatataccgctggtttttgcgccatttt

SEQ ID NO: 407380 - DNA, 75 bp, synthetic construct
  source 1..75: mol_type = other DNA
ggcatatcatgacggcgaaagagttcgcttcgccgtcgccattgaaggtgaaaacaatattcgagccggagtccg

SEQ ID NO: 407381 - DNA, 75 bp, synthetic construct
  source 1..75: mol_type = other DNA
agtcaatgcagcatttgtacatttcatttttcttcaaatattatctatattaattggcttaatagctaaatctta

SEQ ID NO: 407382 - DNA, 75 bp, synthetic construct
  source 1..75: mol_type = other DNA
cggagcagggcgctaacggggcgatacgggagctggaaaaattccgccagcagggttttacccctgagcaggtga

SEQ ID NO: 407383 - DNA, 75 bp, synthetic construct
  source 1..75: mol_type = other DNA
acggctgcggagggcggattgatatcgtcgtgactgacaggaacggtgtccggtgtgggatcgaacttgaccgaa

SEQ ID NO: 407384 - DNA, 75 bp, synthetic construct
  source 1..75: mol_type = other DNA
ttgctacttcccgtgacgttaacgccggagccggataataaaatcccggcacccgcacaggaacctgagcagata

SEQ ID NO: 407385 - DNA, 75 bp, synthetic construct
  source 1..75: mol_type = other DNA
ccggtagcaatttatatattacttaatcttgtatacattattgctcacccattatttcctgaaaaatatctaaaa

SEQ ID NO: 407386 - DNA, 75 bp, synthetic construct
  source 1..75: mol_type = other DNA
ggatgtctgtcgtgagtatccggtgccagagcgtggtgacggttgcggagggcggattgatatcgtcgtgactga

SEQ ID NO: 407387 - DNA, 75 bp, synthetic construct
  source 1..75: mol_type = other DNA
gttcggcctgagacgttgcttcgacaggttaacaccgtctcgtttccggacagtgctatcccaccaggcttcagg

SEQ ID NO: 407388 - DNA, 75 bp, synthetic construct
  source 1..75: mol_type = other DNA
gaccgactgctcaaccgaagtaaaaaaaggcgaagtggtggtggtttgcggcccgtccggctccggtaaatcgac

SEQ ID NO: 407389 - DNA, 75 bp, synthetic construct
  source 1..75: mol_type = other DNA
atgcgtgatgatcgttttaattccctgaaacaagaattttccggcgtatctgatgatgcgagtgatgcgctttcg

SEQ ID NO: 407390 - DNA, 75 bp, synthetic construct
  source 1..75: mol_type = other DNA
tgcgcctgtttgcggaaggcttcctggtgaccgagatcgctaaaaagctgaaccgcagtattaaaaccatcagta

SEQ ID NO: 407391 - DNA, 75 bp, synthetic construct
  source 1..75: mol_type = other DNA
ctggatatcgaagggatcgtgctgaaacaaggtgcaccgaccgatttgccgaaggctctcgccgcgctgcagaaa

SEQ ID NO: 407392 - DNA, 75 bp, synthetic construct
  source 1..75: mol_type = other DNA
tggcacttgtcgcgcttgtcgtaatgaaccgtaaatgtatcattgaagatggggaatttgccgtcgcagttgttt

SEQ ID NO: 407393 - DNA, 75 bp, synthetic construct
  source 1..75: mol_type = other DNA
gctgggcgtcgagaacgatatcgccctgctgaactatctttcttctgttaccttaagtccggcggataaagagta

SEQ ID NO: 407394 - DNA, 75 bp, synthetic construct
  source 1..75: mol_type = other DNA
gccagaagaaatccgcgatgatgaagttgggtgtcgagaacgatatcgccctgctgaactatctctcttctgtga

SEQ ID NO: 407395 - DNA, 75 bp, synthetic construct
  source 1..75: mol_type = other DNA
tggatgaaggtaaaattgtcgaagactcgccaaaagacgcgttctttgatgatccgaaatcagaccgcgcaaaag

SEQ ID NO: 407396 - DNA, 75 bp, synthetic construct
  source 1..75: mol_type = other DNA
ataaagcaccagctcgtgaaaaagcactcaagctgctggagcgcgtgggactttccgcacatgccaataaatttc

SEQ ID NO: 407397 - DNA, 75 bp, synthetic construct
  source 1..75: mol_type = other DNA
agcattttgagttgtttccccatctgtcgattatcgaaaacctgaccctggcgcaggtaaaagtgcttaaacgcg

SEQ ID NO: 407398 - DNA, 75 bp, synthetic construct
  source 1..75: mol_type = other DNA
gccagaagaaatctgcgatgatgaagctgggtgtcgagaacgatattgctctgctgaattatctctcttcagtga

SEQ ID NO: 407399 - DNA, 75 bp, synthetic construct
  source 1..75: mol_type = other DNA
tgcctggcgataagtacggtgatggcattaccttaatcaagtacatcaagcgccatttcccaagcctgtcgatca

SEQ ID NO: 407400 - DNA, 75 bp, synthetic construct
  source 1..75: mol_type = other DNA
ccgaaaaccggccttatctacgcgcgctttatgcagcaattctcgcaaatgtgcacttacagcgccatcaggatg

SEQ ID NO: 407401 - DNA, 75 bp, synthetic construct
  source 1..75: mol_type = other DNA
caccagatattcgctgactggcctctttccggtgaatattcctgcatgcaactggcccgggctcttttcccgggg

SEQ ID NO: 407402 - DNA, 75 bp, synthetic construct
  source 1..75: mol_type = other DNA
gcagaagcggcatgtacagaaggtgaaaccattcacaacatgcctggcggcgcgacgccagatcaggtttacgcc

SEQ ID NO: 407403 - DNA, 75 bp, synthetic construct
  source 1..75: mol_type = other DNA
ccctgctggaagaaggcgaaaaagcgatgcttgccgctgaacagcatgtggtgactccggcgctggaacgtgtga

SEQ ID NO: 407404 - DNA, 75 bp, synthetic construct
  source 1..75: mol_type = other DNA
gggtattggcgatgcgctggcaacctggtttgaagcgcgtgcctgttcccgtagcggcgcgaccaccatggcggg

SEQ ID NO: 407405 - DNA, 75 bp, synthetic construct
  source 1..75: mol_type = other DNA
tctcaggctgaaaggtgaactgacaccggcgttattacagtcacttatccgcgaaatgaaagggagcagccactg

SEQ ID NO: 407406 - DNA, 75 bp, synthetic construct
  source 1..75: mol_type = other DNA
actggcccgggctctgttcccggggcgatacccttcagccccgacagtgactcagcctgtgaaaacagagaaaat

SEQ ID NO: 407407 - DNA, 75 bp, synthetic construct
  source 1..75: mol_type = other DNA
ccctgcaggaagaaggcgaaaaagcgatgcttgccgccgaacagcatgtagtcactccggctctggagcgcgtga

SEQ ID NO: 407408 - DNA, 75 bp, synthetic construct
  source 1..75: mol_type = other DNA
tatgccattccgtatgcgttatatgcgcttgcagccgggtttcttgttacattttttttctgtccccaatgtacg

SEQ ID NO: 407409 - DNA, 75 bp, synthetic construct
  source 1..75: mol_type = other DNA
caggaacttatcaataaatataacaatgtaaggctttatttttctgcaaatcctgctgaagaagccataccgtta

SEQ ID NO: 407410 - DNA, 75 bp, synthetic construct
  source 1..75: mol_type = other DNA
atgaattaataaacggggggatcaggatattccggctgaaacgccgtatgcgccgggagaacaaattaagggagg

SEQ ID NO: 407411 - DNA, 75 bp, synthetic construct
  source 1..75: mol_type = other DNA
gatgcttgccgccgaacagcatgtagtaacccctgcgctggaacgcgtgattgaagcgaacacctatttaagcgg

SEQ ID NO: 407412 - DNA, 75 bp, synthetic construct
  source 1..75: mol_type = other DNA
catgccgttggtctgccaattaccctggcgcaactggatattaaagaagatattccggcgaaaatgcggattgtc

SEQ ID NO: 407413 - DNA, 75 bp, synthetic construct
  source 1..75: mol_type = other DNA
gtaaatacatccagggcgctgatgtgattaatcgtctgggcgaatacctgaagccgctggcagaacgctggttag

SEQ ID NO: 407414 - DNA, 75 bp, synthetic construct
  source 1..75: mol_type = other DNA
ctcttttacccggtgcctgtgtcgcacaaatagctcgtgagaatggaatcaacgataacctgctctttaactggc

SEQ ID NO: 407415 - DNA, 75 bp, synthetic construct
  source 1..75: mol_type = other DNA
tggcgcaggctgttcctgctctgcgtgagtttctcacgaccacaaaaatgcctgtcacctgtacgttgaaagggc

SEQ ID NO: 407416 - DNA, 75 bp, synthetic construct
  source 1..75: mol_type = other DNA
gttgtgccgacatgagcaaggggcggcaatggcagctatcggctatgctcgtgctaccggcaaaaccggtgtatg

SEQ ID NO: 407417 - DNA, 75 bp, synthetic construct
  source 1..75: mol_type = other DNA
gctatctacgcgccgttgttgttaaaacaactgtcggatcgtaaaccggcggattgcgtcgtgaccacagatgtg

SEQ ID NO: 407418 - DNA, 75 bp, synthetic construct
  source 1..75: mol_type = other DNA
gtggatcactattgcaccgttcgtgacatttctgcgcagaccggtgtcagcaaaaccgccattttttctctggtg

SEQ ID NO: 407419 - DNA, 75 bp, synthetic construct
  source 1..75: mol_type = other DNA
cgcacaggaaccagagcagataaatacaccgtccgacagtctgtgttgtgagctggttctgccggccggaactct

SEQ ID NO: 407420 - DNA, 75 bp, synthetic construct
  source 1..75: mol_type = other DNA
atggctacatacggcggtcagtttacgcttacccattttcgcagtaaagggacatttaagatgaatgcacgaaaa

SEQ ID NO: 407421 - DNA, 75 bp, synthetic construct
  source 1..75: mol_type = other DNA
gcaccgtttatcggcactgacgcatttcaggaagtggatgtcctgggattgtcgttagcctgtaccaagcacagc

SEQ ID NO: 407422 - DNA, 75 bp, synthetic construct
  source 1..75: mol_type = other DNA
cggtgcaggagtgcgacctgctgatcgccgtgggtgcacgttttgatgaccgggtgaccggcaaactgaacacct

SEQ ID NO: 407423 - DNA, 75 bp, synthetic construct
  source 1..75: mol_type = other DNA
cgccgtgggcgcacgttttgatgaccgggtgaccggcaaactgaacaccttcgcaccacacgccagcgttatcca

SEQ ID NO: 407424 - DNA, 75 bp, synthetic construct
  source 1..75: mol_type = other DNA
tgggcgcagttgaagcagattatccgtactatctgggaatgctgggaatgcacggcaccaaagcggcgaacttcg

SEQ ID NO: 407425 - DNA, 75 bp, synthetic construct
  source 1..75: mol_type = other DNA
gtcgttagcctgtaccaaacacagcttcctggtgcagtcgctggaagaattaccacgcatcatggccgaagcgtt

SEQ ID NO: 407426 - DNA, 75 bp, synthetic construct
  source 1..75: mol_type = other DNA
tgtatgacggtggcgtagaacacttgctgtgccggcatgaacagggcgcggtaatggcggctatcggttatgccc

SEQ ID NO: 407427 - DNA, 75 bp, synthetic construct
  source 1..75: mol_type = other DNA
tatttctcacccggacgccggtaagactaccatcaccgagaaggtgctgctgttcggacaggccattcagaccgc

SEQ ID NO: 407428 - DNA, 75 bp, synthetic construct
  source 1..75: mol_type = other DNA
atgtagtaacggtaattgatggtaatctcaagcaagcagcatccattaaactcctaaaaacagatgacggctggc

SEQ ID NO: 407429 - DNA, 75 bp, synthetic construct
  source 1..75: mol_type = other DNA
tttcgaacgccctgcgttatacgccaaccggagagacaattgtagtgcgctgtcagacggtcgatcacctggtgc

SEQ ID NO: 407430 - DNA, 75 bp, synthetic construct
  source 1..75: mol_type = other DNA
ttgcggtctttacggtagataaagcaggtcgtaaaccggctctgaaaattggtttcagcgtgatggcgttaggca

SEQ ID NO: 407431 - DNA, 75 bp, synthetic construct
  source 1..75: mol_type = other DNA
atctgatcgttggcgcggttggtgtgctgcagtttgatgtggtggtagcgcgcctgaagagcgaatacaacgttg

SEQ ID NO: 407432 - DNA, 75 bp, synthetic construct
  source 1..75: mol_type = other DNA
cgacgcgctgacctttatggcaggcgaccgttcgcacgttgaagaagcgtatccgggcgatatcctcggcctgca

SEQ ID NO: 407433 - DNA, 75 bp, synthetic construct
  source 1..75: mol_type = other DNA
tcacgcttatcggcgcttttagcgccatccaggctgcctgggcggttgattatccgctaccaccaaccggcagcc

SEQ ID NO: 407434 - DNA, 75 bp, synthetic construct
  source 1..75: mol_type = other DNA
tcagcaactcgcccgcagttgagtcagctcaaaatggcgagcctgagcagggaaatatgttacgcgcgacgcaat

SEQ ID NO: 407435 - DNA, 75 bp, synthetic construct
  source 1..75: mol_type = other DNA
ttgcaggggctggaaacgccagtgatggaaacgcgggttgggcagaaaatccctaaccctacctggacaccgacc

SEQ ID NO: 407436 - DNA, 75 bp, synthetic construct
  source 1..75: mol_type = other DNA
cagccagaaggagctggaagatgtgctctactctaatctcgaagagctgacgcgaatggcgaaaatggtcagcga

SEQ ID NO: 407437 - DNA, 75 bp, synthetic construct
  source 1..75: mol_type = other DNA
cagccagcaatgcgtccgcagttgagtcagcgcagaatggcgagcctgagcagggaaatatgttacgcgcgacgc

SEQ ID NO: 407438 - DNA, 75 bp, synthetic construct
  source 1..75: mol_type = other DNA
ttatgcgatgagcgccgcgccagtggtgtggatcctgtgctctgaaattcagccgctgaaatgccgcgatttcgg

SEQ ID NO: 407439 - DNA, 75 bp, synthetic construct
  source 1..75: mol_type = other DNA
cgtgaagtccggcaagtgtgaagaacacaggcgggccgcatggcgtgcagaggatgccagacggggacaccgccg

SEQ ID NO: 407440 - DNA, 75 bp, synthetic construct
  source 1..75: mol_type = other DNA
aaaatatccgcgacacccttctccccaaactcctttcgggcgaaatcaccctgcctgaagcggagcaggcggtaa

SEQ ID NO: 407441 - DNA, 75 bp, synthetic construct
  source 1..75: mol_type = other DNA
gcgcagcgttggtgtttcatgaaatattttttcctgaatcatcaacggcaatggcgttaattttggcaatgggaa

SEQ ID NO: 407442 - DNA, 75 bp, synthetic construct
  source 1..75: mol_type = other DNA
gcacagagccgggatgcaataaacgggtgaagtctggcaagtgtgacgagcataagcgggaagcgtggcgggcag

SEQ ID NO: 407443 - DNA, 75 bp, synthetic construct
  source 1..75: mol_type = other DNA
gagaagtaccgcgctcagtatctgaaacgtcagccgctatgtgtcgagtgccagaagctgggcctctacgttcct

SEQ ID NO: 407444 - DNA, 75 bp, synthetic construct
  source 1..75: mol_type = other DNA
gcattgtgccagacgtgccacaaccgtaagacgacacgggaagatccagccacgaaagcgaaccgtaaggcgggc

SEQ ID NO: 407445 - DNA, 75 bp, synthetic construct
  source 1..75: mol_type = other DNA
atcaccaaaggacaatcacaaagttatatttctgagaaatacggcttatcacgtagtcaatactacaagattaaa

SEQ ID NO: 407446 - DNA, 75 bp, synthetic construct
  source 1..75: mol_type = other DNA
gcgcgcttagctggtaacgcaccttttattgttgataaaggcagtggtgaaattcattctctgggaacggcaaag

SEQ ID NO: 407447 - DNA, 75 bp, synthetic construct
  source 1..75: mol_type = other DNA
ggtatttctgtttcgaatcacaagaatttcttgaatctggagatgaggccgcgcgtttagccggtaacgcacctt

SEQ ID NO: 407448 - DNA, 75 bp, synthetic construct
  source 1..75: mol_type = other DNA
cattaaaggcgcgttatatcaaaacgggtaatgtaaaaagtggtctggttaattctgtcgccacctttgaagtgt

SEQ ID NO: 407449 - DNA, 75 bp, synthetic construct
  source 1..75: mol_type = other DNA
atgtatgacttttataaacatcgtgaccatttggtaagatttgacggtagagtctggaaggacgtaacacaaacc

SEQ ID NO: 407450 - DNA, 75 bp, synthetic construct
  source 1..75: mol_type = other DNA
atgtatgacttttataaacatcgtgaccatttggtaagatttgacggtagagtctggaaagacataacagaaacc

SEQ ID NO: 407451 - DNA, 75 bp, synthetic construct
  source 1..75: mol_type = other DNA
gacgcaagcccgacgcttaatgacgctggaagatatcgtcagtggttattccaacgtgttgatttccctggcaga

SEQ ID NO: 407452 - DNA, 75 bp, synthetic construct
  source 1..75: mol_type = other DNA
gtcagcgatatgctgttcctggcacaggcagataataatcagctgatacctgacagggtcatgtttgacctcaga

SEQ ID NO: 407453 - DNA, 75 bp, synthetic construct
  source 1..75: mol_type = other DNA
atgaaaaaaatagacttcctaaatctaaaaatgatgaatcaaccttatcgagcggatatactaaatgcaataact

SEQ ID NO: 407454 - DNA, 75 bp, synthetic construct
  source 1..75: mol_type = other DNA
gtactcacaatatatgagcgactatcagaagcagcatcctgatttattttatggcgactgggcagacaaaccctg

SEQ ID NO: 407455 - DNA, 75 bp, synthetic construct
  source 1..75: mol_type = other DNA
aatctgttacccggccgcgcactcgatgaagggcaaattagcgccattgtgcatctggtttccagcgccgttgct

SEQ ID NO: 407456 - DNA, 75 bp, synthetic construct
  source 1..75: mol_type = other DNA
tgaaaaaaaatctgattgcgatcgccgtcgtgataagcctgctgattgttctgatcattcgcatcgctgtccgtc

SEQ ID NO: 407457 - DNA, 75 bp, synthetic construct
  source 1..75: mol_type = other DNA
atgccctgcctggttgagggagatccacaaatgttcagaagggcgatcaataatctgttatccaatgccctgcgt

SEQ ID NO: 407458 - DNA, 75 bp, synthetic construct
  source 1..75: mol_type = other DNA
cagtccatctatatggtagactctgtccaatggatgagattatggcatttgctgagaaaaataacctcttggtgc

SEQ ID NO: 407459 - DNA, 75 bp, synthetic construct
  source 1..75: mol_type = other DNA
actttcattgcctatggatccaacaatgactgagggtgagttacattatattgtggatgtgataaattcttttta

SEQ ID NO: 407460 - DNA, 75 bp, synthetic construct
  source 1..75: mol_type = other DNA
aagtattgtataggtgtagcaaatggattagaagctttaacgttagtactccgcgcatggaagtatatggggctt

SEQ ID NO: 407461 - DNA, 75 bp, synthetic construct
  source 1..75: mol_type = other DNA
gagtatgtcagttcggaagttgttaactggttggataacaaaaaggacagtaagcctttcttcctttatgtcgct

SEQ ID NO: 407462 - DNA, 75 bp, synthetic construct
  source 1..75: mol_type = other DNA
cggcgggctttgttaccgacgccacgctggataacgctaaagaacgcccgcgttatggcatggtttacccgacag

SEQ ID NO: 407463 - DNA, 75 bp, synthetic construct
  source 1..75: mol_type = other DNA
aaaaaataaaccagcgatttgccgatgagattcgtttttcatttgagcgagttttagaatctgggagatatattc

SEQ ID NO: 407464 - DNA, 75 bp, synthetic construct
  source 1..75: mol_type = other DNA
cacccatccatgcagaaaatatactcattacattacacggtaatgactccaacttattgatagtgttttatgttc

SEQ ID NO: 407465 - DNA, 75 bp, synthetic construct
  source 1..75: mol_type = other DNA
ttccatgacgaaatggttgagcagtacggtagggttaaacgttttcttccggcggtgttgcgggacctgcatttc

SEQ ID NO: 407466 - DNA, 75 bp, synthetic construct
  source 1..75: mol_type = other DNA
atgattgaacgtattgaagatgtctttacccgccagtccaacttctcggcagatatcgcccacgaaattcgcacg

SEQ ID NO: 407467 - DNA, 75 bp, synthetic construct
  source 1..75: mol_type = other DNA
ccaacgtcttgatttccctggcagatagccacggtaaaacggtatatcactccccaggcgcgccggatatccgcg

SEQ ID NO: 407468 - DNA, 75 bp, synthetic construct
  source 1..75: mol_type = other DNA
aagtcaccgtcgaaaaccccggtacgccgattgcgcccgaacacttaccacgtttgtttgaccgcttctatcgcg

SEQ ID NO: 407469 - DNA, 75 bp, synthetic construct
  source 1..75: mol_type = other DNA
agtttgcacgtgatgccatacccgataaagacgcgcggggtggcgaggtgtatctcctttccggcccgacgatta

SEQ ID NO: 407470 - DNA, 75 bp, synthetic construct
  source 1..75: mol_type = other DNA
atcgtgctgttggcggtacataaaggtcacgcaccgatccgcagcgtcagccgtcaaatccagaatatcacctcg

SEQ ID NO: 407471 - DNA, 75 bp, synthetic construct
  source 1..75: mol_type = other DNA
atagtgaaatcgattgttgtcgcacataaaggcacggttgccgtaacgtcagatgcgcggggaacaaggtttatt

SEQ ID NO: 407472 - DNA, 75 bp, synthetic construct
  source 1..75: mol_type = other DNA
tgaacgactggccgggcagagtctgcggcgtatcaacaccctgctggatgaagcgtacaacgaaagcctgatgct

SEQ ID NO: 407473 - DNA, 75 bp, synthetic construct
  source 1..75: mol_type = other DNA
gccattcgccaattcgcagcgtcagtcgtcagatccagaacattacttcaaaagatctcgatgttcgccttgacc

SEQ ID NO: 407474 - DNA, 75 bp, synthetic construct
  source 1..75: mol_type = other DNA
atagtgaaatcgattgttgtcgctcataaaggcacagttgcagtaacgtcagatgtgcgggggacaaggtttgtt

SEQ ID NO: 407475 - DNA, 75 bp, synthetic construct
  source 1..75: mol_type = other DNA
aaagagagagccgctatcgtctgttcgtggatgtgcagagtgacatcatcgatacccccgggcggcgcatggtga

SEQ ID NO: 407476 - DNA, 75 bp, synthetic construct
  source 1..75: mol_type = other DNA
gttttggtcctatcctggcgggtattttctgcaccatgacggaatcctggtatccaatcgccattatgatcatgg

SEQ ID NO: 407477 - DNA, 75 bp, synthetic construct
  source 1..75: mol_type = other DNA
cctggcgagcgttgtcgtgatggtctttgctatctggttgcgtatgaatctgaaagaaagcccggtctttgagaa

SEQ ID NO: 407478 - DNA, 75 bp, synthetic construct
  source 1..75: mol_type = other DNA
gaacgcgaaatgacgatggtgatggactcatatcgtctgttcaacgttgggctgcgttgccctgactgcgttatc

SEQ ID NO: 407479 - DNA, 75 bp, synthetic construct
  source 1..75: mol_type = other DNA
gacacaggtgaccgtgacctttgcattggtttgtattctctgggtggtttacggctactcactggcgtttggcga

SEQ ID NO: 407480 - DNA, 75 bp, synthetic construct
  source 1..75: mol_type = other DNA
gcaaaacctgcacctgctggtagcatgttccagagcaaatccttctggctggcaacagggcgcgttttggtcagg

SEQ ID NO: 407481 - DNA, 75 bp, synthetic construct
  source 1..75: mol_type = other DNA
cgctggaagacgctgcggaagatcaaccgcgtgttgtaaggctgcgcaaccttccagaagtctgtaaacccttaa

SEQ ID NO: 407482 - DNA, 75 bp, synthetic construct
  source 1..75: mol_type = other DNA
atgcgtaacagccacaacattacattaacaaataacgacagccttactgaggttgaagacaccacatggtcgctg

SEQ ID NO: 407483 - DNA, 75 bp, synthetic construct
  source 1..75: mol_type = other DNA
ggtttcggcacgctgaccgggaaatatctcaatggtgcaaaacccgctggcgcacgtaatacgctctttagtcgg

SEQ ID NO: 407484 - DNA, 75 bp, synthetic construct
  source 1..75: mol_type = other DNA
gagtaactttaagttacacccttggtggtgagcagaatttaagcattgtgagcgaatcaggtatgtatacattgg

SEQ ID NO: 407485 - DNA, 75 bp, synthetic construct
  source 1..75: mol_type = other DNA
gactgactttgtaccaccgccgacactgcaaccaacgtttaacccgcttacggataacgttgtcccgctcaacct

SEQ ID NO: 407486 - DNA, 75 bp, synthetic construct
  source 1..75: mol_type = other DNA
aagctgctgttaatcgattcctaactgaaaaagatattccggtggcggagctgtgccttctcatcgacccagctt

SEQ ID NO: 407487 - DNA, 75 bp, synthetic construct
  source 1..75: mol_type = other DNA
actggacagctcccacctttcgcgcagagctgagccgcaatatcggtactgctcacgctaaattctacgacgaag

SEQ ID NO: 407488 - DNA, 75 bp, synthetic construct
  source 1..75: mol_type = other DNA
gtacaactggaaagtatcgccattacgatcgtctggtctggtgtggtggcgtttatcggctacaaactggcggat

SEQ ID NO: 407489 - DNA, 75 bp, synthetic construct
  source 1..75: mol_type = other DNA
gcggtgggttacagcgtaaaacggtaaccagcatcctgatggcgtgggtatttactttaccggcggcaatttttc

SEQ ID NO: 407490 - DNA, 75 bp, synthetic construct
  source 1..75: mol_type = other DNA
agatcgcaaaaagaaaaaaggcaaacgtaaaccgccattctggacgcgtattgcgctgattgtttccgctgcggg

SEQ ID NO: 407491 - DNA, 75 bp, synthetic construct
  source 1..75: mol_type = other DNA
ctgggcgatgacaatatcgaccagaagattgccggtcacgtgtcctttatgggcaagaacggtatcaaaggcgaa

SEQ ID NO: 407492 - DNA, 75 bp, synthetic construct
  source 1..75: mol_type = other DNA
cagtactggaaattggcagcctgtttttgatctacaaatggtcatacagctacccactgatccggctgatcatcg

SEQ ID NO: 407493 - DNA, 75 bp, synthetic construct
  source 1..75: mol_type = other DNA
ctctgcgcacttatctgcaaattcgtataggtctgcatgcggcgtttaatgcctgtgaagagatgtgccaacgcg

SEQ ID NO: 407494 - DNA, 75 bp, synthetic construct
  source 1..75: mol_type = other DNA
aagctgcgtggcaacggtaacctacatttactcgacgctgaatcgctacgatcccacctcttttgctgattctca

SEQ ID NO: 407495 - DNA, 75 bp, synthetic construct
  source 1..75: mol_type = other DNA
tgttgttgtatctggagtaaaacctgatcctgagcttgctgcttcaattaaaactgaaattgacagcttagatgc

SEQ ID NO: 407496 - DNA, 75 bp, synthetic construct
  source 1..75: mol_type = other DNA
gagttcacagataaaacactctccaggaaacccggggcggttcatgttgtatctggagtaaaacctgatcctgag

SEQ ID NO: 407497 - DNA, 75 bp, synthetic construct
  source 1..75: mol_type = other DNA
gatcttcggtgaatgggcgctgcgtggtaagccttcactgctgggagcgtgttctggcgcgattgccggtctggt

SEQ ID NO: 407498 - DNA, 75 bp, synthetic construct
  source 1..75: mol_type = other DNA
gaatctccaaaataagtatgttacccagtcaggaagaacaatcaaaataggaagcaagctttacggagatgtttc

SEQ ID NO: 407499 - DNA, 75 bp, synthetic construct
  source 1..75: mol_type = other DNA
gcttcgtccggtgcgccgtatgatcggcgaacgcctgggcgggcgtgagtacacgccagcagagcgtgcaatgct

SEQ ID NO: 407500 - DNA, 75 bp, synthetic construct
  source 1..75: mol_type = other DNA
actggataccaccatcaaggataacgccattacattcccggcgctgagcccgtttggtaaccagattaacgccgg

SEQ ID NO: 407501 - DNA, 75 bp, synthetic construct
  source 1..75: mol_type = other DNA
gcccacgcgggggaacatgcgtctcagcttaaacaagtctccttgcgagaagaaacccttaagacagcagaatat

SEQ ID NO: 407502 - DNA, 75 bp, synthetic construct
  source 1..75: mol_type = other DNA
ccgccagcgtgccagccgataaaaccgaaagccagcgcatccgcgaaaccatcattgcccagctgccggaaggcc

SEQ ID NO: 407503 - DNA, 75 bp, synthetic construct
  source 1..75: mol_type = other DNA
tcgatcccggtaacggcgtctgttcccgccagcgcatcagccgataaaaccgaaagccagcgcatccgtgaaacc

SEQ ID NO: 407504 - DNA, 75 bp, synthetic construct
  source 1..75: mol_type = other DNA
tgatgcacgttgcggcggcgctcaatcgtccgctggttgccctgtatggtccgagtagcccggacttcacaccgc

SEQ ID NO: 407505 - DNA, 75 bp, synthetic construct
  source 1..75: mol_type = other DNA
taagtagtaattctggtctaacaacaggcgggattggcgcagttctaactacattggtaccactattggcgcctg

SEQ ID NO: 407506 - DNA, 75 bp, synthetic construct
  source 1..75: mol_type = other DNA
cgtcgggttgaccgatctggttaccggagatgacggcagcagcatggctgcgggttttatgcagtgggataacgc

SEQ ID NO: 407507 - DNA, 75 bp, synthetic construct
  source 1..75: mol_type = other DNA
gacgaaatcgacatggtactggaaggggaactgcacgttcgccacgaaggcgaaaccatgatcgccaaagcaggc

SEQ ID NO: 407508 - DNA, 75 bp, synthetic construct
  source 1..75: mol_type = other DNA
atgttaacgttaaatcaggtgacttatcgctggtctggcgcggcaacagattgtctttgcgacatttcgctgcaa

SEQ ID NO: 407509 - DNA, 75 bp, synthetic construct
  source 1..75: mol_type = other DNA
gaagcactctctccgccactattgctgctggacgagccgagtcgggattttgacgaaaattggttgagcgtgttt

SEQ ID NO: 407510 - DNA, 75 bp, synthetic construct
  source 1..75: mol_type = other DNA
gaaaaacctgaaaaaccgccagcgcgcggcaaagattggcgtactgtttcaggaagcggaaaaccagctttttca

SEQ ID NO: 407511 - DNA, 75 bp, synthetic construct
  source 1..75: mol_type = other DNA
tcgcaaagtctctatcgcacgctccaggcgcgctatccccaggcgataatcgatgtgatggcaccggcatggtgc

SEQ ID NO: 407512 - DNA, 75 bp, synthetic construct
  source 1..75: mol_type = other DNA
ccccaattttgaataaggggcactttagccaatttaaggtttcattacccgttaaacccgtgcaaaataaaatcg

SEQ ID NO: 407513 - DNA, 75 bp, synthetic construct
  source 1..75: mol_type = other DNA
tcatgacgccgcatttacccggcgtcatttctctcgtgtggtgcgactggaagatggtctaatcaggaacgttaa

SEQ ID NO: 407514 - DNA, 75 bp, synthetic construct
  source 1..75: mol_type = other DNA
cttttccagtcaatgagcaacgtattatccgtcgcgctatgcgactgttggagaaataccagcgccagcccggcg

SEQ ID NO: 407515 - DNA, 75 bp, synthetic construct
  source 1..75: mol_type = other DNA
ataccatcgggagggcgaggggcgttttaattaatcacacgcgggatatagatatttatgagcctgacgggccga

SEQ ID NO: 407516 - DNA, 75 bp, synthetic construct
  source 1..75: mol_type = other DNA
ccgtacatgggcacactcgatgcgttcacgcgtacattgctgatcattaccgcactgggcgtcgtgattgtcgcc

SEQ ID NO: 407517 - DNA, 75 bp, synthetic construct
  source 1..75: mol_type = other DNA
agggctcagatgacagctcaatcgatctgacccaacgtggcttcggtaacagcgccactcttgatcagtggaacg

SEQ ID NO: 407518 - DNA, 75 bp, synthetic construct
  source 1..75: mol_type = other DNA
cgcagaaagcgaaagcgttgctggaaaaagccggttggacgctgcctgcgggcaaagacatccgcgagaaaaatg

SEQ ID NO: 407519 - DNA, 75 bp, synthetic construct
  source 1..75: mol_type = other DNA
atatgcgccgaaaggtaaacgcggcattatctcctcattcgttgcgatgggaacgaactgcggtacgttgagcgc

SEQ ID NO: 407520 - DNA, 75 bp, synthetic construct
  source 1..75: mol_type = other DNA
aattgaacaaatcccgctggccgtagagtacatccacagggtagtgcttgaaggtgagttcatcggcaaacaaga

SEQ ID NO: 407521 - DNA, 75 bp, synthetic construct
  source 1..75: mol_type = other DNA
tggtagatgtacaggtggtggatcatctcatcattggtaatggcaactgtctctcttttgccgaacggggctggc

SEQ ID NO: 407522 - DNA, 75 bp, synthetic construct
  source 1..75: mol_type = other DNA
gcacagttgaagaaaggtttttctgatggtgaggaaaaggcatctccaaatatcaaacctgagtgcattattgat

SEQ ID NO: 407523 - DNA, 75 bp, synthetic construct
  source 1..75: mol_type = other DNA
atctgcactacgccacaacgcggcagcggtgatcctcgctcataaccatccatcgggaataacggatgccagtaa

SEQ ID NO: 407524 - DNA, 75 bp, synthetic construct
  source 1..75: mol_type = other DNA
gttggtcagggctcagatgacagctcaatcgatctgacccaacgtggcttcggtaacagcgccactcttgatcag

SEQ ID NO: 407525 - DNA, 75 bp, synthetic construct
  source 1..75: mol_type = other DNA
gtatgctaaacatgctgcaaattatcaaaaatataaagtaattgttgatatcccggaatacgatgctgagctttg

SEQ ID NO: 407526 - DNA, 75 bp, synthetic construct
  source 1..75: mol_type = other DNA
ccaacgcgctgttaaccggctcatcggtgatggatgcgttaaacctgcgtgaagtgaccaaaattttctcctcgc

SEQ ID NO: 407527 - DNA, 75 bp, synthetic construct
  source 1..75: mol_type = other DNA
tgcaggcattacgcgaagttgttgtttctccgcacgtggagttagcggtgcatttatttgctgacttagccctcg

SEQ ID NO: 407528 - DNA, 75 bp, synthetic construct
  source 1..75: mol_type = other DNA
tttttatcgtggcgggaaccacaattggcgcaggcatgctggcaatgccgctggctgcggcaggtgttggtttta

SEQ ID NO: 407529 - DNA, 75 bp, synthetic construct
  source 1..75: mol_type = other DNA
cagactacggtaggcctgacggatactgagtccaaacgtcgttatcagatgagtaaccagctcacgcttaaaggc

SEQ ID NO: 407530 - DNA, 75 bp, synthetic construct
  source 1..75: mol_type = other DNA
atggttcaatgcctgttgtggctagttggtttacacgcacagcaacagggctgggataagcattttcaggccaat

SEQ ID NO: 407531 - DNA, 75 bp, synthetic construct
  source 1..75: mol_type = other DNA
aatgtaagacactgaccttgactgagttaggtcgaaatttaccaaccacggcccgaaccaagcacaacatcaagc

SEQ ID NO: 407532 - DNA, 75 bp, synthetic construct
  source 1..75: mol_type = other DNA
aggtttatttgattatctggcagatttgtttcagcgttcaaataccgttggtggacgattgcaaactggtgcaat

SEQ ID NO: 407533 - DNA, 75 bp, synthetic construct
  source 1..75: mol_type = other DNA
agtttaacggaccggaagaagaagacgaaaaaccgtgggtcaacgatgataaaccccaggtcattgtcgtgggct

SEQ ID NO: 407534 - DNA, 75 bp, synthetic construct
  source 1..75: mol_type = other DNA
agcgacgtcgatgagatcctccacttttcggaactcggcgtggtgttcctgatgtttatcatcggcctggagttg

SEQ ID NO: 407535 - DNA, 75 bp, synthetic construct
  source 1..75: mol_type = other DNA
gtgggtagtgataagcgtggttgtgctggtggcggtgaaaattctcgtgttgtatctgctggcgcgattgtatgg

SEQ ID NO: 407536 - DNA, 75 bp, synthetic construct
  source 1..75: mol_type = other DNA
gccacgcaggtagctcttttacgttctgcgggtgcagaggccgcagagtcaatcgtcattacctgtaacgaaccg

SEQ ID NO: 407537 - DNA, 75 bp, synthetic construct
  source 1..75: mol_type = other DNA
gaagctggtggaaatatgccagcagcactttccgcatttgcatattcttgcgcgagcgcgcggacgtgtggaagc

SEQ ID NO: 407538 - DNA, 75 bp, synthetic construct
  source 1..75: mol_type = other DNA
gtgcggacaccagatgcgagaagcagacaaagaagcccgcgatcacgttcgcaaagatgagcaagtgatcgggat

SEQ ID NO: 407539 - DNA, 75 bp, synthetic construct
  source 1..75: mol_type = other DNA
actcaggcggcctgattatcaaatcacggagaaagaattgctggcggcctgggtattattcgccaatcagttgct

SEQ ID NO: 407540 - DNA, 75 bp, synthetic construct
  source 1..75: mol_type = other DNA
aactggaaataatcagaaacataataagagagtcgttaccgggaaatgcggcaattattgcgctgatatatgcag

SEQ ID NO: 407541 - DNA, 75 bp, synthetic construct
  source 1..75: mol_type = other DNA
cccacgaaaaagggctgctgatgatggggccggactgcggcacggcgattattaacggcgcggcgctctgttttg

SEQ ID NO: 407542 - DNA, 75 bp, synthetic construct
  source 1..75: mol_type = other DNA
tggtcaccggaccgtcttcatggtgtggaacaactgagcctcgggggcgagagttcagtgcgtggctttaaggag

SEQ ID NO: 407543 - DNA, 75 bp, synthetic construct
  source 1..75: mol_type = other DNA
tgaactgcgtcagtatattgaagagctggaaagtgcgctgggtgtatccggacggcgtcgtgctccggcaggagt

SEQ ID NO: 407544 - DNA, 75 bp, synthetic construct
  source 1..75: mol_type = other DNA
gaattaaccgcagaagaattatcaatcattcaaagtatgcctggcgtttacttcaatccgcgcccacgcaaaaca

SEQ ID NO: 407545 - DNA, 75 bp, synthetic construct
  source 1..75: mol_type = other DNA
ctggcgttcgaagaaaagcatggttcccaggttgatttaatttttcgttttcttgatcacgcctttgcaactggc

SEQ ID NO: 407546 - DNA, 75 bp, synthetic construct
  source 1..75: mol_type = other DNA
ttcaacgaggactaattgccaccatccatcggcaaaaacgtactcaacatcggcgaaagagccttgggtgttagc

SEQ ID NO: 407547 - DNA, 75 bp, synthetic construct
  source 1..75: mol_type = other DNA
acggagaaagaattgctggcggcctgggtattattcgccaatcagttgctcaaatatggctatgctatggctgat

SEQ ID NO: 407548 - DNA, 75 bp, synthetic construct
  source 1..75: mol_type = other DNA
gcagcaggcatcgttgtattatggttattttcaattatctatatttatttttgtgagctattcagaagccactga

SEQ ID NO: 407549 - DNA, 75 bp, synthetic construct
  source 1..75: mol_type = other DNA
ttggaacgtctgctgcgtatctgttttatgcgcaaaaaacgtcagcaggccagttgtttgatgtaaatggcgcta

SEQ ID NO: 407550 - DNA, 75 bp, synthetic construct
  source 1..75: mol_type = other DNA
atgaaatgaatctggacagggcgctactccctatcctttttcgttcgaatcgctccacggtgtggaagtatttaa

SEQ ID NO: 407551 - DNA, 75 bp, synthetic construct
  source 1..75: mol_type = other DNA
tggttaacatcatgcaggatagcccgtcagatccggtaatgatgtttaccaactctaacgtcaaagatggattgt

SEQ ID NO: 407552 - DNA, 75 bp, synthetic construct
  source 1..75: mol_type = other DNA
gccagaactgacgctgattcggctttggcttctagtatcactaatctacaggcgcaaacgagcaaagatattaat

SEQ ID NO: 407553 - DNA, 75 bp, synthetic construct
  source 1..75: mol_type = other DNA
tcggatattgaatcagaaaggcaaaatcgttgaacgcgatgttcttgaaactggcgaaaacataacaaaggttac

SEQ ID NO: 407554 - DNA, 75 bp, synthetic construct
  source 1..75: mol_type = other DNA
gaaacgcctgttttgaacggcgtctggactattacagaaccagatctcgaacctatgcgcgttcgcatcgttaac

SEQ ID NO: 407555 - DNA, 75 bp, synthetic construct
  source 1..75: mol_type = other DNA
cctgcaggccggacggtggtttgcaccagcgtatgccctccatctgctgtgtattggttttatggtcagtgttct

SEQ ID NO: 407556 - DNA, 75 bp, synthetic construct
  source 1..75: mol_type = other DNA
aacatggtcgggcgctgtgctttccccctgtttgcgctggtctgtggctgcaacatggcgggtaaaaccttacgt

SEQ ID NO: 407557 - DNA, 75 bp, synthetic construct
  source 1..75: mol_type = other DNA
tgaagctggtaagcagtaatgggcaatcaataattggttatatttcaaagtttaatcagaaagaaaatatgatct

SEQ ID NO: 407558 - DNA, 75 bp, synthetic construct
  source 1..75: mol_type = other DNA
gctggggcgcgaggcggatatgtcggggagggctgcggatatcgcacagcgtgtggcagagtgggaagaggaggt

SEQ ID NO: 407559 - DNA, 75 bp, synthetic construct
  source 1..75: mol_type = other DNA
ggcgatggagccggatctgtctgagcaggtcatttatagcgaatttgaagataccctgcagattgtcgatgccga

SEQ ID NO: 407560 - DNA, 75 bp, synthetic construct
  source 1..75: mol_type = other DNA
ttcaaggtgtatcctatgccatcccgtcgctctgtatcctgtaaagcatcaacgcgaatgatagctaacgacatt

SEQ ID NO: 407561 - DNA, 75 bp, synthetic construct
  source 1..75: mol_type = other DNA
gcggctggtgaaggcgatgtgattttttgcgatccgccgtatgaaccgctgccggatacagaagggtttaccagt

SEQ ID NO: 407562 - DNA, 75 bp, synthetic construct
  source 1..75: mol_type = other DNA
cctgacgccggacggcaggctgacggcccgtaatgccgatatcagcgggaatatcagtgccagttccggtacgct

SEQ ID NO: 407563 - DNA, 75 bp, synthetic construct
  source 1..75: mol_type = other DNA
tgccagagaaacaacggctcgtgcagatggtgataccgctttaacaaaagaggtttcaagtttaaaagcacagac

SEQ ID NO: 407564 - DNA, 75 bp, synthetic construct
  source 1..75: mol_type = other DNA
ctgcaagtctttggcgcggaatacgctatgcgcatctggcttgacccggccaaactggcgtcttactcgctgatg

SEQ ID NO: 407565 - DNA, 75 bp, synthetic construct
  source 1..75: mol_type = other DNA
gaaagtgcgagatgattgttggcattgaccacttcatgacggcctcggctaagtattgcgatatcctgttgcccg

SEQ ID NO: 407566 - DNA, 75 bp, synthetic construct
  source 1..75: mol_type = other DNA
acgaaatgaatctggacagggcgctgcttccaatcctttttcgttcgaaccggtcgacagtgtggaagtatttaa

SEQ ID NO: 407567 - DNA, 75 bp, synthetic construct
  source 1..75: mol_type = other DNA
gccatggccgagacggcctgttcgaagttacctgcccggagtgcgacggatcgggttacagcccggaagaggaca

SEQ ID NO: 407568 - DNA, 75 bp, synthetic construct
  source 1..75: mol_type = other DNA
tgtctggcaggtgccggagcagtatcaggggcggttatttttactgtggctgtgttctgttgtatggctgaacgg

SEQ ID NO: 407569 - DNA, 75 bp, synthetic construct
  source 1..75: mol_type = other DNA
atctcccgatctacacaccggaagtgctgacgctatgcccgaaatgtggtcatgaccagttccagagacgcccgt

SEQ ID NO: 407570 - DNA, 75 bp, synthetic construct
  source 1..75: mol_type = other DNA
cctggacgcgcatacaaggttcgtgtagtccgtattaccgatgataacagtagccagtatctctataacgataca

SEQ ID NO: 407571 - DNA, 75 bp, synthetic construct
  source 1..75: mol_type = other DNA
ggccggtatgggcatgacactgctggtattgtgtcttgtgcatgagtatgtacctgcatcatcaaagcgcctgca

SEQ ID NO: 407572 - DNA, 75 bp, synthetic construct
  source 1..75: mol_type = other DNA
atggtgaattaccgtcttatatcactggcgctaacagtgatgcaggcggtctgtttctggcagcgccctgatgcc

SEQ ID NO: 407573 - DNA, 75 bp, synthetic construct
  source 1..75: mol_type = other DNA
taaaaggtgccataaccggaaccatgctggcactgtatctgccgttcagtactgccagttatggctggcagggac

SEQ ID NO: 407574 - DNA, 75 bp, synthetic construct
  source 1..75: mol_type = other DNA
aacatcagttatctggatgctcaggttggaaaagtgctggataaaattaaagcgatgggtgaagaagataacacc

SEQ ID NO: 407575 - DNA, 75 bp, synthetic construct
  source 1..75: mol_type = other DNA
cggcgggctttgttaccgacgccacgctagataacgctaaagaacgcccgcgttatggcatagtttacccgacag

SEQ ID NO: 407576 - DNA, 75 bp, synthetic construct
  source 1..75: mol_type = other DNA
gggattgtgttgattaaatctggtactcgcaaagtgcgtaaaccctcgctggaggtgaatcatggcgcagtttga

SEQ ID NO: 407577 - DNA, 75 bp, synthetic construct
  source 1..75: mol_type = other DNA
aaatgactttaccagattaacaaaagaatatagccatgtttatttttcaccgcatccaatgataaaaggagacta

SEQ ID NO: 407578 - DNA, 75 bp, synthetic construct
  source 1..75: mol_type = other DNA
caatttgttgtgatttcttgatgacgagaaataaaacacaacgatatcacttgagatggttttcattattaatga

SEQ ID NO: 407579 - DNA, 75 bp, synthetic construct
  source 1..75: mol_type = other DNA
acttttgatggcgaatcgttggttcctgtccttgagaacaaagcgctaaaacgtgaaaagccattaatcttcgga

SEQ ID NO: 407580 - DNA, 75 bp, synthetic construct
  source 1..75: mol_type = other DNA
acaggactggacaataccgcggaagccctggaaatcggcctgaccgatgcgtccggtcaggtggtatttgaaacc

SEQ ID NO: 407581 - DNA, 75 bp, synthetic construct
  source 1..75: mol_type = other DNA
cgccattggggcgcaggccgccgctgtgcatggtattagtgagcaggctctctgcggcgcaccattatggacaga

SEQ ID NO: 407582 - DNA, 75 bp, synthetic construct
  source 1..75: mol_type = other DNA
tataccgaattgcagacagtgtcccgatgcgtgagaaacgcccactgacgagtgggcaacttctggcaggccagc

SEQ ID NO: 407583 - DNA, 75 bp, synthetic construct
  source 1..75: mol_type = other DNA
atgtctcaaaatacaggacactctttagtgtcgcatcgttctgaatttcagcacgtaatgactgaaatacgtaat

SEQ ID NO: 407584 - DNA, 75 bp, synthetic construct
  source 1..75: mol_type = other DNA
gcttatctttttcctgcgcgtcggctggacccacgtcggttattcagtcggcgtgaaggctattgataaagtgcg

SEQ ID NO: 407585 - DNA, 75 bp, synthetic construct
  source 1..75: mol_type = other DNA
gtggtcgttgtaacgacgatagaaaataaaaatttcaaatataaaaataataatagggtgctaacctttgaagat

SEQ ID NO: 407586 - DNA, 75 bp, synthetic construct
  source 1..75: mol_type = other DNA
tgaaactcctttatctgaacgatataaaatcataggaaaacttctctctattcctgaagatgttttccttgattt

SEQ ID NO: 407587 - DNA, 75 bp, synthetic construct
  source 1..75: mol_type = other DNA
ggaaagtcagggaaaacgagataatctcacgggctcggaacaaatattttacagtgggttcaaagaatttgtgcg

SEQ ID NO: 407588 - DNA, 75 bp, synthetic construct
  source 1..75: mol_type = other DNA
cttattgcgtgtaaaaatccatacattaccggaagatactgcgattcggcaaaggattgctgaaaaatatattcg

SEQ ID NO: 407589 - DNA, 75 bp, synthetic construct
  source 1..75: mol_type = other DNA
caattactgagcaaattcatgatgaagtcatttctttacctataagtccggtaatgagtgaagatgatgtcaatt

SEQ ID NO: 407590 - DNA, 75 bp, synthetic construct
  source 1..75: mol_type = other DNA
ctataaatgatcagtatcaaaatgaattaaaagaagcatgtgatagagttatagactcaggctggtatataatgg

SEQ ID NO: 407591 - DNA, 75 bp, synthetic construct
  source 1..75: mol_type = other DNA
gtcattacctatggatccatcaatgactgatgagcacataaataaagttattaaagttgctaatgaatttaaaaa

SEQ ID NO: 407592 - DNA, 75 bp, synthetic construct
  source 1..75: mol_type = other DNA
tcgtgagctggaaaatctggaaacacacattccgtttctcggtacggtgggttctatcagcccgtatatcggttt

SEQ ID NO: 407593 - DNA, 75 bp, synthetic construct
  source 1..75: mol_type = other DNA
gaactgggtaacatcccctacgcgccgatcgccaccgaaatcccgttcgaacagattaaaccggtgaaaccttaa

SEQ ID NO: 407594 - DNA, 75 bp, synthetic construct
  source 1..75: mol_type = other DNA
ggcctgaaaccgcgccagtacgatccgcagaaagcgaaagcgttgctggaaaaagcaggctggacattgccagca

SEQ ID NO: 407595 - DNA, 75 bp, synthetic construct
  source 1..75: mol_type = other DNA
acgagtttcatcgatgtataccaagcaagatgtgatcaatgaaattgataatttcattagctcgttaaacaataa

SEQ ID NO: 407596 - DNA, 75 bp, synthetic construct
  source 1..75: mol_type = other DNA
acacccattgcagcgctttctggtgctgcggcttataacgcgacgatggcggcaattggagggggctctctcgcg

SEQ ID NO: 407597 - DNA, 75 bp, synthetic construct
  source 1..75: mol_type = other DNA
acacccattgcagcgctttctggtgccgcggcttataacgcgacgatggcggcaattggtgggggctcactggct

SEQ ID NO: 407598 - DNA, 75 bp, synthetic construct
  source 1..75: mol_type = other DNA
atccggaggcctttattttgattccttcggcggaaaaatttattgtagatggcaattgcattcaactgattggta

SEQ ID NO: 407599 - DNA, 75 bp, synthetic construct
  source 1..75: mol_type = other DNA
gacgcgcaactgggctgggatactgaccagttcccgaacagcgtggaagagaacgcgctggtaatgtatgaaatc

SEQ ID NO: 407600 - DNA, 75 bp, synthetic construct
  source 1..75: mol_type = other DNA
gagtcgcgtcctctccctgtctccgttccttcaatgccactgaagctgaaagtcgttctggtcggcgaacgcgaa

SEQ ID NO: 407601 - DNA, 75 bp, synthetic construct
  source 1..75: mol_type = other DNA
cacccgtcacctaaaatctactcagcgtcggcaaaggagccatgggttctagcaacggcactgttgcaaagttag

SEQ ID NO: 407602 - DNA, 75 bp, synthetic construct
  source 1..75: mol_type = other DNA
tgtggcactggctggcaagcgcctattttatcgtgctgtttttcttttcgttgttcgatccgggcaacagcctga

SEQ ID NO: 407603 - DNA, 75 bp, synthetic construct
  source 1..75: mol_type = other DNA
gtgtggatcactattgcaccgttcgtgacaacacatcctgaaattaaattattacaatttaaattaataccaggg

SEQ ID NO: 407604 - DNA, 75 bp, synthetic construct
  source 1..75: mol_type = other DNA
atgtctggtgtaagagtcgtgaggtggtggttctcagaaatctgattgagcaggcgtggggaaaagtattggatg

SEQ ID NO: 407605 - DNA, 75 bp, synthetic construct
  source 1..75: mol_type = other DNA
gttgatttgcaagattacgctaaccgattaattgaacgctatagcaacccggcgttacgtcatcgaacctggcag

SEQ ID NO: 407606 - DNA, 75 bp, synthetic construct
  source 1..75: mol_type = other DNA
agatccggtgccattacctgagctgccgtgcgaaaaatcagatgcttatttcgtgctgcgtgacggtgctgccgg

SEQ ID NO: 407607 - DNA, 75 bp, synthetic construct
  source 1..75: mol_type = other DNA
gagggacaccaggatggctcatatattaatacaaactggcatttcgacaatctccgggcctgcatgggcattacc

SEQ ID NO: 407608 - DNA, 75 bp, synthetic construct
  source 1..75: mol_type = other DNA
aaaattgttgatatgtatgaccatgtaaatgatcaagatgacataaataaattccatagtgctatcattatcatc

SEQ ID NO: 407609 - DNA, 75 bp, synthetic construct
  source 1..75: mol_type = other DNA
ataagaaggattatcggagagcactgttaactgatacatctccttcggatactcccataatattcacaaatgatg

SEQ ID NO: 407610 - DNA, 75 bp, synthetic construct
  source 1..75: mol_type = other DNA
ctctcaaaaaagccctgcaaacgcaggcgaacaacctcataaagtttttcatgagtcagggaatggacaaggccg

SEQ ID NO: 407611 - DNA, 75 bp, synthetic construct
  source 1..75: mol_type = other DNA
gattttttgcccaaacgtggctgaactgcgcccgttcacgattcatgacgaagcgcccgttactggagtcgtcgc

SEQ ID NO: 407612 - DNA, 75 bp, synthetic construct
  source 1..75: mol_type = other DNA
cagaaagctgcttgacaaaaatgataattatattggttccccaccttctgccataccggaaggtgctgtcgtaat

SEQ ID NO: 407613 - DNA, 75 bp, synthetic construct
  source 1..75: mol_type = other DNA
ctgacatagatgtcaataaagaagttaattgcggtgatgtatatttctttcaggcaaaaaaccattattcattaa

SEQ ID NO: 407614 - DNA, 75 bp, synthetic construct
  source 1..75: mol_type = other DNA
aaccgcaagaaccgactaaacatcaatatgattacgatgccgcgacggtctatggcttcctgaaacagtttggtc

SEQ ID NO: 407615 - DNA, 75 bp, synthetic construct
  source 1..75: mol_type = other DNA
actataacggagggaaagcactgatacctgcatttcaggagaatcttttccatggcaagcgcagaatagagaatt

SEQ ID NO: 407616 - DNA, 75 bp, synthetic construct
  source 1..75: mol_type = other DNA
ttaacgccccctttgatacccgcattctgaaacagacggccgccgcacatggcgatccggccgactggctgggag

SEQ ID NO: 407617 - DNA, 75 bp, synthetic construct
  source 1..75: mol_type = other DNA
gtttggtgcgctgcataagtgtgagctgtgtaaccagaaaggtgtggaacgtctcgataaaggcggtctgcctgg

SEQ ID NO: 407618 - DNA, 75 bp, synthetic construct
  source 1..75: mol_type = other DNA
ctctcaacagttcgcttaggcatggaagttttgcggcattctggggctttgttgaataaatcagatttcgggtaa

SEQ ID NO: 407619 - DNA, 75 bp, synthetic construct
  source 1..75: mol_type = other DNA
cgatatacagcagcatgggcgaacttgctgccagtaatattgttctacccggaaatacaacttctggattgaaca

SEQ ID NO: 407620 - DNA, 75 bp, synthetic construct
  source 1..75: mol_type = other DNA
tgccgatcacggcgtctgggatgagggtgtcactatttccccgaaagcggtgacagccattcaggctgaaaatat

SEQ ID NO: 407621 - DNA, 75 bp, synthetic construct
  source 1..75: mol_type = other DNA
tgtctggacaacagaattcatgtttaacgcgctgcgtgcgcgatataccgagcaatcattatataaatattatct

SEQ ID NO: 407622 - DNA, 75 bp, synthetic construct
  source 1..75: mol_type = other DNA
aacgcgctgcgtgcgcgatataccgagcaatcgttatataaatattatctgcataatacgtcagtgagtcggttg

SEQ ID NO: 407623 - DNA, 75 bp, synthetic construct
  source 1..75: mol_type = other DNA
cgatggttcaacggataattctgttgaaatagcaaagcattacgcagaaaactatccgcacgttcgtttgttgca

SEQ ID NO: 407624 - DNA, 75 bp, synthetic construct
  source 1..75: mol_type = other DNA
gcgtgaaggtcggttaccaggcgttactgtggtctttccgcttatggcaatggcgcgaaaaaaacgcggtcgcac

SEQ ID NO: 407625 - DNA, 75 bp, synthetic construct
  source 1..75: mol_type = other DNA
gtgttattatcccgttatataatgcgggtgatgatttcaacgcttgcatggaatctttaatcgcgcagacctgga

SEQ ID NO: 407626 - DNA, 75 bp, synthetic construct
  source 1..75: mol_type = other DNA
ctcaaccggcgtattaaccggcccggactggctgcggatgggactttcttctcgccgctggactcacgttgtctg

SEQ ID NO: 407627 - DNA, 75 bp, synthetic construct
  source 1..75: mol_type = other DNA
ctgaacagcacatcaggcagtattgctgcgcatgaaaccctttttgctgctccgttacgcactatggcgaaatcc

SEQ ID NO: 407628 - DNA, 75 bp, synthetic construct
  source 1..75: mol_type = other DNA
tggtaccggagaagtgctggaactggccacacttcaggcgcttgaagcacagcgtttcagtgtgccgatgtggta

SEQ ID NO: 407629 - DNA, 75 bp, synthetic construct
  source 1..75: mol_type = other DNA
agggcggcgattaccagtctgttgaaacgctgcgcgtggcggacaaagcagcccgccgtgtgcgtctgctggcca

SEQ ID NO: 407630 - DNA, 75 bp, synthetic construct
  source 1..75: mol_type = other DNA
tcccaccatgtacgaaacgctgatgaccatggcgttagaggacgacctcgacgtggcgcagtgcaacgctgactg

SEQ ID NO: 407631 - DNA, 75 bp, synthetic construct
  source 1..75: mol_type = other DNA
cttatccctcgtctgtttggcgcggagccgggtgtttatgtcggtcgtctgtgcaaccgggcagtgaccatcgca

SEQ ID NO: 407632 - DNA, 75 bp, synthetic construct
  source 1..75: mol_type = other DNA
tggcgacgtgaaaattgtctgggtgaacgaaaaaacggtcagtatctggattattgtccgcccctatgcctgccc

SEQ ID NO: 407633 - DNA, 75 bp, synthetic construct
  source 1..75: mol_type = other DNA
atgtctgatttactttgctctgccaaattgggtgctacgacgctagcgttactgcttagcgctgccagtttgtct

SEQ ID NO: 407634 - DNA, 75 bp, synthetic construct
  source 1..75: mol_type = other DNA
aggttacgctcagtcaaaccagaagtatcgctgaatataaaaaacaattgccggtaacattgaagagctggaaaa

SEQ ID NO: 407635 - DNA, 75 bp, synthetic construct
  source 1..75: mol_type = other DNA
tatcttgaatatctttcagacgagaaagagatttgctttaaggtcgagtgcaatcagcaaatctttgcggataaa

SEQ ID NO: 407636 - DNA, 75 bp, synthetic construct
  source 1..75: mol_type = other DNA
gagtgcaatcagcaaatctttgcggataaaattttactgcaacgaatgttatcgaatcttattgttaacgccatt

SEQ ID NO: 407637 - DNA, 75 bp, synthetic construct
  source 1..75: mol_type = other DNA
cgcaataataccgaagcacagcatatgacaatcgacacaaacggtcagatggtcatgaaaagcaaacagcaattg

SEQ ID NO: 407638 - DNA, 75 bp, synthetic construct
  source 1..75: mol_type = other DNA
tttttaaatatttttttaccctagcatttgttctcaaattgatattgagcttaaatataaccaaggaaaatgtaa

SEQ ID NO: 407639 - DNA, 75 bp, synthetic construct
  source 1..75: mol_type = other DNA
atgtataatgccaatcccaattacaaaatggatttcatgattctgaaagacgtgaatgaacacatggatggtatg

SEQ ID NO: 407640 - DNA, 75 bp, synthetic construct
  source 1..75: mol_type = other DNA
gcgaccaaaggcgctggaaaaggtcagtatgaaaagtccgtggcagcacaaggtgacgctcacccgcagcggtca

SEQ ID NO: 407641 - DNA, 75 bp, synthetic construct
  source 1..75: mol_type = other DNA
ggcgcacggatgccgctgttcttcaagtgcaatggcaacagctgccaggtggatgaagagcagagccgcaaaggc

SEQ ID NO: 407642 - DNA, 75 bp, synthetic construct
  source 1..75: mol_type = other DNA
gacgcgcggatgccactgtttttcaaatgcacagggaatacctgtcaggtggatgaagagcatagccgtaaaggc

SEQ ID NO: 407643 - DNA, 75 bp, synthetic construct
  source 1..75: mol_type = other DNA
tccgcccgcagtacagctgtccctgctgtcagaaagtgttcagcgggaaaatgccggcacatatccttccgaaaa

SEQ ID NO: 407644 - DNA, 75 bp, synthetic construct
  source 1..75: mol_type = other DNA
tgaaaaggttatcccgccagctgaggagcgttgtcctgactgtgatgaacccctgcacttcattcgcgatgaagt

SEQ ID NO: 407645 - DNA, 75 bp, synthetic construct
  source 1..75: mol_type = other DNA
cgtgctgactccagtatttttcctggacagatttacagcggagtctggctcaaagacgtacactaataaacccga

SEQ ID NO: 407646 - DNA, 75 bp, synthetic construct
  source 1..75: mol_type = other DNA
caaaaaggcggtggatatttacattgtggtacgcacctgggaagtgccgctgcaaatcaccatcagtctgttact

SEQ ID NO: 407647 - DNA, 75 bp, synthetic construct
  source 1..75: mol_type = other DNA
agagaattgcgggtcatcaatggcgacatatctggctttctggcgatatacacggttgtcttgagcagttgcgcc

SEQ ID NO: 407648 - DNA, 75 bp, synthetic construct
  source 1..75: mol_type = other DNA
atgatgaaggactattttggaattggtagtacggtatttgtgagtttgttgttcgggcttgcatttattttggtg

SEQ ID NO: 407649 - DNA, 75 bp, synthetic construct
  source 1..75: mol_type = other DNA
gaatagtcgcgagcgctgcggcgtcagcatttgggggaattagtaaggttaaagggaattcccagcctaaaattg

SEQ ID NO: 407650 - DNA, 75 bp, synthetic construct
  source 1..75: mol_type = other DNA
aaactgccggcacggcgctggcattactgctcactgcgaccagcctgtccgtgcaggcatcggtcacaccggatc

SEQ ID NO: 407651 - DNA, 75 bp, synthetic construct
  source 1..75: mol_type = other DNA
cgaaagaagaacaaaaagacgggctgtgtgcctacggctgcaatgaagttcctgaacgtcctgctgcagggcgtc

SEQ ID NO: 407652 - DNA, 75 bp, synthetic construct
  source 1..75: mol_type = other DNA
aagcaacaagaaaacggggaatcgtaatgctcattctcgttcttcgtcgaaaaactctttccgcggtggcggcgg

SEQ ID NO: 407653 - DNA, 75 bp, synthetic construct
  source 1..75: mol_type = other DNA
tcagcaggttttgttgacgcattatggacaacggatgcggcagaaactgggcttcatgacggagcaaaaagagga

SEQ ID NO: 407654 - DNA, 75 bp, synthetic construct
  source 1..75: mol_type = other DNA
agtctgatggcgcgagagcgcagcgactatacccgtacattccgcatccttagcctggttgaacagcgcagtccg

SEQ ID NO: 407655 - DNA, 75 bp, synthetic construct
  source 1..75: mol_type = other DNA
ttgcgcatgaaggtggaagatggagatgtcattctggtaaagaagctagaccgtcttggtcgtgacactgccgat

SEQ ID NO: 407656 - DNA, 75 bp, synthetic construct
  source 1..75: mol_type = other DNA
cagcaggatgacgttggcgatagtgaacgacggcaacgtatgctgaacgttaatccggcgctggtgttgcgcaac

SEQ ID NO: 407657 - DNA, 75 bp, synthetic construct
  source 1..75: mol_type = other DNA
ctgatggcactacaatggactggcatctgaaaggtgctggcctgacgccttattcgcgaatgggtgatggacggg

SEQ ID NO: 407658 - DNA, 75 bp, synthetic construct
  source 1..75: mol_type = other DNA
ctggtttacagatgttgtcgcgcgtacggcttcgttaattgcctgctggcagacggtcggctttgctcacggggt

SEQ ID NO: 407659 - DNA, 75 bp, synthetic construct
  source 1..75: mol_type = other DNA
aaaaacccaaccagttattacgtcattatcagctccgccagtacacagaaaggcggtcagcccatcacaggcttt

SEQ ID NO: 407660 - DNA, 75 bp, synthetic construct
  source 1..75: mol_type = other DNA
caaacgccagctacagtgcggagaagcggtgctggtatggtcggagctgcacgaaacggtcaatattatgccgcg

SEQ ID NO: 407661 - DNA, 75 bp, synthetic construct
  source 1..75: mol_type = other DNA
atgtttagtttgactcatacggcaaaaaacgttgtccctgtcctggcgctgctggccagtttctccggccacgcc

SEQ ID NO: 407662 - DNA, 75 bp, synthetic construct
  source 1..75: mol_type = other DNA
gcacacgcctgatcttcaatgaaggtgacaaatctatcagcgtcacgttgcgcaataacgacctgaagcagccct

SEQ ID NO: 407663 - DNA, 75 bp, synthetic construct
  source 1..75: mol_type = other DNA
cggggactacaacgtcattgagcatgtccgcattgctgataaggtggcgcgccgcgtgcggctgatggccatccc

SEQ ID NO: 407664 - DNA, 75 bp, synthetic construct
  source 1..75: mol_type = other DNA
ctggtcgcctgtgtagccgagcggtaaccattgctgacagtccggcgcgggttaaaaccggtgctctgatgaatc

SEQ ID NO: 407665 - DNA, 75 bp, synthetic construct
  source 1..75: mol_type = other DNA
tctgtggaaggcgtggtgctgtctgacgatgtgaccgctaaagcgcaggtaaatcaggccgtgacgttacgatcc

SEQ ID NO: 407666 - DNA, 75 bp, synthetic construct
  source 1..75: mol_type = other DNA
cggaatgctggcggtctattacgcataactgtggttcggtgcaccgttgtacatatcagccgcattatgcataca

SEQ ID NO: 407667 - DNA, 75 bp, synthetic construct
  source 1..75: mol_type = other DNA
ggcgaaagaagagcaaaaagacgggctgtgtgcttacggctgcaatgaagttcctgaacgtcctgctgcaggacg

SEQ ID NO: 407668 - DNA, 75 bp, synthetic construct
  source 1..75: mol_type = other DNA
ccgtaaaatcaacggcaaactgcagccgcgcatgggtaaccgtgccatgttgctgggtaaaatcttcgctaaccc

SEQ ID NO: 407669 - DNA, 75 bp, synthetic construct
  source 1..75: mol_type = other DNA
tgaaattccgccgaaatcgaacaaacctaacacgctacagatagcgctgcagacgcgcattaagttgttctggcg

SEQ ID NO: 407670 - DNA, 75 bp, synthetic construct
  source 1..75: mol_type = other DNA
ggcgcgcggatgccgctgtacttcaaatgcaccggcaacaactgccaggtggatgaagagcagagccgcaaaggc

SEQ ID NO: 407671 - DNA, 75 bp, synthetic construct
  source 1..75: mol_type = other DNA
ggtgcaggggctgccggatatcaacaagctgccagccgaccgcgagagcgtgttctattttaacgtgcgcgaaat

SEQ ID NO: 407672 - DNA, 75 bp, synthetic construct
  source 1..75: mol_type = other DNA
tccgccgacggcgagcagtcggttcagatactcgcgaacctgcgctcgctttctggtcagcttgccctgaaactg

SEQ ID NO: 407673 - DNA, 75 bp, synthetic construct
  source 1..75: mol_type = other DNA
catcatgaggggactgcgggataacctgaccttggattctctgcgagcaggcatcgataactctggtttgtccga

SEQ ID NO: 407674 - DNA, 75 bp, synthetic construct
  source 1..75: mol_type = other DNA
ttcagtcagctaatcgtcgaggcgtgacttggggcgattactgcaaggccaatggtctacccgctcagaaactga

SEQ ID NO: 407675 - DNA, 75 bp, synthetic construct
  source 1..75: mol_type = other DNA
ccggtaacgctggatgtgataaaacagacgctgacggtatatgccgagagggtcaggaaatcgcgggaatcgtag

SEQ ID NO: 407676 - DNA, 75 bp, synthetic construct
  source 1..75: mol_type = other DNA
cgctgacgccggtgtatctggcgaaccgtttgcaggctttgttgggcgttgagcaaaccattcggatggagaact

SEQ ID NO: 407677 - DNA, 75 bp, synthetic construct
  source 1..75: mol_type = other DNA
acgaactggcgcatacctatctcaatatgcttacgcatgaggatcgccaacgactgacgcaaattatctgtgggc

SEQ ID NO: 407678 - DNA, 75 bp, synthetic construct
  source 1..75: mol_type = other DNA
gcaggttaaggtattagccgaaccgctgaagaaaaatgcttatggtcagtatttgctgaaaatgattaaaggtta

SEQ ID NO: 407679 - DNA, 75 bp, synthetic construct
  source 1..75: mol_type = other DNA
ttctgcccgtggcgaactggaaattaccgatattaaccgtatttatatggaacaaggacgtttgtctgtagccat

SEQ ID NO: 407680 - DNA, 75 bp, synthetic construct
  source 1..75: mol_type = other DNA
aacaggggcgtttatctgttgccatgatgggacgtggatatgcatggttggacacggggacacatcaaagtctta

SEQ ID NO: 407681 - DNA, 75 bp, synthetic construct
  source 1..75: mol_type = other DNA
tagacacgggcgcttctggacgtaaatcctctcacactatccttaacggagaccaactactattggtcggtatgc

SEQ ID NO: 407682 - DNA, 75 bp, synthetic construct
  source 1..75: mol_type = other DNA
gcgctcaagggtgaacctgtatgatttcctgcttaacggtaagctggggctgtcacagtttgtcgacggcgacac

SEQ ID NO: 407683 - DNA, 75 bp, synthetic construct
  source 1..75: mol_type = other DNA
atgcttgaagatactacaattcataatgcaataactgataaagcgttagcaagttactttcgcagttcgggtaat

SEQ ID NO: 407684 - DNA, 75 bp, synthetic construct
  source 1..75: mol_type = other DNA
ccgcttgcaggcgttactgggtgtcgagcagacaattcgcatggataactttttcctgccaggcacgctgccaat

SEQ ID NO: 407685 - DNA, 75 bp, synthetic construct
  source 1..75: mol_type = other DNA
gccgccgtcatcgttaagctttgtttactcggtgcccgttgatcaggtgctggaacgcatacgtatgctgatcct

SEQ ID NO: 407686 - DNA, 75 bp, synthetic construct
  source 1..75: mol_type = other DNA
gaatttaacctgagctccgatcaggctcagcggtttatccaacgcacttctgatgtgatgaaagagctgaagtac

SEQ ID NO: 407687 - DNA, 75 bp, synthetic construct
  source 1..75: mol_type = other DNA
ggggtgactgccaatgcgttggctgaagagaagcagcggtgtctggagtccggtatggatagctgtctgtcgaag

SEQ ID NO: 407688 - DNA, 75 bp, synthetic construct
  source 1..75: mol_type = other DNA
atgtcccaacaagaaatcagcgtcattaacctcgaccagcttgtctccatgacctcagttgaaattgctgagctg

SEQ ID NO: 407689 - DNA, 75 bp, synthetic construct
  source 1..75: mol_type = other DNA
attcactggcaccgaccagcagaagcaagagcacctcctgaagctggcacaatccggtaaggtggagggaatcta

SEQ ID NO: 407690 - DNA, 75 bp, synthetic construct
  source 1..75: mol_type = other DNA
tcggggtgactgaagatgtctatctaaacgcgcaggggaaacagcagcctctgtaccgtctcgaccgtaagcata

SEQ ID NO: 407691 - DNA, 75 bp, synthetic construct
  source 1..75: mol_type = other DNA
atgtccgtgctgatggtgattatctttctattcgtgttcgcgatactggcgtgggtattccggcgaaagaagtgg

SEQ ID NO: 407692 - DNA, 75 bp, synthetic construct
  source 1..75: mol_type = other DNA
ctcactctctgccgtcgacggacaaagcggtcagtgataatgacgatatgatgatcctggtcgtggatgatcatc

SEQ ID NO: 407693 - DNA, 75 bp, synthetic construct
  source 1..75: mol_type = other DNA
cgcggatgtacgagcggcgtattttcattccggcagaaagtgacgcccagcgtctggaagaacacgagcagttta

SEQ ID NO: 407694 - DNA, 75 bp, synthetic construct
  source 1..75: mol_type = other DNA
atagaaattgaaaatgatgatcctgccaacgttctgccattgatggacaaagattccaccagcaatgacgacatg

SEQ ID NO: 407695 - DNA, 75 bp, synthetic construct
  source 1..75: mol_type = other DNA
ggcattgttggcgcgtatttatttgatcgagatggagagcgacgatctagactggccccctgaatctccagacaa

SEQ ID NO: 407696 - DNA, 75 bp, synthetic construct
  source 1..75: mol_type = other DNA
tgcgcaatatccacataaaaaaggtgtcgaaggattaacgggtaaacgctgctggttggcggtacgtaatgcgtc

SEQ ID NO: 407697 - DNA, 75 bp, synthetic construct
  source 1..75: mol_type = other DNA
actgggcgacggtagccagtgggggcttaatcttcagtacaaagtgcaacctagtccagatggtctggcacaagc

SEQ ID NO: 407698 - DNA, 75 bp, synthetic construct
  source 1..75: mol_type = other DNA
aatacaaccccaaaaccaatagctgggttaaattgatgtcgcacgcgccgatgggcatggcgggccatgtgactt

SEQ ID NO: 407699 - DNA, 75 bp, synthetic construct
  source 1..75: mol_type = other DNA
gcgacattttcttataattttggtactgttactgtctcagatgttaataataattctcccggaaaaatattacca

SEQ ID NO: 407700 - DNA, 75 bp, synthetic construct
  source 1..75: mol_type = other DNA
tttaataaaaatgagttttacttattacttattacttattacttattacttattacttattacttattacttatt

SEQ ID NO: 407701 - DNA, 75 bp, synthetic construct
  source 1..75: mol_type = other DNA
agtttatttttcaggtatttcaggaatagatccttcaggtgcttcaggtaatccacagggagcggatatatttat

SEQ ID NO: 407702 - DNA, 75 bp, synthetic construct
  source 1..75: mol_type = other DNA
actgtaattctcttgatgattatgagatttatttttcaggtgtttcaggaatagatccttcaggtgcttcaggta

SEQ ID NO: 407703 - DNA, 75 bp, synthetic construct
  source 1..75: mol_type = other DNA
gaagatatttcattttattgattattatattttcaaatgttctttcttctattgctaatgctgaagatatggggc

SEQ ID NO: 407704 - DNA, 75 bp, synthetic construct
  source 1..75: mol_type = other DNA
aaggactccatattcattttatcggctacctggatgggcaacgttacaagaaatcttatcggttatccaggcaac

SEQ ID NO: 407705 - DNA, 75 bp, synthetic construct
  source 1..75: mol_type = other DNA
ttacgttacgccctcagctacctggctaaacaggatcagaaagaacacggtattattctgatgcgtagcagactt

SEQ ID NO: 407706 - DNA, 75 bp, synthetic construct
  source 1..75: mol_type = other DNA
aaagaacacggtattattctgggccgtagcaggcttcccgaaaaaagcaaccggggccgaccacgacataactga

SEQ ID NO: 407707 - DNA, 75 bp, synthetic construct
  source 1..75: mol_type = other DNA
acggagtattaaataaggtatatagggctctttgtaatcgtgcttttgcagcaatatacccatcaaaaattagca

SEQ ID NO: 407708 - DNA, 75 bp, synthetic construct
  source 1..75: mol_type = other DNA
acggctcggaagtgtctagattatccgtggcgattcaaacgccttatcaaacttaaagcggaaggagtattaaat

SEQ ID NO: 407709 - DNA, 75 bp, synthetic construct
  source 1..75: mol_type = other DNA
aagcctatagacctgaaagaaatgctgatcagtgagggtaaaagcgaggatgaggctaatcgtataattggcaaa

SEQ ID NO: 407710 - DNA, 75 bp, synthetic construct
  source 1..75: mol_type = other DNA
atgagtaatccctatcgcacagaataccaccgtgaaaaattccctcctggtgctggaaagggagggttaaccccg

SEQ ID NO: 407711 - DNA, 75 bp, synthetic construct
  source 1..75: mol_type = other DNA
acgggttgatgtgcatgatggtgatgttctggttcttggcggactggccagcagtaagacgacaaaggcgcgcag

SEQ ID NO: 407712 - DNA, 75 bp, synthetic construct
  source 1..75: mol_type = other DNA
cggttcagcaataaacagtgtttcggctgccacggatgcggaagtccttgtatacagtggaacggcggcagatat

SEQ ID NO: 407713 - DNA, 75 bp, synthetic construct
  source 1..75: mol_type = other DNA
attataagtacacctcaagatattcctcgttttatggggttattaggtgatggtagtcaatggggacttcagtta

SEQ ID NO: 407714 - DNA, 75 bp, synthetic construct
  source 1..75: mol_type = other DNA
tcgaaatggcgaaaaatcttaagccttctgcccgtggtgaactggaaattaccgatattaaccgtatctatatgg

SEQ ID NO: 407715 - DNA, 75 bp, synthetic construct
  source 1..75: mol_type = other DNA
gctatgttcttgaagtccagacgacagaccgcaatgcaaccggactgcaaattattgctgatttgttccgtaata

SEQ ID NO: 407716 - DNA, 75 bp, synthetic construct
  source 1..75: mol_type = other DNA
gtctacttggccacacatcggagaagacaacaaaaatgtatcttgatgagagagaaaaaacgtacttactgctct

SEQ ID NO: 407717 - DNA, 75 bp, synthetic construct
  source 1..75: mol_type = other DNA
gtttcctgtccggaagaaattgcttaccgtaaaggatttattgattctgagcaggtgaaagtattagctgaaccg

SEQ ID NO: 407718 - DNA, 75 bp, synthetic construct
  source 1..75: mol_type = other DNA
atgaaaacgcgtaaaggtattattctggctggtggttccggcactcgtctttatcctgtgacgatggcagtaagt

SEQ ID NO: 407719 - DNA, 75 bp, synthetic construct
  source 1..75: mol_type = other DNA
aatcgaagaacgtcaggggttgaaagtttcttgcccggaagaaattgcctacagaaaaggttttattgatgcgga

SEQ ID NO: 407720 - DNA, 75 bp, synthetic construct
  source 1..75: mol_type = other DNA
gacacggggacacatcaaagtctgattgaagcaagtaacttcattgcaacaattgaagagcgacaaggtttaaag

SEQ ID NO: 407721 - DNA, 75 bp, synthetic construct
  source 1..75: mol_type = other DNA
aacaggggcatttatctgttgccatgatgggacgtggttatgcatggctggacacggggacacatcagagtctta

SEQ ID NO: 407722 - DNA, 75 bp, synthetic construct
  source 1..75: mol_type = other DNA
tcctgaacgctatggtgtcgttgagtttgataaaaacggtacggcaattagcctcgaagaaaaaccgctacaacc

SEQ ID NO: 407723 - DNA, 75 bp, synthetic construct
  source 1..75: mol_type = other DNA
gttggcatttaatgtctgtaatgctgagtgcagcgtcgtgtctggattgggccgcgaaattaaccggcctgagca

SEQ ID NO: 407724 - DNA, 75 bp, synthetic construct
  source 1..75: mol_type = other DNA
ggtatggatgtcgtacatgcctgcggcattcaaccgcaaagtattacattgattggtggtggcgcacgtagcgag

SEQ ID NO: 407725 - DNA, 75 bp, synthetic construct
  source 1..75: mol_type = other DNA
ccagttgtcgcaggcggtggcgataatgcagctggtgcggttggtgtgggaatggttgatgctaatcaggcaatg

SEQ ID NO: 407726 - DNA, 75 bp, synthetic construct
  source 1..75: mol_type = other DNA
gttatccgccgtccaatcttcgaacaaattaagcctttcctcgaaaaggccatgacaacgtacaatgatgttctt

SEQ ID NO: 407727 - DNA, 75 bp, synthetic construct
  source 1..75: mol_type = other DNA
cacctgccaacgctaccttggcgttatccacggattttttcagttaggtggtatcagcgaggccgcgcgatcggc

SEQ ID NO: 407728 - DNA, 75 bp, synthetic construct
  source 1..75: mol_type = other DNA
ctatatccgcaatggtcacgattacatcatcacacgcgatactctactgagcggctttgagatgtacctaccaga

SEQ ID NO: 407729 - DNA, 75 bp, synthetic construct
  source 1..75: mol_type = other DNA
tcccgctcgcggtattttctatccgcaaatggcgcgtgagctggggttagcggttccgagctttagcgacagcgg

SEQ ID NO: 407730 - DNA, 75 bp, synthetic construct
  source 1..75: mol_type = other DNA
aatgcccgtgaagacggagtagtgctggaaactgaactgtttaccttcattctgcaacgtgtggcacaggagatt

SEQ ID NO: 407731 - DNA, 75 bp, synthetic construct
  source 1..75: mol_type = other DNA
taccgccatggcaattcagtggtatgcgcagagggaagctgatatcgaaaatgaaaagctccggaaagaactgga

SEQ ID NO: 407732 - DNA, 75 bp, synthetic construct
  source 1..75: mol_type = other DNA
tcgcaaacggaaaagctgaccgtttcgcgcccgcatccactctggtcggaacaagacccggaacagtggtggcag

SEQ ID NO: 407733 - DNA, 75 bp, synthetic construct
  source 1..75: mol_type = other DNA
tgtatgcgcctgcataaaagacttttatttagccgcttcggtatcttcagtatatttcctatgctgttggttgtg

SEQ ID NO: 407734 - DNA, 75 bp, synthetic construct
  source 1..75: mol_type = other DNA
gcatataaattaatattaaggtgtttcggaaaggaatatgattatagtcgttcgaagttgctttccaagtattac

SEQ ID NO: 407735 - DNA, 75 bp, synthetic construct
  source 1..75: mol_type = other DNA
tcgagcgcgaagggcatcatacttcagcagaagatttgcgtgattacgtgatgcaggtgattgatgccacagcgg

SEQ ID NO: 407736 - DNA, 75 bp, synthetic construct
  source 1..75: mol_type = other DNA
gatctctcacttcctgaagaaagagaggttgatttctggtatgtactgcctctggccgggcagtcaaatgcaatg

SEQ ID NO: 407737 - DNA, 75 bp, synthetic construct
  source 1..75: mol_type = other DNA
tcgccgcaaacatttcgacatcttcaccggtctggccctcgctactgcgttcggcctggctattaccttcattct

SEQ ID NO: 407738 - DNA, 75 bp, synthetic construct
  source 1..75: mol_type = other DNA
tcatttcaattaactcatataatgaacttaccggaggaggagtatatttacgtacgcttgttagttttctacaaa

SEQ ID NO: 407739 - DNA, 75 bp, synthetic construct
  source 1..75: mol_type = other DNA
aatcaaagcctcgcccggcggcgacacgccatcggggccgtctgaagatgcatccatacgcacaatctccctgtt

SEQ ID NO: 407740 - DNA, 75 bp, synthetic construct
  source 1..75: mol_type = other DNA
cggagtggtactacgtcatcgtactggccgggcaatccaatgccatggcttacggtgaagggcttccgcttccgg

SEQ ID NO: 407741 - DNA, 75 bp, synthetic construct
  source 1..75: mol_type = other DNA
cctcgcaggacagtctaatggtatggcctacggtgaaggtattcccctgccagatacactcgacaaacccgagtc

SEQ ID NO: 407742 - DNA, 75 bp, synthetic construct
  source 1..75: mol_type = other DNA
ctgttgaggttagcgcactaccgagtgaactaaaacctcttggacaggcgctgaataaaatgcatcatgctttag

SEQ ID NO: 407743 - DNA, 75 bp, synthetic construct
  source 1..75: mol_type = other DNA
tcagcgtttaatccgggggcgggcgacagcctgagttcgctgattaaagagtatctttccatagcccttatcctg

SEQ ID NO: 407744 - DNA, 75 bp, synthetic construct
  source 1..75: mol_type = other DNA
ggtggagcgaagccttcagcaagaccttcagcagctggcggcggcggtggacaaagcgccagcagtagcggcaat

SEQ ID NO: 407745 - DNA, 75 bp, synthetic construct
  source 1..75: mol_type = other DNA
gtagaggattcaaacgttgcctctgtccagcgtgcacttaagaaaatgctattgtcggggttaccttcagaattt

SEQ ID NO: 407746 - DNA, 75 bp, synthetic construct
  source 1..75: mol_type = other DNA
tgaggcagctcctgagaaggtcgatgacggtaaacacatctacggggcccctggtgctaggttcacactggtgga

SEQ ID NO: 407747 - DNA, 75 bp, synthetic construct
  source 1..75: mol_type = other DNA
tacaacactcattaaccggacagcgcagatcaagcagttgctaattgatggagtaaatccagacactttaccagt

SEQ ID NO: 407748 - DNA, 75 bp, synthetic construct
  source 1..75: mol_type = other DNA
tgtttctaacagtgacacatccctgaaccgttcgttgtatcgcaatttcacccaccactacatcaaagcaaaacg

SEQ ID NO: 407749 - DNA, 75 bp, synthetic construct
  source 1..75: mol_type = other DNA
ccgcgactggttgaacctttcgcgggttcttgtgctgtgatgatagagacggattcccccagctatcttgttgcg

SEQ ID NO: 407750 - DNA, 75 bp, synthetic construct
  source 1..75: mol_type = other DNA
gttgttgagaggagtggtccttttattagcaaacaacttatcattacctctccagcggagatggccggggaatgg

SEQ ID NO: 407751 - DNA, 75 bp, synthetic construct
  source 1..75: mol_type = other DNA
cgccaaaggtaagccaatggataccgttccgttggtgatgatggctgcgaccaaaattggcgaacgtcagggcta

SEQ ID NO: 407752 - DNA, 75 bp, synthetic construct
  source 1..75: mol_type = other DNA
ccgtgggttatgtcgttataacaagagcgagcatttcaacattccatacggtaattataaaaatccgtatttccc

SEQ ID NO: 407753 - DNA, 75 bp, synthetic construct
  source 1..75: mol_type = other DNA
acccgttcgctttatcgtagctttacccgccatcgtatcactgcaaaacgcagcatgggcgtagcagccggtgaa

SEQ ID NO: 407754 - DNA, 75 bp, synthetic construct
  source 1..75: mol_type = other DNA
gaaataaaaccgctatcatgccggaattgattaagcaccttcctgctggctcgcggctggttgaacctttcgcgg

SEQ ID NO: 407755 - DNA, 75 bp, synthetic construct
  source 1..75: mol_type = other DNA
gttgtattgcaggaaatcccggaaggcaacttcttcggcaaaatcattgattacatcaagctaatgttccatcac

SEQ ID NO: 407756 - DNA, 75 bp, synthetic construct
  source 1..75: mol_type = other DNA
taaactcgtcaacagacgcacatacacacaatgccccacctgccataaaagttaatgcgggatacaaagagagca

SEQ ID NO: 407757 - DNA, 75 bp, synthetic construct
  source 1..75: mol_type = other DNA
tcatcgcccgcttgccagactggacagccccggcattaacgcccgccacggaacaggcacaaggagccactcaat

SEQ ID NO: 407758 - DNA, 75 bp, synthetic construct
  source 1..75: mol_type = other DNA
ctggatggtaaaaacagagggtgattatatctctccgaaaagtattattgtagacaccccgctgatggggcatga

SEQ ID NO: 407759 - DNA, 75 bp, synthetic construct
  source 1..75: mol_type = other DNA
gtccccgtttcacagttgatccgcggtatcaacctgcaatcgggtaacgatgcttgcgtcgccatggctgacttt

SEQ ID NO: 407760 - DNA, 75 bp, synthetic construct
  source 1..75: mol_type = other DNA
aacgatcgagcaacgcccgctggttgtgttgcacgaaatcccggaatgtaacttcttcgggcaaatccttgatta

SEQ ID NO: 407761 - DNA, 75 bp, synthetic construct
  source 1..75: mol_type = other DNA
ggattatcccagctatctggttgcggatattaatcctgatttaatcaacctctataaaaaggttgccgctgattg

SEQ ID NO: 407762 - DNA, 75 bp, synthetic construct
  source 1..75: mol_type = other DNA
gaaaaagcccagcgagcaacgtttatctgcgccagctttgatgaaacgctggcgatgttgaaggcgggagatgtg

SEQ ID NO: 407763 - DNA, 75 bp, synthetic construct
  source 1..75: mol_type = other DNA
aggattacaagactgttgcggaaattaatggctgccattttaatgtaacagaagatacaattgatgggttgaaag

SEQ ID NO: 407764 - DNA, 75 bp, synthetic construct
  source 1..75: mol_type = other DNA
tgaatcgtttatatctcgcgccagagttttatttgagaacgcaaacagggagatggcttattacaacataaggca

SEQ ID NO: 407765 - DNA, 75 bp, synthetic construct
  source 1..75: mol_type = other DNA
tctataaaaaggttgctgctgattgtgaatcgtttatatctcgcgccaaagctttatttgaggaagcaaacaggg

SEQ ID NO: 407766 - DNA, 75 bp, synthetic construct
  source 1..75: mol_type = other DNA
atgagcaccatcctgaaatgggcgggaaataaaaccgccgtaatgtccgaactgaaaaaacatcttcctgctggt

SEQ ID NO: 407767 - DNA, 75 bp, synthetic construct
  source 1..75: mol_type = other DNA
cacctggcatccgttcttgaacatcgatcatctgaaggtcatccggtcattgtttctaacagtgacacacccctg

SEQ ID NO: 407768 - DNA, 75 bp, synthetic construct
  source 1..75: mol_type = other DNA
gaaataaaaccgccattatgtccgaactgaaaaagcatcttcctgctggccagcgactggttgaacctttcgcgg

SEQ ID NO: 407769 - DNA, 75 bp, synthetic construct
  source 1..75: mol_type = other DNA
gtacgttttccggttatcacactgacggtttcacagaagatgaccagtatcaccttgcatccgttcttgaacatc

SEQ ID NO: 407770 - DNA, 75 bp, synthetic construct
  source 1..75: mol_type = other DNA
gagaaagcccagcgggcaacgtttatctgcgccaactttgatgaaacgctggcgatgttgaaggcgggggatgtg

SEQ ID NO: 407771 - DNA, 75 bp, synthetic construct
  source 1..75: mol_type = other DNA
atgagcaccatcctgaaatgggtgggaaataaaaccgccattatgtccgaactgaaaaaacaccttcctgctggc

SEQ ID NO: 407772 - DNA, 75 bp, synthetic construct
  source 1..75: mol_type = other DNA
tctgcgccagctttgatgaaacgctggcgatgttgaaggcgggagatgtggtgtattgcgatccgccgtatgacg

SEQ ID NO: 407773 - DNA, 75 bp, synthetic construct
  source 1..75: mol_type = other DNA
gtacgttttccggctatcacactgacggtttcactgaagatgaccagtatcaccttgcgtccgttcttgaacatc

SEQ ID NO: 407774 - DNA, 75 bp, synthetic construct
  source 1..75: mol_type = other DNA
atactgactgaaaaagattattaccttataaataatatagacaaccctctaataaaaagcgaaatcgaacgctta

SEQ ID NO: 407775 - DNA, 75 bp, synthetic construct
  source 1..75: mol_type = other DNA
gacgcttttttacatatcgattggcaaaggaaatatatttctaatttaaataaaatgctaggctcattaaaaaca

SEQ ID NO: 407776 - DNA, 75 bp, synthetic construct
  source 1..75: mol_type = other DNA
atgaacgttaatcagcagaaaaatcttcaaaaaatcatgctggcattcgacaaggactaccgcctgtcagaacag

SEQ ID NO: 407777 - DNA, 75 bp, synthetic construct
  source 1..75: mol_type = other DNA
cgccctggcgtcgggtatttttacgccttgacgccagtttatctggcgaaccggttgcaggcgcttttgggtgtc

SEQ ID NO: 407778 - DNA, 75 bp, synthetic construct
  source 1..75: mol_type = other DNA
ttttcttacctggtacgttgccgatgggggttaccattcttgatgaaaatggtcataccctgatttcgcttaccg

SEQ ID NO: 407779 - DNA, 75 bp, synthetic construct
  source 1..75: mol_type = other DNA
ttctggatagaccgggtttcgccggatgatggcggaagctgtcatctctggcttgggcgtggcgtgccgcctgcc

SEQ ID NO: 407780 - DNA, 75 bp, synthetic construct
  source 1..75: mol_type = other DNA
cacgtaaacgtgaactgcttgagatgatcgccagtgagggattttcagttgaggaactaacaggcgcttctgata

SEQ ID NO: 407781 - DNA, 75 bp, synthetic construct
  source 1..75: mol_type = other DNA
tgtcgtggtgtacatggaacaccgccagattgttgaggttctttatgatccagcgtttaaaaaagcgcaactttc

SEQ ID NO: 407782 - DNA, 75 bp, synthetic construct
  source 1..75: mol_type = other DNA
cagacgctggattatgacgtgattatgaaaacgctgtacaccacgatagatgtcgtggtgtacatggaacaccgc

SEQ ID NO: 407783 - DNA, 75 bp, synthetic construct
  source 1..75: mol_type = other DNA
atcgccagacggtgaacagcgttttttccactgcgtataatgattatctgattaatgcatggatggggttaacca

SEQ ID NO: 407784 - DNA, 75 bp, synthetic construct
  source 1..75: mol_type = other DNA
ttaagccacggttttatcgcaaggtaagggtggtttatcaggacgaaaacaagacatgtgcatacgccattcata

SEQ ID NO: 407785 - DNA, 75 bp, synthetic construct
  source 1..75: mol_type = other DNA
ctatccagaaaactgaattgtcacattcaggaatgtcatattgggtattttaatgaagatatgtggcgcatcaga

SEQ ID NO: 407786 - DNA, 75 bp, synthetic construct
  source 1..75: mol_type = other DNA
cacggttgtcttgagcagttgcgccgcaaagtttacgttgtctgcagttactggaacaacattgggtttgtgcgg

SEQ ID NO: 407787 - DNA, 75 bp, synthetic construct
  source 1..75: mol_type = other DNA
ggctgaaaggtatccggtttggccgaaagcgcatcatcgacagaaatagtgtactggcacttcatcagcagggaa

SEQ ID NO: 407788 - DNA, 75 bp, synthetic construct
  source 1..75: mol_type = other DNA
atgtgggtaaaaaactgttcggatggcaattcgcccttccccgctggctggatattccactccggggaataaaat

SEQ ID NO: 407789 - DNA, 75 bp, synthetic construct
  source 1..75: mol_type = other DNA
tctcaaccagccagcagtccctcgatattcagatcagagcgcccaaagatgcaggggtaaaagctaaccgcatct

SEQ ID NO: 407790 - DNA, 75 bp, synthetic construct
  source 1..75: mol_type = other DNA
gggaaaatgcagtaggagttcttgcatgttcaagtcctggagagtctcgaacatgtgtcgatgctgtagatgatg

SEQ ID NO: 407791 - DNA, 75 bp, synthetic construct
  source 1..75: mol_type = other DNA
gctggcaatggtgattgtgcaaacacaccgtttgaagtatataaatctaacaccgagttgctggcaacgcttttg

SEQ ID NO: 407792 - DNA, 75 bp, synthetic construct
  source 1..75: mol_type = other DNA
atcagatcgaacttcatccgctgatgcagcaacgccagcttcacgcctggaacgctacgcacaaaattcagaccg

SEQ ID NO: 407793 - DNA, 75 bp, synthetic construct
  source 1..75: mol_type = other DNA
atcccgaaatcggtcacaccttcacgtattgccgaaaactttgatgtctgggatttccgtctcgacaaagacgaa

SEQ ID NO: 407794 - DNA, 75 bp, synthetic construct
  source 1..75: mol_type = other DNA
gcactctcccaggctgtaaagggtattgatctgtcagtcgcatatgcgctgtggggcggttttggtattgtcgcc

SEQ ID NO: 407795 - DNA, 75 bp, synthetic construct
  source 1..75: mol_type = other DNA
cctgcggcaaataaaaaagcctttgcgttgtctggctggttaatgacgctactggtcctggggattatgtttgcg

SEQ ID NO: 407796 - DNA, 75 bp, synthetic construct
  source 1..75: mol_type = other DNA
tggtattgggtgcgctattacgaaacggcaggtagtacgacatttgtcgccagaccgggaggtatcgaaggctgg

SEQ ID NO: 407797 - DNA, 75 bp, synthetic construct
  source 1..75: mol_type = other DNA
tgtatcgactgtggcaaatgcgcaaaaaattgcccatcacggatcccggtagataaattaattcaggtacgaaca

SEQ ID NO: 407798 - DNA, 75 bp, synthetic construct
  source 1..75: mol_type = other DNA
atgtgggtcagcatcgttaaagattatgttgtgccgatcctgtcggcaacggccacggccggggggatcttcatg

SEQ ID NO: 407799 - DNA, 75 bp, synthetic construct
  source 1..75: mol_type = other DNA
accagtatggtggcgacgatggctgcagcagaaagcggttggggaacgtcgaagctggcggcaacaacaacaacc

SEQ ID NO: 407800 - DNA, 75 bp, synthetic construct
  source 1..75: mol_type = other DNA
tgattggcaaaatctggccgggatttttgactctcggtggcgatttcacgctgttaggcctttctctaccgggct

SEQ ID NO: 407801 - DNA, 75 bp, synthetic construct
  source 1..75: mol_type = other DNA
gccaccggtaatattattccggctggttatcagattgccgccattgcaccgacgaaactgacctataaaaacggc

SEQ ID NO: 407802 - DNA, 75 bp, synthetic construct
  source 1..75: mol_type = other DNA
caactgatacacctgatggcaaagcggtagccggtaccattattggcgggatgggtgagcaagcagggcgcgtcc

SEQ ID NO: 407803 - DNA, 75 bp, synthetic construct
  source 1..75: mol_type = other DNA
aaccaactcataggcatccagtttgtcgcgcctgtgtatgaaagcgactgtggcgagaatatggaaaatgcttct

SEQ ID NO: 407804 - DNA, 75 bp, synthetic construct
  source 1..75: mol_type = other DNA
attattggcaatgcccataacgttgtcataaccagcagcgatgaaattgctcagggaattattaccaggctacaa

SEQ ID NO: 407805 - DNA, 75 bp, synthetic construct
  source 1..75: mol_type = other DNA
gttaccgtccgtccacgccgccgcgatgctgttattggtcgcttttatcgtcatcagtctattactcaaaaaggc

SEQ ID NO: 407806 - DNA, 75 bp, synthetic construct
  source 1..75: mol_type = other DNA
attttgttccctttatgaccgatggtagcggagttaatacaccgacaaacaacccgtcagaagatcctgatattg

SEQ ID NO: 407807 - DNA, 75 bp, synthetic construct
  source 1..75: mol_type = other DNA
ccagaccacagacggcaaactgaatctgatgcatcacaagaaagcaggaaacacaaagttgggcgagttcgggaa

SEQ ID NO: 407808 - DNA, 75 bp, synthetic construct
  source 1..75: mol_type = other DNA
ttacgataacggctttaaccttaccgcgttctcagtaactttggtcgccgttattttatctctcggtggtaaatt

SEQ ID NO: 407809 - DNA, 75 bp, synthetic construct
  source 1..75: mol_type = other DNA
atgacgattgcagaacgtcttattcaaaaaggcgctcttgaagtgggcgcggaaatagcctgccggcttcgggat

SEQ ID NO: 407810 - DNA, 75 bp, synthetic construct
  source 1..75: mol_type = other DNA
atcgaaggctggctaccgattgccggtctgatgaatctgaaatatagccttgcaacaggtcagttaccgtccgtc

SEQ ID NO: 407811 - DNA, 75 bp, synthetic construct
  source 1..75: mol_type = other DNA
gcccgtctccacaacacacgtcctctcgtctgcagtagcagggacgatggtggtgggttacagcgtaaaacggta

SEQ ID NO: 407812 - DNA, 75 bp, synthetic construct
  source 1..75: mol_type = other DNA
cgaataccattaacgcgctcaatcgcctgaaaggcatgttgactgctgacgtggaaagctacgacaagctgtcgc

SEQ ID NO: 407813 - DNA, 75 bp, synthetic construct
  source 1..75: mol_type = other DNA
cccggcgagagttgaagagccggtaaccgctacgctctatatgccgaaagcagtaagagactggcttgctgtgat

SEQ ID NO: 407814 - DNA, 75 bp, synthetic construct
  source 1..75: mol_type = other DNA
caagcaagttgcctgatactgcgatggaatatctgaagcagaacggatttgtaggtgtggaggatattttacgat

SEQ ID NO: 407815 - DNA, 75 bp, synthetic construct
  source 1..75: mol_type = other DNA
atgtgggtcagtatcgttaaagattatgtcgtgccgatcctgtcggccacggccggggggatctttatggcgctg

SEQ ID NO: 407816 - DNA, 75 bp, synthetic construct
  source 1..75: mol_type = other DNA
cggatttccggcctgcccacgcagcaggaggtgaacagactcaatatcgaaatcaccaccctgcgcggtgagctt

SEQ ID NO: 407817 - DNA, 75 bp, synthetic construct
  source 1..75: mol_type = other DNA
ggctccggaagctggcgcaacgcaacctgcggagttccattgccatccgtcgaataccattaacgcgctcaaccg

SEQ ID NO: 407818 - DNA, 75 bp, synthetic construct
  source 1..75: mol_type = other DNA
ggacacgtattgcgctgattgtttccgctgcgggcgtggctttctctcatggtgcgaacgatgggcaaaaaggga

SEQ ID NO: 407819 - DNA, 75 bp, synthetic construct
  source 1..75: mol_type = other DNA
taaaacggtaaccagcatcctgatggcgtgggtatttactttaccggcggcgatttttctttctggtgggctgta

SEQ ID NO: 407820 - DNA, 75 bp, synthetic construct
  source 1..75: mol_type = other DNA
ctaatgcgatgttaaccggctcatcggtgatggacgcgttaaatctgcgtgaagtgaccaagattttctcctcac

SEQ ID NO: 407821 - DNA, 75 bp, synthetic construct
  source 1..75: mol_type = other DNA
cttcaaactgggtgatgctggttacgtgactccttacggcagcatttctggtctgttccagtctggtgatgacta

SEQ ID NO: 407822 - DNA, 75 bp, synthetic construct
  source 1..75: mol_type = other DNA
acttcaacaacgacctgtctgcaaccatgagcaacggtacttacgttgacggtagcaccaactccgacgcttggg

SEQ ID NO: 407823 - DNA, 75 bp, synthetic construct
  source 1..75: mol_type = other DNA
gaagtgaccaaaattttctcctcgctgattgtttcccctatcgtcggcctggtcattgcgggtggtctgattttc

SEQ ID NO: 407824 - DNA, 75 bp, synthetic construct
  source 1..75: mol_type = other DNA
atgaatagtaacggactgacacaaactatcgttaccggcagtgacccacgcggactaccggagttcagcgccatc

SEQ ID NO: 407825 - DNA, 75 bp, synthetic construct
  source 1..75: mol_type = other DNA
gcagcgcgagaaagagggattaaccctttcctatatcaaaaatgtcatctggcaggcggagcggggactggggca

SEQ ID NO: 407826 - DNA, 75 bp, synthetic construct
  source 1..75: mol_type = other DNA
gatttatgccccggaaaacggcactgcgccagcgaccgaaacggtgatgtcgccgctgcccgaactgccggagat

SEQ ID NO: 407827 - DNA, 75 bp, synthetic construct
  source 1..75: mol_type = other DNA
gaaactatgagcgcaggctgcaacaacttcttgatacctccccggtacagccgctggaaaccgggatgcagatga

SEQ ID NO: 407828 - DNA, 75 bp, synthetic construct
  source 1..75: mol_type = other DNA
cttgaaccccagctgaagagtaacactgagaacgccgcacagaccacggtcagaacgctgatttatgccccggaa

SEQ ID NO: 407829 - DNA, 75 bp, synthetic construct
  source 1..75: mol_type = other DNA
agaagcagaatacagatgcgctggaaaaacaaattaatgagcgcctggatagtgccttaagtcgctggctactgc

SEQ ID NO: 407830 - DNA, 75 bp, synthetic construct
  source 1..75: mol_type = other DNA
tgcagaaccctatttattcccagacattaataaacccgatgggccagcaacagcagggatagatgatttgggtga

SEQ ID NO: 407831 - DNA, 75 bp, synthetic construct
  source 1..75: mol_type = other DNA
gaaaaatgccgaggttcagctacaggaagcgatcgatcgtttgtgggacaggtcgatcattctcaaggacgacga

SEQ ID NO: 407832 - DNA, 75 bp, synthetic construct
  source 1..75: mol_type = other DNA
aagaagttacagcataagaatatacgaacttctccagcaattccgcagcacaggggaacgtattatcgccctcga

SEQ ID NO: 407833 - DNA, 75 bp, synthetic construct
  source 1..75: mol_type = other DNA
ttttgatgaggtgagatttattgagaaagaaaagtttgagaaacagctcttacaactcatgaaaattgtgagatc

SEQ ID NO: 407834 - DNA, 75 bp, synthetic construct
  source 1..75: mol_type = other DNA
caatcaagaaggggcgtacggttgtagcactacattttcgcttcaaggaagataaacagatcaaaatcccctcat

SEQ ID NO: 407835 - DNA, 75 bp, synthetic construct
  source 1..75: mol_type = other DNA
aacttagcgacctgctttgggcgcaggttgacagggtggctccgcacctgttgccaaacggcaagaaagaggggc

SEQ ID NO: 407836 - DNA, 75 bp, synthetic construct
  source 1..75: mol_type = other DNA
tgactgggataagttctggccgcaaagcggcccggcgcgcactgaaatgctggactggttcaactcccgcaccgg

SEQ ID NO: 407837 - DNA, 75 bp, synthetic construct
  source 1..75: mol_type = other DNA
cagccgtaatgtggaactatgtttccgcatcaccttcagaaatcaacaaggtgccgccgatggcatttcgctatc

SEQ ID NO: 407838 - DNA, 75 bp, synthetic construct
  source 1..75: mol_type = other DNA
caacctgccaaagatagaacagaaaggcagcgtcggtgtgttctggcgaaataatattccactcacgtatgcctt

SEQ ID NO: 407839 - DNA, 75 bp, synthetic construct
  source 1..75: mol_type = other DNA
atggcaaaatgggcgcaaaaaataaaactacatcacctgcaaatgctggttgcgctgggtgaacagggtaatctg

SEQ ID NO: 407840 - DNA, 75 bp, synthetic construct
  source 1..75: mol_type = other DNA
gtaagccaccgaccgtttctgtggtcaatggccgttacgtggtcagcaagccgttaagccacgaagttgtgcagc

SEQ ID NO: 407841 - DNA, 75 bp, synthetic construct
  source 1..75: mol_type = other DNA
gaaatcgctgcactgaaagcttatatggaagatccgctcctgcgtttttatgcgtatctggtgccgcagccgtgg

SEQ ID NO: 407842 - DNA, 75 bp, synthetic construct
  source 1..75: mol_type = other DNA
acgaagcagaatattaactacgtcgacacggggactgaggggggaatttccaacacgattctggtgaaaggcgtt

SEQ ID NO: 407843 - DNA, 75 bp, synthetic construct
  source 1..75: mol_type = other DNA
gatgcctctccggtacaaccgctggaaaccggaatgcagatgatgcgtgttgccgacagtcgctggacggaaagc

SEQ ID NO: 407844 - DNA, 75 bp, synthetic construct
  source 1..75: mol_type = other DNA
gtttatcgcagggatcgcctgttcagtggctgtcgcctcagcattgtggtggtggcaggtctatctgaaccgccc

SEQ ID NO: 407845 - DNA, 75 bp, synthetic construct
  source 1..75: mol_type = other DNA
gaaggtggaagtgcacagacaggttaacagcacactaccgaccagagaggcaaagcagggctgtgcagcgaaagg

SEQ ID NO: 407846 - DNA, 75 bp, synthetic construct
  source 1..75: mol_type = other DNA
gttgtcacaactcgaagatgagattggaatcacactttttgagcggcacagcaaaggattacgtccgactgaagg

SEQ ID NO: 407847 - DNA, 75 bp, synthetic construct
  source 1..75: mol_type = other DNA
ggcagcgtcggtgtgttttggcgtaataacgaaacgccttcttatgctttaagtcagtttctgcactttttacag

SEQ ID NO: 407848 - DNA, 75 bp, synthetic construct
  source 1..75: mol_type = other DNA
ggcagcgtcggcgtgttctggcgtaataacgaaacgccctcccgtgcgctaagtcggttcctgcactttttgaac

SEQ ID NO: 407849 - DNA, 75 bp, synthetic construct
  source 1..75: mol_type = other DNA
tccattctggaatacatggagcgcgccaaattcttcgatcccgatgagctttgctcagctggggacttgcttcag

SEQ ID NO: 407850 - DNA, 75 bp, synthetic construct
  source 1..75: mol_type = other DNA
ccagactggcggcctgtgggcttctggcgcattgtacggaaaactggcgagcgtctttagctctactggcaccgg

SEQ ID NO: 407851 - DNA, 75 bp, synthetic construct
  source 1..75: mol_type = other DNA
tattccagcatctcgaatatatggctaaactctactcgaaaagtaatgctgatggtcagcgtaattttggttgta

SEQ ID NO: 407852 - DNA, 75 bp, synthetic construct
  source 1..75: mol_type = other DNA
ttgcggctcatagtgccgtggaaaatatccttcttgaatcagttgagcgtggattgttattgttggttacactga

SEQ ID NO: 407853 - DNA, 75 bp, synthetic construct
  source 1..75: mol_type = other DNA
taactacatgttcttcggctctgatggtggaggcgagagtgcggcagtgatgtacagcctgatcggtagctgcaa

SEQ ID NO: 407854 - DNA, 75 bp, synthetic construct
  source 1..75: mol_type = other DNA
gcgacaaacaaccgaacaaatcaaccgaaataaaattgatgcaatgattaaagaagccgcacacgattaccttta

SEQ ID NO: 407855 - DNA, 75 bp, synthetic construct
  source 1..75: mol_type = other DNA
attcaccagtgcagccagcgataccgtcactggtggtgtttccattgtgaacgggaaactcaccggttcaaaagc

SEQ ID NO: 407856 - DNA, 75 bp, synthetic construct
  source 1..75: mol_type = other DNA
atgtactggcatacctgaatacatccacaaccggcagcacacaacaaatccagggcgcgttacccccaccggatg

SEQ ID NO: 407857 - DNA, 75 bp, synthetic construct
  source 1..75: mol_type = other DNA
ttgaaacgatggcacgcgcagtcgctgagggtgcaagcaaagtggatggcgcagaagttgtcgttaagcgtgtac

SEQ ID NO: 407858 - DNA, 75 bp, synthetic construct
  source 1..75: mol_type = other DNA
acggcagaacggtaatggtgtcggtggctcaattacctacgagtatgacggtttcagtattggtggtgcggtgtc

SEQ ID NO: 407859 - DNA, 75 bp, synthetic construct
  source 1..75: mol_type = other DNA
gctctctggactacgggcgtaattatggtgttgtctatgacgtcacctcctggacggatgtgctgccggagtttg

SEQ ID NO: 407860 - DNA, 75 bp, synthetic construct
  source 1..75: mol_type = other DNA
atcgcgcttacaagcgtcaggatatggaagaaggggaggatttttcgacctattttaatcgcgagcgcttcccga

SEQ ID NO: 407861 - DNA, 75 bp, synthetic construct
  source 1..75: mol_type = other DNA
tccgccctacgcgttaaagagccggtttgtagatactgttatggcctgcaagttttttcctggtccggtttcccg

SEQ ID NO: 407862 - DNA, 75 bp, synthetic construct
  source 1..75: mol_type = other DNA
caccatgcaaggtatgacaaattaatggatgcgtttcgtggcgttggctataacgtcaccacgacagatgaactt

SEQ ID NO: 407863 - DNA, 75 bp, synthetic construct
  source 1..75: mol_type = other DNA
atgcaaggtatgctggcagaactgaaacaaaacacatttacgactccactggtatggcgcgatattttaaatatc

SEQ ID NO: 407864 - DNA, 75 bp, synthetic construct
  source 1..75: mol_type = other DNA
ataagtttgctaacgtaaatcgttttgtttttgcattatttttcatgatgttttcagggtttgcggctgcggcag

SEQ ID NO: 407865 - DNA, 75 bp, synthetic construct
  source 1..75: mol_type = other DNA
tcgagcgtgtcagtgaattgcaaattccggtgaatgcgggttctgtcgatatgctcgaccaactaggccaggttt

SEQ ID NO: 407866 - DNA, 75 bp, synthetic construct
  source 1..75: mol_type = other DNA
gccagaagttctgtttgataatggtcaggcgcggttaattcgccgccgccagaccattgaggaattactggcgct

SEQ ID NO: 407867 - DNA, 75 bp, synthetic construct
  source 1..75: mol_type = other DNA
aagctagaacgaagcgcgttcgtgaaaagttgacccaagagcaaaaccggagggtgaatgatgcgaaccaaaatt

SEQ ID NO: 407868 - DNA, 75 bp, synthetic construct
  source 1..75: mol_type = other DNA
gctgagcttatgggtaacgtgacgccaggtaatgtgtctttcatccgggttgccattgagccgctactttctcca

SEQ ID NO: 407869 - DNA, 75 bp, synthetic construct
  source 1..75: mol_type = other DNA
agctatcttcatcagtgggctgttcttctatgcgccaatagacgccgccagtagtcttgatgaactgaaagtgag

SEQ ID NO: 407870 - DNA, 75 bp, synthetic construct
  source 1..75: mol_type = other DNA
tgttagatgcgctgaaagccgacccgcggaaaacctccgaactggcgcaaagcctctcctcatggccgaaatcat

SEQ ID NO: 407871 - DNA, 75 bp, synthetic construct
  source 1..75: mol_type = other DNA
tgaaattgatatcaatgatgcaaaccaaaagatatctaatctgggagatattagtgatggaaggaaaaatatatt

SEQ ID NO: 407872 - DNA, 75 bp, synthetic construct
  source 1..75: mol_type = other DNA
aagtgataaaccttcttttcactgcagcaatgacaggacatcaggtatggacatcattacatgcaaataatgcac

SEQ ID NO: 407873 - DNA, 75 bp, synthetic construct
  source 1..75: mol_type = other DNA
ttggtggtactagcgtggctgatttcgacgccatgaaccgcagcgccgacattgtgctttctgatgtgaatgttc

SEQ ID NO: 407874 - DNA, 75 bp, synthetic construct
  source 1..75: mol_type = other DNA
aactgcctttccgtggttcagtatgcagtggatgttctcgaagttgaacacattattatctgtggccactacggt

SEQ ID NO: 407875 - DNA, 75 bp, synthetic construct
  source 1..75: mol_type = other DNA
aaaacccggaactggggcttatcaacaactggctgctgcacatccgcgatatctggttcaaacatagctcattgc

SEQ ID NO: 407876 - DNA, 75 bp, synthetic construct
  source 1..75: mol_type = other DNA
tacgctggtgctaacgctgcgcccaaccggccttctgccgctggtcacagacagtcttccgatgcgcttgctgcc

SEQ ID NO: 407877 - DNA, 75 bp, synthetic construct
  source 1..75: mol_type = other DNA
gatttgctacggcgcgtccagcaataacctgtgcttcctggtgccaggtgctgatgcagagcaggtagtgcagaa

SEQ ID NO: 407878 - DNA, 75 bp, synthetic construct
  source 1..75: mol_type = other DNA
cttccactggcgatacattgttgacgcaatcactgctgatggagctttcggcgctgtgccgcgtggaagtggaag

SEQ ID NO: 407879 - DNA, 75 bp, synthetic construct
  source 1..75: mol_type = other DNA
cagggaggcatcatatcccctgttctcgccaacatggctctggacggactggagaaggaactgatgcaaacgttc

SEQ ID NO: 407880 - DNA, 75 bp, synthetic construct
  source 1..75: mol_type = other DNA
cgcatcttgcgctggctaaactgcaagatgctctcggcgatcgctttttgctggtgacgcagaatatagacaacc

SEQ ID NO: 407881 - DNA, 75 bp, synthetic construct
  source 1..75: mol_type = other DNA
aatgccactcggcatggatgaaatttatatggcgttgtcgatggcggatgtctttattgccattggtacttccgg

SEQ ID NO: 407882 - DNA, 75 bp, synthetic construct
  source 1..75: mol_type = other DNA
agcaccaggtgaattatgtgagatatgctgatgatttcatctgttcaggcagctcccgtgaactgctggaaaatg

SEQ ID NO: 407883 - DNA, 75 bp, synthetic construct
  source 1..75: mol_type = other DNA
aatccgatgctcccggcatggaaactgataggccagctaaacccggtgatccggggatgggctacctatcaccga

SEQ ID NO: 407884 - DNA, 75 bp, synthetic construct
  source 1..75: mol_type = other DNA
tgctgatgatttcatctgttcaggcagctcccgtgaattgctggaaaatgaggtcagaccactgattgcagcttt

SEQ ID NO: 407885 - DNA, 75 bp, synthetic construct
  source 1..75: mol_type = other DNA
ttagttataaagatccatatttaaacaaggtcatttatttaaatactgatttaaaaagttataaagcaggttcaa

SEQ ID NO: 407886 - DNA, 75 bp, synthetic construct
  source 1..75: mol_type = other DNA
atggcggggacgctggacagtcagagcagttgcccgtgtaaggcgcgatttattgcgtcaatgatggatgatacg

SEQ ID NO: 407887 - DNA, 75 bp, synthetic construct
  source 1..75: mol_type = other DNA
atgggaaattacacgtcggcattgttgctccttgcccgtctgatgctggcatgcctttatatgatatccggcgtt

SEQ ID NO: 407888 - DNA, 75 bp, synthetic construct
  source 1..75: mol_type = other DNA
taagattattgaaggggcggacgaccatacgatcatgggaatcccgcaggcgcgggatatggacagagtgacctg

SEQ ID NO: 407889 - DNA, 75 bp, synthetic construct
  source 1..75: mol_type = other DNA
aaagccttgtccgagcgcagcaccttacccgtcacttctgtttctcttgtaagcggtcagtggggatggaccaca

SEQ ID NO: 407890 - DNA, 75 bp, synthetic construct
  source 1..75: mol_type = other DNA
ttgatatctctgaaaccgatttaacccgccatgttgttccacaggtcctggcgcatgccaaaaccgctaaggtcc

SEQ ID NO: 407891 - DNA, 75 bp, synthetic construct
  source 1..75: mol_type = other DNA
attgttgatcgtattcgtggcttctttgagccatccagtattctggtttctaccctggtgctaacgctgcgccca

SEQ ID NO: 407892 - DNA, 75 bp, synthetic construct
  source 1..75: mol_type = other DNA
gctgacatccctagggtatacaatttcctgtgctcaatatagtccggagtggagagagaaatataatatatgcgt

SEQ ID NO: 407893 - DNA, 75 bp, synthetic construct
  source 1..75: mol_type = other DNA
aattgactgtgaagttcgcggtttattatttgtttttaatcatgataatcagttgcagcatgatttttatgattt

SEQ ID NO: 407894 - DNA, 75 bp, synthetic construct
  source 1..75: mol_type = other DNA
aaaaagaggcttgaagatttagacgttaaagttgtgtctacagtaaaagaattcttctctgcagaagttatttct

SEQ ID NO: 407895 - DNA, 75 bp, synthetic construct
  source 1..75: mol_type = other DNA
gaacttgatatttatacgctgccaaattcactatgggaagcggttgttaaagaaaaagaaaaaagaataaagtta

SEQ ID NO: 407896 - DNA, 75 bp, synthetic construct
  source 1..75: mol_type = other DNA
taactttggtacgccagaatacaacgaaccgggaagcggcggctttgttggtgatacgctgctggttaacggtgt

SEQ ID NO: 407897 - DNA, 75 bp, synthetic construct
  source 1..75: mol_type = other DNA
atgttgtatattataatcgtccgggctccacagatatggagttttattatctctttgatcttttaactaactacc

SEQ ID NO: 407898 - DNA, 75 bp, synthetic construct
  source 1..75: mol_type = other DNA
gcggtactggcgaccaatgccctgaaagatgcctgcggctttactaacccgattcaggcaactcacgaagaaatt

SEQ ID NO: 407899 - DNA, 75 bp, synthetic construct
  source 1..75: mol_type = other DNA
atcccggtaatcccgggccataatcgcgccgctttgttaaatgtacaacgctccttgtttgattgcgtcctgagt

SEQ ID NO: 407900 - DNA, 75 bp, synthetic construct
  source 1..75: mol_type = other DNA
ctggcctgatgaaatctacggcagcacggaaaccggtgtcatcgcctggcgttaccgcgaacaagagcaacgccg

SEQ ID NO: 407901 - DNA, 75 bp, synthetic construct
  source 1..75: mol_type = other DNA
taaatgagatttttaacatcataatgatgaataaaagctttcaaaatatacttgaacaagagaatctttcagaac

SEQ ID NO: 407902 - DNA, 75 bp, synthetic construct
  source 1..75: mol_type = other DNA
gcccggcggaagggtcgattgaagccagcctgaccgtgctggctgagatgcaacaacaagggctggtaaaacata

SEQ ID NO: 407903 - DNA, 75 bp, synthetic construct
  source 1..75: mol_type = other DNA
cgtggaaatgattctctctgccggcggtatgctaccatggcaggatgtagagaaaacttccacctggctgaatat

SEQ ID NO: 407904 - DNA, 75 bp, synthetic construct
  source 1..75: mol_type = other DNA
ggatgtcgctgcaataccattaatacgcaatggccgccaggctatcggtgtcgtggttgtaccaaataaagaggc

SEQ ID NO: 407905 - DNA, 75 bp, synthetic construct
  source 1..75: mol_type = other DNA
agatgatcattccgcagttgccgccgtatccttccgatgcggcagaactgctggaatccattgtcctggaacatg

SEQ ID NO: 407906 - DNA, 75 bp, synthetic construct
  source 1..75: mol_type = other DNA
gtttcaacagctcgccgcgttcagcgaaagcgagtttgttaaaaaactggctggcggaacatcaccctgacgttg

SEQ ID NO: 407907 - DNA, 75 bp, synthetic construct
  source 1..75: mol_type = other DNA
ctggaatccattgtcctggaacatggcggcgattcgctgggtattgtcggttcgtcactggggggatattacgcc

SEQ ID NO: 407908 - DNA, 75 bp, synthetic construct
  source 1..75: mol_type = other DNA
atgctgcctgaaaaaaatgaattcccaataattcaaattgagattgcaaaaataaaatttcttaacccacgaaca

SEQ ID NO: 407909 - DNA, 75 bp, synthetic construct
  source 1..75: mol_type = other DNA
ctattaccatgagttatgtaaaccgcatacgtgggacattaaggagcgcgtgaaaggcggagtgattgaggacgt

SEQ ID NO: 407910 - DNA, 75 bp, synthetic construct
  source 1..75: mol_type = other DNA
ggtgcgcccgtttgaactgctgacggactatctcggtcagaacgagaacccatacaccgggcagcaatatgtgct

SEQ ID NO: 407911 - DNA, 75 bp, synthetic construct
  source 1..75: mol_type = other DNA
gattttgctatggcggtggcgtatcgaacgcggcagcggtcgcgtatccggaactggcctgcgcggtgccgtttt

SEQ ID NO: 407912 - DNA, 75 bp, synthetic construct
  source 1..75: mol_type = other DNA
ttcattgaatgatgcaatgaatatgatggcagattatggatttacccgtaccttaattgtcactgacaatatgtt

SEQ ID NO: 407913 - DNA, 75 bp, synthetic construct
  source 1..75: mol_type = other DNA
acagccagtcttctttctgaatgctctgaatatcgcacgaaatgtgataatctctatcatctatgccagatgcaa

SEQ ID NO: 407914 - DNA, 75 bp, synthetic construct
  source 1..75: mol_type = other DNA
gaacatcttctgttgcgcatttacgggagaatatggctgctgaaaaattgcatctttctgagaaagtgttgtcta

SEQ ID NO: 407915 - DNA, 75 bp, synthetic construct
  source 1..75: mol_type = other DNA
cctgaacgtgaaagaagaagatttcgcggtactggcgactaatgccctgaaagatgcctgtggctttactaaccc

SEQ ID NO: 407916 - DNA, 75 bp, synthetic construct
  source 1..75: mol_type = other DNA
gactcctcgctgatgatcggtatgccgaagtcactgaccgccgcaaccggtatggatgccttaacacacgctatt

SEQ ID NO: 407917 - DNA, 75 bp, synthetic construct
  source 1..75: mol_type = other DNA
tctgcaaaaccgcagttgccgatgatcgccatcaacaccacggcgggtacggcctctgaaatgacccgtttctgc

SEQ ID NO: 407918 - DNA, 75 bp, synthetic construct
  source 1..75: mol_type = other DNA
atttcccacaagagttgctggattactacgactattacgctcacgggaaaatctcgaaacgtgagttcctcaacc

SEQ ID NO: 407919 - DNA, 75 bp, synthetic construct
  source 1..75: mol_type = other DNA
atgccgcgtctgaccgctaaagatttcccacaagagttgctggattactacgactattacgctcacgggaaaatt

SEQ ID NO: 407920 - DNA, 75 bp, synthetic construct
  source 1..75: mol_type = other DNA
ggctgaatccgtatatcgaagatgtggcgcggcgagtggcgaaggcaggatatattgccctcgctcctgacggtt

SEQ ID NO: 407921 - DNA, 75 bp, synthetic construct
  source 1..75: mol_type = other DNA
cgggtgcccgtgttggcgggcatgaacaggtgtgcgaccgttactggtgggttcgccactatgacaaacgttgcc

SEQ ID NO: 407922 - DNA, 75 bp, synthetic construct
  source 1..75: mol_type = other DNA
gggtattcaattctcaaccagctaccgcaatttaatatgccacagtattttgcacatggcgcagtgctgagtatt

SEQ ID NO: 407923 - DNA, 75 bp, synthetic construct
  source 1..75: mol_type = other DNA
cgaaggcggggtatatcgccctggcacctgacggcttaagttccgttggaggttatccgggaaatgatgataaag

SEQ ID NO: 407924 - DNA, 75 bp, synthetic construct
  source 1..75: mol_type = other DNA
caaaagagtatggtggcgatgcggctttgttggtgttgattgaagtggaagagtggctgccgcctgaattgccct

SEQ ID NO: 407925 - DNA, 75 bp, synthetic construct
  source 1..75: mol_type = other DNA
cgaaagagtacggcggagatgcagcgttgttagtgttgattgaagtggaagagtggctaccgccggagttgccat

SEQ ID NO: 407926 - DNA, 75 bp, synthetic construct
  source 1..75: mol_type = other DNA
tgcctgccgccgcgaacatgtgttttgtgcctgcgtgatgcatggtcacgggaagcacatattgaagcagcaaac

SEQ ID NO: 407927 - DNA, 75 bp, synthetic construct
  source 1..75: mol_type = other DNA
gctgagaaaccgggcgcaagccagtccgcagatgaagggctggcaacaagcgcggcagaatttgcgggattttgc

SEQ ID NO: 407928 - DNA, 75 bp, synthetic construct
  source 1..75: mol_type = other DNA
aggacacgattgtccaccgaccgcagcgtaagaaaatcagcgaagtgccggtgaaacggttgattcaggagcagg

SEQ ID NO: 407929 - DNA, 75 bp, synthetic construct
  source 1..75: mol_type = other DNA
cgaaagagtacggcggtgatgcagcattgctggtgctcattgaggtagaagagtggcttccgccggagttaccct

SEQ ID NO: 407930 - DNA, 75 bp, synthetic construct
  source 1..75: mol_type = other DNA
ccaaacaagatctggtaacgggaggcgtacaagttctgtcgtccacgttcctggatgaaacgccaagtctggcac

SEQ ID NO: 407931 - DNA, 75 bp, synthetic construct
  source 1..75: mol_type = other DNA
ttctcaccagacggtagcaaactggcgttcgctctgtcgaaaacgggtagcctgaacctgtatgttatggatttg

SEQ ID NO: 407932 - DNA, 75 bp, synthetic construct
  source 1..75: mol_type = other DNA
ggtactgtacttgctcagaactcatataaagttaacaagcaatggctgcgttatgctggtcataccgccagtgat

SEQ ID NO: 407933 - DNA, 75 bp, synthetic construct
  source 1..75: mol_type = other DNA
cgcccggatgtcagccattttgaggcgaagaaactgcgccgcggcgattattcaccggagttgtttttggatttg

SEQ ID NO: 407934 - DNA, 75 bp, synthetic construct
  source 1..75: mol_type = other DNA
ccagacacaccagacgcctgtcattatgttgacggcgcgcggcagtgaacttgatcgcgttctcggccttgagct

SEQ ID NO: 407935 - DNA, 75 bp, synthetic construct
  source 1..75: mol_type = other DNA
accgacctggttcccggacagccagaacctggcatttacttctgaccaggccggtcgtccacaggtttataaagt

SEQ ID NO: 407936 - DNA, 75 bp, synthetic construct
  source 1..75: mol_type = other DNA
agtgccctcattgtggcgggcagaaatgcaaccactgcgatatgggcgatgacacggcgtgcatgaattgtgaag

SEQ ID NO: 407937 - DNA, 75 bp, synthetic construct
  source 1..75: mol_type = other DNA
accgcagcattttgctttctcggagactttaaaattatgggttgtgccataccggataatggcaaaacgcggtga

SEQ ID NO: 407938 - DNA, 75 bp, synthetic construct
  source 1..75: mol_type = other DNA
tttattaaccagtttttgcatagcgtcagccaattgcttaaacagggtttacgctccgactatgtgagcaagcaa

SEQ ID NO: 407939 - DNA, 75 bp, synthetic construct
  source 1..75: mol_type = other DNA
cgggcgctgcgcctgatggggtatgatacgaaaaccgatgtgtgcggacatggacttcgcgcaatggcctgtagc

SEQ ID NO: 407940 - DNA, 75 bp, synthetic construct
  source 1..75: mol_type = other DNA
atgctgacgaaatatgcccttgtggcagtcatagtgctgtgttttacggtcctgggatttacgcttctggtcgga

SEQ ID NO: 407941 - DNA, 75 bp, synthetic construct
  source 1..75: mol_type = other DNA
atgctgacgaaatatgcccttgtggcagtcatagtgctgtgttttacggtactgggatttacgcttctggtcggc

SEQ ID NO: 407942 - DNA, 75 bp, synthetic construct
  source 1..75: mol_type = other DNA
atgctgacaaaatatgcccttgtggcaatcatcgtactgtgttgtacagtactgggattcacgctgatggtaggt

SEQ ID NO: 407943 - DNA, 75 bp, synthetic construct
  source 1..75: mol_type = other DNA
tagaacatgaaaaagtcggtgcgatgcataaagtccgtattttcggacgtgttggtgaagttataagcaatgata

SEQ ID NO: 407944 - DNA, 75 bp, synthetic construct
  source 1..75: mol_type = other DNA
cgattccagaaccttcagttaaaaacctttttgccgtaaatgaattttatagaaataatgatgatttcataaacc

SEQ ID NO: 407945 - DNA, 75 bp, synthetic construct
  source 1..75: mol_type = other DNA
cattgaaacacacatatgaagtgtacttcggatatgagcgtacgctcaggaagtacggcagattccgtcaaaaat

SEQ ID NO: 407946 - DNA, 75 bp, synthetic construct
  source 1..75: mol_type = other DNA
gatgcagtggtggtcagactatctggacgtgagccgcgagggatacgttgccccgtatatttatgcgcggcggca

SEQ ID NO: 407947 - DNA, 75 bp, synthetic construct
  source 1..75: mol_type = other DNA
acccggcgcagcatctggatggtgtagtcgcctctcccgtcaagaatcactatcccgctttaccgctggagcggt

SEQ ID NO: 407948 - DNA, 75 bp, synthetic construct
  source 1..75: mol_type = other DNA
gcacagaatattaaccccacccaccagcgcatggcagataaagccgcagcttctccggaaaagtattttaaagcc

SEQ ID NO: 407949 - DNA, 75 bp, synthetic construct
  source 1..75: mol_type = other DNA
atagatattgtacaattccacaagcgaagttccgtaaatgggatgaaatggacgttttactctggaagttaggaa

SEQ ID NO: 407950 - DNA, 75 bp, synthetic construct
  source 1..75: mol_type = other DNA
tatcctcctaaagaggcgtttgaagaggcaatcaagaggataaatgaggattatattaatggggcaaaatttatt

SEQ ID NO: 407951 - DNA, 75 bp, synthetic construct
  source 1..75: mol_type = other DNA
ctgtcactgttaattgctttcaccttgcagcttttcttacccggctgggagattggtttttcaccgttggcactg

SEQ ID NO: 407952 - DNA, 75 bp, synthetic construct
  source 1..75: mol_type = other DNA
atcaacgcgttcaattagcccaaatgaagacgaagcggcaaaatttacctcggtgattctggctaccacagaaga

SEQ ID NO: 407953 - DNA, 75 bp, synthetic construct
  source 1..75: mol_type = other DNA
attgacttttcagagtcagcaatatatatcaagcgtttaaaaaatggattatccacagtacatcccctgcaaaaa

SEQ ID NO: 407954 - DNA, 75 bp, synthetic construct
  source 1..75: mol_type = other DNA
cgaaatagagatatcaacaaacaaaaatagttattttaacaagaatggaataaaacaaaaagatacaaataaata

SEQ ID NO: 407955 - DNA, 75 bp, synthetic construct
  source 1..75: mol_type = other DNA
ttggcaaagagcaactatcagaagcgatcgaaaagtttttcatctgggcctatagctgccgcttaaccagccacg

SEQ ID NO: 407956 - DNA, 75 bp, synthetic construct
  source 1..75: mol_type = other DNA
gccgctattgcccgtgccaaagcgcgcaagctggaacagcaacagactaacgcagaaccagaagaacaggttgat

SEQ ID NO: 407957 - DNA, 75 bp, synthetic construct
  source 1..75: mol_type = other DNA
ccatgaatttacgaataacggtcagtccggcccccatcaggctatggctgatgcacaccgccgcatgatcaatgc

SEQ ID NO: 407958 - DNA, 75 bp, synthetic construct
  source 1..75: mol_type = other DNA
aaataacactgtatccacgcccgtttcgtcaacgtcttacgctgcgatggatgagcatgaaagagcagcggttgc

SEQ ID NO: 407959 - DNA, 75 bp, synthetic construct
  source 1..75: mol_type = other DNA
ctgttaggtattgaaccgaaagtccgccagttacaacaaaatgccactcaggtggaggcgaaccgcttatctgtg

SEQ ID NO: 407960 - DNA, 75 bp, synthetic construct
  source 1..75: mol_type = other DNA
gaagagcaagaactggttttacagcggcgcgaaggcaagtgggaaatcgctgattttatccgcccgaacagcggc

SEQ ID NO: 407961 - DNA, 75 bp, synthetic construct
  source 1..75: mol_type = other DNA
actggggcctgatgcgtctcaatgacgtcgaataccatgaatccatcgatgagatgaaacacgctgataaatata

SEQ ID NO: 407962 - DNA, 75 bp, synthetic construct
  source 1..75: mol_type = other DNA
cctgaaaacgaagtcgaattaattggcgcggaaaagatcgctgaatacaaaataacagaatcggaagacggggga

SEQ ID NO: 407963 - DNA, 75 bp, synthetic construct
  source 1..75: mol_type = other DNA
tgagcattcccctgtggctggggtatccagtcaggctttgctgaaagaagatcttttcctggtaggaactcaaga

SEQ ID NO: 407964 - DNA, 75 bp, synthetic construct
  source 1..75: mol_type = other DNA
tcccctgtggctggtgtatccagtcaggctttgctgaaagaagatctttttctggtaggaactcaagattgcccg

SEQ ID NO: 407965 - DNA, 75 bp, synthetic construct
  source 1..75: mol_type = other DNA
gcaggcggtaaaacgcaaactgcaccggttgcaaccccgcaagaactggccgattacgacgccattatttttggt

SEQ ID NO: 407966 - DNA, 75 bp, synthetic construct
  source 1..75: mol_type = other DNA
ttcgagaacggcaatgtaacgtctgctgcgtattgcacgatcttaatcttgctgcccgttatgctgaccgtgtcg

SEQ ID NO: 407967 - DNA, 75 bp, synthetic construct
  source 1..75: mol_type = other DNA
ggttgtttaataagccattaaatgaatggtcaatcaccgaactggcgaaacaccgggccgtgatgcgtcaaaata

SEQ ID NO: 407968 - DNA, 75 bp, synthetic construct
  source 1..75: mol_type = other DNA
atagccttcaggggcggcgtctgactgataatgtctcgctgacttttcccggtggggaaattgttgccattctcg

SEQ ID NO: 407969 - DNA, 75 bp, synthetic construct
  source 1..75: mol_type = other DNA
attcgatgatccagaaaatatcggatatgccggtgccgggattcgtgttgaaggaaccagcccgaccctgtttgt

SEQ ID NO: 407970 - DNA, 75 bp, synthetic construct
  source 1..75: mol_type = other DNA
tttttcgtggtactttaccgaacgaagaaagattgggacagtacgccggacaacctggcgtatgtttccgtgtag

SEQ ID NO: 407971 - DNA, 75 bp, synthetic construct
  source 1..75: mol_type = other DNA
ttttccgtggcactttaccgaacgaagaaagattaggacaatttgccgggcaacctagtgcatgtttccgtgtag

SEQ ID NO: 407972 - DNA, 75 bp, synthetic construct
  source 1..75: mol_type = other DNA
tatcgaaaaacgtctgcaacatatcgcgccgcagaaagagatcggcttctcttccggtatttacgcgatgaaaga

SEQ ID NO: 407973 - DNA, 75 bp, synthetic construct
  source 1..75: mol_type = other DNA
gtgatacagatgattataaattcatctcttatggtatgaggttgttagagattagagaacatatcaaaaaattga

SEQ ID NO: 407974 - DNA, 75 bp, synthetic construct
  source 1..75: mol_type = other DNA
tatacaaatacgaaccgcagcgattactctaggccttgacccttcagaattaactaccagaaatcagttagagtt

SEQ ID NO: 407975 - DNA, 75 bp, synthetic construct
  source 1..75: mol_type = other DNA
caatctgaatccgcagcagtttatgtccggagacaagaacccgcagggcggggatgccggcagggagggcggaaa

SEQ ID NO: 407976 - DNA, 75 bp, synthetic construct
  source 1..75: mol_type = other DNA
ctgatccgtccggcttccgtagtctgccctgtggttttgaacactattttagaaccgaatgggatttacaggaag

SEQ ID NO: 407977 - DNA, 75 bp, synthetic construct
  source 1..75: mol_type = other DNA
gtatgtgaccttgatggccgtggtggcgtttctggtttcactaacattgcaccgtaaaggaaaagggatgcggct

SEQ ID NO: 407978 - DNA, 75 bp, synthetic construct
  source 1..75: mol_type = other DNA
gctgtacagttccgcgtgaattataagaacggcggtatcttttatcgttcagcgcgtgatggttatggctttgaa

SEQ ID NO: 407979 - DNA, 75 bp, synthetic construct
  source 1..75: mol_type = other DNA
aagccgcacagacgctcagtgactactacatcaagcgtgccgaacagtatcacccggtgataccgattggtgcgg

SEQ ID NO: 407980 - DNA, 75 bp, synthetic construct
  source 1..75: mol_type = other DNA
gcatcgaaagccgcacagacgctcagtgactactacatcaaacgtgccgaacagtatcacccggtgataccgatt

SEQ ID NO: 407981 - DNA, 75 bp, synthetic construct
  source 1..75: mol_type = other DNA
gtgatttaattggtagtattgaaaagagaattgctgatattgataagctaatgtctgaacagcttagtctgatta

SEQ ID NO: 407982 - DNA, 75 bp, synthetic construct
  source 1..75: mol_type = other DNA
aatcattgccggcatataattatgtatcccatacaggtgagcggcttttacaatgcccaactgaggttgctatct

SEQ ID NO: 407983 - DNA, 75 bp, synthetic construct
  source 1..75: mol_type = other DNA
atgtggggctgactttgccacagtccctggggcgtatcccatatggtatgaagactgtacccgccgagacgttta

SEQ ID NO: 407984 - DNA, 75 bp, synthetic construct
  source 1..75: mol_type = other DNA
atgatgacgctataaaattagaaaatctcaagttgaaaattgatatctggaagacagttgttgacgttcagaaac

SEQ ID NO: 407985 - DNA, 75 bp, synthetic construct
  source 1..75: mol_type = other DNA
cgaccatcatttatatatgatgaacccggggcattcagttttgttatatgttttgtcgttattttaagggaggtt

SEQ ID NO: 407986 - DNA, 75 bp, synthetic construct
  source 1..75: mol_type = other DNA
tgtgccgctggtacgcgcaccgcgtaatgcagcatctgtgcacggcgaatcgggaatggctggctacgactttgt

SEQ ID NO: 407987 - DNA, 75 bp, synthetic construct
  source 1..75: mol_type = other DNA
accctgaatgagcttgccgcagcacttggcaatgacccgaactttgcgacaacaatgacaaatgcgctggcaggc

SEQ ID NO: 407988 - DNA, 75 bp, synthetic construct
  source 1..75: mol_type = other DNA
acggtaaactcaccggttcaaaagccttcctgaaagcattgtcttcccagggagatgtcagtgtggtgacccaga

SEQ ID NO: 407989 - DNA, 75 bp, synthetic construct
  source 1..75: mol_type = other DNA
ggatccgattgggctgaaagggggatggaatttttatcagtatccgttgaatccgatctcaaatatagatccatt

SEQ ID NO: 407990 - DNA, 75 bp, synthetic construct
  source 1..75: mol_type = other DNA
cagtgggaaaagcctgttcgggtggcggggctaaccagccttgcgcttcagggccatgcgcactataccgaaccg

SEQ ID NO: 407991 - DNA, 75 bp, synthetic construct
  source 1..75: mol_type = other DNA
accatcaccaccggttttaatatgacccttctgccgttcattctcccggactcacagacactgcagctgctctat

SEQ ID NO: 407992 - DNA, 75 bp, synthetic construct
  source 1..75: mol_type = other DNA
ggttcagcggatcacggaaagctgccatattccggtacggatcacacctgatgtactgacatacctgaatacatc

SEQ ID NO: 407993 - DNA, 75 bp, synthetic construct
  source 1..75: mol_type = other DNA
cttcctgaaagcattgtcttcccagggagatgtcagtgtggtgacccagaactctgccgtcaccaaaaacctgac

SEQ ID NO: 407994 - DNA, 75 bp, synthetic construct
  source 1..75: mol_type = other DNA
tggagcagcggttgcagaaactggtgcaatccggttcttcggtgatgtttattgctattgacatggacaagttaa

SEQ ID NO: 407995 - DNA, 75 bp, synthetic construct
  source 1..75: mol_type = other DNA
cgatcaataacgacccgaatttcagcacaactatcaacaatgccctggctctcaaagcgcctttagcaagccctg

SEQ ID NO: 407996 - DNA, 75 bp, synthetic construct
  source 1..75: mol_type = other DNA
ttggcaatgacccgaactttgcgacaacaatgacaaatgcgctggcaggcaaacagcctctggatgcaactttaa

SEQ ID NO: 407997 - DNA, 75 bp, synthetic construct
  source 1..75: mol_type = other DNA
cgcgtaaattacaaacactgctctgcaccagccattcggttaaaaccaaccgggtgatgctctatcttgcccggc

SEQ ID NO: 407998 - DNA, 75 bp, synthetic construct
  source 1..75: mol_type = other DNA
cattatcagtggcttccagcagtcagggcgtcgcagtggaaaacagggtgtcggcacaccgggattcttcggtct

SEQ ID NO: 407999 - DNA, 75 bp, synthetic construct
  source 1..75: mol_type = other DNA
ctgctgaatgaagagaacccgcatcagctgcagcagcttatccgcctgccggggcagcagtatgatgaggagtga

SEQ ID NO: 408000 - DNA, 75 bp, synthetic construct
  source 1..75: mol_type = other DNA
caggatcgtatcgtgcaattgcatggattaaacctcattttcagcttgagggcttaagcatgtcattgcgtcttg

SEQ ID NO: 408001 - DNA, 75 bp, synthetic construct
  source 1..75: mol_type = other DNA
cacctggggacagcagttcgagaagatgggtaagacctatcagcaaccgaagctggtcatgtaccgtggaatgac

SEQ ID NO: 408002 - DNA, 75 bp, synthetic construct
  source 1..75: mol_type = other DNA
gacaaacttggcgcggatggcgattttgcccaggggtacgttatcgcccatgaagtcggtcatcatgtgcagaaa

SEQ ID NO: 408003 - DNA, 75 bp, synthetic construct
  source 1..75: mol_type = other DNA
gacgtgcaactgccgtcaggtgtctggcatgaagatgagttttacggcaaaagcgagatttaccgtgggcggctg

SEQ ID NO: 408004 - DNA, 75 bp, synthetic construct
  source 1..75: mol_type = other DNA
cggacgtttcgcaacggcttttgatagccgcttctacatgaaaaatgcctctcacgatcccagcgaccaactctt

SEQ ID NO: 408005 - DNA, 75 bp, synthetic construct
  source 1..75: mol_type = other DNA
atctgcgccccaagacaaaacacatgaagctgccagctggcggcaccttactggagagactgactcatggcgaaa

SEQ ID NO: 408006 - DNA, 75 bp, synthetic construct
  source 1..75: mol_type = other DNA
cccgccgtctctttcaacacttcgccgctgggcgcgggaggggcgcatttaccctgctccggaacttcacggaaa

SEQ ID NO: 408007 - DNA, 75 bp, synthetic construct
  source 1..75: mol_type = other DNA
acgttaatgagcaaccgccaacaaggcggctcacccggcggtgtgtttgttatgggggcaattgccggattgatc

SEQ ID NO: 408008 - DNA, 75 bp, synthetic construct
  source 1..75: mol_type = other DNA
atgctgacgaaatatgcccttgtggcagtcatagtgctgtgtttcacggtgctgggatttacgcttctggtcggt

SEQ ID NO: 408009 - DNA, 75 bp, synthetic construct
  source 1..75: mol_type = other DNA
atgctgacgaaatatgcccttgtggcagtcatagtgctgtgtttcacggttctgggatttacgcttctggtcggg

SEQ ID NO: 408010 - DNA, 75 bp, synthetic construct
  source 1..75: mol_type = other DNA
gctctgggcgttgttgattggtatcggtatcgccttcacgccatgtgtactgccgatgtaccctctaatttccgg

SEQ ID NO: 408011 - DNA, 75 bp, synthetic construct
  source 1..75: mol_type = other DNA
cccctcctcgctgcaaacgcgcctcacgctgatgagcaatcgccaacagggcggctcacccggcggagtgtttat

SEQ ID NO: 408012 - DNA, 75 bp, synthetic construct
  source 1..75: mol_type = other DNA
tatggggattacgcttgtggtcggcgcttggtgtcgcattctttggctgggcctttatcaccagcctacaggcca

SEQ ID NO: 408013 - DNA, 75 bp, synthetic construct
  source 1..75: mol_type = other DNA
attatattcaattatttcaaacaatagtaatattaatcttcattttcatcttcttgtttcaggaataagcgaaag

SEQ ID NO: 408014 - DNA, 75 bp, synthetic construct
  source 1..75: mol_type = other DNA
gaagttttatgtcaaagacagaatgtcagacatatctgcaaaactggatcatgcaatatgttgtggcatcagata

SEQ ID NO: 408015 - DNA, 75 bp, synthetic construct
  source 1..75: mol_type = other DNA
ggttaataatttccttgctgaagttgccagtggttctttagtcattaacagtgatttaatcggtagtattgaaaa

SEQ ID NO: 408016 - DNA, 75 bp, synthetic construct
  source 1..75: mol_type = other DNA
gaagttattgaagtccctggaagtccgggaaattatcgtgcaattgcatggattaaacctcattttcagcttgag

SEQ ID NO: 408017 - DNA, 75 bp, synthetic construct
  source 1..75: mol_type = other DNA
ttatgaaagcgagtatggaacgttcgggggaacaccgtattctgcttttgtgggtgacttctatttcgataatac

SEQ ID NO: 408018 - DNA, 75 bp, synthetic construct
  source 1..75: mol_type = other DNA
accagtctgtattatttaaaaatatttatgaaagcgagtatggaacgttcgggggaacaccgtattctgcttttg

SEQ ID NO: 408019 - DNA, 75 bp, synthetic construct
  source 1..75: mol_type = other DNA
cctggggcgtgtcccatatggtatgaagaatgtacctgctgagacatttaattttgaagagcacattagtgaaga

SEQ ID NO: 408020 - DNA, 75 bp, synthetic construct
  source 1..75: mol_type = other DNA
cagatcaggatgtgttaaatattttacttaatggacgattatattatctcgataaaaaatataataataagacaa

SEQ ID NO: 408021 - DNA, 75 bp, synthetic construct
  source 1..75: mol_type = other DNA
gtcatctctgactctccagatatgcaagatcgtgtgaaaaagttagactatggtattgattttataaattatttt

SEQ ID NO: 408022 - DNA, 75 bp, synthetic construct
  source 1..75: mol_type = other DNA
tatatcatgtgacagataaatttgatattaatcctgataccctggttctgggaattcctttatcaacatgtttgc

SEQ ID NO: 408023 - DNA, 75 bp, synthetic construct
  source 1..75: mol_type = other DNA
atgaaaaagaaaaattctggctttactgccagcggccccgctcggcctgaaatcagacacggagatatttaccgc

SEQ ID NO: 408024 - DNA, 75 bp, synthetic construct
  source 1..75: mol_type = other DNA
cattctttgcagtacaatcaataaataaacctagactttataatactgatgaggcaaatgctaatgcgagattat

SEQ ID NO: 408025 - DNA, 75 bp, synthetic construct
  source 1..75: mol_type = other DNA
tggtccgaaaggaaatattggaaagcaacttcttgctattatcattacctgctcgctaaattattcggcgtaaag

SEQ ID NO: 408026 - DNA, 75 bp, synthetic construct
  source 1..75: mol_type = other DNA
atgggcgcaaggacataattaaactagttgaaacaaaagactcaaaaacatcggaacatattcagcttgtcgatt

SEQ ID NO: 408027 - DNA, 75 bp, synthetic construct
  source 1..75: mol_type = other DNA
gacacctgtcagcccggtgctggcgtttgcgcacatgcagcagccggtgcgtaagcgcaagcttatcgtcaatgg

SEQ ID NO: 408028 - DNA, 75 bp, synthetic construct
  source 1..75: mol_type = other DNA
ttaacgatgcttggaagggtaacgaaccttttgaaaaaagagacttaattggtttggggtatgctcttcaatcgc

SEQ ID NO: 408029 - DNA, 75 bp, synthetic construct
  source 1..75: mol_type = other DNA
caaaggtgtgttcaagcgtgttctgccagctgaagagtatgcggaaattcgctgggatcaactggaagcgggtga

SEQ ID NO: 408030 - DNA, 75 bp, synthetic construct
  source 1..75: mol_type = other DNA
cgtgttgcaggagaaaatggattacccacatgggcactaataccttcaccatcacatgaagaacttattcaacag

SEQ ID NO: 408031 - DNA, 75 bp, synthetic construct
  source 1..75: mol_type = other DNA
ggatagcgctcacattatggtgctggacgtcagaacgaacaggatttgtcttctggttcaccgctctggggcttc

SEQ ID NO: 408032 - DNA, 75 bp, synthetic construct
  source 1..75: mol_type = other DNA
atgacgaaaggaaaaaccgggcgccggttatggccggtgctgaaagtgaccgggctgaccctgctcagtatggtg

SEQ ID NO: 408033 - DNA, 75 bp, synthetic construct
  source 1..75: mol_type = other DNA
tgcacatttctccctatggaaaagctgagaaccaatgctgtaacacttgatgaaactcgtcctattcatgaagtg

SEQ ID NO: 408034 - DNA, 75 bp, synthetic construct
  source 1..75: mol_type = other DNA
ctgggcgaaacggtggcattggtcaaagcgccgggcgcagaaggcctgtccattgaaaacgccaccgggatttct

SEQ ID NO: 408035 - DNA, 75 bp, synthetic construct
  source 1..75: mol_type = other DNA
aaggccaccggcgatagatgctgaaaaggttgatcaaatcctcgcagctctggaaggaggtgccagtaaagcgtc

SEQ ID NO: 408036 - DNA, 75 bp, synthetic construct
  source 1..75: mol_type = other DNA
cgctcaacgctcaccgatactctacgacgaattggctgggccggacctggggggcgtaatctgacaacggatcag

SEQ ID NO: 408037 - DNA, 75 bp, synthetic construct
  source 1..75: mol_type = other DNA
tctcatcacctgcgtctgacgccagaaatgaaggagacgttaaacgaaactattcgccaactggaggccatgcat

SEQ ID NO: 408038 - DNA, 75 bp, synthetic construct
  source 1..75: mol_type = other DNA
taccaccatcttcccgaacgggccgaaagattttgaagataaagacgatggtcgtgtgattggtaacctggttgg

SEQ ID NO: 408039 - DNA, 75 bp, synthetic construct
  source 1..75: mol_type = other DNA
cagcggcgacggcgcgcgtcgcgatgaagatggctattactggatcaccgggcgtgtggacgacgtgctgaacgt

SEQ ID NO: 408040 - DNA, 75 bp, synthetic construct
  source 1..75: mol_type = other DNA
gcactggaactggttgattcctccagtgcgccagatattgaatggcctacgcctccggcagttcaggccagatga

SEQ ID NO: 408041 - DNA, 75 bp, synthetic construct
  source 1..75: mol_type = other DNA
acgctaaggaagtaaatcaaaatattatcagtgagtttatggctgaaccgccacaaggaaaaatccgtattgccg

SEQ ID NO: 408042 - DNA, 75 bp, synthetic construct
  source 1..75: mol_type = other DNA
aagaggctcagtcagcgatggatgtgtataaaacggcgctggacagcctgacggccgcacaggctgcttaccatg

SEQ ID NO: 408043 - DNA, 75 bp, synthetic construct
  source 1..75: mol_type = other DNA
ataacgggccgggaattgcagcggaacaaagagaacgagtatttgacgcattctaccggcctgcaggcaccgaaa

SEQ ID NO: 408044 - DNA, 75 bp, synthetic construct
  source 1..75: mol_type = other DNA
ctgaattatggtatcagagggggaattctggcacacagcgaaggggtaacgttaagtcaggagttaggtgaaact

SEQ ID NO: 408045 - DNA, 75 bp, synthetic construct
  source 1..75: mol_type = other DNA
ttcgtacctataaatccgtttttgacttaggtccggcagcagagaaatacacagtaaaaatgagcggctgccact

SEQ ID NO: 408046 - DNA, 75 bp, synthetic construct
  source 1..75: mol_type = other DNA
ggtgttcaagcgtgttctgcctgctgaagagtatgcggaaattcactgggatcaactggaagcgggtgacgttaa

SEQ ID NO: 408047 - DNA, 75 bp, synthetic construct
  source 1..75: mol_type = other DNA
accgttaaaatgagcggctgtcactcttgtccaatccgttgtatgacccagatgaacattccgcgggttaaggag

SEQ ID NO: 408048 - DNA, 75 bp, synthetic construct
  source 1..75: mol_type = other DNA
caatggtagctattcctggagccgtgactcccaacattttgattatggcgccagaggcggcgtgctggtgcatag

SEQ ID NO: 408049 - DNA, 75 bp, synthetic construct
  source 1..75: mol_type = other DNA
cagcgcaaatgaaattcgctggatacgacgtcattattatcgaagggaaagcgaaatcaccggtatggctgaaga

SEQ ID NO: 408050 - DNA, 75 bp, synthetic construct
  source 1..75: mol_type = other DNA
tggctatccggttcaccatgctaatgaagcctcggcgcaagttggttccattgttaactgcatgttcaaccgcga

SEQ ID NO: 408051 - DNA, 75 bp, synthetic construct
  source 1..75: mol_type = other DNA
cgctacgtcaggcgcgccttgatttattaaccggtaaacgggtggtgtctgtccagaaagatggtcgcagaattg

SEQ ID NO: 408052 - DNA, 75 bp, synthetic construct
  source 1..75: mol_type = other DNA
tgtgaccccgcgtcgctggctggcggtagcgaacccatcgctttcagctgtgctggacgaacacctgggccgtaa

SEQ ID NO: 408053 - DNA, 75 bp, synthetic construct
  source 1..75: mol_type = other DNA
acggtgtgacgccgcgtcgctggctggcggtagcgaacccatcgctttcagccgtgctggacgaacacctgggcc

SEQ ID NO: 408054 - DNA, 75 bp, synthetic construct
  source 1..75: mol_type = other DNA
aaattaacctcggtaaattcaaccagggtgactacttcgcggcagtggaagataaaaaccactccgagaacgtat

SEQ ID NO: 408055 - DNA, 75 bp, synthetic construct
  source 1..75: mol_type = other DNA
tggcgcagctgatcattccggcagccgatctttccgaacagatttcgctggcgggtacggaagcctccggcacca

SEQ ID NO: 408056 - DNA, 75 bp, synthetic construct
  source 1..75: mol_type = other DNA
ggagtgcgcaagccagtagtgaaattaacctcggtaaattcaaccagggtgactacttcgcggcagtggaagata

SEQ ID NO: 408057 - DNA, 75 bp, synthetic construct
  source 1..75: mol_type = other DNA
ctggcgtaccgacctgagccaattaaacgagctacaacagcactgtgatttccctatggtcaatcatgctgttca

SEQ ID NO: 408058 - DNA, 75 bp, synthetic construct
  source 1..75: mol_type = other DNA
gctcgattttactgacggcaaaggaagttttggcggtcttgataacatgttcaggcaactggcaaagctgcgaaa

SEQ ID NO: 408059 - DNA, 75 bp, synthetic construct
  source 1..75: mol_type = other DNA
cgagctgccgctggcgattgccagtacgccgatcccgctggtacaaagtcaggatattcagccgctggtggaagt

SEQ ID NO: 408060 - DNA, 75 bp, synthetic construct
  source 1..75: mol_type = other DNA
aaatgtgatttggttgaattggcggtaaaaggcttgagactaaatgacgaaattcatcgagtatcggcgtttggt

SEQ ID NO: 408061 - DNA, 75 bp, synthetic construct
  source 1..75: mol_type = other DNA
aattgaatgtggtggtgaatccgaaagcgctattcgatgtgcagatcaaacgtattcacgaatacaaacgtcaat

SEQ ID NO: 408062 - DNA, 75 bp, synthetic construct
  source 1..75: mol_type = other DNA
cctgaaaaccttgcaggaacagtatccgaacgataccgatctgctgggacgggcgtcgatcattgatgaatccaa

SEQ ID NO: 408063 - DNA, 75 bp, synthetic construct
  source 1..75: mol_type = other DNA
ttaattatcactaactgggatgttgtcggaccttatttcaagaagctctgggaaaccattggtccttattttgag

SEQ ID NO: 408064 - DNA, 75 bp, synthetic construct
  source 1..75: mol_type = other DNA
atatcgttaacggtagccagaaagagtcgcctgactactggctggaatacggtaacccgtgggaattcaaacgcc

SEQ ID NO: 408065 - DNA, 75 bp, synthetic construct
  source 1..75: mol_type = other DNA
cctgaatcgtgccattaacgatgctgaagtgatgctggggacagccagtcgccgccgtcgtccgctgggggtaag

SEQ ID NO: 408066 - DNA, 75 bp, synthetic construct
  source 1..75: mol_type = other DNA
tcgaatacaaggagcacgttatccataaaaacgcggatggaacagtgcgcatggggataagtctggacatacgtt

SEQ ID NO: 408067 - DNA, 75 bp, synthetic construct
  source 1..75: mol_type = other DNA
tgaccggtgttaccgatgaacatgctatcggtaaagccttcaccgaatctctgccattcaccgcactgttgacgg

SEQ ID NO: 408068 - DNA, 75 bp, synthetic construct
  source 1..75: mol_type = other DNA
gaaaattctggcggcagagcagcagaatggtgtgctgaaagtggtgatcagtcgcggcagtggcgggcgagggta

SEQ ID NO: 408069 - DNA, 75 bp, synthetic construct
  source 1..75: mol_type = other DNA
ctcatcttgcaggtattaaacatcttaatcggcttgagcaagtattgattcgctctcatcttgagcagacaaacg

SEQ ID NO: 408070 - DNA, 75 bp, synthetic construct
  source 1..75: mol_type = other DNA
cagcacattgaacagcggaccggcaacgcggattctctccgttacggcttatcctgcacattacgaccgtttgcg

SEQ ID NO: 408071 - DNA, 75 bp, synthetic construct
  source 1..75: mol_type = other DNA
caaagtgacacaggccgggcatcaggcaacgattgtttcgacagataaaggctactgtcagttactgtcagttac

SEQ ID NO: 408072 - DNA, 75 bp, synthetic construct
  source 1..75: mol_type = other DNA
gatgattgcgcttaatggctcgcccacctggcgaattgctcaggcgatcattgaattgaatcaggccgatctcga

SEQ ID NO: 408073 - DNA, 75 bp, synthetic construct
  source 1..75: mol_type = other DNA
aaaataagcaggctgttgggttctataagaagatgggttttaaggttacgggacgcttgggagagcgttcaccga

SEQ ID NO: 408074 - DNA, 75 bp, synthetic construct
  source 1..75: mol_type = other DNA
taagaagatgggatttaaagttaccgggcgttcggaagtcgacgagctggggaaaccgtatccgctactgaatct

SEQ ID NO: 408075 - DNA, 75 bp, synthetic construct
  source 1..75: mol_type = other DNA
tgaccattggcaacattaacgattggaggattgatgatgccagggccgaagccaggcggctgcaaacattaatcg

SEQ ID NO: 408076 - DNA, 75 bp, synthetic construct
  source 1..75: mol_type = other DNA
atggcgcgtatggcaacgatgaacgttaatcgtcgcaggcaacacgctaccggacagggagaacggctcatccgg

SEQ ID NO: 408077 - DNA, 75 bp, synthetic construct
  source 1..75: mol_type = other DNA
ccgtcaggataaaatccgtctgattgtccaggcgattatcggcgtctggctggtgactgcgctggcgttgcatct

SEQ ID NO: 408078 - DNA, 75 bp, synthetic construct
  source 1..75: mol_type = other DNA
tgccgcggctcgtaaaggaactgatgatgctaagggcataccaatgccgaaggataacgatctgcgactagagtt

SEQ ID NO: 408079 - DNA, 75 bp, synthetic construct
  source 1..75: mol_type = other DNA
ggggaatcagacccgcaatgggaaggcttgggtagtcgttacttgctgtactacatcgaggaaaacgagcttgta

SEQ ID NO: 408080 - DNA, 75 bp, synthetic construct
  source 1..75: mol_type = other DNA
agccaattgccgaaatgatgtatccggatccagcagtagaggaattaaaggctattgctgacaaaatgcgcttaa

SEQ ID NO: 408081 - DNA, 75 bp, synthetic construct
  source 1..75: mol_type = other DNA
tggatggccctgccttataccctcgtactgaccctcgtcgggctgttttgcgttgagtttacgcttgcacctgta

SEQ ID NO: 408082 - DNA, 75 bp, synthetic construct
  source 1..75: mol_type = other DNA
tgtttttctcggtagtcgcggtgattatcgaccaacaactgttttcgccgattattcagtttgtgttgcaggcat

SEQ ID NO: 408083 - DNA, 75 bp, synthetic construct
  source 1..75: mol_type = other DNA
acgtcaggataaaattcgtctgattgttcaggcgattatcggcatctggctggtgattgcgctggcattgcacct

SEQ ID NO: 408084 - DNA, 75 bp, synthetic construct
  source 1..75: mol_type = other DNA
tgctggctggctgttggtagcggaatttattttcaccctggcgatggcgctcaaatgctatccgctactgcctgg

SEQ ID NO: 408085 - DNA, 75 bp, synthetic construct
  source 1..75: mol_type = other DNA
tgacctctgcactcgcgccattgattcgcctctcttatggccgcatggtgtggatggccctgccttacaccctcg

SEQ ID NO: 408086 - DNA, 75 bp, synthetic construct
  source 1..75: mol_type = other DNA
tctgccctctgtcgctacgccgaacggtcaggctgcgttcctgttcctgctgacctctgcactcgcgccattgat

SEQ ID NO: 408087 - DNA, 75 bp, synthetic construct
  source 1..75: mol_type = other DNA
tataacggcatgggaagcgtgctgttaccgtggggtatgtctgccgagcaatttgataaacaagttgatcaggcc

SEQ ID NO: 408088 - DNA, 75 bp, synthetic construct
  source 1..75: mol_type = other DNA
ggtaaaccgtctgatcaagctgaagatcttctggatacattagcgttgaatcttccggtcgagttgggaaataca

SEQ ID NO: 408089 - DNA, 75 bp, synthetic construct
  source 1..75: mol_type = other DNA
cgcaccgtccgcttcctgtccaacggcgtgtataacccagcgaagaacgccccgaccactaaggtgaaaggcggt

SEQ ID NO: 408090 - DNA, 75 bp, synthetic construct
  source 1..75: mol_type = other DNA
atgggatctgaaatcagtaaaaaagatatcacccgtctgggtgatgcgccgcgcgataaatgcactctatcttgt

SEQ ID NO: 408091 - DNA, 75 bp, synthetic construct
  source 1..75: mol_type = other DNA
aagcagcgatctgctgaataaccctgaaacaggtttgcttaacctgaaagggaaaaatgctattggaaaaggcca

SEQ ID NO: 408092 - DNA, 75 bp, synthetic construct
  source 1..75: mol_type = other DNA
cagatcgaacaactggctatgtcgctgccggatgaacaggcccgtaatgctttcatgcaacaggcgcagcagcag

SEQ ID NO: 408093 - DNA, 75 bp, synthetic construct
  source 1..75: mol_type = other DNA
tagtggctattccgatcgtgctcgaggtatacgcaacaataaccccggcaatcttgaatacagcaaaactaatcc

SEQ ID NO: 408094 - DNA, 75 bp, synthetic construct
  source 1..75: mol_type = other DNA
ttatgaacaatgccgtcacaggtacggcgttcgtgagttatcaaaatccccagcagcgggatttcgtctttaata

SEQ ID NO: 408095 - DNA, 75 bp, synthetic construct
  source 1..75: mol_type = other DNA
gccgtaatgcggcaaggtccgatggaagggatatcctcactggctgacattgaagactttttgcagcagcactga

SEQ ID NO: 408096 - DNA, 75 bp, synthetic construct
  source 1..75: mol_type = other DNA
ccattggaacaagtgatggatgatgacgacagaattatgctggaaaagcagttacaggcgttaccgaaagagact

SEQ ID NO: 408097 - DNA, 75 bp, synthetic construct
  source 1..75: mol_type = other DNA
taatttcctacgcccagagccggaatattttgtgcatcatgaggcaaatgaaaacgcgcatcgtcagcgggtcga

SEQ ID NO: 408098 - DNA, 75 bp, synthetic construct
  source 1..75: mol_type = other DNA
gcgcagagttccgccctgactttcagctaattgcccctatgattcgctcactgaaagccatgggcaaatgccgtt

SEQ ID NO: 408099 - DNA, 75 bp, synthetic construct
  source 1..75: mol_type = other DNA
actgacaacagaagtgcaatttatgctttccctggtcagatttacatcccaaaagatgtaaccatcaggtgtaat

SEQ ID NO: 408100 - DNA, 75 bp, synthetic construct
  source 1..75: mol_type = other DNA
atttgcggtctgttaacgtgcctgttggtagagaaactgcgttggtttggctatggcgaaacgctgccggagaaa

SEQ ID NO: 408101 - DNA, 75 bp, synthetic construct
  source 1..75: mol_type = other DNA
gatttaaccactcgcgaagcagtagaaaaccgccctgaagttcatcgtcgctatttggacattcagttcctggcg

SEQ ID NO: 408102 - DNA, 75 bp, synthetic construct
  source 1..75: mol_type = other DNA
caaggcaagtagattataacggatatacttttttatcaggcattaaagaatatcaagactattgtattttgttga

SEQ ID NO: 408103 - DNA, 75 bp, synthetic construct
  source 1..75: mol_type = other DNA
ttgttgatgttgccaatgatcttctgaaaaggagtatagatcatttttcagtagagcatgaaaatgttatcaact

SEQ ID NO: 408104 - DNA, 75 bp, synthetic construct
  source 1..75: mol_type = other DNA
gatttaaccacacgcgaggtgccggaaaaccgcccggaagtgcatcgtcgctatatcgatattcagtttctggca

SEQ ID NO: 408105 - DNA, 75 bp, synthetic construct
  source 1..75: mol_type = other DNA
aacatgaatcatttatagaaatgataccgggcagctacgctattttcttcccgcaggatgttcaccgaccaggtt

SEQ ID NO: 408106 - DNA, 75 bp, synthetic construct
  source 1..75: mol_type = other DNA
ctaatccgtgccgtttgcccgccgccattgaaaaggcgctcgattttctgcgcaccaccgacttcaacgccctgg

SEQ ID NO: 408107 - DNA, 75 bp, synthetic construct
  source 1..75: mol_type = other DNA
atgaggattgcggatgatgatggttatcccgtatggggtaatattccgccactggaacatgaagaactgataaaa

SEQ ID NO: 408108 - DNA, 75 bp, synthetic construct
  source 1..75: mol_type = other DNA
attcgctcccatgcagatggcctgcccatctgggaagatgccccgcctatgactgaagaagaacttattctgaaa

SEQ ID NO: 408109 - DNA, 75 bp, synthetic construct
  source 1..75: mol_type = other DNA
atggctggattatctggacgcactggaactggtcgatacttccggtgcgccagatattgaatggcctacgcctcc

SEQ ID NO: 408110 - DNA, 75 bp, synthetic construct
  source 1..75: mol_type = other DNA
aaaacttgaaagaaagtgagtttataagatatatagaaaacaatcctgttgtctcaacggctttatgcgaaaaat

SEQ ID NO: 408111 - DNA, 75 bp, synthetic construct
  source 1..75: mol_type = other DNA
gagcatagattatttttcagtagaacatgaaaatgttattaactgttttaatatcttaaaagaaaagttcccatc

SEQ ID NO: 408112 - DNA, 75 bp, synthetic construct
  source 1..75: mol_type = other DNA
gaacagtaaacaatggcctggtaaagcggctattggccggctgaaaggggaggaactggcgcaatataatttgtg

SEQ ID NO: 408113 - DNA, 75 bp, synthetic construct
  source 1..75: mol_type = other DNA
ccgcaggatgttcatcgcccggcatgtaataaaaatgccactacggcaatacgcaagatcgtggttaaagtggcc

SEQ ID NO: 408114 - DNA, 75 bp, synthetic construct
  source 1..75: mol_type = other DNA
ggcagcacggcaggacaaagatacttaaaggtgaatttatgaactctgacattaaaacgctgagcatatcaggcg

SEQ ID NO: 408115 - DNA, 75 bp, synthetic construct
  source 1..75: mol_type = other DNA
tctgaccgtattaagaaggcatggtcacataaacgacaacagtttgaacaagacggtacaaagataaccggtaat

SEQ ID NO: 408116 - DNA, 75 bp, synthetic construct
  source 1..75: mol_type = other DNA
aagattttatcgataatacttcatgtaaattaaaaaacgaaagaaaacaccgtgctggaagattacagagagtgt

SEQ ID NO: 408117 - DNA, 75 bp, synthetic construct
  source 1..75: mol_type = other DNA
ttctttcagatgaaccgggaacgcttgcatggtatccggctaacagcacagcggaacaggtgacaatcatcaacg

SEQ ID NO: 408118 - DNA, 75 bp, synthetic construct
  source 1..75: mol_type = other DNA
atttgcgtggtatccggtagatgaaagttccgggcatgaaataatcagtaaaaacgatggggcaaagcatgacta

SEQ ID NO: 408119 - DNA, 75 bp, synthetic construct
  source 1..75: mol_type = other DNA
cagcgcagtgacaatgccgacaacctgttgcacattgaaaatatcgcccttatgccgtaatgccgatcagttaag

SEQ ID NO: 408120 - DNA, 75 bp, synthetic construct
  source 1..75: mol_type = other DNA
cgcacagcgtaatgtgcgcctgaccccacagcgcctcgaagtgttgcgcctgatgagtctgcaggatggcgctat

SEQ ID NO: 408121 - DNA, 75 bp, synthetic construct
  source 1..75: mol_type = other DNA
cgcaagaatcagcgcacatggtacagcaagccacgcagtgaaatgggggtgacttgtgttggtcgccagaaaatg

SEQ ID NO: 408122 - DNA, 75 bp, synthetic construct
  source 1..75: mol_type = other DNA
gaaacacgaaaagccgaagtcctgaatcgtacgatggggtgtgtcggcaaggtggttggtgcactgctcactgtt

SEQ ID NO: 408123 - DNA, 75 bp, synthetic construct
  source 1..75: mol_type = other DNA
tgaaagcaacctgcaacgtattgagcgcaagaatcagcgcacatggtacagcaagccacgcagtgaaatgggggt

SEQ ID NO: 408124 - DNA, 75 bp, synthetic construct
  source 1..75: mol_type = other DNA
gcaagccacgcagtgaaatgggtgtgacttgtgttggtcgccagaaaattaaattaggcagcaaaccactgtatg

SEQ ID NO: 408125 - DNA, 75 bp, synthetic construct
  source 1..75: mol_type = other DNA
tatccttgaccgtgcccgtaatgctgaaaatatcgtgcatgaaattaatcgtcttcataaaaagcgagaagctct

SEQ ID NO: 408126 - DNA, 75 bp, synthetic construct
  source 1..75: mol_type = other DNA
ccattgggatggggactgttttctttatctcgacaaagatgctacatgccaatagttcaagtagtgttattatat

SEQ ID NO: 408127 - DNA, 75 bp, synthetic construct
  source 1..75: mol_type = other DNA
ggtcatacattagaacgctctcagcgcgaacttaatcgccgcagggcgacggcttttgccgagtatgtagtgaac

SEQ ID NO: 408128 - DNA, 75 bp, synthetic construct
  source 1..75: mol_type = other DNA
ggtaataacccgctaattatcgatgaggtggcggatatcgatgccgctgtccatctgaccattcagtcggcgttt

SEQ ID NO: 408129 - DNA, 75 bp, synthetic construct
  source 1..75: mol_type = other DNA
ctgaacgtcaggccgttgtcgaacgctttgccggattgctggaaaggaataaaggcgaattaaccgcaatcattg

SEQ ID NO: 408130 - DNA, 75 bp, synthetic construct
  source 1..75: mol_type = other DNA
gattcggatggcgaacaacacccgcttcggactctcttgcggtctggtttcccccgagcgggaaaaattcgatca

SEQ ID NO: 408131 - DNA, 75 bp, synthetic construct
  source 1..75: mol_type = other DNA
cattaagagtaattgttgtcctggggatgttattcctgctgataatgattgcgggtggtatgtgccgttatcttc

SEQ ID NO: 408132 - DNA, 75 bp, synthetic construct
  source 1..75: mol_type = other DNA
tattggtttcgggatggagttattttttctcgccgatcgggttcatccggcattaagagtaatcgttggcctggg

SEQ ID NO: 408133 - DNA, 75 bp, synthetic construct
  source 1..75: mol_type = other DNA
atcgccgctgggcggctggcattctggacagagctcgtttttatgggttacagaacgagcaaagcgctgatggaa

SEQ ID NO: 408134 - DNA, 75 bp, synthetic construct
  source 1..75: mol_type = other DNA
aacatcgcgtatgaccagacgaatgtcatcggacagatagtcaaacgtgccatcctgaataaccccgtactggct

SEQ ID NO: 408135 - DNA, 75 bp, synthetic construct
  source 1..75: mol_type = other DNA
aacagatgctggaattactgcgccaacgcggagcgcaatatccggcggaacacaatgtcggccatctgtataaag

SEQ ID NO: 408136 - DNA, 75 bp, synthetic construct
  source 1..75: mol_type = other DNA
aatggatcttgacgagcaggggtattcagaagcagagatagttcatagtgttcgtgaattagttggtgatgagca

SEQ ID NO: 408137 - DNA, 75 bp, synthetic construct
  source 1..75: mol_type = other DNA
cgcgaaaccggtcaggcactcagcgctctggaagatcttgacggtttgctgtttaccggtagcgctaataccggc

SEQ ID NO: 408138 - DNA, 75 bp, synthetic construct
  source 1..75: mol_type = other DNA
aacaggtttataccctggccagaaatggtagttatcgtccggttggctccagcgatctgtttcgtgaactgagcg

SEQ ID NO: 408139 - DNA, 75 bp, synthetic construct
  source 1..75: mol_type = other DNA
ccgatgggcaactatttccactcgctgatgaccactgcaccgctcactggtgcgattggatttatcattattatg

SEQ ID NO: 408140 - DNA, 75 bp, synthetic construct
  source 1..75: mol_type = other DNA
accctgcacattatgaccgcttacgcaaagagggtattactctggcgctaagtccagtacgccttggacgcaatc

SEQ ID NO: 408141 - DNA, 75 bp, synthetic construct
  source 1..75: mol_type = other DNA
ctggtggggtaagtcaatcattctgataatgtgtattgtcgtcgcgataacagaagtgtttgtctttattgagcc

SEQ ID NO: 408142 - DNA, 75 bp, synthetic construct
  source 1..75: mol_type = other DNA
ggtagccgttaatcaggccggattgacgctggtgagtaccagttggatcaaagaacttaatgttgaattacttaa

SEQ ID NO: 408143 - DNA, 75 bp, synthetic construct
  source 1..75: mol_type = other DNA
tatgatgcgttatccgggggcgctgctggcgcgttatcaccgtagtgactttgccgcgctgttgccgcaccggac

SEQ ID NO: 408144 - DNA, 75 bp, synthetic construct
  source 1..75: mol_type = other DNA
atgccgctgtccatctgaccattcagtcggcatttgtcactgccgggcaacgctgcacctgcgcccgccgtttat

SEQ ID NO: 408145 - DNA, 75 bp, synthetic construct
  source 1..75: mol_type = other DNA
aagcctggagtcagactcgttaacgttgcccaccacgcttaacccaggtctggatttttccgaggaggtggagcg

SEQ ID NO: 408146 - DNA, 75 bp, synthetic construct
  source 1..75: mol_type = other DNA
gtttaccggtagcgctaataccggctaccagttgcaccgccagctttccggtcagccggaaaagattctcgccct

SEQ ID NO: 408147 - DNA, 75 bp, synthetic construct
  source 1..75: mol_type = other DNA
ctttacccgcgcattttgaactggcagttcaaaaacttgagcagttatccgcgcagctaaagccagcagaaatca

SEQ ID NO: 408148 - DNA, 75 bp, synthetic construct
  source 1..75: mol_type = other DNA
gccgcacagcaggtggttactgcctggcaagaactggaagcgatgggcggacgaaccctgcttgcgccacgttta

SEQ ID NO: 408149 - DNA, 75 bp, synthetic construct
  source 1..75: mol_type = other DNA
gtcagccggaaaaaatcctcgccctcgaaatgggcggcaataacccgctgattattgatgacgtggcggatatcg

SEQ ID NO: 408150 - DNA, 75 bp, synthetic construct
  source 1..75: mol_type = other DNA
gtgaaccagcaaaccagaataagcgataagagcctggccagactgattgccgatgcggacaaggtgctggatcgg

SEQ ID NO: 408151 - DNA, 75 bp, synthetic construct
  source 1..75: mol_type = other DNA
tattcagtaccagggtaaaaacggtagcccgtctggcgagggtatgactggtgtgaccaacaatggtcgtgatgc

SEQ ID NO: 408152 - DNA, 75 bp, synthetic construct
  source 1..75: mol_type = other DNA
gccatggcaatcagcttaatagaacaaaacgtcggtattggttatattccacatcatctggcattgccgttattg

SEQ ID NO: 408153 - DNA, 75 bp, synthetic construct
  source 1..75: mol_type = other DNA
ccagctgggcggtttctacaacctgccacacggtgtatgtaatgctgttctgctgccacacgttcaggtgttcaa

SEQ ID NO: 408154 - DNA, 75 bp, synthetic construct
  source 1..75: mol_type = other DNA
gtcacggtccggcggaaggatcgattgaagccagcctgactgtgctcgcagaaatgcagcaacaaggtctggtga

SEQ ID NO: 408155 - DNA, 75 bp, synthetic construct
  source 1..75: mol_type = other DNA
aattcggcagtacttgaaccgccccgggtttcctggagagtgttttatctgtgaactcaggctgccagatcatcg

SEQ ID NO: 408156 - DNA, 75 bp, synthetic construct
  source 1..75: mol_type = other DNA
tctatcacttatgattacgaaggcttcggtatcggtgctgcagtttccagctccaaacgtacctgggatcagaac

SEQ ID NO: 408157 - DNA, 75 bp, synthetic construct
  source 1..75: mol_type = other DNA
cctgaatgtgaaagatgaagatataccggaactggccagaaatgcgctgaaagatgcctgtgggctgacgaaccc

SEQ ID NO: 408158 - DNA, 75 bp, synthetic construct
  source 1..75: mol_type = other DNA
accggatattaccacctacctgctcggctctaacgccgctgccgtagtacgtcatgcagagtgttcagtgctggt

SEQ ID NO: 408159 - DNA, 75 bp, synthetic construct
  source 1..75: mol_type = other DNA
cccgctcccctatcgccgttggttatgccattgagtccgcaatttcctttacggataactacgggctgggcatcc

SEQ ID NO: 408160 - DNA, 75 bp, synthetic construct
  source 1..75: mol_type = other DNA
ccagctaggcggtttctacaacctgccgcacggcgtatgcaatgccgttctgctgccgcatgttcaggtgttcaa

SEQ ID NO: 408161 - DNA, 75 bp, synthetic construct
  source 1..75: mol_type = other DNA
cttctgtaaatatgctgggagtgggagcgctgtcggctgcaaccggaatgatggtggagtatggtttccgacgga

SEQ ID NO: 408162 - DNA, 75 bp, synthetic construct
  source 1..75: mol_type = other DNA
cgaagtcactgaccgccgcaacgggtatggatgccttaacgcacgctatcgaagcgtatgtttctattgccgcca

SEQ ID NO: 408163 - DNA, 75 bp, synthetic construct
  source 1..75: mol_type = other DNA
ggacgtactggatgtggttaacctgcgcgttatgatgggggatggtcatggcccagcggaaggatcgattgaagc

SEQ ID NO: 408164 - DNA, 75 bp, synthetic construct
  source 1..75: mol_type = other DNA
tccgctgctacaatccgaacgcagccaaagaacaacgttattcagcactgagtaacatcagagaacatgatttac

SEQ ID NO: 408165 - DNA, 75 bp, synthetic construct
  source 1..75: mol_type = other DNA
gttacaccatcaagaaagcggaagagagcctgggcgttgaactgttcattcgtaagggacgctatattgaattat

SEQ ID NO: 408166 - DNA, 75 bp, synthetic construct
  source 1..75: mol_type = other DNA
ttattcatctggtcgccagacaccagagcattaccaccgcagccgagcagttaaataaagtcccttccgctatca

SEQ ID NO: 408167 - DNA, 75 bp, synthetic construct
  source 1..75: mol_type = other DNA
gtaaataaaaagcataattataataaaaatgtcattatattaattcttggtttacttcttttgggtgcaatgaac

SEQ ID NO: 408168 - DNA, 75 bp, synthetic construct
  source 1..75: mol_type = other DNA
cttgcttgtggtttgatatttaataaggaaattgataggcgaattaattcattaaaagctgatgttatttcatat

SEQ ID NO: 408169 - DNA, 75 bp, synthetic construct
  source 1..75: mol_type = other DNA
ggggagctgtatgtgaaattttatttgatgaagaacaagttgttttttatgatggcatgccggaaatagcatcac

SEQ ID NO: 408170 - DNA, 75 bp, synthetic construct
  source 1..75: mol_type = other DNA
accgggatggcgtggatgcgctgattacaacactggatcgccgtatcagtgtaagcgactcgtcagaaccgtatt

SEQ ID NO: 408171 - DNA, 75 bp, synthetic construct
  source 1..75: mol_type = other DNA
cgctggaaggcctggtcatggggactcgttccggcgacatcgatccggcgatcattttccacctgcacgacaccc

SEQ ID NO: 408172 - DNA, 75 bp, synthetic construct
  source 1..75: mol_type = other DNA
cactgcgctgatggatggtcgtctggacgctgttgtattcaccggtggtatcggtgaaaatgccgcgatggttcg

SEQ ID NO: 408173 - DNA, 75 bp, synthetic construct
  source 1..75: mol_type = other DNA
gctacggcaatcgccttaatagaacaaaacgtcggtattggttatattccacatcatctggcattgccgttattg

SEQ ID NO: 408174 - DNA, 75 bp, synthetic construct
  source 1..75: mol_type = other DNA
aacgaccccgctgggaacccgtgtaatgttgccggaatacggcagcaaattatttgacctcgttgataatcccac

SEQ ID NO: 408175 - DNA, 75 bp, synthetic construct
  source 1..75: mol_type = other DNA
accgtcagaactcagaaaatcactgacatgggacagatgtcacgaacggtgcaatagtgatccacacccaacgcc

SEQ ID NO: 408176 - DNA, 75 bp, synthetic construct
  source 1..75: mol_type = other DNA
gtggagagtgggttaaccgaccgcgtgctcgacgacccgcatcatccgtatacacagctgctggtgtcatcggtt

SEQ ID NO: 408177 - DNA, 75 bp, synthetic construct
  source 1..75: mol_type = other DNA
gctggtgatgaagcaggggcaagtggtggagagtgggttaaccgaccgcgtgctcgacgacccgcatcatccgta

SEQ ID NO: 408178 - DNA, 75 bp, synthetic construct
  source 1..75: mol_type = other DNA
tggaatttttatcagtatccgttaaatccggttcagtatatagattcaatgggactggcatctaaatatggacac

SEQ ID NO: 408179 - DNA, 75 bp, synthetic construct
  source 1..75: mol_type = other DNA
ccgactcgctgccggagtgttttgaagtgaccgcctggagcgagacccacgagattatggggattcgccatcgcc

SEQ ID NO: 408180 - DNA, 75 bp, synthetic construct
  source 1..75: mol_type = other DNA
ccgggatctcccttgacgttattcgccactatgccgggcgcttgccgattcttggcgtctgcctcggtcatcagg

SEQ ID NO: 408181 - DNA, 75 bp, synthetic construct
  source 1..75: mol_type = other DNA
gctcacgctcctcccgtttgcagcagttgatgcgcggcgacgaaggctatttgctggcgctggcctactccaccc

SEQ ID NO: 408182 - DNA, 75 bp, synthetic construct
  source 1..75: mol_type = other DNA
tgcgccaaaagttgatggtgagatcaaggtctcttttgtgaattcgcctccgggtatgcgggttatggaaacgcg

SEQ ID NO: 408183 - DNA, 75 bp, synthetic construct
  source 1..75: mol_type = other DNA
ttacatttaataccacaccatttgccatcattagcgttctggcgctgatcgcttgtgccggggtgattgtgctgc

SEQ ID NO: 408184 - DNA, 75 bp, synthetic construct
  source 1..75: mol_type = other DNA
ggtggttgatgaagatgtttgtatcggctgccgctactgccacatggcttgtccgtacggcgcaccacagtacaa

SEQ ID NO: 408185 - DNA, 75 bp, synthetic construct
  source 1..75: mol_type = other DNA
acagttccggtgacacggtcgatgccattaactcggcgcagtggggcgcgggtgcttatgatgcttatgggacgg

SEQ ID NO: 408186 - DNA, 75 bp, synthetic construct
  source 1..75: mol_type = other DNA
ctggcaaagttgcgaaaactgactgacgttaagcgaactaatgtacttaaggcaatatttggtgatgatgccgaa

SEQ ID NO: 408187 - DNA, 75 bp, synthetic construct
  source 1..75: mol_type = other DNA
cagaagacatgatggggctgttcgacactatccagaaggcgttttatctgggcgtggacgataccaacatgttgt

SEQ ID NO: 408188 - DNA, 75 bp, synthetic construct
  source 1..75: mol_type = other DNA
agtgggatctggaaggtgtgcagttccatccagaaagtattcttagcgaacaaggacatcaactgctggctaatt

SEQ ID NO: 408189 - DNA, 75 bp, synthetic construct
  source 1..75: mol_type = other DNA
tcaccatcaccgacagcctgaaccgccgtgaagtgctgcacacgcagggcgaagccgggctgaagcgggtggtga

SEQ ID NO: 408190 - DNA, 75 bp, synthetic construct
  source 1..75: mol_type = other DNA
cgacgcagtgtgtggtctttgaagatgccgatttcggtattcaggcggcccgtgcagcaggcatggacgcgtgga

SEQ ID NO: 408191 - DNA, 75 bp, synthetic construct
  source 1..75: mol_type = other DNA
cgcacaaaggcgaacgccggccgttacgccgggaggctctcaacccgctcgcttcgttccggtgggcccgggcat

SEQ ID NO: 408192 - DNA, 75 bp, synthetic construct
  source 1..75: mol_type = other DNA
gcgctgccctctacttgctctgcctgccggcgctgcgtcgcgggctttggagaaattcttcaaattcccgttgca

SEQ ID NO: 408193 - DNA, 75 bp, synthetic construct
  source 1..75: mol_type = other DNA
catcaccggggcgactggggcggtagccggcgcttatattgccgatatcactgatggcgatgagcgcgcgcggca

SEQ ID NO: 408194 - DNA, 75 bp, synthetic construct
  source 1..75: mol_type = other DNA
tactcagtgataacggcggcagaagcctgtattttgagcacctgtttcccggtgaggacggttacagccgcagcg

SEQ ID NO: 408195 - DNA, 75 bp, synthetic construct
  source 1..75: mol_type = other DNA
ccggcattcgctgcgcttatggcagagcagggaaaggaattgccgggctatgtgcaacgggaatttgaagaattt

SEQ ID NO: 408196 - DNA, 75 bp, synthetic construct
  source 1..75: mol_type = other DNA
atgttttttattgagaatgaaggtcaggctgtcgccggaacggattactggcagtctgtacaggcgcaggccgga

SEQ ID NO: 408197 - DNA, 75 bp, synthetic construct
  source 1..75: mol_type = other DNA
ccgcgcgcgctgcgttacatgacctgatgatgggaaagcgcgtggcgacggtacagaaagacggtcgaagagtgg

SEQ ID NO: 408198 - DNA, 75 bp, synthetic construct
  source 1..75: mol_type = other DNA
cgcttatattgccgatatcactgatggcgatgagcgcgcgcggcacttcggcttcatgagcgcctgtttcgggtt

SEQ ID NO: 408199 - DNA, 75 bp, synthetic construct
  source 1..75: mol_type = other DNA
aaagatgtttttttttatgaaagcccaacatcaacccacaatgacataatggggggcgggggaatgtcatatgcc

SEQ ID NO: 408200 - DNA, 75 bp, synthetic construct
  source 1..75: mol_type = other DNA
aagaattctccaaagcccgcgacgcagcgccggcaggcagagcaagtagagggcagcgcctgcaatccatgccca

SEQ ID NO: 408201 - DNA, 75 bp, synthetic construct
  source 1..75: mol_type = other DNA
ttgcctctgtcatgcacctgggatcgccactgcgggcgtttaactcgctgaatcgaatcggagcttctggtctga

SEQ ID NO: 408202 - DNA, 75 bp, synthetic construct
  source 1..75: mol_type = other DNA
gcccgttgtataatgcgctgtaccgggaagattttaagcccacaaggcagcccaagacgaagactctgcagttgc

SEQ ID NO: 408203 - DNA, 75 bp, synthetic construct
  source 1..75: mol_type = other DNA
caggtacagccgataaaaccatacaactgcaggcgctggagtacagtctgatttattccctgttcccgctgtata

SEQ ID NO: 408204 - DNA, 75 bp, synthetic construct
  source 1..75: mol_type = other DNA
cccgggaggcgtatctgtcactggggatacggcagtcgctctatggcatggaggaccgcccgacggtctatgtcc

SEQ ID NO: 408205 - DNA, 75 bp, synthetic construct
  source 1..75: mol_type = other DNA
gttcaggaagtgaagggactggaatacgaaacggtgatcctccacaacatggtcagcggcgcccggcaggcgttt

SEQ ID NO: 408206 - DNA, 75 bp, synthetic construct
  source 1..75: mol_type = other DNA
ttttctgaggctgaatcacgggcagtatattctgaatccggggcttaaaatcagacgaggtgacgtatggtatgc

SEQ ID NO: 408207 - DNA, 75 bp, synthetic construct
  source 1..75: mol_type = other DNA
gtccaggaggttaaggggctggaatacgagacggtgattctctacaacatgatcagcggtgcccggcaggtgttt

SEQ ID NO: 408208 - DNA, 75 bp, synthetic construct
  source 1..75: mol_type = other DNA
tgcaaggtttgtcataaatattttatccttatcctcacggtgatgaacaatctgacgattaactacggtactgaa

SEQ ID NO: 408209 - DNA, 75 bp, synthetic construct
  source 1..75: mol_type = other DNA
atgaacgatgtgcaaaatcgtagaatactggcattacttgatatgctgtataataccctgggcaataaaaccaca

SEQ ID NO: 408210 - DNA, 75 bp, synthetic construct
  source 1..75: mol_type = other DNA
cctggagcgtgtccaacaacgtatgcgtattttcatgaaaggagatcactcaataacttccatcgagatcgggta

SEQ ID NO: 408211 - DNA, 75 bp, synthetic construct
  source 1..75: mol_type = other DNA
gtgcagcgactggttgccccgcaaccagtcgctgcactgggatctgcccataccctgtatgaggagttcaggggc

SEQ ID NO: 408212 - DNA, 75 bp, synthetic construct
  source 1..75: mol_type = other DNA
cgtggctatcgtgaaggctggcgcgatcgtgacgatcatcgtggaaaaggccgcggacatggacaccgccattaa

SEQ ID NO: 408213 - DNA, 75 bp, synthetic construct
  source 1..75: mol_type = other DNA
ctactgccatcgatcaaattacaaattggcgatcgcgatcattacggtaattactgggacggtggtcactggcga

SEQ ID NO: 408214 - DNA, 75 bp, synthetic construct
  source 1..75: mol_type = other DNA
tttttatcaatgcgctgtatgttgcgttcacccgtgccacgcacaacgtgtatcttgttgaacagcaggtggcgc

SEQ ID NO: 408215 - DNA, 75 bp, synthetic construct
  source 1..75: mol_type = other DNA
gacgctgagcgtgccgatgccaccattcgagtctgggtgcgttttcgtacagatatctcagcttcttcccgcctg

SEQ ID NO: 408216 - DNA, 75 bp, synthetic construct
  source 1..75: mol_type = other DNA
ggcgtgtactgaatatcatcgggcaaccgctgccagatgccgccaggacacgccttgaaattctttgtagtgagg

SEQ ID NO: 408217 - DNA, 75 bp, synthetic construct
  source 1..75: mol_type = other DNA
ttccggcatggaggacgacggatgcttcaaaactggacgaacttatgctgacgagcattacaaaaaatcgcgcat

SEQ ID NO: 408218 - DNA, 75 bp, synthetic construct
  source 1..75: mol_type = other DNA
gacttacagaatattttatttttttgccttcaaaaagaaatatttatctacagctaccatccagcttcaaggata

SEQ ID NO: 408219 - DNA, 75 bp, synthetic construct
  source 1..75: mol_type = other DNA
ccatcagcgtcatgatggatcagatggggatgaacggggagtcggcaggtaatgccctgcgaaaagttatccagt

SEQ ID NO: 408220 - DNA, 75 bp, synthetic construct
  source 1..75: mol_type = other DNA
ggtgctgaaatgtccgaggttacatttcgtatgtggatacgttaccgctctgacgtaaccagcgccagccggatc

SEQ ID NO: 408221 - DNA, 75 bp, synthetic construct
  source 1..75: mol_type = other DNA
aaagggatgctgaatcagcaactgaaaacgcaaacgcagttgcaacagcagcatttagaaaaccagataaacaat

SEQ ID NO: 408222 - DNA, 75 bp, synthetic construct
  source 1..75: mol_type = other DNA
gcatatgttgctggagaggagaaacggcgacatgctgaatcagcccggcacgccgcagcctgatataccgttgaa

SEQ ID NO: 408223 - DNA, 75 bp, synthetic construct
  source 1..75: mol_type = other DNA
gcagcaaatgctgcccaacaccaacggcgggatgttaaacagcaaccgtaatccggatagttcgttgaatcagca

SEQ ID NO: 408224 - DNA, 75 bp, synthetic construct
  source 1..75: mol_type = other DNA
aagtcgcactgccgcctgatgctgtgctgaccgtgacactttctgacgcgtcgttagccgatgcaccgtcaaaag

SEQ ID NO: 408225 - DNA, 75 bp, synthetic construct
  source 1..75: mol_type = other DNA
ctccctgtactgacagcatcataaacagtattgcatcaggcgttttcaccaaagagggtcagcatgatgagaaca

SEQ ID NO: 408226 - DNA, 75 bp, synthetic construct
  source 1..75: mol_type = other DNA
agtgcatttctcggtatgttgggaaatacatcagtaagcatttcgaagctaggcaacatcgtgataagggcgttc

SEQ ID NO: 408227 - DNA, 75 bp, synthetic construct
  source 1..75: mol_type = other DNA
atgggtttgatgcgctgcgccgtcaggttccggtgcgctattcggtacgtggcggtaaggtgattgccagcaccc

SEQ ID NO: 408228 - DNA, 75 bp, synthetic construct
  source 1..75: mol_type = other DNA
ttattaacgcccggttacccggcaaagaggggctgtggcagattcatctgcaggacggaaaaatcagcgccattg

SEQ ID NO: 408229 - DNA, 75 bp, synthetic construct
  source 1..75: mol_type = other DNA
ggcggcaaggtgattgccagtacacaaccggcacaaaccaccgtatatctggagcagccagaagccatcgattac

SEQ ID NO: 408230 - DNA, 75 bp, synthetic construct
  source 1..75: mol_type = other DNA
agaccgcaaagccaaaagacaaaaactacaaaatggccgatggcggtggtttgtatctcgaggtttcggccaagg

SEQ ID NO: 408231 - DNA, 75 bp, synthetic construct
  source 1..75: mol_type = other DNA
atattgttcctctcagtcggaaggctatggttttattagagcagctcaagcaaattagtggtgataaagagctac

SEQ ID NO: 408232 - DNA, 75 bp, synthetic construct
  source 1..75: mol_type = other DNA
cgacattcccccgctttaccctcaagccgattccctgagtttcttgcacgtcttgctgcatatcgtggccgtgta

SEQ ID NO: 408233 - DNA, 75 bp, synthetic construct
  source 1..75: mol_type = other DNA
agactgcaaagccgaaagagaaagcctataaaatggctgatggaggcggcttgtatcttgaagtctcccctaaag

SEQ ID NO: 408234 - DNA, 75 bp, synthetic construct
  source 1..75: mol_type = other DNA
actcaaatccggccagtgatatggctggtgcgttatctacaaccaaagtgcgacattaccctgcgttaccttcca

SEQ ID NO: 408235 - DNA, 75 bp, synthetic construct
  source 1..75: mol_type = other DNA
catgatttaaatgaagatgcggaatttgatgagaacggagttgaggtttttgacgaaaaggccttagtagaatag

SEQ ID NO: 408236 - DNA, 75 bp, synthetic construct
  source 1..75: mol_type = other DNA
atgcactcttataacggggcgtatacttcgcgcttgttccgcttgctgaaaatgtccggcattaactttgttgcc

SEQ ID NO: 408237 - DNA, 75 bp, synthetic construct
  source 1..75: mol_type = other DNA
cgttgtggtcagtgttgcgcccaggcggcgtgttgtcattaatgttctacaatgcgcacggcttgctgatgcata

SEQ ID NO: 408238 - DNA, 75 bp, synthetic construct
  source 1..75: mol_type = other DNA
gcgagatgaagccaaaaagttggtatctgatggtatcgatccttccgagaagaaaaaagcagacaaaatcgagca

SEQ ID NO: 408239 - DNA, 75 bp, synthetic construct
  source 1..75: mol_type = other DNA
attaaaaaagttgatgccagtggtaaacacgacgtcgctcagcgcctacaacagcgcgtcacggccattatgcgt

SEQ ID NO: 408240 - DNA, 75 bp, synthetic construct
  source 1..75: mol_type = other DNA
ccatttatctgctgttccttcacattcaaactcagcctgatatccggaatcaatatatcgcgccaggtagtgtga

SEQ ID NO: 408241 - DNA, 75 bp, synthetic construct
  source 1..75: mol_type = other DNA
aatggttcaatggtgggctgattatattgataaaaatcgtttttgttatataacaccatatgactttgctaaaat

SEQ ID NO: 408242 - DNA, 75 bp, synthetic construct
  source 1..75: mol_type = other DNA
attaaaaaagttgatgccagtggtaagcatgacgttgcgcagcgtcttcaacaacgtgtcacggctgtaatgcgt

SEQ ID NO: 408243 - DNA, 75 bp, synthetic construct
  source 1..75: mol_type = other DNA
cacaggcatttgaagatgcccgcgaccgcatcattgctgcggaaatgccgaaacagctggggtatgcactgaaac

SEQ ID NO: 408244 - DNA, 75 bp, synthetic construct
  source 1..75: mol_type = other DNA
attgttttcaagctaaaagattgcctatcgtcagaggatgctccacattatttaagatttcgagttaaactcaac

SEQ ID NO: 408245 - DNA, 75 bp, synthetic construct
  source 1..75: mol_type = other DNA
gctcggcacggcgcgcgtcaggctctcgcgtaaaaaaggggccagaaacggagcgggcagcgtccttaaaatcgg

SEQ ID NO: 408246 - DNA, 75 bp, synthetic construct
  source 1..75: mol_type = other DNA
ggtacgtatttacccggaatttgctggcctgttccgcactcaattgcgggcgattttgcgcgctgccagtttcgg

SEQ ID NO: 408247 - DNA, 75 bp, synthetic construct
  source 1..75: mol_type = other DNA
tggagtgaaacattcccatagaggctcaaaaatgcgtacaacgcatctagtgcctctttcaaggcaagcccttgc

SEQ ID NO: 408248 - DNA, 75 bp, synthetic construct
  source 1..75: mol_type = other DNA
cgacattaccctgccttaccctccagcaggttacctgagtttcttgctcgccttgctgcatatcgtgggcgtgta

SEQ ID NO: 408249 - DNA, 75 bp, synthetic construct
  source 1..75: mol_type = other DNA
ctacggtgacgcttgctcaggcaagagcaaagcgtgacgaggctaaaaagctcttagtacagggcattgacccaa

SEQ ID NO: 408250 - DNA, 75 bp, synthetic construct
  source 1..75: mol_type = other DNA
cgtgggatgaagatgaaagaggagcatattgttcctctcagtcgacaggcgatggtgttgttagagcagcttaag

SEQ ID NO: 408251 - DNA, 75 bp, synthetic construct
  source 1..75: mol_type = other DNA
gtgaacttgaccgtagagttaaggtaactaaaatacataatggtacttttattgttttcaagctaaaagattgcc

SEQ ID NO: 408252 - DNA, 75 bp, synthetic construct
  source 1..75: mol_type = other DNA
gtcgaaggccgtattcagcagcgtattgaagcgatcctgtcacctattgttggtaacggtaatattcacgcctag

SEQ ID NO: 408253 - DNA, 75 bp, synthetic construct
  source 1..75: mol_type = other DNA
taatgacaaaattataacctattataattataaatcaaattataaattttacaattctgtgcttagtttatataa

SEQ ID NO: 408254 - DNA, 75 bp, synthetic construct
  source 1..75: mol_type = other DNA
cgcaacggccagttgcgtgcagtggcagctggcagtcgtctgagtttttccagtgcggcgcgtaactataacggc

SEQ ID NO: 408255 - DNA, 75 bp, synthetic construct
  source 1..75: mol_type = other DNA
cgacgtattccggtccggtgatgccgtggattgacccggttaaggaggctgaagcctggcggatacagatccggg

SEQ ID NO: 408256 - DNA, 75 bp, synthetic construct
  source 1..75: mol_type = other DNA
ctctacattgacggtaatccatcaaagtttttgcaaggtcactctgttatcggttccgacgatttgcaagggttg

SEQ ID NO: 408257 - DNA, 75 bp, synthetic construct
  source 1..75: mol_type = other DNA
cgtctcctggcaacttcttgtctggcaggtgatgttcgctatcggtgtcgttgctggggttaacctggaacacgc

SEQ ID NO: 408258 - DNA, 75 bp, synthetic construct
  source 1..75: mol_type = other DNA
catctcctggcagttccttgtctggcaggtgatgttcgttataggtgttgttgcagggatgaacctggaacacgc

SEQ ID NO: 408259 - DNA, 75 bp, synthetic construct
  source 1..75: mol_type = other DNA
cgcacctacgcggcgcggaatataacccgcgttttatcggtgaggatgatcttgcgaggctggcggaaagcgtca

SEQ ID NO: 408260 - DNA, 75 bp, synthetic construct
  source 1..75: mol_type = other DNA
atgactatttattttataaactgggttgcagattatgaattaaaaatgatccagtacttgaaaaaaaagcacaag

SEQ ID NO: 408261 - DNA, 75 bp, synthetic construct
  source 1..75: mol_type = other DNA
atgactatttattttataaactgggttgcagattatgaattaaaaatgatccagtacctgaaaaaaaagtacaag

SEQ ID NO: 408262 - DNA, 75 bp, synthetic construct
  source 1..75: mol_type = other DNA
tttttccagtacagcgcgcaactataacggcacttacagcgcccagcgtcaggagctggttgaatccactgatgg

SEQ ID NO: 408263 - DNA, 75 bp, synthetic construct
  source 1..75: mol_type = other DNA
tggttttttatctggttttttgtttttaactgtgctgtatatttttctctgaagacaataaatataaaggatata

SEQ ID NO: 408264 - DNA, 75 bp, synthetic construct
  source 1..75: mol_type = other DNA
atgcgttacgccattgccgcaatgcaaaatcaccttgatgccggatacaaaacattgccgatggtggtgccactg

SEQ ID NO: 408265 - DNA, 75 bp, synthetic construct
  source 1..75: mol_type = other DNA
attaatttctattgtgattccccagactctaataacgttgttccgctaataagaacgctggaagccaagccagcg

SEQ ID NO: 408266 - DNA, 75 bp, synthetic construct
  source 1..75: mol_type = other DNA
actcaaatccagccagtgatatggccggtgcgctatcgacaactaaagcacgacattaccccgctttgccctcaa

SEQ ID NO: 408267 - DNA, 75 bp, synthetic construct
  source 1..75: mol_type = other DNA
ccatcgagcgcgcgttcttcgctatcttgagctttatatcttccctcatatcggttcgtccgacattcggcagct

SEQ ID NO: 408268 - DNA, 75 bp, synthetic construct
  source 1..75: mol_type = other DNA
cgacattaccccgccttaccctccagcaggttgcctgagtttcttgctcgtcttgctgcatatcgtggccgtgta

SEQ ID NO: 408269 - DNA, 75 bp, synthetic construct
  source 1..75: mol_type = other DNA
ggagtgatgatgcaattgagcgtcaattgagtcactctgagcgtaataatgtgcgtgcagcttatatccatactt

SEQ ID NO: 408270 - DNA, 75 bp, synthetic construct
  source 1..75: mol_type = other DNA
cttcaagctaacactattaatcctgtatcccccttcgattttgccaagaaaaaacaggataaatctataaatcaa

SEQ ID NO: 408271 - DNA, 75 bp, synthetic construct
  source 1..75: mol_type = other DNA
cgagaactcgggggcatacactttcgaaactatcgctcgtgaatggcacgccagtaacaagcgctggagtgaaga

SEQ ID NO: 408272 - DNA, 75 bp, synthetic construct
  source 1..75: mol_type = other DNA
gtaaaaaagggcaccagatagccgaagattttgtacgagccgggttactggactggacgaaagataaattacgta

SEQ ID NO: 408273 - DNA, 75 bp, synthetic construct
  source 1..75: mol_type = other DNA
agacgaggtatcggtgattgtctggatgaggctgagcaagagcttatcgttaccattaacaaatatgccagtcag

SEQ ID NO: 408274 - DNA, 75 bp, synthetic construct
  source 1..75: mol_type = other DNA
tacagaacgctaaacgcgtgcaaaacgcgcttaacgcctgccgcgccgccatgcttcagtccggaaactttcggg

SEQ ID NO: 408275 - DNA, 75 bp, synthetic construct
  source 1..75: mol_type = other DNA
tcttgttgccagggagtttgacaggaaaggtgactggcgaatgaaatgggcgacttacatcccggggcatcctga

SEQ ID NO: 408276 - DNA, 75 bp, synthetic construct
  source 1..75: mol_type = other DNA
tttctggttctctgcctgcgggctggcgtaagcgcgatgatgtggcttttatcggggacggaccgtgctttattg

SEQ ID NO: 408277 - DNA, 75 bp, synthetic construct
  source 1..75: mol_type = other DNA
atcccctccatgtttaacacggactcctggtggaccccgtcgctctcccgtgatgccctgtgcgtggtgtttaaa

SEQ ID NO: 408278 - DNA, 75 bp, synthetic construct
  source 1..75: mol_type = other DNA
tcggggattcgcgttaatgcaatctgccctggttacgttcgcacgccaatggcggaaagcatcgcccgtcagtca

SEQ ID NO: 408279 - DNA, 75 bp, synthetic construct
  source 1..75: mol_type = other DNA
atattctggtgaataacgcaggtgtttgccgtctgggtagttttcttgaaatgagcgatgacgatcgcgatttcc

SEQ ID NO: 408280 - DNA, 75 bp, synthetic construct
  source 1..75: mol_type = other DNA
tcgcctccgatgaatccagctatttaacgggtactcagaatgtgatcgatggcggcagtacgttgccagaaagcg

SEQ ID NO: 408281 - DNA, 75 bp, synthetic construct
  source 1..75: mol_type = other DNA
gcaagctaaggaagcggaggcggcggcactggcgcagggtattattgtgaatccggcacagcgtctagcgttcaa

SEQ ID NO: 408282 - DNA, 75 bp, synthetic construct
  source 1..75: mol_type = other DNA
gcgtgatgacgccagttgcgaagaaactgcggtgttgccttgcaagtggtccgtggattgcatcttgtcccgtta

SEQ ID NO: 408283 - DNA, 75 bp, synthetic construct
  source 1..75: mol_type = other DNA
tcgcgtcggatgaatccagctatttaacaggtacacagaatgtgatcgatggcggtagcacactaccggagacgg

SEQ ID NO: 408284 - DNA, 75 bp, synthetic construct
  source 1..75: mol_type = other DNA
aagtgttcgttactgaagacggcgctgaaaccgacctggatctggggcactacgagcgtttcattcgtaccaaaa

SEQ ID NO: 408285 - DNA, 75 bp, synthetic construct
  source 1..75: mol_type = other DNA
attacgtttaaaaaacctgatgacgacaccattgcaaatcatggtgcaatatgcatatttttaccatttgagaag

SEQ ID NO: 408286 - DNA, 75 bp, synthetic construct
  source 1..75: mol_type = other DNA
agtttaccgcaatgttctgcgttggctcggtggacatgctgattaagtactataagctctttaaagataaacaaa

SEQ ID NO: 408287 - DNA, 75 bp, synthetic construct
  source 1..75: mol_type = other DNA
tcgcgtcggatgaatccagctatttaaccggtacacagaatgtgatcgatggtggcagcacactgccggagacgg

SEQ ID NO: 408288 - DNA, 75 bp, synthetic construct
  source 1..75: mol_type = other DNA
ggacgcggtcatcgttgcacagccgtcattgccgacgtacgcgacccggcatcggttgccgcggctatcaagcgc

SEQ ID NO: 408289 - DNA, 75 bp, synthetic construct
  source 1..75: mol_type = other DNA
tcgcatcggatgaatccagctatttaaccggtacacagaatgtgattgatggcggcagcacactgccggagacgg

SEQ ID NO: 408290 - DNA, 75 bp, synthetic construct
  source 1..75: mol_type = other DNA
ctgccaaccatcgcggatgtggcgcgttaccttgatgagcaactgcacaatctacccgccgcccacgatatcgta

SEQ ID NO: 408291 - DNA, 75 bp, synthetic construct
  source 1..75: mol_type = other DNA
acgaactcaccgagcgcccgcacccgttcccgctcggcatcgacctgatcctgacctgcggcgagcgcctgctgg

SEQ ID NO: 408292 - DNA, 75 bp, synthetic construct
  source 1..75: mol_type = other DNA
tgccgggagtgcagaaaaaatatatggcgataatggcgatattattggtattagaatggataaaataaatggaga

SEQ ID NO: 408293 - DNA, 75 bp, synthetic construct
  source 1..75: mol_type = other DNA
taagtatcacggggagttttttgttcggactgctcatggcatctttccactggtggcgcaggaaagttaacctgc

SEQ ID NO: 408294 - DNA, 75 bp, synthetic construct
  source 1..75: mol_type = other DNA
tccttggaagcctgcgcggcaacggcagagggcgttttgtcttacaggatggcagccaggtgacagggaaggagg

SEQ ID NO: 408295 - DNA, 75 bp, synthetic construct
  source 1..75: mol_type = other DNA
gcggcagtatgcataacatcaccctggatgtgcgtggctctgactgcaccatcaaagggctggcgatgagcggct

SEQ ID NO: 408296 - DNA, 75 bp, synthetic construct
  source 1..75: mol_type = other DNA
gaccttcgcggtaacggatgaggcgatttccagcgaacagcttaacgccctttccagcggcaccgctgttgcgcc

SEQ ID NO: 408297 - DNA, 75 bp, synthetic construct
  source 1..75: mol_type = other DNA
aagcacgggccattgccctgatggacagcaaaaagatgtggcggagcaattatgcccctcctcttctgcgtattc

SEQ ID NO: 408298 - DNA, 75 bp, synthetic construct
  source 1..75: mol_type = other DNA
acatcgacttccaggggctggcgccgattgtccgtgatttctatgtctttatcccttcctggctgtggccggggc

SEQ ID NO: 408299 - DNA, 75 bp, synthetic construct
  source 1..75: mol_type = other DNA
cggtcggggtggaaggagagatttgcattggcgggatggggctggcacaaggctacctgaacgacgcagagaaaa

SEQ ID NO: 408300 - DNA, 75 bp, synthetic construct
  source 1..75: mol_type = other DNA
aaagatgtggcggagcaattatgcccctcctcttctgtgtattctctggcggctgggtatccggcttccgccatt

SEQ ID NO: 408301 - DNA, 75 bp, synthetic construct
  source 1..75: mol_type = other DNA
cctcctctgctgcgtattctctggcggctgggtatccggcttccgccattgccctttatgccgttctggcaggtt

SEQ ID NO: 408302 - DNA, 75 bp, synthetic construct
  source 1..75: mol_type = other DNA
tgtctcttacgaaggcattttgccggatctgttccgtgaagggcagggcgttgtggtgcagggcgaactggaaaa

SEQ ID NO: 408303 - DNA, 75 bp, synthetic construct
  source 1..75: mol_type = other DNA
aatgccaccgcagtcagttcggcgacactcacaaggctatcgtaagtttctttgaaaatgcgcaactgtttggtt

SEQ ID NO: 408304 - DNA, 75 bp, synthetic construct
  source 1..75: mol_type = other DNA
ccatgctggaaacgcgtcgggcatccgtcatgtatttttcagatcacggtctggagtatgacccgacaaaagaac

SEQ ID NO: 408305 - DNA, 75 bp, synthetic construct
  source 1..75: mol_type = other DNA
cagcgaccagtgccggacagaaatatcgcttttactcaattattatgaaaattaatcttccgttcatacactggt

SEQ ID NO: 408306 - DNA, 75 bp, synthetic construct
  source 1..75: mol_type = other DNA
gggaggttttttaaatgcctttgtttctcctcctgccgatacctttgctggctcattaaatggtattgcgggact

SEQ ID NO: 408307 - DNA, 75 bp, synthetic construct
  source 1..75: mol_type = other DNA
gggaaagcggcgatctgcatttgttcatacgaattcgctgcccgtaaagagcacgagctggcacgaatcccgtgg

SEQ ID NO: 408308 - DNA, 75 bp, synthetic construct
  source 1..75: mol_type = other DNA
gcaagcagtggagccaggagctggaagagaaattttcgctgccttcacaaattattgaagcgaagatcttcaatc

SEQ ID NO: 408309 - DNA, 75 bp, synthetic construct
  source 1..75: mol_type = other DNA
ggcatccgtcatgtatttttcagatcatggcctggagtatgacccgacaaaagagcatgcctattttcatggcgg

SEQ ID NO: 408310 - DNA, 75 bp, synthetic construct
  source 1..75: mol_type = other DNA
aaccaggtgaaggggatccccctgaaactggtcagggggcgcgtcaggatgctgagtgccagcccttccggaaaa

SEQ ID NO: 408311 - DNA, 75 bp, synthetic construct
  source 1..75: mol_type = other DNA
agatgcccgcgaccgcatcattgctgcggaaatgccgaaacagctggggtatgcactgaaacaacaactgaggtt

SEQ ID NO: 408312 - DNA, 75 bp, synthetic construct
  source 1..75: mol_type = other DNA
atatcttttccgggatgcgtttattcagcaactggcgaatggtcgctggcatgtgatgcgacgtattgatggcaa

SEQ ID NO: 408313 - DNA, 75 bp, synthetic construct
  source 1..75: mol_type = other DNA
gagaaatggaaggtttggttggtaactctgttgccgcccatgaatccattcctgcggcaatcggtctattgctgt

SEQ ID NO: 408314 - DNA, 75 bp, synthetic construct
  source 1..75: mol_type = other DNA
cattactggacgccgcaatctggggagcgaattacggcgaacgcctggccaaacaatatgcacgatgtgtcgcag

SEQ ID NO: 408315 - DNA, 75 bp, synthetic construct
  source 1..75: mol_type = other DNA
aaatgtttctgagcgacgagagcgattttcaacgttctgagacgggttttcgttccagaggaaagtattttgacg

SEQ ID NO: 408316 - DNA, 75 bp, synthetic construct
  source 1..75: mol_type = other DNA
cgattcgatgcagtaatgcatgcagagctaaaaatggcagaacatactgaaaaaacgcataaaaaaaccggcatt

SEQ ID NO: 408317 - DNA, 75 bp, synthetic construct
  source 1..75: mol_type = other DNA
tgcgaactttgcttcgagcatgggcaatatcagtttcttctttccaaaagccaaacaagggagcgctcttgggat

SEQ ID NO: 408318 - DNA, 75 bp, synthetic construct
  source 1..75: mol_type = other DNA
ttgggcttctctatttcagatatcactccagtagcttctaataccgattatgacgatgattctagtgatgggggt

SEQ ID NO: 408319 - DNA, 75 bp, synthetic construct
  source 1..75: mol_type = other DNA
agttcaccgcgatgttctgcgtcgggtcagtcgatatgctgatcacctactacaaactctttaaagaaaagcagg

SEQ ID NO: 408320 - DNA, 75 bp, synthetic construct
  source 1..75: mol_type = other DNA
tcaggaaggttttcagctgaagtacacggatgaggacaaggcatccacaccggcacgccaggcaaaagcggtggt

SEQ ID NO: 408321 - DNA, 75 bp, synthetic construct
  source 1..75: mol_type = other DNA
tgaccggtctggtcaggatgcccaacgataaaacgtatgatctgacgggctgtatggtcactgccggggcctatg

SEQ ID NO: 408322 - DNA, 75 bp, synthetic construct
  source 1..75: mol_type = other DNA
aaattgctttgccaaaaatcagggcagttgttactagcaaaagtcagtatcggaaatcaagaacaacaacgagag

SEQ ID NO: 408323 - DNA, 75 bp, synthetic construct
  source 1..75: mol_type = other DNA
gaaatcgatcagttaaaaagttataaaaccttagcggcatctataactaaaaacgccaaggcggaggcattgtta

SEQ ID NO: 408324 - DNA, 75 bp, synthetic construct
  source 1..75: mol_type = other DNA
aaatcagtaatgcattatctggcaggaagaaaattctgctttccgctacgccgcttcaaaacagcatccttgagc

SEQ ID NO: 408325 - DNA, 75 bp, synthetic construct
  source 1..75: mol_type = other DNA
gggatctggtcgtcatggatgaagcccataaactgcgaaatatctacaagagcgatggcgctaaaacggccaaaa

SEQ ID NO: 408326 - DNA, 75 bp, synthetic construct
  source 1..75: mol_type = other DNA
agcgatgtttgcactagcgtctcctttatctagtggcgttatcctagccgatgaggtcgggctggggaaaaccat

SEQ ID NO: 408327 - DNA, 75 bp, synthetic construct
  source 1..75: mol_type = other DNA
aaaggcactagaacgcgagcgggacaacatcatgttgcagtatcatgatgaaaagaaaaaaattgagcaggaaga

SEQ ID NO: 408328 - DNA, 75 bp, synthetic construct
  source 1..75: mol_type = other DNA
gaagactatgcccgccgtaaaggtatgagcgttaccgaagttgagcgctggctggcaccgaatctggggtatgac

SEQ ID NO: 408329 - DNA, 75 bp, synthetic construct
  source 1..75: mol_type = other DNA
tgccaaagaagtgaatgccgatttgattggcctttcggggctgatcacgccgtcgctggacgaaatggttaacgt

SEQ ID NO: 408330 - DNA, 75 bp, synthetic construct
  source 1..75: mol_type = other DNA
cgcgaagccattcacgcggtgttcctctactacgctattcgcaatggcatggatatggggatcgtcaacgccggg

SEQ ID NO: 408331 - DNA, 75 bp, synthetic construct
  source 1..75: mol_type = other DNA
agatgtgatcctcaaccgtcgcgacgatggtaccgagcgtttactggaacttgccgagaaatatcgcggcagcaa

SEQ ID NO: 408332 - DNA, 75 bp, synthetic construct
  source 1..75: mol_type = other DNA
gggtaaaaccaacggcaagatggtgatcgccacagtgaagggcgatgtccacgacatcggtaaaaatatcgttgg

SEQ ID NO: 408333 - DNA, 75 bp, synthetic construct
  source 1..75: mol_type = other DNA
tatcggcgcgtgtgaagacatcaaacgcgaactgccgcacgcgctaatttccggcggcgtatctaacgtttcttt

SEQ ID NO: 408334 - DNA, 75 bp, synthetic construct
  source 1..75: mol_type = other DNA
ccgtgttttgtcgcggtagaaactcagggtgaatttacctcaggcacgacggtggttgatatcgacggttgcctg

SEQ ID NO: 408335 - DNA, 75 bp, synthetic construct
  source 1..75: mol_type = other DNA
tgccgtcgccattgccgccgcgatttttgcccccgaactcgacctgcaactgatgaccaccgtcgcgggtaatgt

SEQ ID NO: 408336 - DNA, 75 bp, synthetic construct
  source 1..75: mol_type = other DNA
tgccattgccgccgcgatttttgcccccgaactcgatctgcaactgatgaccactgtcgcgggtaatgtttcggt

SEQ ID NO: 408337 - DNA, 75 bp, synthetic construct
  source 1..75: mol_type = other DNA
aacacaccggcatgaaactcacggaatctttcgcgatgtggcctggtgcttcggtttcgggttggtatttcagcc

SEQ ID NO: 408338 - DNA, 75 bp, synthetic construct
  source 1..75: mol_type = other DNA
ctcggggtcgtgggttcggacatgtgtataagagatccgcgcaaatccgccgtcgaagccgcgattgcccgtgcc

SEQ ID NO: 408339 - DNA, 75 bp, synthetic construct
  source 1..75: mol_type = other DNA
ccgcgcaaagccgccgtcgaagccgctattgcccgcgccaaagcacgcaagctggaacagcaacaggctaatgcg

SEQ ID NO: 408340 - DNA, 75 bp, synthetic construct
  source 1..75: mol_type = other DNA
atgaacgtggtcggcgacctgtttggcgagggcaaaatgttcctgcctcaggtggtgaaatcggcgcgcgtcatg

SEQ ID NO: 408341 - DNA, 75 bp, synthetic construct
  source 1..75: mol_type = other DNA
gctgcacaggcagcgggaattaaaacgattgttgtcgccgaggattttcaacagccgtgctttaactctgcggta

SEQ ID NO: 408342 - DNA, 75 bp, synthetic construct
  source 1..75: mol_type = other DNA
cggttgttgtcgccgaggattttcaacagccgtgctttaactctgcggtagtcgggtatgcatcacttgaagagt

SEQ ID NO: 408343 - DNA, 75 bp, synthetic construct
  source 1..75: mol_type = other DNA
ctttctgcactgcgagaattgcaactgtctgctgcagattgtttggttatagaggacagcgtgagtggttttcag

SEQ ID NO: 408344 - DNA, 75 bp, synthetic construct
  source 1..75: mol_type = other DNA
ttctggcttgcgtcattgcaagcccactggctcatgcggggattcccgtactggttgatgctgacccgctgcgtg

SEQ ID NO: 408345 - DNA, 75 bp, synthetic construct
  source 1..75: mol_type = other DNA
aagtgtgcgggaagcactggagcgtgccggttatgacgatgccagtgtggagcatattacctatgcacaatgtgc

SEQ ID NO: 408346 - DNA, 75 bp, synthetic construct
  source 1..75: mol_type = other DNA
gaacccaggtaaatgccagttctcagcttgacccactaacgcgcgcagtggtgatttcgctcttcactcaccggc

SEQ ID NO: 408347 - DNA, 75 bp, synthetic construct
  source 1..75: mol_type = other DNA
ttcaccattccgttactgattggcggtgcgaccacctcaaaagcgcacacggcggtgaaaattgagcagaactac

SEQ ID NO: 408348 - DNA, 75 bp, synthetic construct
  source 1..75: mol_type = other DNA
cgctaaagaagtgaatgctgatttgattggcctttcggggcttatcacgccgtcgctggacgagatggttaacgt

SEQ ID NO: 408349 - DNA, 75 bp, synthetic construct
  source 1..75: mol_type = other DNA
tggataaattaagcgccgaaaaaatgctgaacccgcgtggtgtggtgggcctgttcccggcaaaccgtgtgggcg

SEQ ID NO: 408350 - DNA, 75 bp, synthetic construct
  source 1..75: mol_type = other DNA
cgctggcaggcgagtatccggtgagcagtgcagtggtgctctgtttccgcacgcagatttttgtcacccgtagcg

SEQ ID NO: 408351 - DNA, 75 bp, synthetic construct
  source 1..75: mol_type = other DNA
gtggatgacagcagtatcgactacaccctgccgctggcaggcgagcatccggtaagcagtgcagtggtgctctgt

SEQ ID NO: 408352 - DNA, 75 bp, synthetic construct
  source 1..75: mol_type = other DNA
agtttaaggattttaaaattaaaatagaatgtgacaaagaaaaaaatgatactaagattgaagaattaaaaagag

SEQ ID NO: 408353 - DNA, 75 bp, synthetic construct
  source 1..75: mol_type = other DNA
tattgatcccgaagcggcagcccaggtcttccagagcgggctggagattgtgatgtgtggcctggacgttaccaa

SEQ ID NO: 408354 - DNA, 75 bp, synthetic construct
  source 1..75: mol_type = other DNA
cgttgtggaaaactcggtggtgctcgacggctccgccatgaatcaaatcattaatattgatattgagaatatgca

SEQ ID NO: 408355 - DNA, 75 bp, synthetic construct
  source 1..75: mol_type = other DNA
ggcaaacgtggcaggcatcgagagcagctattgaaattgagctgcaaaagccaaagaaaggcccacttcccggtg

SEQ ID NO: 408356 - DNA, 75 bp, synthetic construct
  source 1..75: mol_type = other DNA
cgcaccgtgaaggcatgggcgcgcgagtcaccgccagccatactacggcaatgcactcctataacggggcgtata

SEQ ID NO: 408357 - DNA, 75 bp, synthetic construct
  source 1..75: mol_type = other DNA
actatgggaaagagtcacatcttaacggtgaagctgaagtagaaaaacgtgttacagcatcagttggctcgtgga

SEQ ID NO: 408358 - DNA, 75 bp, synthetic construct
  source 1..75: mol_type = other DNA
agtacgcgattgactatcaggaagggatcaagaacccggtggggctttccggcgtgcgaatgcaggcaaaagtgc

SEQ ID NO: 408359 - DNA, 75 bp, synthetic construct
  source 1..75: mol_type = other DNA
gcaatcgaagatatggtcgttggtctggaagcagtattggctgatggcaccgtcacacgcattaaaaacgtgcca

SEQ ID NO: 408360 - DNA, 75 bp, synthetic construct
  source 1..75: mol_type = other DNA
cgttaaccattgccgccagcctggcgcagattggtgagttcgcctttatcctggcaggtctggggatggcgctga

SEQ ID NO: 408361 - DNA, 75 bp, synthetic construct
  source 1..75: mol_type = other DNA
cattaactatcgccgccagcctggcgcaaattggtgagttcgcttttatcctggcggggctggggatggcgctgg

SEQ ID NO: 408362 - DNA, 75 bp, synthetic construct
  source 1..75: mol_type = other DNA
gggcaatgcggcgaacgaagaaattatgcaactggcgcatctggaatgtgcaaaatggctgatcctgacgattcc

SEQ ID NO: 408363 - DNA, 75 bp, synthetic construct
  source 1..75: mol_type = other DNA
tgaaatggcagattgccaacggcattcagcatgtgcgtacccatgtcgatgtttcggacgcaacgctgactgcgc

SEQ ID NO: 408364 - DNA, 75 bp, synthetic construct
  source 1..75: mol_type = other DNA
ccaggacgttgaatttgcaggattacggcattgccgccggaaacagcgccaacctgattatcctgccggctgaaa

SEQ ID NO: 408365 - DNA, 75 bp, synthetic construct
  source 1..75: mol_type = other DNA
tgggtgaacgcgaaattgcccgtactatgctggaactgctggaagcgccaccggctggtgaggtggtgacggggt

SEQ ID NO: 408366 - DNA, 75 bp, synthetic construct
  source 1..75: mol_type = other DNA
acctgatcacatgtcacaatgatatggcgaaaaacatcgtcaaagcggttgaacgttgtgggctgaaagttgacc

SEQ ID NO: 408367 - DNA, 75 bp, synthetic construct
  source 1..75: mol_type = other DNA
ttgttctttacccgtgaaggaatgcttaaacgggataatgagctgaaagccgcagctgatgctctgccatcaccg

SEQ ID NO: 408368 - DNA, 75 bp, synthetic construct
  source 1..75: mol_type = other DNA
caacaggcgctggtatcgcagcaggtgctgccattatggcgcagccggtcaaaaagcagatgagctacgaacgcc

SEQ ID NO: 408369 - DNA, 75 bp, synthetic construct
  source 1..75: mol_type = other DNA
tcaagaactttacagataatcatggtttgttttttgcagacgatggctccttgttctttacccgtgaaggaatgc

SEQ ID NO: 408370 - DNA, 75 bp, synthetic construct
  source 1..75: mol_type = other DNA
cgactgtcggaggcaatgtatcggtgcagaaaactacccgaaatgcgctgcaattactgcatttctgggatgcgg

SEQ ID NO: 408371 - DNA, 75 bp, synthetic construct
  source 1..75: mol_type = other DNA
gcgcccggacctgttcactctcaaaccgtgttttgtggcagtggaaactcagggcgaatttacctcaggcacgac

SEQ ID NO: 408372 - DNA, 75 bp, synthetic construct
  source 1..75: mol_type = other DNA
cgcgcaaagcggcagttgctgcggctattgcccgcgttcaggccaaaaaagccgcccagcaaaaggttgtaaacg

SEQ ID NO: 408373 - DNA, 75 bp, synthetic construct
  source 1..75: mol_type = other DNA
tcaaacaaactgatcgcatttcgcatgatgcgttacgctattgccgcaatgcaaaatcaccttgatgccggataa

SEQ ID NO: 408374 - DNA, 75 bp, synthetic construct
  source 1..75: mol_type = other DNA
attatgtgcaaaacggtgaaaactacttacgttttaactttggcacccaaagatactggcttgaacaagcattag

SEQ ID NO: 408375 - DNA, 75 bp, synthetic construct
  source 1..75: mol_type = other DNA
ccaagcgacgccgaagcgattaaagttcgccatggctgcgcgcttggctcgatcgtcggtaaagatgagagcgtt

SEQ ID NO: 408376 - DNA, 75 bp, synthetic construct
  source 1..75: mol_type = other DNA
gtgcatccccacgcgatctggtcactatggcggccaaagctaagcaaacatttggactgacagacaacgatcttc

SEQ ID NO: 408377 - DNA, 75 bp, synthetic construct
  source 1..75: mol_type = other DNA
tgattcctggacgagatatctacccgattagcaccaaagtcttccgttcattcttcgataacccgcaaatggcgt

SEQ ID NO: 408378 - DNA, 75 bp, synthetic construct
  source 1..75: mol_type = other DNA
aaagagatgtacgaccgtgctgccgaacagctgattcgtaagctgccaagcatccgtgctgcggatattcgttcc

SEQ ID NO: 408379 - DNA, 75 bp, synthetic construct
  source 1..75: mol_type = other DNA
gtcagcctttaccgtgggtgaccagttgctgtggggtgcagcggagccgctgcgccggatgcttcgtcaactggc

SEQ ID NO: 408380 - DNA, 75 bp, synthetic construct
  source 1..75: mol_type = other DNA
actgtaccgtaagcctgatgttgatgtcgttaggcggtttattcgccaatgatcttgttgattgggtttccgttg

SEQ ID NO: 408381 - DNA, 75 bp, synthetic construct
  source 1..75: mol_type = other DNA
ttactggattgacgcagcatcgtctctgcgcatgaaagacgacgccatcatcatccttgacccagtcaatcagga

SEQ ID NO: 408382 - DNA, 75 bp, synthetic construct
  source 1..75: mol_type = other DNA
ctgatgagatcctcgatatagctgatgatgctaagaacgttgataaagaccaactacgccgccaccaattaatga

SEQ ID NO: 408383 - DNA, 75 bp, synthetic construct
  source 1..75: mol_type = other DNA
ctgaaatggtttcgtgatgtgcctgaattttcggacatgtatgtacgcgcgaaggagatcggcttcgaggtgttg

SEQ ID NO: 408384 - DNA, 75 bp, synthetic construct
  source 1..75: mol_type = other DNA
cggatgggggtaagcgcattgctgaactggagaaaatcgaagagcaactcatcaacgagcgtgaccatgctgagt

SEQ ID NO: 408385 - DNA, 75 bp, synthetic construct
  source 1..75: mol_type = other DNA
caactcattaacgagcgtgaccatgctgagtctgctttagctgatatgtacttcgcaacaaccggggataggcct

SEQ ID NO: 408386 - DNA, 75 bp, synthetic construct
  source 1..75: mol_type = other DNA
ggttcggcttttcagatgctgtcgatgccgtggttgacagaattgctgatttagaagctcaacagccatcgccag

SEQ ID NO: 408387 - DNA, 75 bp, synthetic construct
  source 1..75: mol_type = other DNA
ggagcatggaaagacgctgttgactgggtgctcaaagaggcttgtcaggttctaaacactggcatcaaaggagag

SEQ ID NO: 408388 - DNA, 75 bp, synthetic construct
  source 1..75: mol_type = other DNA
gtggaaagggcaggcggaaaccaacaagatcctcaacacatcttccgtaattccggtagatggtttatgtgtgcg

SEQ ID NO: 408389 - DNA, 75 bp, synthetic construct
  source 1..75: mol_type = other DNA
gctgactggctgacagcgattgagatgtacaaaccaaatgtgcgcatcgtggaagttaatgtgccacgcgtcgct

SEQ ID NO: 408390 - DNA, 75 bp, synthetic construct
  source 1..75: mol_type = other DNA
acgtgtgagatcggcgttataccagcttattacggctttgtgagcgttaatggggataggcattatggctttatg

SEQ ID NO: 408391 - DNA, 75 bp, synthetic construct
  source 1..75: mol_type = other DNA
gtaacaaggaagaagcacccgtccaggtggaagtaacgaaagaagaaatcgcccgcatcgttcaggaagtagaag

SEQ ID NO: 408392 - DNA, 75 bp, synthetic construct
  source 1..75: mol_type = other DNA
gcaaaagccaacacctggccgctgccgccagcgggcagtcgtctggttggcgaaaacaaatttcatgtggtggaa

SEQ ID NO: 408393 - DNA, 75 bp, synthetic construct
  source 1..75: mol_type = other DNA
tcgtctgcgggatgacgatatcaaaacactctttagccaggtcaccccaggcaccaaagtgaatatcatcaacac

SEQ ID NO: 408394 - DNA, 75 bp, synthetic construct
  source 1..75: mol_type = other DNA
gaaggcattgtgatcaacattgcggagttgcgtctctattactacccaccgggcaaaaattcagtgaccgtgtac

SEQ ID NO: 408395 - DNA, 75 bp, synthetic construct
  source 1..75: mol_type = other DNA
atggttgggacgattatttatcaaacatcacctaaatgctgtaaaaaggatgatatcattatatttaatgacagt

SEQ ID NO: 408396 - DNA, 75 bp, synthetic construct
  source 1..75: mol_type = other DNA
actaaagaaaaccaatctggctggactcttcggatactcgaagcattatttttcaataaaaaattaattactaat

SEQ ID NO: 408397 - DNA, 75 bp, synthetic construct
  source 1..75: mol_type = other DNA
tccggcatcatggtgatggcactgaagaagtggtgtttgattctcgtgtatcaggtacagatttaccaactaact

SEQ ID NO: 408398 - DNA, 75 bp, synthetic construct
  source 1..75: mol_type = other DNA
cacgaagtcggcctgcacgcctgggatcaccatgcctggcaagcccatagcggtaactgggatcggcaaacaatg

SEQ ID NO: 408399 - DNA, 75 bp, synthetic construct
  source 1..75: mol_type = other DNA
gcgggaaatactgctcccggaacgtagcagtatgcttcatcgaacagattttaacgaggattaccacacggtaat

SEQ ID NO: 408400 - DNA, 75 bp, synthetic construct
  source 1..75: mol_type = other DNA
ttgaaacccgtaaatggctattggcaaaactgcaaccgcgtaagtatggcgaacgcgttacgcaggaaatcgtag

SEQ ID NO: 408401 - DNA, 75 bp, synthetic construct
  source 1..75: mol_type = other DNA
cggttggctattgctgtgtatctatattgcactcggtgtagttcgtcatagagtaattaatgctgaatctggcag

SEQ ID NO: 408402 - DNA, 75 bp, synthetic construct
  source 1..75: mol_type = other DNA
gggacgccagtttataccattcatgcagaagtcgaaggctgcacttatcagcattattttgtcgatcttctgaaa

SEQ ID NO: 408403 - DNA, 75 bp, synthetic construct
  source 1..75: mol_type = other DNA
agagaatttaccgctcggtcacgtcgttcgcggaaatattgccggacgtgaaggctggctgggttgccaacaagt

SEQ ID NO: 408404 - DNA, 75 bp, synthetic construct
  source 1..75: mol_type = other DNA
agcgaagagcaactcatcagcgagcgtgatcatgctgagtctgctttagctgatatgtattttgcagcaaccggg

SEQ ID NO: 408405 - DNA, 75 bp, synthetic construct
  source 1..75: mol_type = other DNA
cccgcaggccagacgctgaccattaccgtcaaactgctgatgcaggacgatcgcttcggcagttttgagtgcagc

SEQ ID NO: 408406 - DNA, 75 bp, synthetic construct
  source 1..75: mol_type = other DNA
gtacaaaatccgttaaccgtcttggttatggcgcgatgcaactggcaggtccggggtttttggtcccccaagaga

SEQ ID NO: 408407 - DNA, 75 bp, synthetic construct
  source 1..75: mol_type = other DNA
tcatttgcgtaagactctgggcaaagatgagtatcagagattaggtcatttagagttcatcaaagaactttgtga

SEQ ID NO: 408408 - DNA, 75 bp, synthetic construct
  source 1..75: mol_type = other DNA
gtgagccactatttatcccccggcgcttatctgccccacgacgcgcccatgttactgctggaagacgtggtgagc

SEQ ID NO: 408409 - DNA, 75 bp, synthetic construct
  source 1..75: mol_type = other DNA
agtagcattaactccttcaactttcagaaaataagcgaagatgaaatcctgaaatttttagatgaaaatatttca

SEQ ID NO: 408410 - DNA, 75 bp, synthetic construct
  source 1..75: mol_type = other DNA
taaacttttttcaacagatcagcagattttgcatttttctaaaaagaataaacactccacaaagatatctaaatt

SEQ ID NO: 408411 - DNA, 75 bp, synthetic construct
  source 1..75: mol_type = other DNA
gagcgtggaattaacgcgccgctggcgtcatcgtgtgggcgttttttcgatgcagtggcggcggcactgggctgt

SEQ ID NO: 408412 - DNA, 75 bp, synthetic construct
  source 1..75: mol_type = other DNA
caacactacaaagaccagatgcaagcttataaggatcaactggcaacggccacgggcgttcgggatatcgccggc

SEQ ID NO: 408413 - DNA, 75 bp, synthetic construct
  source 1..75: mol_type = other DNA
caaaagctgattattaacgttgaagccacggttataaccccaactgatgaggcggtaataaaaaccgaatcaggg

SEQ ID NO: 408414 - DNA, 75 bp, synthetic construct
  source 1..75: mol_type = other DNA
cgtctcgataaacttctctcagtagtgagtattatcctcggttcatctgtcattggcggattcattccggaaatt

SEQ ID NO: 408415 - DNA, 75 bp, synthetic construct
  source 1..75: mol_type = other DNA
atggaccgggatgatattcttgacagaattttatatggctattttcttgagcaactattttctgtagcgactggt

SEQ ID NO: 408416 - DNA, 75 bp, synthetic construct
  source 1..75: mol_type = other DNA
atctcgccaccttctggcagcagtggctgaactggcaggctccggttaatcaacgtgcgtgggcgtttcatgatg

SEQ ID NO: 408417 - DNA, 75 bp, synthetic construct
  source 1..75: mol_type = other DNA
ccgtcaaactgctgatgcaagacgatcgcttcggcagttttgagtgcagcatcaacgacggcgaggcgacgggcc

SEQ ID NO: 408418 - DNA, 75 bp, synthetic construct
  source 1..75: mol_type = other DNA
ttgttcttgtcaatttatttgcaacatcactaattgaaaataccagttcctttatatccggctcttcagaaagat

SEQ ID NO: 408419 - DNA, 75 bp, synthetic construct
  source 1..75: mol_type = other DNA
tttttatggagtgtttcaaaaccaacagccttctattataatgaaaatgatatgttgagctttgttgtttgcttt

SEQ ID NO: 408420 - DNA, 75 bp, synthetic construct
  source 1..75: mol_type = other DNA
tgctggcctgtggcatttcctttatatgtctattatatcagtgatgcaggcagaaggagcaacgatgatgactaa

SEQ ID NO: 408421 - DNA, 75 bp, synthetic construct
  source 1..75: mol_type = other DNA
gaccccatcgatcttgccagggcgattcgcaaaggtccggatatgcctactgttcagggtggcaactctccggtg

SEQ ID NO: 408422 - DNA, 75 bp, synthetic construct
  source 1..75: mol_type = other DNA
gcaggccaatgctgaattcatcgccgcagccaatccggctactgtgctggcactgctggatgaacgggaaagaaa

SEQ ID NO: 408423 - DNA, 75 bp, synthetic construct
  source 1..75: mol_type = other DNA
cgggaaagaaacggaaagcacatgaaaaacatcaaaactcacaccggactccttatccacaaagaacaaacgcgg

SEQ ID NO: 408424 - DNA, 75 bp, synthetic construct
  source 1..75: mol_type = other DNA
caggtgcttacacctacgactggacgccagaaacacgctacggcagcatgaagagcatcagtttgcaacgaattc

SEQ ID NO: 408425 - DNA, 75 bp, synthetic construct
  source 1..75: mol_type = other DNA
gggattgccatccgttttcttgaaaatggcctgagtaccgaagggacaatggggaaaatggtgattcagattttg

SEQ ID NO: 408426 - DNA, 75 bp, synthetic construct
  source 1..75: mol_type = other DNA
ttatatcgtgcctcagatgacagaatacgagcggaatttgaaagttaagcgattccagcaaccaaagaatggagt

SEQ ID NO: 408427 - DNA, 75 bp, synthetic construct
  source 1..75: mol_type = other DNA
gaaaggcgtctttaccgacggggatttacgtcgctggctggttggcggcggtgcactcaccacgccagttaatga

SEQ ID NO: 408428 - DNA, 75 bp, synthetic construct
  source 1..75: mol_type = other DNA
acgccaaagagatcctgatgaagcgcaaaatcaccgccgcaccggtggtagatgaaaacggcaaactcgtcggcg

SEQ ID NO: 408429 - DNA, 75 bp, synthetic construct
  source 1..75: mol_type = other DNA
atgagtgaagcactactaaacgcagggcgtcagacgttaaccctggagttgcaggaagcaagccgtttaccggaa

SEQ ID NO: 408430 - DNA, 75 bp, synthetic construct
  source 1..75: mol_type = other DNA
gcccgcaacgtcatcacatttgagggtgaacgccataatgccctgcacgatgcgcgttaccaggcaaaatacgtt

SEQ ID NO: 408431 - DNA, 75 bp, synthetic construct
  source 1..75: mol_type = other DNA
gaatgatccgaaatgggtgaaggggattgaaacccgcgattctgtgaaccagaaccagcacgaatcggaacagaa

SEQ ID NO: 408432 - DNA, 75 bp, synthetic construct
  source 1..75: mol_type = other DNA
gatccgcatcgaaatggatatggaagatggaaacatacagagcctgcttactgcagtacgttcgcatcctgagct

SEQ ID NO: 408433 - DNA, 75 bp, synthetic construct
  source 1..75: mol_type = other DNA
ggctatttaagggcgtgaatctgtatcaggcagcccattatccttacacccaagcgctgcgcattcagcacgagc

SEQ ID NO: 408434 - DNA, 75 bp, synthetic construct
  source 1..75: mol_type = other DNA
caccattaaatggtggcttaagcaatcacgcgaagcgcaatctgccattatgaccgatgaaatcccgttagatga

SEQ ID NO: 408435 - DNA, 75 bp, synthetic construct
  source 1..75: mol_type = other DNA
ctttctggtatggatgtggcgcgtaagctattgattctcgctcgtgaaacgggacgtgaactggagctggcggat

SEQ ID NO: 408436 - DNA, 75 bp, synthetic construct
  source 1..75: mol_type = other DNA
tgccgcgctggctcgcgctaatatcaacattgtcgccattgcccaagggtcttctgaacgttcaatctccgtggt

SEQ ID NO: 408437 - DNA, 75 bp, synthetic construct
  source 1..75: mol_type = other DNA
gtggtgggtgatggtatgcgcaccttgcgcgggatctcagcgaaattctttgccgcgctggctcgcgccaatatc

SEQ ID NO: 408438 - DNA, 75 bp, synthetic construct
  source 1..75: mol_type = other DNA
gctgttcaaagtgaaaaatggcgaaaacgccctggccttctatagccactattatcagccgctgccgttggtgct

SEQ ID NO: 408439 - DNA, 75 bp, synthetic construct
  source 1..75: mol_type = other DNA
tgaagcgtcagcaaagctggctgaagaacaaacatattgatttacgagtctgtggcgttgccaactcgaaggcgt

SEQ ID NO: 408440 - DNA, 75 bp, synthetic construct
  source 1..75: mol_type = other DNA
tttacgtgccgattgttgcgagatctggacggacgttgacggtgtctatacctgcgacccgcgtcaggtacccga

SEQ ID NO: 408441 - DNA, 75 bp, synthetic construct
  source 1..75: mol_type = other DNA
cgccattgaatggaacgtggcgattaacgacagtgatattctcatctctgaccatgtcatcgagcgcatcaactg

SEQ ID NO: 408442 - DNA, 75 bp, synthetic construct
  source 1..75: mol_type = other DNA
caatattgagatgaaacgtgcttctctggagctacacaacaaaccgcagcacctttttatgcgtaatatcaatgt

SEQ ID NO: 408443 - DNA, 75 bp, synthetic construct
  source 1..75: mol_type = other DNA
tatctctcgtttttcactgcaaaccagcgcccgtaaccagtggttcggcactatcaccgcccgcgatcatgatga

SEQ ID NO: 408444 - DNA, 75 bp, synthetic construct
  source 1..75: mol_type = other DNA
cagagggcgatttgtcttacaggacggtagccaggtgacaggggagaagggcggcagtatgcataacatcaccct

SEQ ID NO: 408445 - DNA, 75 bp, synthetic construct
  source 1..75: mol_type = other DNA
gcaacttcctgacggcaagttctgtgcttgccttcctccatacgcctttcgcccgcgcacttcccgctcaacaaa

SEQ ID NO: 408446 - DNA, 75 bp, synthetic construct
  source 1..75: mol_type = other DNA
acacgactggatcgcctcatttaaacaagccttcagcgaagggcaaacggtcgtcgtgcctgccggattggtttg

SEQ ID NO: 408447 - DNA, 75 bp, synthetic construct
  source 1..75: mol_type = other DNA
cataaatctcataaaaagattaatttaaccttactaattagagaaatagatctttaccttttagatataactata

SEQ ID NO: 408448 - DNA, 75 bp, synthetic construct
  source 1..75: mol_type = other DNA
aaagcggcgtatgacctgacccgtgagcagggcttttatgagaaaaacccaggggcggataccgcgacgcgtcag

SEQ ID NO: 408449 - DNA, 75 bp, synthetic construct
  source 1..75: mol_type = other DNA
ccggtaagaagacaccacagcaggcactggataccgccgttgagcgtggaaatcagttgctgcgccgctttgaga

SEQ ID NO: 408450 - DNA, 75 bp, synthetic construct
  source 1..75: mol_type = other DNA
cgttaaatgaagcagcttctcttgagcaagggcagaatgtcacggcctactttaatgccgacagcgtaattatcg

SEQ ID NO: 408451 - DNA, 75 bp, synthetic construct
  source 1..75: mol_type = other DNA
cggtaaatgaagcagcttctcttgaacaagggcagaatgtcaaggcttacttcaacgccgacagcgtgattatcg

SEQ ID NO: 408452 - DNA, 75 bp, synthetic construct
  source 1..75: mol_type = other DNA
ttagccagggagcgaaagatgccggtatcagctataaaagcgcctgggatgccattaacgagatgaatcagttaa

SEQ ID NO: 408453 - DNA, 75 bp, synthetic construct
  source 1..75: mol_type = other DNA
gaagacgaattaccggtcaagggcatttccaatctgaataacatggcaatgttcagcgtttccggcccggggatg

SEQ ID NO: 408454 - DNA, 75 bp, synthetic construct
  source 1..75: mol_type = other DNA
cagggtcgcccgaaatggatgggctggagtccctcctatgcgaagcgacgcggccccgggcaaatccttcagaag

SEQ ID NO: 408455 - DNA, 75 bp, synthetic construct
  source 1..75: mol_type = other DNA
gctttcccgacagggaaaactttggacgtagcgccatgcaactgccgccggaaacggtttacgcccagacgttgt

SEQ ID NO: 408456 - DNA, 75 bp, synthetic construct
  source 1..75: mol_type = other DNA
aagagtatcactggcgaatgggcgacggtaacagtacagacagtctgtttgcatggcgacggtgagcatgcactg

SEQ ID NO: 408457 - DNA, 75 bp, synthetic construct
  source 1..75: mol_type = other DNA
ccagcgaagaagccctgaaaatcaccgccgccaaacagaacgtacgcgttctgacctgcggtcagtggggcgagc

SEQ ID NO: 408458 - DNA, 75 bp, synthetic construct
  source 1..75: mol_type = other DNA
cagggtcgcccgaaatggatgggctggagtccggcttatgcgaagcggcgcggccccgggcaaatccttcagaag

SEQ ID NO: 408459 - DNA, 75 bp, synthetic construct
  source 1..75: mol_type = other DNA
aaatacgccatcaggcacggacgcagaacctgtattttaagcagtacaggaacggcagcgtcagcacccgctttg

SEQ ID NO: 408460 - DNA, 75 bp, synthetic construct
  source 1..75: mol_type = other DNA
atgctgatttcattacccccggtgattactaaaggagaggctaaaacgactttattcccctggtatgtgtatcca

SEQ ID NO: 408461 - DNA, 75 bp, synthetic construct
  source 1..75: mol_type = other DNA
tcgtgaactgacggttcaggcttctaccggcactaactctgattcggatctggactccattcaggacgaaatcaa

SEQ ID NO: 408462 - DNA, 75 bp, synthetic construct
  source 1..75: mol_type = other DNA
gctgccgctaaaaacggcgatactatcagcttcgccgggaataacggtacaggaatcactgctacggcgggaact

SEQ ID NO: 408463 - DNA, 75 bp, synthetic construct
  source 1..75: mol_type = other DNA
cgttgcggccaccgatcggcagaaatgtaaccgctgtatggattgttttcatgtttgcccggaaccgcatgtgct

SEQ ID NO: 408464 - DNA, 75 bp, synthetic construct
  source 1..75: mol_type = other DNA
gctccctgtttttatatgttttcctcctaggaaattgcatcagcaatgaacacgtcagtaatgagcgtatatgca

SEQ ID NO: 408465 - DNA, 75 bp, synthetic construct
  source 1..75: mol_type = other DNA
gctctttgtttttatttgctttcctcctgggaaattgcatcagcaatgaacacgtcagtaatgagcgtgtatgca

SEQ ID NO: 408466 - DNA, 75 bp, synthetic construct
  source 1..75: mol_type = other DNA
ccctctcttataacaacatcgccgataccgatgcggcgctggagtgcgtgaaagagttcgccgagccggcatgtg

SEQ ID NO: 408467 - DNA, 75 bp, synthetic construct
  source 1..75: mol_type = other DNA
actgcaatcgacgcaatcctgggcgtgtatgaagaaggttctgaatataaaaaatacctcgacatgggttactct

SEQ ID NO: 408468 - DNA, 75 bp, synthetic construct
  source 1..75: mol_type = other DNA
taagttaattcgaaccgttcaagacctgtttatggcaaccaatatcaaaaactctgaagcattcaaagcagctgc

SEQ ID NO: 408469 - DNA, 75 bp, synthetic construct
  source 1..75: mol_type = other DNA
gatgccctgggttatcccaagtaccgcgatcattactttagcagagctattgttactcagaatcataaaggcggt

SEQ ID NO: 408470 - DNA, 75 bp, synthetic construct
  source 1..75: mol_type = other DNA
tgaataaatggcttgatagtcaaagtaaacattgtagaaatgtcacgacaagcgtgattttacatcgtgatctta

SEQ ID NO: 408471 - DNA, 75 bp, synthetic construct
  source 1..75: mol_type = other DNA
gcaatggctgagaccgagctcaaatacggaaaagatcccgaaatgagaaagcttgcgcaggaggtaatgactcca

SEQ ID NO: 408472 - DNA, 75 bp, synthetic construct
  source 1..75: mol_type = other DNA
ttggtcgctgcaaaattctcaatgaaaagatcaaggacctttatgctgaacgaatgaaagctattggtgatctgc

SEQ ID NO: 408473 - DNA, 75 bp, synthetic construct
  source 1..75: mol_type = other DNA
gacgcttgcaacccgtttcgatctcgctatcaaagcctttgaacataccgccgcctacgacagcatgattgccaa

SEQ ID NO: 408474 - DNA, 75 bp, synthetic construct
  source 1..75: mol_type = other DNA
atgccaaaaacaatatgaccatcggtattggcgcaggccagatgagccgcgtgtactccgcaaaaatcgccggta

SEQ ID NO: 408475 - DNA, 75 bp, synthetic construct
  source 1..75: mol_type = other DNA
gcgctctgctcagtgtttctgacaaagccggtatcgtcgaattcgcccaggctctttccgcacgcggtgtggagc

SEQ ID NO: 408476 - DNA, 75 bp, synthetic construct
  source 1..75: mol_type = other DNA
attctgaagcatttaaggcagctgcttccaaagggcgtacagtgcttgatatcaaaaaatcagaggaactttgtt

SEQ ID NO: 408477 - DNA, 75 bp, synthetic construct
  source 1..75: mol_type = other DNA
cggcattatcgcctttaaccgcgaactggatgcggaaaccgctcaggcgatcgtttcccgccagttcgtcgaagt

SEQ ID NO: 408478 - DNA, 75 bp, synthetic construct
  source 1..75: mol_type = other DNA
gccatcaaagccttcgaacacactgccgcctacgacagcatgattgccaactatttcggcagcatggttccggcg

SEQ ID NO: 408479 - DNA, 75 bp, synthetic construct
  source 1..75: mol_type = other DNA
gggtacaagtcagtccgtagcgaggtagtcaaacaggcgaacaccggaaggggggtagcccaggctaaagaaaat

SEQ ID NO: 408480 - DNA, 75 bp, synthetic construct
  source 1..75: mol_type = other DNA
acgaatggcagcggaacaagctaaagcggtaacggatgacttgccggaagtaatagcgttctgggaggcgttcga

SEQ ID NO: 408481 - DNA, 75 bp, synthetic construct
  source 1..75: mol_type = other DNA
attacctgttgttctgattgaagcagaccggggagacaatgcgcaaaaaagaggtgcgtttgacttcgataacct

SEQ ID NO: 408482 - DNA, 75 bp, synthetic construct
  source 1..75: mol_type = other DNA
tgagcttgtcgcaataaatcagtattttctccatgcccggatgtttaaaaactggggcctgatgcgtctcaatga

SEQ ID NO: 408483 - DNA, 75 bp, synthetic construct
  source 1..75: mol_type = other DNA
atgaaaggtgatgttaagatcataaattatctcaataaactattgggaaatgagcttgtcgcaataaatcagtat

SEQ ID NO: 408484 - DNA, 75 bp, synthetic construct
  source 1..75: mol_type = other DNA
ttcttgctctgggtttggttggtgctgcaaatgctaatacctattatgtgtgtaattcctacttcgaacataaag

SEQ ID NO: 408485 - DNA, 75 bp, synthetic construct
  source 1..75: mol_type = other DNA
aacggctggagctttaccccgttgagcaggtatcaggttttatccatcgggcagtaagccaggagcgggcgatta

SEQ ID NO: 408486 - DNA, 75 bp, synthetic construct
  source 1..75: mol_type = other DNA
ctggttcaagctggacattgagcgccatatgaaggctgttgagcgtgtcattaatgagcgaaatgttgacgaaga

SEQ ID NO: 408487 - DNA, 75 bp, synthetic construct
  source 1..75: mol_type = other DNA
ttttccggcagctacaaggggttgtggtgggcttatccgggagcagatttaagcaaggccaaagaaatctggatt

SEQ ID NO: 408488 - DNA, 75 bp, synthetic construct
  source 1..75: mol_type = other DNA
gggaattattaccctggctttctggttgggttcgttgttcagcgaacaaatcaggcagaaaaacacatcttaccc

SEQ ID NO: 408489 - DNA, 75 bp, synthetic construct
  source 1..75: mol_type = other DNA
gataacgggcgtgcgggtgagcgttacgcgaaaaaacatgcagaacgcagcgccgaagacggctggagaacggca

SEQ ID NO: 408490 - DNA, 75 bp, synthetic construct
  source 1..75: mol_type = other DNA
gcagtaagccaggagcgggcgattatggatctgtttatggcactctcggattctgaaacaacccgcctttacggt

SEQ ID NO: 408491 - DNA, 75 bp, synthetic construct
  source 1..75: mol_type = other DNA
atttccaacctgcgtcgtaaactgccggatcgtaaagatggtcacccgtggtttaaaaccttgcgtggtcgcggc

SEQ ID NO: 408492 - DNA, 75 bp, synthetic construct
  source 1..75: mol_type = other DNA
tgccatgtctgagaaaggatatcttaacgtaaaagacagcacacttgtttcaaaacaggatactgcccttggttt

SEQ ID NO: 408493 - DNA, 75 bp, synthetic construct
  source 1..75: mol_type = other DNA
ctgggtggtgattccgaaaagcgttgctggacatcctggccgatgaaaaagagaacggtccggaagataccacgc

SEQ ID NO: 408494 - DNA, 75 bp, synthetic construct
  source 1..75: mol_type = other DNA
aggtcgtgaaattggcctcacccgtgaacgtgttcgccagattcaggttgaaggcctgcgccgtttgcgtgaaat

SEQ ID NO: 408495 - DNA, 75 bp, synthetic construct
  source 1..75: mol_type = other DNA
tgctcatgaaaccatgacgaacgggtcggcggatgcgcaccagaaaatgggggaaagtcatcagaggatgatggg

SEQ ID NO: 408496 - DNA, 75 bp, synthetic construct
  source 1..75: mol_type = other DNA
atgagcatgaaagagcagcggttgcccatgaattcatgaataacgggcaatccggcccacatcaggctatggccg

SEQ ID NO: 408497 - DNA, 75 bp, synthetic construct
  source 1..75: mol_type = other DNA
aggacagataaatgaccgtctgaatctttggggtaatgtgggagtacagacaggtgataaggggtacagcgacac

SEQ ID NO: 408498 - DNA, 75 bp, synthetic construct
  source 1..75: mol_type = other DNA
cgatatgatgatagaaattctgcgtgatgaagaaggccatattgactggctggaaacggaacttgatttgattca

SEQ ID NO: 408499 - DNA, 75 bp, synthetic construct
  source 1..75: mol_type = other DNA
taatgtcatctctggccagcaactggctctgaccgcccgccagtattatgaaaaacaactcggtagccttgagaa

SEQ ID NO: 408500 - DNA, 75 bp, synthetic construct
  source 1..75: mol_type = other DNA
gcccttccgttggcagttatccgggcggcgacagccaggtccggtcactgtatgacggtgcggggaaaacaggaa

SEQ ID NO: 408501 - DNA, 75 bp, synthetic construct
  source 1..75: mol_type = other DNA
agctttaccttggtgagattggttattcaccactgttaacggccgaagaagaagaagtttattttgcgcgtcgcg

SEQ ID NO: 408502 - DNA, 75 bp, synthetic construct
  source 1..75: mol_type = other DNA
gggtctggcgttgctggacccttatcgaagaggggcaacctggggctgatccgcgcgcggtagagaagtttgacc

SEQ ID NO: 408503 - DNA, 75 bp, synthetic construct
  source 1..75: mol_type = other DNA
cgtgttcgccagattcaggttgaaggcctgcgccgtctgcgtgagattttgcagactcaggggctgaatatcgaa

SEQ ID NO: 408504 - DNA, 75 bp, synthetic construct
  source 1..75: mol_type = other DNA
atctctggctggcgtttggtgaaaagggaattattaccctggccttctggctgggttcgttgttcagcgaacaaa

SEQ ID NO: 408505 - DNA, 75 bp, synthetic construct
  source 1..75: mol_type = other DNA
agagtgttatcagcattagatctgaattgactaaaatcctacaaggtttaccgagcgattcatatttagcaaatc

SEQ ID NO: 408506 - DNA, 75 bp, synthetic construct
  source 1..75: mol_type = other DNA
attcgggattcagtggaatgctccaataatagaagctgacgaagcgaagaagatcgtcatttttcttgaggacaa

SEQ ID NO: 408507 - DNA, 75 bp, synthetic construct
  source 1..75: mol_type = other DNA
tctccatataatccttaccctatttcttttgatgataaaaatttattaaagactcctgtcattgattctagcaat

SEQ ID NO: 408508 - DNA, 75 bp, synthetic construct
  source 1..75: mol_type = other DNA
cgcctcgctatcgaccgtgcttttaccgtaaaaggtgccgggctggtggtgacgggtacggcgttaagtggggaa

SEQ ID NO: 408509 - DNA, 75 bp, synthetic construct
  source 1..75: mol_type = other DNA
gatcacgcgctgttggtggtggcgtgcgatgacggcgtgatggcacagacccgtgagcatctggcgattttgcag

SEQ ID NO: 408510 - DNA, 75 bp, synthetic construct
  source 1..75: mol_type = other DNA
aatagagaatccatctataagcattgtgctggagtttgaaaagtcgatagaggaaaaactattagaagatataga

SEQ ID NO: 408511 - DNA, 75 bp, synthetic construct
  source 1..75: mol_type = other DNA
gaagttttaagcaggtttaaatttaataatggtatgcaagctcctgccataaagatactaaaaatgcttagtcaa

SEQ ID NO: 408512 - DNA, 75 bp, synthetic construct
  source 1..75: mol_type = other DNA
gcattgagcatgaacttcgacatgcgcaaagacgtacgaggtgtctttatggcgaaaaaagaaacactgctgtct

SEQ ID NO: 408513 - DNA, 75 bp, synthetic construct
  source 1..75: mol_type = other DNA
caagccttcagcgaagggcaaacggtcgtcgtgcctgccggattcgtttgtgacaatatcaacaccggcatcttc

SEQ ID NO: 408514 - DNA, 75 bp, synthetic construct
  source 1..75: mol_type = other DNA
tttattaatttaaatgatatagcaaaagaatactctatactattagaaaatagaaacaatgaaaccgcattaata

SEQ ID NO: 408515 - DNA, 75 bp, synthetic construct
  source 1..75: mol_type = other DNA
aagaatatagtattcttttaaagaacaaagataaattcactgcatcaattacacctttagaaaaatatatcattt

SEQ ID NO: 408516 - DNA, 75 bp, synthetic construct
  source 1..75: mol_type = other DNA
cttgtgaattaatcacctcaaaagaaaaagatataacatcatctcatatagcgttattagaggaaatagcaaaca

SEQ ID NO: 408517 - DNA, 75 bp, synthetic construct
  source 1..75: mol_type = other DNA
tcgttattaccgtaacgatcggattgtcgaatttgccaatatgatccgcgatctcgatcaggagtgtggttcaac

SEQ ID NO: 408518 - DNA, 75 bp, synthetic construct
  source 1..75: mol_type = other DNA
cgctggactggaatgacctgttgttacgtaaccggttcagtaagtcggacattaaaaattatcgctactatggcg

SEQ ID NO: 408519 - DNA, 75 bp, synthetic construct
  source 1..75: mol_type = other DNA
catggggtcggcaacggtcagattttcgctgtcatgcggtgcaacatgggagcgcatcattgaccagccgcagcg

SEQ ID NO: 408520 - DNA, 75 bp, synthetic construct
  source 1..75: mol_type = other DNA
aacgggcgaacaagggcaaaggggaaatgcagcgaatgccagaaacattccgctgctgggtgttcagtcgggata

SEQ ID NO: 408521 - DNA, 75 bp, synthetic construct
  source 1..75: mol_type = other DNA
tgaagcgcgcaaaattgcacttaaggaatccggtactgtaaaagaaatcgcaaactgtaacccagcgccgcttta

SEQ ID NO: 408522 - DNA, 75 bp, synthetic construct
  source 1..75: mol_type = other DNA
ggtgggagcgcatcatagaccgaccggaacgcttcgaacggaaggcgaatttttccggcagctacaaggggctgt

SEQ ID NO: 408523 - DNA, 75 bp, synthetic construct
  source 1..75: mol_type = other DNA
agcgcatcattgaccagccgcagcgctttggtaagcagaaagcgaacatcagaggcagctatgttggtcactggt

SEQ ID NO: 408524 - DNA, 75 bp, synthetic construct
  source 1..75: mol_type = other DNA
gtgcgatgacggcgtgatggcacagacccgtgagcatctggcgattttgcagctgaccggtaacccgatgctgac

SEQ ID NO: 408525 - DNA, 75 bp, synthetic construct
  source 1..75: mol_type = other DNA
ttcaaatcctggaatattttgaccgcattggctttacgcgtcgtcgtggaaatgatcatttattgcgcgacgcat

SEQ ID NO: 408526 - DNA, 75 bp, synthetic construct
  source 1..75: mol_type = other DNA
cactggtacggcgttaagcggggaagtgaaggttggtgattcactatggctgacaggtgtaaataagccgatgcg

SEQ ID NO: 408527 - DNA, 75 bp, synthetic construct
  source 1..75: mol_type = other DNA
ttgactggaatgacctgctaatccgcgacagatttagcaaatcggacatcaaaaactatcgttattttggcgatc

SEQ ID NO: 408528 - DNA, 75 bp, synthetic construct
  source 1..75: mol_type = other DNA
aagcgggcttcagcgaagagcagcaggccatctggcaaaaagcagagccgctgtttggtgacgaaccgtggtggg

SEQ ID NO: 408529 - DNA, 75 bp, synthetic construct
  source 1..75: mol_type = other DNA
atctctgcccgcaacacgctggcgggggcgcgcgtggtgatgcttaacccaccgcgccgcggtaaacgtaagccg

SEQ ID NO: 408530 - DNA, 75 bp, synthetic construct
  source 1..75: mol_type = other DNA
tgaacgcacagataaaggacaacatgcgctttggactggagtttgagaaatccgcctttggtaaatacaacgtgg

SEQ ID NO: 408531 - DNA, 75 bp, synthetic construct
  source 1..75: mol_type = other DNA
gaaggaacaaaacgtgacgcatataaaaacactgaacgttatacagcgttttatcgtgtggggagcggtacacaa

SEQ ID NO: 408532 - DNA, 75 bp, synthetic construct
  source 1..75: mol_type = other DNA
tagagtgtctgaaagattataatgtttatttttcctatccctatgatttagattggataatgcttaataaattct

SEQ ID NO: 408533 - DNA, 75 bp, synthetic construct
  source 1..75: mol_type = other DNA
atttgtgggcactgacaaaaacaaggccattcagacagtgaaagaccgcattctggccgaacgggcaaaacagcc

SEQ ID NO: 408534 - DNA, 75 bp, synthetic construct
  source 1..75: mol_type = other DNA
cagcagattacggtgctgttattacaaatagtgcacagcaaaaatccagtcttttactggatctgaaggccattg

SEQ ID NO: 408535 - DNA, 75 bp, synthetic construct
  source 1..75: mol_type = other DNA
gcatgggcagaaagggaatgacctcaacgcaggaaaaaatctggttttcagtggtcagaacggcgcaattgtcct

SEQ ID NO: 408536 - DNA, 75 bp, synthetic construct
  source 1..75: mol_type = other DNA
aagacggtgagatggacctgagtatgaagaacaaggatttcagcccgttgattggcagaacagggattgagctgg

SEQ ID NO: 408537 - DNA, 75 bp, synthetic construct
  source 1..75: mol_type = other DNA
gagtggcaattctggccgggtgtgcctctaacgcccccgagcaaaagcctcagccccagactgcccctgccgaaa

SEQ ID NO: 408538 - DNA, 75 bp, synthetic construct
  source 1..75: mol_type = other DNA
cgtaaagaacgccgcggtgactacctcggcgcaaccgtacaggttattccgcacatcactaacgctatcaaagag

SEQ ID NO: 408539 - DNA, 75 bp, synthetic construct
  source 1..75: mol_type = other DNA
ggagtatgaaaaaaatataacagcatatgaaagatcgaaaattcatgttcattatgtccctgcataccgagatcc

SEQ ID NO: 408540 - DNA, 75 bp, synthetic construct
  source 1..75: mol_type = other DNA
ataacatggtcactgacaggctataacacggtagcaaacaaggaagcaacccggaatgccgccgccctgttctct

SEQ ID NO: 408541 - DNA, 75 bp, synthetic construct
  source 1..75: mol_type = other DNA
actattaatggtcatggtgagaataaaggtggccttaaagttggggacggcgttgttgttcttgagcaacagcca

SEQ ID NO: 408542 - DNA, 75 bp, synthetic construct
  source 1..75: mol_type = other DNA
acatcgtatcagctgacgccggaaaaacatggacaggtggaggtattattacagacaagggaaccaatgttacct

SEQ ID NO: 408543 - DNA, 75 bp, synthetic construct
  source 1..75: mol_type = other DNA
cgaccagctgctggtgacccgaatcgacagcaaggccaccgccctttcgccaaaattgcctgatgctaaagataa

SEQ ID NO: 408544 - DNA, 75 bp, synthetic construct
  source 1..75: mol_type = other DNA
cgaccaactgctggtgacgcggatcgacagcaaagccaccgccctttcaccgaaactgcctgacgctaaagataa

SEQ ID NO: 408545 - DNA, 75 bp, synthetic construct
  source 1..75: mol_type = other DNA
aacgacgtgatgaccacgttgatgggcgatctggtcggtcaggggctggaagaacagattgtggcgcgtgatgag

SEQ ID NO: 408546 - DNA, 75 bp, synthetic construct
  source 1..75: mol_type = other DNA
gacggaacaggaaattatgtcattctggaggaaggtacctctgtcccggacaccgtgaatgacaggagccagtat

SEQ ID NO: 408547 - DNA, 75 bp, synthetic construct
  source 1..75: mol_type = other DNA
aggtaccctgagtgaggacagtggcaccctgatattccaggggcatccggttatccacgcctccgtcagtggcag

SEQ ID NO: 408548 - DNA, 75 bp, synthetic construct
  source 1..75: mol_type = other DNA
agagcaaattgtcgcccgtgatgagaactcatggctgatagacggcggcacgcctattgacgacgtcatgcgcgt

SEQ ID NO: 408549 - DNA, 75 bp, synthetic construct
  source 1..75: mol_type = other DNA
acaacaaaaaaaatgggttattgttgctgtattaagagcatatgcaggtattaatggtgctacgaactggtggaa

SEQ ID NO: 408550 - DNA, 75 bp, synthetic construct
  source 1..75: mol_type = other DNA
tttattccttggcagaggtaaacctctctctcataactatgttttgaagaaactcgataacaattcattgaaaaa

SEQ ID NO: 408551 - DNA, 75 bp, synthetic construct
  source 1..75: mol_type = other DNA
tgccggagcggaaacgggttaccgttatcacctgacggaagacacatttattgagcctcaggccgaactggttta

SEQ ID NO: 408552 - DNA, 75 bp, synthetic construct
  source 1..75: mol_type = other DNA
atgttaaacagtattttagtcatactctgcttgatcgctgtaagtgcgttcttctcgatgtccgagatctcgctt

SEQ ID NO: 408553 - DNA, 75 bp, synthetic construct
  source 1..75: mol_type = other DNA
ctgcctgttcgtctgcacccctctggtgtggtttttcaacggcctggcgaacatgatcttccgtatctttaaatt

SEQ ID NO: 408554 - DNA, 75 bp, synthetic construct
  source 1..75: mol_type = other DNA
acttctgatgacatctacgcggtagtggaagccggtgcgctggcgggcgtgttacgtaaacaggaacacgagctg

SEQ ID NO: 408555 - DNA, 75 bp, synthetic construct
  source 1..75: mol_type = other DNA
ccggcggggtcgtatcctctctgggtaaaggcattgccgcagcctccctcgcagctattcttgaagcccgtggcc

SEQ ID NO: 408556 - DNA, 75 bp, synthetic construct
  source 1..75: mol_type = other DNA
atcggcagcctttcaggattaagttgtaagatggtcaactacaccctgcaaacaaacggactcagcaacacctca

SEQ ID NO: 408557 - DNA, 75 bp, synthetic construct
  source 1..75: mol_type = other DNA
ctgaaggcgatacctcaaaagaaaaacaagcggtaaaacaacccaagaagttctttagtgacgtcgacgattcag

SEQ ID NO: 408558 - DNA, 75 bp, synthetic construct
  source 1..75: mol_type = other DNA
tgggggcgctgggtgaccgcatgttaattctggtgaatatcgaaaaactgctcaatagtgaagagatggcgctgt

SEQ ID NO: 408559 - DNA, 75 bp, synthetic construct
  source 1..75: mol_type = other DNA
gataagaccacagtcaaattttcgattccaatggataacgccatttcgctgcgtacggtagatgataacggctgg

SEQ ID NO: 408560 - DNA, 75 bp, synthetic construct
  source 1..75: mol_type = other DNA
tataccctgcaaacaaacggactcagcaacacctcaatccatatattcccggcgatcgccaactcgtcgttagcc

SEQ ID NO: 408561 - DNA, 75 bp, synthetic construct
  source 1..75: mol_type = other DNA
ggcgtacgatatgcagttcagtctgaatggcagttcatggaaaccggtgagcaataccgcctattactacacctt

SEQ ID NO: 408562 - DNA, 75 bp, synthetic construct
  source 1..75: mol_type = other DNA
cgcaacttgaccatcgataacctgaccgtcagccacgctaattacgccattttacgccagggatttcataaccag

SEQ ID NO: 408563 - DNA, 75 bp, synthetic construct
  source 1..75: mol_type = other DNA
aaatatctctcgataccgcagaatttccgagtgaatgatattcaactggataatactcatcttgcttataaattg

SEQ ID NO: 408564 - DNA, 75 bp, synthetic construct
  source 1..75: mol_type = other DNA
aaatgattaatagtgccgggatgttaatcggctatggggtaattaaaggcaaatatctctcgataccgcagaatt

SEQ ID NO: 408565 - DNA, 75 bp, synthetic construct
  source 1..75: mol_type = other DNA
accatgtcatcgagcgtatcaactgtactaacggaaaaatcaactggggcatcggcataggccttgcggggagta

SEQ ID NO: 408566 - DNA, 75 bp, synthetic construct
  source 1..75: mol_type = other DNA
ttcttggaagcttgcgcggcaacggtagagggcgatttgttttacagggcggcagccaggtgacaggggaggagg

SEQ ID NO: 408567 - DNA, 75 bp, synthetic construct
  source 1..75: mol_type = other DNA
cagagggcgatttgtcttacaggacggcagccaggtgacagggggggagggcggcagtatacataacattaccct

SEQ ID NO: 408568 - DNA, 75 bp, synthetic construct
  source 1..75: mol_type = other DNA
atttcggctatatcgtaaccaccagcggtcaaggtgaccggacccgcgcaggtgattggcgggcgctcctattgt

SEQ ID NO: 408569 - DNA, 75 bp, synthetic construct
  source 1..75: mol_type = other DNA
taactgcctgccagaacgttactccacttcttcaggtcgcggagcaccgcgaagccggtcgctttacttctatcg

SEQ ID NO: 408570 - DNA, 75 bp, synthetic construct
  source 1..75: mol_type = other DNA
atcctcgccagagaaacggcacatgtaaaattccagccgtggctggatgataagtggagtcgagtgttaccatat

SEQ ID NO: 408571 - DNA, 75 bp, synthetic construct
  source 1..75: mol_type = other DNA
ctcgatcgagaagttcaacaatccccgatcacaaaacaattcactgataacgaactttgcacactcgcctggtta

SEQ ID NO: 408572 - DNA, 75 bp, synthetic construct
  source 1..75: mol_type = other DNA
aaactgatcgattcacaagatgttgaaacacgcggtgttgaaatccttaaaggcctggatgcgatcctcgtacct

SEQ ID NO: 408573 - DNA, 75 bp, synthetic construct
  source 1..75: mol_type = other DNA
cgcgtgctggaaggcggcgaaggtcatgacgtagtactggtcgaaatcggcggtacagtaggtgatatcgaatcc

SEQ ID NO: 408574 - DNA, 75 bp, synthetic construct
  source 1..75: mol_type = other DNA
ttgccgttcctcgaagcgattcgccagatggctgttgaaattggccgtgagcacactctgtttatgcacctgacg

SEQ ID NO: 408575 - DNA, 75 bp, synthetic construct
  source 1..75: mol_type = other DNA
gtgcaaaatccgaatactccttttgggatatttatcgttatcgctttgctatgcggttttgcaggtgcaaacttt

SEQ ID NO: 408576 - DNA, 75 bp, synthetic construct
  source 1..75: mol_type = other DNA
cggcaatttcatcgcatttttcgccgtgtttatggggttgttcctgactgcgggtctgggtagtggctccacctt

SEQ ID NO: 408577 - DNA, 75 bp, synthetic construct
  source 1..75: mol_type = other DNA
ttatagcattgatattgatggcgtttcccccccaggtgatggaaatatatatgcaattattcctccccattattc

SEQ ID NO: 408578 - DNA, 75 bp, synthetic construct
  source 1..75: mol_type = other DNA
aagaatatcctcggatactcaacagggcgcgagaaatccttgccagagaaacggcgcatgtaaaattccaaccgt

SEQ ID NO: 408579 - DNA, 75 bp, synthetic construct
  source 1..75: mol_type = other DNA
ttgctctgctgtgcggttttgcgggcgcaaactttgcttcaagtatgggaaatatcagttttttcttcccgaaag

SEQ ID NO: 408580 - DNA, 75 bp, synthetic construct
  source 1..75: mol_type = other DNA
cagataaccatttatcgcgtcaagatgaaaggtggcagcgatgatgaagcgcagcgagaagcgatcaccgaaacg

SEQ ID NO: 408581 - DNA, 75 bp, synthetic construct
  source 1..75: mol_type = other DNA
ttcaatgaaaattcaggtcggcgcaaatgatggtgaaaccatcacgattgatctgaaaaagatcgactcttctac

SEQ ID NO: 408582 - DNA, 75 bp, synthetic construct
  source 1..75: mol_type = other DNA
caaaagcaactcctgcgacaaccactccagtagctccgttaatccctggtgggattacttatcaggctacagtga

SEQ ID NO: 408583 - DNA, 75 bp, synthetic construct
  source 1..75: mol_type = other DNA
cgccaacgacggtatttctgttgcacagaccactgaaggcgcgctgtccgaaatcaacaacaacttacagcgtat

SEQ ID NO: 408584 - DNA, 75 bp, synthetic construct
  source 1..75: mol_type = other DNA
aatgatggtgaaaccatcacgattgacctgaaaaaaatcgactcttctacactgaagctgaccagcttcaacgtc

SEQ ID NO: 408585 - DNA, 75 bp, synthetic construct
  source 1..75: mol_type = other DNA
agcagtctatgtttcagctgatggtaattttactactgacgctgaaactaaagccgaaaccaccgccgatcccct

SEQ ID NO: 408586 - DNA, 75 bp, synthetic construct
  source 1..75: mol_type = other DNA
aactcctgccgagtattttgctcaagctgatggcactattactagtggtgaaaatgcggctaccagtaaagctat

SEQ ID NO: 408587 - DNA, 75 bp, synthetic construct
  source 1..75: mol_type = other DNA
ttgtaccctccgggccggactacattcacgatgaaacagtctaccaatgacctgttcggtgcagcacttgttcag

SEQ ID NO: 408588 - DNA, 75 bp, synthetic construct
  source 1..75: mol_type = other DNA
ccctagtggaacgctgtgatcttaaagctgttatcaccttgcctagcggcgtgttcaaaccctacgccggagtca

SEQ ID NO: 408589 - DNA, 75 bp, synthetic construct
  source 1..75: mol_type = other DNA
taagaccgagttgctgtttgtcgaaaatatctatcgattgctgaaaaaaggtggtaccgcctgcgtgatcgtgcc

SEQ ID NO: 408590 - DNA, 75 bp, synthetic construct
  source 1..75: mol_type = other DNA
acatcgaagacgtccgatccattggctgcgcttgacgacgcaatcagctccatcgacaaattccgttcatccctg

SEQ ID NO: 408591 - DNA, 75 bp, synthetic construct
  source 1..75: mol_type = other DNA
atgccttaacccaggatgctcaaactgtttcaacctactactcgcaagccgatggcacggtcacgaatagcgcag

SEQ ID NO: 408592 - DNA, 75 bp, synthetic construct
  source 1..75: mol_type = other DNA
tatgcgaccgaagtgtccaacatgtcgaaagcgcagattatccagcaggccggtaactccgtgctggcaaaagcc

SEQ ID NO: 408593 - DNA, 75 bp, synthetic construct
  source 1..75: mol_type = other DNA
ctctgtataaagcggctgacggctctctgaccactgaagctacaggtaaatctgaagcgaccacggatccgctga

SEQ ID NO: 408594 - DNA, 75 bp, synthetic construct
  source 1..75: mol_type = other DNA
aacggcaaaggtactattgcgaacaaagctgctacagtcagcgatctgaccgctgctggtgcaacgggaacaggt

SEQ ID NO: 408595 - DNA, 75 bp, synthetic construct
  source 1..75: mol_type = other DNA
aacaaacaactccggtggtgcggctactgcaactcttaaagagctgtttactcttgctggcgatggtaaatctct

SEQ ID NO: 408596 - DNA, 75 bp, synthetic construct
  source 1..75: mol_type = other DNA
cgcagtcccgtattcaggacgccgactatgcgaccgaagtgtccaacatgtcgaaagcgcagattatccagcagg

SEQ ID NO: 408597 - DNA, 75 bp, synthetic construct
  source 1..75: mol_type = other DNA
gtttctgcttatgttgatgatgcaggtacattgacaactgatgcaaacaaaactgtaaaatattatgcccacact

SEQ ID NO: 408598 - DNA, 75 bp, synthetic construct
  source 1..75: mol_type = other DNA
tggcaagcattctgaaagacaaggattttgcccttaatagtggaactactcagtatgctgtcaccggcagtacag

SEQ ID NO: 408599 - DNA, 75 bp, synthetic construct
  source 1..75: mol_type = other DNA
gtctaaagcgcagatcatccagcaggccggtaactccgtgttggctaaagctaaccaggttcctcagcaggttct

SEQ ID NO: 408600 - DNA, 75 bp, synthetic construct
  source 1..75: mol_type = other DNA
acgcgtatgaaagaaacggtgacggttgagccgaagaaggtcatcattctcgaaggcattttgctgctgacggat

SEQ ID NO: 408601 - DNA, 75 bp, synthetic construct
  source 1..75: mol_type = other DNA
ttcctgcaattcattgagccttctaaacaatatgcggacattatcgtgccgcgcggcgggaaaaaccgcatcgcg

SEQ ID NO: 408602 - DNA, 75 bp, synthetic construct
  source 1..75: mol_type = other DNA
tctttaagttagaagacgccaatggcaaagatactggttcatttgcgttgattggtgatgacggtaaacagtatg

SEQ ID NO: 408603 - DNA, 75 bp, synthetic construct
  source 1..75: mol_type = other DNA
acatctgttgatgttgttctggcgagcgatggcaaaattacagcgaaagatggctcagctctgtatatcgactca

SEQ ID NO: 408604 - DNA, 75 bp, synthetic construct
  source 1..75: mol_type = other DNA
ggacatctgcctgatgcgccgcattaagcgtgacgttaacgaacgtggtcgctccatggactccgtgatggctca

SEQ ID NO: 408605 - DNA, 75 bp, synthetic construct
  source 1..75: mol_type = other DNA
acccgcatgcaggaaacgattcatattgaaccgaagaaagtgatcatccttgaagggatcctgctgctgaccgac

SEQ ID NO: 408606 - DNA, 75 bp, synthetic construct
  source 1..75: mol_type = other DNA
ctgcggtacgggggggtttctgttaggtgcctaccagtacatccttactcagttgtctttatctcaaaacttaaa

SEQ ID NO: 408607 - DNA, 75 bp, synthetic construct
  source 1..75: mol_type = other DNA
tgcccccgtggactttgtttccggactgggccccctgaactggacatacgacaaaacatcaggcacaggtaccct

SEQ ID NO: 408608 - DNA, 75 bp, synthetic construct
  source 1..75: mol_type = other DNA
tgctgtctccgaacttgccagtagtgtaacgaaaaacgcaggccgaaaattaaaaaaaatatcgctgatggtttt

SEQ ID NO: 408609 - DNA, 75 bp, synthetic construct
  source 1..75: mol_type = other DNA
aatgaaaacactgtcgctgaaagatgctgacttccatctttcacgtaacgcctcgctgaacagtgacattaagtc

SEQ ID NO: 408610 - DNA, 75 bp, synthetic construct
  source 1..75: mol_type = other DNA
aaggagaccgtactttccgtaccctgacggtgaataaactggatgcaacaggcagtgattttgttctgcgtacgg

SEQ ID NO: 408611 - DNA, 75 bp, synthetic construct
  source 1..75: mol_type = other DNA
ggacgtcctgttaacagccccgggtgcttttgccggcagttcactgacagtgcatgatggcggtcatcttacagc

SEQ ID NO: 408612 - DNA, 75 bp, synthetic construct
  source 1..75: mol_type = other DNA
ggaggaaggtacctctgtcccggacaccgtgaatgacaggagccagtatgaagggaatattacgctggaccataa

SEQ ID NO: 408613 - DNA, 75 bp, synthetic construct
  source 1..75: mol_type = other DNA
tgaagggagtgccactgcaaccacagttggtgaccagagtgattacagcggaaatgttacgctggaaaataaatc

SEQ ID NO: 408614 - DNA, 75 bp, synthetic construct
  source 1..75: mol_type = other DNA
gggagaaacggataaaaggcgagaaagacagccggatgctgtttaatgttggtatgaatgcgcagataaaggaca

SEQ ID NO: 408615 - DNA, 75 bp, synthetic construct
  source 1..75: mol_type = other DNA
ttccggtatatgataaggacggaaaacttgtgggaagactgggtaaagccccaatggccgatttcagcagtgtga

SEQ ID NO: 408616 - DNA, 75 bp, synthetic construct
  source 1..75: mol_type = other DNA
gttgaaaagtaaccgatatggcagcgctttgtttggcgcgctgaataatcagagcgaatggcaaaggctgggtaa

SEQ ID NO: 408617 - DNA, 75 bp, synthetic construct
  source 1..75: mol_type = other DNA
atgaagggaaaatcgaactggtatccagtgtggagcagggagccggatatcttcagtttgataaagactacactg

SEQ ID NO: 408618 - DNA, 75 bp, synthetic construct
  source 1..75: mol_type = other DNA
atcaggaaaagcttttagctgggaagaccggggaatggctctgagcatgaaagacaaggattataacccactgat

SEQ ID NO: 408619 - DNA, 75 bp, synthetic construct
  source 1..75: mol_type = other DNA
tcccagaacatcattccgtcctctaccggtgcggctaaagctgtaggtaaagtactgccggaactgaacggcaaa

SEQ ID NO: 408620 - DNA, 75 bp, synthetic construct
  source 1..75: mol_type = other DNA
aaaaaacctcaatgaaaagaagaaaatatggtctagatcgtctattccatgcatacttgtatttgttttttggga

SEQ ID NO: 408621 - DNA, 75 bp, synthetic construct
  source 1..75: mol_type = other DNA
ggaagatgggtgtaaactacatagaaggtgtattgacaagatggggatggggatatcaatcaatttcgcaagaaa

SEQ ID NO: 408622 - DNA, 75 bp, synthetic construct
  source 1..75: mol_type = other DNA
atgaaaccttggcatgaagatgttaggcgatattttacagaacaccttatctatgatgaatccagtgattccctg

SEQ ID NO: 408623 - DNA, 75 bp, synthetic construct
  source 1..75: mol_type = other DNA
gagccgcatattgattatcaggacacactaagcaagagctatagtgaagaaaccaaatatgacatagtgctagca

SEQ ID NO: 408624 - DNA, 75 bp, synthetic construct
  source 1..75: mol_type = other DNA
acataatctccaacacatctcaccccatacctattaataatagtacaaactcggccatgatagaaaaatatgacg

SEQ ID NO: 408625 - DNA, 75 bp, synthetic construct
  source 1..75: mol_type = other DNA
atacggcgtcctttgccggactcggcacaaaagactacagctctcattcctggtatgccggtgctgaagtgggtt

SEQ ID NO: 408626 - DNA, 75 bp, synthetic construct
  source 1..75: mol_type = other DNA
atgtccctaaaggtctgccaaataccgtatagcgttggagtacaccctaccgcaatagcgcaaccgtacaatatt

SEQ ID NO: 408627 - DNA, 75 bp, synthetic construct
  source 1..75: mol_type = other DNA
aggtaaatggcatagagcttgatacttcattgataacatttgctccattaggtgggcgatatgttaatcactttt

SEQ ID NO: 408628 - DNA, 75 bp, synthetic construct
  source 1..75: mol_type = other DNA
ttcaccagcttaattggagggaatggaacaggtaagacggctgttctcctcgcattgacaaggatgtttggtgtc

SEQ ID NO: 408629 - DNA, 75 bp, synthetic construct
  source 1..75: mol_type = other DNA
catgtcatccatcgacacggaatgactgatgaaaagacggcgtacgaagttgaagctgcacttattgatgcctac

SEQ ID NO: 408630 - DNA, 75 bp, synthetic construct
  source 1..75: mol_type = other DNA
cagccaagcagaaatcattcttgctactgtaagggggatcgttcgaggggttttcattgctgataaatggctcaa

SEQ ID NO: 408631 - DNA, 75 bp, synthetic construct
  source 1..75: mol_type = other DNA
acatatcaacccgaaaccataacatttcatcataaagcattaatgatttccgttaacagaagtgcaaaggattca

SEQ ID NO: 408632 - DNA, 75 bp, synthetic construct
  source 1..75: mol_type = other DNA
cctgaccgctatcatcagactggtggaaaacctcggtaattatctgacggagagcgccagagaacgccttctggc

SEQ ID NO: 408633 - DNA, 75 bp, synthetic construct
  source 1..75: mol_type = other DNA
gctgaacagccacaacagccacaacagccacaacagccacaacagccacaacagccacaacagccacaacagcca

SEQ ID NO: 408634 - DNA, 75 bp, synthetic construct
  source 1..75: mol_type = other DNA
cgtcagttcgtggcagaacgtccagaccagttgtgggtggctgattttacctgggtaagcacatggcagggcttc

SEQ ID NO: 408635 - DNA, 75 bp, synthetic construct
  source 1..75: mol_type = other DNA
gtccatcacagtgataaaggttctcagtatgtatcactggcctatacggagcgactaaaagaagcaaaactgctg

SEQ ID NO: 408636 - DNA, 75 bp, synthetic construct
  source 1..75: mol_type = other DNA
gctgttatgtgtttggtatccagtcctatgcccagctggaagatatctacggtgagaaagcggctgccacgctgt

SEQ ID NO: 408637 - DNA, 75 bp, synthetic construct
  source 1..75: mol_type = other DNA
tcaacaccggattggtgcaggcgaagtgaaaaccttgttcaatatcgtccctgaggccgccgtgtatctgggcaa

SEQ ID NO: 408638 - DNA, 75 bp, synthetic construct
  source 1..75: mol_type = other DNA
caggaatccggtctgttcatgaatgacaccacgatgggctttatgctggaagccatccccatcaatggggcgaat

SEQ ID NO: 408639 - DNA, 75 bp, synthetic construct
  source 1..75: mol_type = other DNA
tcaacaaatattttaacaatgggcgcaatggcatttgtaattggagttctgattgctgtctttgtctggaaatca

SEQ ID NO: 408640 - DNA, 75 bp, synthetic construct
  source 1..75: mol_type = other DNA
tttttcttttcattcatgtccttgctgttgtgatgatttctgttatgacagtccatctgtgcagtatggctgtgg

SEQ ID NO: 408641 - DNA, 75 bp, synthetic construct
  source 1..75: mol_type = other DNA
cactggcagcaatccttaacgctgctaaacgcgcatatgaagaatcagcaagcgcagctggcattcgcatcaaag

SEQ ID NO: 408642 - DNA, 75 bp, synthetic construct
  source 1..75: mol_type = other DNA
tctggttttatgggtaaaaataagctggcagacgtttgtgaatggctgcatttactggtggtgcaccacgctgga

SEQ ID NO: 408643 - DNA, 75 bp, synthetic construct
  source 1..75: mol_type = other DNA
tctcgtcaaatgccgacactcatgcctccctgaagccggtggtttccatgtggctgtccattgccattcgtgggc

SEQ ID NO: 408644 - DNA, 75 bp, synthetic construct
  source 1..75: mol_type = other DNA
ttctagcatcctgactgtgttatttgccagtttagtaattcggatagctatggattttcagggggatatattgca

SEQ ID NO: 408645 - DNA, 75 bp, synthetic construct
  source 1..75: mol_type = other DNA
cacaggtggtcgtcagctgactgacaatccgaaagaggtggctaggatgctgaaaaaagatggcaaggattccga

SEQ ID NO: 408646 - DNA, 75 bp, synthetic construct
  source 1..75: mol_type = other DNA
atgatcaaactgaagacgccaaactctatggagattgccgggcaacctgctgttattacctacgtgccagaactg

SEQ ID NO: 408647 - DNA, 75 bp, synthetic construct
  source 1..75: mol_type = other DNA
accaagcaacaaagaaactaaatggcaatgagtattttgataaaaatgaggttgataaactcaactttaatataa

SEQ ID NO: 408648 - DNA, 75 bp, synthetic construct
  source 1..75: mol_type = other DNA
tggccttgaaagaggtcattacatccgaaaagagattttaaacgctgaacctattgttaaaagaaaaatgcctga

SEQ ID NO: 408649 - DNA, 75 bp, synthetic construct
  source 1..75: mol_type = other DNA
tattgccgttccgctgaacggcaatacctcccataccgtcgtcgtggccacagagcacggcgcatatcgcctgac

SEQ ID NO: 408650 - DNA, 75 bp, synthetic construct
  source 1..75: mol_type = other DNA
cttatgcttccctggttgggcgtttttacagtctcattcgtcggtggtgagtactggtggatagtcattattccc

SEQ ID NO: 408651 - DNA, 75 bp, synthetic construct
  source 1..75: mol_type = other DNA
ggcgatagcgcaccagaaaacagagaaatagccgcctggcgacaatgtctttttttagttcccgctttattaacc

SEQ ID NO: 408652 - DNA, 75 bp, synthetic construct
  source 1..75: mol_type = other DNA
cctcattggtctggtattatgggtaaaaataagctggcagacgtttataaacggctgtatttactggtggtgtac

SEQ ID NO: 408653 - DNA, 75 bp, synthetic construct
  source 1..75: mol_type = other DNA
actccttggtctggtattatgggtaaaaataagctggcagacgtttataaacggctgtatttactggtggtgtac

SEQ ID NO: 408654 - DNA, 75 bp, synthetic construct
  source 1..75: mol_type = other DNA
ttccgcgtgacatcaacccggaaatggagaaccgtctgagtgccgtacttgccgcaagggaagcagaaggtcgtc

SEQ ID NO: 408655 - DNA, 75 bp, synthetic construct
  source 1..75: mol_type = other DNA
ttataggatttgacttctatcgaataaatagatttggtagatgggaaaagtattattatatacaactaagaggcg

SEQ ID NO: 408656 - DNA, 75 bp, synthetic construct
  source 1..75: mol_type = other DNA
gcgtaaagtctggcgccagttgttacgcgaaggtatcagggtggccagatgtacagtggctcggctcatggcggt

SEQ ID NO: 408657 - DNA, 75 bp, synthetic construct
  source 1..75: mol_type = other DNA
gctcgttggtctgatattatgggtaaaaataagctggcagacgtttataaacggctgtatttactggtggtgtac

SEQ ID NO: 408658 - DNA, 75 bp, synthetic construct
  source 1..75: mol_type = other DNA
gccgcaacagccggtgtctcctgccatcaacgataagaagtcagattcaggtgtgaatgttccggcaggggggat

SEQ ID NO: 408659 - DNA, 75 bp, synthetic construct
  source 1..75: mol_type = other DNA
aatcaactttgatagtgataccaatacggtggatgtcgccattcgcaggctccgcgcaaaagttgatgatccttt

SEQ ID NO: 408660 - DNA, 75 bp, synthetic construct
  source 1..75: mol_type = other DNA
tcctcacacgtctgcgtgagaacaatcctcaccccacaaccgagcttaatttcagttcgccttttgaattgctga

SEQ ID NO: 408661 - DNA, 75 bp, synthetic construct
  source 1..75: mol_type = other DNA
gaaattattgttaatccggcagggggagaaatgcagatgctggggagtcgccaggataaagtaaccggaggaaaa

SEQ ID NO: 408662 - DNA, 75 bp, synthetic construct
  source 1..75: mol_type = other DNA
aaaagaaaatcatctattgcaggtaattttactaaattaggtgaggcaattacctcgagtgggcagagggttttt

SEQ ID NO: 408663 - DNA, 75 bp, synthetic construct
  source 1..75: mol_type = other DNA
tcgccaaaaatgtataccgggataaaagaattcgatctctcatcatcctggggaataaataatcgtgatgattta

SEQ ID NO: 408664 - DNA, 75 bp, synthetic construct
  source 1..75: mol_type = other DNA
gcgaggcgctaaccctgtacaaatacgatagcgccgggagtcggatgttcgaagagctggcagcgggaagcgatc

SEQ ID NO: 408665 - DNA, 75 bp, synthetic construct
  source 1..75: mol_type = other DNA
accggccagcgggaaaatcgtgatgtacgatgcgatgacctgtcagtttcgcgaaatgaaactgatgcgcaatcc

SEQ ID NO: 408666 - DNA, 75 bp, synthetic construct
  source 1..75: mol_type = other DNA
cggctgtgcggcatcgcaatatctggcaagcgccggtgtcggcaacctgacgctgcttgacttcgacaccgtttc

SEQ ID NO: 408667 - DNA, 75 bp, synthetic construct
  source 1..75: mol_type = other DNA
cgttaacctgcgtagaagcaggcgtgatggcaccgttgatcggcgtaattggttcgttgcaggcaatggaagcga

SEQ ID NO: 408668 - DNA, 75 bp, synthetic construct
  source 1..75: mol_type = other DNA
aaggcggtaaaaaaggtaatgtcacgctctacagctttgatggccgtttcaaaatccagcgagccatgcaggaca

SEQ ID NO: 408669 - DNA, 75 bp, synthetic construct
  source 1..75: mol_type = other DNA
gtgattgctgcctctgcctcactgcgtgaactgaaactacgtgcctttggtgatattcaggcgtttattgacctg

SEQ ID NO: 408670 - DNA, 75 bp, synthetic construct
  source 1..75: mol_type = other DNA
ctgagcggacgagaaacttttcgacaactggcagataaaacgggtgtcagtaagaccgctattcgtcgtttatct

SEQ ID NO: 408671 - DNA, 75 bp, synthetic construct
  source 1..75: mol_type = other DNA
atgtcgctggcgaatgccgcatggatttgggtaccgctactggcgattgccacgatcgccgcctggtcagggatg

SEQ ID NO: 408672 - DNA, 75 bp, synthetic construct
  source 1..75: mol_type = other DNA
cccagggcggtcagatcgcgagcatgcgtatccgtatgttcagtcaaattgccaatatcatcgtgtactgtcttg

SEQ ID NO: 408673 - DNA, 75 bp, synthetic construct
  source 1..75: mol_type = other DNA
cgctggcgttatcagatggtgaatatgtatccggacaccatccgtgactggatgcggggtgtccgggaagataag

SEQ ID NO: 408674 - DNA, 75 bp, synthetic construct
  source 1..75: mol_type = other DNA
tgaacagccacaacagccacaacagccacaacagccacaacagccacaacagccacaacagccacaacagccaca

SEQ ID NO: 408675 - DNA, 75 bp, synthetic construct
  source 1..75: mol_type = other DNA
ttatgcttccatcggaaacgatgatctggcagcctgagttcacagataaaaacactctccaggaaacccggggcg

SEQ ID NO: 408676 - DNA, 75 bp, synthetic construct
  source 1..75: mol_type = other DNA
gacgagctgccctcactgcacaaactgcccacgctgccacgcattattgccgaagcgcgtaagtttggcggctgt

SEQ ID NO: 408677 - DNA, 75 bp, synthetic construct
  source 1..75: mol_type = other DNA
ttatttttttctggattctcgttggtctggttttatgggtaaaaataagctggcagacgtttgtgaatggctgca

SEQ ID NO: 408678 - DNA, 75 bp, synthetic construct
  source 1..75: mol_type = other DNA
ggccgcagcgtgacacgctgggaaaccggcaagaacatgcctaatgaccgtcgaaatttcgggtatctcttctgg

SEQ ID NO: 408679 - DNA, 75 bp, synthetic construct
  source 1..75: mol_type = other DNA
ccggtgggcgcgatgaaagtgtttttaatcttctacatcgtttgtgtgctactgacctggctggtttatggtcgg

SEQ ID NO: 408680 - DNA, 75 bp, synthetic construct
  source 1..75: mol_type = other DNA
cccgtcagcgcggtgatatggtggtgatttatgaccgttcaggggaatttgttaaaagttactatgatccctcca

SEQ ID NO: 408681 - DNA, 75 bp, synthetic construct
  source 1..75: mol_type = other DNA
tctgacctgttatgtcaccctgcccggaccgtatccggcagtaaaactctcactgaaatatcaggcacgtccgaa

SEQ ID NO: 408682 - DNA, 75 bp, synthetic construct
  source 1..75: mol_type = other DNA
atgtacagtggcgcgcctcatggcggttatggacttgccggtgttctccggggtaaaaaggtccgtactaccgtc

SEQ ID NO: 408683 - DNA, 75 bp, synthetic construct
  source 1..75: mol_type = other DNA
ctttaaatcagtggcttagtgcgagttctcttgctgcggtgatagcaggggttcctccagaggtggctttgggag

SEQ ID NO: 408684 - DNA, 75 bp, synthetic construct
  source 1..75: mol_type = other DNA
gcattggcatctggctctatcaccgttctgacaatccacgcgagttaattccggggagaaaagacgatgacaact

SEQ ID NO: 408685 - DNA, 75 bp, synthetic construct
  source 1..75: mol_type = other DNA
tcagctttctctgcggacttcttttctacaaaccagcagcatcaattcttatcggcatagccagcctgatcccta

SEQ ID NO: 408686 - DNA, 75 bp, synthetic construct
  source 1..75: mol_type = other DNA
ctttaaatcagtggcttagcatggggtcgcttgctgcggtaatcgcaggagttccgccagaggtggcgctaggtg

SEQ ID NO: 408687 - DNA, 75 bp, synthetic construct
  source 1..75: mol_type = other DNA
gaattggcatctggctctatcaccgttccgataatccacgcgagttaattccggggagaaaagacgatggtaacg

SEQ ID NO: 408688 - DNA, 75 bp, synthetic construct
  source 1..75: mol_type = other DNA
gttcctccagaggtggctttgggagctttggctggggcggtaatttttgttacctcagccatcgagtatcccatt

SEQ ID NO: 408689 - DNA, 75 bp, synthetic construct
  source 1..75: mol_type = other DNA
atgcgaaccataaatgcctcatcttcagcaatgcaaccggcatccgaacaggacgatattgtaaattcacctaat

SEQ ID NO: 408690 - DNA, 75 bp, synthetic construct
  source 1..75: mol_type = other DNA
ctgttgttgatcttctaccccttacagatatgcaatttcgtgcttgtgcaggaggtgcgccatttaatgttgcga

SEQ ID NO: 408691 - DNA, 75 bp, synthetic construct
  source 1..75: mol_type = other DNA
gttattcgttcagggttcaagaacttaagcctctcctctttcataattggcctgtgcatggagaaatagcctggt

SEQ ID NO: 408692 - DNA, 75 bp, synthetic construct
  source 1..75: mol_type = other DNA
atcagatgttgaattacatcaaaggcgattgaaagtaaccgatggtgagcggtttgtgcgagacagtattgagaa

SEQ ID NO: 408693 - DNA, 75 bp, synthetic construct
  source 1..75: mol_type = other DNA
cgacccaatgtcaccaatatgcgtcaggcactccttatgggagatcattattccgtcgaaatagaaaatgcagaa

SEQ ID NO: 408694 - DNA, 75 bp, synthetic construct
  source 1..75: mol_type = other DNA
tcaccatcgatatttttagaaaaatctggtcgttacgaaatgatggcgcaatactgccactccataatggcatcc

SEQ ID NO: 408695 - DNA, 75 bp, synthetic construct
  source 1..75: mol_type = other DNA
ctttggctggggcggtaatttttgttacctctgcagtagagtaccccatccgtcgccgggtgctcctgtcgatgc

SEQ ID NO: 408696 - DNA, 75 bp, synthetic construct
  source 1..75: mol_type = other DNA
atgcaaaactggataaaaacggtggtggtagccgtaagtctgacgctgcccggcgtggcgctgtcgcaatcgctg

SEQ ID NO: 408697 - DNA, 75 bp, synthetic construct
  source 1..75: mol_type = other DNA
ccgaataaaatcgacccgaaggtgaaaaacgtcgccgcggtggcggtgagcgccacattgccgccgatgtactcg

SEQ ID NO: 408698 - DNA, 75 bp, synthetic construct
  source 1..75: mol_type = other DNA
tcgtagccgtaagcctggcgctacccggcgtggtgctggcgcaatcgctggagtcactggttaacgtacagggcg

SEQ ID NO: 408699 - DNA, 75 bp, synthetic construct
  source 1..75: mol_type = other DNA
ctggagccggtcattgatgccatcagaacgcgggggctggcggaggcactggcagacctgcccgccctttaccgt

SEQ ID NO: 408700 - DNA, 75 bp, synthetic construct
  source 1..75: mol_type = other DNA
ccggagacaagggcgcgcgctcgctgggtgaagtgcataacgaggtgcgccgggaaatcagggattctgatttac

SEQ ID NO: 408701 - DNA, 75 bp, synthetic construct
  source 1..75: mol_type = other DNA
accggggccagcggttcgagcgtaacggttaatacgccaaccgccgggttaattcccaacggcgcgacggtggag

SEQ ID NO: 408702 - DNA, 75 bp, synthetic construct
  source 1..75: mol_type = other DNA
aaataaaaagtgccggacatagcggaaataaacattatcagaaagtcctggaaaacatgtggaaagaatgtgaag

SEQ ID NO: 408703 - DNA, 75 bp, synthetic construct
  source 1..75: mol_type = other DNA
gcaaaacctgattgcaaattaccggatagggcgatggattatcttttgcggaacggactgctaagtgtggaggat

SEQ ID NO: 408704 - DNA, 75 bp, synthetic construct
  source 1..75: mol_type = other DNA
atgtctgtaggtataaccagcgagtctttaaaccaatggcttagcatgagttctctggtggcggtgatagttgga

SEQ ID NO: 408705 - DNA, 75 bp, synthetic construct
  source 1..75: mol_type = other DNA
gccggatgacattatgtcgattttgcaggcgctgcatgaagcgggcgcgctggatgccgacctggaggtgatctg

SEQ ID NO: 408706 - DNA, 75 bp, synthetic construct
  source 1..75: mol_type = other DNA
atattttcttctgtacttcttgttcctgtatatgaagagattgtatttcgagggtgtctttttaactcttttaaa

SEQ ID NO: 408707 - DNA, 75 bp, synthetic construct
  source 1..75: mol_type = other DNA
gccggatatcgccagtgttgcgtcggatgttgtgagtgcaaaaaaacaacgctgcaatactaatatgacagtgga

SEQ ID NO: 408708 - DNA, 75 bp, synthetic construct
  source 1..75: mol_type = other DNA
acagcgcgttagcggtcaaacgttttgacaggcgttggaatactgagcgaacggttttacttcgcttgccacagg

SEQ ID NO: 408709 - DNA, 75 bp, synthetic construct
  source 1..75: mol_type = other DNA
atttgaataacagcggcgcacagcaaaaactggctgaggcgttgagcgcgttaaagggggcaacggttgaactga

SEQ ID NO: 408710 - DNA, 75 bp, synthetic construct
  source 1..75: mol_type = other DNA
attgagtgggaagcgttgctggtagaaatgctcggcctgttgcaccgcattgcaatggtgcaactttcccctgct

SEQ ID NO: 408711 - DNA, 75 bp, synthetic construct
  source 1..75: mol_type = other DNA
tactatcagacgctgttgattggtcgcaaagaattaccgtatgcgccggaccgccgcatgggcgttgagatgacg

SEQ ID NO: 408712 - DNA, 75 bp, synthetic construct
  source 1..75: mol_type = other DNA
atgcgaaagttcaaagtaattattgaaactggaatagctggtggagattttgaggatgtattcgaagtggtcgat

SEQ ID NO: 408713 - DNA, 75 bp, synthetic construct
  source 1..75: mol_type = other DNA
acgaagcaaaagaaattttcttcaactactgcaattactcatataacgaaataaaagatgaggaggaagaacaaa

SEQ ID NO: 408714 - DNA, 75 bp, synthetic construct
  source 1..75: mol_type = other DNA
gctatagaggcaatgtttatcttttacagaaagcaggttgaccccaattataataagcgacaaaaagaagacagg

SEQ ID NO: 408715 - DNA, 75 bp, synthetic construct
  source 1..75: mol_type = other DNA
tgcacctcaggccagacagatggtcgatcgatggcacctgctaaaaaatattggcgatgcgcctgaacgaatgat

SEQ ID NO: 408716 - DNA, 75 bp, synthetic construct
  source 1..75: mol_type = other DNA
acgccgcattcacgacaccgttactgacggccagcgataagctgacggtggaaggtaaaatcaccggcaacggtg

SEQ ID NO: 408717 - DNA, 75 bp, synthetic construct
  source 1..75: mol_type = other DNA
tattttcagcattacggcctcaccacatccccgccgcccggctcaatgggtattgccgttccgctgaacggtaat

SEQ ID NO: 408718 - DNA, 75 bp, synthetic construct
  source 1..75: mol_type = other DNA
gcgcaccataccgccgacggatattcagctttactatcagacgctgttgattggtcgcaaagaattaccgtatgc

SEQ ID NO: 408719 - DNA, 75 bp, synthetic construct
  source 1..75: mol_type = other DNA
ccgctgaaggcagcctgcgagatgccttaagtctgaccgaccaggcgattgccagcggtgacggccaggtttcaa

SEQ ID NO: 408720 - DNA, 75 bp, synthetic construct
  source 1..75: mol_type = other DNA
gccagaagtgccacgccagtcctttgcacccgtcgcgccaacggcagtaatgacgccaacccaggtgccgccgca

SEQ ID NO: 408721 - DNA, 75 bp, synthetic construct
  source 1..75: mol_type = other DNA
acgaagcaaaagaaattttctttaactactgcaattactcataccacgaaataaaagatgaagaggaaggacaaa

SEQ ID NO: 408722 - DNA, 75 bp, synthetic construct
  source 1..75: mol_type = other DNA
gtgtctggaaatataggggcaaatccaatagatgggcgagggcttacttttaaagtatcaactcttccagatgtc

SEQ ID NO: 408723 - DNA, 75 bp, synthetic construct
  source 1..75: mol_type = other DNA
gtaaaattgacactgacccggtaaatcctgaaaaccagattcaggtttatgtggagaacgaagacggttctcaca

SEQ ID NO: 408724 - DNA, 75 bp, synthetic construct
  source 1..75: mol_type = other DNA
agatgttaaaccttatcttgataatgtaaatgctcttggtggtccgggaaacaggttctcgatagtttatcttgg

SEQ ID NO: 408725 - DNA, 75 bp, synthetic construct
  source 1..75: mol_type = other DNA
ctgagattcccggaagtgcagatgcatgaaatcctaagtgactttgccagaatgattccggcagcactggataac

SEQ ID NO: 408726 - DNA, 75 bp, synthetic construct
  source 1..75: mol_type = other DNA
taaaattacagatacaccgtggtacaacgcctggacgcaggataaaacgtttgtatatgacaatgtcatctatgc

SEQ ID NO: 408727 - DNA, 75 bp, synthetic construct
  source 1..75: mol_type = other DNA
gatggagagacagttatgatgtaagaggttggggggctattggtgatggtgttcatgatgatacatcagctctat

SEQ ID NO: 408728 - DNA, 75 bp, synthetic construct
  source 1..75: mol_type = other DNA
cgatcagcgttatctgtgggaaaagttcaaagcggatcatgcctgcagattaattgagtcccgcgacagagataa

SEQ ID NO: 408729 - DNA, 75 bp, synthetic construct
  source 1..75: mol_type = other DNA
tcagagattaatcgttagcggcggtgaaacaacgtcttcagcagatggtgcaatgataacgttgcatggttccgg

SEQ ID NO: 408730 - DNA, 75 bp, synthetic construct
  source 1..75: mol_type = other DNA
aaacgaggattgttggtaacgtgcgtgaagatgtatttgaagtggatgatgatgcgactcctgaggaaatagaaa

SEQ ID NO: 408731 - DNA, 75 bp, synthetic construct
  source 1..75: mol_type = other DNA
ttggtccacgcgagcttgggatactctatttctctgatgctttcggttctcctggtagctttgttcgcagacgca

SEQ ID NO: 408732 - DNA, 75 bp, synthetic construct
  source 1..75: mol_type = other DNA
agagcaggtgtcagttatcggattcgatgatatcgcaattgccccctacatcgttccggcgctctccagcgtaaa

SEQ ID NO: 408733 - DNA, 75 bp, synthetic construct
  source 1..75: mol_type = other DNA
tattttatgggttttagttaaccagtcagacaaattagcactaacaaaatacagcacattaacggaatatggtat

SEQ ID NO: 408734 - DNA, 75 bp, synthetic construct
  source 1..75: mol_type = other DNA
agagctaagtgcttttgtaagtgggctgatggataagagaaatagtgtatttgaggtgagaaatgaaaatactga

SEQ ID NO: 408735 - DNA, 75 bp, synthetic construct
  source 1..75: mol_type = other DNA
atcaggaagaggtaacccttcgactccggaatcagtaagtgagcttaatcataatcactttctttctcctgaatt

SEQ ID NO: 408736 - DNA, 75 bp, synthetic construct
  source 1..75: mol_type = other DNA
tgaggttgtcggagcactgagggaggggatgacgatagatgacagggatggttatatcagggagctttttttctg

SEQ ID NO: 408737 - DNA, 75 bp, synthetic construct
  source 1..75: mol_type = other DNA
aaagcacggcgagtatatggcaggacaggtacaaggggaatacgtggagttgagcgacggcactttatcgtggtt

SEQ ID NO: 408738 - DNA, 75 bp, synthetic construct
  source 1..75: mol_type = other DNA
cagtttacaggttttaacctggataatacgggtgacttccagtatgcgcagtgtttcggtgcgcctatcgtgtgt

SEQ ID NO: 408739 - DNA, 75 bp, synthetic construct
  source 1..75: mol_type = other DNA
gcctcgtggaaggatgcagtgatgattttaatccttttgatattattagggtaccagatcttacttacaacaaag

SEQ ID NO: 408740 - DNA, 75 bp, synthetic construct
  source 1..75: mol_type = other DNA
cccttaaaattcgcccgaatctgctggttgtgccaccggcgctggaggatgacgcgaactacctgatgaccgccg

SEQ ID NO: 408741 - DNA, 75 bp, synthetic construct
  source 1..75: mol_type = other DNA
caggcgaaaggagccggacagtcggcagcagagctaccggcagatattgtggcgtcccttatcagtaacggtttt

SEQ ID NO: 408742 - DNA, 75 bp, synthetic construct
  source 1..75: mol_type = other DNA
cggtgcgctcacgcgtaaaaaaaagcaaacccaacgcaaaagccacaaatgcggttattccacccgccagaatgc

SEQ ID NO: 408743 - DNA, 75 bp, synthetic construct
  source 1..75: mol_type = other DNA
gttatatatcactgatggagacaggatcttcactaaaaaccagttgttaagaataaaggcagaaaataatgaaat

SEQ ID NO: 408744 - DNA, 75 bp, synthetic construct
  source 1..75: mol_type = other DNA
agcgtgctgttttgttgaagtgcctaaaggtgatgttttctgcaattatgaatttaaagacagtttaggccgatc

SEQ ID NO: 408745 - DNA, 75 bp, synthetic construct
  source 1..75: mol_type = other DNA
atgaaaagcgataaattcattgcgtgctgttttgttgaagtgcctaaaggtgatgccttctgcgattatgaattt

SEQ ID NO: 408746 - DNA, 75 bp, synthetic construct
  source 1..75: mol_type = other DNA
atggcgtgcctgtcttctggagcaaggacttggtgatcttctggatggcttgagtaagcaggtgctgaccgtctt

SEQ ID NO: 408747 - DNA, 75 bp, synthetic construct
  source 1..75: mol_type = other DNA
cccaaatcaaccgtgattgaaaactcggttttttcagatcttggtcgtggtaactggtcatcctgccgggcaaac

SEQ ID NO: 408748 - DNA, 75 bp, synthetic construct
  source 1..75: mol_type = other DNA
ctcgtagttccattattcgcctgaatgcggcgaatgctcgttttgtttatcaaccgtttacacgcgaccagcgga

SEQ ID NO: 408749 - DNA, 75 bp, synthetic construct
  source 1..75: mol_type = other DNA
gctgaactgaaactctacgcgcgtcattactcagtggaaaattgcacagaggaaagctgtcgggattgtaattat

SEQ ID NO: 408750 - DNA, 75 bp, synthetic construct
  source 1..75: mol_type = other DNA
tacctggaagcaacgtaccctatccgcagtgatgaaactaagggcaagggggagtttggttccaagacaattgag

SEQ ID NO: 408751 - DNA, 75 bp, synthetic construct
  source 1..75: mol_type = other DNA
acgtctgctgctgaaggataaatacccagaggtttatgctggggaatacacaccaaagacgctggaagctgtttc

SEQ ID NO: 408752 - DNA, 75 bp, synthetic construct
  source 1..75: mol_type = other DNA
agcagccatgggaaactgtatcgaacgagatgctgagcaatatatccgctgacattggcaaattggtcaacggga

SEQ ID NO: 408753 - DNA, 75 bp, synthetic construct
  source 1..75: mol_type = other DNA
ccgccaccattagccgtctttgtgcctgtggtgctgattttggatttgatccttatattagtgatgttccagatg

SEQ ID NO: 408754 - DNA, 75 bp, synthetic construct
  source 1..75: mol_type = other DNA
atggctgatgaaaagccgattaggtcgctggcaggtgatgacccacgccgccagcagtacgccgaactgttggcg

SEQ ID NO: 408755 - DNA, 75 bp, synthetic construct
  source 1..75: mol_type = other DNA
atggctgctgaaaagccgattaagccgctggcatgtgatgacccacgccgccagcggtacgccgaactgttggcg

SEQ ID NO: 408756 - DNA, 75 bp, synthetic construct
  source 1..75: mol_type = other DNA
cttacgcggatttcgcgataagcaggctaaactgaaactctacgcgcgtcattactcagtggaaaattgcacaga

SEQ ID NO: 408757 - DNA, 75 bp, synthetic construct
  source 1..75: mol_type = other DNA
tagcgataacaacttacgcggatttcgcgataagcaggccgaactgaaactctacgctcggcattacacagtgga

SEQ ID NO: 408758 - DNA, 75 bp, synthetic construct
  source 1..75: mol_type = other DNA
cacgtagcgctattattcgcctgaacgcggcgaatgcccgctttgtctatcagccgtttacgtgtgaccagcggg

SEQ ID NO: 408759 - DNA, 75 bp, synthetic construct
  source 1..75: mol_type = other DNA
atgtcccataccggggggaaagaaggaacgtatcccggcacccgcgccagcgccaccatgattggcgacgatgaa

SEQ ID NO: 408760 - DNA, 75 bp, synthetic construct
  source 1..75: mol_type = other DNA
ttcatcctgacgctgacactggtggtggaagatcaggtgaaaacccacagcgaagccaacctgaagtacatggac

SEQ ID NO: 408761 - DNA, 75 bp, synthetic construct
  source 1..75: mol_type = other DNA
cggtattccgctgtgtgtccatctgatgtcgagccagctggtcggcgggcggattgaatacgggctgcgggagtt

SEQ ID NO: 408762 - DNA, 75 bp, synthetic construct
  source 1..75: mol_type = other DNA
agcaccttgaagcgcgaatggaaatgatgcagtggtggtcagattatcttgaaatcaatcaggaaagttatgtcc

SEQ ID NO: 408763 - DNA, 75 bp, synthetic construct
  source 1..75: mol_type = other DNA
aagttggtgagtttattcaaaaaggttaccgcacctgtcgccgtcataccggtgcctatatcaccatcacacaga

SEQ ID NO: 408764 - DNA, 75 bp, synthetic construct
  source 1..75: mol_type = other DNA
gcgtggaagaagtcagggccggagatggcttcgctggaagcctggctggaagcctggctggaagaacatgagaaa

SEQ ID NO: 408765 - DNA, 75 bp, synthetic construct
  source 1..75: mol_type = other DNA
gtcagatgagctacatgcgtcagcagctttccgcccgcatgctcagtcgttaccagaacaactatcacttcggag

SEQ ID NO: 408766 - DNA, 75 bp, synthetic construct
  source 1..75: mol_type = other DNA
gaaaatctggtgaaaatcatccgtgcctcttttcacggcgcaaaaatcaccacacagacagtggatgcacaggct

SEQ ID NO: 408767 - DNA, 75 bp, synthetic construct
  source 1..75: mol_type = other DNA
atgccaaatggtttccgtccgtggagaaagaggcgaaggagtggggggaactgcgtcagcggctgggctccggtc

SEQ ID NO: 408768 - DNA, 75 bp, synthetic construct
  source 1..75: mol_type = other DNA
catggacctggagaaaaagtcgaagacctcctatgccaaatggtttccgtccgtggagaaagaggcgaaggagtg

SEQ ID NO: 408769 - DNA, 75 bp, synthetic construct
  source 1..75: mol_type = other DNA
ttcccgcgtgtcggtgatggaaagccaggtacaccatttacctgaccgtgatgagttccaccgcctgcaactgga

SEQ ID NO: 408770 - DNA, 75 bp, synthetic construct
  source 1..75: mol_type = other DNA
agctcaagcctgatagctatggtcattgcctgccaaatgccagtaatctcgaaaaactgctctataagtatgcgg

SEQ ID NO: 408771 - DNA, 75 bp, synthetic construct
  source 1..75: mol_type = other DNA
actaacgggcgttatgacagccccgaagagatgatcacttcagtacaaaaatacccccttggtgaagccgatctg

SEQ ID NO: 408772 - DNA, 75 bp, synthetic construct
  source 1..75: mol_type = other DNA
cgtgcaaaaatgaataacaggtctatcaattccgaaattgtggctacgatggaagaatcgctctccaaaccatca

SEQ ID NO: 408773 - DNA, 75 bp, synthetic construct
  source 1..75: mol_type = other DNA
ggtgatgcattttattcaaattgggggttgactgatgacaggcaaaataatattcgaaaaaaaaggaagctaacc

SEQ ID NO: 408774 - DNA, 75 bp, synthetic construct
  source 1..75: mol_type = other DNA
acacagccatcgcaccagcatagtgaggagctcattgaatttgccattgattacctgaagaacaataaaaagcag

SEQ ID NO: 408775 - DNA, 75 bp, synthetic construct
  source 1..75: mol_type = other DNA
tgatgaagcgcgttggccgttgcatgggatatcttcaggtagccgctgagattgaagcgctggccagtggtgctg

SEQ ID NO: 408776 - DNA, 75 bp, synthetic construct
  source 1..75: mol_type = other DNA
aaaagcagctcgaagaacaacagaaagccgaagagaaagcacaaaaagtaaaattcttggtcaggtctttggttg

SEQ ID NO: 408777 - DNA, 75 bp, synthetic construct
  source 1..75: mol_type = other DNA
ctggataataaaacgctggagtttaaaaagcagctcgaagaacaacagaaagccgaagagaaagcacaaaaagta

SEQ ID NO: 408778 - DNA, 75 bp, synthetic construct
  source 1..75: mol_type = other DNA
gtgattaagcctcgtaaatcggtaaaagcccccgaagtaaaagaccccgatcttgaacgccgaattgaggatttt

SEQ ID NO: 408779 - DNA, 75 bp, synthetic construct
  source 1..75: mol_type = other DNA
cttcttcgtgattttaatactccaccctttaaaaaagtgccggcttactggcttcatccggggctgacttatctt

SEQ ID NO: 408780 - DNA, 75 bp, synthetic construct
  source 1..75: mol_type = other DNA
caaaaacaaaaattctccccgcaccaatcccacaacgcctgtcgtagagttcaatccccagcttaaaaccgtgaa

SEQ ID NO: 408781 - DNA, 75 bp, synthetic construct
  source 1..75: mol_type = other DNA
cgtctggcgaagatcgccgcctattccgcagctgatatgcctcacaagcatgacattgggtttttgtcacaaaaa

SEQ ID NO: 408782 - DNA, 75 bp, synthetic construct
  source 1..75: mol_type = other DNA
cccgctgccgcacaagccgcagaaaacctgaaaaataacaaaggctgccgcacaagccgcagaaaacctgaaaaa

SEQ ID NO: 408783 - DNA, 75 bp, synthetic construct
  source 1..75: mol_type = other DNA
cggcacggtgaaagaatttggcctgtgggatgtggttcagcaaggcaaaatttcagtttatgtcgcggatgcatt

SEQ ID NO: 408784 - DNA, 75 bp, synthetic construct
  source 1..75: mol_type = other DNA
ggcggcggaaccaatatcgccagtgccatggaatatggtcggcaacttattgaacaaccagcgaaaagcgtcatc

SEQ ID NO: 408785 - DNA, 75 bp, synthetic construct
  source 1..75: mol_type = other DNA
acgaaccgcgcaccttagtgctggtgattggcgagtcaacccagcgtggacgcatgagcctgtacggttatccgc

SEQ ID NO: 408786 - DNA, 75 bp, synthetic construct
  source 1..75: mol_type = other DNA
atgagatcgagagtcaggaagatttctatcgcgactttaatcaaacctttggtctggcgaaagaacaagttagcg

SEQ ID NO: 408787 - DNA, 75 bp, synthetic construct
  source 1..75: mol_type = other DNA
tgggaacatctgaccgaactttatcgctacctggaactatccccgttcagccggtcggtgatgctgccaacttac

SEQ ID NO: 408788 - DNA, 75 bp, synthetic construct
  source 1..75: mol_type = other DNA
ccgcattattgctgccgtgataggcgtggtgttatgggcggcctcgctggctgctctgagctattacgtcatcta

SEQ ID NO: 408789 - DNA, 75 bp, synthetic construct
  source 1..75: mol_type = other DNA
cctgattaaagactttaaagcgaccgatccgaacggtttcctggtttacttctctgatcacggtgaagaggttta

SEQ ID NO: 408790 - DNA, 75 bp, synthetic construct
  source 1..75: mol_type = other DNA
aaaaatggcaagcgactcatccgcgtgatttctcacaggatgttgatcgtaaatacagcctggcggaactgatcc

SEQ ID NO: 408791 - DNA, 75 bp, synthetic construct
  source 1..75: mol_type = other DNA
aagcctttttgatcttccttaccacggtgatgatggtgtcgctgatgatggccgcgcggatccctccctgcttgc

SEQ ID NO: 408792 - DNA, 75 bp, synthetic construct
  source 1..75: mol_type = other DNA
atctggtaaaacctttttcattttctgagttgctggcgagggttcgggcacaattaaggcaacatcatgcgctga

SEQ ID NO: 408793 - DNA, 75 bp, synthetic construct
  source 1..75: mol_type = other DNA
tatgttcagcgtatagaaggtgattttgcgtttgaatataaccatatctttaatatttccacatcaatagctaat

SEQ ID NO: 408794 - DNA, 75 bp, synthetic construct
  source 1..75: mol_type = other DNA
gcagagcactgaaggaatggcagaaactcggccacaccatccgtgaacaattcaaaaagaaactgtcagaacggc

SEQ ID NO: 408795 - DNA, 75 bp, synthetic construct
  source 1..75: mol_type = other DNA
atgaggggatctctcaggacacagcgtgagctggtcgcgaggctgaaacagcacatcccggagaagttttttaag

SEQ ID NO: 408796 - DNA, 75 bp, synthetic construct
  source 1..75: mol_type = other DNA
ccacaatctgttactcctttatgcaggcatgtgggctggtgaatgatcatgtggttggctgctgttgctatccgg

SEQ ID NO: 408797 - DNA, 75 bp, synthetic construct
  source 1..75: mol_type = other DNA
cgctggattggcaacccgtacaaaaagaatgccctgattgattacgataccctgcctcatggcgataaaataggt

SEQ ID NO: 408798 - DNA, 75 bp, synthetic construct
  source 1..75: mol_type = other DNA
ctgccgactatgttcgtgacggaaatgaacgactggctgctaccatcactccccagcatctgatgtttaaccgta

SEQ ID NO: 408799 - DNA, 75 bp, synthetic construct
  source 1..75: mol_type = other DNA
agcatcgcactgactgatgacaccctggtgccattcctcgccggggaaacggtacgctggtccgttaaacaataa

SEQ ID NO: 408800 - DNA, 75 bp, synthetic construct
  source 1..75: mol_type = other DNA
cactggatgcagacgaactggagcgagggtttaacgaaggcgtgttcaccgctgcaaaactttacccagcaaacg

SEQ ID NO: 408801 - DNA, 75 bp, synthetic construct
  source 1..75: mol_type = other DNA
cggattaaatttatttagttggcagatacactctgatgccagctatagcaaacctgatgatatgagaggcacatg

SEQ ID NO: 408802 - DNA, 75 bp, synthetic construct
  source 1..75: mol_type = other DNA
gcgcctgaccgcgctgaaagtcgtttttgagcacatcaccaccaaagatgctgccgactatgtccgtgacggaaa

SEQ ID NO: 408803 - DNA, 75 bp, synthetic construct
  source 1..75: mol_type = other DNA
gggctgttttaatgcgcctacggcgctgagcagttacgccaccgtctttgaagagatgaatgcgctgcaacactt

SEQ ID NO: 408804 - DNA, 75 bp, synthetic construct
  source 1..75: mol_type = other DNA
gcttcgacaggttcagaagaatatttgtctgtattatgttgtcatcagtatggtccggagtgatgtggtctttta

SEQ ID NO: 408805 - DNA, 75 bp, synthetic construct
  source 1..75: mol_type = other DNA
ttctcctgagttcgctggtttttcttgttattaatattgcgagtttatatgtgctgactgccagattctggtttc

SEQ ID NO: 408806 - DNA, 75 bp, synthetic construct
  source 1..75: mol_type = other DNA
tatctgtattatgttgtcatcagtatggtcaggagtaatgtggttttttataaaggtgcttacacagcatgtggg

SEQ ID NO: 408807 - DNA, 75 bp, synthetic construct
  source 1..75: mol_type = other DNA
aaaccgaaaacctgatcaacgcacaccatttcgggttaatgaaaagcagcgccattattgttaacaccgcgcgct

SEQ ID NO: 408808 - DNA, 75 bp, synthetic construct
  source 1..75: mol_type = other DNA
ggtactgccttccggtattcagctcattattccagtcatttccgtcaacaaaaccgtatcggagatcccaccatg

SEQ ID NO: 408809 - DNA, 75 bp, synthetic construct
  source 1..75: mol_type = other DNA
agcaccacgttattaaatttgagtagcctggattctaagactcaccgtgatgccgcgatccgactactggcttta

SEQ ID NO: 408810 - DNA, 75 bp, synthetic construct
  source 1..75: mol_type = other DNA
gatgggctttattttgcgctgaaggatgattatgcattgatcattctggatattatgcttcctggtatggatggc

SEQ ID NO: 408811 - DNA, 75 bp, synthetic construct
  source 1..75: mol_type = other DNA
gaagcattaccgtactttacgcgggctaccggttgataactttatgggtgagaaattagcctcattgctgaaaca

SEQ ID NO: 408812 - DNA, 75 bp, synthetic construct
  source 1..75: mol_type = other DNA
acctgccgcatctgctggcaagctggaagcattaccgcgctttgcgtggtttgccggtagataactttatgggtg

SEQ ID NO: 408813 - DNA, 75 bp, synthetic construct
  source 1..75: mol_type = other DNA
tttatggggacgatagcgcgttcaatgccgcaactggggctgttggtgattctggtgctgctgccgctgcaaatg

SEQ ID NO: 408814 - DNA, 75 bp, synthetic construct
  source 1..75: mol_type = other DNA
agatccgaaggtgatactgaagcgattaaaagatctggaaaaagagattctggcggatctggatgagctggaggg

SEQ ID NO: 408815 - DNA, 75 bp, synthetic construct
  source 1..75: mol_type = other DNA
agcaatcttggctcggatgagatgatggaagtggtgcgcgatggcgtattccagcattttcgtcagctcggccag

SEQ ID NO: 408816 - DNA, 75 bp, synthetic construct
  source 1..75: mol_type = other DNA
ttaccggttcactggacgaggaagatatcgactccacgctgtcggcaatggtgaaaaccaaaaaaaccgaactac

SEQ ID NO: 408817 - DNA, 75 bp, synthetic construct
  source 1..75: mol_type = other DNA
cggcattaggtcatctattagattggcttgttcacaacggagccgacttatctatgcgcagtgcctgcactttgg

SEQ ID NO: 408818 - DNA, 75 bp, synthetic construct
  source 1..75: mol_type = other DNA
cagatgcagaaattcctgcgaggtagcggcatagcaccatcgacttttatcgctttgggctgggctaccgaaacc

SEQ ID NO: 408819 - DNA, 75 bp, synthetic construct
  source 1..75: mol_type = other DNA
cagatgcagaaattcctgcgcggtagtggtatagcgccctctacttttatcgctttgggctgggcgacggaaacc

SEQ ID NO: 408820 - DNA, 75 bp, synthetic construct
  source 1..75: mol_type = other DNA
gtttgccaccacgtcaatcggcatttttatggggacgatagcacgttcgatgccacagcttgggctgctggtgat

SEQ ID NO: 408821 - DNA, 75 bp, synthetic construct
  source 1..75: mol_type = other DNA
attccgcctaattttcagcgtgatgtcctcgccggacgccagccggatattcaggtgaacgtcgatgccacgcgc

SEQ ID NO: 408822 - DNA, 75 bp, synthetic construct
  source 1..75: mol_type = other DNA
cggacgctataccttcgcgataaatattccgcctaattttcagcgtgatgtcctcgccggacgccagccagatat

SEQ ID NO: 408823 - DNA, 75 bp, synthetic construct
  source 1..75: mol_type = other DNA
tggaagtggtgcgcgatggcgtattccagcattttcgtcagctcggccaggccgatgcgtcgaaggtaacgctgc

SEQ ID NO: 408824 - DNA, 75 bp, synthetic construct
  source 1..75: mol_type = other DNA
gtatgctgcatgatatgacgggagcggatagcagtgtttctaaatgctattttactcgcgccaaaagcggcgtat

SEQ ID NO: 408825 - DNA, 75 bp, synthetic construct
  source 1..75: mol_type = other DNA
aacatctccaaacatactgtttatctctatatccgtcagttcaagagcggtgatttccaggggcaagataagtaa

SEQ ID NO: 408826 - DNA, 75 bp, synthetic construct
  source 1..75: mol_type = other DNA
ttgcgtcttctgttgaagatctggttacccaaacgctggagttcaccattgaagaagtgaatgccgatcgcaatg

SEQ ID NO: 408827 - DNA, 75 bp, synthetic construct
  source 1..75: mol_type = other DNA
acctcgcctgcgcccagtggattgccgattttattggcgagcagttccgtccgcacgccgaagaagccgaacgct

SEQ ID NO: 408828 - DNA, 75 bp, synthetic construct
  source 1..75: mol_type = other DNA
cgattttattggcgagcagttccgtccgcacgctgaagaagccgaacgcttgttcgcacaaccacagccggatcg

SEQ ID NO: 408829 - DNA, 75 bp, synthetic construct
  source 1..75: mol_type = other DNA
attctggcgtttcgtcttggcaaagaaacaattctgttacgtaccggctggaccgcgttcgatgaagaaaagacc

SEQ ID NO: 408830 - DNA, 75 bp, synthetic construct
  source 1..75: mol_type = other DNA
cgctggcgtggcgacggcgatcctgatctttaccaaaggcggtcaaacggatgaggtctggttctacgatctgca

SEQ ID NO: 408831 - DNA, 75 bp, synthetic construct
  source 1..75: mol_type = other DNA
agaagttagcctcgttgctgaaacagcagtacccggaagggattgatgctggcgttgattttaaagatcgcactc

SEQ ID NO: 408832 - DNA, 75 bp, synthetic construct
  source 1..75: mol_type = other DNA
atctttaccaaaggcggtcagacggacgaggtctggttctacgatctgcaaaatgatggctacagcctggatgac

SEQ ID NO: 408833 - DNA, 75 bp, synthetic construct
  source 1..75: mol_type = other DNA
ggttgacggaagacgagagtttatggctgcaatcgcgcgtctatatacgagcacaccattactatcacagctgga

SEQ ID NO: 408834 - DNA, 75 bp, synthetic construct
  source 1..75: mol_type = other DNA
aaatatcaatgatggtattggctccgggctggactggattggcatcgggagcgtgaaaaaggaagggaaaacatg

SEQ ID NO: 408835 - DNA, 75 bp, synthetic construct
  source 1..75: mol_type = other DNA
tatcgactccacgctgtcggcaatggtgaaaaccaaaaaaccgaactgctgttcctggcgcgtattctgcaaatg

SEQ ID NO: 408836 - DNA, 75 bp, synthetic construct
  source 1..75: mol_type = other DNA
gctctgccgatgcagattttacccgtcaccatgcaagagaccgtgtatggcgaactgcactggcaaagcagtaac

SEQ ID NO: 408837 - DNA, 75 bp, synthetic construct
  source 1..75: mol_type = other DNA
ccagccagattgacgtccactgcttccgccatattctgcagatagttcgcgacaacgaagccgctgactatctgg

SEQ ID NO: 408838 - DNA, 75 bp, synthetic construct
  source 1..75: mol_type = other DNA
gatgtcgagtgaattacataaattgtatcgttcgctggaagcatcggtggaagagaaaacgcgcgatctacacga

SEQ ID NO: 408839 - DNA, 75 bp, synthetic construct
  source 1..75: mol_type = other DNA
cctcgtttcttattcgtatggatgatatttattggtgctgtggtagcaatcaaagatcagagccatattcgcgta

SEQ ID NO: 408840 - DNA, 75 bp, synthetic construct
  source 1..75: mol_type = other DNA
tgaatgatgcttatcgacagttacgcgagctgttgaccacgttccgcctgacgctgcagcaagcggatcttccct

SEQ ID NO: 408841 - DNA, 75 bp, synthetic construct
  source 1..75: mol_type = other DNA
tgaccatgcaagagacagtgtatggcgaactacactggcaaaatagtaacgtgtcagcgtcagaaccgctgctta

SEQ ID NO: 408842 - DNA, 75 bp, synthetic construct
  source 1..75: mol_type = other DNA
gaccctgccgcagcttttccggctggcattccgccacaagatgatcgacggcgatgcgctggcggtcatccactg

SEQ ID NO: 408843 - DNA, 75 bp, synthetic construct
  source 1..75: mol_type = other DNA
gacaccgccttcctggtttcaggcagagcagtttgcccccacaccgacggggagcgccccggcagagccgaagga

SEQ ID NO: 408844 - DNA, 75 bp, synthetic construct
  source 1..75: mol_type = other DNA
ggatttcgatgtcgggcgtgcgtattcccatcacgttccccggcgaagagccaaaagccgtgagcgccgcccgcc

SEQ ID NO: 408845 - DNA, 75 bp, synthetic construct
  source 1..75: mol_type = other DNA
agaggcggtaaaaacccgctatgcgcatctgcatgccaactggcaagagatgaataaccgattgatgaagggtga

SEQ ID NO: 408846 - DNA, 75 bp, synthetic construct
  source 1..75: mol_type = other DNA
cgagctgttaactactttccgcctgacgctgcagcaggcggatctcccctccgcgttgctgtctcttgatcagat

SEQ ID NO: 408847 - DNA, 75 bp, synthetic construct
  source 1..75: mol_type = other DNA
gacaccgccttcctggtttcaggcagagcagtttgcctccacaccgacgggcagtgacccggcagagccgaagga

SEQ ID NO: 408848 - DNA, 75 bp, synthetic construct
  source 1..75: mol_type = other DNA
gatgaatgggtacgtcatgacgttgggcggatattcgttcagctttttgataacgcactggcggtgtggctgggt

SEQ ID NO: 408849 - DNA, 75 bp, synthetic construct
  source 1..75: mol_type = other DNA
tctttgtgttgctgaacttatgcaaaatttttttgcaccataaatccaacaacacattcaataacacattgctgt

SEQ ID NO: 408850 - DNA, 75 bp, synthetic construct
  source 1..75: mol_type = other DNA
taggtgaaacggcggtcgtgctggaactggagccgccgataacactggctagccagaaacgtatctggcggctgg

SEQ ID NO: 408851 - DNA, 75 bp, synthetic construct
  source 1..75: mol_type = other DNA
tgacccgacgcgagacgaacccatcttattacgtccgggagacagcgtgcgctttgtgccgcagagggagggagt

SEQ ID NO: 408852 - DNA, 75 bp, synthetic construct
  source 1..75: mol_type = other DNA
aattgatggctggaaaaaagcaggatttccagtagctgaaaataaatcccagcctttgccattaatgcgtcaggt

SEQ ID NO: 408853 - DNA, 75 bp, synthetic construct
  source 1..75: mol_type = other DNA
gattgatggctggaaaaaagcagggttgccggtagcaataaataaatcacaacccttgccgttaatgcgtcaggt

SEQ ID NO: 408854 - DNA, 75 bp, synthetic construct
  source 1..75: mol_type = other DNA
aaattagcagcgattgccgccccgcagaaatctttttactcgaagatgggattgatggctggaaaaaagcaggat

SEQ ID NO: 408855 - DNA, 75 bp, synthetic construct
  source 1..75: mol_type = other DNA
ccagttacgtccctccggtgacgggcaagcggtcagaattcagtttgattccatcatcaactcaatgtatggcaa

SEQ ID NO: 408856 - DNA, 75 bp, synthetic construct
  source 1..75: mol_type = other DNA
tgttttccggatttggaacgcatcattccgaaaaaatttgacctctgtacacacccggtgatccaggcgggttac

SEQ ID NO: 408857 - DNA, 75 bp, synthetic construct
  source 1..75: mol_type = other DNA
taacgcgtgaagtgggggctgaatttctccagtttattccggtggtggagtatggctcccagcgcgggttgctgc

SEQ ID NO: 408858 - DNA, 75 bp, synthetic construct
  source 1..75: mol_type = other DNA
agccagaaacggatctggcgactggcgcagcgtctggtggatatgccgaatgtggttgaagccattcccggcatg

SEQ ID NO: 408859 - DNA, 75 bp, synthetic construct
  source 1..75: mol_type = other DNA
aaaagtatcaaacatgaaattgataaactggccgatcatgtcctgattgtgccggaacaaaatagtcatattatt

SEQ ID NO: 408860 - DNA, 75 bp, synthetic construct
  source 1..75: mol_type = other DNA
acgaagaaaaacatcatcgtccagtttgaaggaccggttccggcgaaagcggaaaccactgaactggtattcaac

SEQ ID NO: 408861 - DNA, 75 bp, synthetic construct
  source 1..75: mol_type = other DNA
gcgaccggacagaatagcccccggtcgcgggcgctacagtacggtggtgcaggtgattgaccctgaccggctgag

SEQ ID NO: 408862 - DNA, 75 bp, synthetic construct
  source 1..75: mol_type = other DNA
agggcttggcgcggtgaaagccttgcgcgaacagtgcccggacaaaatcatcgttgctgactggaaggtcgccga

SEQ ID NO: 408863 - DNA, 75 bp, synthetic construct
  source 1..75: mol_type = other DNA
catcgtattggcgtgcggcaggcgatttatcatcgtggtcgtgatgcacaggccagcgggcaacagtggggcgaa

SEQ ID NO: 408864 - DNA, 75 bp, synthetic construct
  source 1..75: mol_type = other DNA
acgccggacatgccaaagtgatggaaggccgtgctgaagcggtgacttgcgccgttatgcaggctaaagagaatg

SEQ ID NO: 408865 - DNA, 75 bp, synthetic construct
  source 1..75: mol_type = other DNA
atgctcgatgctctggaattagatgtgctcagttttgagcgcacctatcttgaccagtgtggacgtgaacaaacc

SEQ ID NO: 408866 - DNA, 75 bp, synthetic construct
  source 1..75: mol_type = other DNA
gcagcaaatccggcgcaggtggctggcgatttccatgcgcaaatcgacgctatctggggaggcaagcgtgcgtaa

SEQ ID NO: 408867 - DNA, 75 bp, synthetic construct
  source 1..75: mol_type = other DNA
cgctggtgaaacgctcgcgcaacaggcatttggcgcaggcgctaactggatgaccatcatctgcgccgcgccgct

SEQ ID NO: 408868 - DNA, 75 bp, synthetic construct
  source 1..75: mol_type = other DNA
gcggtcaggcgattgtcaacgctgatgacgaagtaggccgccgctggctggcaaaattgccggacgcggttgccg

SEQ ID NO: 408869 - DNA, 75 bp, synthetic construct
  source 1..75: mol_type = other DNA
gcggtcaggcgattgttaacgccgacgatgaagtgggtcgccgctggctggcaaaactgccggacgcggttgcgg

SEQ ID NO: 408870 - DNA, 75 bp, synthetic construct
  source 1..75: mol_type = other DNA
agagagatttaccaactgctgaagcggaaatatctcgcgtgcaggcgtctattatcaaatggtatgcgtcagaat

SEQ ID NO: 408871 - DNA, 75 bp, synthetic construct
  source 1..75: mol_type = other DNA
tgtcgatggaagacaatatcaatccgaactgtcacggtcgttggctgaaagtgaccgatgtgaactatcacgaca

SEQ ID NO: 408872 - DNA, 75 bp, synthetic construct
  source 1..75: mol_type = other DNA
tgagctggcggggctggtggatcagggcgcgactttttgcgcaatggaagtttcctcccacgggctggtacagca

SEQ ID NO: 408873 - DNA, 75 bp, synthetic construct
  source 1..75: mol_type = other DNA
tctttggctgcggtggcgatcgtgataaaggcaaacgtccactgatgggcgcaattgctgaagagtttgctgacg

SEQ ID NO: 408874 - DNA, 75 bp, synthetic construct
  source 1..75: mol_type = other DNA
tatgttgctaatgactcttctctgtctttctgccgcatgaatgctcactaccaacttgagtttactgttgatgtt

SEQ ID NO: 408875 - DNA, 75 bp, synthetic construct
  source 1..75: mol_type = other DNA
aagctcgattggattcgtgaggcaatggaattggaagccgcaaacgaacaactgattcaagaaaagaaacaactg

SEQ ID NO: 408876 - DNA, 75 bp, synthetic construct
  source 1..75: mol_type = other DNA
actaagctcgattggattcgtgaggcaatggaattagaagccgcaaacgaacaactgattcaagaaaaagaacaa

SEQ ID NO: 408877 - DNA, 75 bp, synthetic construct
  source 1..75: mol_type = other DNA
agtcaacccatacgcaaacatgactaagctcgattggattcgtgaggcaatggaattggaagccgcaaacgaaca

SEQ ID NO: 408878 - DNA, 75 bp, synthetic construct
  source 1..75: mol_type = other DNA
ctgcgtaatttctcttccggcacggggttatctccgcagcaggttacacaggactggtctgatgtgaattacagc

SEQ ID NO: 408879 - DNA, 75 bp, synthetic construct
  source 1..75: mol_type = other DNA
accgtatagtttcccgtgcgcgggatctggtccgaaatgatggatgggccaatggtgccataactcgcctgcttg

SEQ ID NO: 408880 - DNA, 75 bp, synthetic construct
  source 1..75: mol_type = other DNA
atggaaacagccttcttctggtatgtgaccttgatggccgtggtggcgtttctggtttctttgatgctacatcgc

SEQ ID NO: 408881 - DNA, 75 bp, synthetic construct
  source 1..75: mol_type = other DNA
tcgagcttggcccgcatacgtatgttggtgaacatcaactgatatgccgcaaaggtgagtctggaaatgttaagc

SEQ ID NO: 408882 - DNA, 75 bp, synthetic construct
  source 1..75: mol_type = other DNA
gcagttgttgataaacatgccctgcttgcccatcaacaacgcgtggtgagtggggaacaggaacccagttattaa

SEQ ID NO: 408883 - DNA, 75 bp, synthetic construct
  source 1..75: mol_type = other DNA
gcctaaaccgaacaacactattctgattcaaaataaagctgctgaacgtatccgccagaatgctggctctctgga

SEQ ID NO: 408884 - DNA, 75 bp, synthetic construct
  source 1..75: mol_type = other DNA
tgaaagaagaaaatgaaaaactgcgtcaggaacgtttagccgttaacccgtatgcagactttgaagaaacagact

SEQ ID NO: 408885 - DNA, 75 bp, synthetic construct
  source 1..75: mol_type = other DNA
taacaagccgtgtgggtatgttgctaatgattccgcgataccgttttgcagcatgaacgctcactatcaactttc

SEQ ID NO: 408886 - DNA, 75 bp, synthetic construct
  source 1..75: mol_type = other DNA
tgatgttcttcctcctgcttacatgtacgctcgacaatcagcacatggtcagcttgagttcacaactgactgttt

SEQ ID NO: 408887 - DNA, 75 bp, synthetic construct
  source 1..75: mol_type = other DNA
atcaacagttgcgcaacaccctggtcgccaacctgagtacgcaactgcctggttgggtggttgcctcccagcctt

SEQ ID NO: 408888 - DNA, 75 bp, synthetic construct
  source 1..75: mol_type = other DNA
ggctgggtggttgcttcccagcctctgggaagcgctcaggacacgcttaacgtaactgtcactgagtttaacggt

SEQ ID NO: 408889 - DNA, 75 bp, synthetic construct
  source 1..75: mol_type = other DNA
gggacaattgatcaaacgaccgttccgtctggaaggggtgcaaaatcaggatggctacgatgaaatggtcaaagt

SEQ ID NO: 408890 - DNA, 75 bp, synthetic construct
  source 1..75: mol_type = other DNA
taccaagaaaggtattacggggaaaaataaaataatcgcatcaataaaaacttctattttgggttttgtggcgag

SEQ ID NO: 408891 - DNA, 75 bp, synthetic construct
  source 1..75: mol_type = other DNA
ttcgtcaatcggctgggtgaagcgatgcaggcggttcaatttggtaaccccgctgaacgcaacgacattgcgatg

SEQ ID NO: 408892 - DNA, 75 bp, synthetic construct
  source 1..75: mol_type = other DNA
tgtatatcgatggacagtttgttacctggcatggagatgcatggattgatgttgtaaaccctgcaacagagacgg

SEQ ID NO: 408893 - DNA, 75 bp, synthetic construct
  source 1..75: mol_type = other DNA
ctccctgaagccggtggtttccatgtggctgtccattgccattcgtggcctgctggcaatgggagaaaaccgtaa

SEQ ID NO: 408894 - DNA, 75 bp, synthetic construct
  source 1..75: mol_type = other DNA
gccctggttatttgcctgatcaccttctttgttgtctcctggattctggggcgtcagggtaaacaacagagcgaa

SEQ ID NO: 408895 - DNA, 75 bp, synthetic construct
  source 1..75: mol_type = other DNA
gagatccagtattacggtaaaaccttccgcatgaacgctgctcaggtactgcatgacaaatatatgatctggtgc

SEQ ID NO: 408896 - DNA, 75 bp, synthetic construct
  source 1..75: mol_type = other DNA
taccagttacctgttgtgcagagcggtacgcaaagtaccgccagccagggcaatcgcctgttatgggtagagcaa

SEQ ID NO: 408897 - DNA, 75 bp, synthetic construct
  source 1..75: mol_type = other DNA
gcttattcttgccgatcacatttcaaatgcaatatccagagtctcctccggaatacaaatcaataatttttttct

SEQ ID NO: 408898 - DNA, 75 bp, synthetic construct
  source 1..75: mol_type = other DNA
attgttcattgtcttttaaactgtgcattacagagcgaaggaatcaggaaagaagttattaattatgttgctaat

SEQ ID NO: 408899 - DNA, 75 bp, synthetic construct
  source 1..75: mol_type = other DNA
ttattttggattatgaccaaacaaataggaaactgaatgttgttgataaaggcttcctaatatggttgcaacatc

SEQ ID NO: 408900 - DNA, 75 bp, synthetic construct
  source 1..75: mol_type = other DNA
cttctgccagccagagaaattaagcgtctatgcgcgttatacccgtcgtggcggcctggacattaacccctggcg

SEQ ID NO: 408901 - DNA, 75 bp, synthetic construct
  source 1..75: mol_type = other DNA
cacttgcgggcctgactctcggaaaatcaaccgattaccgggatacctatgacgccagcctgctgcaaggcgttc

SEQ ID NO: 408902 - DNA, 75 bp, synthetic construct
  source 1..75: mol_type = other DNA
aaggttagcgtggcgttatatcgtcttgatgaactggaaggccagccgataggtcatttcaatggcacctgcatt

SEQ ID NO: 408903 - DNA, 75 bp, synthetic construct
  source 1..75: mol_type = other DNA
caatatcgcccggaattaattattcgcctgggcattgatattgagactgccatctcccgcaagcctgaccatgac

SEQ ID NO: 408904 - DNA, 75 bp, synthetic construct
  source 1..75: mol_type = other DNA
cgcaatacaaagaggtcgatcttgcggcacgtaccgcggcggcctctccgcttgaactggtgctggtgctgttcg

SEQ ID NO: 408905 - DNA, 75 bp, synthetic construct
  source 1..75: mol_type = other DNA
gtagatctaaatagtaaaagattatcatattgcttgaagtcagtaagagaaatggcgataagggatataatccct

SEQ ID NO: 408906 - DNA, 75 bp, synthetic construct
  source 1..75: mol_type = other DNA
gaaaaaggaaactaaacttcttgttgcgatcgagcgtgttatagaggaaaggataaccgctaacccgcttgatcc

SEQ ID NO: 408907 - DNA, 75 bp, synthetic construct
  source 1..75: mol_type = other DNA
tgcaagaagcatgtaggcgtgcgtgtattgaatgcggaatatcagagactcagcaaacaaaaagaactattggag

SEQ ID NO: 408908 - DNA, 75 bp, synthetic construct
  source 1..75: mol_type = other DNA
ctttagaaattgatgttgatgatgttaatgatgttatagcggctttaaaatctataaatttcaagaagattatcg

SEQ ID NO: 408909 - DNA, 75 bp, synthetic construct
  source 1..75: mol_type = other DNA
gtgagttttgtccatcaacatcgccgcaaacttcacatcgcgattaacacttttgcgcacccggacggttacgcc

SEQ ID NO: 408910 - DNA, 75 bp, synthetic construct
  source 1..75: mol_type = other DNA
tggatggagacgctcgggtcgatgtccgaaggcacgcaaaccacccttggcgcgtatcaccgtaaatggcagtga

SEQ ID NO: 408911 - DNA, 75 bp, synthetic construct
  source 1..75: mol_type = other DNA
atctcccggcgcttaaggcggccatcgaaaacggcgcagacgctgtttatatcgggctaaaagatgataccaatg

SEQ ID NO: 408912 - DNA, 75 bp, synthetic construct
  source 1..75: mol_type = other DNA
atgatctggtgcggagagcagttatggtccgcattcgttctggccacagttgtggcactggttatttgcctgatt

SEQ ID NO: 408913 - DNA, 75 bp, synthetic construct
  source 1..75: mol_type = other DNA
agtattgagtttttggggctgctggataccgtagcttctgtgggggcggcgcatgttttaccgggcgctgccggt

SEQ ID NO: 408914 - DNA, 75 bp, synthetic construct
  source 1..75: mol_type = other DNA
aggctaaagcgcgtaaagaacaaatggaaaatattgaaaaagagcgggcgaacaagcagaaagggaatggcacac

SEQ ID NO: 408915 - DNA, 75 bp, synthetic construct
  source 1..75: mol_type = other DNA
cgcagctgagccgtgacgaaatccagcgccttgccaccctgaccgccaccgcgttttccaccgcactggagcgcg

SEQ ID NO: 408916 - DNA, 75 bp, synthetic construct
  source 1..75: mol_type = other DNA
atcaaccgtgaaaacttcgaagctatgcaaggcttccacgccggatggcgtaaatccggtattggcggcgcagat

SEQ ID NO: 408917 - DNA, 75 bp, synthetic construct
  source 1..75: mol_type = other DNA
tttgaccggtaataccatcgtcattaaacccagtgaatttacgccaaacaatgcgattgcttttgccaaaattgt

SEQ ID NO: 408918 - DNA, 75 bp, synthetic construct
  source 1..75: mol_type = other DNA
gtttcatacgacctatcagaacgcagaagaacagggatattttaactactatataccgggtgtaggcacaccatt

SEQ ID NO: 408919 - DNA, 75 bp, synthetic construct
  source 1..75: mol_type = other DNA
attaatggaacatggagtgaagaagaggatagtcgaggaagaactgttgttacatatacttgtgacatcagtgaa

SEQ ID NO: 408920 - DNA, 75 bp, synthetic construct
  source 1..75: mol_type = other DNA
tagatcatataagaaagctaaacagtgcttttaatgaagatccaataatatatagcaaactcacaattagccctt

SEQ ID NO: 408921 - DNA, 75 bp, synthetic construct
  source 1..75: mol_type = other DNA
cattaataactaaaaacttccccggtttctacgaacgtgtccccccctgtgagaacgcagatgaatgcataaaaa

SEQ ID NO: 408922 - DNA, 75 bp, synthetic construct
  source 1..75: mol_type = other DNA
gcaagaacctggacgccagcacctttcacgacaatgacccgaaaaccggcaaaccttacgccgataaagaatcgg

SEQ ID NO: 408923 - DNA, 75 bp, synthetic construct
  source 1..75: mol_type = other DNA
aggaaaaggcgacgataacctgtttacctggttgctgacttaccagcagctggcgcgcatggcaataaaactggg

SEQ ID NO: 408924 - DNA, 75 bp, synthetic construct
  source 1..75: mol_type = other DNA
cagggcgttgctgtacagcggcgcagcactctgcatcagcctggtggctaatggcatacagtactggcatgccac

SEQ ID NO: 408925 - DNA, 75 bp, synthetic construct
  source 1..75: mol_type = other DNA
tttctgttaagactaagattaggcatcgtaatgaaattaacagcacattctcatcgttgcctttgtctgccagaa

SEQ ID NO: 408926 - DNA, 75 bp, synthetic construct
  source 1..75: mol_type = other DNA
gagttacccacgttacacaaactgccggacctggtggagatcctgccggaagcccgtaagttcggtggctgttat

SEQ ID NO: 408927 - DNA, 75 bp, synthetic construct
  source 1..75: mol_type = other DNA
agattcatgatacaccttaaatatttttcaagtcgcgtgttatgcaatgaaaaaataaaacagaaagatattggt

SEQ ID NO: 408928 - DNA, 75 bp, synthetic construct
  source 1..75: mol_type = other DNA
aggttcatgatacaccttaaatatttttcaagtcgcgtattatgcaatgaaaaaataaaacagaaagatattggt

SEQ ID NO: 408929 - DNA, 75 bp, synthetic construct
  source 1..75: mol_type = other DNA
gttatccgacgtctggccaactatgcccgtcagcgtggcgacatggtggtgatttatgaccgttcgggggaattt

SEQ ID NO: 408930 - DNA, 75 bp, synthetic construct
  source 1..75: mol_type = other DNA
agattgcagagtttgctgccggtgaaattggtgagaaagagcacctgaaagccagtctgcagtattcctatggtg

SEQ ID NO: 408931 - DNA, 75 bp, synthetic construct
  source 1..75: mol_type = other DNA
gtcttctgtcatcaatgataagaagtcagatgcaggtgtgagtgttccggcaggggggatcgagcaggagctgaa

SEQ ID NO: 408932 - DNA, 75 bp, synthetic construct
  source 1..75: mol_type = other DNA
attccatctcaattaactggaatgatatcggtactgtaacaactgaaacacaatcgccagcaaatgtggcggttg

SEQ ID NO: 408933 - DNA, 75 bp, synthetic construct
  source 1..75: mol_type = other DNA
atctggatgatgactactttgacatgttgcaggaggaactttgcagcgtggtggaggcatccggtgccagcctgg

SEQ ID NO: 408934 - DNA, 75 bp, synthetic construct
  source 1..75: mol_type = other DNA
atgccatttgctcgttatttctgcattttcataaacgttggttttggagaaggtgctaactgggttatgttacct

SEQ ID NO: 408935 - DNA, 75 bp, synthetic construct
  source 1..75: mol_type = other DNA
ttgtcgcaaataatcacggggcttattgaagttgtttataacagaaaggtggacagaagttcatttaattattcc

SEQ ID NO: 408936 - DNA, 75 bp, synthetic construct
  source 1..75: mol_type = other DNA
aatcctcgaaaactcaaagtatgaaaactaaatctccggcgctatgggcggcggtgattatgtactgcttttctc

SEQ ID NO: 408937 - DNA, 75 bp, synthetic construct
  source 1..75: mol_type = other DNA
tgatttagatgtctctcttactgtaagtcaggaagagtataacgtattagctcgggttgtgtttaataataaaag

SEQ ID NO: 408938 - DNA, 75 bp, synthetic construct
  source 1..75: mol_type = other DNA
attgccggtattaaggtgaataaaggtgctgaaagtttttatgtcgagccttttgaacaggacgctggactgaat

SEQ ID NO: 408939 - DNA, 75 bp, synthetic construct
  source 1..75: mol_type = other DNA
ggtattaaggtgaataaaggcgctgaaagttttcatgtcgagccttttgaacaggacgccggactgaataaataa

SEQ ID NO: 408940 - DNA, 75 bp, synthetic construct
  source 1..75: mol_type = other DNA
aggaagtgaataagcaagccatcctggcggagccggatgcggtgaaagggattgccggtattaaggtgaataaag

SEQ ID NO: 408941 - DNA, 75 bp, synthetic construct
  source 1..75: mol_type = other DNA
aaagagcgtgtttatgaatgctgatggcgatctcttcgcctgtaatatcagcaaaattaaaatcggcaatttata

SEQ ID NO: 408942 - DNA, 75 bp, synthetic construct
  source 1..75: mol_type = other DNA
attgctggtattaaggtgaataaaggcgctgaaagttttcatgtcgagccttttgaacaggacgccggactgaat

SEQ ID NO: 408943 - DNA, 75 bp, synthetic construct
  source 1..75: mol_type = other DNA
gcatgtcggtgaagcgccaaatatggtggtctgctggggcggtcactcaattaacgaaaacgagtatttgtatgc

SEQ ID NO: 408944 - DNA, 75 bp, synthetic construct
  source 1..75: mol_type = other DNA
ccggtagcgcacctgttaggccgaaaatttgagcacgggaaaacagactgctacgcgcttttccgcgacgcatat

SEQ ID NO: 408945 - DNA, 75 bp, synthetic construct
  source 1..75: mol_type = other DNA
agcacacctggtcatccggtaccaacggcgtggtggctgcaacgttttcacttcgcctgaagggtaaaccggtgt

SEQ ID NO: 408946 - DNA, 75 bp, synthetic construct
  source 1..75: mol_type = other DNA
gttacgcaacggcagggagcatcacagaggctactaatatgccaacggtcgccgccttcgattcaggtaatctgg

SEQ ID NO: 408947 - DNA, 75 bp, synthetic construct
  source 1..75: mol_type = other DNA
tgtctgaaacgccgcacaacagctttaaaatctcgcctgacgattatatcaaagctgacgaattgggcgttataa

SEQ ID NO: 408948 - DNA, 75 bp, synthetic construct
  source 1..75: mol_type = other DNA
cggcggcaagatcaggaaattccgtccggttgcgcacctgctaggccgtaaattcgtacacggaacgacagactg

SEQ ID NO: 408949 - DNA, 75 bp, synthetic construct
  source 1..75: mol_type = other DNA
acttcgagcgccttgatggctggtggcttcgcggtgaaaacctgtatttaaaaaacttgccgcgaaacgggtttt

SEQ ID NO: 408950 - DNA, 75 bp, synthetic construct
  source 1..75: mol_type = other DNA
atggtgttcgtttcatccttcccaggttagtaaagaagttttccttaaacaaatactggcaattaaggacgcggg

SEQ ID NO: 408951 - DNA, 75 bp, synthetic construct
  source 1..75: mol_type = other DNA
tttacgaaatgatctacgactttcagaaccatgccgatgccgcgttgattttctggatgccggatcaggggcgct

SEQ ID NO: 408952 - DNA, 75 bp, synthetic construct
  source 1..75: mol_type = other DNA
atgcctctgctgaatgacgatggcttatacgtcgcagggttggacgtagccgtagacgctttatcaccagaagat

SEQ ID NO: 408953 - DNA, 75 bp, synthetic construct
  source 1..75: mol_type = other DNA
tgttagtctcattagttggtggtgagttctggtggatagtcataattcccgttggggcgcatatcagtttttcgc

SEQ ID NO: 408954 - DNA, 75 bp, synthetic construct
  source 1..75: mol_type = other DNA
cacattgaaaccgggatgcgatttaccgatggtaactggaacctgacgccgtatgcatcgttaacgggggttcac

SEQ ID NO: 408955 - DNA, 75 bp, synthetic construct
  source 1..75: mol_type = other DNA
acttctccggcaaagataaagtctgtatcagctcatactgacccaaaggataatgtaaaggtatcgccagaatag

SEQ ID NO: 408956 - DNA, 75 bp, synthetic construct
  source 1..75: mol_type = other DNA
tgtcttttattgcgcccacttcggctcccggctgcctggcggcatccggtcgtcaggcccgactccgacaggcag

SEQ ID NO: 408957 - DNA, 75 bp, synthetic construct
  source 1..75: mol_type = other DNA
gctatttttctcggggcgagtgtgggcgggcgatagtgcaccagaaaaaagagaaatagccgtctggcgacaatg

SEQ ID NO: 408958 - DNA, 75 bp, synthetic construct
  source 1..75: mol_type = other DNA
ttaattccctgactgaacaacaggtgcgtgacatcttcagtggtgcaattaccaactggcgtactgttggcggta

SEQ ID NO: 408959 - DNA, 75 bp, synthetic construct
  source 1..75: mol_type = other DNA
aagatgtccgcatgatctcgccgcaggaaaccgaagtggcaagcgtgatggaaggcatgattaaagtcgttgctg

SEQ ID NO: 408960 - DNA, 75 bp, synthetic construct
  source 1..75: mol_type = other DNA
atttttctcggggcgagtatgggcgggcgatagtgcaccagaaaaaagagaaatagccgcctggcgacaatgctt

SEQ ID NO: 408961 - DNA, 75 bp, synthetic construct
  source 1..75: mol_type = other DNA
ctggttggctggataatcacgctacatctggcagattatcaatttcgccagatgggagctggttggttggcaaac

SEQ ID NO: 408962 - DNA, 75 bp, synthetic construct
  source 1..75: mol_type = other DNA
atgcactaagcgttttgccggaagattttcacgaatgggaatatctggcgaactctcgggtaatggtgccaactt

SEQ ID NO: 408963 - DNA, 75 bp, synthetic construct
  source 1..75: mol_type = other DNA
gagttacgttggtcttccaagggaaatgtgatgtccgacgaagaaaaagcgctcctgcgggcgcaggctgctcag

SEQ ID NO: 408964 - DNA, 75 bp, synthetic construct
  source 1..75: mol_type = other DNA
agaaaatgcagaaataattttagatattgatactccggacgactttattacagcgcaaaaaggtatactaaaatt

SEQ ID NO: 408965 - DNA, 75 bp, synthetic construct
  source 1..75: mol_type = other DNA
tggcagcaaggaacaattcttgatgcaagtatcaaaaatgcgttgcagttttgtagccgaattattttagtcaca

SEQ ID NO: 408966 - DNA, 75 bp, synthetic construct
  source 1..75: mol_type = other DNA
tattccgaaaaatctgggcattgcgtaacaatggcgcaatacttcctttgcacaaggggatccccggccatccga

SEQ ID NO: 408967 - DNA, 75 bp, synthetic construct
  source 1..75: mol_type = other DNA
tggcaatgaaccggctcagaccgacagggaaacaccaccggaaaaacaggaaaaaacagagcagacggcgctgtc

SEQ ID NO: 408968 - DNA, 75 bp, synthetic construct
  source 1..75: mol_type = other DNA
gacagctggctgcaaccctgaaccgcgatctggtgtatccgctgtacgccctgaacaccacgcacactattgata

SEQ ID NO: 408969 - DNA, 75 bp, synthetic construct
  source 1..75: mol_type = other DNA
ttatctggccgttcatcttcaaaaactattccgtgcgtgatctggcggagtttctggaggtgtacggcctgccga

SEQ ID NO: 408970 - DNA, 75 bp, synthetic construct
  source 1..75: mol_type = other DNA
ctcaacgaaccgcgagaaagccacgctgatgcaggccgtgatggatatcgggcgacgtgccggtggcattattcc

SEQ ID NO: 408971 - DNA, 75 bp, synthetic construct
  source 1..75: mol_type = other DNA
agacctgttacggccctgtcagtgccgacgttatggcaaaagcagaaaatattcgtctgctgatccttgacgtcg

SEQ ID NO: 408972 - DNA, 75 bp, synthetic construct
  source 1..75: mol_type = other DNA
aatctctgcattgcatctacaatatacatactttcgtacatttttgatgttatttctggtatcgttagttcttat

SEQ ID NO: 408973 - DNA, 75 bp, synthetic construct
  source 1..75: mol_type = other DNA
cctggcaacagggaacaattcttgatgcaagtatcaaaaatgcgttgcagttttgtagccgaattattttagtca

SEQ ID NO: 408974 - DNA, 75 bp, synthetic construct
  source 1..75: mol_type = other DNA
gagcagggcttactgacctcggtgaaggctgctgctcctgaagtgcaaaccgaacattgctttattactcatggc

SEQ ID NO: 408975 - DNA, 75 bp, synthetic construct
  source 1..75: mol_type = other DNA
aagccgtgtttactgtacaaccggttgtcccggataacggttcgcagaaagaggccgcattatccgctgaagata

SEQ ID NO: 408976 - DNA, 75 bp, synthetic construct
  source 1..75: mol_type = other DNA
gaaaacctctctcctttgacccggagatgcagagtaccgcgctggatattccgcagattgccagccgttatgttg

SEQ ID NO: 408977 - DNA, 75 bp, synthetic construct
  source 1..75: mol_type = other DNA
gccagattaaaccggcggcgtatcttgcacaccagaccgcctcgcgcaaactggaggcccatacgagcggtgata

SEQ ID NO: 408978 - DNA, 75 bp, synthetic construct
  source 1..75: mol_type = other DNA
gggttcatttcatgccataaggcaaagaacggactgagcaaaatggttttgcatgccgagcagattgaattgata

SEQ ID NO: 408979 - DNA, 75 bp, synthetic construct
  source 1..75: mol_type = other DNA
cctacaaagatcgggaagaagcaagagcagctggcgctaaatgggacaaagagaaaaaaacctggtatgccgatg

SEQ ID NO: 408980 - DNA, 75 bp, synthetic construct
  source 1..75: mol_type = other DNA
aaaacttggtatgccgaagctggggcagatatgcaaaaactggcgaagtggaaaccggaaaatgtggtgatcgaa

SEQ ID NO: 408981 - DNA, 75 bp, synthetic construct
  source 1..75: mol_type = other DNA
gggcagaaaacctttatccctgcttatgatgtccagggtaagcaatggacgatgcagtacatcaacgaggacggc

SEQ ID NO: 408982 - DNA, 75 bp, synthetic construct
  source 1..75: mol_type = other DNA
ttgtgtttaatgcggagcagattgacggtctaccgccgatggccgttcgccaagataagagctggaacagtattg

SEQ ID NO: 408983 - DNA, 75 bp, synthetic construct
  source 1..75: mol_type = other DNA
tcaccggcaggcgtggtgccaaatgcccgttattgttagcggacacgaaaaccaggccattactcacagtataac

SEQ ID NO: 408984 - DNA, 75 bp, synthetic construct
  source 1..75: mol_type = other DNA
gcaccgtgtgcaggactctccttcgaaaggtcagtccatcaggaattcctcactgccagttcgtgcttgagcatc

SEQ ID NO: 408985 - DNA, 75 bp, synthetic construct
  source 1..75: mol_type = other DNA
atgactgcagcaaccgaacagaaaattcccggtaactgttacccggtcgataaagttattcaccaggataatatc

SEQ ID NO: 408986 - DNA, 75 bp, synthetic construct
  source 1..75: mol_type = other DNA
cgtagtcattgaaaggcaggggcaatctgacagtaaccaggtggtgatgcgcacgaacagcgctataaaagcgct

SEQ ID NO: 408987 - DNA, 75 bp, synthetic construct
  source 1..75: mol_type = other DNA
aaaagtttattctctcaaatctcgatggtggtctgtcgcatcatgttaataacatgaaccgtagccagctgcatc

SEQ ID NO: 408988 - DNA, 75 bp, synthetic construct
  source 1..75: mol_type = other DNA
cgggttgccgccaatggcggtgcgccaggataaaagctggaacagcattgaacgggccgaagccattctggaggc

SEQ ID NO: 408989 - DNA, 75 bp, synthetic construct
  source 1..75: mol_type = other DNA
gattatccagcagtgtcgttttggctgcctcattgttcagcgtaccctcttatgccgctactgacagcatcgggc

SEQ ID NO: 408990 - DNA, 75 bp, synthetic construct
  source 1..75: mol_type = other DNA
gtagaaaaaaataaaaccgtaaacaatgttacggcgggtaaattttctgcccctgccacatttacagtaacctat

SEQ ID NO: 408991 - DNA, 75 bp, synthetic construct
  source 1..75: mol_type = other DNA
catcatacactaaatcagtaagttggcagcattaccataaattagcagcgattgccgcccccgcagaaatctttt

SEQ ID NO: 408992 - DNA, 75 bp, synthetic construct
  source 1..75: mol_type = other DNA
acagcgacaacctgcgaagtatgacactggataaattgatggtaatggggaaaaagtctgctgtatctgttgctg

SEQ ID NO: 408993 - DNA, 75 bp, synthetic construct
  source 1..75: mol_type = other DNA
tgatccacagcgacaacctgcgaagtatgacgctggataaattgatggtaatggggaaaaagtcggttgtatccg

SEQ ID NO: 408994 - DNA, 75 bp, synthetic construct
  source 1..75: mol_type = other DNA
tgattaatgagcttgaaagttttaatcaaaaagaagtaatggaagcaaatattatcttcgttgatattcaaggtg

SEQ ID NO: 408995 - DNA, 75 bp, synthetic construct
  source 1..75: mol_type = other DNA
ccggaaacacgcggcctgccagcgagcattcttgatgccctgcccgctgaacaaaaaattcgtattccgatggtg

SEQ ID NO: 408996 - DNA, 75 bp, synthetic construct
  source 1..75: mol_type = other DNA
actctactcatttcttgaatgttatatcgattcgaaaaaacaagctctctacgaccatgtaggaaacggaattgt

SEQ ID NO: 408997 - DNA, 75 bp, synthetic construct
  source 1..75: mol_type = other DNA
gcggcggtcgccgttgaggtctggagcacatctacaccaggtaagaacggcgctaaacaattcagttgtgtcacc

SEQ ID NO: 408998 - DNA, 75 bp, synthetic construct
  source 1..75: mol_type = other DNA
gtaaacaagaagaggaacaaaggcgtaaagagcgtgaggaatttgagcgtccattaaaatcactcattacaaaaa

SEQ ID NO: 408999 - DNA, 75 bp, synthetic construct
  source 1..75: mol_type = other DNA
gtatcgatattggtctaacaatattcaagtcattccatcatcagtagtcaagaacatcattcaagataaagaaag

SEQ ID NO: 409000 - DNA, 75 bp, synthetic construct
  source 1..75: mol_type = other DNA
tgaacgacctgacttgttagaaaaatattataatgaaagattaattcgtttctcgataaaaggcactgatggtaa

SEQ ID NO: 409001 - DNA, 75 bp, synthetic construct
  source 1..75: mol_type = other DNA
tgctggttacgaaggcaagttaacggcgcacggcttccgccattgtttgtctacggcactcaacgaacatggatt

SEQ ID NO: 409002 - DNA, 75 bp, synthetic construct
  source 1..75: mol_type = other DNA
tcgctgaaatgacgaaagtaagcgcttacgaacttatcacgcgcctgacctcaagagtcgcgatgaaatacgtgg

SEQ ID NO: 409003 - DNA, 75 bp, synthetic construct
  source 1..75: mol_type = other DNA
ggcgaaggtttgcccgtagaacgtatcgctgaaatgacgaaagtaagcgcttacgaacttatcacgcgcctgacc

SEQ ID NO: 409004 - DNA, 75 bp, synthetic construct
  source 1..75: mol_type = other DNA
aaaacgctgaacttaaagagcctgtcaccgtctggatgaagctcgataccggaatgcaccgtttgggcgtattgc

SEQ ID NO: 409005 - DNA, 75 bp, synthetic construct
  source 1..75: mol_type = other DNA
agagagctttaccaactgctgaagaggaaatatctcgcgtgcaggcctctattatcaaatggtatgcgtcagaat

SEQ ID NO: 409006 - DNA, 75 bp, synthetic construct
  source 1..75: mol_type = other DNA
agtgtaataatggttttataatgtttgaacctggatatgaattaattgtttccttatttggatatttgggatttc

SEQ ID NO: 409007 - DNA, 75 bp, synthetic construct
  source 1..75: mol_type = other DNA
ggtatgcaccgtctgggcgtcaggccagaacaagctggagcgttttatcatcgtctgacccaatgtaaaaacgtg

SEQ ID NO: 409008 - DNA, 75 bp, synthetic construct
  source 1..75: mol_type = other DNA
atggctactccggtagaagataaacttgttgcaccgccagaatatattcatgaagcaccaataccaaccacgcac

SEQ ID NO: 409009 - DNA, 75 bp, synthetic construct
  source 1..75: mol_type = other DNA
ttgttgtgccgccagaatatattcatgaagcaccaatgccaaccacgcgcatacaatatatcaataaaccagcat

SEQ ID NO: 409010 - DNA, 75 bp, synthetic construct
  source 1..75: mol_type = other DNA
ttgcctggttcttttttcggagaaataaagaaaatcacgctgttgagtgttatgactattctgcgtgtctttcaa

SEQ ID NO: 409011 - DNA, 75 bp, synthetic construct
  source 1..75: mol_type = other DNA
gcccgggcatcattctttatggcgtgtcaccgctggaagatggttccaccggtgccgatttcggttgccagccag

SEQ ID NO: 409012 - DNA, 75 bp, synthetic construct
  source 1..75: mol_type = other DNA
gatggttatccgcgcgccgcgccgtccggtacgccagtgctggtcaatggccgcgaagtgcccattgtagggcgt

SEQ ID NO: 409013 - DNA, 75 bp, synthetic construct
  source 1..75: mol_type = other DNA
gcccgtgttttgaccgccccatgtagagctctattacttgaccaacaaaacactccagatagtaaatatcgttat

SEQ ID NO: 409014 - DNA, 75 bp, synthetic construct
  source 1..75: mol_type = other DNA
atggattatcgggtagtctatttctggcttcatcactgtttaccattccttcgcatgcagccactgacagtattg

SEQ ID NO: 409015 - DNA, 75 bp, synthetic construct
  source 1..75: mol_type = other DNA
ttatggcgcatgctgcagctgaatatcctagtgagtgttgcggcgtggtggcgcaaaagagccgggtagagaaat

SEQ ID NO: 409016 - DNA, 75 bp, synthetic construct
  source 1..75: mol_type = other DNA
ttgtcgtatacggcgcgtttctaccagtatttggcgaagatcacctccggtgaagtcgaagcccatatggtgttt

SEQ ID NO: 409017 - DNA, 75 bp, synthetic construct
  source 1..75: mol_type = other DNA
ttttacgccgagtttccaaaaaagatgggcctcaaaggtaaaaagctcggcgagtggccggagctcgctatccag

SEQ ID NO: 409018 - DNA, 75 bp, synthetic construct
  source 1..75: mol_type = other DNA
ttatggtggatactggatggatagaacaataaagattttgcggtttaaaaaatttgctatccgaccacatccgta

SEQ ID NO: 409019 - DNA, 75 bp, synthetic construct
  source 1..75: mol_type = other DNA
acggacatctgagccagcgcgtgccgtatggtggctactggcaggaaaggacgatgaagatcgtcagatataaaa

SEQ ID NO: 409020 - DNA, 75 bp, synthetic construct
  source 1..75: mol_type = other DNA
tcgccagaagactatgcagctgctgaggactggggtacggtgatcgccatcgttcacagtcaccctgacgccact

SEQ ID NO: 409021 - DNA, 75 bp, synthetic construct
  source 1..75: mol_type = other DNA
gtccgggcattttcttgaaaccctcaacggtattctgagcctgagaattaacggcgtgacagcgcaccgtgaggc

SEQ ID NO: 409022 - DNA, 75 bp, synthetic construct
  source 1..75: mol_type = other DNA
tttgcctggctctgggattttttctaagtattgtgatttctgtaatgttttgccttgtcaaaaaaatggtagatg

SEQ ID NO: 409023 - DNA, 75 bp, synthetic construct
  source 1..75: mol_type = other DNA
aaccatcccgccgttcttcctctaaaaaagcacctaaaaagacagattcaggcaggaatgatggcatcgatatga

SEQ ID NO: 409024 - DNA, 75 bp, synthetic construct
  source 1..75: mol_type = other DNA
aacagtgagctttatacaaaaatgatatacctgaccaggaactggtcactgtatccgaacggtgatggctgtgtc

SEQ ID NO: 409025 - DNA, 75 bp, synthetic construct
  source 1..75: mol_type = other DNA
gatcatgaacacatgcgtaaatgcgcaagtctggcacttatagacagtgatattatggcaatgccaatgggctat

SEQ ID NO: 409026 - DNA, 75 bp, synthetic construct
  source 1..75: mol_type = other DNA
agcacacaggggatgaccctgcagaggctgatagagtgtgcagccggtatccggttgtcctcccgggccgtccgg

SEQ ID NO: 409027 - DNA, 75 bp, synthetic construct
  source 1..75: mol_type = other DNA
acatcgacgtggcattcctcggcgtcccatcctgtgatgaattcggtaatgctaacggttataccggcaaagcct

SEQ ID NO: 409028 - DNA, 75 bp, synthetic construct
  source 1..75: mol_type = other DNA
aaaagcgcgattgatgcccagcagccgtacatctctaacccggatgaatggctgaagcagcccgccaacctggaa

SEQ ID NO: 409029 - DNA, 75 bp, synthetic construct
  source 1..75: mol_type = other DNA
taccgcccagtttttgaaagatcagggcaaagttcccgctgtggcgaaggattacagccagtacgttacctcacg

SEQ ID NO: 409030 - DNA, 75 bp, synthetic construct
  source 1..75: mol_type = other DNA
gcgaaagtcgactggcgcaagttcgacagcggcgcatccgtggtgcgtgcgttagcctccggcgacgtgcagatc

SEQ ID NO: 409031 - DNA, 75 bp, synthetic construct
  source 1..75: mol_type = other DNA
ataacggccctggatttgctaacgcatcaacgcaacagcaaaagcagcggcagtcgccgttgaggtctggagtac

SEQ ID NO: 409032 - DNA, 75 bp, synthetic construct
  source 1..75: mol_type = other DNA
gatcatcgacaccgcgcagtttttgaaagagcagggcaaggtcccggctgtagcgaatgattacagccagtacgt

SEQ ID NO: 409033 - DNA, 75 bp, synthetic construct
  source 1..75: mol_type = other DNA
aaactgggtaactccgaagcgctggtggtgaagaaaaccatcagcaaaccggaagatctgattggcaaacgcatt

SEQ ID NO: 409034 - DNA, 75 bp, synthetic construct
  source 1..75: mol_type = other DNA
cagcaacaaacggcagaactgaccggaccggtgaacaaagcgatcatcgacaccgcgcagtttttaaagagcagg

SEQ ID NO: 409035 - DNA, 75 bp, synthetic construct
  source 1..75: mol_type = other DNA
cgcttccggcggtcactgcgataccgcgattgcatccgccctttccatcatcgtcgcaccgctggtacgcggtcg

SEQ ID NO: 409036 - DNA, 75 bp, synthetic construct
  source 1..75: mol_type = other DNA
ttggcgatgctgcaaaaatcggcgctggcgcgacccgtatgaccactaacccgcgcgaactgcttattgcccgta

SEQ ID NO: 409037 - DNA, 75 bp, synthetic construct
  source 1..75: mol_type = other DNA
aaactggcgcgcttgagcggtgtaccggaagctgacgtaccggggctggtcaagggaaatacctatctgacgccg

SEQ ID NO: 409038 - DNA, 75 bp, synthetic construct
  source 1..75: mol_type = other DNA
gctggcttctggcgacgtgcaaatcggtaatcttggctccagcccgttagcggtcgctgccagtcagcaggtgcc

SEQ ID NO: 409039 - DNA, 75 bp, synthetic construct
  source 1..75: mol_type = other DNA
ggtaatctcggttccagcccgttagcggttgctgccagccagcaggtgccgattgaagttttcttgctggcgtcg

SEQ ID NO: 409040 - DNA, 75 bp, synthetic construct
  source 1..75: mol_type = other DNA
atggcgtattttctggattttgacgagcgggcactaaaggaatggcgaaagctgggctcgacggtacgtgaacag

SEQ ID NO: 409041 - DNA, 75 bp, synthetic construct
  source 1..75: mol_type = other DNA
aactcgaagagcaaaattgtccgtttgctatggcgcaaattgttgatagccgaggctcgactccccgccattctg

SEQ ID NO: 409042 - DNA, 75 bp, synthetic construct
  source 1..75: mol_type = other DNA
ggaaatatcaattcagagaaaatttgaaatgatatataataaattaaatacattaatttacgacaaatatagtga

SEQ ID NO: 409043 - DNA, 75 bp, synthetic construct
  source 1..75: mol_type = other DNA
tgcgttctcttcgcgttcagcaagtttccacctcccgcggcatgattaccgaccgttctggtcgcccgttagcag

SEQ ID NO: 409044 - DNA, 75 bp, synthetic construct
  source 1..75: mol_type = other DNA
caatcaaagaaaagttactgtttttttatctaaagaaaataaaactcttactttggagccttacacaattggtgg

SEQ ID NO: 409045 - DNA, 75 bp, synthetic construct
  source 1..75: mol_type = other DNA
ggaaagactctcactcgctactgcacttgttccttatggccttgatccgtgcagtacgaaacgggtcgaacgtca

SEQ ID NO: 409046 - DNA, 75 bp, synthetic construct
  source 1..75: mol_type = other DNA
ttgtgatttctcgatctttatcaacgcgccagctactgcgttgcgggaacgactggtagggcgcaagctggcggg

SEQ ID NO: 409047 - DNA, 75 bp, synthetic construct
  source 1..75: mol_type = other DNA
ggctgaacgtgcaagcgcagtaccctgatgatgagatagaaaacgtacataagccgttattgcgtaagctggcgg

SEQ ID NO: 409048 - DNA, 75 bp, synthetic construct
  source 1..75: mol_type = other DNA
ttcaccattacaatagctggctggatgcgcatcaattgcgccccttcaaaggcgcaccagagacattcgatgtag

SEQ ID NO: 409049 - DNA, 75 bp, synthetic construct
  source 1..75: mol_type = other DNA
tacaaaccaaggttttaaaagcttaatcccaggcaaaaatgttcacaataaatacttatatcattgcattaagaa

SEQ ID NO: 409050 - DNA, 75 bp, synthetic construct
  source 1..75: mol_type = other DNA
atgaaaaaagcatttgctgcactgttcgttttgttgtctctggtagcttcaactcaggcctttgccggccgttgt

SEQ ID NO: 409051 - DNA, 75 bp, synthetic construct
  source 1..75: mol_type = other DNA
cgcttattcgtgtcatgaacggacacatctacagagtaccagatcgtcgtaagcgtaaaccggagctgaagcctt

SEQ ID NO: 409052 - DNA, 75 bp, synthetic construct
  source 1..75: mol_type = other DNA
ttcatctgcgtgaggaatcccgccgttactatccgtccggcgaagtgaccgctcacctcattggctttaccaacg

SEQ ID NO: 409053 - DNA, 75 bp, synthetic construct
  source 1..75: mol_type = other DNA
ctccacgttttcctttgttggattagagacgctgaatattgctggtcgcaatgtactgtgcaatgtctggcagga

SEQ ID NO: 409054 - DNA, 75 bp, synthetic construct
  source 1..75: mol_type = other DNA
ctacttgtctgaaatttagtcgtattggtaatgtaaatgagaaaacgagatctgtttctataaaagctaaggctg

SEQ ID NO: 409055 - DNA, 75 bp, synthetic construct
  source 1..75: mol_type = other DNA
ccccacgtctgcaaacggcggcaacgctgtgtaaccagacgcctgccgcgacggaatctccgctgtggctggggg

SEQ ID NO: 409056 - DNA, 75 bp, synthetic construct
  source 1..75: mol_type = other DNA
gtgattaaaggagctttaagatctgcgccaagtagaaaagttttacttacccttgatgaggaaacgaataaatta

SEQ ID NO: 409057 - DNA, 75 bp, synthetic construct
  source 1..75: mol_type = other DNA
taaacagaaacaaacgggcgtttatgttcaggatcaggcgcagtgggataaagtgctggtcaccctgggcggtcg

SEQ ID NO: 409058 - DNA, 75 bp, synthetic construct
  source 1..75: mol_type = other DNA
gggaagttatacggtcgtggatgcgttagtgcgttatgatctggcgcgagtcggcatggctggctccaacgtggc

SEQ ID NO: 409059 - DNA, 75 bp, synthetic construct
  source 1..75: mol_type = other DNA
gacgtgtttgaaccgggttcaaccgtcaagccgatggtggtgatgactgcgctgcaacgcggcgtcgtgcgggaa

SEQ ID NO: 409060 - DNA, 75 bp, synthetic construct
  source 1..75: mol_type = other DNA
ttcatctgcgtgaagaatctcgccgttattatccgtctggcgaagtgaccgctcacctcatcggctttaccaacg

SEQ ID NO: 409061 - DNA, 75 bp, synthetic construct
  source 1..75: mol_type = other DNA
cggctacgggctaatggtaacaccgttacagttagcgcgagtctacgcaactatcggcagctacggcatttatcg

SEQ ID NO: 409062 - DNA, 75 bp, synthetic construct
  source 1..75: mol_type = other DNA
atggcgcacgacgaacaatggctcaccccacatctgcaaacggcggcaacgttgtgtaaccagacacccgccgcg

SEQ ID NO: 409063 - DNA, 75 bp, synthetic construct
  source 1..75: mol_type = other DNA
gctaagcttgccaatcatgcggcaaaaaatggcagcggcagacgggtggggtggtggatttatcaaatctggaac

SEQ ID NO: 409064 - DNA, 75 bp, synthetic construct
  source 1..75: mol_type = other DNA
atctggggtgtaggccgcaggatatcaaagaagctgaacacaatagagataactactgcactgcagctggcgcac

SEQ ID NO: 409065 - DNA, 75 bp, synthetic construct
  source 1..75: mol_type = other DNA
tcacaaacgaaatctttcgcgttccagcgcgccgcaagcctaagcccgcggttaagccgtccgatatcccgaccc

SEQ ID NO: 409066 - DNA, 75 bp, synthetic construct
  source 1..75: mol_type = other DNA
tcaaattagtattcaaaactgggccccagccggctcgttggaagactgttgtttttttgctgtggggtatttatg

SEQ ID NO: 409067 - DNA, 75 bp, synthetic construct
  source 1..75: mol_type = other DNA
ggctctcgaaaaccttggtttgggaacactgcaatcatccttcacagataaaacgggtaaaattgcattaaatgg

SEQ ID NO: 409068 - DNA, 75 bp, synthetic construct
  source 1..75: mol_type = other DNA
aaaagcgccgacgcctgccgcaggaaataacaccacgcggattgcgaccactgcgtttgttcaggccgctattac

SEQ ID NO: 409069 - DNA, 75 bp, synthetic construct
  source 1..75: mol_type = other DNA
atgatcaaaactcgtcggactaaacgtaccttttccccggagttcaagcttgaagctttcgagcaggtggtggtt

SEQ ID NO: 409070 - DNA, 75 bp, synthetic construct
  source 1..75: mol_type = other DNA
ccaatgtcgagcgtgtgctgatgaatagttgtcaggccaatctgatagtagagatgaccgaagaaggcagatatc

SEQ ID NO: 409071 - DNA, 75 bp, synthetic construct
  source 1..75: mol_type = other DNA
actggttgttgctggacgacgagaagtggtgccagcttgcgcaattttgtgatttctctatctttatcaacgcgc

SEQ ID NO: 409072 - DNA, 75 bp, synthetic construct
  source 1..75: mol_type = other DNA
atgttatacatggctttatgcagttttatgatgatcctggcgttaagtgagatgtttcgcacgatgacggccatt

SEQ ID NO: 409073 - DNA, 75 bp, synthetic construct
  source 1..75: mol_type = other DNA
cccatctggggcctgttcaggtaactcataaggcgcttgtgcgattcgggaggctggcaaaacacgatgaaaacg

SEQ ID NO: 409074 - DNA, 75 bp, synthetic construct
  source 1..75: mol_type = other DNA
gaccagacaggcgtaatcaacattaacgcggaaaatggtcaggcattctataacgatggcactgggcttattatc

SEQ ID NO: 409075 - DNA, 75 bp, synthetic construct
  source 1..75: mol_type = other DNA
tcaacgcacggcaaaaagctgggttaacacaagatgcgttggctaaaaaagctgggatcaccagagttgcaatca

SEQ ID NO: 409076 - DNA, 75 bp, synthetic construct
  source 1..75: mol_type = other DNA
tttcagggtgttacgtcatcgccagaaaaaaatccaccaatgaagcaacattcaaaaaatatatttctgacatgg

SEQ ID NO: 409077 - DNA, 75 bp, synthetic construct
  source 1..75: mol_type = other DNA
ttcgctttattgatgcctgtcaccatcaacaaacgaaaaacctgtggtccttagcagtatacacaggcattcgtc

SEQ ID NO: 409078 - DNA, 75 bp, synthetic construct
  source 1..75: mol_type = other DNA
tagcagcccggcttaatcatcagcgcaaagatgcgcctgtcgtgtgggtccacgacggtgaacgcgatcacccga

SEQ ID NO: 409079 - DNA, 75 bp, synthetic construct
  source 1..75: mol_type = other DNA
caccgacgaactgattccttccggtgaaacctcttcttatcgttcaaatccgattggtctggcggagtttaccct

SEQ ID NO: 409080 - DNA, 75 bp, synthetic construct
  source 1..75: mol_type = other DNA
cctttatttcgatatgcgcgctttcgcgaatattcaggcggcagaagctgtaaaatcagggcgtatgaggcttga

SEQ ID NO: 409081 - DNA, 75 bp, synthetic construct
  source 1..75: mol_type = other DNA
atatcgttatgactggattgcggccgctgatgttttgttcggcaaaacacctacctggcagcaggatctgattat

SEQ ID NO: 409082 - DNA, 75 bp, synthetic construct
  source 1..75: mol_type = other DNA
gaaagtgtgctcgaagatcctcgacgaagtgaccaccaccgacgaactgattccttccggtgaaacctcttctta

SEQ ID NO: 409083 - DNA, 75 bp, synthetic construct
  source 1..75: mol_type = other DNA
gtaacgccgtataaaaaccgtgtttatcagggctttgtgaaaggggcaactcagcaaccgctgatttacgggccg

SEQ ID NO: 409084 - DNA, 75 bp, synthetic construct
  source 1..75: mol_type = other DNA
aatcatcagaaccgcgttctgcggcccatgctttggcgcgggcgatacgccaatcaacaacggtttgagtattcg

SEQ ID NO: 409085 - DNA, 75 bp, synthetic construct
  source 1..75: mol_type = other DNA
tacccaggccctctggcaggaatgctttcagtaatgcagcaggaagcgggtgagtggtttttgttttgcccgtgc

SEQ ID NO: 409086 - DNA, 75 bp, synthetic construct
  source 1..75: mol_type = other DNA
gtggttaatgccaatcgccatcaggaaatctaccaattaagcggtctgaaagtaattgaggattcactggcagat

SEQ ID NO: 409087 - DNA, 75 bp, synthetic construct
  source 1..75: mol_type = other DNA
gcgttgtgctggcaggcggtaaagccagacgaatgggcggcgtagataaaggattgcttgaattaaatggcaaac

SEQ ID NO: 409088 - DNA, 75 bp, synthetic construct
  source 1..75: mol_type = other DNA
aaaaaatcttgcctcatcgattaataaagaaaaattactggaggttcgtaaagagctactgactggataccagat

SEQ ID NO: 409089 - DNA, 75 bp, synthetic construct
  source 1..75: mol_type = other DNA
acgcggcgaaaggtcaagattgccaaaggatggggctgggttgcatgtgttgacgttgctggtggcacaggacga

SEQ ID NO: 409090 - DNA, 75 bp, synthetic construct
  source 1..75: mol_type = other DNA
tatgtgcctgctaatgaagatattggtgccgaaatggcaactttccgagatcaggttctggcggatatcgaaatg

SEQ ID NO: 409091 - DNA, 75 bp, synthetic construct
  source 1..75: mol_type = other DNA
ttactgtgccggcctgaccggcgacaggaggagatgctggccgcctggaggaaaagggcgacacaggagggtgag

SEQ ID NO: 409092 - DNA, 75 bp, synthetic construct
  source 1..75: mol_type = other DNA
gtgtagaacaccaggcggtgctggctgtcgtagtggtagtggtgggtccgctcgtcgtgcatccatatcacccct

SEQ ID NO: 409093 - DNA, 75 bp, synthetic construct
  source 1..75: mol_type = other DNA
ctggagaaaaagcattacaagagcattgtgcgaagcaccttattttccggaccagctgggtctatgcaggtaaag

SEQ ID NO: 409094 - DNA, 75 bp, synthetic construct
  source 1..75: mol_type = other DNA
ccggagaaaaagcattacaagagcattgtgcgaagcatcttattttccggaccagctgggtctatgcaggtaaag

SEQ ID NO: 409095 - DNA, 75 bp, synthetic construct
  source 1..75: mol_type = other DNA
ggctgattgtacggcacatgccattcgtgtagcactgaataaaccggaagtcgcaggcttgtaccatttggtagc

SEQ ID NO: 409096 - DNA, 75 bp, synthetic construct
  source 1..75: mol_type = other DNA
gggcagcgccttatcaccttgcgcaagcgagggctgattgggcggaaacgccagcggctggatgaaaaggcaata

SEQ ID NO: 409097 - DNA, 75 bp, synthetic construct
  source 1..75: mol_type = other DNA
gtcgtccacataactctcgccttaatacagaaaaatttcagcagaactttgcgcttgtcttgcctgactggcagg

SEQ ID NO: 409098 - DNA, 75 bp, synthetic construct
  source 1..75: mol_type = other DNA
gaaataacttcgccaaaacaatgttgcgtctggcaaaagagcgtgaagaattagcggttattaacgatcagtttg

SEQ ID NO: 409099 - DNA, 75 bp, synthetic construct
  source 1..75: mol_type = other DNA
gaaacaattttgccaagacaatgttacgtctggcaaaagagcgcgaagaattagctgtcattaacgatcagtttg

SEQ ID NO: 409100 - DNA, 75 bp, synthetic construct
  source 1..75: mol_type = other DNA
tacagaaaaatttcagcagaactttgcgcttgtcttgcctgactggcaggttggcgtgaaacgaatgctcaacga

SEQ ID NO: 409101 - DNA, 75 bp, synthetic construct
  source 1..75: mol_type = other DNA
ctgattattgtggcgatttcagtaaccccgaaggtgtggctgaaaccgtcaaaaaaattcgcccagatgttattg

SEQ ID NO: 409102 - DNA, 75 bp, synthetic construct
  source 1..75: mol_type = other DNA
aaaagaattcgacctgatgttattgttaatgctgcggctcacaccgcagtagataaggctgagtcagaacccgaa

SEQ ID NO: 409103 - DNA, 75 bp, synthetic construct
  source 1..75: mol_type = other DNA
gaaataactttgccaaaacgatgttgcgcctggcaaaagaacgcgaagagttggctgtgataaacgatcaatttg

SEQ ID NO: 409104 - DNA, 75 bp, synthetic construct
  source 1..75: mol_type = other DNA
gccagcaaaattgccgggcgtattgacaccattctggtgaaagaaggccagtttgttcgcgaaggtgaagtgctg

SEQ ID NO: 409105 - DNA, 75 bp, synthetic construct
  source 1..75: mol_type = other DNA
aacgtcatatgcgttcccgttcactggcccaacgaggggctatttctgcgcaacagctggatgacgaccgcgccg

SEQ ID NO: 409106 - DNA, 75 bp, synthetic construct
  source 1..75: mol_type = other DNA
caactgttattacgatttgaaggtcttacccgtgttgaatttggacggacggatggcgagaccgcaatacttacc

SEQ ID NO: 409107 - DNA, 75 bp, synthetic construct
  source 1..75: mol_type = other DNA
acaccttgcgcgtggtagcgctggcaccggaaaaagaaggggcattgcaggccatccgccatcttaaacagcaaa

SEQ ID NO: 409108 - DNA, 75 bp, synthetic construct
  source 1..75: mol_type = other DNA
ggctgctgactgaagagggatggctcgatgaccatcagttgcgtattgctgacggtgtaatcgcagcaatcgaac

SEQ ID NO: 409109 - DNA, 75 bp, synthetic construct
  source 1..75: mol_type = other DNA
aagaccgtggaaaccgccagcgaacgccagaagctgatgttccgggtcaaggcgcagatcgcccccgaactgctg

SEQ ID NO: 409110 - DNA, 75 bp, synthetic construct
  source 1..75: mol_type = other DNA
gcgcttgtcttgcctgactggcaggttggcgtgaaacgcatgctcaacgaattatttacgactacagcaatttaa

SEQ ID NO: 409111 - DNA, 75 bp, synthetic construct
  source 1..75: mol_type = other DNA
tcttaacaaactcaatgctgtgccaacaacagcctatcccacaccagctcgtcgtcctctcaattctcgccttaa

SEQ ID NO: 409112 - DNA, 75 bp, synthetic construct
  source 1..75: mol_type = other DNA
gggtcacgtatccaaagggttgatggcatttcaaacgtaatactctcgctcaatgaaagtcccaatgatcttgtc

SEQ ID NO: 409113 - DNA, 75 bp, synthetic construct
  source 1..75: mol_type = other DNA
tacagaaaaatttcagcaaaattttgcgcttgttttgcctgactggcaagttggcgtgaaacgcatgctcaacga

SEQ ID NO: 409114 - DNA, 75 bp, synthetic construct
  source 1..75: mol_type = other DNA
aaaaaaattcgtcctgacgttattgttaatgctgctgctcataccgcggtagataaggctgagtcagaacccgaa

SEQ ID NO: 409115 - DNA, 75 bp, synthetic construct
  source 1..75: mol_type = other DNA
gagcgcgaagaactagccgttattaatgatcagtttggcgcgccaacgggcgcagagttgctagctgattgtacg

SEQ ID NO: 409116 - DNA, 75 bp, synthetic construct
  source 1..75: mol_type = other DNA
gagtggtgaaacaaactggcatgaatatgcgcaatttgtttttgagcttgccagccaaaaaggcgaattactgaa

SEQ ID NO: 409117 - DNA, 75 bp, synthetic construct
  source 1..75: mol_type = other DNA
tgcataaagaagatttccaggccgttgatattgaagcaattgctaaaccggtcagcaaaatggcggttacagttc

SEQ ID NO: 409118 - DNA, 75 bp, synthetic construct
  source 1..75: mol_type = other DNA
aggtatcaccaccgccttcggcgttccgggagctgcaatcaatccgttctactcagcgatgcgtaagcacggcgg

SEQ ID NO: 409119 - DNA, 75 bp, synthetic construct
  source 1..75: mol_type = other DNA
cggcaatgtatgtgctggagaaagaaggtatcaccaccgccttcggcgttccgggagctgcaatcaatccgttct

SEQ ID NO: 409120 - DNA, 75 bp, synthetic construct
  source 1..75: mol_type = other DNA
gtggaaggtgcgtcgcacatggcggaaggctacacccgcgcaacggcagggaatatcggcgtatgtctgggaacg

SEQ ID NO: 409121 - DNA, 75 bp, synthetic construct
  source 1..75: mol_type = other DNA
gtcatggaatttgaagatatcgccgataacgcagtggacgcaccgactgaaacctgcttcatgcactatgaataa

SEQ ID NO: 409122 - DNA, 75 bp, synthetic construct
  source 1..75: mol_type = other DNA
cgataatgtgatggaatttgaagatatcgccgataacgcagcggacgcgccaaccgaaacctgttttatgcaata

SEQ ID NO: 409123 - DNA, 75 bp, synthetic construct
  source 1..75: mol_type = other DNA
gcgccacgtgagtatgagttgttccggttgatggataacactctggcagaagatttactctggagttacctgcaa

SEQ ID NO: 409124 - DNA, 75 bp, synthetic construct
  source 1..75: mol_type = other DNA
gcaccgcgagaatacgaactgttccgactaatggataattctctggcggaagatttgctctggagttacctgcaa

SEQ ID NO: 409125 - DNA, 75 bp, synthetic construct
  source 1..75: mol_type = other DNA
tttcgcactcgcgaatgtctcccggcattatttgaaggctttaacgacaattgtgtgctgattcacggtaacttc

SEQ ID NO: 409126 - DNA, 75 bp, synthetic construct
  source 1..75: mol_type = other DNA
agatttgctctggagttacctgcaacgcgcgccagtggcggagtcattcatctggcggcgttggttgtatgtgtt

SEQ ID NO: 409127 - DNA, 75 bp, synthetic construct
  source 1..75: mol_type = other DNA
gtcatttactgggcgaaagattgagtcgtatagagtgcgtgaatgaaaaatcagacactactctgtgggcgttgt

SEQ ID NO: 409128 - DNA, 75 bp, synthetic construct
  source 1..75: mol_type = other DNA
tatggcgtgatgacacatgaagaacatcctggccccgatgtcctgttactggagcggatgcgtggtgtttctgta

SEQ ID NO: 409129 - DNA, 75 bp, synthetic construct
  source 1..75: mol_type = other DNA
ttcaaaccggaagatattgctccggcctttgaacaagcgaaagtcttaatgaatcagtaccgtgtcccggtggtg

SEQ ID NO: 409130 - DNA, 75 bp, synthetic construct
  source 1..75: mol_type = other DNA
tggccggcacgtatcacctggtggccagcggtgaaaccagctggtgcgactatgcccgctatgtgtttgaagtgg

SEQ ID NO: 409131 - DNA, 75 bp, synthetic construct
  source 1..75: mol_type = other DNA
atccgatacgacaacctggtatgactatgcagcactggtatttgatgaagccagaaaggcaggcatcgaactggc

SEQ ID NO: 409132 - DNA, 75 bp, synthetic construct
  source 1..75: mol_type = other DNA
accagctgggtctatgcaggaaaaggaaataacttcgccaaaacgatgttacgtctggcaaaagagcgtgaagaa

SEQ ID NO: 409133 - DNA, 75 bp, synthetic construct
  source 1..75: mol_type = other DNA
atggccaggtgggctgggagctgcagcgttccctgtccaccctcggcgacgtggtcgcggtggattattttgata

SEQ ID NO: 409134 - DNA, 75 bp, synthetic construct
  source 1..75: mol_type = other DNA
acggcgccggcagccattatcgtcgggaagatgaagcaacaggcccgctgaacgtctacggcgaaaccaaacgtg

SEQ ID NO: 409135 - DNA, 75 bp, synthetic construct
  source 1..75: mol_type = other DNA
atggtcaggtgggctgggagctgcagcgttcactgtccacgctcggtgatgtggtcgcggtggattactttgata

SEQ ID NO: 409136 - DNA, 75 bp, synthetic construct
  source 1..75: mol_type = other DNA
cgggcgtccttcggtgcgcgaagcgctggcagcgttaaaacgcaaaggtctggtgcaaataaacaacggcgaacg

SEQ ID NO: 409137 - DNA, 75 bp, synthetic construct
  source 1..75: mol_type = other DNA
tagctatcaacagcatattgcgatcgttgatgcgatccgccgtcatgatcctgacgaagccgatcgtgcgttgca

SEQ ID NO: 409138 - DNA, 75 bp, synthetic construct
  source 1..75: mol_type = other DNA
gacaccatcatcggcgagctttccggcatggcgaaagatttcctttctcatcctggtgggattgcccatttcgaa

SEQ ID NO: 409139 - DNA, 75 bp, synthetic construct
  source 1..75: mol_type = other DNA
ttgcgcgaagcatcttattttccgtaccagctgggtatatgcaggtaaaggaaataacttcgccaaaacaatgtt

SEQ ID NO: 409140 - DNA, 75 bp, synthetic construct
  source 1..75: mol_type = other DNA
ccgatcgcgcattgcaatcgcaccttaacagcgtttctgccacctggcacgccttcggtcaaaccactaacaaaa

SEQ ID NO: 409141 - DNA, 75 bp, synthetic construct
  source 1..75: mol_type = other DNA
aagattctccggctactatcggtcgtaacttgcgtcgtcgtccgctggcgcgtaaaaaactctccgaaatggtgg

SEQ ID NO: 409142 - DNA, 75 bp, synthetic construct
  source 1..75: mol_type = other DNA
tgacgaagccgataatttcggtgaccgccgctcaattttttacgcccgtaatgcctgtttcgacctggcaaaact

SEQ ID NO: 409143 - DNA, 75 bp, synthetic construct
  source 1..75: mol_type = other DNA
agttctgacttaccggacgttgcgtcgtgctggctataccgggaaaatttttatcgttgttgatgatgaagataa

SEQ ID NO: 409144 - DNA, 75 bp, synthetic construct
  source 1..75: mol_type = other DNA
atctgaacatgttcaatgacggccttagctacatgggcgttgtggaatccgtgacgctgccgaagctgacccgca

SEQ ID NO: 409145 - DNA, 75 bp, synthetic construct
  source 1..75: mol_type = other DNA
taaggagctggtcgaaatcgacaccatcaacatgattgagaaggtgaacggcatcgaccggctggagcaacaccg

SEQ ID NO: 409146 - DNA, 75 bp, synthetic construct
  source 1..75: mol_type = other DNA
ctcggcctggacgactccgcgcttgatgcgagctttgtcatggggggcgcagttcgtgagctgttccttaagtat

SEQ ID NO: 409147 - DNA, 75 bp, synthetic construct
  source 1..75: mol_type = other DNA
aaacgggactgactgctaaagcgattcgtttctatgaagagaaagggctggtcacaccgccgctgcgtggtgaaa

SEQ ID NO: 409148 - DNA, 75 bp, synthetic construct
  source 1..75: mol_type = other DNA
atcgtcatggaacatggtgtacacaatgggactatgtcgctgaccgtttcggctctgcggatctgctgccgttca

SEQ ID NO: 409149 - DNA, 75 bp, synthetic construct
  source 1..75: mol_type = other DNA
aaggtcgcggctttgtgcgtctcaatgccggatgtccgcgttcaaaactggagaaaggcgccaccgggttgatta

SEQ ID NO: 409150 - DNA, 75 bp, synthetic construct
  source 1..75: mol_type = other DNA
gagtaatgtggctcccggggactgggcgttgctaacgtccgggtcggaaaagtttcaatattcccgccctgaccg

SEQ ID NO: 409151 - DNA, 75 bp, synthetic construct
  source 1..75: mol_type = other DNA
caaaactaggcgaattcactccaccaaaaactgatgctggtaccggaagaacgattcatctagttcaaccagcta

SEQ ID NO: 409152 - DNA, 75 bp, synthetic construct
  source 1..75: mol_type = other DNA
tcatacgaaaggatttgctgaccggatatcatgttctgaaacgagggcaaaaaacacccattaagggacgctccg

SEQ ID NO: 409153 - DNA, 75 bp, synthetic construct
  source 1..75: mol_type = other DNA
ccagcgcgacgataccggcgaaacggtggccgtcgaagtggtcatgcgtgggcgtcagaaagaagtcgacaccgg

SEQ ID NO: 409154 - DNA, 75 bp, synthetic construct
  source 1..75: mol_type = other DNA
taaggagctggtcgaaatcgacaccattaacatgattgagaaggtgaatggcgtcgaccggctggagcaacaccg

SEQ ID NO: 409155 - DNA, 75 bp, synthetic construct
  source 1..75: mol_type = other DNA
actcaactcattccagcgtgtcggattatcgttcgaaagggagtgtcagaggctattgcgcagggctgtatgcca

SEQ ID NO: 409156 - DNA, 75 bp, synthetic construct
  source 1..75: mol_type = other DNA
atggttgattatctaaaaccgccaccaccgccacgaacaaaagagcaagtattaaaagaagcccgtgatcaaatc

SEQ ID NO: 409157 - DNA, 75 bp, synthetic construct
  source 1..75: mol_type = other DNA
cagaaaaaagtcatggttgccggaggaaatgtaattaccaatccagaccttgataatcacgataaaacagacgta

SEQ ID NO: 409158 - DNA, 75 bp, synthetic construct
  source 1..75: mol_type = other DNA
ggtgaggatgtggcggtgagcgctgcggttgccacccgcctgatggctgaaccgaatctgattgtccgggaagcg

SEQ ID NO: 409159 - DNA, 75 bp, synthetic construct
  source 1..75: mol_type = other DNA
agggtaaacccggcctgcagttcgtcggcgacaggctggacgaaatccagataagcctggtcttccatcagcatt

SEQ ID NO: 409160 - DNA, 75 bp, synthetic construct
  source 1..75: mol_type = other DNA
catcaggcactggcgctggtcttcggcaacggtgactatcgcggctggttcgtgattaccgatgtgaccgcaacc

SEQ ID NO: 409161 - DNA, 75 bp, synthetic construct
  source 1..75: mol_type = other DNA
tcaacggcactatcgacaacgaaaccactcttctcgttaatgctcgtgatctacactcttttcttggggtaggta

SEQ ID NO: 409162 - DNA, 75 bp, synthetic construct
  source 1..75: mol_type = other DNA
gagtcgaaaatctcagtggtctgcacctatttccggctgacgatggacggtaaggagctggtcgaaattgacacc

SEQ ID NO: 409163 - DNA, 75 bp, synthetic construct
  source 1..75: mol_type = other DNA
atcgcggtcgaggtggtcatgcgtggccgtcataaagaaatcgacggcggcgagaataagcagggtgaaaacacc

SEQ ID NO: 409164 - DNA, 75 bp, synthetic construct
  source 1..75: mol_type = other DNA
acggtcagtgccgtccggattgcacaaaaaatgaaaaacaatccggctgctgcactgacccgtgtcccgggactg

SEQ ID NO: 409165 - DNA, 75 bp, synthetic construct
  source 1..75: mol_type = other DNA
atgttcgagaaaatgaaaaacaatgtaacccgtataccggggaatttaacaaaacttaatcaataccaaaaagac

SEQ ID NO: 409166 - DNA, 75 bp, synthetic construct
  source 1..75: mol_type = other DNA
acccgtacagggcttatgcatgggacggagagaaaagcgtttacgtcgggtgctatccaaccgtggatgaggctg

SEQ ID NO: 409167 - DNA, 75 bp, synthetic construct
  source 1..75: mol_type = other DNA
aaagccattgagggtaatcaacgcacagtgatgcccgttgctttagagaagcgggctgatggctggttttgtgac

SEQ ID NO: 409168 - DNA, 75 bp, synthetic construct
  source 1..75: mol_type = other DNA
tggcagaggcgaagtctcaacaagcgccaattcatgcccggatgcagcaactggtcagcgaatttcaaactaccc

SEQ ID NO: 409169 - DNA, 75 bp, synthetic construct
  source 1..75: mol_type = other DNA
gtactgggaaccccactgagctggaatgccaaatactcagctgatgcctcatttacaccagtacagaaaacactg

SEQ ID NO: 409170 - DNA, 75 bp, synthetic construct
  source 1..75: mol_type = other DNA
ctccgaagaaggtgcctgtctgcatgaatatgccacgtactcctgtgagtcaaaaacatccgggaaagtgatgct

SEQ ID NO: 409171 - DNA, 75 bp, synthetic construct
  source 1..75: mol_type = other DNA
gctgatcaaacagatccaacagttattgcagcaagaaccgttattcagcggcaaaccgcaactgcgcgtgcaccc

SEQ ID NO: 409172 - DNA, 75 bp, synthetic construct
  source 1..75: mol_type = other DNA
cctggacgcctgacgatcttgcgccgccacagacagagtttgtgccgctgatggagccggaagaaaccgtcactg

SEQ ID NO: 409173 - DNA, 75 bp, synthetic construct
  source 1..75: mol_type = other DNA
ctggtcagcgaatttcaaactacccttgatgcgcttgatagtgtgattgcgtcgcgcctgatgcagatggcgctg

SEQ ID NO: 409174 - DNA, 75 bp, synthetic construct
  source 1..75: mol_type = other DNA
tgtgcgattaaggtcgaaaccatcaaagactgtcaggatagaatcgatgcagaaaatgaaaagcctgcgcaaagc

SEQ ID NO: 409175 - DNA, 75 bp, synthetic construct
  source 1..75: mol_type = other DNA
tcaccggaaggtacggaactgctgttcgctcgctgctccattttgcaagccgcgcgctctgccggtatccaggcg

SEQ ID NO: 409176 - DNA, 75 bp, synthetic construct
  source 1..75: mol_type = other DNA
cgttcgcggtggtgcggacgttgtgcgtctgccgaaaaccgataccgctcaggatgttctggatatcgaaaaaga

SEQ ID NO: 409177 - DNA, 75 bp, synthetic construct
  source 1..75: mol_type = other DNA
attctgtaccgcaccggtgaacaagccacgcaaaaaaatgattatgtgaaatttcaactcattgatgcctatctt

SEQ ID NO: 409178 - DNA, 75 bp, synthetic construct
  source 1..75: mol_type = other DNA
aagcttttgctgttggtgacaccgggaacagctatgacagccgttactgggggtttatcagcatttcagataccg

SEQ ID NO: 409179 - DNA, 75 bp, synthetic construct
  source 1..75: mol_type = other DNA
ggcacccgagccgctcacaggctgatttactggctggcctctctactcaaaagcagggggaatcatggctatcga

SEQ ID NO: 409180 - DNA, 75 bp, synthetic construct
  source 1..75: mol_type = other DNA
atgcttggcgcaacgttaagcctgcacggctggcggttgcgcggcgatccaactctgcatcccggcggctgtaaa

SEQ ID NO: 409181 - DNA, 75 bp, synthetic construct
  source 1..75: mol_type = other DNA
ggagctgccacggtggacggtatccagttgcgttttaccggctctattcagcgtgacgataccggcgaagtgcag

SEQ ID NO: 409182 - DNA, 75 bp, synthetic construct
  source 1..75: mol_type = other DNA
cgggcgttatccgaccacagaacaggggcttgaggcgctgatccagcaaccggccaatatggcggattcccgcaa

SEQ ID NO: 409183 - DNA, 75 bp, synthetic construct
  source 1..75: mol_type = other DNA
accttaggggcggatggtcaggaaaacggagaaggggctgccgcagatatcggtaactggaatttacaggagttt

SEQ ID NO: 409184 - DNA, 75 bp, synthetic construct
  source 1..75: mol_type = other DNA
gatgaaatccatatggatatggtatgggatgagcaaccacatattccctggagcaacgtggcgcgcggagactgg

SEQ ID NO: 409185 - DNA, 75 bp, synthetic construct
  source 1..75: mol_type = other DNA
aaaatttcaagttacaaatgaaatccatatgatgtttgataaattacaaaagcataatattcttttcgccctgga

SEQ ID NO: 409186 - DNA, 75 bp, synthetic construct
  source 1..75: mol_type = other DNA
gtggaaaactggagaaagtagcgccaccaaagtcagcagcaccaacagttacgcgaagctgaccattaacggcga

SEQ ID NO: 409187 - DNA, 75 bp, synthetic construct
  source 1..75: mol_type = other DNA
gaatactggtgttacagcgaaaatgttgtgtgaccgcactggctcgtgaagcggcaattacccgaaatattcagt

SEQ ID NO: 409188 - DNA, 75 bp, synthetic construct
  source 1..75: mol_type = other DNA
gcaagggtatcttttttcaccacctgtatctggagatgtttttattcataaatggattttgtcaaccgaaaaaag

SEQ ID NO: 409189 - DNA, 75 bp, synthetic construct
  source 1..75: mol_type = other DNA
atgtctgataatctgccgtggaaaacctggatgccggacgatcttgcgccaccaccggcagagtttgtgccaata

SEQ ID NO: 409190 - DNA, 75 bp, synthetic construct
  source 1..75: mol_type = other DNA
acctggaagagagcggcgaactggtgaatctgtttaacgacccacagcgtcacagcgccgatgtaaaacggcgca

SEQ ID NO: 409191 - DNA, 75 bp, synthetic construct
  source 1..75: mol_type = other DNA
gaatctgtttaacgatccgcagcgtcatagtgccgacgtcaaacgtcgtacgctggagaaggtggcggagatcga

SEQ ID NO: 409192 - DNA, 75 bp, synthetic construct
  source 1..75: mol_type = other DNA
ttgttgacgaagtgatttttcgcctgaaacagcgtgcgggaaaaacactcgcgctaactgtttcgcaactgcgag

SEQ ID NO: 409193 - DNA, 75 bp, synthetic construct
  source 1..75: mol_type = other DNA
cgacggtattgaacgcggcatgaataccgaaggcgtattgcctggcccgctcaatgtcccacgccgggcggtggc

SEQ ID NO: 409194 - DNA, 75 bp, synthetic construct
  source 1..75: mol_type = other DNA
gtgctggcttattacgataagttccgtcgtccggtaaacgagcggtcaattgcccgctattttctggcagcgggg

SEQ ID NO: 409195 - DNA, 75 bp, synthetic construct
  source 1..75: mol_type = other DNA
taaaaataaaatatcttcgtctgaaaatccttattatcgtgataacgctttatatcatgccttgaagataattaa

SEQ ID NO: 409196 - DNA, 75 bp, synthetic construct
  source 1..75: mol_type = other DNA
atcgcgtggcaattaatgtgctggcgaaagatatcgccaatgcccgtgaaatctttgacgccgccgaaggccacg

SEQ ID NO: 409197 - DNA, 75 bp, synthetic construct
  source 1..75: mol_type = other DNA
tgcggcagaaatcgccatggagcataacctcgggctgacctgcgatccggttgccgggcaggtgcaaatcccgtg

SEQ ID NO: 409198 - DNA, 75 bp, synthetic construct
  source 1..75: mol_type = other DNA
aaccttgggctgacctgcgatccggtagccgggcaggtgcaaattccgtgtattgagcggaatgcgattaatgcc

SEQ ID NO: 409199 - DNA, 75 bp, synthetic construct
  source 1..75: mol_type = other DNA
tgctaacgatatgccagttgataaccgacaggggaccattacggtatctgctgaaggtttgcaggttggcgatgc

SEQ ID NO: 409200 - DNA, 75 bp, synthetic construct
  source 1..75: mol_type = other DNA
ctgcgcacaaggttgaagcgaaagatgccaacgatatgccagtggataaccgacaggggaccattacggtatctg

SEQ ID NO: 409201 - DNA, 75 bp, synthetic construct
  source 1..75: mol_type = other DNA
gggccgtgatttgtggaactgtgcggcaggtattgatgccaccatgacggcgattggtgtacctcagggtatcaa

SEQ ID NO: 409202 - DNA, 75 bp, synthetic construct
  source 1..75: mol_type = other DNA
taataaattcgatgctgtgatgctgcttggtgatcgctatgaaatatttgcagttgcagttgctgctgcgattca

SEQ ID NO: 409203 - DNA, 75 bp, synthetic construct
  source 1..75: mol_type = other DNA
gcatgcgccttgctgcacagattgactctgacctgatttccatggtcacgcagcgtgctactaacgtggtcgcaa

SEQ ID NO: 409204 - DNA, 75 bp, synthetic construct
  source 1..75: mol_type = other DNA
cgcaaccctgacagcatacgaaaaagcgcagatccctccggttgcttcctttgatagctacaagaccgatatttc

SEQ ID NO: 409205 - DNA, 75 bp, synthetic construct
  source 1..75: mol_type = other DNA
tggctcgacgctatcagcgttgccgaagcgcaaacgctgttgcgggaaggtcagtttggtgtcggcagtatgcaa

SEQ ID NO: 409206 - DNA, 75 bp, synthetic construct
  source 1..75: mol_type = other DNA
ttatgggagcggataaagtccgcaacaaagttactgggtttatcgaaaaccgtatcggcggaatgaagggcgggg

SEQ ID NO: 409207 - DNA, 75 bp, synthetic construct
  source 1..75: mol_type = other DNA
atgcagattagccagctctccccttgccacaccgtggagtcaatggttcgcgctttacgcacgggcaattacagc

SEQ ID NO: 409208 - DNA, 75 bp, synthetic construct
  source 1..75: mol_type = other DNA
ttctggtctattgaaattattcgcagagatttacgaaacagaattacccatgagccagatcctgagatcccttta

SEQ ID NO: 409209 - DNA, 75 bp, synthetic construct
  source 1..75: mol_type = other DNA
ataatggcaatatagatatccaaaatatcggttttatttcagtgtcaggtgaagatacgtcgggcactaataatg

SEQ ID NO: 409210 - DNA, 75 bp, synthetic construct
  source 1..75: mol_type = other DNA
aaataaagctatcctggaaattggtcgtgatgctttgttgggtgtaaaggatattaaatcgtttaataactatta

SEQ ID NO: 409211 - DNA, 75 bp, synthetic construct
  source 1..75: mol_type = other DNA
gcagtagaagatcttaatgttactgggcagaaagcgatgggtgtcgacatttctggtgatagtaacgacattgat

SEQ ID NO: 409212 - DNA, 75 bp, synthetic construct
  source 1..75: mol_type = other DNA
ggtgattgaccagggtgcggatgacaccaccaacgccgtgtcgattcgcaacttcttcaagcgcgtgaccggggt

SEQ ID NO: 409213 - DNA, 75 bp, synthetic construct
  source 1..75: mol_type = other DNA
catctgcggatcgacccacagctatctcgacgaagtggtgctggatgacgccggaaaccgcatgtttgtctgctc

SEQ ID NO: 409214 - DNA, 75 bp, synthetic construct
  source 1..75: mol_type = other DNA
ttgcttacctcgacgagcagaccaaacgcatgatccgccgcgccatcttaaaagcggtggcgatccccggttatc

SEQ ID NO: 409215 - DNA, 75 bp, synthetic construct
  source 1..75: mol_type = other DNA
agctgtgatgctgttcgtcggcgatgatctctcatcactaagggaagcactacatgacccagatgattgtccttg

SEQ ID NO: 409216 - DNA, 75 bp, synthetic construct
  source 1..75: mol_type = other DNA
gcgtgtggcccggaatcattaatcagggcggcaggacaaattgattgctcccgtaactttctcaaccctccatat

SEQ ID NO: 409217 - DNA, 75 bp, synthetic construct
  source 1..75: mol_type = other DNA
aagatatcgcccgcttcggtcatatcgccactacctacgcctatccggtgaaggtaaatgggcgctacgtgatgg

SEQ ID NO: 409218 - DNA, 75 bp, synthetic construct
  source 1..75: mol_type = other DNA
aaaactgaagctggtcgagccgcaggcatgcgccttgctgcacagattgactctgacctgatttccatggtcacg

SEQ ID NO: 409219 - DNA, 75 bp, synthetic construct
  source 1..75: mol_type = other DNA
aacctataacagaatcaatgattatgagaaaagaggaatgtcactttgatacaaaaagagaagctttttgttgta

SEQ ID NO: 409220 - DNA, 75 bp, synthetic construct
  source 1..75: mol_type = other DNA
caggtaatacagtattacaaggtaaagtatattcttgttcatttcatccagactctaatcacttttcttgcccgg

SEQ ID NO: 409221 - DNA, 75 bp, synthetic construct
  source 1..75: mol_type = other DNA
atgccatttacaactctaaatataccaagtatatctcaattatctcctgctggaatacaggctttgcaggatgcg

SEQ ID NO: 409222 - DNA, 75 bp, synthetic construct
  source 1..75: mol_type = other DNA
ttcaactacaaagacctggctaaggagcttggctctcgcgcatatgcggtcggtgcaactctgacagcctatgag

SEQ ID NO: 409223 - DNA, 75 bp, synthetic construct
  source 1..75: mol_type = other DNA
tctaatcacttttcttgcccggagtcatttttgacatacccgataacgctggacacacctgcgaatggagtgttc

SEQ ID NO: 409224 - DNA, 75 bp, synthetic construct
  source 1..75: mol_type = other DNA
atgcccgataacgctggacacacctgagaatggagtgttcatgagaaactcacaaggtgctgagatatgctctct

SEQ ID NO: 409225 - DNA, 75 bp, synthetic construct
  source 1..75: mol_type = other DNA
agcgtacgattcttgcgggcgtcgccgcctcgcagttatttaacgccatcacggcctataccatcagcacctccg

SEQ ID NO: 409226 - DNA, 75 bp, synthetic construct
  source 1..75: mol_type = other DNA
ggtgtcgatcgtggtgctgggccttggcgctggcgcaatttccctctcggcaggcgcctttgccggggccttcgc

SEQ ID NO: 409227 - DNA, 75 bp, synthetic construct
  source 1..75: mol_type = other DNA
ctcgccgaaccctacgtcctcggcgtctccgccggggcctccaccggcgcggtgtcgatcgtggtgctgggcctt

SEQ ID NO: 409228 - DNA, 75 bp, synthetic construct
  source 1..75: mol_type = other DNA
gtgatttacttcgtgaaacggacctggcaaaaattgccgcaatccttatcccggcaagtgatgatcctatatggt

SEQ ID NO: 409229 - DNA, 75 bp, synthetic construct
  source 1..75: mol_type = other DNA
atgcgctatatcgatcctgtaactgaacaggagcgttcaagccaactttggctacgtcaaattggcgggcataat

SEQ ID NO: 409230 - DNA, 75 bp, synthetic construct
  source 1..75: mol_type = other DNA
atgcgtctgaacgatcgtgcaggtgaaacgcgctatatcgatcctgtaactgaacaggagcgttcaagccaactt

SEQ ID NO: 409231 - DNA, 75 bp, synthetic construct
  source 1..75: mol_type = other DNA
ccgctgagaacgtactggctgtcggtgatgcattcactatcgaaggcgttaacagtgtccacatgatcaagaagg

SEQ ID NO: 409232 - DNA, 75 bp, synthetic construct
  source 1..75: mol_type = other DNA
gtgggcgattgcgcagcaaatcgagagacgaaatacgtgcgtagtcgaagtgcaattgccgaaaaaacagcgtct

SEQ ID NO: 409233 - DNA, 75 bp, synthetic construct
  source 1..75: mol_type = other DNA
gtgggcgattgcgcagcaaatcgagagacgaaatgcctgcgtggtcgaagtacaattaccgaaaaaacagcgtct

SEQ ID NO: 409234 - DNA, 75 bp, synthetic construct
  source 1..75: mol_type = other DNA
atgcggtaaatgcgtggcctgtatgacgatttgcccgaccggcgccattgtcgagccatataccgttgatgctcg

SEQ ID NO: 409235 - DNA, 75 bp, synthetic construct
  source 1..75: mol_type = other DNA
tgaataatgcctataagcatatcaaagaattcctgttaagtaaccatgaacaatataaggatttttatgatgtgt

SEQ ID NO: 409236 - DNA, 75 bp, synthetic construct
  source 1..75: mol_type = other DNA
gttattgaaaatgatggttttcgtgtcgataaaataatagatatcgagattaataatgacacgaacgctgagata

SEQ ID NO: 409237 - DNA, 75 bp, synthetic construct
  source 1..75: mol_type = other DNA
tatttatggttgcgatgactgccagcttatctgcccgtggaatcgctattcgcaactcactacagaagacgattt

SEQ ID NO: 409238 - DNA, 75 bp, synthetic construct
  source 1..75: mol_type = other DNA
cagcccgcgtaagccgctacacgcaccggaactcattgagttattcgcctggagtgaagagaagtttttaaaagt

SEQ ID NO: 409239 - DNA, 75 bp, synthetic construct
  source 1..75: mol_type = other DNA
gtaatctcaacattttctggcaacccacaatataaaaaactcgtttttatggcatggtttggattcagcgttcca

SEQ ID NO: 409240 - DNA, 75 bp, synthetic construct
  source 1..75: mol_type = other DNA
caaggttaccatctgaaaaccgttagcggcctagatctgaccgcagcaactgcaaactcactcgttcagcgtcag

SEQ ID NO: 409241 - DNA, 75 bp, synthetic construct
  source 1..75: mol_type = other DNA
agttacgcccgttaatgggaaaccgtatttacggttgcgatgactgccagcttacctgcccgtggaatcgctatt

SEQ ID NO: 409242 - DNA, 75 bp, synthetic construct
  source 1..75: mol_type = other DNA
aaaaagcccgccagttgaagaaaaagcaggcttataaaccggatcccgaagcatcgtttagctggtcggcaaata

SEQ ID NO: 409243 - DNA, 75 bp, synthetic construct
  source 1..75: mol_type = other DNA
aagagatgaccgagcgtgaacagcgcgaattaaagacgctactggatcgggcgcgtattgcgcatggtcgtgtgt

SEQ ID NO: 409244 - DNA, 75 bp, synthetic construct
  source 1..75: mol_type = other DNA
gctgctgacgccgggcgtgattacctggctggaagaaaaagatatgctgccagcgtttaacgtgacacgtaagag

SEQ ID NO: 409245 - DNA, 75 bp, synthetic construct
  source 1..75: mol_type = other DNA
ggcgacggcgaacggtttaaccgggatgtccgcatggctggcaagtacgctgtttgcactggtagtcggtgcact

SEQ ID NO: 409246 - DNA, 75 bp, synthetic construct
  source 1..75: mol_type = other DNA
cacgtctgccagcttttcgcccgcttgccagactggacagccccggcattaacgcccgccacggaacaggcacaa

SEQ ID NO: 409247 - DNA, 75 bp, synthetic construct
  source 1..75: mol_type = other DNA
ggatttcccggaagtgatattaaaatcggccaactcactgtggctgatgaaaatccgggaaagcgacagggaact

SEQ ID NO: 409248 - DNA, 75 bp, synthetic construct
  source 1..75: mol_type = other DNA
ctggccgagagcggcctgcgggaaatgcatgacgcagagtggtggagtctctgcacctggtacgacgtgcgggat

SEQ ID NO: 409249 - DNA, 75 bp, synthetic construct
  source 1..75: mol_type = other DNA
ctctacccgccgctgaacgaggcactctggctcgcccccttcaaccgtccggcatcggcctggtcagatgacgcg

SEQ ID NO: 409250 - DNA, 75 bp, synthetic construct
  source 1..75: mol_type = other DNA
aagaccgtccgtcactgctggttgcggtgatgttcagccttatcatttacatcgagaacaggatgtaccgcacgc

SEQ ID NO: 409251 - DNA, 75 bp, synthetic construct
  source 1..75: mol_type = other DNA
tcactcaggcggttaattcactgcggactgcgcttaaattaccggatgaatccgctcaggctaatcagatcctcg

SEQ ID NO: 409252 - DNA, 75 bp, synthetic construct
  source 1..75: mol_type = other DNA
gatgtaccgcacgccgcgtaacctcaagaaactgaacgtcattgatgaaggctggcgtctgctggacttcaaaaa

SEQ ID NO: 409253 - DNA, 75 bp, synthetic construct
  source 1..75: mol_type = other DNA
taaccgcgatgccggccgtggtgttcaccgatccgcaagtagcaaccgtgggctacagcgaagcggaagcgcatc

SEQ ID NO: 409254 - DNA, 75 bp, synthetic construct
  source 1..75: mol_type = other DNA
cgccgacataccggtgcctatatcaccatcacacagaacatcgtcgactttgactctgacaaggcctccagtgcg

SEQ ID NO: 409255 - DNA, 75 bp, synthetic construct
  source 1..75: mol_type = other DNA
tcggtgagtttattcaaaaaggttaccgcacctgtcgccgccataccggtgcctatatcaccatcacacagaaca

SEQ ID NO: 409256 - DNA, 75 bp, synthetic construct
  source 1..75: mol_type = other DNA
gcccatgtatgactcggtgatgatgctgaatgacatcaacaaacatgatccggtctgtatcatgaccattgttgc

SEQ ID NO: 409257 - DNA, 75 bp, synthetic construct
  source 1..75: mol_type = other DNA
gacgctgggcctgcgtgagaacggcaggaacagcacggcccgcatcctgaatttccatctggcccgtaacccgga

SEQ ID NO: 409258 - DNA, 75 bp, synthetic construct
  source 1..75: mol_type = other DNA
tattgatgacgtggtggatttcctgaaaaacgccagtgacagcgagcagtatgccgagtcaccgaccatccgcag

SEQ ID NO: 409259 - DNA, 75 bp, synthetic construct
  source 1..75: mol_type = other DNA
aggcgcttttgttccgttaaaagtagcacatggtggtacaggcgggcttaattcaggacaagctcgcactaacct

SEQ ID NO: 409260 - DNA, 75 bp, synthetic construct
  source 1..75: mol_type = other DNA
gagcatctgatgctatatctttttctctggggattgttggcaattatggatctgatctatgtgttttatttttag

SEQ ID NO: 409261 - DNA, 75 bp, synthetic construct
  source 1..75: mol_type = other DNA
gaattacaaacacaaacggcggtaacggaggtgtgccgagtactggcgatatccgcatcactggtggaaatggag

SEQ ID NO: 409262 - DNA, 75 bp, synthetic construct
  source 1..75: mol_type = other DNA
aacaccacgcggtcattctggtgtcgcctgccgtggtacagggggctccggatatcacccgggaaatccagcagg

SEQ ID NO: 409263 - DNA, 75 bp, synthetic construct
  source 1..75: mol_type = other DNA
tccaatgtatgaatccgttatgaccctggcggcaacggatgaaaaagaacctgtctgcataatgaccatcatggc

SEQ ID NO: 409264 - DNA, 75 bp, synthetic construct
  source 1..75: mol_type = other DNA
catgattctgatggcctgctgattcgcctgatggatatccatgaagtgggacgggaaatccgccgccagctggag

SEQ ID NO: 409265 - DNA, 75 bp, synthetic construct
  source 1..75: mol_type = other DNA
cgctgacgcaggagctcgggtcactgcgggcacgccagatcctggcagaacactttccccgtggttcagccacct

SEQ ID NO: 409266 - DNA, 75 bp, synthetic construct
  source 1..75: mol_type = other DNA
ctctgcacaattaagcaaaaactgtattaggcgggatcgttttcaggtggagtatgacgagtacagcgtcaatcg

SEQ ID NO: 409267 - DNA, 75 bp, synthetic construct
  source 1..75: mol_type = other DNA
agccatcgctttattcgcgtcttgatctggcgtgggatggcactggcgaacctaaacttctggaaaataacgccg

SEQ ID NO: 409268 - DNA, 75 bp, synthetic construct
  source 1..75: mol_type = other DNA
atccgtgggaatttatgttgcgtgagatgttttccaccaagctggaggatgcaggcgtacgctggctggaaccgg

SEQ ID NO: 409269 - DNA, 75 bp, synthetic construct
  source 1..75: mol_type = other DNA
ccgacaactacagcaatctgctgaacccggaaatgtccatttcctgcccgttcatcctgacgctgacactggtgg

SEQ ID NO: 409270 - DNA, 75 bp, synthetic construct
  source 1..75: mol_type = other DNA
tgatataaatcggctgctggatattgatatcaacgatcccctcgccgtgcgcgatcgggcaatgctggaagtaat

SEQ ID NO: 409271 - DNA, 75 bp, synthetic construct
  source 1..75: mol_type = other DNA
gcctattctgcgcagtgtactggactccggcggtatcgcctgggtgtttgatatgggggacggctacaagtcgtt

SEQ ID NO: 409272 - DNA, 75 bp, synthetic construct
  source 1..75: mol_type = other DNA
ccgatgatgcctccggcgcggccaaagcggcctggggtaactctgccttcaaggttgtcctcaaacaggatgcgt

SEQ ID NO: 409273 - DNA, 75 bp, synthetic construct
  source 1..75: mol_type = other DNA
gagcgccgcctgccgattggtcgcaacgccgtggcgtggattgagcactggcttgatttgcgcgacctgtttggt

SEQ ID NO: 409274 - DNA, 75 bp, synthetic construct
  source 1..75: mol_type = other DNA
cggctttctgcgctacgtagcttttttgactggctggtcagccagaacgaactcaaagccaacccggcgaaaggt

SEQ ID NO: 409275 - DNA, 75 bp, synthetic construct
  source 1..75: mol_type = other DNA
actcaaagctaacccggcgaaaggtgtttcggcaccgaaagcgccacgtcatctgccgaaaaacatcgacgtcga

SEQ ID NO: 409276 - DNA, 75 bp, synthetic construct
  source 1..75: mol_type = other DNA
ccgctgaacagcaggtgctcaacagctaccgtaaaggcggtttccagctgatcccggcccgctaccatcacctgc

SEQ ID NO: 409277 - DNA, 75 bp, synthetic construct
  source 1..75: mol_type = other DNA
gcgacgggaaagagtgcgtaacccgggtgacgagctaccatctggagagtgatccggaaatggccttcctctgga

SEQ ID NO: 409278 - DNA, 75 bp, synthetic construct
  source 1..75: mol_type = other DNA
caaattgtggagatggagaaccagattaaaatcctgcgggcgtcactgggcggtgcctatattccgacgcgtatc

SEQ ID NO: 409279 - DNA, 75 bp, synthetic construct
  source 1..75: mol_type = other DNA
gtggaaggagatccgcgagcatctcaacagtaaccagacctgtatagtccgctattactataacgtcaccacgtt

SEQ ID NO: 409280 - DNA, 75 bp, synthetic construct
  source 1..75: mol_type = other DNA
tggcctgaaaaaactgaacgtcatcgatgagggctggaagctccttgatttcaagaatgaaaaagtggggcagtt

SEQ ID NO: 409281 - DNA, 75 bp, synthetic construct
  source 1..75: mol_type = other DNA
gaaaacatggggggcgtatacctcgatggcgataccctcaagtttaacccgttcgccaacgtgctggatgatgct

SEQ ID NO: 409282 - DNA, 75 bp, synthetic construct
  source 1..75: mol_type = other DNA
atccgcagcgtgctggactccgggggctttgccgtggtgttcgacatgggggatggctacaagtctctgtgtgag

SEQ ID NO: 409283 - DNA, 75 bp, synthetic construct
  source 1..75: mol_type = other DNA
ctcctgtacaacgcgaagaaaaagaccgtggttctgattcgtcagttccgcgtcgctacctgggttaatggcaat

SEQ ID NO: 409284 - DNA, 75 bp, synthetic construct
  source 1..75: mol_type = other DNA
aaaagcggcgaaatacgtgacggtaagacggtgttattgcttaactatttgcaaatgtcacatttaatggactga

SEQ ID NO: 409285 - DNA, 75 bp, synthetic construct
  source 1..75: mol_type = other DNA
gcgaactgatccagacggctgttctcgccattcgcaaccgcatgacggtgcaggaactagccgaccagttgttcc

SEQ ID NO: 409286 - DNA, 75 bp, synthetic construct
  source 1..75: mol_type = other DNA
gtgagatgaacttcccgcagttcagccgtctgctgccataccgtgattacaaccaggaatccggtctgttcatga

SEQ ID NO: 409287 - DNA, 75 bp, synthetic construct
  source 1..75: mol_type = other DNA
ctcctggtcaggtgaacaggccgaacggtttaacgccattacccgggcctattatatgaaagccgcagaaacact

SEQ ID NO: 409288 - DNA, 75 bp, synthetic construct
  source 1..75: mol_type = other DNA
ctcctgtacaacgcgaagaaaaagacggtcgtgttgattcgccagttccgcgtcgcaacctgggttaatggcaat

SEQ ID NO: 409289 - DNA, 75 bp, synthetic construct
  source 1..75: mol_type = other DNA
ggcccggattttgagtttgtgcagcagaaacgcagagagggtatgagtattcatgaggcggtgtggcagctggcg

SEQ ID NO: 409290 - DNA, 75 bp, synthetic construct
  source 1..75: mol_type = other DNA
actcttaacgcatcttcgcaaaggtggactggataccagcaatttaaatctacggagtttttcgctgatacttac

SEQ ID NO: 409291 - DNA, 75 bp, synthetic construct
  source 1..75: mol_type = other DNA
tggaagaaatcggggccggagatggcttcgctggaggcctggctggaagaacatgagaaatacaggcactgttgc

SEQ ID NO: 409292 - DNA, 75 bp, synthetic construct
  source 1..75: mol_type = other DNA
attgatttagacacttacggcattagtaataacctacttgattttacatcgagtgcaacagggttttattgcact

SEQ ID NO: 409293 - DNA, 75 bp, synthetic construct
  source 1..75: mol_type = other DNA
cggaactatacagcctggaaacggggttgcgacatattcagatcaggactggagcgcacaacaatcagataacgt

SEQ ID NO: 409294 - DNA, 75 bp, synthetic construct
  source 1..75: mol_type = other DNA
tcatgaggcggtgtggcagctggcgtggaagaaatcggggccggagatggcttcgctggaggcctggctggaaga

SEQ ID NO: 409295 - DNA, 75 bp, synthetic construct
  source 1..75: mol_type = other DNA
gcgatgcatacgggagatgagttggtggtctggaagctggacaggattgggcgtaacgttttacatgcgctgctg

SEQ ID NO: 409296 - DNA, 75 bp, synthetic construct
  source 1..75: mol_type = other DNA
cttatcggaatgccccaagtatcactttaggcagactggctttggacaaatctcttcaaggtcaggggcttggct

SEQ ID NO: 409297 - DNA, 75 bp, synthetic construct
  source 1..75: mol_type = other DNA
gttttgcattgaggcaaccatagcccttccggcacaaggagcccctggagcgcatggtttcagtacggaagatat

SEQ ID NO: 409298 - DNA, 75 bp, synthetic construct
  source 1..75: mol_type = other DNA
acctgcaaaaagccaacgatcaaatgtgcgtgctggtgcagatcgaaacgcgtgaggcaatgaagaacctaccgc

SEQ ID NO: 409299 - DNA, 75 bp, synthetic construct
  source 1..75: mol_type = other DNA
gccgatggtacaaaacgctgacgaagcccgtgaagcggtacgcgccacccgttatccccccgccggtattcgcgg

SEQ ID NO: 409300 - DNA, 75 bp, synthetic construct
  source 1..75: mol_type = other DNA
ctgagcgccgatatgggttatgccggtaatccgcagcacccggaagtgcaggccgccattgagcaggcgatcgtg

SEQ ID NO: 409301 - DNA, 75 bp, synthetic construct
  source 1..75: mol_type = other DNA
ctgaagcccgcggtgatttcattcgtatctgggatgacgggcgaggtgcagacggtggtcgcgaattattaagct

SEQ ID NO: 409302 - DNA, 75 bp, synthetic construct
  source 1..75: mol_type = other DNA
cattgtaattgtgtgcgatggtggtttcgggggcgggaatatgtggggggcgaccaactggagcactaccggctt

SEQ ID NO: 409303 - DNA, 75 bp, synthetic construct
  source 1..75: mol_type = other DNA
tctaacgtggtctgacgtcacgtcaggtggcgcagctccgggaactacaatgtcttatggaatagtcgtggggtc

SEQ ID NO: 409304 - DNA, 75 bp, synthetic construct
  source 1..75: mol_type = other DNA
caaatggttcagacatagaaaacgtttctgtttttctacaaaaccttcgtttgggagcaggcgcaccagctatcg

SEQ ID NO: 409305 - DNA, 75 bp, synthetic construct
  source 1..75: mol_type = other DNA
aataacaccacgcggattgcgaccactgcgtttgttcaggccgctattaccgctctgattaacggtgcgccagcc

SEQ ID NO: 409306 - DNA, 75 bp, synthetic construct
  source 1..75: mol_type = other DNA
tggcaaccctgacaaaagtcgggcgggatattcttgcgaaatcgaccgttgctgccgttatcgaatacctcggtt

SEQ ID NO: 409307 - DNA, 75 bp, synthetic construct
  source 1..75: mol_type = other DNA
aattaaggcgcaagcgtgaaggcacaaaagcattcgagtatcacatcgactgcctgcccgctgaagcggagaaag

SEQ ID NO: 409308 - DNA, 75 bp, synthetic construct
  source 1..75: mol_type = other DNA
atctcaaaacgtatcgttcgtgacatacagaaaacagctaactctaaatccgtcgataaaaaaatctatgttgag

SEQ ID NO: 409309 - DNA, 75 bp, synthetic construct
  source 1..75: mol_type = other DNA
tcgattgagcagggtggtacaacgctgaaagattttctgcaaagtgatggtaaaccgggctatttcgctcaggaa

SEQ ID NO: 409310 - DNA, 75 bp, synthetic construct
  source 1..75: mol_type = other DNA
ttcagaaagtatcttggcgactttaaacgccgttttacaggcgttaacgggatggttgatatctgctccatcaga

SEQ ID NO: 409311 - DNA, 75 bp, synthetic construct
  source 1..75: mol_type = other DNA
tgtcagtgatggccagccccaacggtaacctggatgaagtgcatgaaggtctgctgctgcaggcggtcaaagcct

SEQ ID NO: 409312 - DNA, 75 bp, synthetic construct
  source 1..75: mol_type = other DNA
gtctctgacatgcaaaaaacgtacagcatgtttacctccgaagacgtagtagaatacaaatcacgaggtctgaat

SEQ ID NO: 409313 - DNA, 75 bp, synthetic construct
  source 1..75: mol_type = other DNA
cgtcgataaaaaaatctatgttgaggttcccttctttgtcgttggtaacaaagaatttaaatttgggttgctgaa

SEQ ID NO: 409314 - DNA, 75 bp, synthetic construct
  source 1..75: mol_type = other DNA
atgtggattacagcaaaagagtgtgctggcattggagggctaccaacacgtgaacacaatgtcagggcgcgtcta

SEQ ID NO: 409315 - DNA, 75 bp, synthetic construct
  source 1..75: mol_type = other DNA
ggaaaaagaagaactttatttattcgtgtctgaccgtgagcgcaatttaaagaaaaacggcacaaataatcgtta

SEQ ID NO: 409316 - DNA, 75 bp, synthetic construct
  source 1..75: mol_type = other DNA
ctgtcgccggaagaactgcatgaaatgttccgaccggaaagcatctgcacggtgcgacgcggtgaagtggtgtta

SEQ ID NO: 409317 - DNA, 75 bp, synthetic construct
  source 1..75: mol_type = other DNA
ctgtggcgcatcttagtggcgcagacagcttttcggcgtaagcgagagcaaatgcaccttgatttatatcgaaag

SEQ ID NO: 409318 - DNA, 75 bp, synthetic construct
  source 1..75: mol_type = other DNA
ttctttctttggttttgttctcaattgcattgagtggatgtggtgaggaaatcaagaccgttgattggtggcgaa

SEQ ID NO: 409319 - DNA, 75 bp, synthetic construct
  source 1..75: mol_type = other DNA
aagaactgacaaaacggcaggttaaggcgagggatgaaatccccacctttgagcaactgatggccgccatagagc

SEQ ID NO: 409320 - DNA, 75 bp, synthetic construct
  source 1..75: mol_type = other DNA
gaacaggtgatccctgaaaatgagggtggttggtggatccgtgaagtgggcctgtttgatgagtcaggggcatta

SEQ ID NO: 409321 - DNA, 75 bp, synthetic construct
  source 1..75: mol_type = other DNA
cacgcaccaatatcattcaggcgcaaacccgcgtcgaagccgcacaagccactgaacggcgcattgccgcagata

SEQ ID NO: 409322 - DNA, 75 bp, synthetic construct
  source 1..75: mol_type = other DNA
tatgtcaaaaccggtttgccgggcgtggcgtgggtgcgggtgaacgaagaacgtccgtggcctgaagacctggtg

SEQ ID NO: 409323 - DNA, 75 bp, synthetic construct
  source 1..75: mol_type = other DNA
cagcatctggaatatgtcaaaaccggtttgccgggcgtagcgtgggtgcgggtgaatgaagaacttccgtggcct

SEQ ID NO: 409324 - DNA, 75 bp, synthetic construct
  source 1..75: mol_type = other DNA
gcagcagcggggctggttcactccggattgaaagtcaacgaagttcagacgaagggatgtatattcaggcatggg

SEQ ID NO: 409325 - DNA, 75 bp, synthetic construct
  source 1..75: mol_type = other DNA
cgctgactaatttgagtggaaaggatgtagctggtcttctcgcataccttggtttgggagaagcggcaaaacgga

SEQ ID NO: 409326 - DNA, 75 bp, synthetic construct
  source 1..75: mol_type = other DNA
attacaggttctaataagtcttatattgccacagccacattgccctttgtatttcctaataaggtgctgggcgtt

SEQ ID NO: 409327 - DNA, 75 bp, synthetic construct
  source 1..75: mol_type = other DNA
gcgaagatggatactcgcgtgttgcaggagcagcgactggaagccatcgcgcaaatcaaagaagcacaaagcgcc

SEQ ID NO: 409328 - DNA, 75 bp, synthetic construct
  source 1..75: mol_type = other DNA
gttgccgccgcgcaggctttgctggagcaacgacaaagcgaaactcgtgccgcacagtcgctggttaatcaacgc

SEQ ID NO: 409329 - DNA, 75 bp, synthetic construct
  source 1..75: mol_type = other DNA
cgcccatcgtggggctatttctgcgcaacagttggatgacgaccgcgccgccgctgagagcgcccgagctgcgct

SEQ ID NO: 409330 - DNA, 75 bp, synthetic construct
  source 1..75: mol_type = other DNA
aggagcagcggctggaagccatcgcacaaatcaaagaagcacaaagcgccattgctgccgcccgggccttgctgg

SEQ ID NO: 409331 - DNA, 75 bp, synthetic construct
  source 1..75: mol_type = other DNA
cattgaagcgacggaagtggatatcgccagtaaaattgccggacgtattgacaccattctggtgaaagaggggca

SEQ ID NO: 409332 - DNA, 75 bp, synthetic construct
  source 1..75: mol_type = other DNA
ctgttgcgcccggcaggtgtgccggaaggctttgccgtcagcaatgggcgcattgaagcgacggaagtggatatc

SEQ ID NO: 409333 - DNA, 75 bp, synthetic construct
  source 1..75: mol_type = other DNA
cgctgactaatttgagtggaaaggatgtagctggtcttctcgcataccttcgtttaagaaaatgcagaggtaaca

SEQ ID NO: 409334 - DNA, 75 bp, synthetic construct
  source 1..75: mol_type = other DNA
attatgaaatctatgaaattagcttagttacaataccagcagatgcttctgtaggcgtaggccgttcaatggaat

SEQ ID NO: 409335 - DNA, 75 bp, synthetic construct
  source 1..75: mol_type = other DNA
acttcactaaagttaccctaacaccaaaagcattcggtggtgctattccactaagtaaaactgcaattcttactg

SEQ ID NO: 409336 - DNA, 75 bp, synthetic construct
  source 1..75: mol_type = other DNA
attcagtaccaccattaacaatgcactggcacaaaaagcgccgctgtcgagtccggcactcaccggaacgccaac

SEQ ID NO: 409337 - DNA, 75 bp, synthetic construct
  source 1..75: mol_type = other DNA
tgtaactggtcttctcacataccttggtttgggagaagccagatatgtcattcagcgaggagctaatgccaatgg

SEQ ID NO: 409338 - DNA, 75 bp, synthetic construct
  source 1..75: mol_type = other DNA
agagactggcctcattaatctcggaacgagtaaaagaagttgcggctgaaattctaaggaaagaaaaaacccgcg

SEQ ID NO: 409339 - DNA, 75 bp, synthetic construct
  source 1..75: mol_type = other DNA
cgcttaccaatttgagtggaaaggatgtagctggtcttctcacataccttggtttgggagaagcggcaaaacgaa

SEQ ID NO: 409340 - DNA, 75 bp, synthetic construct
  source 1..75: mol_type = other DNA
cactgaaagcgccgctgtcgagtccggcacttaccggaacgccaacagctcccacggcggcgcagtcggtcaaca

SEQ ID NO: 409341 - DNA, 75 bp, synthetic construct
  source 1..75: mol_type = other DNA
cgctgactcatttgagtggaaaggatgtagcaggtcttctcgcataccttggtttgggagaagcggctaaaagga

SEQ ID NO: 409342 - DNA, 75 bp, synthetic construct
  source 1..75: mol_type = other DNA
atggatatggataatccagaaaacgaaaaggaatcaattgttgatagtactgaagaagtaaatgaaacaattgaa

SEQ ID NO: 409343 - DNA, 75 bp, synthetic construct
  source 1..75: mol_type = other DNA
tccctaatcagccaatggtttcagtcagtgttatgtctgatgccgttcagtcagacccgtcgaatcctgccccgc

SEQ ID NO: 409344 - DNA, 75 bp, synthetic construct
  source 1..75: mol_type = other DNA
agtggtgtcacaacatttgatttcgatatgtcaagggtggcaaataccgccaatgaaactcgcccggtgaacgtt

SEQ ID NO: 409345 - DNA, 75 bp, synthetic construct
  source 1..75: mol_type = other DNA
tcggtaaagtacttaatattgatgtatcggatgccattggtaaaggaattaccgtgaccgatttcaaacgtcaat

SEQ ID NO: 409346 - DNA, 75 bp, synthetic construct
  source 1..75: mol_type = other DNA
cgttcacggcaaatacgtgccaggctcgccgcttccggctgaggcggagctctgtgaggagtttgcaacctcgcg

SEQ ID NO: 409347 - DNA, 75 bp, synthetic construct
  source 1..75: mol_type = other DNA
tcgctgatggcgaagcggctgattgaaatgaaacgttatcgcggggcgtttgtggcgccgcgtaaccagtggaat

SEQ ID NO: 409348 - DNA, 75 bp, synthetic construct
  source 1..75: mol_type = other DNA
gaggcggtgctgcagtcggtacataatccggtgttacagcaacttagcattgcgatcagttcgctgcagcgggcg

SEQ ID NO: 409349 - DNA, 75 bp, synthetic construct
  source 1..75: mol_type = other DNA
tgggatgataacccggcgcagtttgtgattaacgcaatggcaccggcagacgttgcttctatcgtggtggatgaa

SEQ ID NO: 409350 - DNA, 75 bp, synthetic construct
  source 1..75: mol_type = other DNA
cgttgcttctatcgtggtggatgaagataaacacaccatggatatcgccgttgaagctggtaatctggcgcaagc

SEQ ID NO: 409351 - DNA, 75 bp, synthetic construct
  source 1..75: mol_type = other DNA
tgcgtaggtatgcgtggcgcgcgtgttcaggcggtttctactgaactgggcggagagcgtatcgatattgtcctg

SEQ ID NO: 409352 - DNA, 75 bp, synthetic construct
  source 1..75: mol_type = other DNA
cgaactggaagaaaaagggcgggcgtttatggctttggctcaattcgccgttggtaaagagcaaacaattgcaat

SEQ ID NO: 409353 - DNA, 75 bp, synthetic construct
  source 1..75: mol_type = other DNA
ctcgcagtaccacgagaaacaggcgatcactggtatgacgcacatcatgaagtacgcagcaacccagcgcgagaa

SEQ ID NO: 409354 - DNA, 75 bp, synthetic construct
  source 1..75: mol_type = other DNA
gctgacgacgacaacgcgaaatgcccagcatggtacaccgccgaagataacgcactgacgcaggactggtctgaa

SEQ ID NO: 409355 - DNA, 75 bp, synthetic construct
  source 1..75: mol_type = other DNA
gcgatacggcatcaggacggcgatgcggcagagcaggcggcgcttaccatgatcgtcagctcgacacgaaggtta

SEQ ID NO: 409356 - DNA, 75 bp, synthetic construct
  source 1..75: mol_type = other DNA
gaccaacgacaagcgggcgcggctctggcgattaatcagcaaatcgtcccgcgtgagcagtggacgcaacatatc

SEQ ID NO: 409357 - DNA, 75 bp, synthetic construct
  source 1..75: mol_type = other DNA
agctgaaagccaacatcaatcaactctggctggaacgaacggccaccagcgaaatcattactgccgcttctgaac

SEQ ID NO: 409358 - DNA, 75 bp, synthetic construct
  source 1..75: mol_type = other DNA
acctttgaccgtatcaccacccagacggcaaaacaggttatcgtgcagaaagtgcgtgaagccgaacgtgcgatg

SEQ ID NO: 409359 - DNA, 75 bp, synthetic construct
  source 1..75: mol_type = other DNA
ccgtccgtgccttttcatgaaggtgagcgtcgtcgtcagaaaaccacgctgacagagcagaaatacagccgccag

SEQ ID NO: 409360 - DNA, 75 bp, synthetic construct
  source 1..75: mol_type = other DNA
gcgcgtccgagcccaaactgcacgcatggctggacaaacaataccacggggaattggactggatggcgcgtcact

SEQ ID NO: 409361 - DNA, 75 bp, synthetic construct
  source 1..75: mol_type = other DNA
aggcgaaatgcgtgcgtcgtggaggtacaactaccgaaaaaacagcgtctggttcgggtcattgaaaagggatta

SEQ ID NO: 409362 - DNA, 75 bp, synthetic construct
  source 1..75: mol_type = other DNA
ctcctgtggctggctgccgtggataaactgattgaaagttttggtgaagtctgtgttcttcccctgccatccgat

SEQ ID NO: 409363 - DNA, 75 bp, synthetic construct
  source 1..75: mol_type = other DNA
ggcgtttttccgctgtctgaacggaagccgcaggatgtcgttgtctgacctgcgatttttcatgcagtccctgac

SEQ ID NO: 409364 - DNA, 75 bp, synthetic construct
  source 1..75: mol_type = other DNA
gcagcagaacgcttgttcccgtcggtgcggttccgtgtcagggaacgccgtcgccataaatctgcgctggtcatg

SEQ ID NO: 409365 - DNA, 75 bp, synthetic construct
  source 1..75: mol_type = other DNA
actgtgaccaccgtgggctgccgctggcgcttatcagcccggaaggggaaacggcgtggcagggggagtatgacg

SEQ ID NO: 409366 - DNA, 75 bp, synthetic construct
  source 1..75: mol_type = other DNA
gtgcgatggtggttgatcagttccgtgaacacgaaggtgaaatcatcaccggcgtggtgaaaaaagtaaaccgcg

SEQ ID NO: 409367 - DNA, 75 bp, synthetic construct
  source 1..75: mol_type = other DNA
cgaaaatcgcggtgaaaaccaacgataaacgtatcgatccggtaggtgcttgcgtaggtatgcgtggcgcgcgtg

SEQ ID NO: 409368 - DNA, 75 bp, synthetic construct
  source 1..75: mol_type = other DNA
ggagcgaagagaagtttttaaaagtcacggaaggatcggcgattcgccgtataggtcacctgcgttggctgcgta

SEQ ID NO: 409369 - DNA, 75 bp, synthetic construct
  source 1..75: mol_type = other DNA
caggtaagcactcacttatcctcaatcgcgaggccggttcgttcttctttttaggcgaattgctggtcgatattc

SEQ ID NO: 409370 - DNA, 75 bp, synthetic construct
  source 1..75: mol_type = other DNA
ggtactatgacccgctacaggggaggtatattacacaagaccccattgggctggcggggggatggaacctgtata

SEQ ID NO: 409371 - DNA, 75 bp, synthetic construct
  source 1..75: mol_type = other DNA
tgggggcgttcctcgccattggtctgtttggcctgatgccgatgtggattttaggcgtggtttgtctggcgctgt

SEQ ID NO: 409372 - DNA, 75 bp, synthetic construct
  source 1..75: mol_type = other DNA
gaagagaatcctgatctgtatctaacacagccgtctctgatgaacatgatgaagcaggcaggctataaaacattc

SEQ ID NO: 409373 - DNA, 75 bp, synthetic construct
  source 1..75: mol_type = other DNA
gcaataccgatcatgttccgccgggattaaacgcggaagagctggagtcatataacgattatgacaacgctaacc

SEQ ID NO: 409374 - DNA, 75 bp, synthetic construct
  source 1..75: mol_type = other DNA
cgcgtccgtacaccattgaagccctgcagcaggccctgactttcgccaacgaaaagaaccctgatctgtatctga

SEQ ID NO: 409375 - DNA, 75 bp, synthetic construct
  source 1..75: mol_type = other DNA
ccatcatcggttgtggcgggattggttttgatacggcgatgtatttgagtcagccaggggagtccaccagccaga

SEQ ID NO: 409376 - DNA, 75 bp, synthetic construct
  source 1..75: mol_type = other DNA
atgccaatccttcctgccgtgcagaaaaaaaatctggcggtggtcggtgcgggacctgctgggctggcgtttgcc

SEQ ID NO: 409377 - DNA, 75 bp, synthetic construct
  source 1..75: mol_type = other DNA
tataacgattacgataatgctaatctgtttaacgatcatgtggtggccagtctgataaaggacttcagagcgacc

SEQ ID NO: 409378 - DNA, 75 bp, synthetic construct
  source 1..75: mol_type = other DNA
cgtggcgatggcgcactttccggttaccgctggggtgcttcgcgtaaagcgcaattgctacgtcgcgaagctgaa

SEQ ID NO: 409379 - DNA, 75 bp, synthetic construct
  source 1..75: mol_type = other DNA
ggaatggttggcgcgggattaacggacaagcgcgcctggctggaactgatagccgatggtcatcatgtacatccg

SEQ ID NO: 409380 - DNA, 75 bp, synthetic construct
  source 1..75: mol_type = other DNA
cggtattgtacgcaccgcgtctggtggactggcgggcagcacgctgtctgtcgatgcggcggtacggaatatggt

SEQ ID NO: 409381 - DNA, 75 bp, synthetic construct
  source 1..75: mol_type = other DNA
attttctcgccagacagataaacagtattatatgaatcagcaacgtacgcaaagtgcgcgtgaatatgatactaa

SEQ ID NO: 409382 - DNA, 75 bp, synthetic construct
  source 1..75: mol_type = other DNA
cgtggtgatggcacactttccggttaccgctggggtgtttcgcgtaaagcacagttgctacgccgtgaagctgaa

SEQ ID NO: 409383 - DNA, 75 bp, synthetic construct
  source 1..75: mol_type = other DNA
ggcactgcgcacgataccttgcggtgaaaccgtcagttatcagcaactggctaacgccattggcaaaccgaaagc

SEQ ID NO: 409384 - DNA, 75 bp, synthetic construct
  source 1..75: mol_type = other DNA
aacaggctggtggcttaagcccgcagggaatgcagatccctcgtagcccacggcagattgtgatgctccagcgca

SEQ ID NO: 409385 - DNA, 75 bp, synthetic construct
  source 1..75: mol_type = other DNA
caggccgaactggactccgtagccaaacgtcatgcgcgttcccgctcgctggcccaacgaggggcgatttctgcg

SEQ ID NO: 409386 - DNA, 75 bp, synthetic construct
  source 1..75: mol_type = other DNA
ccagatctgcgtattcccgcgaccatcagttttgtcgccagcgtcgcccagttcacgccaaaaaccgtcgaaacc

SEQ ID NO: 409387 - DNA, 75 bp, synthetic construct
  source 1..75: mol_type = other DNA
caagctggtaaagagctgggcgttgatgtgacctacgacgggccgacagaacccagtgtttctggtcaggtacag

SEQ ID NO: 409388 - DNA, 75 bp, synthetic construct
  source 1..75: mol_type = other DNA
cggcgcggctattggtgcgttaaccagcgggaagctggcacatagtgcgcgaccagggttattgatgctgctctc

SEQ ID NO: 409389 - DNA, 75 bp, synthetic construct
  source 1..75: mol_type = other DNA
atagatccgatgctttttcgtctttacggtatcagtaaagtccccgcattaatttatcagccagatatgcacatc

SEQ ID NO: 409390 - DNA, 75 bp, synthetic construct
  source 1..75: mol_type = other DNA
cgcacagtcgctggttaatcaacgccaggccgaactggactccgttgccaaacgtcatacgcgttcccgctcgct

SEQ ID NO: 409391 - DNA, 75 bp, synthetic construct
  source 1..75: mol_type = other DNA
tttgacgctcatagcgagattggcgggcagtttaatatcgccaaacagatccccggcaaagaggagttttacgaa

SEQ ID NO: 409392 - DNA, 75 bp, synthetic construct
  source 1..75: mol_type = other DNA
ttgtttgatgcgcacagcgagatcggcgggcagtttaatatcgccaaacaaatccccggcaaagaggagttttac

SEQ ID NO: 409393 - DNA, 75 bp, synthetic construct
  source 1..75: mol_type = other DNA
agattgacgatgacgggctgcatgtggtgatcaacggcgaaacgcaggtattagcagtggacaatgtggtgatct

SEQ ID NO: 409394 - DNA, 75 bp, synthetic construct
  source 1..75: mol_type = other DNA
tcggtctgcaacgcctgctactcaggcccaccgcagaattaagtattgaagccaaaacaaaggaggaaaaagttg

SEQ ID NO: 409395 - DNA, 75 bp, synthetic construct
  source 1..75: mol_type = other DNA
tcctcgccagtgggatcgtgccgcgcactccgcccatcgacgggatcgatcatccgaaggtattgagttatctcg

SEQ ID NO: 409396 - DNA, 75 bp, synthetic construct
  source 1..75: mol_type = other DNA
ccccggcaaagaggagttttacgaaacgctgcgctattaccgccggatgatcgaagtgacgggcgtgacgctaaa

SEQ ID NO: 409397 - DNA, 75 bp, synthetic construct
  source 1..75: mol_type = other DNA
taccaatacgatggggaattccatcgatgttgaaaaaaatattagcagtgttgtgccgacgcaaggcgcgttggt

SEQ ID NO: 409398 - DNA, 75 bp, synthetic construct
  source 1..75: mol_type = other DNA
gaacccgtcctggcacctctgttcaggcgggtcgaaaatggggttaacccgtctgagctgctgggcgaactggcg

SEQ ID NO: 409399 - DNA, 75 bp, synthetic construct
  source 1..75: mol_type = other DNA
acacccgtgccacccgcgacgaaaaactcacccgggcgggtctgcgtctgaccccgcaatacttcaagcgtgagt

SEQ ID NO: 409400 - DNA, 75 bp, synthetic construct
  source 1..75: mol_type = other DNA
ccgcccgccgtcataccggtgcctatatcaccatcacacagaacatcgtcgactttgactctgacaaggcctcca

SEQ ID NO: 409401 - DNA, 75 bp, synthetic construct
  source 1..75: mol_type = other DNA
atcacgcgggcgttttaccggcgtgctgcacagcagcagttcaacagtcctacggggttgccgctgaccctgcgg

SEQ ID NO: 409402 - DNA, 75 bp, synthetic construct
  source 1..75: mol_type = other DNA
atgtgggaacaggaggccattgatgacacccgtgccacccgcgacgaaaaactcacccgcgcgggactacgcctg

SEQ ID NO: 409403 - DNA, 75 bp, synthetic construct
  source 1..75: mol_type = other DNA
ccgtcaaccgcatggcgctggccaacgagctgccggacgccatcatcacggagtcgggcctgaagatcacgccgc

SEQ ID NO: 409404 - DNA, 75 bp, synthetic construct
  source 1..75: mol_type = other DNA
cgagcgggcgagcgccgaagcgattacccgcgccaaccggcgtctctacgacgccttggctgagccgctgacgga

SEQ ID NO: 409405 - DNA, 75 bp, synthetic construct
  source 1..75: mol_type = other DNA
acacgttcagcgaaagcgacctctccatcatccggcagcggcgcggcccggccaatcggctgggcttcgcggtgc

SEQ ID NO: 409406 - DNA, 75 bp, synthetic construct
  source 1..75: mol_type = other DNA
atggcccgtggactctgggtttcagccaatgagtttgtctcttttgccgaacccaataaaacgctgacggagcag

SEQ ID NO: 409407 - DNA, 75 bp, synthetic construct
  source 1..75: mol_type = other DNA
gggatactggttactgcagctgctggacaaagtctctccgtcccagtgggtggcaataggtgtgctgggaagtct

SEQ ID NO: 409408 - DNA, 75 bp, synthetic construct
  source 1..75: mol_type = other DNA
cctgcggcggcagtcggtcattctgcccgccctcaacgccgtcgagcgggcgagtgccgaggcgatcacccgtgc

SEQ ID NO: 409409 - DNA, 75 bp, synthetic construct
  source 1..75: mol_type = other DNA
atgactctcaataaaaccgatcgcattgtcattacgctgggtaaacagatcgttcacggcaaatatgtacctggc

SEQ ID NO: 409410 - DNA, 75 bp, synthetic construct
  source 1..75: mol_type = other DNA
ccgatgatgcctctggcgcggcaaaagcagcctgggggaactctgccttcaaggtggttctcaagcaggatgcgt

SEQ ID NO: 409411 - DNA, 75 bp, synthetic construct
  source 1..75: mol_type = other DNA
gctgatttcaccgcgctttaaccacatgcgcaatttcctgacctgtctgccctttatggccgggaaagggttgtt

SEQ ID NO: 409412 - DNA, 75 bp, synthetic construct
  source 1..75: mol_type = other DNA
ccaacggtatcccggacaacagcgtccagccgggagccggaaatggcgaaccgatcacggcagaggtactggcac

SEQ ID NO: 409413 - DNA, 75 bp, synthetic construct
  source 1..75: mol_type = other DNA
ccggggcgtcccggtcagttttcatctggtctccagcaaactggtcggcaatgatatcgactacggtctgcgtga

SEQ ID NO: 409414 - DNA, 75 bp, synthetic construct
  source 1..75: mol_type = other DNA
ggctggaagatcagcttaacgcgggcaacctaccggaaggcagcgaccagtttaacagtctgcaagaaaagctga

SEQ ID NO: 409415 - DNA, 75 bp, synthetic construct
  source 1..75: mol_type = other DNA
gaaattcggcgacagctatatgctgattggtagctggctggtgaacgatcaacctgccggaattggcattcgtga

SEQ ID NO: 409416 - DNA, 75 bp, synthetic construct
  source 1..75: mol_type = other DNA
atgaaaaaggtattgattgcagcacttatttccggtgtgtcttttggcgcttttgcacagcagggcggtttccaa

SEQ ID NO: 409417 - DNA, 75 bp, synthetic construct
  source 1..75: mol_type = other DNA
caggaggcctgggaagaacataagggaaaagcccgtattgaccatgttgtccagaagctgacggctattcgcgag

SEQ ID NO: 409418 - DNA, 75 bp, synthetic construct
  source 1..75: mol_type = other DNA
aaaaatggttgaacaagccagtaaagatgagcttatggtcgttataaaatacctgttaaatcacatcagaatgaa

SEQ ID NO: 409419 - DNA, 75 bp, synthetic construct
  source 1..75: mol_type = other DNA
aacatggcggtctgtggcacctccggggccggtaaaaccgggctgatacagccacttatccgcagcgtgctggac

SEQ ID NO: 409420 - DNA, 75 bp, synthetic construct
  source 1..75: mol_type = other DNA
tctcgcctccatgctgcgtatcccggtatgtatgcacaacgttgaagagaccaaagtatatcgtccttctgcctg

SEQ ID NO: 409421 - DNA, 75 bp, synthetic construct
  source 1..75: mol_type = other DNA
ggaagaatcacttggctacaacgccatcgctgcgggcttccaggggcaacgtcactggaccgatcaatatcccaa

SEQ ID NO: 409422 - DNA, 75 bp, synthetic construct
  source 1..75: mol_type = other DNA
gccgtcgaagccgtgtgcgagacaccgcggccgccgccaaaaacgtgcttgatgccattgaggtgctgcgcggca

SEQ ID NO: 409423 - DNA, 75 bp, synthetic construct
  source 1..75: mol_type = other DNA
atgaagcgtgcggtatgggtatccgcgaagataacacgctgatcactaaagacacttcgcgttttgttccgcact

SEQ ID NO: 409424 - DNA, 75 bp, synthetic construct
  source 1..75: mol_type = other DNA
accgcgatttggcgatagttacacgctgattggtagctggattgtcgatgatgaagcgtgcggtatgggtatccg

SEQ ID NO: 409425 - DNA, 75 bp, synthetic construct
  source 1..75: mol_type = other DNA
gcaagaaaaaatgcagcagatgcaggaagaaatcgcgaagctggaagtgaccggcgaatccggcgcaggtctggt

SEQ ID NO: 409426 - DNA, 75 bp, synthetic construct
  source 1..75: mol_type = other DNA
tgctgtcaggacaccgatgaagacaggagtaccgtgctgtacttgcaggactgcgcccagcaggcagggcaggag

SEQ ID NO: 409427 - DNA, 75 bp, synthetic construct
  source 1..75: mol_type = other DNA
gccgcgatttggcgatagctacacactcatcggtagctggattgtcgatgatgaagcgtgcggaatggggatccg

SEQ ID NO: 409428 - DNA, 75 bp, synthetic construct
  source 1..75: mol_type = other DNA
accttctgctggaacggggcggatatgtttggtgtgggggcgtttaatcgtccgtggcagcagcctggtgaggca

SEQ ID NO: 409429 - DNA, 75 bp, synthetic construct
  source 1..75: mol_type = other DNA
ctgcgtcatctggcttttagcgttgatgatatcgatgcggcagtggcgcaccttgaaagccataacgtgaagtgt

SEQ ID NO: 409430 - DNA, 75 bp, synthetic construct
  source 1..75: mol_type = other DNA
tgtaataggctattacacaactcccaaaaatgttatgcatgaggtcccaaagatgtccgtcgagaaatctcatgc

SEQ ID NO: 409431 - DNA, 75 bp, synthetic construct
  source 1..75: mol_type = other DNA
taacggcgatccgttgctcgatttgccgtggcaaattactcgtcaacaattgaccgtaagcgatggtcgctggag

SEQ ID NO: 409432 - DNA, 75 bp, synthetic construct
  source 1..75: mol_type = other DNA
gtaacccgtacaacctcgggcagaccattacccaggggattatcagtgccacgggtcgaatcggtctgaacccga

SEQ ID NO: 409433 - DNA, 75 bp, synthetic construct
  source 1..75: mol_type = other DNA
acgggtcgaatcggtctgaacccgaccgggcggcaaaacttcctgcaaaccgatgcttccattaaccacggtaac

SEQ ID NO: 409434 - DNA, 75 bp, synthetic construct
  source 1..75: mol_type = other DNA
ctagataatgatgccgccccagggttaaaaaagagtctgggggatgtcactaaggctgcatttgatttatgtgat

SEQ ID NO: 409435 - DNA, 75 bp, synthetic construct
  source 1..75: mol_type = other DNA
agcgcttcatggcacagcatgccgccagtgccgtttccggtggcggaactgccgggaacggggaagaagaactgc

SEQ ID NO: 409436 - DNA, 75 bp, synthetic construct
  source 1..75: mol_type = other DNA
tcaacccgaacagcgaccagtacctggaagagcgtttgcagctgctggacgagcagttggccaccgtcacccgcc

SEQ ID NO: 409437 - DNA, 75 bp, synthetic construct
  source 1..75: mol_type = other DNA
cctgctgtaccatgaaagcgatctggaaattaccgagcattacaccgataccgcaggcttcactgaacatgtttt

SEQ ID NO: 409438 - DNA, 75 bp, synthetic construct
  source 1..75: mol_type = other DNA
cagcgtggaagaaacgcggtttctttcccgtaagggcaatttcgacgcgcttcatctgatcaccgaaaaatacag

SEQ ID NO: 409439 - DNA, 75 bp, synthetic construct
  source 1..75: mol_type = other DNA
ttgtgtagcaaaacttaaagataaaacattggaggctacacgtaagcgtactgaggggcgaacagagatacaact

SEQ ID NO: 409440 - DNA, 75 bp, synthetic construct
  source 1..75: mol_type = other DNA
cgttacagttacagcaaatgaaacttatcggattcgcaccggaagagaacaaatcagcatcggaaggtttgctct

SEQ ID NO: 409441 - DNA, 75 bp, synthetic construct
  source 1..75: mol_type = other DNA
aaacgatgatctggcagcctgagttcacagataaaacactctccaggaaacccggggcggttcaatgtcatatac

SEQ ID NO: 409442 - DNA, 75 bp, synthetic construct
  source 1..75: mol_type = other DNA
aatcatcgacctgcatgaccgcatcctgggcaagctgttcaatgccgccaagaacaagcatcagcagcagttcca

SEQ ID NO: 409443 - DNA, 75 bp, synthetic construct
  source 1..75: mol_type = other DNA
gtcacgcagacggcaaaaattggttcgattggcgtgatgatggcgcacaccagttacgagaaacaactggcacag

SEQ ID NO: 409444 - DNA, 75 bp, synthetic construct
  source 1..75: mol_type = other DNA
tgacagtggagcaggcgaaaacgctgctggcagctgcgccatcagtatcgcaaccgtcacaggtaacactttttg

SEQ ID NO: 409445 - DNA, 75 bp, synthetic construct
  source 1..75: mol_type = other DNA
caaggggtttacgttaaggccaaaagagcggggaatgatgtaaaagcgcagggtagtcttgatgttatcattcgt

SEQ ID NO: 409446 - DNA, 75 bp, synthetic construct
  source 1..75: mol_type = other DNA
caccggcagcggtgcggggtggcgtgtcacagacgtcagcagacggtgatgcggacgtgaaaatgctcatggcca

SEQ ID NO: 409447 - DNA, 75 bp, synthetic construct
  source 1..75: mol_type = other DNA
gcaaaaacattactggcggcagcaccggttgccggtactgacagcacaggcgatcagattatggcacttccggaa

SEQ ID NO: 409448 - DNA, 75 bp, synthetic construct
  source 1..75: mol_type = other DNA
gatgtgctggatgtgaaagcctacgggccggaaacacattcacaggaagggcgtgtatttctttatgtgttatca

SEQ ID NO: 409449 - DNA, 75 bp, synthetic construct
  source 1..75: mol_type = other DNA
ccatttatgctgcgctgcagcaatccggtgtggtccgggtaaggctgatttctccggtagcagatctggaagcgg

SEQ ID NO: 409450 - DNA, 75 bp, synthetic construct
  source 1..75: mol_type = other DNA
cgccagggtaaccgcaatgcgtcgaatgtttatcagcttaacgttgcgaagcttcaggcagcggcattttctcaa

SEQ ID NO: 409451 - DNA, 75 bp, synthetic construct
  source 1..75: mol_type = other DNA
cccgttaacagttgaccagtcaaatattgccccctcaacgattgacccgtcaaattttgatggatcaaccgtttg

SEQ ID NO: 409452 - DNA, 75 bp, synthetic construct
  source 1..75: mol_type = other DNA
attggctcggtggcatcccgttctggcatggatggtgcccttcaccagaccggggtgattacggtgaatctgacc

SEQ ID NO: 409453 - DNA, 75 bp, synthetic construct
  source 1..75: mol_type = other DNA
atttgtccgcgatacctgtaccggatgcggtggaggtgccggacaccgctgtgctggtcactcagatagtggcga

SEQ ID NO: 409454 - DNA, 75 bp, synthetic construct
  source 1..75: mol_type = other DNA
caaccgactgggtgagctttgatattggtttgagctgcgatgtcggggcgagaataaacgtacgtatcgatgcca

SEQ ID NO: 409455 - DNA, 75 bp, synthetic construct
  source 1..75: mol_type = other DNA
ccctggttcatgaagcgctggttgcgcgaggactggaaacaccgctgcgcccgcccgtgcatgaaatggataacg

SEQ ID NO: 409456 - DNA, 75 bp, synthetic construct
  source 1..75: mol_type = other DNA
accgtgcgcgatatcactctgaccagcacctgtgaacaccattttgtcactattgatggcaaagcgacggtggcc

SEQ ID NO: 409457 - DNA, 75 bp, synthetic construct
  source 1..75: mol_type = other DNA
gtttggttcgatggatgtggaggggcgtcgctcgtttaccgaatttattcgtgaaggggtgggcgttcatacatt

SEQ ID NO: 409458 - DNA, 75 bp, synthetic construct
  source 1..75: mol_type = other DNA
gataccctgtcggtggtggcaaaaacccgccgtaacctggaggcggatgtgacgttgttctgtgatgttctgtgt

SEQ ID NO: 409459 - DNA, 75 bp, synthetic construct
  source 1..75: mol_type = other DNA
atgactaaaaatattcgtaatctggcactggcaacgatgtcggggtttcgccataaaactgttgatgtgcctgaa

SEQ ID NO: 409460 - DNA, 75 bp, synthetic construct
  source 1..75: mol_type = other DNA
taatattaataattcctcagttacttatattaatattggttccaatgatacagactatattactattggtatcga

SEQ ID NO: 409461 - DNA, 75 bp, synthetic construct
  source 1..75: mol_type = other DNA
aaaatcaatccgccgaagcctgtggaaaatggcaatggcaccggaggtgataaacccaaagacaacaaaccgctc

SEQ ID NO: 409462 - DNA, 75 bp, synthetic construct
  source 1..75: mol_type = other DNA
atgataccactagaattagtaatcgttgctaacgacccgaaacagttttgttcttttttttgtgagtacataaaa

SEQ ID NO: 409463 - DNA, 75 bp, synthetic construct
  source 1..75: mol_type = other DNA
ttaataatgccattattggtagagatacattaatagcaagtaaagtatttattagtgatcataatcatggtattt

SEQ ID NO: 409464 - DNA, 75 bp, synthetic construct
  source 1..75: mol_type = other DNA
accgatggagtccagcaaggaaacgctggataaatgtaccagtgctggcgagatattcggtaacgttcttggtgg

SEQ ID NO: 409465 - DNA, 75 bp, synthetic construct
  source 1..75: mol_type = other DNA
ctggataaatgtaccagtgctggcgagatattcggtaacgttcttggcggtgcgttacaacttgttctgacacct

SEQ ID NO: 409466 - DNA, 75 bp, synthetic construct
  source 1..75: mol_type = other DNA
atgctggtacggcaatgcgtgccagcctggctcgtctggcatcaccgccaaaggcggcagcagaggcgctgaaag

SEQ ID NO: 409467 - DNA, 75 bp, synthetic construct
  source 1..75: mol_type = other DNA
ctgatgcggttgtattcagccctaaaaagcgccagtgggggacgcaggatgatttgacctgcgcacagtggctct

SEQ ID NO: 409468 - DNA, 75 bp, synthetic construct
  source 1..75: mol_type = other DNA
gtcgtgaacactttggcgaagccgatctggagtatgtcattggtaccgaagtgccggtacctggcggcgcgcatg

SEQ ID NO: 409469 - DNA, 75 bp, synthetic construct
  source 1..75: mol_type = other DNA
aacggacttatttacttggtacggtaaagataaaaaaggcgactctctcgctattgtaattaaaaatataaacgg

SEQ ID NO: 409470 - DNA, 75 bp, synthetic construct
  source 1..75: mol_type = other DNA
attctcaaaaaatatataagcattttaaggatctcgaaggtaaaattgaagaaaggcttcaaaatcgccaggctg

SEQ ID NO: 409471 - DNA, 75 bp, synthetic construct
  source 1..75: mol_type = other DNA
gagtgggatgcgcactatctacacggcgatggctggctgggcgagtggcaatgtgtctcggaatccgctatctgg

SEQ ID NO: 409472 - DNA, 75 bp, synthetic construct
  source 1..75: mol_type = other DNA
ctgacgcatcaaaatctgacgcatcaaaatctgacccgtcaaaatttgatgcgtcgaaatctggcaaaaaagcgg

SEQ ID NO: 409473 - DNA, 75 bp, synthetic construct
  source 1..75: mol_type = other DNA
tctcttggtggattgttcaaatccagtcagaatacgcgccacgagtttctgcgcgctgtgcgtcatcacaactga

SEQ ID NO: 409474 - DNA, 75 bp, synthetic construct
  source 1..75: mol_type = other DNA
ctctgagtcagcgttggtagccgccattggaattgaagatatggttatcgtgcaaactaaagatgccgttcttgt

SEQ ID NO: 409475 - DNA, 75 bp, synthetic construct
  source 1..75: mol_type = other DNA
gctcatttttacgtggcaaaaaagtttgtagaaaaacctgaacgtgaacttgctgagaaatattgttcttcaaaa

SEQ ID NO: 409476 - DNA, 75 bp, synthetic construct
  source 1..75: mol_type = other DNA
acctggactcgcccgtgccgtgaacggagcgtattaacgctaaccaactttgagcgccagtggcaaaactggatt

SEQ ID NO: 409477 - DNA, 75 bp, synthetic construct
  source 1..75: mol_type = other DNA
ttgtaatggctggtggtacgggtagccgtctttggcccctctcaagagagcactatccaaagcaatttctgcaat

SEQ ID NO: 409478 - DNA, 75 bp, synthetic construct
  source 1..75: mol_type = other DNA
tcgttgaaaaacctaatcgctcaagggctgaagagtatatttcctcagataaatatctttggaatagtgggatgt

SEQ ID NO: 409479 - DNA, 75 bp, synthetic construct
  source 1..75: mol_type = other DNA
ttggtgtttcaggcggctcactgacggcattgacctcacccttaacctcaacaactcccgtcgccgaaaacgtag

SEQ ID NO: 409480 - DNA, 75 bp, synthetic construct
  source 1..75: mol_type = other DNA
aatattacgcgtattgcaggaacagcaggttgagcgattaggcagcaaccgacaaatcaaactcaattttcgcct

SEQ ID NO: 409481 - DNA, 75 bp, synthetic construct
  source 1..75: mol_type = other DNA
tttggctacgacaaaggcgcatttaccggcgcaattgccagcgtgccaggaaaaatggaactggcgaataacggc

SEQ ID NO: 409482 - DNA, 75 bp, synthetic construct
  source 1..75: mol_type = other DNA
ccggcgcaattgccagtgtgccaggaaaaatggaactagcgaataacggcaccttattactcgatgaaattggcg

SEQ ID NO: 409483 - DNA, 75 bp, synthetic construct
  source 1..75: mol_type = other DNA
ggttaatcttacggaaagtcagtttggtatcggtacaccgcgcagccagtttccgtggaatctttccggtactta

SEQ ID NO: 409484 - DNA, 75 bp, synthetic construct
  source 1..75: mol_type = other DNA
ccggcgcgggcaaagagtgcgtggcgaaatatattcacaccgtcgcctttggtgaaaatgataacgcgccctata

SEQ ID NO: 409485 - DNA, 75 bp, synthetic construct
  source 1..75: mol_type = other DNA
taaatatcagggcaaccgcagcaaaatcgccgacctgttaggcattaccccgcgcgcactgcgctatcgactggc

SEQ ID NO: 409486 - DNA, 75 bp, synthetic construct
  source 1..75: mol_type = other DNA
gcgtttgccgtcagtctggcctttgctgcacccctgttacggctggttgggatggacggcggcggctaccacctc

SEQ ID NO: 409487 - DNA, 75 bp, synthetic construct
  source 1..75: mol_type = other DNA
cggtggtggcgaaaccccgccgtaacctggaagcggatgtgacgctgttctgcgatgtgctgtgtgatacggatc

SEQ ID NO: 409488 - DNA, 75 bp, synthetic construct
  source 1..75: mol_type = other DNA
tgcgatgtcctgtgtgatactgacctgcaacgggtgttcactccggacgaccgtgagcaggtgctggccgtctat

SEQ ID NO: 409489 - DNA, 75 bp, synthetic construct
  source 1..75: mol_type = other DNA
caaaagcaagcgggtatcgacctgctgccggtgggcgattttgcctggtacgatcatgtactgacaaccagtctg

SEQ ID NO: 409490 - DNA, 75 bp, synthetic construct
  source 1..75: mol_type = other DNA
atggtcaccgtgcgcgatatcactctgaccagcacctgtgaacaccattttgttaccatcgatggcaaagcgacg

SEQ ID NO: 409491 - DNA, 75 bp, synthetic construct
  source 1..75: mol_type = other DNA
cgctggccagactgtcagggtttcgtcataaaacggtgcgggtgcctgaatgggaaaatgtcagcgtggtgctgc

SEQ ID NO: 409492 - DNA, 75 bp, synthetic construct
  source 1..75: mol_type = other DNA
cgctggccagactgtcaggatttcgtcataaaacggtgaaggtacctgaatggggaaatgtcagcgtggtactgc

SEQ ID NO: 409493 - DNA, 75 bp, synthetic construct
  source 1..75: mol_type = other DNA
ccaagcaatttgatcgcgtcatgaatggaattcttaaaccagagcctcgtctattaattattgataagattcagg

SEQ ID NO: 409494 - DNA, 75 bp, synthetic construct
  source 1..75: mol_type = other DNA
aagctggtgaacatatcggcatatgttcagtctgttctgcccatcccttggttatcgaagcggcgctggcatttg

SEQ ID NO: 409495 - DNA, 75 bp, synthetic construct
  source 1..75: mol_type = other DNA
agcgtaatttaaaagaggaaattaaacgcgtcgaaaaacgcatcattatggaagtgctggaacaacaagaaggaa

SEQ ID NO: 409496 - DNA, 75 bp, synthetic construct
  source 1..75: mol_type = other DNA
cgggcattgcggaacatatcaagcaggccattgttgagcaggaacgtttgggactggatgtgctggtacatggcg

SEQ ID NO: 409497 - DNA, 75 bp, synthetic construct
  source 1..75: mol_type = other DNA
atccagtataacattgctatgcagaagcagcttgctgtacaccctgagttagcaaacgatgaagttgctctgcaa

SEQ ID NO: 409498 - DNA, 75 bp, synthetic construct
  source 1..75: mol_type = other DNA
taatttatctgaaggaatggatgcggaaaaagcgcaaaagcaggctgataaacaaatcagcgggatgatgacatt

SEQ ID NO: 409499 - DNA, 75 bp, synthetic construct
  source 1..75: mol_type = other DNA
cgaacttagccgtctgaccgaagagctaacttcccgcgagcagaaactggcgatcagctctcgcagtgtggcgaa

SEQ ID NO: 409500 - DNA, 75 bp, synthetic construct
  source 1..75: mol_type = other DNA
acttaaccgccgacagcgccgccgaatggctggaaaccttccaggcgaaagagctggaagcgactgaaaaaatgc

SEQ ID NO: 409501 - DNA, 75 bp, synthetic construct
  source 1..75: mol_type = other DNA
ccgcgcacagccagtttgagcaggcttatcagctggtggtggcaatcaacggcccgctggcgcgtaacgaggcgt

SEQ ID NO: 409502 - DNA, 75 bp, synthetic construct
  source 1..75: mol_type = other DNA
aaagccgtattgaaagcctccatgccgagcgtgaagtgctttccgaacgcttcgccacgctctcctttgatgtac

SEQ ID NO: 409503 - DNA, 75 bp, synthetic construct
  source 1..75: mol_type = other DNA
acgccaggcgcgcgtgctgccgcttaacgagctgaaagacaagctcgaggcgatggaaggcgtgcagtttaagca

SEQ ID NO: 409504 - DNA, 75 bp, synthetic construct
  source 1..75: mol_type = other DNA
tcgatgaaatccgcgaacgtctggatgaagcccaggaagccgcgcgttttgttcagcagttcggtaatcaactgg

SEQ ID NO: 409505 - DNA, 75 bp, synthetic construct
  source 1..75: mol_type = other DNA
tatgatcgacagagaaattgctcgtggtgaactggtggagttaatggcagataaagtgttgccagtggaaatgcc

SEQ ID NO: 409506 - DNA, 75 bp, synthetic construct
  source 1..75: mol_type = other DNA
cgcctcccccgatgagccggctcatgaaaagcgcgaaagcgtttcaaacaaaacacgaaaatacaaactttcgcg

SEQ ID NO: 409507 - DNA, 75 bp, synthetic construct
  source 1..75: mol_type = other DNA
ccacaccgtaataaatctatagtgaaccatccagattttgttgaggtggctcgaggtcctcactatcacatgtac

SEQ ID NO: 409508 - DNA, 75 bp, synthetic construct
  source 1..75: mol_type = other DNA
gccacgccattgtggtaccggatctgtcgcaagttgctgaacaactggaaggtttaaccgattgcccggaagatc

SEQ ID NO: 409509 - DNA, 75 bp, synthetic construct
  source 1..75: mol_type = other DNA
cacgcagcggtgagacgacgagttacagctatgatgacccggcgagtgagctgccgacagggatacaggacgcga

SEQ ID NO: 409510 - DNA, 75 bp, synthetic construct
  source 1..75: mol_type = other DNA
tcagtgcagtctattacagcgaccgtgcggtaagtacgcgcatccgggcttttatcgatttccttagcgagcatg

SEQ ID NO: 409511 - DNA, 75 bp, synthetic construct
  source 1..75: mol_type = other DNA
ttcgccgtgacgagctgcatgcgcaactgagtaataaccggtcccgccgcaaccagctggaaaaagcactgactt

SEQ ID NO: 409512 - DNA, 75 bp, synthetic construct
  source 1..75: mol_type = other DNA
cgtgattatcacgagatgcgcgagcaggtggtgaccgccaaagcgggctggtgcgcggtaatgcgcatggtgaaa

SEQ ID NO: 409513 - DNA, 75 bp, synthetic construct
  source 1..75: mol_type = other DNA
tccccgacctgaccctgctgcatttccgtaacactacggaagccggggccaccagcggttcgcgcgataaaggtc

SEQ ID NO: 409514 - DNA, 75 bp, synthetic construct
  source 1..75: mol_type = other DNA
atcgaagcctcgctgtatggcgggatctccagcgccattacccgttctctgcgcgactacctgttgccggaaaac

SEQ ID NO: 409515 - DNA, 75 bp, synthetic construct
  source 1..75: mol_type = other DNA
caaccaggtgctggcttcgctgaaaagttcttacgacaccaaaaaagagctacttaacgatctgcaacgtgaatt

SEQ ID NO: 409516 - DNA, 75 bp, synthetic construct
  source 1..75: mol_type = other DNA
aggtagtgaccgccaaagcgggctggtgtgcggtgatgcgcatggtgaaagataacggcgttgagcgtcgcttac

SEQ ID NO: 409517 - DNA, 75 bp, synthetic construct
  source 1..75: mol_type = other DNA
cattaattcacgccatcagcgtgtactggttggtgtgcgtttacaacaggtcgccgggcgcgatcgtaaagtcga

SEQ ID NO: 409518 - DNA, 75 bp, synthetic construct
  source 1..75: mol_type = other DNA
caactatgtggcggcggactatatgcgtcacgccaacgaacgtcgcgttcatctggataaggcactagagtttcg

SEQ ID NO: 409519 - DNA, 75 bp, synthetic construct
  source 1..75: mol_type = other DNA
ttgaagctatcgagcagatggaaatcgaacttagccgtctgaccgaagagttaacttcccgcgaacagaaactgg

SEQ ID NO: 409520 - DNA, 75 bp, synthetic construct
  source 1..75: mol_type = other DNA
gtcaggaacaggaacaactgcaatcacgcattcagagtctgatgcagcgtgcgccggtttggctggcggcgcaaa

SEQ ID NO: 409521 - DNA, 75 bp, synthetic construct
  source 1..75: mol_type = other DNA
gcgctggcggaacgttttggcggcgtgctgttgtcagaaatttatgacgacgttagcctggaagatgcgccgtac

SEQ ID NO: 409522 - DNA, 75 bp, synthetic construct
  source 1..75: mol_type = other DNA
cggaagccgaaatccgtcaactgaacagccgtcgcgtcgaactggagcgggcgttgagtaatcatgaaaatgata

SEQ ID NO: 409523 - DNA, 75 bp, synthetic construct
  source 1..75: mol_type = other DNA
gcgcgtaaaaacgccgtcgatgaagagatcgaacgtttaagccagccaggtggttctgaagaccagcgtttgaat

SEQ ID NO: 409524 - DNA, 75 bp, synthetic construct
  source 1..75: mol_type = other DNA
gacggaaaaatcgatgtcgcaaattcagggcgcactggtgggtatcgcgatggtgctgtcagcggtatttattcc

SEQ ID NO: 409525 - DNA, 75 bp, synthetic construct
  source 1..75: mol_type = other DNA
gacaagtttatccgcgaagttaatgccaactcactggctcgttatttgctggttgccagcgcgattggttctctt

SEQ ID NO: 409526 - DNA, 75 bp, synthetic construct
  source 1..75: mol_type = other DNA
gacctgcaaaaacattgccaggaaactggtctgtcactctctggcctgatgatgaaaaacgagctggcgctgcac

SEQ ID NO: 409527 - DNA, 75 bp, synthetic construct
  source 1..75: mol_type = other DNA
ccaatgttattgattaccagccagcaaaagcgaccgccttaagccagatggtcgaaaactatgaaacgctgattt

SEQ ID NO: 409528 - DNA, 75 bp, synthetic construct
  source 1..75: mol_type = other DNA
gtaaaagcggtgaacgccgcacgtatggcgctgcgccgtaccagcgagccgcgcgtctgcctcgataaagttatc

SEQ ID NO: 409529 - DNA, 75 bp, synthetic construct
  source 1..75: mol_type = other DNA
cagcgagccgcgcgtctgcctcgataaagttatcgaaaccatgtacgaaacaggtaaagatatgaacgccaagta

SEQ ID NO: 409530 - DNA, 75 bp, synthetic construct
  source 1..75: mol_type = other DNA
gcgataaagtcgtttacagccagacttactactccatcggcggtggctttatcgttgatgaagaacattttggtc

SEQ ID NO: 409531 - DNA, 75 bp, synthetic construct
  source 1..75: mol_type = other DNA
tcttcgcccttactatatggattttgattatttttcattgttattcccaattatctttggttttttttcggggag

SEQ ID NO: 409532 - DNA, 75 bp, synthetic construct
  source 1..75: mol_type = other DNA
gtcgctggttattggggtgctttacgggaagctggccaccctgcgtcttggttttgacattcttacccggtcaat

SEQ ID NO: 409533 - DNA, 75 bp, synthetic construct
  source 1..75: mol_type = other DNA
cctgcaacttcccgtaaccgggagcctgttgcctccggatttggtggtgaaattcatgttcatctgcataacgtt

SEQ ID NO: 409534 - DNA, 75 bp, synthetic construct
  source 1..75: mol_type = other DNA
atgtcctgtcaggacgatccgattcccttaactgatgacatcgtggctgaacgcgccgcccgtctggcgaaagtg

SEQ ID NO: 409535 - DNA, 75 bp, synthetic construct
  source 1..75: mol_type = other DNA
catcggtggtcgtgaaattggtaatggttttagcgaattaaacgacgcagaagatcaggctgaacgtttccagga

SEQ ID NO: 409536 - DNA, 75 bp, synthetic construct
  source 1..75: mol_type = other DNA
aaaaatatcgtccagaaaccgatatggcggatctggataattttgatgctgctaaagcattagctgaatctatcg

SEQ ID NO: 409537 - DNA, 75 bp, synthetic construct
  source 1..75: mol_type = other DNA
tgctgccgggcgttttttgcagcccgcgatcgggttcgggaaagagatgtcccgcgttcaggcactgacgcgaat

SEQ ID NO: 409538 - DNA, 75 bp, synthetic construct
  source 1..75: mol_type = other DNA
gtcgtgttatcgctcgtccgtttatcggcgacaaagccggtaacttccagcgtactggtaaccgtcacgacctgg

SEQ ID NO: 409539 - DNA, 75 bp, synthetic construct
  source 1..75: mol_type = other DNA
aagggcggtttcttcggctggtttaatactaccttcgatcatagcgttaaccactacaccaacagcgtcggcaaa

SEQ ID NO: 409540 - DNA, 75 bp, synthetic construct
  source 1..75: mol_type = other DNA
agagtttccgctctggagctggcgttaaacaaaaaccaaaacccaataagtgcacataatgagtacataaataaa

SEQ ID NO: 409541 - DNA, 75 bp, synthetic construct
  source 1..75: mol_type = other DNA
ctggtgggtatcgcgatggtgctgtcagcggtatttattccgatggcattcttggtgatgctgccaacttactga

SEQ ID NO: 409542 - DNA, 75 bp, synthetic construct
  source 1..75: mol_type = other DNA
cctctaacgttaaagatacgcttagccgtctgaatagcgtcggtgacgtacagcttttcggcgcacagtatgcga

SEQ ID NO: 409543 - DNA, 75 bp, synthetic construct
  source 1..75: mol_type = other DNA
gaatatgaatggtatcgataacctgatgtatatgtcctccaccagcgattctgccggtagcgtgacaattaccct

SEQ ID NO: 409544 - DNA, 75 bp, synthetic construct
  source 1..75: mol_type = other DNA
actggcgaaactggtcggtgaaatggtcagggcagaattggaacgacgcgaccgtgccggacgtggcagttttta

SEQ ID NO: 409545 - DNA, 75 bp, synthetic construct
  source 1..75: mol_type = other DNA
acagacagcaataccggtacgctacgcagactcagcaaaattgctgataacacaggtaagctggttgatgagacg

SEQ ID NO: 409546 - DNA, 75 bp, synthetic construct
  source 1..75: mol_type = other DNA
gtttttctctcctgaccggatcaatgaatgctgtcaggctcctgccagcactatggggaatggtgacgggttccg

SEQ ID NO: 409547 - DNA, 75 bp, synthetic construct
  source 1..75: mol_type = other DNA
acaacctccagctcgccacgccgttgctgccgcaggaggttcagcagcaggggatcagtgttgaaaagtccagta

SEQ ID NO: 409548 - DNA, 75 bp, synthetic construct
  source 1..75: mol_type = other DNA
gaacggcaaaatgcgcccgatggaggatgtgctggctgacctttataaagccacccgcaaatacggggaagttga

SEQ ID NO: 409549 - DNA, 75 bp, synthetic construct
  source 1..75: mol_type = other DNA
ctgcctccggcgctggtccctgttgttgcggccagctcccgcccggtggcggaggctatacgatcgccagtggca

SEQ ID NO: 409550 - DNA, 75 bp, synthetic construct
  source 1..75: mol_type = other DNA
catcagcgactgggaccgcaaagaaattatcgtgccgaacaaggcgtttattaccgagcagtttatcaactggtc

SEQ ID NO: 409551 - DNA, 75 bp, synthetic construct
  source 1..75: mol_type = other DNA
ttagcggtagcgattggcgatggcgtaacggccaccgtgccgctgctatgggtggtgatgatttgcgctgccttt

SEQ ID NO: 409552 - DNA, 75 bp, synthetic construct
  source 1..75: mol_type = other DNA
ttcccgcccttccagatgcgtctggaaagcctcaacggtaaacaaacggggagaacgctgacgtctgcgggtaaa

SEQ ID NO: 409553 - DNA, 75 bp, synthetic construct
  source 1..75: mol_type = other DNA
ggatgtcctgctgacggatgtttttcataaaagctggccgctggcctccgatccttctcaacaaatgcgactgat

SEQ ID NO: 409554 - DNA, 75 bp, synthetic construct
  source 1..75: mol_type = other DNA
taaagaagacggttcacagcgtgccggaaaagtcctcatttgtactcaggtcttagagcagagcgttgattgtga

SEQ ID NO: 409555 - DNA, 75 bp, synthetic construct
  source 1..75: mol_type = other DNA
ttatcacgttatccgccgctggatgctgatccagcgccgcaggctggcgtttgaccgggcgaagcatcgccgggc

SEQ ID NO: 409556 - DNA, 75 bp, synthetic construct
  source 1..75: mol_type = other DNA
gctggttcagacggatgcgtttaaggaccgtgtaaataatgccctgtggcgtgacacaccagggccgaactatat

SEQ ID NO: 409557 - DNA, 75 bp, synthetic construct
  source 1..75: mol_type = other DNA
gtgaactcacaccgggtagcgacgcgcaaagatgttgagcgtagcgtcagcgtgggttggcttcatagtgaacaa

SEQ ID NO: 409558 - DNA, 75 bp, synthetic construct
  source 1..75: mol_type = other DNA
gcaatgacaacaacgtgcatgaccggactttccttgccgggaactacctgaagataggctggccgtctatcaaca

SEQ ID NO: 409559 - DNA, 75 bp, synthetic construct
  source 1..75: mol_type = other DNA
caccgctatctgttctggacctctgacgtgcgcccgatgaccatcgcctggccgctggagatcgctcaggatctg

SEQ ID NO: 409560 - DNA, 75 bp, synthetic construct
  source 1..75: mol_type = other DNA
cacagcaacgtcaggctaccagccagacgttgcaggttcggcaggcgctgaatacgctacgcgaacaatcacaat

SEQ ID NO: 409561 - DNA, 75 bp, synthetic construct
  source 1..75: mol_type = other DNA
gcgcagcggatggatctcgtcgcttcacagcaacgtcaggctaccagccagacgttgcaggttcggcaggcgctg

SEQ ID NO: 409562 - DNA, 75 bp, synthetic construct
  source 1..75: mol_type = other DNA
ttgctacatcccgaaatgtcttaaacgtcactcatcaacgttttgcgaaaatgaaacacttcttaccagctgaaa

SEQ ID NO: 409563 - DNA, 75 bp, synthetic construct
  source 1..75: mol_type = other DNA
attgcgtcattctggatggaaggccccgctgcggcatatcagacgctgtcccagctggtctataagttgctgacc

SEQ ID NO: 409564 - DNA, 75 bp, synthetic construct
  source 1..75: mol_type = other DNA
atgcatttctgatatcgcgtaaacattcagtgaagatcagtaatgttatctgcttgagtggcaccgacggtaaat

SEQ ID NO: 409565 - DNA, 75 bp, synthetic construct
  source 1..75: mol_type = other DNA
ccggaattctcgggacatgcttggcggctgaaatcaagcatgattgccccgccaatggaaagggaatatctgaca

SEQ ID NO: 409566 - DNA, 75 bp, synthetic construct
  source 1..75: mol_type = other DNA
aacttcttccagccgaccattctggtggacgtgccggccaacgccaaagtgtcgaaagaagagacgttcggcccc

SEQ ID NO: 409567 - DNA, 75 bp, synthetic construct
  source 1..75: mol_type = other DNA
gcgctctgcccgcctggcgtgcgctcaccgccaaagaacgcgccaacattctgcgcaactggttcaatttgatga

SEQ ID NO: 409568 - DNA, 75 bp, synthetic construct
  source 1..75: mol_type = other DNA
tatgcaaaacgaactggcgctgcacagcaagaaagagatcgacgagtatttcgcgcatgtctggcaaaccatgca

SEQ ID NO: 409569 - DNA, 75 bp, synthetic construct
  source 1..75: mol_type = other DNA
aaatggacaatatgaccgggtaccgcgacagcagcgatcccgtactggccagtgaagccgcgtttctacagtgcc

SEQ ID NO: 409570 - DNA, 75 bp, synthetic construct
  source 1..75: mol_type = other DNA
tgccgctctggcttcttcagacggatgccctgaaagaccgggtgaataacgcgttatggcgtgactcgccaggtc

SEQ ID NO: 409571 - DNA, 75 bp, synthetic construct
  source 1..75: mol_type = other DNA
gcggagttctcggggcatgcttggcggctaaaatcaaatatgattgccccaccaatggaaagggaatacctgaca

SEQ ID NO: 409572 - DNA, 75 bp, synthetic construct
  source 1..75: mol_type = other DNA
cgctggtcggtggtgacggttgaggatgacgcgctgacagactgggttatgcaggataccccggaggcatcatga

SEQ ID NO: 409573 - DNA, 75 bp, synthetic construct
  source 1..75: mol_type = other DNA
cttatcaacaccatgacgaataccatcctcggaccggaagaggtggtgaataagtacggcgtgccgccagaactg

SEQ ID NO: 409574 - DNA, 75 bp, synthetic construct
  source 1..75: mol_type = other DNA
cgccgggcggatgcgcgtggtgaggttccggtatatctgttgcagacggacctgttaaaagatcagctcagtaac

SEQ ID NO: 409575 - DNA, 75 bp, synthetic construct
  source 1..75: mol_type = other DNA
cttattgaatccgtctacggtgaggacgtggtaatgccggaaggatttgcccgcagcgagcaggagcaagtgggc

SEQ ID NO: 409576 - DNA, 75 bp, synthetic construct
  source 1..75: mol_type = other DNA
tcgtcccttatatcctgttctcgctgtataactggctcaagcgttctgtccgctcgctgtacttcggctcttacc

SEQ ID NO: 409577 - DNA, 75 bp, synthetic construct
  source 1..75: mol_type = other DNA
tacggtttcctgagtccggtgaagcgccgcttactggaagaagttgtgtacgtcataacggagacggtgagaaaa

SEQ ID NO: 409578 - DNA, 75 bp, synthetic construct
  source 1..75: mol_type = other DNA
gttactggcagagatgagccgcattgctgcggatgtgatacaggaaatctgccgccaggcagatgtggtgccggg

SEQ ID NO: 409579 - DNA, 75 bp, synthetic construct
  source 1..75: mol_type = other DNA
agacggtgagaaagatggcgatgcaaatcacccggagagggatgtatcagcggttactgaaggttgacccgctga

SEQ ID NO: 409580 - DNA, 75 bp, synthetic construct
  source 1..75: mol_type = other DNA
gcagtacgtccggtggtgattgagtcggtgaccaaaatcatggcgtgcgggaccacactgatggggtatacacag

SEQ ID NO: 409581 - DNA, 75 bp, synthetic construct
  source 1..75: mol_type = other DNA
ttcagcagggaaaccgctggcttaactggctggagaaacagccggaaggttcagtgcgtccggtggtgactgagt

SEQ ID NO: 409582 - DNA, 75 bp, synthetic construct
  source 1..75: mol_type = other DNA
acgggaatggaatcgcttcctggacacccactaccggcgtggctggaatgtcaacgtatcccgggtgatggataa

SEQ ID NO: 409583 - DNA, 75 bp, synthetic construct
  source 1..75: mol_type = other DNA
atgcttccccgttttgccgatatttttcagcagggaaaccgctggcttaactggctggagaaaccaccagaaggt

SEQ ID NO: 409584 - DNA, 75 bp, synthetic construct
  source 1..75: mol_type = other DNA
aggcagatgtggagccggggatattcacggtgatccacacatgggggcgtaaccagcagtggcatccgcatatcc

SEQ ID NO: 409585 - DNA, 75 bp, synthetic construct
  source 1..75: mol_type = other DNA
gcccggctatgccgccaatatcaacgattacctcccggaaaaactgtcgacacgtctggctgaggagtctgtttc

SEQ ID NO: 409586 - DNA, 75 bp, synthetic construct
  source 1..75: mol_type = other DNA
gtgttcacacttccgtgccaatactggtccctggtgtttcacaaccgctggttgctggcagagatgagccgcatt

SEQ ID NO: 409587 - DNA, 75 bp, synthetic construct
  source 1..75: mol_type = other DNA
ttgatgagtggagatgagttcatggaaaggttctcctggcatgtagcagataaggggttccgtatggtgaggtac

SEQ ID NO: 409588 - DNA, 75 bp, synthetic construct
  source 1..75: mol_type = other DNA
cgtcaccggactgttgccacaccaaaaaggtctgcttccggtgtaaaagccgctcctgtccgcactgcggagtga

SEQ ID NO: 409589 - DNA, 75 bp, synthetic construct
  source 1..75: mol_type = other DNA
cggtgtgacgtcagctcacacctggaaaaaccttcatttttacgcccgtaaggtgatgcgcatgtggcgttaccg

SEQ ID NO: 409590 - DNA, 75 bp, synthetic construct
  source 1..75: mol_type = other DNA
gatgtggagccggggatattcacggtaatccacacctggggacgtgaccagcagtggtatccgcatatccattta

SEQ ID NO: 409591 - DNA, 75 bp, synthetic construct
  source 1..75: mol_type = other DNA
agatatgaaacgtgagctgaatggtcgcggtgtctggttgcgtgaaggagagcatattgacagagaagggaatgt

SEQ ID NO: 409592 - DNA, 75 bp, synthetic construct
  source 1..75: mol_type = other DNA
gattgtggtgattatttccagccatcgatggaggctatgacgggatatcgtgacaatcctgatcctgtaaaagcc

SEQ ID NO: 409593 - DNA, 75 bp, synthetic construct
  source 1..75: mol_type = other DNA
cccctggacgtgagatcacaaacagcaaatggcgcagaacgtcaccgcatgaagccccgcccacaacggggatcc

SEQ ID NO: 409594 - DNA, 75 bp, synthetic construct
  source 1..75: mol_type = other DNA
gatgagtcggctggagcattatgccggtcaggatgaaatcggtctgcgttacaacagtcaccgtacaaaacggga

SEQ ID NO: 409595 - DNA, 75 bp, synthetic construct
  source 1..75: mol_type = other DNA
ggctgaagcggggttaccgactggcagagcaggccctgatgcatgagcgactggcacgacagcaggtgtgcggct

SEQ ID NO: 409596 - DNA, 75 bp, synthetic construct
  source 1..75: mol_type = other DNA
cgttacaacagtcaccggacaaaacgggaagaatacctggtgatgagtggtgatgagtttatggaaaggttctcc

SEQ ID NO: 409597 - DNA, 75 bp, synthetic construct
  source 1..75: mol_type = other DNA
taccgccgcggctggaatgtcaacgtatcccgggtgatggataacgccacacatgtggcggtgtacttcggctct

SEQ ID NO: 409598 - DNA, 75 bp, synthetic construct
  source 1..75: mol_type = other DNA
tggtgttgttcatcaccggactgttgccatacaaaaaaggtctgcttccggtgtaaaagccgctcctgcccgcac

SEQ ID NO: 409599 - DNA, 75 bp, synthetic construct
  source 1..75: mol_type = other DNA
ggatacagtatctgctgaatctggttcccgactgtccgtggcagcatattgtgttcacacttccctgccagtact

SEQ ID NO: 409600 - DNA, 75 bp, synthetic construct
  source 1..75: mol_type = other DNA
gcgaatgggtgaaaaaatggtttctgttccccatacggtgaatgacttcatttccagaagtgctttattttttaa

SEQ ID NO: 409601 - DNA, 75 bp, synthetic construct
  source 1..75: mol_type = other DNA
gttgggatgttgatggccgggccgattggcctttttcgccagcgttaccccggcgtagaattgaaaatttcggag

SEQ ID NO: 409602 - DNA, 75 bp, synthetic construct
  source 1..75: mol_type = other DNA
atgaaattattccacggaacttatgaaaaagtggctccaataatcaaaattggtgagttcgcaatgtctggcaat

SEQ ID NO: 409603 - DNA, 75 bp, synthetic construct
  source 1..75: mol_type = other DNA
cactggttcagggaagtacggcgcggcagctggcggcagttccttccagcgccgacccttctcgtacgactgtcg

SEQ ID NO: 409604 - DNA, 75 bp, synthetic construct
  source 1..75: mol_type = other DNA
gtaagtgacgccatcgtcaacatggatgtattaatcaccgacgaagcgaaaatcgcgatggcgagcgaagaagat

SEQ ID NO: 409605 - DNA, 75 bp, synthetic construct
  source 1..75: mol_type = other DNA
agtgatatcggtaataaaaccgcgacgttgaaaaccagtagcaccacgcaaggtaatgtggtgacgcagctttcc

SEQ ID NO: 409606 - DNA, 75 bp, synthetic construct
  source 1..75: mol_type = other DNA
atgagttgtcgcgtttaattacacttcgtcgcagccattacgagtttcatccggataataattttaccattgata

SEQ ID NO: 409607 - DNA, 75 bp, synthetic construct
  source 1..75: mol_type = other DNA
ggcattagtaaactggaaaaataatcccgacggtacgcgtagcccctatgaaatgaatgtcacctatatggatgc

SEQ ID NO: 409608 - DNA, 75 bp, synthetic construct
  source 1..75: mol_type = other DNA
ctctggcagatgagagcaaaacaggcttttatgtgacccgtaaagccggtgcttctgttatgtcactttcagacc

SEQ ID NO: 409609 - DNA, 75 bp, synthetic construct
  source 1..75: mol_type = other DNA
tcgtaaaacgaacaggaagcaccggcaaattgcggatatttactgcgcctgttcagatgttgagtgtggccacac

SEQ ID NO: 409610 - DNA, 75 bp, synthetic construct
  source 1..75: mol_type = other DNA
cgggtgacgctctggtacaaaccttattaaaaaatctgtcacccaatcagaagcaaatggctctggatttactga

SEQ ID NO: 409611 - DNA, 75 bp, synthetic construct
  source 1..75: mol_type = other DNA
caacatgtaaggcagtcgcgcggatcggtaaaacaaacagaaaacaccctcagctgtacgatgtgtactgctatt

SEQ ID NO: 409612 - DNA, 75 bp, synthetic construct
  source 1..75: mol_type = other DNA
acagctttacgctgaaaccggtaagcgatgccatcgtcaatatggacgttttaatcaccgatgaagcagaaatcg

SEQ ID NO: 409613 - DNA, 75 bp, synthetic construct
  source 1..75: mol_type = other DNA
caaacagtttgttgaggcggcgcagccgctggaagccatcaccggtaaagtgaacgacttcctcgctcatatcga

SEQ ID NO: 409614 - DNA, 75 bp, synthetic construct
  source 1..75: mol_type = other DNA
atgaccattgaaacactgcgcgggcgctatcgcctgcaccgttttccgccgcgccagcgtgcggtgaccggagaa

SEQ ID NO: 409615 - DNA, 75 bp, synthetic construct
  source 1..75: mol_type = other DNA
atgaccattgaaacactgcgcgggcgctatcgcctgcaccgcttcccgccgcgccagcgtgcggtgaccggagaa

SEQ ID NO: 409616 - DNA, 75 bp, synthetic construct
  source 1..75: mol_type = other DNA
ctggcccggaaatgttcgccaactggaaaacgccattcagcgaggaatgatcttaaaccgcgacggcgtgattta

SEQ ID NO: 409617 - DNA, 75 bp, synthetic construct
  source 1..75: mol_type = other DNA
atggtgtacctgctcagagaatttaaaacatgcttttagcatcggactgaaaagcgcaaagggagtttttaatgg

SEQ ID NO: 409618 - DNA, 75 bp, synthetic construct
  source 1..75: mol_type = other DNA
atgagtaattcgctgttaccaccatcagccagcaatttcatgcgttgcgccgaagctgtcggagcgcgcactaca

SEQ ID NO: 409619 - DNA, 75 bp, synthetic construct
  source 1..75: mol_type = other DNA
tcgcgctattgccttcgttgaaagtgaagtcgaggaatggattcagtctgttattgaaacaaccagaaaaaatgt

SEQ ID NO: 409620 - DNA, 75 bp, synthetic construct
  source 1..75: mol_type = other DNA
ataagtgctgttttaagcccagtaataagcaagttgttaatctctcacgttgttaatattgaagagaataaaata

SEQ ID NO: 409621 - DNA, 75 bp, synthetic construct
  source 1..75: mol_type = other DNA
cactggtacagggcagcacggcgcgtcagttggcggcagtaccgtccagcgccgatccttcccgcacgacagtcg

SEQ ID NO: 409622 - DNA, 75 bp, synthetic construct
  source 1..75: mol_type = other DNA
tccattattgtcgaaggggactatttccctgccccggccattcatttaattgataatctgagagtaaacgcatga

SEQ ID NO: 409623 - DNA, 75 bp, synthetic construct
  source 1..75: mol_type = other DNA
tttaactcaggggtgttacattataaacatttcactagatcaaggaactaaagctcatgcagtagcttatataaa

SEQ ID NO: 409624 - DNA, 75 bp, synthetic construct
  source 1..75: mol_type = other DNA
tgacaataattctggtggagatgcaatgtttaaagttgtcaatcacgcccatcaacgaaaccccaaaaagaaatg

SEQ ID NO: 409625 - DNA, 75 bp, synthetic construct
  source 1..75: mol_type = other DNA
cagtgtgagttacaaggacgagtggggcgataaatataagtcagaagttgatgttaaaagtcatgacatcctgct

SEQ ID NO: 409626 - DNA, 75 bp, synthetic construct
  source 1..75: mol_type = other DNA
gatcttgtccgagtattatgtgaacaaggctggagtgaagattcagcacataagctagttatagagtatgagttt

SEQ ID NO: 409627 - DNA, 75 bp, synthetic construct
  source 1..75: mol_type = other DNA
tttaaaaggtcaggtgataacagattacctgatgctggtctaagtattttccagaaagaaaataatatttggtat

SEQ ID NO: 409628 - DNA, 75 bp, synthetic construct
  source 1..75: mol_type = other DNA
tccggacttgatatcgctgttattattgctgcagcatccattggtattgctctgattattgctgttttccgcgat

SEQ ID NO: 409629 - DNA, 75 bp, synthetic construct
  source 1..75: mol_type = other DNA
ctggttcgtcggggagtcacagaagtcagggagaaaaagataatctggaaaaaggcgaaaaaggcgaaaaaggag

SEQ ID NO: 409630 - DNA, 75 bp, synthetic construct
  source 1..75: mol_type = other DNA
cctgcagcaaaatgttgtactaccggttaattcatttccggataatgtaaaaataagtatcagacagacaaacgg

SEQ ID NO: 409631 - DNA, 75 bp, synthetic construct
  source 1..75: mol_type = other DNA
aaggctggagtgaagattcagcacataagctagttatagagtatgagtttgcaagggacttaatcacgtacatgg

SEQ ID NO: 409632 - DNA, 75 bp, synthetic construct
  source 1..75: mol_type = other DNA
ggcggagctggcgatccgcgcgggcattccggctggcgtatttaacgtagtgacggggtctgctggcgcggtcgg

SEQ ID NO: 409633 - DNA, 75 bp, synthetic construct
  source 1..75: mol_type = other DNA
ccgctggctgaagcgaaaggcgaaattagctacgccgcctcctttattgagtggtttgctgaagaaggtaaacgc

SEQ ID NO: 409634 - DNA, 75 bp, synthetic construct
  source 1..75: mol_type = other DNA
agtacggcatcgtcggcatcaataccgggattatttccaatgaagtggccccgttcggcggcattaaagcctcgg

SEQ ID NO: 409635 - DNA, 75 bp, synthetic construct
  source 1..75: mol_type = other DNA
ccgtgaaactaaagtagataaactcattggggctttgggcgtgctgtggcagcaaaatccagaggagcgcattgt

SEQ ID NO: 409636 - DNA, 75 bp, synthetic construct
  source 1..75: mol_type = other DNA
gttccggccaacgccaaagtgtcgaaagaagagacgttcggccccctcgccccactgttccgttttaaagatgaa

SEQ ID NO: 409637 - DNA, 75 bp, synthetic construct
  source 1..75: mol_type = other DNA
ccgaggatctcgaagaagcaaagaagaattcaaggtttacacaggtatccccaaaaggttgggaacgcgttcgag

SEQ ID NO: 409638 - DNA, 75 bp, synthetic construct
  source 1..75: mol_type = other DNA
tggttgagagttcaccggggcgggatatcaccgataccaaatggcgctgtggtggtgcacatgaggctccgccaa

SEQ ID NO: 409639 - DNA, 75 bp, synthetic construct
  source 1..75: mol_type = other DNA
tggccgtgtccgcactgcggggaatattttcagccggtgatggataacatgaccggttaccggaataaccccgat

SEQ ID NO: 409640 - DNA, 75 bp, synthetic construct
  source 1..75: mol_type = other DNA
atcggacgcccctatctgccccgttcagctacggaacagcgtaaaagtgaactgcttgaacagcgtgcggagccg

SEQ ID NO: 409641 - DNA, 75 bp, synthetic construct
  source 1..75: mol_type = other DNA
ggcaggtgttcgctatgacgtaactccggatattgctcttgacctcagctatcgctatctggatgctggtaaatc

SEQ ID NO: 409642 - DNA, 75 bp, synthetic construct
  source 1..75: mol_type = other DNA
tggcgcattaaccggccacgatgtcaccgttttactgcccgcgatgtatttaatgggcaacccggtgcaaaatgt

SEQ ID NO: 409643 - DNA, 75 bp, synthetic construct
  source 1..75: mol_type = other DNA
gtgggacatatctgtgaacccgtaatggcgctgtggggattgcccggtgaagcggcaaccgtccttttagccgca

SEQ ID NO: 409644 - DNA, 75 bp, synthetic construct
  source 1..75: mol_type = other DNA
tggcgctgtggggattacccggtgaagcggcaaccgtccttttagccgcattaatgagtatgggcggcgcagtcg

SEQ ID NO: 409645 - DNA, 75 bp, synthetic construct
  source 1..75: mol_type = other DNA
tttttcctctaatgaggaagcagcaaaaatacttgatagcgaattcggcgataaattattaacagatcttgataa

SEQ ID NO: 409646 - DNA, 75 bp, synthetic construct
  source 1..75: mol_type = other DNA
cgacatatactgatacctcctggaatgaatctggcgagataagtgatatttctgagttacattactcgggatatg

SEQ ID NO: 409647 - DNA, 75 bp, synthetic construct
  source 1..75: mol_type = other DNA
cgacgcgcctcagaccgtcaacggagaatagcgagtggcaacagccagcagaaggtgtgagccgctatgtacttc

SEQ ID NO: 409648 - DNA, 75 bp, synthetic construct
  source 1..75: mol_type = other DNA
ataacaattttgcatggagttttggggcaggtgtccgctatgacgtaaccccggatatcgctctggacctcagct

SEQ ID NO: 409649 - DNA, 75 bp, synthetic construct
  source 1..75: mol_type = other DNA
tcctgtgagcattattccggtggtgcaacatgggatattcgaaagccgtatatagataaggtcttggttattaat

SEQ ID NO: 409650 - DNA, 75 bp, synthetic construct
  source 1..75: mol_type = other DNA
cgaaatgatgctgcttgacgcgaagttaatacctgttgatatcaagtttgagaaggaccttggatatccatgcgc

SEQ ID NO: 409651 - DNA, 75 bp, synthetic construct
  source 1..75: mol_type = other DNA
cgccggaggtcacagcggacatgcggaaggaacgactcaggccgcagtggcagatggcacaatcaccatccggga

SEQ ID NO: 409652 - DNA, 75 bp, synthetic construct
  source 1..75: mol_type = other DNA
ggcatcaataccgggatgctcgccaactttgccagagaaggtgctgaatgccatctggcgatccgcactgcgatc

SEQ ID NO: 409653 - DNA, 75 bp, synthetic construct
  source 1..75: mol_type = other DNA
ttgccatcaacaatacaaatggggcgacctttgcgctaaccaatggcaataacgatatcaatttcagagcctggc

SEQ ID NO: 409654 - DNA, 75 bp, synthetic construct
  source 1..75: mol_type = other DNA
cagacgaacagattatgacaggcctgtatatgtcaccatgacgggggcaacgggaaatcagatatataacgggga

SEQ ID NO: 409655 - DNA, 75 bp, synthetic construct
  source 1..75: mol_type = other DNA
ccagattgcttgagaaggaagatgtaaccaaagacgcgattaatgaatggattgattccctagaagtgtattccg

SEQ ID NO: 409656 - DNA, 75 bp, synthetic construct
  source 1..75: mol_type = other DNA
ccccgaaagaatcaaagtgccatttaatgcagtatgtcgggcttttcggtgatatttccaagatcgtgagtattg

SEQ ID NO: 409657 - DNA, 75 bp, synthetic construct
  source 1..75: mol_type = other DNA
gaatcagttcggagtttaactgttggttctatagcacatttagagactcatgactcttacgttaaagtcggtgaa

SEQ ID NO: 409658 - DNA, 75 bp, synthetic construct
  source 1..75: mol_type = other DNA
gcggtggcgtgggtgtcagtatcggtgccggtggtaacggtgccggtatcagcgtctttgccagcgttaatgcgg

SEQ ID NO: 409659 - DNA, 75 bp, synthetic construct
  source 1..75: mol_type = other DNA
gtccggcagcggctatgccagcatcagccaggacaaaattaaaagcaattacgattctgtccgggaacagagtgg

SEQ ID NO: 409660 - DNA, 75 bp, synthetic construct
  source 1..75: mol_type = other DNA
aaccaaagatgttattctggagtttatttccttattggcaatacgtacgcctgctcagcgagaacatttatcatc

SEQ ID NO: 409661 - DNA, 75 bp, synthetic construct
  source 1..75: mol_type = other DNA
agcgcctgaattaagtatgcaaaaagaagagttctttttgggtgaatttggtggggttaaaataaccgcgccggt

SEQ ID NO: 409662 - DNA, 75 bp, synthetic construct
  source 1..75: mol_type = other DNA
tgttgataccggcgcgctcggtggaatgtacgccaggcgtattcatctgacctccactgaaagtggtgtcggggt

SEQ ID NO: 409663 - DNA, 75 bp, synthetic construct
  source 1..75: mol_type = other DNA
gcagcatctggtagtagacagaacccatccactggattatgaggtgttctcggttcaggaagtggaagggctgga

SEQ ID NO: 409664 - DNA, 75 bp, synthetic construct
  source 1..75: mol_type = other DNA
accgcctgccagtttcgcagcagccaggatgtaacgctgtggccgctcgccatcgaagaggcgcgactgaccgcc

SEQ ID NO: 409665 - DNA, 75 bp, synthetic construct
  source 1..75: mol_type = other DNA
gctggaaaggaactgttggatggaatgcagccggtggtgcatttggtaactggctggatgggaaggatccattat

SEQ ID NO: 409666 - DNA, 75 bp, synthetic construct
  source 1..75: mol_type = other DNA
catcgttgtggttaattcaggtaagaaaggggcctggaatcaagcaatgaataagccggaaccgaataccattta

SEQ ID NO: 409667 - DNA, 75 bp, synthetic construct
  source 1..75: mol_type = other DNA
agcgtggctgccggcggcagttttacctttggttccatgaccggctcaggttacatcagcgccagccaggataag

SEQ ID NO: 409668 - DNA, 75 bp, synthetic construct
  source 1..75: mol_type = other DNA
gtattcagcgctatgcaaaccgcaaagcgccggaattaagtatgcaaaaagaagagttctttttgggtgaatatg

SEQ ID NO: 409669 - DNA, 75 bp, synthetic construct
  source 1..75: mol_type = other DNA
taaattcagccgcgaaatcaaattttatgacggcggacaacgggtttatcgtgcaaaggctgatgacgatatgat

SEQ ID NO: 409670 - DNA, 75 bp, synthetic construct
  source 1..75: mol_type = other DNA
aacgctattgtgttactcgatgaaattgttgagttgattgcagggcaggctaaattcagccgcgaaatcaaattt

SEQ ID NO: 409671 - DNA, 75 bp, synthetic construct
  source 1..75: mol_type = other DNA
atctggatcaccgtaccggcggccaggcgttgcgagatctgctgaacctgtttattcctgctcatgacagtccgc

SEQ ID NO: 409672 - DNA, 75 bp, synthetic construct
  source 1..75: mol_type = other DNA
gaccctggctggcattccggggcattttgacggcgcgctggatgtgaatctgaaacagcccgttatgtacgaagg

SEQ ID NO: 409673 - DNA, 75 bp, synthetic construct
  source 1..75: mol_type = other DNA
ggcgcagttgcatcccgatacggaagaaggcgatctggcaaaaggatttaccgtcccgcgcgacacggccttttt

SEQ ID NO: 409674 - DNA, 75 bp, synthetic construct
  source 1..75: mol_type = other DNA
taagcgcaatcgagtcaattgagccatggacagctgaacgaaaaacatcactttcttcagatgaacttgtacgca

SEQ ID NO: 409675 - DNA, 75 bp, synthetic construct
  source 1..75: mol_type = other DNA
atcgtggtggtgaaacccgcgtgttacgtccgggctacgtcaagccgaaacacgaatttaattaccagcaggcgg

SEQ ID NO: 409676 - DNA, 75 bp, synthetic construct
  source 1..75: mol_type = other DNA
ttgaaggaaaagtgctgcgtcatcgtggtggtgaaacccgcgtgttacgtccgggctacgtcaagccgaaacacg

SEQ ID NO: 409677 - DNA, 75 bp, synthetic construct
  source 1..75: mol_type = other DNA
tcgtcggcccgctatccgaaacactggctgacggtgggcgacccggcccgtgaattcaccatgacgcagtcctcg

SEQ ID NO: 409678 - DNA, 75 bp, synthetic construct
  source 1..75: mol_type = other DNA
cgaatataccatgacgcagtctgcgccgttgatggtgttgccggatccggatgcgtttgtggtggttcaggtgaa

SEQ ID NO: 409679 - DNA, 75 bp, synthetic construct
  source 1..75: mol_type = other DNA
atgaaaacggcgatgaacagcgttatctgccggaaggcacactgattctggggaatactcaggcagagggcgtcc

SEQ ID NO: 409680 - DNA, 75 bp, synthetic construct
  source 1..75: mol_type = other DNA
cggcaccatcaatatcgcgattatggacggcacggtctggcgtatgctgaacggttttaaactgttccgtgaaaa

SEQ ID NO: 409681 - DNA, 75 bp, synthetic construct
  source 1..75: mol_type = other DNA
gggtttgatatcgccgttgccgatatttatcgcgaaagcctcaatcctgaattttttccgccgtcaactacgctt

SEQ ID NO: 409682 - DNA, 75 bp, synthetic construct
  source 1..75: mol_type = other DNA
aatgtcagtgtttatcagcgtgcatggtatgagaccacgtctggtgttgatcggcgcggggcatgtcaaccgggc

SEQ ID NO: 409683 - DNA, 75 bp, synthetic construct
  source 1..75: mol_type = other DNA
cgcaaggttcagcttttcctgcgccaattgcgtgagaaaggcgtggctgaagaacatattgcccgtttacatgcg

SEQ ID NO: 409684 - DNA, 75 bp, synthetic construct
  source 1..75: mol_type = other DNA
tctgcccggagaagatcctgcacagctgaacgacccggcttatcgtcgtctgcgtatcatcaccgataatctgaa

SEQ ID NO: 409685 - DNA, 75 bp, synthetic construct
  source 1..75: mol_type = other DNA
tctgaaggaaataacattgagcaggccgacggtaaaaaatggtctgagcaggaccgtgatacgtttgatccgacg

SEQ ID NO: 409686 - DNA, 75 bp, synthetic construct
  source 1..75: mol_type = other DNA
cctcaaacaggaagagcacgccattgtccaggtggaagaaatgcaggcggtgaatgccgtgctgtatggcaaata

SEQ ID NO: 409687 - DNA, 75 bp, synthetic construct
  source 1..75: mol_type = other DNA
tggtgaaacccgcgtgttacgtcccggttatgtaaaaccaaaacaccgctttgattatcagcaggcagtggaacg

SEQ ID NO: 409688 - DNA, 75 bp, synthetic construct
  source 1..75: mol_type = other DNA
gattggttctgcgttttggggattaattgccggaggcgtttgttacgtggtgttgaatttaatcgctgacagaaa

SEQ ID NO: 409689 - DNA, 75 bp, synthetic construct
  source 1..75: mol_type = other DNA
gctatttgccaaagcccggaagcgcatccggataaagatcaacgttggctggccgctgccgttgcaggcattttc

SEQ ID NO: 409690 - DNA, 75 bp, synthetic construct
  source 1..75: mol_type = other DNA
tttggcgtgcccagcacaggtggtaacacttgtgtagctaactgtccataccaccatcttcccgaacgggccgaa

SEQ ID NO: 409691 - DNA, 75 bp, synthetic construct
  source 1..75: mol_type = other DNA
gcgtgctctattatgacgagaatttcagtgactattactatggcatttcagagagtgagtcccgtcgtagcggtc

SEQ ID NO: 409692 - DNA, 75 bp, synthetic construct
  source 1..75: mol_type = other DNA
ttcgtcagaccacgttaggttttattctgtcgcaaagtgaaaaaaatgaacttagcctgaccgcatcctggatgc

SEQ ID NO: 409693 - DNA, 75 bp, synthetic construct
  source 1..75: mol_type = other DNA
tctactgcgttgaaaggcgcgggtctgttaccacacatccgcgcgaccgtaaagttgccgatgattgttatgaag

SEQ ID NO: 409694 - DNA, 75 bp, synthetic construct
  source 1..75: mol_type = other DNA
tcacaactcgaaacggcagtgaaagacctgggggctgtggtgtctttcaaagggtattacggtgatctggccatt

SEQ ID NO: 409695 - DNA, 75 bp, synthetic construct
  source 1..75: mol_type = other DNA
tgcgtattctgacggacaacctgaaacaggaagagcaggcgattgtgcaggtggaagaaatgcaggcggtcagtg

SEQ ID NO: 409696 - DNA, 75 bp, synthetic construct
  source 1..75: mol_type = other DNA
cagcagcggatatggacgtgattgaaatcagcagctgggaagacgtcacggtgatgttctacggcgacaacggcc

SEQ ID NO: 409697 - DNA, 75 bp, synthetic construct
  source 1..75: mol_type = other DNA
gacacgttcgatcctacacatgatattgacctctactgcgaccaggccagcggtcttgtgaatattgccattatg

SEQ ID NO: 409698 - DNA, 75 bp, synthetic construct
  source 1..75: mol_type = other DNA
tactgtctggcgtctgctgaatggttttaagctgttccgcgaaaaactggatacccgtcgcggctcaaattcaca

SEQ ID NO: 409699 - DNA, 75 bp, synthetic construct
  source 1..75: mol_type = other DNA
gctgcggctattctggcagtgattgctgcctgtatcagtggtttacgtatcactcagccacgatccagggcataa

SEQ ID NO: 409700 - DNA, 75 bp, synthetic construct
  source 1..75: mol_type = other DNA
acgtagcggtggagccagtggcatgttaggaacggctcgtctactgggtcagagtagcggcgctggtggcgctga

SEQ ID NO: 409701 - DNA, 75 bp, synthetic construct
  source 1..75: mol_type = other DNA
gaacaattaaagacagaggggattttaagaagagttaatagaatgggggggttatatattacagactctctaaaa

SEQ ID NO: 409702 - DNA, 75 bp, synthetic construct
  source 1..75: mol_type = other DNA
agcgaaattctgattatcggcagattgttaactctatgcgtccagacaacgattacactcacaccgtagccgata

SEQ ID NO: 409703 - DNA, 75 bp, synthetic construct
  source 1..75: mol_type = other DNA
acgaacattcaaaccaagggcaaaccaaggtttacacgggcaagatgaaagtttctgatttacttccagttgttg

SEQ ID NO: 409704 - DNA, 75 bp, synthetic construct
  source 1..75: mol_type = other DNA
aattgaggctgttctgggggctgaaacactagttacgagcattacccgtcgtgatattaaaaatttgcttgaagt

SEQ ID NO: 409705 - DNA, 75 bp, synthetic construct
  source 1..75: mol_type = other DNA
ttttgattgccgccggaattggtctggtggtgcaaaacacgctgatggtgcgcatcacccagagctcctctacca

SEQ ID NO: 409706 - DNA, 75 bp, synthetic construct
  source 1..75: mol_type = other DNA
atgccacgttttacacctggcgtaagaagtatggcggtatggaggtgcctgaagttaagcgcctgaagtcgcttg

SEQ ID NO: 409707 - DNA, 75 bp, synthetic construct
  source 1..75: mol_type = other DNA
cttctgaaattcagcgtcaacgtggaaaaaaaagctctggtggtggaaggccgaaagttagagatggagaatgga

SEQ ID NO: 409708 - DNA, 75 bp, synthetic construct
  source 1..75: mol_type = other DNA
tactcagattaaaacaaataagtgggttaacagaactatttgaagaagaaaactttagtccggcatggactataa

SEQ ID NO: 409709 - DNA, 75 bp, synthetic construct
  source 1..75: mol_type = other DNA
gaggttaagcggcttaaatctcttgaagaggagaacgcccgcctcaagaagctacttgccgaagccatgctggat

SEQ ID NO: 409710 - DNA, 75 bp, synthetic construct
  source 1..75: mol_type = other DNA
agatcatcagtattctccgcgaggcagaagccggggtttcggcccgggaactctgccgcaagcatgccatttcag

SEQ ID NO: 409711 - DNA, 75 bp, synthetic construct
  source 1..75: mol_type = other DNA
cgatatcaaacatttgctcgaagtggtggagggtctaccccgtcagaacatgaagccatacaacaagatgacggt

SEQ ID NO: 409712 - DNA, 75 bp, synthetic construct
  source 1..75: mol_type = other DNA
taccggaaattgacgggaagccagcgcgaacgcaaaaatattcaggcgttgtttgagcgtgcctgtatccacaaa

SEQ ID NO: 409713 - DNA, 75 bp, synthetic construct
  source 1..75: mol_type = other DNA
gaaagtagatactaaccttctatcatacgataccttaataaaagcgtggcctttatgggagtataaaaaattaca

SEQ ID NO: 409714 - DNA, 75 bp, synthetic construct
  source 1..75: mol_type = other DNA
tgatttacgtcgtaaaagaatgtctgtatatattgtgctttctccaacaggcatggaaaagtataagcagttaat

SEQ ID NO: 409715 - DNA, 75 bp, synthetic construct
  source 1..75: mol_type = other DNA
ataaaccttgccggaccgctgcagggaagaattaaccggcatcgggacagcatgatccggctgatcgcacagcac

SEQ ID NO: 409716 - DNA, 75 bp, synthetic construct
  source 1..75: mol_type = other DNA
gtctgcgagaaatgtcacttccatctcccgatctatacaccggaagtgctgacgctatgcccgaaatgtggtcat

SEQ ID NO: 409717 - DNA, 75 bp, synthetic construct
  source 1..75: mol_type = other DNA
tctgtcagtcgtatcaagacgctgagcaacaggaatactgtgaagcagaatctgatgctgttaatcctgatttaa

SEQ ID NO: 409718 - DNA, 75 bp, synthetic construct
  source 1..75: mol_type = other DNA
ctaaggggcgttataaaggtcaatatctgaaatttgcagggcaacaatttttaggtttaggagcgccgacgcgaa

SEQ ID NO: 409719 - DNA, 75 bp, synthetic construct
  source 1..75: mol_type = other DNA
aaaacatgtaatgcaaaaaattaacaagggcaagaaaacaaaagtggcaattaatgaagttgtcattatggagca

SEQ ID NO: 409720 - DNA, 75 bp, synthetic construct
  source 1..75: mol_type = other DNA
cgtctggatgctgatagccagcgacactacattatgatccaagacagtaaaactgatgctggaatacgacaggtt

SEQ ID NO: 409721 - DNA, 75 bp, synthetic construct
  source 1..75: mol_type = other DNA
gttctaaagcaaagcgtatcggtgaaattaaagatttatcaaaaattctctttcccgatgagggcggcgataatg

SEQ ID NO: 409722 - DNA, 75 bp, synthetic construct
  source 1..75: mol_type = other DNA
gcagttcaaattaagtgattattacattggtctgagcgctgatgaacaaaaggcgttcaatgagaagtttttaaa

SEQ ID NO: 409723 - DNA, 75 bp, synthetic construct
  source 1..75: mol_type = other DNA
gtatacctggtgctttcagctacgggtatggataagtacaaaaccctgattaaccttttctttagccagttggtc

SEQ ID NO: 409724 - DNA, 75 bp, synthetic construct
  source 1..75: mol_type = other DNA
aaccccggtacgcaccgctcctgatggaaaaatgaagccgctgcgctacgccgccgccgtggagaacgcgctacg

SEQ ID NO: 409725 - DNA, 75 bp, synthetic construct
  source 1..75: mol_type = other DNA
cggttgcctcctggaatcagtatgctgatgccaataatctcacaccggaacagaagcaggcaggattggataaac

SEQ ID NO: 409726 - DNA, 75 bp, synthetic construct
  source 1..75: mol_type = other DNA
aagagcaggaaaagttcggtactggtagtgatatccagcgtggcattcaggcggcaacggccgcgcttcagggcc

SEQ ID NO: 409727 - DNA, 75 bp, synthetic construct
  source 1..75: mol_type = other DNA
tcatgcgggactcgatgccggcacgctgaataacagtggctccgttcagggggcttccctgacgctcggcagtac

SEQ ID NO: 409728 - DNA, 75 bp, synthetic construct
  source 1..75: mol_type = other DNA
ctggttaaaagacggctgggacccgaaatttaatccaacacttcaaaaatataccgatattaaaggagaattggg

SEQ ID NO: 409729 - DNA, 75 bp, synthetic construct
  source 1..75: mol_type = other DNA
gctgaagaaaggggatgtggctgaggcttcgaagctgattcataaggcaagtgatgagataagctcagcgaggta

SEQ ID NO: 409730 - DNA, 75 bp, synthetic construct
  source 1..75: mol_type = other DNA
ctgtatttagcgatggcgctaatattaagtcccaatctggaactgctctcggggcatacgcaggtggatatgtgg

SEQ ID NO: 409731 - DNA, 75 bp, synthetic construct
  source 1..75: mol_type = other DNA
gtgaagtcctggagcggtactgccggtggtggttttgaggcatgggccgttccgactgaaaagggagccacccgg

SEQ ID NO: 409732 - DNA, 75 bp, synthetic construct
  source 1..75: mol_type = other DNA
ttaccaatggcgccacattgcagggcaacggtatcacgctgaatgctgcaggcaggctgaccaacaatggccagt

SEQ ID NO: 409733 - DNA, 75 bp, synthetic construct
  source 1..75: mol_type = other DNA
gtggcgaagcttgccggtaatggcactgtgatggcggcgaatcaggcaacgctcacaggtaacagtctgaccaac

SEQ ID NO: 409734 - DNA, 75 bp, synthetic construct
  source 1..75: mol_type = other DNA
gatggtgttagtttcacttttggttttggcccaagttggggttggagtgcaactgaaattaaaggcgttgacgtt

SEQ ID NO: 409735 - DNA, 75 bp, synthetic construct
  source 1..75: mol_type = other DNA
gcgctgaaagtcgcgcaggataaatacggacctcttcaggcggatgcgacggaagaacagcgacaggcatatctg

SEQ ID NO: 409736 - DNA, 75 bp, synthetic construct
  source 1..75: mol_type = other DNA
acgcttaaaaacagtaaaaatccggcagagcgtgaaaaggcacagcagaaatatgatgcattgcttgaaaaagat

SEQ ID NO: 409737 - DNA, 75 bp, synthetic construct
  source 1..75: mol_type = other DNA
atgagctctatctccctgatccaaccggatcgcgacctgttctcttggccgcagtactgggccgcctgttttgga

SEQ ID NO: 409738 - DNA, 75 bp, synthetic construct
  source 1..75: mol_type = other DNA
gaactggaagagctggtgggctatgccgaccgggtgattatcatgcgcgatcgcaaacaggtggcggagatcccg

SEQ ID NO: 409739 - DNA, 75 bp, synthetic construct
  source 1..75: mol_type = other DNA
tctgataccgtgcgccgttccgtgctggtggattccaaagccgacatgctgatgttcggtaacggtgagcgtccg

SEQ ID NO: 409740 - DNA, 75 bp, synthetic construct
  source 1..75: mol_type = other DNA
catacgccgatggcgacccagcgtcagactcctgctacggcaaaaaaagcgccgtctatgcaatctcgtccggtg

SEQ ID NO: 409741 - DNA, 75 bp, synthetic construct
  source 1..75: mol_type = other DNA
tgcgcatgagctggttgaacggctcggtaatgaccctgaagtatggctcaaagaatactggcgcctgacggctta

SEQ ID NO: 409742 - DNA, 75 bp, synthetic construct
  source 1..75: mol_type = other DNA
ctcgttccacaattttatgcgtggcaagcctgataataacccctgggggccagcgcttaccatgttccgcacgat

SEQ ID NO: 409743 - DNA, 75 bp, synthetic construct
  source 1..75: mol_type = other DNA
cagccacacgttaatgcaatcaaaaatggctttattcgcttaatgccgttaacccttgcgggggccatgttctga

SEQ ID NO: 409744 - DNA, 75 bp, synthetic construct
  source 1..75: mol_type = other DNA
ccgcgatgtgcgtaataccgcgattatcgtgaaagaggcgctgcctggctggagcggtgtggattccacccgtct

SEQ ID NO: 409745 - DNA, 75 bp, synthetic construct
  source 1..75: mol_type = other DNA
agacacctgctacggcaaaaaaagcgtcgtctacgccatctcgcccggtgaatgctggcgcgaagaaacgcccta

SEQ ID NO: 409746 - DNA, 75 bp, synthetic construct
  source 1..75: mol_type = other DNA
ccgcgatgtgcgtaataccgcgattatcgtaaaagaggcgttgccaggctggagcggtgtggattctactcgtct

SEQ ID NO: 409747 - DNA, 75 bp, synthetic construct
  source 1..75: mol_type = other DNA
acaggcgtgatttccgatctcggcgggccaactgccaacatgtatatgttgcgctgcaaatcgccacgcgccgag

SEQ ID NO: 409748 - DNA, 75 bp, synthetic construct
  source 1..75: mol_type = other DNA
agacacctgccacggcaaaaaaagtgccgtctatgcaatctcgtccggtgaatgctggtgcgaagaaacgcccta

SEQ ID NO: 409749 - DNA, 75 bp, synthetic construct
  source 1..75: mol_type = other DNA
gccgttaccgtgcagccgccgcgcccgaaaccgtgggaaaaaacctacgtgttgttgccttcattcgagaaagtg

SEQ ID NO: 409750 - DNA, 75 bp, synthetic construct
  source 1..75: mol_type = other DNA
cacatctgattcagcctaccttgattactgaatatccggcagaagtctccccgctggcccgccgtaatgaggtta

SEQ ID NO: 409751 - DNA, 75 bp, synthetic construct
  source 1..75: mol_type = other DNA
cacatctgattcagcctaccttcattactgaatatccggcagaagtgtccccgctggcccgccgtaatgaggtta

SEQ ID NO: 409752 - DNA, 75 bp, synthetic construct
  source 1..75: mol_type = other DNA
cacatctgattcagcctaccttcattactgaatatccggcagaagtctcgccgctggcccgccgtaatgaggtta

SEQ ID NO: 409753 - DNA, 75 bp, synthetic construct
  source 1..75: mol_type = other DNA
aacgcaaaattacaaagcgagaatgcatacatccgcaaccggtacaaagaactggacctattaatcgggaaaaac

SEQ ID NO: 409754 - DNA, 75 bp, synthetic construct
  source 1..75: mol_type = other DNA
ccagcaatacataaaacgccgcgatcaggagaacgaggatattgcgctaacggtagggaaactgcgtgttgagct

SEQ ID NO: 409755 - DNA, 75 bp, synthetic construct
  source 1..75: mol_type = other DNA
atgagcaaaattaactatcaggcactgcgtgaggcggcagagcaggcaatgcatgactactgggggtttgatgcg

SEQ ID NO: 409756 - DNA, 75 bp, synthetic construct
  source 1..75: mol_type = other DNA
tggcttaccgccaactgcgggtctggggattggtatcgatcgtatggtgatgctgttcaccaacagccacaccat

SEQ ID NO: 409757 - DNA, 75 bp, synthetic construct
  source 1..75: mol_type = other DNA
gcgtgcgcgttttaaactgccagcctggccgaccaccacgattggctctttcccgcaaaccacagaaatccgtac

SEQ ID NO: 409758 - DNA, 75 bp, synthetic construct
  source 1..75: mol_type = other DNA
atcagaacaaagatggttcggtagatatcgacaccctgttccgtattggtcgtggacgtgcgccaactggcgaac

SEQ ID NO: 409759 - DNA, 75 bp, synthetic construct
  source 1..75: mol_type = other DNA
ttaaagtgcgctcgcagatcctttctggcatccgccagttcatggtaaatcgcggctttatggaagttgaaacgc

SEQ ID NO: 409760 - DNA, 75 bp, synthetic construct
  source 1..75: mol_type = other DNA
cgttaccgagatcttcgaagaagtggcagaagcacatctgattcagccgaccttcattactgaatatccggcaga

SEQ ID NO: 409761 - DNA, 75 bp, synthetic construct
  source 1..75: mol_type = other DNA
ggttttgaacgcgtgttcgaaatcaaccgtaacttccgtaacgaaggtatctccgtgcgccataacccagagttc

SEQ ID NO: 409762 - DNA, 75 bp, synthetic construct
  source 1..75: mol_type = other DNA
aagcttatggcgcttcacaagtggttttgggaacaaagtgaagccgagcgcgccgctggcatcaaggaggagtct

SEQ ID NO: 409763 - DNA, 75 bp, synthetic construct
  source 1..75: mol_type = other DNA
ggtcggtaagctgtttgcgccgatcatgctgacctggtttttgattctggcaggactggggttacgtagcattat

SEQ ID NO: 409764 - DNA, 75 bp, synthetic construct
  source 1..75: mol_type = other DNA
accgcggtgtatatgtcgcgtgcaatcaacgtcattccctttgcgctgatgcataacctgaaacataacaaggta

SEQ ID NO: 409765 - DNA, 75 bp, synthetic construct
  source 1..75: mol_type = other DNA
caatacgtcggcgcgaacgacctcaattctggtgattatggggctaataggcggcagctttttctatggtgaagt

SEQ ID NO: 409766 - DNA, 75 bp, synthetic construct
  source 1..75: mol_type = other DNA
cgattgacgaaaagctcatggagcttcacaagtggttttgggaacaaagtgaagccgagcgcgccgctggcattc

SEQ ID NO: 409767 - DNA, 75 bp, synthetic construct
  source 1..75: mol_type = other DNA
gcgggaaacgccaaacgtggaagaagtcttccaccgttgtggcctggaaggtttaagttgccggatgatggaaac

SEQ ID NO: 409768 - DNA, 75 bp, synthetic construct
  source 1..75: mol_type = other DNA
cagggcaaatctacattccgtttgtgaactggatgctctatgtcgcagttgtgattgtgattgttagctttgagc

SEQ ID NO: 409769 - DNA, 75 bp, synthetic construct
  source 1..75: mol_type = other DNA
aatgtgtgttactaccgacaaaaggcaatatttaaaatcggtctgaaaaaccggaatgatattgcatggattatg

SEQ ID NO: 409770 - DNA, 75 bp, synthetic construct
  source 1..75: mol_type = other DNA
gcaaatatgcaccgattgacgaaaagcttatggagcttcacaagtggttttgggaacaaagtgaagccgagcgcg

SEQ ID NO: 409771 - DNA, 75 bp, synthetic construct
  source 1..75: mol_type = other DNA
agagaagcgcaacgcaaaattacaaagcgagaatgcatacatccgcaaccggtacaaagaactggacctattaat

SEQ ID NO: 409772 - DNA, 75 bp, synthetic construct
  source 1..75: mol_type = other DNA
aacaggaacttaaagattacggtgtggatattgatgcgctcaacgccttcaaatttctgaccggaccagaaaccg

SEQ ID NO: 409773 - DNA, 75 bp, synthetic construct
  source 1..75: mol_type = other DNA
cgcaaatatgcaccgattgacgaaaagcttatggagcttcacaagtggttttgggaacaaagtaaagccgagcgc

SEQ ID NO: 409774 - DNA, 75 bp, synthetic construct
  source 1..75: mol_type = other DNA
gctccgattcaggcgcgtcgtcactctactcgtgttcataatccggcagtagaaaagcgtctggcggcgatcacc

SEQ ID NO: 409775 - DNA, 75 bp, synthetic construct
  source 1..75: mol_type = other DNA
acgctggcgtggatacttgaaaaacttggtgtccttccggatgaagcggaaagggcgcgcaagaaaatcgaagac

SEQ ID NO: 409776 - DNA, 75 bp, synthetic construct
  source 1..75: mol_type = other DNA
atgaaatatgcaggtccggtggcgggtaagctgggaatatcgctggagcaggccgcagcgatggcgggcgtgctg

SEQ ID NO: 409777 - DNA, 75 bp, synthetic construct
  source 1..75: mol_type = other DNA
ggccgataatcttgatggggacctgaaaaatctcgacagcgcatgggaaggtcttcgtattcgcatcagtgatct

SEQ ID NO: 409778 - DNA, 75 bp, synthetic construct
  source 1..75: mol_type = other DNA
gggaagctggccacgttgcgtcttggtttttctctcctgaccggatcaatgaatgctgtcagggttctgcctgca

SEQ ID NO: 409779 - DNA, 75 bp, synthetic construct
  source 1..75: mol_type = other DNA
ctgatagcaggcggtgcgctgctggcaatgactgcaacggttggctcgttgtcgctggttattggagtgcttcac

SEQ ID NO: 409780 - DNA, 75 bp, synthetic construct
  source 1..75: mol_type = other DNA
taacgttcttggtggcgcgttacagcttgttctgacgcctgcaaaaatgttgctggatacgctggcgtggatact

SEQ ID NO: 409781 - DNA, 75 bp, synthetic construct
  source 1..75: mol_type = other DNA
cgagcacgaagggcgcattattcagagccgttccgaagattcgattattaatgagatcgaagcgatccgcgacac

SEQ ID NO: 409782 - DNA, 75 bp, synthetic construct
  source 1..75: mol_type = other DNA
attcgatcattaatgagatcgaagcgatccgcgacaccgttccaggttttacgggcgtaatttccgatctcggtg

SEQ ID NO: 409783 - DNA, 75 bp, synthetic construct
  source 1..75: mol_type = other DNA
gtgaagaactgctggattaccgcaactatctggaaatggaagttgaggttaaccgtggttccgatggctggctgc

SEQ ID NO: 409784 - DNA, 75 bp, synthetic construct
  source 1..75: mol_type = other DNA
tgaagaactcccgtgacggcaaccctcgaaaatggcgattcgatgcaacaaacagtgaactatgtgccgaacgtc

SEQ ID NO: 409785 - DNA, 75 bp, synthetic construct
  source 1..75: mol_type = other DNA
atgtcaacatgggtcactataacggaagcagttgagatcactaccaaagccataaaacaaaaaattactcctagc

SEQ ID NO: 409786 - DNA, 75 bp, synthetic construct
  source 1..75: mol_type = other DNA
tgcccgaattccggcttacgaaatgatccgtttctcggtcaacattatgcgtggctgctttggcggctgctcttt

SEQ ID NO: 409787 - DNA, 75 bp, synthetic construct
  source 1..75: mol_type = other DNA
ggtgtgggtattctacaacctgattgttcttggcggcgcagttgcggtatcggtagaaagcaaacaggtacgccg

SEQ ID NO: 409788 - DNA, 75 bp, synthetic construct
  source 1..75: mol_type = other DNA
tgcgcgatgcgctgaacagtggtgatacggcagctctggcagagtggagcgctccgattcaggcgcgtcgtcact

SEQ ID NO: 409789 - DNA, 75 bp, synthetic construct
  source 1..75: mol_type = other DNA
ttgctgcgctggggggtggattgcatctgtaccgatgcgattgacgtgattggtccgaactttacggcccaatag

SEQ ID NO: 409790 - DNA, 75 bp, synthetic construct
  source 1..75: mol_type = other DNA
atgagtggcgcgacgactggcgcgaactgaccgcgcggctgggctgcgtctctattcatctcaatcataagttac

SEQ ID NO: 409791 - DNA, 75 bp, synthetic construct
  source 1..75: mol_type = other DNA
tggtcgtaacgtctggcgcgccgatcttaccgagaaatatgcgcaaattaaggacattgtcggcaaacgtgattt

SEQ ID NO: 409792 - DNA, 75 bp, synthetic construct
  source 1..75: mol_type = other DNA
aattggcatcatccagattgatgaaccggcgctgcgcgaaggtttaccgctgcgtcgtagcgactgggatgcata

SEQ ID NO: 409793 - DNA, 75 bp, synthetic construct
  source 1..75: mol_type = other DNA
agaaaagcgtctggcggcgatcaccgcccaggacagccagcgtgcgaatgtctatgaagtgcgtgctgaagccca

SEQ ID NO: 409794 - DNA, 75 bp, synthetic construct
  source 1..75: mol_type = other DNA
gatccggtcagtctggtgtgcggcttaattctgttgttcgccgaaacctacgcatggattgtgctggtgctcggc

SEQ ID NO: 409795 - DNA, 75 bp, synthetic construct
  source 1..75: mol_type = other DNA
acggtcaggcgcagattctggaagggcagaaagtgaatctgctgcttaaacgcggtcagcaggaatacgtcttcc

SEQ ID NO: 409796 - DNA, 75 bp, synthetic construct
  source 1..75: mol_type = other DNA
ttgatgagaaaaaagaactcggtcatctgagtgctggagcccggcgttttattcttggtattatcgtcaccttct

SEQ ID NO: 409797 - DNA, 75 bp, synthetic construct
  source 1..75: mol_type = other DNA
tcgtcgcccatcgtggcggcggtaaactggccccggaaaacaccctggcggcaatcgatgtgggggcaagatacg

SEQ ID NO: 409798 - DNA, 75 bp, synthetic construct
  source 1..75: mol_type = other DNA
gcggaacgctgtcgcgaacacgggatgatggcgaatatcgaaatcaaacccaccactggcaccgggtcgttgacg

SEQ ID NO: 409799 - DNA, 75 bp, synthetic construct
  source 1..75: mol_type = other DNA
atgaaaggaactgattttattgggattgtttacgacccgccagttactcggttataccgacaaaaagtgaaattt

SEQ ID NO: 409800 - DNA, 75 bp, synthetic construct
  source 1..75: mol_type = other DNA
attagtaacagccgagttattcaatgcgcaaccatgtcagccgacaaaaaaagatttcttctctatttgcaataa

SEQ ID NO: 409801 - DNA, 75 bp, synthetic construct
  source 1..75: mol_type = other DNA
ttaatggcggcaaatacagcgacgaatggcacccgaacggttcaggctggtttgcccaaaacctgtacctcgatg

SEQ ID NO: 409802 - DNA, 75 bp, synthetic construct
  source 1..75: mol_type = other DNA
tcttccgggggaagatccggcccgtcttaatgacccggcctaccgtcgcctgcgtattctgactgacaacctgaa

SEQ ID NO: 409803 - DNA, 75 bp, synthetic construct
  source 1..75: mol_type = other DNA
atgggattgtttacgacccgccagttgctcggttataccgaacaaaaagttaaatttcgtgcgctgtttctggaa

SEQ ID NO: 409804 - DNA, 75 bp, synthetic construct
  source 1..75: mol_type = other DNA
tgaagttggtaagcagcagcgggcaatcaataattggttacatttcaaagtttaaccagaaagaaaatgtaattt

SEQ ID NO: 409805 - DNA, 75 bp, synthetic construct
  source 1..75: mol_type = other DNA
gaacttgcctacaaaacgtattttgcaggcgcatgaatgggcggaatgcactgcaatagacgtcacgatcgccgg

SEQ ID NO: 409806 - DNA, 75 bp, synthetic construct
  source 1..75: mol_type = other DNA
taaacaatgctttgaattgcgtgtgagttctgttattcagaaccatcctgaacaagtagaacaactcaagcatga

SEQ ID NO: 409807 - DNA, 75 bp, synthetic construct
  source 1..75: mol_type = other DNA
gcctgagcgtggatgtgactgccacctgtaccaccgctggtgagcctggtaatgactggcaaccggcgcagatta

SEQ ID NO: 409808 - DNA, 75 bp, synthetic construct
  source 1..75: mol_type = other DNA
actgagggtagtggcagaaaacgaatgggcaaactgtacggcgatcacacttaacatgagtggagtgtctgatga

SEQ ID NO: 409809 - DNA, 75 bp, synthetic construct
  source 1..75: mol_type = other DNA
aagagagcgatgacgcactacgccagcggatccaactggcgccggaaagtttcagcaatgcgggcagctatggtg

SEQ ID NO: 409810 - DNA, 75 bp, synthetic construct
  source 1..75: mol_type = other DNA
cgtattttgcaggcgcatgagtgggcggaatgcaccgcaatagacgtcacgattgccggagtcagcgatggataa

SEQ ID NO: 409811 - DNA, 75 bp, synthetic construct
  source 1..75: mol_type = other DNA
taatgcttgtcaagttggaatgattagacctaatggcaaccatatgcagatcatgtttgactgggttagcagaat

SEQ ID NO: 409812 - DNA, 75 bp, synthetic construct
  source 1..75: mol_type = other DNA
gggaatacggcggcagaggggattcgttgctatggtgccattcaggatgcacaggcgttgtccgaaggtgtggtg

SEQ ID NO: 409813 - DNA, 75 bp, synthetic construct
  source 1..75: mol_type = other DNA
gcacgccattgtccaggtggaagaaatgcaggcggtgaatgccgtgctgtatggcaaatacaccatggaagggga

SEQ ID NO: 409814 - DNA, 75 bp, synthetic construct
  source 1..75: mol_type = other DNA
aagtgattgcctggattggcgagcatgaaattaaagcgccgttgacggggatggtgcgtggtttacttaacgacg

SEQ ID NO: 409815 - DNA, 75 bp, synthetic construct
  source 1..75: mol_type = other DNA
cggtgtgctggaggcgttaatgatgctgatgcatcagggcgttaaagcaacaaaagaagtactggaagtggctta

SEQ ID NO: 409816 - DNA, 75 bp, synthetic construct
  source 1..75: mol_type = other DNA
cggctccacctctgaatttacaccgggatatgtcaagccgaagcatgaggtgaatccgcagatgaccctgcgtcg

SEQ ID NO: 409817 - DNA, 75 bp, synthetic construct
  source 1..75: mol_type = other DNA
aaggtgagtgtgtcgtcactaactcgcggacggcggaaatgtgtaagctcaccgaaaacagcttccgcgatgtga

SEQ ID NO: 409818 - DNA, 75 bp, synthetic construct
  source 1..75: mol_type = other DNA
gaagtcgattttggccgatcgacgaagaataacatcatacagggtagcggtaaggagtggtcaaaacaggatcgt

SEQ ID NO: 409819 - DNA, 75 bp, synthetic construct
  source 1..75: mol_type = other DNA
tgaattcaccatgacgcagtccgcgccgttgatggtgctgccggatccggatgagtttgtggtggtgcaggtgaa

SEQ ID NO: 409820 - DNA, 75 bp, synthetic construct
  source 1..75: mol_type = other DNA
tgtcgctgatttgtgccgatcaggggattaacgtctgggaactgattcgcctggcgaatcgtcaccctcgcgtta

SEQ ID NO: 409821 - DNA, 75 bp, synthetic construct
  source 1..75: mol_type = other DNA
tcggactgggttacattgggctgcctacagcagctgcgtttgcctcacggcaaaaacaggtgattggtgtcgata

SEQ ID NO: 409822 - DNA, 75 bp, synthetic construct
  source 1..75: mol_type = other DNA
ctgttgatccgtggtttatcgtggcacagaacccccagcaggcgcggcttatccgtaccgcgcgcgaagtgaacg

SEQ ID NO: 409823 - DNA, 75 bp, synthetic construct
  source 1..75: mol_type = other DNA
cagccaggcgattatcgacgtggccatcctcggcccggatgaggggctggatgaaggttgcgtggagatttaccc

SEQ ID NO: 409824 - DNA, 75 bp, synthetic construct
  source 1..75: mol_type = other DNA
acacctttcctaatgaacatccggaagcctttattttggttacgtcagcggaaaaatttattgtagatggcaaca

SEQ ID NO: 409825 - DNA, 75 bp, synthetic construct
  source 1..75: mol_type = other DNA
tggggttcacgtctgtacaggctgtttagcgacggtgttatatggtgcctacccgaagtggtatgctgctgttgt

SEQ ID NO: 409826 - DNA, 75 bp, synthetic construct
  source 1..75: mol_type = other DNA
tttgttgttggcttttggtctgtctattattattggtatgtcaacaggcatggccggggctactatcagcctccc

SEQ ID NO: 409827 - DNA, 75 bp, synthetic construct
  source 1..75: mol_type = other DNA
cgatcttctgaaggggcgaatacctataacgagccaggccgggcttactatgccggagttaccgcatcattctga

SEQ ID NO: 409828 - DNA, 75 bp, synthetic construct
  source 1..75: mol_type = other DNA
cgatccggaaatcagcgtcaataaagaaattggactggagttcacctgggaagattaccacgcaagtgtgaccta

SEQ ID NO: 409829 - DNA, 75 bp, synthetic construct
  source 1..75: mol_type = other DNA
ggcaaaccgcttcaggcgcatatatcctcaagtggcagaatggcgggaaagctctggtggacggtatcgaagcca

SEQ ID NO: 409830 - DNA, 75 bp, synthetic construct
  source 1..75: mol_type = other DNA
tatgcaccgattgacgaaaagcttatggcgcttcacaagtggttttgggaacaaagtgaagccgagcgcgccgcc

SEQ ID NO: 409831 - DNA, 75 bp, synthetic construct
  source 1..75: mol_type = other DNA
ttatcgaatggcaatcgactggcgacgctaaaagcggactggcatggatttataacacactgtttggcccaggcg

SEQ ID NO: 409832 - DNA, 75 bp, synthetic construct
  source 1..75: mol_type = other DNA
atactgatcggaatgtctacaggtatggcgggggctactatcagtctgccaataattttttctgtagcttttata

SEQ ID NO: 409833 - DNA, 75 bp, synthetic construct
  source 1..75: mol_type = other DNA
aatgcactgattgctgcattgcagaaaggcgaaattcacgccgccgggctggatgtcttcgaacaagagccactg

SEQ ID NO: 409834 - DNA, 75 bp, synthetic construct
  source 1..75: mol_type = other DNA
tcggcgtcgagtatcaacatacctttaaggcgattaatcaacgtaacggagagcgcaacaatgcgtttctcacca

SEQ ID NO: 409835 - DNA, 75 bp, synthetic construct
  source 1..75: mol_type = other DNA
ggtattggtatcgaccgaatgatcatgttgtttactaacagccatacgatccgcgacgttattcttttcccggct

SEQ ID NO: 409836 - DNA, 75 bp, synthetic construct
  source 1..75: mol_type = other DNA
tgattcagcctaccttgattacggaatatccggcagaagtgtccccgctggcgcgtcgtaatgatgttaacccgg

SEQ ID NO: 409837 - DNA, 75 bp, synthetic construct
  source 1..75: mol_type = other DNA
tgattcagcctaccttgattacggaatatccggcagaagtctccccgctggcgcgccgtaaggatgttaacccgg

SEQ ID NO: 409838 - DNA, 75 bp, synthetic construct
  source 1..75: mol_type = other DNA
agttggcagcatcacccgttgagcgcatttcctttctttatggcgcttgaagcacaatctattttctggatagtt

SEQ ID NO: 409839 - DNA, 75 bp, synthetic construct
  source 1..75: mol_type = other DNA
atatttttgacacaagtattgcatcattgaatgttggtgattacattattatggatgctgtgaccaaacagttat

SEQ ID NO: 409840 - DNA, 75 bp, synthetic construct
  source 1..75: mol_type = other DNA
cgatgatgcaggtaattccaggtggggcatctgctcgcccgtttattacccatcataatgctctggatttggata

SEQ ID NO: 409841 - DNA, 75 bp, synthetic construct
  source 1..75: mol_type = other DNA
gtttatgaatcgggtgcgctggaatgtttactggagaaatataaacccgcacatcagatttataaatttgtttac

SEQ ID NO: 409842 - DNA, 75 bp, synthetic construct
  source 1..75: mol_type = other DNA
gtcgccaaacaacattccatttcaaaaaatcagcttattgttgatgtcttagaacgtgagttttcagcccagatg

SEQ ID NO: 409843 - DNA, 75 bp, synthetic construct
  source 1..75: mol_type = other DNA
attgaagcattgttccgtgaaggtgaaagcgcgctggatgagtggattgcggattgtgaagaggactgtattgct

SEQ ID NO: 409844 - DNA, 75 bp, synthetic construct
  source 1..75: mol_type = other DNA
tgattcagcctaccttgattacggaatatccggcagaagtttccccgctggcgcgtcgtaaagatgttaacccgg

SEQ ID NO: 409845 - DNA, 75 bp, synthetic construct
  source 1..75: mol_type = other DNA
tgattcagcctaccttgattacggaatatccggcagaagtatccccgctggcgcgacgtaacgatgttaacccgg

SEQ ID NO: 409846 - DNA, 75 bp, synthetic construct
  source 1..75: mol_type = other DNA
agcataagttcccgccagtagcgaatgatgatgtttatatgggtgtgctggcacaggcagagaattttaaagaac

SEQ ID NO: 409847 - DNA, 75 bp, synthetic construct
  source 1..75: mol_type = other DNA
tttgacgtcgataaattcaaaaacattaacgataccttcggtcatttgctgggcgatgaggtgttgataaaagtg

SEQ ID NO: 409848 - DNA, 75 bp, synthetic construct
  source 1..75: mol_type = other DNA
gtacgtagagtgatcaaccgtggcattgttgagaaagaggctattattaataaccattttgaccgggtattagat

SEQ ID NO: 409849 - DNA, 75 bp, synthetic construct
  source 1..75: mol_type = other DNA
agatagcctcaagcacccgcagtcattctacttaactaagatttccccgcaaaccgtttttgtccagcacagtaa

SEQ ID NO: 409850 - DNA, 75 bp, synthetic construct
  source 1..75: mol_type = other DNA
agcgtcaaattcgtgagaatcacgaagagatgaagcgtgcagcagcacagagtgcagcgctggcggggcttttcc

SEQ ID NO: 409851 - DNA, 75 bp, synthetic construct
  source 1..75: mol_type = other DNA
tctggtaagttctcagtagctgttggtaacggtgctaaggctacagaaaaagcgtcaacatcagtgggatcatgg

SEQ ID NO: 409852 - DNA, 75 bp, synthetic construct
  source 1..75: mol_type = other DNA
gctaaaaacgccatcttcaccgtttcggaagcgatggagcacttcgcctatttgccgaccggattgtacgtattt

SEQ ID NO: 409853 - DNA, 75 bp, synthetic construct
  source 1..75: mol_type = other DNA
taagcgcactggctctgatgggtttttatatattctggatccgcgttccgaagatcatctttaaacaaaaaggtt

SEQ ID NO: 409854 - DNA, 75 bp, synthetic construct
  source 1..75: mol_type = other DNA
ttggccccctttttttttttgtggggattaatgacaatcacggacctggtactgattcttttcatcgccgccctc

SEQ ID NO: 409855 - DNA, 75 bp, synthetic construct
  source 1..75: mol_type = other DNA
ttagagcagcgccgtttattaatccgcgtacgaaatatcgacgacctggaaaaaatttataagcttctcgtttct

SEQ ID NO: 409856 - DNA, 75 bp, synthetic construct
  source 1..75: mol_type = other DNA
attatcaaaaatggcaaggcgtatagcaagtatacgagaaaaaggggagtcagaattctataatagtttagatat

SEQ ID NO: 409857 - DNA, 75 bp, synthetic construct
  source 1..75: mol_type = other DNA
cacggcggcggcgactgcgacggcgaaccgtatcccgttgcttctgctaccaggagatgtgtatgcatcgcgtca

SEQ ID NO: 409858 - DNA, 75 bp, synthetic construct
  source 1..75: mol_type = other DNA
gctgattcgccgccaccagcggccgctgatcgtttgcggtgggggcgtgaagtattcgcaggctgaagaggcgct

SEQ ID NO: 409859 - DNA, 75 bp, synthetic construct
  source 1..75: mol_type = other DNA
ctgtttctgttgctatcagtggaacgttgttgggtcttggtgtgggtgtgtcagctgcagaagatatggctgggt

SEQ ID NO: 409860 - DNA, 75 bp, synthetic construct
  source 1..75: mol_type = other DNA
ctgttagggaagggggccggtggtattgcttccctcatttttggccgtggggcactaaagaaagttggctcgatg

SEQ ID NO: 409861 - DNA, 75 bp, synthetic construct
  source 1..75: mol_type = other DNA
caacggcaaggatgtttctttgccaaaattaaatgctgccggataccaatggatttctgacaatgccgattattt

SEQ ID NO: 409862 - DNA, 75 bp, synthetic construct
  source 1..75: mol_type = other DNA
caagaaacaaaaaggctcaaagaaccgcgccaaagcacgtttaaaggttgcccgcctccacgcgagaatagtcga

SEQ ID NO: 409863 - DNA, 75 bp, synthetic construct
  source 1..75: mol_type = other DNA
agctactgaatctaatggcaatccgtatgcaaaatctcaaactggtgcgctaggaatgtttcagtttacggacat

SEQ ID NO: 409864 - DNA, 75 bp, synthetic construct
  source 1..75: mol_type = other DNA
tagtgaccttggcggctccggtgccaagccgacaatgcagttggctgataataccgtttcacttgatggtgaaac

SEQ ID NO: 409865 - DNA, 75 bp, synthetic construct
  source 1..75: mol_type = other DNA
aatccaaatgcagtatcccagttaagatgggttaatgggaaaaagagtggtggtgcgctcgggatgtttcagttt

SEQ ID NO: 409866 - DNA, 75 bp, synthetic construct
  source 1..75: mol_type = other DNA
tctgggagtgggaacatatgcttatgcaaatgcatctacagccctgggaagcgttgcatttgttgattacacggc

SEQ ID NO: 409867 - DNA, 75 bp, synthetic construct
  source 1..75: mol_type = other DNA
ggttaccgtttcaatgagcagacagcagcgaaagcaggtgtggcagcgagtgatggcgatgtgtcctacaacgta

SEQ ID NO: 409868 - DNA, 75 bp, synthetic construct
  source 1..75: mol_type = other DNA
agaaccaccgttggtgtgaatgcggacggaaccctgaccagcgctgatggcgctacaaaaacgattgctgttaat

SEQ ID NO: 409869 - DNA, 75 bp, synthetic construct
  source 1..75: mol_type = other DNA
atcatcaccgaatacggcgtggatacgttagccggtctgcactcgatgtacaccgacatgtggagtgaagagtat

SEQ ID NO: 409870 - DNA, 75 bp, synthetic construct
  source 1..75: mol_type = other DNA
gtggtgaatccgcacctctggcaaccgggtgaaggttatctctatgaactgtacgtcacagccaaaagccggaca

SEQ ID NO: 409871 - DNA, 75 bp, synthetic construct
  source 1..75: mol_type = other DNA
cccggcgctgaaagattttgcaaaggctgttgagggtaaaacagatcacaagctgataaacagtgatgttcgtgg

SEQ ID NO: 409872 - DNA, 75 bp, synthetic construct
  source 1..75: mol_type = other DNA
ttagaacagcgccgtttattaatccgcgttcgaaatatcgacgatctggaaaaaatttataaacttctcgtgtca

SEQ ID NO: 409873 - DNA, 75 bp, synthetic construct
  source 1..75: mol_type = other DNA
tggccgcaccccagttttttaggtgattttttgcccgcaaaacgggaggtcagcgagaccggttttcaggcgcaa

SEQ ID NO: 409874 - DNA, 75 bp, synthetic construct
  source 1..75: mol_type = other DNA
cgttctttgtttttgaaacgccaccgcgcaacgcttacacccaatgcaatatttgctggtggggctttcattggt

SEQ ID NO: 409875 - DNA, 75 bp, synthetic construct
  source 1..75: mol_type = other DNA
gggccgcaaaagttgattgggccgctcatcgctattcctgtaactgaactttatacggtgcaggaagaggggaaa

SEQ ID NO: 409876 - DNA, 75 bp, synthetic construct
  source 1..75: mol_type = other DNA
cacgctgggaaaactgtccacttggacaaaaaatccggtaaccgaagctgatcttgaaaatcctttttctaggat

SEQ ID NO: 409877 - DNA, 75 bp, synthetic construct
  source 1..75: mol_type = other DNA
atcattataaaatggaagaaacaaaagaggaaacaattcactcttttgtttcattatatcttgatgcactcaggg

SEQ ID NO: 409878 - DNA, 75 bp, synthetic construct
  source 1..75: mol_type = other DNA
actgaagatattttacccggtattcgtggtgaagtgaatatatttgcttcaggggctattgaggcggatgtgcgt

SEQ ID NO: 409879 - DNA, 75 bp, synthetic construct
  source 1..75: mol_type = other DNA
tggtatgcgttttcactgccgaaaatgaaagccagtaaagaagttaccatggacgatgaattacgtatctggaaa

SEQ ID NO: 409880 - DNA, 75 bp, synthetic construct
  source 1..75: mol_type = other DNA
tctgtattcccagggaatgctcctgaaatggagcggagtgaatctttctggtgcagaagaaaaagtaacagggca

SEQ ID NO: 409881 - DNA, 75 bp, synthetic construct
  source 1..75: mol_type = other DNA
gaaacaattcgctcctttgtttcattatatcttgatgcgctaagggaaaagcaatccattgcggtacttgaacag

SEQ ID NO: 409882 - DNA, 75 bp, synthetic construct
  source 1..75: mol_type = other DNA
ggaccgggcgactaagtacgccattctgctgattgcgctgacttttatggcgttctttgtttttgaaacgctcac

SEQ ID NO: 409883 - DNA, 75 bp, synthetic construct
  source 1..75: mol_type = other DNA
tttgtgacccgtaatatcgactggtatgcgttttcactgccgaaaatgaaagccagtaaagaagttacaacggac

SEQ ID NO: 409884 - DNA, 75 bp, synthetic construct
  source 1..75: mol_type = other DNA
tggtatgcgttttcactgccgaaaatgaaagccagtaaagacgttacaatggacgatcaattacgtatctggaaa

SEQ ID NO: 409885 - DNA, 75 bp, synthetic construct
  source 1..75: mol_type = other DNA
ggattatctgtattcccagggaatgctcctgaaatggagcggagtgaatctttctggtgcagaagaaaaagtaac

SEQ ID NO: 409886 - DNA, 75 bp, synthetic construct
  source 1..75: mol_type = other DNA
cttgctggtatccgggaagctgttgaagatttgaaaggtgggcgagttgctactgttgatcctgtctctcgcagc

SEQ ID NO: 409887 - DNA, 75 bp, synthetic construct
  source 1..75: mol_type = other DNA
accggcgaatatgttactcgtgtcagagggtatcagcagatgctcaataatggtgccgtttatggctctaaggta

SEQ ID NO: 409888 - DNA, 75 bp, synthetic construct
  source 1..75: mol_type = other DNA
atctggtggtaatccgtatgcaaaatcccaaaccggtgctctggggatgtttcagttcacggggattgctcgtga

SEQ ID NO: 409889 - DNA, 75 bp, synthetic construct
  source 1..75: mol_type = other DNA
ttagaacagcgtcggctgttaatccgcgttcgaaatatcgacgatctggaaaaaatttataagcttctcgtttaa

SEQ ID NO: 409890 - DNA, 75 bp, synthetic construct
  source 1..75: mol_type = other DNA
atggcactgcctaagaaactcaaatatttcaatatgttctttgacggggataactacttcggcatggtgccggaa

SEQ ID NO: 409891 - DNA, 75 bp, synthetic construct
  source 1..75: mol_type = other DNA
aagcccgtataactgttgagtcagagaagcagaaaaaatacacagaccagaagaccagcgaggttaacgaaaaag

SEQ ID NO: 409892 - DNA, 75 bp, synthetic construct
  source 1..75: mol_type = other DNA
aaatacccaatccgatcggcgaggctaatgcgaaagaaatcactccagagttaaaagctccggttaatagccagc

SEQ ID NO: 409893 - DNA, 75 bp, synthetic construct
  source 1..75: mol_type = other DNA
cacgaagagatgaagcgtgcagcagcacagagtgcagcgctggcggggcttttccagccgtacagtgtggggaaa

SEQ ID NO: 409894 - DNA, 75 bp, synthetic construct
  source 1..75: mol_type = other DNA
tctgtttgcttcgggagctattgaggcggatgtcagccggagtgagtcggaagccgagtattaccgttataaagt

SEQ ID NO: 409895 - DNA, 75 bp, synthetic construct
  source 1..75: mol_type = other DNA
atccgatcggcgaggctaatgcgaaagaaatcactccagagttaaaagctccggttaatagccaccaggggacat

SEQ ID NO: 409896 - DNA, 75 bp, synthetic construct
  source 1..75: mol_type = other DNA
ggcacagtggctggaggtatttatgatgcggtaaccggttggaatgatacagaagcgcaacgtcgagcgtttggg

SEQ ID NO: 409897 - DNA, 75 bp, synthetic construct
  source 1..75: mol_type = other DNA
tagtgccgatgtcgttcaggttaacacccaaaaacggacggttcaggaacttcaggatcagaccagcgaaattaa

SEQ ID NO: 409898 - DNA, 75 bp, synthetic construct
  source 1..75: mol_type = other DNA
gtgacaccgccaccaccagtgaaatcaaagccaaactgctggcggacgacatcgtcccttcacgtaaagtgaaag

SEQ ID NO: 409899 - DNA, 75 bp, synthetic construct
  source 1..75: mol_type = other DNA
cagacaatatagccaactggaacgaaaggcacgggataattatcttgatatattatctgcatttatcgaagaaaa

SEQ ID NO: 409900 - DNA, 75 bp, synthetic construct
  source 1..75: mol_type = other DNA
ccccgaacaggagaaacctgttctcatgcgattttatgatccccggaatatatgggtattagtggaagttctgac

SEQ ID NO: 409901 - DNA, 75 bp, synthetic construct
  source 1..75: mol_type = other DNA
actggcgcaccggatggtggcgcagcaaatttctatcgcctcgacggtgccgattggcacgttgcatatgccgct

SEQ ID NO: 409902 - DNA, 75 bp, synthetic construct
  source 1..75: mol_type = other DNA
cgatattcacctgcacgaaaccacgccggcaggcgtggcagccatcaattatatggttgaaacggtggagaaaac

SEQ ID NO: 409903 - DNA, 75 bp, synthetic construct
  source 1..75: mol_type = other DNA
aaccgtacacgcaggaacgggcggaaaaactgatcgatttattgcagtcgaaaggcaccaccattgcccgcagcc

SEQ ID NO: 409904 - DNA, 75 bp, synthetic construct
  source 1..75: mol_type = other DNA
aggccgatcttgagcgactatttcgcttgctgacccagcggtttgcttttctgactcagggcggagcggcgccag

SEQ ID NO: 409905 - DNA, 75 bp, synthetic construct
  source 1..75: mol_type = other DNA
tgccgcctttacgctggtcgtaccacaagcgacaacatccatgacggcggttctgctgattggcatggcactgtt

SEQ ID NO: 409906 - DNA, 75 bp, synthetic construct
  source 1..75: mol_type = other DNA
atccctttcctgtttggggctgccgggatgctggtcaacggttacgttactgactggctggtcaaagggggaatg

SEQ ID NO: 409907 - DNA, 75 bp, synthetic construct
  source 1..75: mol_type = other DNA
aagacggcaccgccaatcccgatagccagaatgcgaagttgatgcaaaaagtggtgtgggtgacggcagatcagc

SEQ ID NO: 409908 - DNA, 75 bp, synthetic construct
  source 1..75: mol_type = other DNA
atgcgcaaaaaccgcaaagtgcaccgggcacgctttcgccggatgcacgcagcgaagcgcagcctttttatggtg

SEQ ID NO: 409909 - DNA, 75 bp, synthetic construct
  source 1..75: mol_type = other DNA
cgacccggaagggaaggtgatcgcgctggacagccatatccggctggcgaatccccgcacggcggagagtgagtc

SEQ ID NO: 409910 - DNA, 75 bp, synthetic construct
  source 1..75: mol_type = other DNA
ctggtcgccttacggcctgggcgacatgctggaaaaagccaatctctacgcgcagctctatattcgtcctaacga

SEQ ID NO: 409911 - DNA, 75 bp, synthetic construct
  source 1..75: mol_type = other DNA
gtgggaccgtgaaacccggcagcgcctgccgcgttatgtctggattacgcctgccggctggcagatgctgggcgt

SEQ ID NO: 409912 - DNA, 75 bp, synthetic construct
  source 1..75: mol_type = other DNA
aaacctgataaattcagaaaaggggagtattatttcttattccctaccgatattctcgataaaaaaagaggtttc

SEQ ID NO: 409913 - DNA, 75 bp, synthetic construct
  source 1..75: mol_type = other DNA
taaccgtggtacgtcggtgtacttcccttcgcaggttatcccgatgctgccggaagtgctctctaacggcctgtg

SEQ ID NO: 409914 - DNA, 75 bp, synthetic construct
  source 1..75: mol_type = other DNA
ataacgcagtacactggagtcagttagcccccgaagagcagatccgtttctgggaagactatgaagcgggaaggg

SEQ ID NO: 409915 - DNA, 75 bp, synthetic construct
  source 1..75: mol_type = other DNA
aaggaagcgcacaaatcgccgtcgtggtgaacactccactaaacccaaatgcgaaaatccgtcctggtatcgtcc

SEQ ID NO: 409916 - DNA, 75 bp, synthetic construct
  source 1..75: mol_type = other DNA
cgatgccatctggccggttctggtcagcttcagtgatgccggcacacataccgtggggatgagcgtcactcggct

SEQ ID NO: 409917 - DNA, 75 bp, synthetic construct
  source 1..75: mol_type = other DNA
atgcgaagaagatccattactactacacggctatcaaagcaagcaaacgaacttcttctaaagatcagaaaatcg

SEQ ID NO: 409918 - DNA, 75 bp, synthetic construct
  source 1..75: mol_type = other DNA
caccaggtgaaattctcagggtggcatccgctattggccagccaatgagcttcctcgatggcaaccctgcgtttt

SEQ ID NO: 409919 - DNA, 75 bp, synthetic construct
  source 1..75: mol_type = other DNA
aatggaaaccctgtcagagccgcgtatgggccggttggatggccctgtggttgactatcagttttctgatgttat

SEQ ID NO: 409920 - DNA, 75 bp, synthetic construct
  source 1..75: mol_type = other DNA
aaggccgccgtgaagcgcgtattgtccgcgtactggtgccaaaaacgagccagattgtgggtcgttactttaccg

SEQ ID NO: 409921 - DNA, 75 bp, synthetic construct
  source 1..75: mol_type = other DNA
gatgaaacaggcgatttacgatccggaaaaccgtggtcacttcggtctggcattgcagtcctatgcgcactttac

SEQ ID NO: 409922 - DNA, 75 bp, synthetic construct
  source 1..75: mol_type = other DNA
gcactgttccgtattcacgacaagccgagcaccgaagcgattacctctttccgttcagtgctggcggagctgggg

SEQ ID NO: 409923 - DNA, 75 bp, synthetic construct
  source 1..75: mol_type = other DNA
agttcattatcaagttcgggagctataaagttttcagaatctccctttgaaagaccgctttttcttttcttaaac

SEQ ID NO: 409924 - DNA, 75 bp, synthetic construct
  source 1..75: mol_type = other DNA
aggaagaacttacaaagctggaaactgaacttcaggttttacagcgcagaattgttgatgccagtgaatcctcgt

SEQ ID NO: 409925 - DNA, 75 bp, synthetic construct
  source 1..75: mol_type = other DNA
gggtggaaacaaccgtcctctgtggacgctatatatggactcttccgctcagggtgagtgtcccctggtgatcga

SEQ ID NO: 409926 - DNA, 75 bp, synthetic construct
  source 1..75: mol_type = other DNA
tcgtccgtgggtaattggctacagcggcgggaaagattcttctgccgtaattacgctggtgtatctggctctgct

SEQ ID NO: 409927 - DNA, 75 bp, synthetic construct
  source 1..75: mol_type = other DNA
actatatacagcatgaatataatattgaaacttcattagattttagttctcctttgccagagccggagcgagagc

SEQ ID NO: 409928 - DNA, 75 bp, synthetic construct
  source 1..75: mol_type = other DNA
acaatagacagcatgaatataatattgaaacttcattagattttagttctcctttgccagagccggagcgagagc

SEQ ID NO: 409929 - DNA, 75 bp, synthetic construct
  source 1..75: mol_type = other DNA
gctaacaaggctcttgagcatggcataattaattccataaaaactgcaaggctggtatccaatcaggcaaactgg

SEQ ID NO: 409930 - DNA, 75 bp, synthetic construct
  source 1..75: mol_type = other DNA
cgatctggtcaacaaattcatgaatggccgggggatgcgtcgggaagtcgtccagggaaccctcgaagaacgtgc

SEQ ID NO: 409931 - DNA, 75 bp, synthetic construct
  source 1..75: mol_type = other DNA
tccatcttttcagcaaaaagcggcttatacactggctaacgttctcgatatgggaggactggtatctggtattag

SEQ ID NO: 409932 - DNA, 75 bp, synthetic construct
  source 1..75: mol_type = other DNA
acaaactcattaatgcccggggaatgcgctcaaataattctcctcaaccagcctccacgtcccaggtgacgactg

SEQ ID NO: 409933 - DNA, 75 bp, synthetic construct
  source 1..75: mol_type = other DNA
ggcgggaaagactcatcagcggttattacgctggtgtatctggctttgctgggcttgcctccggaaatgcgtagt

SEQ ID NO: 409934 - DNA, 75 bp, synthetic construct
  source 1..75: mol_type = other DNA
ttgatagtgcaattgatttcattaagaatcctgggaaatacattaaagaggctggcagtaatttatggcataccg

SEQ ID NO: 409935 - DNA, 75 bp, synthetic construct
  source 1..75: mol_type = other DNA
tactgttgatcctgtctctcgcagcgtgtcggcattaaatcgcacaatcgaaaattcccggccagactttgtggc

SEQ ID NO: 409936 - DNA, 75 bp, synthetic construct
  source 1..75: mol_type = other DNA
actatagacatcatgaatataatattgaaacttcattagattttagttctcctttgccagagccggagcgagagc

SEQ ID NO: 409937 - DNA, 75 bp, synthetic construct
  source 1..75: mol_type = other DNA
gagatgaaaattagcgtccgctctcttagccgtgaaacccggcaacttctgttggcccgtattcccgctctggca

SEQ ID NO: 409938 - DNA, 75 bp, synthetic construct
  source 1..75: mol_type = other DNA
catggttaaagaggggctttttgaccgtttcccctgcgatgtcattttcggcatgcataacatgcccggtctgcc

SEQ ID NO: 409939 - DNA, 75 bp, synthetic construct
  source 1..75: mol_type = other DNA
cccctgatgggcagtgaagatttctctttcatgctggaagcccagccgaaaggtgcttttttgctgtttggtaat

SEQ ID NO: 409940 - DNA, 75 bp, synthetic construct
  source 1..75: mol_type = other DNA
atggagcgccagggaattttaaaaatactgagtttacgccattcttatttacaacccatcctccttttaaaaaaa

SEQ ID NO: 409941 - DNA, 75 bp, synthetic construct
  source 1..75: mol_type = other DNA
tacaacccatcctccttttaaaaaaaatcaactaataaaaaagaagcttccagaatggttaaattatataaagcc

SEQ ID NO: 409942 - DNA, 75 bp, synthetic construct
  source 1..75: mol_type = other DNA
aaaaagaaaattggagcaagaacatttttcaacatattacgatgaatttcatgattggtattttcctgttgatta

SEQ ID NO: 409943 - DNA, 75 bp, synthetic construct
  source 1..75: mol_type = other DNA
acgatagacaacatgaatataatattgaaacttcattagattttagttctcctttgccagagccggagcgagagc

SEQ ID NO: 409944 - DNA, 75 bp, synthetic construct
  source 1..75: mol_type = other DNA
acgatatacatcatgaatataatattgaaacttcattagattttagttctcctttgccagagccggagcgagagc

SEQ ID NO: 409945 - DNA, 75 bp, synthetic construct
  source 1..75: mol_type = other DNA
acgataaacagcatgaatataatattgaaacttcattagattttagttctcctttgccagagccggagcgagagc

SEQ ID NO: 409946 - DNA, 75 bp, synthetic construct
  source 1..75: mol_type = other DNA
gggctggcgacgactggcgtggtggccacattaaaggtgggtgacggagagaaaagtattggtctgcgcgctgat

SEQ ID NO: 409947 - DNA, 75 bp, synthetic construct
  source 1..75: mol_type = other DNA
tctgaccctattcctgctctggcacaagcccaggctgccagctttggcgctacggctgaggttacgcatgttaac

SEQ ID NO: 409948 - DNA, 75 bp, synthetic construct
  source 1..75: mol_type = other DNA
tccgcaatggcaacgcttgatcatgtccgtcattcactggataaatctgccatcaaccgcgccgtcgacttgctc

SEQ ID NO: 409949 - DNA, 75 bp, synthetic construct
  source 1..75: mol_type = other DNA
attgtggaaagaccacaccgcggttgaagaagcggaagagatcacccgtttgtgtcacgcgccgggcaaagttga

SEQ ID NO: 409950 - DNA, 75 bp, synthetic construct
  source 1..75: mol_type = other DNA
tgcaccaatcgacgccgacggcaacgtgctggcgctacgcccggagtttgctgaaaacccgaacgcgatgttcgt

SEQ ID NO: 409951 - DNA, 75 bp, synthetic construct
  source 1..75: mol_type = other DNA
ataccgctagttatagggctatttctgactctgttcttacgtcgagtgcctgtaaccaacggacatagagatagt

SEQ ID NO: 409952 - DNA, 75 bp, synthetic construct
  source 1..75: mol_type = other DNA
ccatttaccagtgccgcaaatttttcccgcccatcctgtttgcccatggggatacaccaatgggcgccgccatta

SEQ ID NO: 409953 - DNA, 75 bp, synthetic construct
  source 1..75: mol_type = other DNA
ttcaaagcctgaagcaggacgtcagcatagatacctctattaacgttggactggtgacggaggatggcgagcgga

SEQ ID NO: 409954 - DNA, 75 bp, synthetic construct
  source 1..75: mol_type = other DNA
tatggcacgaaagctggggcggcctgccgccagccagtttctttgatgagctggacccgatcctcaatcgccatt

SEQ ID NO: 409955 - DNA, 75 bp, synthetic construct
  source 1..75: mol_type = other DNA
gctttcaaaggatgcaggtatgcaccctgaatgtttcatgttttgttctttccttgatcactttcttggacttca

SEQ ID NO: 409956 - DNA, 75 bp, synthetic construct
  source 1..75: mol_type = other DNA
cttctgaaagaagtaactatgaggaaaatgtatatattcgtctgagtgatgatggtggagctcagtcacgtatta

SEQ ID NO: 409957 - DNA, 75 bp, synthetic construct
  source 1..75: mol_type = other DNA
cgtaatctggccccccaatttttgtatcactacccctcatcatgtattgcttcatttgaaccagacaggaaatcc

SEQ ID NO: 409958 - DNA, 75 bp, synthetic construct
  source 1..75: mol_type = other DNA
ctttcctttaataatcctctggggctggctgacaactggtttgtcagcgggggacggagcagtgacttttcggtg

SEQ ID NO: 409959 - DNA, 75 bp, synthetic construct
  source 1..75: mol_type = other DNA
ccagtggtcaccggaccgtcttcatggtgtggaacaactgagcctcgggggcgagagttcagtgcgtggctttaa

SEQ ID NO: 409960 - DNA, 75 bp, synthetic construct
  source 1..75: mol_type = other DNA
ataaaatagaaaagcatgtctctgaagaactcttcagagtaaactgttcccccgttgttaatctcttcgaaaaaa

SEQ ID NO: 409961 - DNA, 75 bp, synthetic construct
  source 1..75: mol_type = other DNA
acttaaaaaagaacttccattaataacaattattgatccaaatgatgttttatgtaattctggaaaatgtcacgc

SEQ ID NO: 409962 - DNA, 75 bp, synthetic construct
  source 1..75: mol_type = other DNA
caactggtgagccaggacgctcagagtcgtgagatacagttgtgctttaacgctaacaacgggttgccggaaatt

SEQ ID NO: 409963 - DNA, 75 bp, synthetic construct
  source 1..75: mol_type = other DNA
ctgttgatgccagtgatctggttgcaacccagattggggagaagcgcaataccctgattattctctttgctctgg

SEQ ID NO: 409964 - DNA, 75 bp, synthetic construct
  source 1..75: mol_type = other DNA
cattgctggaagagatggcagggcaaccgggagtgttgtggtttgccgtgactaatgcgcaggggattatcgttc

SEQ ID NO: 409965 - DNA, 75 bp, synthetic construct
  source 1..75: mol_type = other DNA
aaccttggtttgggagaagcagcgaaacgggatgtgggaacaggggaaaatcagataccggatatgggagcattc

SEQ ID NO: 409966 - DNA, 75 bp, synthetic construct
  source 1..75: mol_type = other DNA
ttaagccgcaagaatccgtttggtgatatcaaatcggatggcacggtgaaaacggctctcgaaaaccttggtttg

SEQ ID NO: 409967 - DNA, 75 bp, synthetic construct
  source 1..75: mol_type = other DNA
caggagaaaatcagataccggatatgtcagcctggaaaagaaatccgagttctaatcgctggagaaaattgcctg

SEQ ID NO: 409968 - DNA, 75 bp, synthetic construct
  source 1..75: mol_type = other DNA
tgaaaaatggcgaacgattgccgcaggaagattggggctatgatatgcgtgatggcgtactgacgcgagtcgaag

SEQ ID NO: 409969 - DNA, 75 bp, synthetic construct
  source 1..75: mol_type = other DNA
cgttcatttccaggtgggaagcattaatttaagtaccagtatcggtgtagcgcattcaaatgaatgtactaccgt

SEQ ID NO: 409970 - DNA, 75 bp, synthetic construct
  source 1..75: mol_type = other DNA
agcctggcaggcaaaagcggcgaaggtttgtattttatcgacaaagaactctctaccctcgacacacaaaactaa

SEQ ID NO: 409971 - DNA, 75 bp, synthetic construct
  source 1..75: mol_type = other DNA
caaaccagcaaatatgagctggtagaagggctggtggtttactttctctatttcgaatttatcgcgctgattgtg

SEQ ID NO: 409972 - DNA, 75 bp, synthetic construct
  source 1..75: mol_type = other DNA
aaggtttgctcgcggaaggcttgctgggggaagtggcttactttgagtctcatttcgaccgcttccgtccacagg

SEQ ID NO: 409973 - DNA, 75 bp, synthetic construct
  source 1..75: mol_type = other DNA
atgaataaactgttatcttactatcagaaagaacttgcttttcttaaaaaacaaggcgctgagtttgcaagtaaa

SEQ ID NO: 409974 - DNA, 75 bp, synthetic construct
  source 1..75: mol_type = other DNA
cgctacattggtgtcggcgaacgtattgaggatttgcgtccgtttaaagcggacgactttattgaggcacttttt

SEQ ID NO: 409975 - DNA, 75 bp, synthetic construct
  source 1..75: mol_type = other DNA
cggattccgcctctgttatcttcgacgccattcaggccgctaaagcgcgtaacatcgacgtcctgattgccgata

SEQ ID NO: 409976 - DNA, 75 bp, synthetic construct
  source 1..75: mol_type = other DNA
gcggtaaaaaaatcgacgatgatctgtttgaagaattggaagagcaattgctcatcgccgatgtgggcgtggaaa

SEQ ID NO: 409977 - DNA, 75 bp, synthetic construct
  source 1..75: mol_type = other DNA
ggtggcgttccacgggagacctgcagactcaccggctgggactgtcgcatgtcctgttccgtaacggggacatga

SEQ ID NO: 409978 - DNA, 75 bp, synthetic construct
  source 1..75: mol_type = other DNA
ctggggtcagcgcaacaatattccggtgattgcccagcataccggtgcggattccgcctctgttatcttcgacgc

SEQ ID NO: 409979 - DNA, 75 bp, synthetic construct
  source 1..75: mol_type = other DNA
ttgcacagccggaaccggtcgtagaagaaacgccggagccagtggctatcgaacgtgaagagctgccgttgccgg

SEQ ID NO: 409980 - DNA, 75 bp, synthetic construct
  source 1..75: mol_type = other DNA
tctataccttcactacttatatgcagaagtatctggtaaatactgcggaatgcatgccaacgtggcgagtggcat

SEQ ID NO: 409981 - DNA, 75 bp, synthetic construct
  source 1..75: mol_type = other DNA
acagcaaactgacaagtagtgatactcgtcgccgcatttgggcaattgtgggggcctcttcaggtaatctggtcg

SEQ ID NO: 409982 - DNA, 75 bp, synthetic construct
  source 1..75: mol_type = other DNA
tttataccaacaaatggcgcagtaccgtcctgaattaatcattcgcctgggcattgatattgatactgccatctc

SEQ ID NO: 409983 - DNA, 75 bp, synthetic construct
  source 1..75: mol_type = other DNA
gtttcttcgcgcgcctgaaacgcagcctgttaaaaaccaaagaaaacctcggttccggatttatcagcctgttcc

SEQ ID NO: 409984 - DNA, 75 bp, synthetic construct
  source 1..75: mol_type = other DNA
agatgcacgttaagaagctggccgacgatcccaaaaaggataaagagcaggttatgaccagctctttaccgcgcc

SEQ ID NO: 409985 - DNA, 75 bp, synthetic construct
  source 1..75: mol_type = other DNA
atgcatgccaacgtggcgagtggcattatgactgccgcattgtttgtattcatgcttattcaaccactcattggt

SEQ ID NO: 409986 - DNA, 75 bp, synthetic construct
  source 1..75: mol_type = other DNA
tatgctatctctccctctccgttttttctggtttttttatccccgcattttcgtctccggcagccatgctgtctc

SEQ ID NO: 409987 - DNA, 75 bp, synthetic construct
  source 1..75: mol_type = other DNA
aagttgagttatttacaggggattctcttagaatctccattacattaaaaaatagtgctgaaaaatatgaacttg

SEQ ID NO: 409988 - DNA, 75 bp, synthetic construct
  source 1..75: mol_type = other DNA
tatctaaatggctctgctacagttacaggtatcgtatatacattactatgcgatgaagttgataatattcttttg

SEQ ID NO: 409989 - DNA, 75 bp, synthetic construct
  source 1..75: mol_type = other DNA
agatttttttagaataaactgtgctccagttattaatctattcaataagaaaacagaaccattacgattatcgga

SEQ ID NO: 409990 - DNA, 75 bp, synthetic construct
  source 1..75: mol_type = other DNA
aacattgcatagatatgaagatgctttagtcaagcagttctcattgagaaatttgtttggacttgaacattctgt

SEQ ID NO: 409991 - DNA, 75 bp, synthetic construct
  source 1..75: mol_type = other DNA
atgattacagtatttgagcatgatgagaacactcgtcgcatatggccgatgagagcagggaaattaacatggctt

SEQ ID NO: 409992 - DNA, 75 bp, synthetic construct
  source 1..75: mol_type = other DNA
agaaatgctatccatatataactacaacaataaccactcaatatcaatttttattgaatggattaaagagttaca

SEQ ID NO: 409993 - DNA, 75 bp, synthetic construct
  source 1..75: mol_type = other DNA
cgttcactgccgggctgcctctggtttacccggactggcttgcccctgaccatctcacggtttactggcgcgttg

SEQ ID NO: 409994 - DNA, 75 bp, synthetic construct
  source 1..75: mol_type = other DNA
gcgggcagaagagtaccggtacggggcagttaaatggtgtcctttcctttaataatcctctggggctggctgaca

SEQ ID NO: 409995 - DNA, 75 bp, synthetic construct
  source 1..75: mol_type = other DNA
ggggccacccgactgacgtctgcagaaaccgacagactggtggcaccgtgggtgaatcagtgtctgaatatcacg

SEQ ID NO: 409996 - DNA, 75 bp, synthetic construct
  source 1..75: mol_type = other DNA
aggatccgtaccttatctcaggtggtacgctatttttccctcctcccctgcctttgcattctttcattttcgtct

SEQ ID NO: 409997 - DNA, 75 bp, synthetic construct
  source 1..75: mol_type = other DNA
ccggttcgttcactgccggactgcctctggtttacccggactggcttgcccctgaccatctcacggtttactggc

SEQ ID NO: 409998 - DNA, 75 bp, synthetic construct
  source 1..75: mol_type = other DNA
atattaatatattgcccaacactaatgctatttatattaaggttttatatgcaatggagcgaacatatcaatggt

SEQ ID NO: 409999 - DNA, 75 bp, synthetic construct
  source 1..75: mol_type = other DNA
ttggcctgaataaagcatccccagcagagttaagagcaagtctcgaaatggcgcatagccttgctcaaattggtg

SEQ ID NO: 410000 - DNA, 75 bp, synthetic construct
  source 1..75: mol_type = other DNA
atgaacaaagaaaatgtcattaccctggacaatccggtcaagcgtggtgagcaggttatcgaacaggtcacgctg

SEQ ID NO: 410001 - DNA, 75 bp, synthetic construct
  source 1..75: mol_type = other DNA
gcggtaatttatacccttttccttgcactggttctttatcgtgaaatatcagttaaagatttacctaagatattt

SEQ ID NO: 410002 - DNA, 75 bp, synthetic construct
  source 1..75: mol_type = other DNA
aactggaaaagttactggacgtatgaccgccagaaaaggaagttctctccagctaataaagaagactgccagacc

SEQ ID NO: 410003 - DNA, 75 bp, synthetic construct
  source 1..75: mol_type = other DNA
ttgaaaccaccgatggcgtggttcagctctccggtaccgtagattctcaggcacaaagtgaccgtgctgaaagta

SEQ ID NO: 410004 - DNA, 75 bp, synthetic construct
  source 1..75: mol_type = other DNA
attgccgaaggcattgaaaataaaaaagatgccctttatttatataggcaaggagtttgttatatgcaagggtat

SEQ ID NO: 410005 - DNA, 75 bp, synthetic construct
  source 1..75: mol_type = other DNA
ctgtatggcgtgattgataacagcgatttctaccgtaatgatgtggcgaaagctaaccgttcgcggatgaatgtg

SEQ ID NO: 410006 - DNA, 75 bp, synthetic construct
  source 1..75: mol_type = other DNA
ggcccggctggcctgacgatcgtcatcgttcgcgaagacttactgggtaaagcgaatatcgcatgcccgtcgatt

SEQ ID NO: 410007 - DNA, 75 bp, synthetic construct
  source 1..75: mol_type = other DNA
gcaggttatcgaacaggtcacgctgatgaaacctaatgccgggacgctgcgcggtgtcagtctggctgcggtcgc

SEQ ID NO: 410008 - DNA, 75 bp, synthetic construct
  source 1..75: mol_type = other DNA
tggcaaagagttcattcaggttgcagaggaagccgagaaggattttcgcgatcttcttaacgtcccctccaacta

SEQ ID NO: 410009 - DNA, 75 bp, synthetic construct
  source 1..75: mol_type = other DNA
atcaatcagcaaaaagcagaactgctgtatggggtgattgataacagcgatttctaccgcaatgatgtggcgaaa

SEQ ID NO: 410010 - DNA, 75 bp, synthetic construct
  source 1..75: mol_type = other DNA
tggtaaagagttcattcaggttgcagaggaagccgagaaggattttcgcgatcttcttaatatcccctccaacta

SEQ ID NO: 410011 - DNA, 75 bp, synthetic construct
  source 1..75: mol_type = other DNA
tattccaacgaagtggtgctggtgttcaaaagtacctctctggcttacaccattacgctgatggaagtgatggga

SEQ ID NO: 410012 - DNA, 75 bp, synthetic construct
  source 1..75: mol_type = other DNA
caggaagaagacgatgaaccctttgccgagaagatggcgcgactgaccgagcagttgaaagagcaactggaagag

SEQ ID NO: 410013 - DNA, 75 bp, synthetic construct
  source 1..75: mol_type = other DNA
tgaacgagctggataacaaattctggaaggccgccgacaaactgcgcgccaatatggatgccgccaactacaagc

SEQ ID NO: 410014 - DNA, 75 bp, synthetic construct
  source 1..75: mol_type = other DNA
ctatgaagacgaagctggattctgtttctccgcaacgctggaagatatccagaaaaacgactttgtgttgacccc

SEQ ID NO: 410015 - DNA, 75 bp, synthetic construct
  source 1..75: mol_type = other DNA
atcaaaaagattgccgatactttccacgcctggcagacggataagaattatgaagatgaggctggtttttgtttt

SEQ ID NO: 410016 - DNA, 75 bp, synthetic construct
  source 1..75: mol_type = other DNA
ccttaaagaacaattaatagaaagtgcgaaactggaaaaacaaataaaagctgatttgaaaggattgggttatga

SEQ ID NO: 410017 - DNA, 75 bp, synthetic construct
  source 1..75: mol_type = other DNA
ttacgctgattgttgaaatgctccagccctacaatggccgcgtgtatgacccagcgatggggtctggtgggttct

SEQ ID NO: 410018 - DNA, 75 bp, synthetic construct
  source 1..75: mol_type = other DNA
tgttttacggggcgattcgcgcgatcccggaaggtcaatggcagtcctgtagcgcgctgggaatgagcaaaaaag

SEQ ID NO: 410019 - DNA, 75 bp, synthetic construct
  source 1..75: mol_type = other DNA
ttactacggaccaggtcagttcccgacgttgcaggagtatccggcgctgtggcatttgctgtcggaaccgtggct

SEQ ID NO: 410020 - DNA, 75 bp, synthetic construct
  source 1..75: mol_type = other DNA
cgctgctggtgcagatcttcctgatttattacgggccgggccagtttccgacgttgcaggagtatccggcactgt

SEQ ID NO: 410021 - DNA, 75 bp, synthetic construct
  source 1..75: mol_type = other DNA
ctgaccgggctgattaacaccttctctgacgccaacttcagcaacccggaatttaacggtgagaaactgagctta

SEQ ID NO: 410022 - DNA, 75 bp, synthetic construct
  source 1..75: mol_type = other DNA
gatgacatcatcggcctggacggttcagtggaccgcaaggaaactcaccgtgcgccttatgtcaaagggaccttc

SEQ ID NO: 410023 - DNA, 75 bp, synthetic construct
  source 1..75: mol_type = other DNA
gctgacggttgcctcgctgattgtggcgctgattctggcgttgatttttaccatcatcctgacgctgaaaacgcc

SEQ ID NO: 410024 - DNA, 75 bp, synthetic construct
  source 1..75: mol_type = other DNA
tatttgatagtgaatatcttgttgcaagcaagcgatatggtccatttgatttcactttaggtatcggctggggaa

SEQ ID NO: 410025 - DNA, 75 bp, synthetic construct
  source 1..75: mol_type = other DNA
ttggccttggcggcagtgaaaaacaggcgaaggaaggtgagtttgaggccgtgatgctggcaccgaagtccacgc

SEQ ID NO: 410026 - DNA, 75 bp, synthetic construct
  source 1..75: mol_type = other DNA
cagggcgatgttattaaggttaattttggattcatcaatggtcagaagtttaccacccgcaatgccatgccagac

SEQ ID NO: 410027 - DNA, 75 bp, synthetic construct
  source 1..75: mol_type = other DNA
aatgacagcctggatattaaaaccacattacaggcaaacgacattccaggactcacaaccgaccaggttgtctct

SEQ ID NO: 410028 - DNA, 75 bp, synthetic construct
  source 1..75: mol_type = other DNA
gctttgcggggatgtatgacagcggcggctatatcccgcgcgggcagtttggcatcgtcggtgaaaacgggccgg

SEQ ID NO: 410029 - DNA, 75 bp, synthetic construct
  source 1..75: mol_type = other DNA
gcgggaggtggcccgccagcttgatgaacgtgaacgcaggctgaaggcaaaagccaggagtaactacagcgatca

SEQ ID NO: 410030 - DNA, 75 bp, synthetic construct
  source 1..75: mol_type = other DNA
ctgtgccgcccatttaccggattgaagcaccgacgcagatcatcatccagacacagccaggacaaagtgcgcagg

SEQ ID NO: 410031 - DNA, 75 bp, synthetic construct
  source 1..75: mol_type = other DNA
tctgattttaattagcgcaaccggcggtgattcggcgctggcgctgtacgatcagctttccaccatcgccccgac

SEQ ID NO: 410032 - DNA, 75 bp, synthetic construct
  source 1..75: mol_type = other DNA
aagagcaaatcaaattaccgccgcagccggtcactgccattgtctataccgccgctgcacacagtgccaatctct

SEQ ID NO: 410033 - DNA, 75 bp, synthetic construct
  source 1..75: mol_type = other DNA
gaagcggcgaaacgaaatgtgggaacaggggaaaatcagataccggacatggcctcttttgccagtggtgatgga

SEQ ID NO: 410034 - DNA, 75 bp, synthetic construct
  source 1..75: mol_type = other DNA
agatatcgcgttatttgccgagatgggcttcacctgtctgcgtatttccattgcctgggcgcgaattttccctca

SEQ ID NO: 410035 - DNA, 75 bp, synthetic construct
  source 1..75: mol_type = other DNA
tgcagggagagctgatgcgtaccgtcggtgatgtgcgcaacggggccaatgccatctatagcggtgccagcgaaa

SEQ ID NO: 410036 - DNA, 75 bp, synthetic construct
  source 1..75: mol_type = other DNA
cttcctcatcgaaagaaatgcgtctacagcgtaagggaagcccgatgtcggcttccgaaaaacaaatggccgcag

SEQ ID NO: 410037 - DNA, 75 bp, synthetic construct
  source 1..75: mol_type = other DNA
ctggaagatgcgttaaatgatttgtttatccctgaaaccacgatagagacgatactcaaacgattaaccatcaaa

SEQ ID NO: 410038 - DNA, 75 bp, synthetic construct
  source 1..75: mol_type = other DNA
atcagggatggtggataactttatcgaccgtaaacatggtcgcgaagagatctcctatccggacgtgcagtggca

SEQ ID NO: 410039 - DNA, 75 bp, synthetic construct
  source 1..75: mol_type = other DNA
tacttcctgccgcagttcccgaccggggacatgagtaccgaagattatctggtcaagcgtgcaaaagaaggcctg

SEQ ID NO: 410040 - DNA, 75 bp, synthetic construct
  source 1..75: mol_type = other DNA
gcaatcagggatggtggataactttatcgaccgtaaacatggtcgcgaagagatctcctatccggacgtgcagtg

SEQ ID NO: 410041 - DNA, 75 bp, synthetic construct
  source 1..75: mol_type = other DNA
atgagcatgtatgacgatttagtgtcctgcaaatttgatggttgtacacctgatgatctgaacggaattgagagc

SEQ ID NO: 410042 - DNA, 75 bp, synthetic construct
  source 1..75: mol_type = other DNA
tgcacaataccgggcacggcccgaagatgaaagccattgccgacaaaatggaggtgttcaaaaacaggttggccg

SEQ ID NO: 410043 - DNA, 75 bp, synthetic construct
  source 1..75: mol_type = other DNA
ctgacgaggaagaacgtcttaagcggcgcccggaatatgacgtacgtctggatactgaactccaggttatcaacc

SEQ ID NO: 410044 - DNA, 75 bp, synthetic construct
  source 1..75: mol_type = other DNA
tccagcttgaatcgcgcggcatgaaggatctgatcaagcgtctgcaacctgactgcttcgaagatatgatcgcac

SEQ ID NO: 410045 - DNA, 75 bp, synthetic construct
  source 1..75: mol_type = other DNA
ttctgtatacgccagctttcaggcaagtacagttaacgatagatgacaggtctactccaaccacgtcaacagttc

SEQ ID NO: 410046 - DNA, 75 bp, synthetic construct
  source 1..75: mol_type = other DNA
tccatattacacattaccaaatgcatcatttgatggcgcaacgatagcagcctcagctggattttcttgtcgcat

SEQ ID NO: 410047 - DNA, 75 bp, synthetic construct
  source 1..75: mol_type = other DNA
tgaacttcaggttatcaaccagatgggcttcccgggctacttcctcatcgttatggaatttatccagtggtcgaa

SEQ ID NO: 410048 - DNA, 75 bp, synthetic construct
  source 1..75: mol_type = other DNA
gtcgtgcgatgggtaagaaaaagccggaagagatggctaagcagcgttctgtatttgctgaaggtgcagaaaaga

SEQ ID NO: 410049 - DNA, 75 bp, synthetic construct
  source 1..75: mol_type = other DNA
gcggagtttatggcggcggtaatgaccgccgatatggacaataccgagaaggtggtgggcctggtggatgagtgc

SEQ ID NO: 410050 - DNA, 75 bp, synthetic construct
  source 1..75: mol_type = other DNA
aatgctggaaaagcaccgtcattttgttgtagctaacgatgggcatgattcaaaagaggaatgggagctggcaac

SEQ ID NO: 410051 - DNA, 75 bp, synthetic construct
  source 1..75: mol_type = other DNA
gcatccgccgctgggaagttgagtttaaacctctctgcgactcaaagcgcaatccgtactggcgcaagcgtgacc

SEQ ID NO: 410052 - DNA, 75 bp, synthetic construct
  source 1..75: mol_type = other DNA
ctctcgaaaaccttggtttgggagaaggctcagcattacctgttggggtgcctgttccgtggccttcagccactc

SEQ ID NO: 410053 - DNA, 75 bp, synthetic construct
  source 1..75: mol_type = other DNA
gtcatgtataaaggaatgaaactgttaacaaaagaggggcttgagcttattcgtgacggtattgcggaggctacg

SEQ ID NO: 410054 - DNA, 75 bp, synthetic construct
  source 1..75: mol_type = other DNA
cacgattgtgactgatgcaactattaatttctattttgatgaaagctgggtaaatagtggcactgacattatcaa

SEQ ID NO: 410055 - DNA, 75 bp, synthetic construct
  source 1..75: mol_type = other DNA
gcggcaacgactaaacctgctggtgcgaatgaaacacgcccacgaaatgtcgcttttaactatattgtgagggct

SEQ ID NO: 410056 - DNA, 75 bp, synthetic construct
  source 1..75: mol_type = other DNA
cgctcaacgaacaacaggtcgatgcgctggcgaatcggatggcggcgcagcaaatttctatcgcctcgacggtgc

SEQ ID NO: 410057 - DNA, 75 bp, synthetic construct
  source 1..75: mol_type = other DNA
aaatcggaacccttaatgcgtgaagcaatgcaggcgggtgcgcattacgtcggcgggctggacccgaccagtgtc

SEQ ID NO: 410058 - DNA, 75 bp, synthetic construct
  source 1..75: mol_type = other DNA
gataaactcccatattttacaggggcagatcgtgccgcgttaaccgcgttgacaagtgttggacgtgccattctt

SEQ ID NO: 410059 - DNA, 75 bp, synthetic construct
  source 1..75: mol_type = other DNA
aacggtagagaaaacgccgcaactgaaaggtaagctgaccatcagccacgcctttgcgctggctacgctcaacga

SEQ ID NO: 410060 - DNA, 75 bp, synthetic construct
  source 1..75: mol_type = other DNA
gcgcgatggaaaaatccctcgacaccatgttccagattgcgctggactacgacaaaggcgtcgatattcacctgc

SEQ ID NO: 410061 - DNA, 75 bp, synthetic construct
  source 1..75: mol_type = other DNA
agtttctgagccagagcggtaagatggtcaccgccgccgcgctgtttggtacctctgtgccgctcgcccatgcgg

SEQ ID NO: 410062 - DNA, 75 bp, synthetic construct
  source 1..75: mol_type = other DNA
gggatgatgggcgaggaattgatgcggcacgcgctttattgagcattcaaaacgggatgttggaaaaacaccgcc

SEQ ID NO: 410063 - DNA, 75 bp, synthetic construct
  source 1..75: mol_type = other DNA
gagaaggttcggcattacccgttggcgtgcctgttccgtggccttccgccactccgccaacaggctggctgaaat

SEQ ID NO: 410064 - DNA, 75 bp, synthetic construct
  source 1..75: mol_type = other DNA
gttgaataccagctctacaggcacaacagaaacccgcccccgcaatattgcttttaacttcattgtaagagcagc

SEQ ID NO: 410065 - DNA, 75 bp, synthetic construct
  source 1..75: mol_type = other DNA
tatcccaaactagccacagcgtacccgtcaggaaaactgcctgatttacgcggtgaatttattcgtggctgggat

SEQ ID NO: 410066 - DNA, 75 bp, synthetic construct
  source 1..75: mol_type = other DNA
atgtgtaactgcttttccaaaaaccttggtttgggagaaggctcagcattacccgttggcgtacctgttccgtgg

SEQ ID NO: 410067 - DNA, 75 bp, synthetic construct
  source 1..75: mol_type = other DNA
ggatagcggtcgtactttattaacgaatcaagagcatgcagtaatttctcataatcatggaatacctacaaaagt

SEQ ID NO: 410068 - DNA, 75 bp, synthetic construct
  source 1..75: mol_type = other DNA
accgccaacaggttggctgaaatgcaacggtgcagctttttctgccgaagagtatccggaactggcaaaagttta

SEQ ID NO: 410069 - DNA, 75 bp, synthetic construct
  source 1..75: mol_type = other DNA
tccgccaacaggctggctgaaatgcaacggagcagctttttctgctgaagaatacccggaactggcaaaggctta

SEQ ID NO: 410070 - DNA, 75 bp, synthetic construct
  source 1..75: mol_type = other DNA
cggatggcacggtgaaaacggctctcgaaaaccttggtttgggagaaggctcagcattacccgttggtgtgcctg

SEQ ID NO: 410071 - DNA, 75 bp, synthetic construct
  source 1..75: mol_type = other DNA
cctgatttacgtggtgagttcattcgtggctgggatgacgggcgcgggattgatccaggtcgctctattttaagc

SEQ ID NO: 410072 - DNA, 75 bp, synthetic construct
  source 1..75: mol_type = other DNA
cgtggccttccgccactccgccaacggggtggctaaaatgtaacggagcagtattttcttctgaaaagtacccaa

SEQ ID NO: 410073 - DNA, 75 bp, synthetic construct
  source 1..75: mol_type = other DNA
tacagaacggagttttcagggggaaatgaaacccgcccacgtaacatcgccttcaattatattgtgagagctgca

SEQ ID NO: 410074 - DNA, 75 bp, synthetic construct
  source 1..75: mol_type = other DNA
atatccggtcatgggacgcatggaataatacagtactggaaccaaatgacagacagggcgacagtctgttgtcga

SEQ ID NO: 410075 - DNA, 75 bp, synthetic construct
  source 1..75: mol_type = other DNA
agctttattgctgcagctctggcccagtttgtaagtgataaaacacaacgggatgtgcttgataatggtgatctg

SEQ ID NO: 410076 - DNA, 75 bp, synthetic construct
  source 1..75: mol_type = other DNA
gacgtaggtttttccgccgccagagttgtaccaactgcggaagaaaaccgaccacgtaacattgcatttaactac

SEQ ID NO: 410077 - DNA, 75 bp, synthetic construct
  source 1..75: mol_type = other DNA
ctagtcttctcgcataccttggtttaggggaaggctctgcgctgcctgttggtgtgcctgttccatggccttcag

SEQ ID NO: 410078 - DNA, 75 bp, synthetic construct
  source 1..75: mol_type = other DNA
acggtgcggctttttctgctgaagattaccctaatctggcaaaggcttacccgacgttaaaattgcctgatttac

SEQ ID NO: 410079 - DNA, 75 bp, synthetic construct
  source 1..75: mol_type = other DNA
ttttccagtgctgtatttttcttcttttttactttcaccaccattatggtctttacctgtttatgtgtacttcag

SEQ ID NO: 410080 - DNA, 75 bp, synthetic construct
  source 1..75: mol_type = other DNA
aggctcagatagcggcggatttagcggcgggggggggggtgttttgtgggggggggggggggggggggtggtggg

SEQ ID NO: 410081 - DNA, 75 bp, synthetic construct
  source 1..75: mol_type = other DNA
ctcagggattagagctagctataaacgctttgaataaccaactcacttcacaacaccaatatccgactaatcctt

SEQ ID NO: 410082 - DNA, 75 bp, synthetic construct
  source 1..75: mol_type = other DNA
ggacgtcatcttatatgaagatgatcatatcctggtgctgaataaaccttccggtacggcggtacatggcggcag

SEQ ID NO: 410083 - DNA, 75 bp, synthetic construct
  source 1..75: mol_type = other DNA
agaggccgtttcgccgcatctgcaaaaagtggcggcgctggcggacgccatcttatatgaagatgatcatatcct

SEQ ID NO: 410084 - DNA, 75 bp, synthetic construct
  source 1..75: mol_type = other DNA
ttcgtccagtaacagcaaagtagtgatgatgccattagaggccagcagcctgatggggtcgattgccgggattgc

SEQ ID NO: 410085 - DNA, 75 bp, synthetic construct
  source 1..75: mol_type = other DNA
ttgaagtttacccatccgggaacgggtgaggtgatgcgtatcgaagcgccgatggatgatggtctgaagcgttgt

SEQ ID NO: 410086 - DNA, 75 bp, synthetic construct
  source 1..75: mol_type = other DNA
ggggaccggtgaggtgatgcgtatcgaagcgccgatggatgaaggtttgaagcgttgtttgcaaaagctgcgtaa

SEQ ID NO: 410087 - DNA, 75 bp, synthetic construct
  source 1..75: mol_type = other DNA
atctgcaaaaagtggcggcgctggccgatgtcatcttatatgaagatgatcatattctggtgctgaataaaccgt

SEQ ID NO: 410088 - DNA, 75 bp, synthetic construct
  source 1..75: mol_type = other DNA
ttaaacaacaacaattagctaaaggattagagttagctataatcgctttgaataaccgactcacttcacaacacc

SEQ ID NO: 410089 - DNA, 75 bp, synthetic construct
  source 1..75: mol_type = other DNA
ctgattaccctgtgctggcgaaagtgtttccggcgctagcattacctgacgcacggggtgatttcattcgtatct

SEQ ID NO: 410090 - DNA, 75 bp, synthetic construct
  source 1..75: mol_type = other DNA
ttgcccgcgcttttatctggatttacagcagggaaagcctccagtgcgcaagtcaataaggttattcggcaggcc

SEQ ID NO: 410091 - DNA, 75 bp, synthetic construct
  source 1..75: mol_type = other DNA
gagtaaacccaggaatactggctacatacggtgacgggggaatagttaaaacggacgaacccggtcttaaggtgc

SEQ ID NO: 410092 - DNA, 75 bp, synthetic construct
  source 1..75: mol_type = other DNA
aaatcggatggcacggtgaaaacggctctcgaaaaccttggtttgggagaaggttcggcattacccgttggggtg

SEQ ID NO: 410093 - DNA, 75 bp, synthetic construct
  source 1..75: mol_type = other DNA
cggggtggctgaaatgcaatggtgcagcattttcttctgaaaagtacccaaatctggcaaaggtttacccaacgt

SEQ ID NO: 410094 - DNA, 75 bp, synthetic construct
  source 1..75: mol_type = other DNA
tgaaattagtggacatgtaggtacagaaacccgtccacgaaatattgcatttaactttctggtgagggctaaata

SEQ ID NO: 410095 - DNA, 75 bp, synthetic construct
  source 1..75: mol_type = other DNA
aactcagtaggagatggtgttaattttattgccgtcagaccgcgaaatattgcatttaactttctggtgagggct

SEQ ID NO: 410096 - DNA, 75 bp, synthetic construct
  source 1..75: mol_type = other DNA
tccgccaacaggctggctgaaatgcaacggtgcgcctttttctgccgaagagtatccggaactggcaaaagttta

SEQ ID NO: 410097 - DNA, 75 bp, synthetic construct
  source 1..75: mol_type = other DNA
gtgtgacacttgatttatccaggagtgcaagaacatcagcagaaacaaggccacgtaacattgcatttaactaca

SEQ ID NO: 410098 - DNA, 75 bp, synthetic construct
  source 1..75: mol_type = other DNA
cgcgcactaatgagcgcacagggtgatgctatgagaaatatctctggaacagttcggctagcatccaactcatat

SEQ ID NO: 410099 - DNA, 75 bp, synthetic construct
  source 1..75: mol_type = other DNA
ggtttgggagaaggctctgcattacctgttggtgtgcctgttccgtggccctcagccactccgccaacaggctgg

SEQ ID NO: 410100 - DNA, 75 bp, synthetic construct
  source 1..75: mol_type = other DNA
gacggtggtcgcgaattattaagctggcaggcagctacaaacttttctcagcgtgccggaaatataggcgaaggt

SEQ ID NO: 410101 - DNA, 75 bp, synthetic construct
  source 1..75: mol_type = other DNA
tgcgggacgtgccttgctaagtcttcaggatgactcttttgaagcgcacaggcatgagtcctttttttacgcggg

SEQ ID NO: 410102 - DNA, 75 bp, synthetic construct
  source 1..75: mol_type = other DNA
ctgttataactgttggaaaccctgctaatcctaaagcaggagataatagcgattatgttccagcatcatcagata

SEQ ID NO: 410103 - DNA, 75 bp, synthetic construct
  source 1..75: mol_type = other DNA
cgatctgactactaatgtcaaagtaggtatcgcttatgctactgctgattctgttataactgttggaaaccctgc

SEQ ID NO: 410104 - DNA, 75 bp, synthetic construct
  source 1..75: mol_type = other DNA
ttttcttaaacgttggtttgggagaaggctcagcattacccgttggcgtacctgttccgtggccttcagccacac

SEQ ID NO: 410105 - DNA, 75 bp, synthetic construct
  source 1..75: mol_type = other DNA
attactggtctaacagtgaaagagtttttacttataccactggtggaagaaatggtgctgaatcagtgagttcac

SEQ ID NO: 410106 - DNA, 75 bp, synthetic construct
  source 1..75: mol_type = other DNA
tgcagtaatttctcataatcatggaatacctacaaaagtggggtcagttactaatatcccgtatggaatagaaca

SEQ ID NO: 410107 - DNA, 75 bp, synthetic construct
  source 1..75: mol_type = other DNA
atcctacaaataaactaccggatctacggggtgaatttatccgtggctgggatgacggacgtggcgtggatgcgg

SEQ ID NO: 410108 - DNA, 75 bp, synthetic construct
  source 1..75: mol_type = other DNA
ggccctcagccactccaccaacgggctggctgaaatgcaacggcgcagcattttcttctgaagattaccccaaat

SEQ ID NO: 410109 - DNA, 75 bp, synthetic construct
  source 1..75: mol_type = other DNA
ttgcctgatttacgcggtgaatttattcgtggctgggatgatgggcgtggcattgatcctggacgtgccttgcta

SEQ ID NO: 410110 - DNA, 75 bp, synthetic construct
  source 1..75: mol_type = other DNA
ctttcacggcaggatggtacaagtttttctcattacgcaggtaattttgacattgggtctggtcattcaatcaat

SEQ ID NO: 410111 - DNA, 75 bp, synthetic construct
  source 1..75: mol_type = other DNA
ccgttggtgtgcctgttccgtggccttcagccactccgccaacaggctggctgaaatgcaatggtgcgccttttt

SEQ ID NO: 410112 - DNA, 75 bp, synthetic construct
  source 1..75: mol_type = other DNA
ttttcttaaacgttggtttgggagaaggttcagcattacctgttggtgcgcctgttccgtggccttcagagacac

SEQ ID NO: 410113 - DNA, 75 bp, synthetic construct
  source 1..75: mol_type = other DNA
aggacagcggaggataattttaccggggcatggatatcaatgcgcccccgcaatgttgcgtttaattacatcgta

SEQ ID NO: 410114 - DNA, 75 bp, synthetic construct
  source 1..75: mol_type = other DNA
acatgtggcggtgtacttcggctcttacctgaaaaagccaccggtgccgatgagtcggctggagcattatgccgg

SEQ ID NO: 410115 - DNA, 75 bp, synthetic construct
  source 1..75: mol_type = other DNA
aacgttatggtgaaattagtggaaatgtaggtacagaaactcgccctcgcaacgttgcatttaattacatcgtaa

SEQ ID NO: 410116 - DNA, 75 bp, synthetic construct
  source 1..75: mol_type = other DNA
ctccgccaacaggctggctgaaatgcaacggagcagctttttctgctgaagaatacccggaactggcaaaggctt

SEQ ID NO: 410117 - DNA, 75 bp, synthetic construct
  source 1..75: mol_type = other DNA
aagacggcgatgcaaatcaggtggagagggatgtatcagcggttactgaaggttgacccgctgaagtgcatcctg

SEQ ID NO: 410118 - DNA, 75 bp, synthetic construct
  source 1..75: mol_type = other DNA
ggagcctgtgtgatggggatgatggttgcacatactggctaccgaatgatttatctgctgggtgcactattagtg

SEQ ID NO: 410119 - DNA, 75 bp, synthetic construct
  source 1..75: mol_type = other DNA
tcaattgttatgccaaaaccccaattttgtcaccttgatgaaaaaaaattcagagggatgccgttatattatgaa

SEQ ID NO: 410120 - DNA, 75 bp, synthetic construct
  source 1..75: mol_type = other DNA
attttcttctgaaaagtacccaaaactggcaaaggcttatcccaccaataaattaccggatttacgcggtgaatt

SEQ ID NO: 410121 - DNA, 75 bp, synthetic construct
  source 1..75: mol_type = other DNA
ctgtaaacactgaaaattattcaatatgggaatcagtaagctcgtttaagggggcagtggtgcctttggccccct

SEQ ID NO: 410122 - DNA, 75 bp, synthetic construct
  source 1..75: mol_type = other DNA
cagtatggtgtttttgaagttcaacggcgcgaaattctctgccactgattatcctgtgctggcgaaagtgtttcc

SEQ ID NO: 410123 - DNA, 75 bp, synthetic construct
  source 1..75: mol_type = other DNA
ccaatctggcaaaggcctactccaccaataaattaccggatttacggggcgaatttattcgcggctgggatgacg

SEQ ID NO: 410124 - DNA, 75 bp, synthetic construct
  source 1..75: mol_type = other DNA
caaagcgagtaacattcgatgcttccagggttgttccaactgcaaacgaaaaccgacctcgtaacattgctttta

SEQ ID NO: 410125 - DNA, 75 bp, synthetic construct
  source 1..75: mol_type = other DNA
cattcgaaatataattggtgcattagtagatgtcaggtttaatacctatccttctgattctggcgtttttacaac

SEQ ID NO: 410126 - DNA, 75 bp, synthetic construct
  source 1..75: mol_type = other DNA
cttggtttaggagaaggctcagcgttacccgttggtgtgcctgttccgtggccttcagccactccgccaacaggc

SEQ ID NO: 410127 - DNA, 75 bp, synthetic construct
  source 1..75: mol_type = other DNA
cagacgctgctgaccgacatgctggaaagcggcaaagccactgatgcgctgtgtaattacgacggcccgcagggg

SEQ ID NO: 410128 - DNA, 75 bp, synthetic construct
  source 1..75: mol_type = other DNA
tgctctacgcactggcgaaaaaccgtcagttaccggcggcgatggcgaaagtttcccgtcacggcgtaccggttg

SEQ ID NO: 410129 - DNA, 75 bp, synthetic construct
  source 1..75: mol_type = other DNA
ctggttcccggagatggcgcagtggatacctgcattgatcgcggtggcgctggtggcgttggcgaatctggcggc

SEQ ID NO: 410130 - DNA, 75 bp, synthetic construct
  source 1..75: mol_type = other DNA
gcgtctcgcgaccgacgaacccaacaggtaatgtgataaccgatgaagagttgctgaagctggatgcgctggcga

SEQ ID NO: 410131 - DNA, 75 bp, synthetic construct
  source 1..75: mol_type = other DNA
attatcagcctggcgcctggtggtattggtccagcgatgatgtgtgaaatgattaagcgtaacgatctgctgcgc

SEQ ID NO: 410132 - DNA, 75 bp, synthetic construct
  source 1..75: mol_type = other DNA
tgaaagcgcgcggtgtactgatggtgccggggcataatttcttccccgggctggataaaccgtggccacacacgc

SEQ ID NO: 410133 - DNA, 75 bp, synthetic construct
  source 1..75: mol_type = other DNA
atgcatcgtatagacacgaaaaccgcgcagaaggataagttcggcgcgggtaagaacggttttacccgtggtaat

SEQ ID NO: 410134 - DNA, 75 bp, synthetic construct
  source 1..75: mol_type = other DNA
ttccagagttgttccaactgcaaacgaaaaccgacctcgtaacattgcctttaattatatcgtgagggctgcctg

SEQ ID NO: 410135 - DNA, 75 bp, synthetic construct
  source 1..75: mol_type = other DNA
gtgaaggtttatattcccctgcaacagcatacccctctatcgaattgccaccaattggagcaggcgcaggggctg

SEQ ID NO: 410136 - DNA, 75 bp, synthetic construct
  source 1..75: mol_type = other DNA
cgtgcttccggggatggtgccatggtttgtgattttgataagccaactgcgttttcgtcgtgtgcacaaagcggc

SEQ ID NO: 410137 - DNA, 75 bp, synthetic construct
  source 1..75: mol_type = other DNA
tatatcatccccaatccacagcgtgtgtttgtctacgtctacagtgccagcgtgcttccagggatggtgccgtgg

SEQ ID NO: 410138 - DNA, 75 bp, synthetic construct
  source 1..75: mol_type = other DNA
tggtggcgtcctaccagggcgtggagctgattggcattaccgctggtgaagcgaagaatccgcaggtgacgctgc

SEQ ID NO: 410139 - DNA, 75 bp, synthetic construct
  source 1..75: mol_type = other DNA
tatcgccatcattcgccgctatttaccggaagatcgctgcctgattcataaacccgaaggggcaattttcctctg

SEQ ID NO: 410140 - DNA, 75 bp, synthetic construct
  source 1..75: mol_type = other DNA
cacattagcgaaattgccggcggtaacctggcgaatagcctcatcattgatggacgcagtgaaatgggcgagctg

SEQ ID NO: 410141 - DNA, 75 bp, synthetic construct
  source 1..75: mol_type = other DNA
ggatggcgtggtgaaaaccatgcacgaaattgctgacagttcgaagaaaattgctgacatcatcagcgttatcga

SEQ ID NO: 410142 - DNA, 75 bp, synthetic construct
  source 1..75: mol_type = other DNA
aatataaaaaactacatacaatttatcaataatatatatatgaatgcattgccattttacgggttgcaaaagaga

SEQ ID NO: 410143 - DNA, 75 bp, synthetic construct
  source 1..75: mol_type = other DNA
gggcagctcttcagagttagtgattatcgtacaaaagaaataccagcatcagaagttatgggaagaggatatatt

SEQ ID NO: 410144 - DNA, 75 bp, synthetic construct
  source 1..75: mol_type = other DNA
ggcgagctgacgtcaacatgggatttaatgctgcaaacgcgcattaacctgagtcgttcagcggtgcggatgatg

SEQ ID NO: 410145 - DNA, 75 bp, synthetic construct
  source 1..75: mol_type = other DNA
atgccaaagttgaattgctcgatagcgccaggaaaacattggcccaggccgcgactcattataaaaaattcaaaa

SEQ ID NO: 410146 - DNA, 75 bp, synthetic construct
  source 1..75: mol_type = other DNA
aaccaggacactacgggaacctcggggatagtcggcatgggattcaacaatgaagattccattacagaccttcgt

SEQ ID NO: 410147 - DNA, 75 bp, synthetic construct
  source 1..75: mol_type = other DNA
gtcttcccgatttgcgcggtgagtttatccgtggatgggacgacgggcgcaaagttgatacaggacgtaagttgc

SEQ ID NO: 410148 - DNA, 75 bp, synthetic construct
  source 1..75: mol_type = other DNA
agaaagagcagacggcgctgtttacccaaaagtgattggccttgatgcttcaagaattgttccaactgcaaacga

SEQ ID NO: 410149 - DNA, 75 bp, synthetic construct
  source 1..75: mol_type = other DNA
ggacggcagaggataattttaccggggcatggatatcaatgcgcccccgcaacgttgcttttaattacatcgtaa

SEQ ID NO: 410150 - DNA, 75 bp, synthetic construct
  source 1..75: mol_type = other DNA
cgtacagctttgcaggattattacggtgtcgatctgactactaatgtcaaagtaggtatcgcttatgctactgct

SEQ ID NO: 410151 - DNA, 75 bp, synthetic construct
  source 1..75: mol_type = other DNA
acacttcattcacgagggagtatcggtaatactggcgggagtgaaacccgtccacgaaatattgcatttaactat

SEQ ID NO: 410152 - DNA, 75 bp, synthetic construct
  source 1..75: mol_type = other DNA
gcttggcattatgtatatgttgagtttccgcgcgtacctttatctgacggtttccgagttgctgttatttaccgt

SEQ ID NO: 410153 - DNA, 75 bp, synthetic construct
  source 1..75: mol_type = other DNA
agcgggctattgagttggcttgtcgttacggcggaaccgatgaaatgcatcatctgcaatgggtcgtggatcaga

SEQ ID NO: 410154 - DNA, 75 bp, synthetic construct
  source 1..75: mol_type = other DNA
ggagggctgatcctcgatccgtttatggggtccggcaccacgggcgtggccgcccttcgccggggctgccgtttt

SEQ ID NO: 410155 - DNA, 75 bp, synthetic construct
  source 1..75: mol_type = other DNA
ggcaatagcctgaaaaccattggcctgtatatgctggtgggcgcgatgcaacttggcattatgtatatgctgagt

SEQ ID NO: 410156 - DNA, 75 bp, synthetic construct
  source 1..75: mol_type = other DNA
gcaatggggcattctggtgtttcttggcgtggtggcttccgggattggctactttatgtggaactacggcgcgac

SEQ ID NO: 410157 - DNA, 75 bp, synthetic construct
  source 1..75: mol_type = other DNA
cagtgattgcatggttcttgctgggaaatgcgcagaaaatgccgcaaaccacgttgcaatggggcattctggtgt

SEQ ID NO: 410158 - DNA, 75 bp, synthetic construct
  source 1..75: mol_type = other DNA
cggttggcctcttgcgtatagtgattatgctgaaggcaggaacgactgccgcgaagccatgcttcagggagataa

SEQ ID NO: 410159 - DNA, 75 bp, synthetic construct
  source 1..75: mol_type = other DNA
ataacaccggcagggtggcagatgctgggcgtcgacatggtaaaacttcacgaacagcagcagaaacgactgcgt

SEQ ID NO: 410160 - DNA, 75 bp, synthetic construct
  source 1..75: mol_type = other DNA
gatatctccgtacatgcggccagaaaacgctggtatctgcagcgcagtcaagattcgctgaaacaccgtcgtgca

SEQ ID NO: 410161 - DNA, 75 bp, synthetic construct
  source 1..75: mol_type = other DNA
tcgaaaggatatgaagataaagagatactgaaattcctcaacgatgcgggtttttcagacgttacattacgtgat

SEQ ID NO: 410162 - DNA, 75 bp, synthetic construct
  source 1..75: mol_type = other DNA
attcacggctcagcctgtgcaactgacacaagaaggattgattaaagcagtgcgtttctatgaacaggtaaagcg

SEQ ID NO: 410163 - DNA, 75 bp, synthetic construct
  source 1..75: mol_type = other DNA
gctggaagcagaaccgatagcgtgggaatgcggcgaaaacataatcctgtttaatcctgatatagttgaagcata

SEQ ID NO: 410164 - DNA, 75 bp, synthetic construct
  source 1..75: mol_type = other DNA
ttcttggcgtggtggcttccgggattggttattttatgtggaactacggcgcgactcaggtggacgccggaacgc

SEQ ID NO: 410165 - DNA, 75 bp, synthetic construct
  source 1..75: mol_type = other DNA
tcagggaaaaatatcatcagatggctgcttaaaaaaagaacaaatggtagtgtccgctattgccagtacacctca

SEQ ID NO: 410166 - DNA, 75 bp, synthetic construct
  source 1..75: mol_type = other DNA
atgaaagatttaactttgaagttttatgacaaactgcagtttaaggccttcctgtcatctcttggctgggcggaa

SEQ ID NO: 410167 - DNA, 75 bp, synthetic construct
  source 1..75: mol_type = other DNA
caacgatgtcagcgctaaactttccgtcggacgctatttagccggtgatgtgggagcaaccattgacctttcgaa

SEQ ID NO: 410168 - DNA, 75 bp, synthetic construct
  source 1..75: mol_type = other DNA
ttctttctgagcattgcgttcaggatagtcagcagcttgcgtatacaggtaaccagcgccacttttttgggtttt

SEQ ID NO: 410169 - DNA, 75 bp, synthetic construct
  source 1..75: mol_type = other DNA
acggcaaaccaggtttaccctggttggtgtttttgcacggtttttctggcgattgccatgaatggcaagaagtgg

SEQ ID NO: 410170 - DNA, 75 bp, synthetic construct
  source 1..75: mol_type = other DNA
taaaaataacacctattactccttcaaaaaatatccttttaaaatatttagaacaacaagagcgtaaaaacacag

SEQ ID NO: 410171 - DNA, 75 bp, synthetic construct
  source 1..75: mol_type = other DNA
atgaaagatttaactttgaagtttcatgacaaactgcagtttaaggccttcctgtcatctcttgcctgggtggac

SEQ ID NO: 410172 - DNA, 75 bp, synthetic construct
  source 1..75: mol_type = other DNA
atgaaagatttaactttgaagtttcatgacaaactgcagtttaaggccttcctgtcatctcttgactgggtggaa

SEQ ID NO: 410173 - DNA, 75 bp, synthetic construct
  source 1..75: mol_type = other DNA
atgaaagatttaactttgaagtttcatgacaaactgcagtttaaggccttcctgtcatctcttgactgggaggat

SEQ ID NO: 410174 - DNA, 75 bp, synthetic construct
  source 1..75: mol_type = other DNA
atgaaagatttaactttgaagtttcatgacaaactgcagtttaaggccttcctgtcatctcttggctggggggat

SEQ ID NO: 410175 - DNA, 75 bp, synthetic construct
  source 1..75: mol_type = other DNA
atgaaagatttaactttgaagtttcatgacaaactgcagtttaaggccttcctgtcatctcttggctgggtggag

SEQ ID NO: 410176 - DNA, 75 bp, synthetic construct
  source 1..75: mol_type = other DNA
atgaaagatttaactttgaagtttcatgacaaactgcagtttaaggccttcctgtcatctcttgcctgggcggat

SEQ ID NO: 410177 - DNA, 75 bp, synthetic construct
  source 1..75: mol_type = other DNA
cgtaccagagattcaaccctgtgcagtgtataaatacacggcacaatcgctccgccataagcgacagcttgtggc

SEQ ID NO: 410178 - DNA, 75 bp, synthetic construct
  source 1..75: mol_type = other DNA
gtgagctggcgtctggtttatgcatccgctgttggaacgtcgcacattagcgctgatttaccttgtcaggatgcc

SEQ ID NO: 410179 - DNA, 75 bp, synthetic construct
  source 1..75: mol_type = other DNA
ccgacgaagatgccgtttccagactggaaactttcaccagcactgggcgtgcgcacaaagttgcagcatttacgg

SEQ ID NO: 410180 - DNA, 75 bp, synthetic construct
  source 1..75: mol_type = other DNA
ccatcaatgaagcgatggcttatgtgtcgcaaaaagtgcagcacggtgaatttggactcaatgatattctcgcca

SEQ ID NO: 410181 - DNA, 75 bp, synthetic construct
  source 1..75: mol_type = other DNA
cacatcctgaagcgtatgccgccggatgaagcctactggtgcacgccggaacgcctgcagcagctggccatcagg

SEQ ID NO: 410182 - DNA, 75 bp, synthetic construct
  source 1..75: mol_type = other DNA
ttccgatgaccatctgaagcgactggccatcagggagttgcgtcagcttgaactgacgctggctgccccgccacc

SEQ ID NO: 410183 - DNA, 75 bp, synthetic construct
  source 1..75: mol_type = other DNA
agcagccattattgtcggtatttgtcgctgatggcgcaggtagcgcctcgcagggaggcgaaggtgcgatgctcg

SEQ ID NO: 410184 - DNA, 75 bp, synthetic construct
  source 1..75: mol_type = other DNA
gatatttccgtgcatgcggccagaaaacgctggtatctgcagcgcagccaggatgcactgaaacaccgtcgggca

SEQ ID NO: 410185 - DNA, 75 bp, synthetic construct
  source 1..75: mol_type = other DNA
cgtctgccgcgctatgtctggataacaccggcagggtggcagatgctgggtgtggacatggttaaacttcacgaa

SEQ ID NO: 410186 - DNA, 75 bp, synthetic construct
  source 1..75: mol_type = other DNA
cgtctgccacgttacgtctggataacaccggcaggctggcagatgctgggcgtcgacatggtaaaacttcacgaa

SEQ ID NO: 410187 - DNA, 75 bp, synthetic construct
  source 1..75: mol_type = other DNA
tatgccaatatgacgcacttcattaccgatgaagatgccgtttccagactggaaactttcaccagcactgagcgt

SEQ ID NO: 410188 - DNA, 75 bp, synthetic construct
  source 1..75: mol_type = other DNA
gtggctgaaagatacaccccacaaaaacactggagtcagcttccgcctgaagagcaaatccgtttctgggaagac

SEQ ID NO: 410189 - DNA, 75 bp, synthetic construct
  source 1..75: mol_type = other DNA
aggacccggtgaccggcgaacagagcctgcgcatgcacatgtcgcgacatcctttttacgtgcagaaacggacgt

SEQ ID NO: 410190 - DNA, 75 bp, synthetic construct
  source 1..75: mol_type = other DNA
aacgctggtatctgcagcgcagccaggatgcactgaaacaccgtcgtgcaaaagcggcagccagtaagcgcgcca

SEQ ID NO: 410191 - DNA, 75 bp, synthetic construct
  source 1..75: mol_type = other DNA
cgacaatccattagcatccagtaaccaagttggcgaattaacaatgtgggttaaacgactggtcagtcaactgaa

SEQ ID NO: 410192 - DNA, 75 bp, synthetic construct
  source 1..75: mol_type = other DNA
taatcaaagaagccaaattaaaaatagcggttgcgaaatgttaccctaattcagagatggccagggtagagggcg

SEQ ID NO: 410193 - DNA, 75 bp, synthetic construct
  source 1..75: mol_type = other DNA
gaatcagagctggtggttgttcagaatcagcctgatgaaattcccgttctggaatggcagggagtacgcgtcgta

SEQ ID NO: 410194 - DNA, 75 bp, synthetic construct
  source 1..75: mol_type = other DNA
atggtgattaaaaatacccgtccaggccactgggctcagttgcctcccgaagaacaaatccgcttctgggaagac

SEQ ID NO: 410195 - DNA, 75 bp, synthetic construct
  source 1..75: mol_type = other DNA
agagcaaatccgtttctgggaagactatgaagcgggaagggcgaccactttcctggttgaaccggaaaggaagcg

SEQ ID NO: 410196 - DNA, 75 bp, synthetic construct
  source 1..75: mol_type = other DNA
tgcaacgacaggccgagctatgagattcaggcattattcactaccccgccagtcccggtgatatcagaaggactg

SEQ ID NO: 410197 - DNA, 75 bp, synthetic construct
  source 1..75: mol_type = other DNA
cgttacaaagcctttgatagaatccacaccactaccagccatggatgttatccccagtacgggcgacacaatcga

SEQ ID NO: 410198 - DNA, 75 bp, synthetic construct
  source 1..75: mol_type = other DNA
atgaagcctatttctgttccgatgaccatctgaagcgactggccatcagggagttgcgtcagcttgaactgacgc

SEQ ID NO: 410199 - DNA, 75 bp, synthetic construct
  source 1..75: mol_type = other DNA
aacactggagtcagcttccgccagaagagcaaatccgtttctgggaggactatgaagcgggagtggcgacctctt

SEQ ID NO: 410200 - DNA, 75 bp, synthetic construct
  source 1..75: mol_type = other DNA
attttgcaaaggtcgttggacttaaacaaaatgcgctgtttgcctggttacgggagaacggcatcctgatagcgt

SEQ ID NO: 410201 - DNA, 75 bp, synthetic construct
  source 1..75: mol_type = other DNA
atgggaccgatgaagcgaatattcgtaaaaatttgtctcgcaaccccgatcgctttgaagaaggtaagcattact

SEQ ID NO: 410202 - DNA, 75 bp, synthetic construct
  source 1..75: mol_type = other DNA
ccggagaaaggacaagaacgcggttcaccgtatcctgttgtctgatatccgcgaatacctgctcgaacagggtca

SEQ ID NO: 410203 - DNA, 75 bp, synthetic construct
  source 1..75: mol_type = other DNA
gaatacccggaactggcaaaggcttatccgacaaataaattgcctgatttacgtggtgagtttattcgtggctgg

SEQ ID NO: 410204 - DNA, 75 bp, synthetic construct
  source 1..75: mol_type = other DNA
atgatgccagttagccataatctctgcattttcttaaacgttggtttgggagaaggctctgcattacctgttggt

SEQ ID NO: 410205 - DNA, 75 bp, synthetic construct
  source 1..75: mol_type = other DNA
agaacagcaatgctggattattataaccaggacactacgggaacctcggggatagtcggcatgggattcaacaat

SEQ ID NO: 410206 - DNA, 75 bp, synthetic construct
  source 1..75: mol_type = other DNA
cctgatctccgtggtgagtttattcgtggctgggatgacggacgaggcgttgatgctggacgtgctttattgagc

SEQ ID NO: 410207 - DNA, 75 bp, synthetic construct
  source 1..75: mol_type = other DNA
ttacgtggtgagtttattcgtggctgggatgacgggcgcggtattgatgcaggacgtgttttattgagcattcag

SEQ ID NO: 410208 - DNA, 75 bp, synthetic construct
  source 1..75: mol_type = other DNA
gcttatcccaccaataaattaccggatttacggggcgaatttattcgtggctgggatgatgggcgaggaattgat

SEQ ID NO: 410209 - DNA, 75 bp, synthetic construct
  source 1..75: mol_type = other DNA
gaatgggaactggcggcaatcttcagaagagcatatacacagggcaagggactggatggtaccagtgcaggcgga

SEQ ID NO: 410210 - DNA, 75 bp, synthetic construct
  source 1..75: mol_type = other DNA
cgccaacaggctggctgaaatgcaacggtgcggctttttctcctgaagaatacccggaactggcaaaggcttacc

SEQ ID NO: 410211 - DNA, 75 bp, synthetic construct
  source 1..75: mol_type = other DNA
acgccgggcaaacctgcgtctgtgccaaccgtttatatgtgcaggacggcgtgtatgaccgctttgccgaaaaat

SEQ ID NO: 410212 - DNA, 75 bp, synthetic construct
  source 1..75: mol_type = other DNA
agttactttcaacgctgacagaattcgctcaaaactggaactattatccgaagaactaatgccccgttgtggtct

SEQ ID NO: 410213 - DNA, 75 bp, synthetic construct
  source 1..75: mol_type = other DNA
aggctctgcattaccggttggtgtgcctgttccgtggccttcagctacaccaccgacaggctggttgaaatgcaa

SEQ ID NO: 410214 - DNA, 75 bp, synthetic construct
  source 1..75: mol_type = other DNA
ttttcttctgaagattaccccaaactggcacaggcttaccccgcgaataaattaccggatctacggggtgaattt

SEQ ID NO: 410215 - DNA, 75 bp, synthetic construct
  source 1..75: mol_type = other DNA
cgcggtgaatttattcgtggctgggatgacggacgtggagtggatgccgggcgacaattattatcttcacagggg

SEQ ID NO: 410216 - DNA, 75 bp, synthetic construct
  source 1..75: mol_type = other DNA
ttggcatcgatgcaactcgatatggtcgctggtttgatattggctcaggggaaaaaaccaaagttcttactaaag

SEQ ID NO: 410217 - DNA, 75 bp, synthetic construct
  source 1..75: mol_type = other DNA
aaattgcctgatttacgtggtgagttcattcgtggctgggatgacgggcgcgggattgatccaggtcgctctatt

SEQ ID NO: 410218 - DNA, 75 bp, synthetic construct
  source 1..75: mol_type = other DNA
cgttggtgtgcctgttccgtggccttcagccacaccgcctactggctggctgaaatgcaacggtgcggctttttc

SEQ ID NO: 410219 - DNA, 75 bp, synthetic construct
  source 1..75: mol_type = other DNA
gggattaaagtcacccgtatcgaaattcgtgatgtgcgcccgcccgcagagcttatctcttcaatgaacgcgcag

SEQ ID NO: 410220 - DNA, 75 bp, synthetic construct
  source 1..75: mol_type = other DNA
tttatggatcgcattggccgcaagatcaatatgatggagcaagtgctcgacattccatcccaggaggtcatctcg

SEQ ID NO: 410221 - DNA, 75 bp, synthetic construct
  source 1..75: mol_type = other DNA
atgcttatctttatcccgattctcatttttgtcgcgctggtcattgtcggcgcgggcgtcaaaatcgtgccgcag

SEQ ID NO: 410222 - DNA, 75 bp, synthetic construct
  source 1..75: mol_type = other DNA
agatacgatagcaactggtctacaaaaattagatcgactgatttagcagacgactgggggagcgtagtctcattt

SEQ ID NO: 410223 - DNA, 75 bp, synthetic construct
  source 1..75: mol_type = other DNA
gcggctttttctgctgaagaatacccggaactggcaaaggcttacccgacaaataaattgcctgatttacgcggt

SEQ ID NO: 410224 - DNA, 75 bp, synthetic construct
  source 1..75: mol_type = other DNA
tggctatggcgagagctatatcaacgccaccggtttgcgacatgtctggcatttacgctgtatggatacgttaaa

SEQ ID NO: 410225 - DNA, 75 bp, synthetic construct
  source 1..75: mol_type = other DNA
atccgtttggtgatatcaaatcggatggcacggtgaaaacggctctcgaaaaccttggtttgggagaaggctctg

SEQ ID NO: 410226 - DNA, 75 bp, synthetic construct
  source 1..75: mol_type = other DNA
ttttcataaacgttggtttgggagaaggttctgcattacctgttggtgtgcctgttccgtggccttcagtcacac

SEQ ID NO: 410227 - DNA, 75 bp, synthetic construct
  source 1..75: mol_type = other DNA
tgcaatcagaggggctttttacgatgcaggaacacgatcagcgagaattccgaataacacaactactatagacaa

SEQ ID NO: 410228 - DNA, 75 bp, synthetic construct
  source 1..75: mol_type = other DNA
gtcttccgcgtgggcgaagcactggagtacggcatcatcggcatcaacaccggcattatttccaatgaagttgcc

SEQ ID NO: 410229 - DNA, 75 bp, synthetic construct
  source 1..75: mol_type = other DNA
ttattttcattttcatgtgctgaattatatggttacattttatttttctcacaaaaaaaacgtcgtggattggca

SEQ ID NO: 410230 - DNA, 75 bp, synthetic construct
  source 1..75: mol_type = other DNA
ttttaagagatcctaaagctttcattagagactcaaaatatattaagataatgcataaaaaaaataaaaacgata

SEQ ID NO: 410231 - DNA, 75 bp, synthetic construct
  source 1..75: mol_type = other DNA
gtagctttgtgatgcaggcggccatgttacttgtttatttttcaaataatgcttggaccaccatgtataagccta

SEQ ID NO: 410232 - DNA, 75 bp, synthetic construct
  source 1..75: mol_type = other DNA
tttttgtcgcgctggtcattgttggcgcgggcgtcaaaatcgtgccgcagggctatcagtggacagtagaacgtt

SEQ ID NO: 410233 - DNA, 75 bp, synthetic construct
  source 1..75: mol_type = other DNA
tgatgccccgcgcgcggcttatgaagtcagcaatctggagctggcgatcatcaacctgaccatgactaacatccg

SEQ ID NO: 410234 - DNA, 75 bp, synthetic construct
  source 1..75: mol_type = other DNA
tggcagcgccagaagatttggtcgactctgcgcagcggcttagcgaggtatgtcagtggctggcggaaggtgcac

SEQ ID NO: 410235 - DNA, 75 bp, synthetic construct
  source 1..75: mol_type = other DNA
tatatgcccgcgttcaggagattgaagaaaaaatgtcctcaaaccgggcgattattccgggggctaccatttttt

SEQ ID NO: 410236 - DNA, 75 bp, synthetic construct
  source 1..75: mol_type = other DNA
gcttgtgcgtgaagaagaaacgttgaaagcattcctgatcaaagctctgaccacgtatcaggacagggcaggggt

SEQ ID NO: 410237 - DNA, 75 bp, synthetic construct
  source 1..75: mol_type = other DNA
ggttgcgacaagcgctgccatgtacagggctgttcgcacaccagccctgccgccaaagatggttcgtcgccctct

SEQ ID NO: 410238 - DNA, 75 bp, synthetic construct
  source 1..75: mol_type = other DNA
aacgtcgcctggggctactggctgatgaccgcatttggcaacgttgcctttgcggtaattttaatggatgctttt

SEQ ID NO: 410239 - DNA, 75 bp, synthetic construct
  source 1..75: mol_type = other DNA
gatattggcgaacgtctggagattacgcataaggcttccagccgcatgacctttgctaacggcgcggtaagatcg

SEQ ID NO: 410240 - DNA, 75 bp, synthetic construct
  source 1..75: mol_type = other DNA
tgcggtaaaagatgattttgatgtgtttatcgattttacccgtccggaaggtacgctgaaccatctcgctttttg

SEQ ID NO: 410241 - DNA, 75 bp, synthetic construct
  source 1..75: mol_type = other DNA
tcgcaatgctcgccctggctacctggaacacttctgggcgctggtgaactgggcgttcgtggcgaaaaatctcgc

SEQ ID NO: 410242 - DNA, 75 bp, synthetic construct
  source 1..75: mol_type = other DNA
gtcttccgcgtgggcgaagcgctggagtacggcatcgtcggcatcaataccggcattatttccaatgaagtggcc

SEQ ID NO: 410243 - DNA, 75 bp, synthetic construct
  source 1..75: mol_type = other DNA
cgcgccgctatcgacgccgccaaccgcgccctgcccgcctggcgtgcgcttaccgccaaagaacgcgccaccatt

SEQ ID NO: 410244 - DNA, 75 bp, synthetic construct
  source 1..75: mol_type = other DNA
cgtggtgagtttattcgtggctgggatgatgggcgcggcgttgattcaaggcgtgcggtgctgtcaacacaagag

SEQ ID NO: 410245 - DNA, 75 bp, synthetic construct
  source 1..75: mol_type = other DNA
gttccggctggcgtgtttaacgtggtcaccggttcggcgggcgcggtcggtaacgaactgaccagcaacccgctg

SEQ ID NO: 410246 - DNA, 75 bp, synthetic construct
  source 1..75: mol_type = other DNA
tttctacgcccgcgatttaagccgcgtcttccgcgtgggcgaggcgctggaatacggcatcgtcggcatcaatac

SEQ ID NO: 410247 - DNA, 75 bp, synthetic construct
  source 1..75: mol_type = other DNA
ctggcggcaggctgcacgatggtgctgaagcccgccagtcagacgccgttctctgcgctggcgctggcagaactg

SEQ ID NO: 410248 - DNA, 75 bp, synthetic construct
  source 1..75: mol_type = other DNA
cccctgtgccgtatgcatgacggtcccgttttccgggaacaccatataaatgaactcagcgccgcactggccaga

SEQ ID NO: 410249 - DNA, 75 bp, synthetic construct
  source 1..75: mol_type = other DNA
ttctactggaactgcctggcaccgaacgccggtggcgaacctacgggtgaactggctgacgccatcaccgcttct

SEQ ID NO: 410250 - DNA, 75 bp, synthetic construct
  source 1..75: mol_type = other DNA
tcgcaatgcgcgtcctggctacctggaacacttctgggcgctggtgaactgggagttcgtggcgaaaaatctcgc

SEQ ID NO: 410251 - DNA, 75 bp, synthetic construct
  source 1..75: mol_type = other DNA
ccccagacaggcacgcctgccaccgatctggatgatgactactttgacatgttgcaggaagaactctgcagcgtg

SEQ ID NO: 410252 - DNA, 75 bp, synthetic construct
  source 1..75: mol_type = other DNA
atgccaatatagcccggcgtgacaaatttcgcgaaatgatgcgatcccccgcctaccagtggaagaagcctgcgc

SEQ ID NO: 410253 - DNA, 75 bp, synthetic construct
  source 1..75: mol_type = other DNA
tgaactcagcgccgcactggccagaatgctccatatgcaccacatactgctggaacgaacccggtacagagaaaa

SEQ ID NO: 410254 - DNA, 75 bp, synthetic construct
  source 1..75: mol_type = other DNA
gtaccttggtgctgatcctgtaattgttgatgtagatcgtaaaacatttaatatatcagttgatgccattgagaa

SEQ ID NO: 410255 - DNA, 75 bp, synthetic construct
  source 1..75: mol_type = other DNA
gccagaaccaaaggtaaggttgaacggatggtgaaatacctcaaggaaaacttcttcgtccggtaccgccggttc

SEQ ID NO: 410256 - DNA, 75 bp, synthetic construct
  source 1..75: mol_type = other DNA
tgctggtcgataaccagaaagccgcagttctgaaaaataacaatgggaaggtggtgttcaactccgggttcctgc

SEQ ID NO: 410257 - DNA, 75 bp, synthetic construct
  source 1..75: mol_type = other DNA
aaagcgccgcacgtgatgcacggctgcatttgcctgaagcccggcacccttctggatacctttacgccggtgcgc

SEQ ID NO: 410258 - DNA, 75 bp, synthetic construct
  source 1..75: mol_type = other DNA
aaaggtggtctacaagtaaactctcatctgtactgtaagcagttgaacttggagtttttttcaccaactgaaaaa

SEQ ID NO: 410259 - DNA, 75 bp, synthetic construct
  source 1..75: mol_type = other DNA
gcaaaaaataagtgaaaataaatttggtggcttcagggttagagactttaatgttgacatcgatatctggagtct

SEQ ID NO: 410260 - DNA, 75 bp, synthetic construct
  source 1..75: mol_type = other DNA
caccggcccttatgcgctggttctggtgcctgtgaaccgccccgggtttcctggagagtgttttatctgtgaact

SEQ ID NO: 410261 - DNA, 75 bp, synthetic construct
  source 1..75: mol_type = other DNA
gtacttggcaatagtaatttgacaagaggtgagataatcaggatgcttgaggcgagaaattatgatggtgcacca

SEQ ID NO: 410262 - DNA, 75 bp, synthetic construct
  source 1..75: mol_type = other DNA
atgcttgaggcgagaaattatgatggtgcaccaggattacttcttgcgtatcaaaatggagatattaatacgatt

SEQ ID NO: 410263 - DNA, 75 bp, synthetic construct
  source 1..75: mol_type = other DNA
agaaggttgcggtgctgaagaataacaacgggaaagttgtgttcaactccggattcctgttgctggctgaccact

SEQ ID NO: 410264 - DNA, 75 bp, synthetic construct
  source 1..75: mol_type = other DNA
tgttcattttttcaatacttcaaatagtaaaaggcgagatgatatatatgaacggggcttatcgtttgtcaagta

SEQ ID NO: 410265 - DNA, 75 bp, synthetic construct
  source 1..75: mol_type = other DNA
aggttactgaatgtcagggcaatgatatggcttcggttgtcgcgacgcttgaagagcttaaacaggaaggcaaac

SEQ ID NO: 410266 - DNA, 75 bp, synthetic construct
  source 1..75: mol_type = other DNA
tgaaatgttacgccgagaagatcatgcatgtgcgcgatgcgcaggtcacgccaatgcattttcactggcgtaagc

SEQ ID NO: 410267 - DNA, 75 bp, synthetic construct
  source 1..75: mol_type = other DNA
tgactgaaaccgatcatgccaaccctgatccggaaatcgtggatattgcctgcggtcgctcctctgccccgatgc

SEQ ID NO: 410268 - DNA, 75 bp, synthetic construct
  source 1..75: mol_type = other DNA
gaaacattcaatggagaaaatcaggctgaatctcaggaaaaaaatccggaggaaatggaaggcaatgaacatctt

SEQ ID NO: 410269 - DNA, 75 bp, synthetic construct
  source 1..75: mol_type = other DNA
gaaatatcagaaactgcgggcagaactccatgaagccaggaaaaacattccgccccaaaatcctgtcgatgcaga

SEQ ID NO: 410270 - DNA, 75 bp, synthetic construct
  source 1..75: mol_type = other DNA
tgctggggttctcggaagcgccatcattcccggcgaacgcccgtattgtcgccgcctggttcccaacgaaagaac

SEQ ID NO: 410271 - DNA, 75 bp, synthetic construct
  source 1..75: mol_type = other DNA
cgaacgaggtttatcacgccgccaacggaataagcagcacgatgctgaaggatgcccgtatcagtttgatgtatt

SEQ ID NO: 410272 - DNA, 75 bp, synthetic construct
  source 1..75: mol_type = other DNA
cgaagaccgggcgcttatggacgtacgttcgagacgaccgcaacgccggatcagcgctggcccccgcagtgtggt

SEQ ID NO: 410273 - DNA, 75 bp, synthetic construct
  source 1..75: mol_type = other DNA
cgatgaaaaaaatcaggctgaagttcaggaagatgatccggaggaaatagaaggcgctgaacatccgaacaatga

SEQ ID NO: 410274 - DNA, 75 bp, synthetic construct
  source 1..75: mol_type = other DNA
tggctcgactggcagccccagcgcgggcgtggcaagcgctcacggctccacctgttaacctcgccggaaaagctg

SEQ ID NO: 410275 - DNA, 75 bp, synthetic construct
  source 1..75: mol_type = other DNA
ttttgcctgcgcggccacgtaaaccgaaagataaagccaaagctgaagttggcgttcaggttgttgaacgctgga

SEQ ID NO: 410276 - DNA, 75 bp, synthetic construct
  source 1..75: mol_type = other DNA
atcagcgtgatgggtcaattttcatatgccagcgttgcggcacagcaaagcatcgtaatggtaaatactggtggg

SEQ ID NO: 410277 - DNA, 75 bp, synthetic construct
  source 1..75: mol_type = other DNA
caaaaatcctgatgcgccaataaacgctctggccggtaagttttttgatccggcaaccggagagatggggccaga

SEQ ID NO: 410278 - DNA, 75 bp, synthetic construct
  source 1..75: mol_type = other DNA
aaaatcggggcggttcataccgatgaagaaatagtctcttccgatatcattggcagccatttcggttcggtgttt

SEQ ID NO: 410279 - DNA, 75 bp, synthetic construct
  source 1..75: mol_type = other DNA
actggattgactatcttgcaagtactgacatggggattgttttagtcagcgaccgcaatatgcaatcgttagcta

SEQ ID NO: 410280 - DNA, 75 bp, synthetic construct
  source 1..75: mol_type = other DNA
tggtgaagccttatgccaccggtgctcacgcatgggaaatgagcgttgtcagagtgcgccgaagctggtggaaaa

SEQ ID NO: 410281 - DNA, 75 bp, synthetic construct
  source 1..75: mol_type = other DNA
attacagcggcatatccgcgatattaatggtcagttaaagcgtgacggaaaagacgagcgttccccccctgaatt

SEQ ID NO: 410282 - DNA, 75 bp, synthetic construct
  source 1..75: mol_type = other DNA
atggcggtagatattgccatgtttggtcgtatgctggcgaataaacccgagtttaatgttgaagccgcctgccag

SEQ ID NO: 410283 - DNA, 75 bp, synthetic construct
  source 1..75: mol_type = other DNA
cttacaaatgatatatggaattatgctgatacaagatttgtaataaagaacaacaatgaaagaacacttggtttt

SEQ ID NO: 410284 - DNA, 75 bp, synthetic construct
  source 1..75: mol_type = other DNA
cttacaaatgatgtatggagctatgctgacactaaattctccataaaaaacaataatgaacgggctctgggattt

SEQ ID NO: 410285 - DNA, 75 bp, synthetic construct
  source 1..75: mol_type = other DNA
gttaaatacttttaaaaacagggttaacgtttttaaaaaaacaagtaaatgtggtcttgaatatcaattgattgt

SEQ ID NO: 410286 - DNA, 75 bp, synthetic construct
  source 1..75: mol_type = other DNA
aaaaaggtaatatacattgaaccttttgataaaagcttagctttagatttacatgacgatgcaataaccaccaca

SEQ ID NO: 410287 - DNA, 75 bp, synthetic construct
  source 1..75: mol_type = other DNA
gcgagcattctaaaaaagcgcctcgacagaacgttcagaagcagtgcggcggtaaagaaaagaatgagtccacgt

SEQ ID NO: 410288 - DNA, 75 bp, synthetic construct
  source 1..75: mol_type = other DNA
gatggtctttggatttgcccctatatttccagacatctgttatcacttaacccattacaagcccgctgccgcaga

SEQ ID NO: 410289 - DNA, 75 bp, synthetic construct
  source 1..75: mol_type = other DNA
accataacgcacgattaagcggatacatttttgtagatttttcagtaagttttttacgtctttttttagataaag

SEQ ID NO: 410290 - DNA, 75 bp, synthetic construct
  source 1..75: mol_type = other DNA
cgatatgcgaaatggttttaacggcctggcatcaaaagttcagaacgtcctgaaggatgacccgttctccggaca

SEQ ID NO: 410291 - DNA, 75 bp, synthetic construct
  source 1..75: mol_type = other DNA
aagaaacccacgatccaatctatgatatcgagctttatgcggatcaagcagattgccccgccaacgtcatgatta

SEQ ID NO: 410292 - DNA, 75 bp, synthetic construct
  source 1..75: mol_type = other DNA
gttcaatcgcttcttaatattacaactttacatttgagactaaagggtaaatatttaaatgctggatttttatta

SEQ ID NO: 410293 - DNA, 75 bp, synthetic construct
  source 1..75: mol_type = other DNA
gctagtatttaataattgtactttgaactatattaaaataaacagtggtcttggtgaagctggttcaggtaaata

SEQ ID NO: 410294 - DNA, 75 bp, synthetic construct
  source 1..75: mol_type = other DNA
ttatttatcatttaccagaggtaacacattaactcagatggaattcaccataatggggtatatggtttctggtta

SEQ ID NO: 410295 - DNA, 75 bp, synthetic construct
  source 1..75: mol_type = other DNA
atgtccggataatctcgattttccgggaacccgctttatcactaccagaatcaacgaccagacctggaaatctct

SEQ ID NO: 410296 - DNA, 75 bp, synthetic construct
  source 1..75: mol_type = other DNA
gctggattgtactggatgaagcgcatacctatgtcgggtcgcaggccgctgaactggcactccagctgcgtcgtg

SEQ ID NO: 410297 - DNA, 75 bp, synthetic construct
  source 1..75: mol_type = other DNA
tgcggtaataatacgggaattttcccaggagcaatctatattaaaaatggcatgaaatgtaataatgaatatatt

SEQ ID NO: 410298 - DNA, 75 bp, synthetic construct
  source 1..75: mol_type = other DNA
ttccccataaatcggccctgatgcaaatgcccgcaaatctccttgccgaagatgtctgtttacctgccgcgatca

SEQ ID NO: 410299 - DNA, 75 bp, synthetic construct
  source 1..75: mol_type = other DNA
attgcatccggcattaagtggccattaccagaaacgctctcttttacccagctcgaccagatgctgtttactaac

SEQ ID NO: 410300 - DNA, 75 bp, synthetic construct
  source 1..75: mol_type = other DNA
tgcgccgcccttatgaccggcttgaatcgaagtaccagcgccgcaccgtgttttttgcgtcagtgaacccgaaac

SEQ ID NO: 410301 - DNA, 75 bp, synthetic construct
  source 1..75: mol_type = other DNA
agaaatgaatttaatccaatagatatatcatcttataatgtttctgatatttcatggagtgaacatcaagtcatg

SEQ ID NO: 410302 - DNA, 75 bp, synthetic construct
  source 1..75: mol_type = other DNA
gggtattacgtcattccctgatgatagcttcgacaatatccgttcttaccggttgcgactattttaccgacaact

SEQ ID NO: 410303 - DNA, 75 bp, synthetic construct
  source 1..75: mol_type = other DNA
tgaaggacatgccgcgtttgtggcggcgcatttttctgcttatccgtgtggacgggctggatgccagcagcgtct

SEQ ID NO: 410304 - DNA, 75 bp, synthetic construct
  source 1..75: mol_type = other DNA
aaaccgtggcttcaaagatgctccatgggctctgtctgaagaagaattagcaccgttggatgctatatttctttc

SEQ ID NO: 410305 - DNA, 75 bp, synthetic construct
  source 1..75: mol_type = other DNA
cttactctgaacatatgcttgaaggaggtcgttcactcaaatctcaatttctgccacggcaacctaactgtccaa

SEQ ID NO: 410306 - DNA, 75 bp, synthetic construct
  source 1..75: mol_type = other DNA
actctagaaccagagttaaagtggacttacaatgaacatatccttgagggggggcgttcgctcagacctcaattt

SEQ ID NO: 410307 - DNA, 75 bp, synthetic construct
  source 1..75: mol_type = other DNA
atgactaattctactgataaccagaactacgttcgtgcagtactggcaggcattggtattgattttgatgaaaca

SEQ ID NO: 410308 - DNA, 75 bp, synthetic construct
  source 1..75: mol_type = other DNA
tcaaaaaatattaaagtatatacacttacgatggataataatgagggtaattttaataaaattaaaaaaataggt

SEQ ID NO: 410309 - DNA, 75 bp, synthetic construct
  source 1..75: mol_type = other DNA
atcgtctgcgtggtctgttttttattaattcctatgtgaaaggacgctatttgacccacgatcggcaacgggtgg

SEQ ID NO: 410310 - DNA, 75 bp, synthetic construct
  source 1..75: mol_type = other DNA
attctcgtttttgccacattgatatatcaagagaaaagaacaaaaactgtggtagtacttacacaccttatgatg

SEQ ID NO: 410311 - DNA, 75 bp, synthetic construct
  source 1..75: mol_type = other DNA
tttggcggtggtcgctacaacggcggcgcggtaggtgctggcaacctgtaccgcgtaggggaacacggtaagccg

SEQ ID NO: 410312 - DNA, 75 bp, synthetic construct
  source 1..75: mol_type = other DNA
gacgccgttcaggaaatgggcgctaacgcaacggcaaaacaggttagtgagatgaaaaaccttgcgcacctgatt

SEQ ID NO: 410313 - DNA, 75 bp, synthetic construct
  source 1..75: mol_type = other DNA
accgcgacaatgggtacggccccgatgatcgcaatgtcagctatcagcgccttgatggctggaattactggcttg

SEQ ID NO: 410314 - DNA, 75 bp, synthetic construct
  source 1..75: mol_type = other DNA
tcaaaagcattgcaaaagaccatagaaaatacagccatgcgcctgatgcagcgtgaatcacaaaggcctggaggc

SEQ ID NO: 410315 - DNA, 75 bp, synthetic construct
  source 1..75: mol_type = other DNA
tgatcgcaatgtcagctattagtgctttgatggctggcattactggcttgttcggcggcagacgctacaacggcg

SEQ ID NO: 410316 - DNA, 75 bp, synthetic construct
  source 1..75: mol_type = other DNA
aatatacgattgatgcaaaaacagacaagctactgatcgccggacgccgcgctgatgacacctttgataacatcg

SEQ ID NO: 410317 - DNA, 75 bp, synthetic construct
  source 1..75: mol_type = other DNA
tgtggatggatcatcgtgcaactgtcgagacggcgcagattaacgcaacgaaggatcccgtattgcgctacgttg

SEQ ID NO: 410318 - DNA, 75 bp, synthetic construct
  source 1..75: mol_type = other DNA
caagcctatcccgggtatgacattaaaaacccatgcgaaaggtttgcaagatttcgccctaagcgaatggaaaga

SEQ ID NO: 410319 - DNA, 75 bp, synthetic construct
  source 1..75: mol_type = other DNA
gttcttaaagatgcccagggtaactttattactgatggtgttgttcagcttaatgaggaaaacgtacaagtcagg

SEQ ID NO: 410320 - DNA, 75 bp, synthetic construct
  source 1..75: mol_type = other DNA
gcactcaaaccaaccacggtatcggctggcgttatttcacatcgagctggatgtctggcgtcaatatgtttatcg

SEQ ID NO: 410321 - DNA, 75 bp, synthetic construct
  source 1..75: mol_type = other DNA
gatcgcggatctggtggtcattaaggatggttcagaggcggacggttcgacggcgaacacgctgcgggtgagggt

SEQ ID NO: 410322 - DNA, 75 bp, synthetic construct
  source 1..75: mol_type = other DNA
cagaggcggacggttcgacggcgaacacgctgcgggcgagggtcaccgatgcgttcggtaatgcacttgccggac

SEQ ID NO: 410323 - DNA, 75 bp, synthetic construct
  source 1..75: mol_type = other DNA
aaatttaatcctgaaactggtatatcagagcttgggacaggaaagtcttctggcttgtgtgtagagtattattaa

SEQ ID NO: 410324 - DNA, 75 bp, synthetic construct
  source 1..75: mol_type = other DNA
cagaggagcctctatgcgccttatcaaattaagcgaagtcatgctcagaacgggcttcaagaaaacggcaatcta

SEQ ID NO: 410325 - DNA, 75 bp, synthetic construct
  source 1..75: mol_type = other DNA
agtgtagtagaaagtataaatagtaatgttgtaaaactctacaaacaagaaaatggcggtccttcaaaagcaaga

SEQ ID NO: 410326 - DNA, 75 bp, synthetic construct
  source 1..75: mol_type = other DNA
cctttggcaccagacatattattgaaactctcagggaaaatgggcataccattacccgattaacattatgtggtg

SEQ ID NO: 410327 - DNA, 75 bp, synthetic construct
  source 1..75: mol_type = other DNA
cgctgctcacaaaaatttaaaattagttgtgattggtgattatacagaaatgagtaaaagtgacaaaggtgcata

SEQ ID NO: 410328 - DNA, 75 bp, synthetic construct
  source 1..75: mol_type = other DNA
gagaaatgcaacgttaaatatgaaactgaaaacattgagagaacaagaaatgtatacattaacttgggatgacct

SEQ ID NO: 410329 - DNA, 75 bp, synthetic construct
  source 1..75: mol_type = other DNA
atgttgcaggttatgcgattgcatcagcactggtgcgccttctggtgaagaaggcgatcatcaccgcagaagagg

SEQ ID NO: 410330 - DNA, 75 bp, synthetic construct
  source 1..75: mol_type = other DNA
taaacgctttattgaaatcgcggacaacgtaaaactactacgcgcccgtgtatcccggctatccggtagtctggt

SEQ ID NO: 410331 - DNA, 75 bp, synthetic construct
  source 1..75: mol_type = other DNA
gcatttgataaaagaaatattatggaacctgcagcaaagaaaaatcccgctgatgttcctgctataagaactaat

SEQ ID NO: 410332 - DNA, 75 bp, synthetic construct
  source 1..75: mol_type = other DNA
caactggatatgtagcacgagaaagaccatggtacaaccttccagataagactcaaaaaaaatggagcggaatat

SEQ ID NO: 410333 - DNA, 75 bp, synthetic construct
  source 1..75: mol_type = other DNA
actcaaaaaaaatggagcggaatatataattgctacggtttccctgggggtaaatgtctttcttttactttgaag

SEQ ID NO: 410334 - DNA, 75 bp, synthetic construct
  source 1..75: mol_type = other DNA
ccgtaagtttgctgaaaagtgggtgaaggaagagtttgcccgcacccagaaagagcttgatttccagcgtgaggt

SEQ ID NO: 410335 - DNA, 75 bp, synthetic construct
  source 1..75: mol_type = other DNA
tggggactcagtaccgacgattatcagcgttatcagcagctgatgaagggaccccggggtatccagtcgccgggt

SEQ ID NO: 410336 - DNA, 75 bp, synthetic construct
  source 1..75: mol_type = other DNA
acgtgtctgggccgaaaagtgggtcagggctgaatatgaacgaacagagaaggagctggcgtttcagcaggaggt

SEQ ID NO: 410337 - DNA, 75 bp, synthetic construct
  source 1..75: mol_type = other DNA
gcagtataaagcacaaaatatcattaccaatatgatagaaagtgaccgaattaagtttattgaatctatcataaa

SEQ ID NO: 410338 - DNA, 75 bp, synthetic construct
  source 1..75: mol_type = other DNA
attggggcaaatttaggctattattacagtggagataggtgcaaagactgtgctattgatccaaatacaaattat

SEQ ID NO: 410339 - DNA, 75 bp, synthetic construct
  source 1..75: mol_type = other DNA
aaaaggtatgtttaaaggttgttttatttctaaatgcaaaattgaaaattatagatgtgagacgtctaaaatcta

SEQ ID NO: 410340 - DNA, 75 bp, synthetic construct
  source 1..75: mol_type = other DNA
tgaaattgaacgcaaagcaatccgcaagttcattaacagcattgaacacatcctgcgtgacaagctgtctccgta

SEQ ID NO: 410341 - DNA, 75 bp, synthetic construct
  source 1..75: mol_type = other DNA
tattataacgaatggcatctgcatagtgcgctggggtatcctcgccacgggaatatctgcggcagcgggcttgta

SEQ ID NO: 410342 - DNA, 75 bp, synthetic construct
  source 1..75: mol_type = other DNA
accaatatgatagcaagtgaccgaattaagtttattgaatctatcataaaggaaatcattccatcggcagatata

SEQ ID NO: 410343 - DNA, 75 bp, synthetic construct
  source 1..75: mol_type = other DNA
agctggtggacgcggccaatgcgccagcggaagtcgctcaccttgatatcgccagatcatgcggaacgtgcatgc

SEQ ID NO: 410344 - DNA, 75 bp, synthetic construct
  source 1..75: mol_type = other DNA
gggtgtaaatttgaatcaatttctgtttcctcgcaagggaaaaacccacttaaagatttaatgctattattaaag

SEQ ID NO: 410345 - DNA, 75 bp, synthetic construct
  source 1..75: mol_type = other DNA
gggactatatcattaaaaattttgatgaaaggaaaataataaaaatataccttgatacgttaacaagatatatgt

SEQ ID NO: 410346 - DNA, 75 bp, synthetic construct
  source 1..75: mol_type = other DNA
aaccatgcgcagtatctcgataaacgcagagaaatgatgcaatggtgggcggattggcttgatgaaaaggtgggg

SEQ ID NO: 410347 - DNA, 75 bp, synthetic construct
  source 1..75: mol_type = other DNA
acaagctgccgacaaccacggaacaggcaatgacagagctatcaacaaattttagcctgttactggaaaccatcg

SEQ ID NO: 410348 - DNA, 75 bp, synthetic construct
  source 1..75: mol_type = other DNA
ctcagagtgcatactaccgtaaaggtaacggtaatgtgattttacgccagggtggatatgcgatttttaatgtcc

SEQ ID NO: 410349 - DNA, 75 bp, synthetic construct
  source 1..75: mol_type = other DNA
gtccggtgatgcgggatttgtatgccgtcgctgtggcatttctcggcccacattgcgtaaatggtggcgcagata

SEQ ID NO: 410350 - DNA, 75 bp, synthetic construct
  source 1..75: mol_type = other DNA
aaatacgcaggcgcagaagacgcttcagtctgagcagaagaagggagcttcccaggctgattctattgcccagaa

SEQ ID NO: 410351 - DNA, 75 bp, synthetic construct
  source 1..75: mol_type = other DNA
gccctggcgcgcgtaaatgccgacgtggctactttgctgagaaatcaggcactgctcgagtataaccaggcgatc

SEQ ID NO: 410352 - DNA, 75 bp, synthetic construct
  source 1..75: mol_type = other DNA
cactttattatccaaattactatcagagggttagggaagagattatttcttttctgcaggggtttgattatttta

SEQ ID NO: 410353 - DNA, 75 bp, synthetic construct
  source 1..75: mol_type = other DNA
aaggtctggaaagcggtcacggattcaggcatgaattcagcacgattatgaacgagcacgaatggcctgctgatg

SEQ ID NO: 410354 - DNA, 75 bp, synthetic construct
  source 1..75: mol_type = other DNA
accgcactcacggcattcgtagggaaacttgttgagttatcgcgtgaagccgtcattgctaaaggtaatgttgct

SEQ ID NO: 410355 - DNA, 75 bp, synthetic construct
  source 1..75: mol_type = other DNA
aaatacggaagagcaaaagaagcttaaatcggagcagaaaaaaggagcatctcaggcagaaaccattgctcagaa

SEQ ID NO: 410356 - DNA, 75 bp, synthetic construct
  source 1..75: mol_type = other DNA
ttcaccttttaggagaaaagaacgcttattcgatttagccatttctacgagatgctatcctagccttttcaatta

SEQ ID NO: 410357 - DNA, 75 bp, synthetic construct
  source 1..75: mol_type = other DNA
gctggaagcgtggttacgaaagatgtacctccatattctatagtgactggcaaccccgcaaaattaattaaaatg

SEQ ID NO: 410358 - DNA, 75 bp, synthetic construct
  source 1..75: mol_type = other DNA
gctggttcagtagttaccaaaaatgtcgagcctaatacaatagtaatcggaaatccagctaaagaattaaagaga

SEQ ID NO: 410359 - DNA, 75 bp, synthetic construct
  source 1..75: mol_type = other DNA
ctgcgcagccgcttacaggatatacgccagcatcttcactgccagttaccggtttacgtggtactgacccggctt

SEQ ID NO: 410360 - DNA, 75 bp, synthetic construct
  source 1..75: mol_type = other DNA
tcgcgatgcgattctgggcgtcacgttcacccgccgcgcccatgaaaatgatgactggcgaacagagttgaatgc

SEQ ID NO: 410361 - DNA, 75 bp, synthetic construct
  source 1..75: mol_type = other DNA
gaacgggtggctggggcggcccgcttgagctgaaagccacgccgggaaaaaaaaatcgtctatatcaccgccggt

SEQ ID NO: 410362 - DNA, 75 bp, synthetic construct
  source 1..75: mol_type = other DNA
tcaacgaattattacccttagagggtataaaaacatccttgataataagtttcttaaatattggttgcaatcaga

SEQ ID NO: 410363 - DNA, 75 bp, synthetic construct
  source 1..75: mol_type = other DNA
aggattattatctttactcattttttctatggtccttcctgcacatgccggaattgttggtgatgctgccaactt

SEQ ID NO: 410364 - DNA, 75 bp, synthetic construct
  source 1..75: mol_type = other DNA
cgtttctgatggaatgcgcaagcacaggaaaaacggttatcactgcggaagaaggccggaaaattgaactcatgt

SEQ ID NO: 410365 - DNA, 75 bp, synthetic construct
  source 1..75: mol_type = other DNA
taaaagcagatagtattggtgagggtacacgtatatggcaatttgttgtagtactaccaggggcaaaaattggta

SEQ ID NO: 410366 - DNA, 75 bp, synthetic construct
  source 1..75: mol_type = other DNA
gtgagcgaaattaactatcaagaactgcgcgaggcggcggaacaggcaacgcaagatgaatgggtagcatatatt

SEQ ID NO: 410367 - DNA, 75 bp, synthetic construct
  source 1..75: mol_type = other DNA
atctccgcgataccctacttcccaaactgatgagcggcgaagtacgggttcagtatgcggaagaagcaatcgcat

SEQ ID NO: 410368 - DNA, 75 bp, synthetic construct
  source 1..75: mol_type = other DNA
aaggtggcgatcccgcactttgtcaggctgcgttggcagcagctaaacttgcgaagatcccgaaaccaccaagcc

SEQ ID NO: 410369 - DNA, 75 bp, synthetic construct
  source 1..75: mol_type = other DNA
caagtcggtgtccgcgttcaaaaccttttcattaatgtccatgatgctttttttttacaccaatactctgcggca

SEQ ID NO: 410370 - DNA, 75 bp, synthetic construct
  source 1..75: mol_type = other DNA
atcatttcacgccggaacagattgccgcactgcgggaaaaatcatcagcaggctggagtggcatcagcggggctg

SEQ ID NO: 410371 - DNA, 75 bp, synthetic construct
  source 1..75: mol_type = other DNA
ttccgtggccgtagcgaaaaacaaaagcagctgtatctgttcgtgccgaatcaggacaagctcaaacagttgggc

SEQ ID NO: 410372 - DNA, 75 bp, synthetic construct
  source 1..75: mol_type = other DNA
tctccattttatccatgatgcttttcttatattcaaacacactccgtcattatctaaaaaatgaaggagagaagc

SEQ ID NO: 410373 - DNA, 75 bp, synthetic construct
  source 1..75: mol_type = other DNA
ctgccgctcagggaagcgtcggcgcttacgtcaacatcggttatatgtataaacacggacaaggcgttgagaaag

SEQ ID NO: 410374 - DNA, 75 bp, synthetic construct
  source 1..75: mol_type = other DNA
gccactgcctggtataacctggccattatgtatcactacggagaaggaagacctgtcgatctccgacaggctctc

SEQ ID NO: 410375 - DNA, 75 bp, synthetic construct
  source 1..75: mol_type = other DNA
acggcagacggcatcaatctttacagctaatgtctatggcggataatttaaaatacaacaaacaaattatcaatg

SEQ ID NO: 410376 - DNA, 75 bp, synthetic construct
  source 1..75: mol_type = other DNA
tggatcttcttaagggagtggcaattttcctagttgtgtggggccactgcattcaatttcttacttcggacagat

SEQ ID NO: 410377 - DNA, 75 bp, synthetic construct
  source 1..75: mol_type = other DNA
aatgtgtcgcgtgctccgggtggcccgcagcggctggtatacgtggtgtcagcggcgggcaaggataagccttcg

SEQ ID NO: 410378 - DNA, 75 bp, synthetic construct
  source 1..75: mol_type = other DNA
gtgcaacaggaaccggaaatagcctgcaatgcctgcggtcagactggcggggataactgccctgactgtggtgcg

SEQ ID NO: 410379 - DNA, 75 bp, synthetic construct
  source 1..75: mol_type = other DNA
tgtaccctggatactttccagttttatctggaaaaacaggggtgggctcttgtaaaccggagcgcaattaaaaat

SEQ ID NO: 410380 - DNA, 75 bp, synthetic construct
  source 1..75: mol_type = other DNA
tcccgaagagatactggagattttaaattattctcaacattctgaagataggggtgggtgtacagttattaacgg

SEQ ID NO: 410381 - DNA, 75 bp, synthetic construct
  source 1..75: mol_type = other DNA
tagtaaattctgtgccagtgactttccctgtcccgttccctgttaattgctggggcgttttttctaccaaattaa

SEQ ID NO: 410382 - DNA, 75 bp, synthetic construct
  source 1..75: mol_type = other DNA
gatcgcaacctggggcgcattctcgacctgatggatgagcacgatctgtggcgagataccatgctgattgtcggc

SEQ ID NO: 410383 - DNA, 75 bp, synthetic construct
  source 1..75: mol_type = other DNA
atctttccttgtatgaagataactgggatggaccgcattatgactggccgcgtggccgggtgcaggaaagcgacg

SEQ ID NO: 410384 - DNA, 75 bp, synthetic construct
  source 1..75: mol_type = other DNA
tataaaaaagagcaacttaaaaattttgaacaagctcagtttttatttaaaagccagtggcctgatgagactaaa

SEQ ID NO: 410385 - DNA, 75 bp, synthetic construct
  source 1..75: mol_type = other DNA
gttgaaatgaactggatccataacagtaaagattttgctgtctcaatgaacggtgtgaaagtcgaacaagatggg

SEQ ID NO: 410386 - DNA, 75 bp, synthetic construct
  source 1..75: mol_type = other DNA
cgttctctggtaactgtcgccccgtttgcttatatgacccaaccgctcttttccgccgctggaatgctgtcgcgg

SEQ ID NO: 410387 - DNA, 75 bp, synthetic construct
  source 1..75: mol_type = other DNA
tttttcaacagccagtgccgcccgatgtgcaggggcaaccgctggcgaaaacggtcagtcacgatgaaccagtac

SEQ ID NO: 410388 - DNA, 75 bp, synthetic construct
  source 1..75: mol_type = other DNA
ctaaccgccgtattaccgtgcctggttactggttttaccgcgacgataaatttgtcttcgactacaaacttaaag

SEQ ID NO: 410389 - DNA, 75 bp, synthetic construct
  source 1..75: mol_type = other DNA
ataccagctggcacgacagcataaatttttattgtggctgttctccgatgatggtcaggaatggcacgaagccca

SEQ ID NO: 410390 - DNA, 75 bp, synthetic construct
  source 1..75: mol_type = other DNA
tatcctgctctttccggcagctaacggtcaaggcaatgtgaaagtaagaatggatgatgttctacctcaattccg

SEQ ID NO: 410391 - DNA, 75 bp, synthetic construct
  source 1..75: mol_type = other DNA
taaaagaagagttttcactttcagaagttgcagacattttgggcgtttcaaaagaaactttaaggcgttgggata

SEQ ID NO: 410392 - DNA, 75 bp, synthetic construct
  source 1..75: mol_type = other DNA
ctgcctaacggcaacaacgatacgaagatagtcaatattgcgcccgatgccagcaacgcgcaggtcaccctgaac

SEQ ID NO: 410393 - DNA, 75 bp, synthetic construct
  source 1..75: mol_type = other DNA
gatttcaacattatcactgataaaacctcatataacgccattgaatggcccgtctctccggaagcctcttcctga

SEQ ID NO: 410394 - DNA, 75 bp, synthetic construct
  source 1..75: mol_type = other DNA
gtgcgcagaatacgatgaatggggcaacctgctgaatgaagagaacccgcatcagctgcagcagcttatccgcct

SEQ ID NO: 410395 - DNA, 75 bp, synthetic construct
  source 1..75: mol_type = other DNA
aagctggcagcgtatggtgaaatcatttctacactgccacccgatgtggtcgcacatcctaccattaaacggcaa

SEQ ID NO: 410396 - DNA, 75 bp, synthetic construct
  source 1..75: mol_type = other DNA
gtggtcggactatctggacatgagccgcgaggggtacgttgcgccgtatatttatgcgcggcagcataaggtggc

SEQ ID NO: 410397 - DNA, 75 bp, synthetic construct
  source 1..75: mol_type = other DNA
acaagaacagcctcactgatctggatgcctggctgtgccaacacagcgccacgctgacgggcgcgccgactttgt

SEQ ID NO: 410398 - DNA, 75 bp, synthetic construct
  source 1..75: mol_type = other DNA
gcgccatcgtggttgcgtccgtgaaagaagcaccaattgggatcgaggtcatccccgcacacgtcactgaatatc

SEQ ID NO: 410399 - DNA, 75 bp, synthetic construct
  source 1..75: mol_type = other DNA
atggaaaaattaacctgttttaaagcctacgatattcgcggaaaattaggcgaagaactgaatgaagatattgcc

SEQ ID NO: 410400 - DNA, 75 bp, synthetic construct
  source 1..75: mol_type = other DNA
ggtgcagtggttaaagcggagtttgtgactcatgtgggttatcgcgttctcttcagagtgttaaatgcaaatggt

SEQ ID NO: 410401 - DNA, 75 bp, synthetic construct
  source 1..75: mol_type = other DNA
tataatgatgaatcagataagtgtgattacactgaaagtatcgttgagaaacaatgccctaactgtggtagagat

SEQ ID NO: 410402 - DNA, 75 bp, synthetic construct
  source 1..75: mol_type = other DNA
atgcgggggttataccgattgttccatcatgggcatcaaggactcctgtttctcaagtgccagccgccgtattaa

SEQ ID NO: 410403 - DNA, 75 bp, synthetic construct
  source 1..75: mol_type = other DNA
gaaagaaaacagcaagttttgccataacttcaggtatgggaatatctaaaaatgcatgggataccattggtgagt

SEQ ID NO: 410404 - DNA, 75 bp, synthetic construct
  source 1..75: mol_type = other DNA
cggcgaatggttatgcggatactaaagtaacggcttcagagaatcgacttgatgataagattgccgcaagtgaag

SEQ ID NO: 410405 - DNA, 75 bp, synthetic construct
  source 1..75: mol_type = other DNA
tttccgttaccccggctgggcaaaaatgatgattattaatggtgttacttttactaaaaatgatactcaaaactc

SEQ ID NO: 410406 - DNA, 75 bp, synthetic construct
  source 1..75: mol_type = other DNA
ttgtggaacagggttttgctggacatagccacggattaacaataacagatgttttctaccgcctttatgaaataa

SEQ ID NO: 410407 - DNA, 75 bp, synthetic construct
  source 1..75: mol_type = other DNA
tgatggcggtcatcgttgcccaggcgatgaaccatggcaaccatgtgatggcgcgaaccagcgatataccattcc

SEQ ID NO: 410408 - DNA, 75 bp, synthetic construct
  source 1..75: mol_type = other DNA
tgaagcccgtcggtaaactgacgatgcaatggcaggttgtggatggtatgacagcattaatccggcgtaacctga

SEQ ID NO: 410409 - DNA, 75 bp, synthetic construct
  source 1..75: mol_type = other DNA
tgagattttctacaatcgtcagcgtcgtcactctcgtctggggaatatctccccggcagccttcaggataaaata

SEQ ID NO: 410410 - DNA, 75 bp, synthetic construct
  source 1..75: mol_type = other DNA
aacctgctacccgttgccggagtaatgcgccggaaacacccgaaggcgcaaattattatcgccgcagacaacgac

SEQ ID NO: 410411 - DNA, 75 bp, synthetic construct
  source 1..75: mol_type = other DNA
gccagagctgcgccactgatgcagtcactgtatgactggatacagactcagatgaaaacactgtcgcgtcactcg

SEQ ID NO: 410412 - DNA, 75 bp, synthetic construct
  source 1..75: mol_type = other DNA
acggccaatgactgtataaccgatgctatagaagcgctaccggtttttccgctctattcgtttgatccggagacg

SEQ ID NO: 410413 - DNA, 75 bp, synthetic construct
  source 1..75: mol_type = other DNA
gaggtatatcgggaagtgtcgttttgcatagccaggggatcacttttgggcaaccaataaatggttctgcggctc

SEQ ID NO: 410414 - DNA, 75 bp, synthetic construct
  source 1..75: mol_type = other DNA
aggagtatggaaaaagaaaaatgatatcagtataagtataaggcaatcttttaatgattatggtaatatagatct

SEQ ID NO: 410415 - DNA, 75 bp, synthetic construct
  source 1..75: mol_type = other DNA
ggaagatggttaaatacaagtagcacaaatctaagatatcagatcgttagtgagcgtgacgatagtgtaagtaat

SEQ ID NO: 410416 - DNA, 75 bp, synthetic construct
  source 1..75: mol_type = other DNA
acaggaaaagggtcacatttgcatggccttagtttctgtaagttgattgacaaaagctccccgttacttattaac

SEQ ID NO: 410417 - DNA, 75 bp, synthetic construct
  source 1..75: mol_type = other DNA
atagcaaacagtttttcatgtttggcccacgcgatctttatcgcccaggtgaaacggtaatcctcaatggtttgc

SEQ ID NO: 410418 - DNA, 75 bp, synthetic construct
  source 1..75: mol_type = other DNA
taatggttataaaaagaaaaatgatactagccttagtataagacaggatttatttgattatggttcattagactt

SEQ ID NO: 410419 - DNA, 75 bp, synthetic construct
  source 1..75: mol_type = other DNA
gcatgatgacgctggacaccgcacggggacgggcgcagttcgtaggaaaaagcctgattattatgcctgaccaga

SEQ ID NO: 410420 - DNA, 75 bp, synthetic construct
  source 1..75: mol_type = other DNA
gggaaagggacgcgcagctactgtaaatgacagtcactcgtggctatcttctgtcaatggtgttgacagatattt

SEQ ID NO: 410421 - DNA, 75 bp, synthetic construct
  source 1..75: mol_type = other DNA
cgcgagctaaccgagctggcccagcagaccgacaaaggcttgctgctggccggtcaggccctggagagcctacgg

SEQ ID NO: 410422 - DNA, 75 bp, synthetic construct
  source 1..75: mol_type = other DNA
cacaggttatcatctgtttattgctaatatatttgttattctatacagaaatagtaatattattattcttggcac

SEQ ID NO: 410423 - DNA, 75 bp, synthetic construct
  source 1..75: mol_type = other DNA
ggtgaagtactagcactatatgtgcttatattttcgctatacagttttgatattataagtgtgcagaaggtaatt

SEQ ID NO: 410424 - DNA, 75 bp, synthetic construct
  source 1..75: mol_type = other DNA
ccgacagtgacatcaatacaatcgttgccgatttggatcgctgggcgttgggtgagcttggatcaaaactcacct

SEQ ID NO: 410425 - DNA, 75 bp, synthetic construct
  source 1..75: mol_type = other DNA
tgaaactggcgtctgttgatcagttccgtgactcaatggataacagcaaaaccgtttgggaagaagtttccggcg

SEQ ID NO: 410426 - DNA, 75 bp, synthetic construct
  source 1..75: mol_type = other DNA
tattgattaccgggcagcacaaaccgaccagacggcagcgagccagagaagggagcaactggaggctgaccgcca

SEQ ID NO: 410427 - DNA, 75 bp, synthetic construct
  source 1..75: mol_type = other DNA
atatgtgtgcggcgctttttttcatgaacgaacccaaaggcatgatgatgggcggaggtacatgggcaggccagc

SEQ ID NO: 410428 - DNA, 75 bp, synthetic construct
  source 1..75: mol_type = other DNA
ttgatgatatccctgaagccgatatccagcgtttagcccaattggcgaatagctatcgtacctgtatccagatcc

SEQ ID NO: 410429 - DNA, 75 bp, synthetic construct
  source 1..75: mol_type = other DNA
cgccacgcacatcctggactaccaggatgaaggtaaagttgagttcttcgaaggtaactttactgagtacgaaga

SEQ ID NO: 410430 - DNA, 75 bp, synthetic construct
  source 1..75: mol_type = other DNA
ccgggctgtgcgatggttatctcgcacgaccgttggttcctcgaccgtatcgccacgcacatcctggactaccag

SEQ ID NO: 410431 - DNA, 75 bp, synthetic construct
  source 1..75: mol_type = other DNA
aaaataaaataatatctacaatatttattgttctctctaccatttcattaatattgataattacatttgcttttt

SEQ ID NO: 410432 - DNA, 75 bp, synthetic construct
  source 1..75: mol_type = other DNA
tgacaggtgttggcgctaagttcgggctgaaggggctgaagaacgagaaacttgccctgcggcagaataccgcga

SEQ ID NO: 410433 - DNA, 75 bp, synthetic construct
  source 1..75: mol_type = other DNA
atgagtaaacatccaaaactcctggttctcgctctggcctgccttgcttgtgctggccgtgccagtgctgcgcct

SEQ ID NO: 410434 - DNA, 75 bp, synthetic construct
  source 1..75: mol_type = other DNA
ttttgccaaaccatttaacatcattatttgttgaaaataacaggctatataacttaccggctcttcccgaaaaat

SEQ ID NO: 410435 - DNA, 75 bp, synthetic construct
  source 1..75: mol_type = other DNA
ttgggtttagcccaatattcaaatcattcattaaaatagatgttaccaccgcaatgattatcagtactatcgtag

SEQ ID NO: 410436 - DNA, 75 bp, synthetic construct
  source 1..75: mol_type = other DNA
aagactactacccactttcaattttttgatatattcaaagtattcagtgatattatgagtacccggttggctggg

SEQ ID NO: 410437 - DNA, 75 bp, synthetic construct
  source 1..75: mol_type = other DNA
ctgcggccagactggcggggataactgccctgactgtggtgcggtgatgggcgacgcaacataccaggaaacatt

SEQ ID NO: 410438 - DNA, 75 bp, synthetic construct
  source 1..75: mol_type = other DNA
atgctgaaagcctggggcgtcaaaacagacgtcttcccggcgctggcagcactgccgccggatcaaccactggac

SEQ ID NO: 410439 - DNA, 75 bp, synthetic construct
  source 1..75: mol_type = other DNA
tttttgacagtgtgagttttcgcggcattcaactggcatcagatgacaacatgttaccagacagtttgaaaggct

SEQ ID NO: 410440 - DNA, 75 bp, synthetic construct
  source 1..75: mol_type = other DNA
gagaagcggcgaaaggaaaagcgcgtgcagcagccggacaacaccgcgccggacggggccaccgtatcggcggag

SEQ ID NO: 410441 - DNA, 75 bp, synthetic construct
  source 1..75: mol_type = other DNA
catcagtttcttgctccccctctattaactcaaactcaaccagtaatgaacattatctgagaatcctgactgaat

SEQ ID NO: 410442 - DNA, 75 bp, synthetic construct
  source 1..75: mol_type = other DNA
ttcagaatggcaaagatttgaaagatatcactctgcatcctgacgatgaatacggccatttttgtcgagatggca

SEQ ID NO: 410443 - DNA, 75 bp, synthetic construct
  source 1..75: mol_type = other DNA
tggaacgactggaaaccctgaaaaacgaaaaaccacaccagaagcttttgctggtttttccgggcaaaccacagg

SEQ ID NO: 410444 - DNA, 75 bp, synthetic construct
  source 1..75: mol_type = other DNA
agtttgtttcgccaatggtgtatggagagcgaaagatcacatgggatgaggcttactccaggtttaggagcttag

SEQ ID NO: 410445 - DNA, 75 bp, synthetic construct
  source 1..75: mol_type = other DNA
aagatgaatcttatgctgcctttaactacagcacgttattgttgagaaacataagctttaccgttggatggaaca

SEQ ID NO: 410446 - DNA, 75 bp, synthetic construct
  source 1..75: mol_type = other DNA
agttagagagcaatctggcagagctgcgtggcggcagcgattacgcgcaacgtaaaatcaagatagccgctgctc

SEQ ID NO: 410447 - DNA, 75 bp, synthetic construct
  source 1..75: mol_type = other DNA
ccagttatcgctatagtggtgctggagtcggttatcaggtcgccagtgtggttggcggtggatttacacctttta

SEQ ID NO: 410448 - DNA, 75 bp, synthetic construct
  source 1..75: mol_type = other DNA
gacatgtaatattccatatgcacttggaaataaaaattcggcgggcttatatgtctccacctttagatgccagta

SEQ ID NO: 410449 - DNA, 75 bp, synthetic construct
  source 1..75: mol_type = other DNA
aagagttatagtacgtttgacgatgctatggaaccaggccagagttattctttcggcaagagaaaaaatgacttt

SEQ ID NO: 410450 - DNA, 75 bp, synthetic construct
  source 1..75: mol_type = other DNA
cctatatgcttattatggcaggattttcttataacaatgatttattagcaaaaaaaagtgattatatctttgatt

SEQ ID NO: 410451 - DNA, 75 bp, synthetic construct
  source 1..75: mol_type = other DNA
acatgtatggataaaaacgtttcatcccttttcagtaattaaattacttaaggggatgagtacaattaaaaaatt

SEQ ID NO: 410452 - DNA, 75 bp, synthetic construct
  source 1..75: mol_type = other DNA
ttcttcagatgataaagacgtcatcgcaattgatggaaaaacactccggtattcttatgacaagagtcgccgcaa

SEQ ID NO: 410453 - DNA, 75 bp, synthetic construct
  source 1..75: mol_type = other DNA
ggaaccgctctggcaaaatcaggtgtcgcacttaatcgcatgtcggaagatgtggatatcaaactggtgcctaag

SEQ ID NO: 410454 - DNA, 75 bp, synthetic construct
  source 1..75: mol_type = other DNA
tctgtctgtgaacttattcaggatgtagctcaaaaatttgagctcagcatagaaacccgtcgattgcaactaaga

SEQ ID NO: 410455 - DNA, 75 bp, synthetic construct
  source 1..75: mol_type = other DNA
cttgattacaacatgtatgccagccagtatgccccacatcacggagacagcacccaaaacgtcagctcctatggt

SEQ ID NO: 410456 - DNA, 75 bp, synthetic construct
  source 1..75: mol_type = other DNA
agatttacccgcgggattatgatgtggtgaacgtggcgaacatgcgccacctgtggattacgccggagccaatta

SEQ ID NO: 410457 - DNA, 75 bp, synthetic construct
  source 1..75: mol_type = other DNA
gacagccagcaccgcctggtgttccacacgcggatacagcatggcgagccactggtcgagagccgctacctctac

SEQ ID NO: 410458 - DNA, 75 bp, synthetic construct
  source 1..75: mol_type = other DNA
gctggtggtattagtattgcagccactgctattactggattagcattgaacattaatgatgccgttaaagaattg

SEQ ID NO: 410459 - DNA, 75 bp, synthetic construct
  source 1..75: mol_type = other DNA
aatcatgaggcggcagggaatagacaaggtcagccagctaaagaaagaatcatggatcttaaaaataacactgtc

SEQ ID NO: 410460 - DNA, 75 bp, synthetic construct
  source 1..75: mol_type = other DNA
cttccctgaccctcccacatggggaaatctcggtatatggggcgaccgccttctggatgcactggaaacctgtaa

SEQ ID NO: 410461 - DNA, 75 bp, synthetic construct
  source 1..75: mol_type = other DNA
cggtggcttatattgactccccttcaatggcaacaccacaggatgtggtccagcgtcgggcatcctttggtgggc

SEQ ID NO: 410462 - DNA, 75 bp, synthetic construct
  source 1..75: mol_type = other DNA
gagttatatggatatcaaagatattttatgcctaaaagtcctttcactggattcccatttgaatttcaagaggta

SEQ ID NO: 410463 - DNA, 75 bp, synthetic construct
  source 1..75: mol_type = other DNA
aaagccggagtgataacccgccagcttgacgggcatgggttcacgatgcaggactggagaaattatttgagctac

SEQ ID NO: 410464 - DNA, 75 bp, synthetic construct
  source 1..75: mol_type = other DNA
cgacaactggtcggactgggcgccatcttcggcggtcgggcctggctggatgaagaacttaataccgcagagagc

SEQ ID NO: 410465 - DNA, 75 bp, synthetic construct
  source 1..75: mol_type = other DNA
atcaggacacgcagccgctggatgctcagtcacaggtaaattctgttgatgcgaaatatcaggaactgcgggcag

SEQ ID NO: 410466 - DNA, 75 bp, synthetic construct
  source 1..75: mol_type = other DNA
gcggtcagtaccctgaatgcaggaggcgctgaaaatcatgtggtgccgccgttcagcctgacgttatccggcggg

SEQ ID NO: 410467 - DNA, 75 bp, synthetic construct
  source 1..75: mol_type = other DNA
gaacgtatgagcggcaacatctgtcgctgtggtgcatacgctaacatccttgccgccattgaagatgctgcgggg

SEQ ID NO: 410468 - DNA, 75 bp, synthetic construct
  source 1..75: mol_type = other DNA
gttccggcagctacacccgcgccagagataatgcccctgacacttaaggtgaacggcaaaaccgagcagcttgag

SEQ ID NO: 410469 - DNA, 75 bp, synthetic construct
  source 1..75: mol_type = other DNA
aaagatgggtccccgcccgactttacgcacgatataccgccgccgacaccgtgctctgtgaactgttaccggact

SEQ ID NO: 410470 - DNA, 75 bp, synthetic construct
  source 1..75: mol_type = other DNA
gcatggtggcgacggtcgatatccgcaccggcaaaaaaagcgtgctggattatctgttgaaaccctttaataaag

SEQ ID NO: 410471 - DNA, 75 bp, synthetic construct
  source 1..75: mol_type = other DNA
caactgctgattgaggcaaaaatctccccgcgcgatgtggcgtttatccacccggggcaaaaatcgctggtgaaa

SEQ ID NO: 410472 - DNA, 75 bp, synthetic construct
  source 1..75: mol_type = other DNA
gacattgacgtcaccacggttggcggcgtcatcgcccccggtggtaaactgatgaccatcgtgccgctggatgag

SEQ ID NO: 410473 - DNA, 75 bp, synthetic construct
  source 1..75: mol_type = other DNA
aaccgatgatcacgttgctgctgattgcctgcccgctgctgccattcatcattatggcgatttgcaaaggcgatc

SEQ ID NO: 410474 - DNA, 75 bp, synthetic construct
  source 1..75: mol_type = other DNA
atgaacggacaactgcaatataaccgtggcctgactgaaccccgcttgccgcgttcggcgctggcggtacgcgtt

SEQ ID NO: 410475 - DNA, 75 bp, synthetic construct
  source 1..75: mol_type = other DNA
ccgaacttatcgaatccgaaacggcgttatacaacacccgccgtgaagggttaagcaaagccaccaccggactga

SEQ ID NO: 410476 - DNA, 75 bp, synthetic construct
  source 1..75: mol_type = other DNA
cattatggatattcccttctggtcgctggttccaaccatcacgctcgataaacgtgagcgtgaacaactggttcc

SEQ ID NO: 410477 - DNA, 75 bp, synthetic construct
  source 1..75: mol_type = other DNA
tttgtttctggtggcgaggatctgggatgctattaacgatccgattatgggatggattgtaaatgctacgcgatc

SEQ ID NO: 410478 - DNA, 75 bp, synthetic construct
  source 1..75: mol_type = other DNA
caggcaaagcccctgcgcacgtgaaaccatggacacggcaggaagacgagatgcttacctcgctttatcaggaaa

SEQ ID NO: 410479 - DNA, 75 bp, synthetic construct
  source 1..75: mol_type = other DNA
tcgtgttttacgcatcagccgcacgccatccggcgctaatgctggcggaggaattcttaccgatcgcggtgaaag

SEQ ID NO: 410480 - DNA, 75 bp, synthetic construct
  source 1..75: mol_type = other DNA
ttccggtcggtgcagtgggtaatgactccaacttattgatagtgttttatgttcagataatgcccgatgactttg

SEQ ID NO: 410481 - DNA, 75 bp, synthetic construct
  source 1..75: mol_type = other DNA
aaggaagccatctgacacttaaagccatcgttgcgctaatttataaaaacgatcagctttcatgcctcttgggta

SEQ ID NO: 410482 - DNA, 75 bp, synthetic construct
  source 1..75: mol_type = other DNA
atgttgattggttatatgcggctatcaagcaatgatgaacaccagtcagttgctttacagcgtgatgccttgatt

SEQ ID NO: 410483 - DNA, 75 bp, synthetic construct
  source 1..75: mol_type = other DNA
cggacggttcgacggcgaacacgctgcgggcgagggtgaccgatgcgttcggtaatgcgcttgccggacagacgg

SEQ ID NO: 410484 - DNA, 75 bp, synthetic construct
  source 1..75: mol_type = other DNA
ttaacagcagcagccagagccgggatgtgacgtttatcgccgatgtcagaacggcgaagatcgctgatctggtgg

SEQ ID NO: 410485 - DNA, 75 bp, synthetic construct
  source 1..75: mol_type = other DNA
ggtcagcgtgacggcaggcaacggcgcaacggtcactccgacggtgaccacgcagccggacggcacggtggagat

SEQ ID NO: 410486 - DNA, 75 bp, synthetic construct
  source 1..75: mol_type = other DNA
cactgccagcatcaacaacagcagcctgagccagaacgtgacgtttgtcgccgatgtcagcacggcgaagatcgc

SEQ ID NO: 410487 - DNA, 75 bp, synthetic construct
  source 1..75: mol_type = other DNA
ggcggacagacggtcagcgtgacggcagacaacagtgcaacggtcactccgacggttatcaccgagccggacggt

SEQ ID NO: 410488 - DNA, 75 bp, synthetic construct
  source 1..75: mol_type = other DNA
gtggtcattaaggacggcgtagtggcagacggcgcaatggcgaacatgctgcgggtgagggtcaccgatgctaac

SEQ ID NO: 410489 - DNA, 75 bp, synthetic construct
  source 1..75: mol_type = other DNA
agccggaacgtgacgtttatcgcggatgtcaggacggcgaagatcgctgatctggtggtcacccgggataactca

SEQ ID NO: 410490 - DNA, 75 bp, synthetic construct
  source 1..75: mol_type = other DNA
caatgcacttgccgggcagacggtcagcgtgtcggcaggcaacagcgcaacggttgctccggcggtcatcacaga

SEQ ID NO: 410491 - DNA, 75 bp, synthetic construct
  source 1..75: mol_type = other DNA
caggacggcgaagatcgcggatctggtcgttagccaggataacgccgtggctgacggcgcaatggcgaacacgct

SEQ ID NO: 410492 - DNA, 75 bp, synthetic construct
  source 1..75: mol_type = other DNA
atcaacaacagcagcctgagccggaacgtgatgtttgtcgcggatgtcaggacggcgcagatcgctgatctggtg

SEQ ID NO: 410493 - DNA, 75 bp, synthetic construct
  source 1..75: mol_type = other DNA
gacggcgggcaccagtacagtcaccgccagcatcaacaacagcagccagagccagaacgtcacctttgtacctgg

SEQ ID NO: 410494 - DNA, 75 bp, synthetic construct
  source 1..75: mol_type = other DNA
ggtcagcgtgttggcggacaacggcgcaacggtcgccccgacggtcaccacgcagccggacggtacggtggagat

SEQ ID NO: 410495 - DNA, 75 bp, synthetic construct
  source 1..75: mol_type = other DNA
agtacagtcaccgcaaccatcaacagcagcagtcagagccggaacgtgacgtttgtcgcggatgtcaggacggcg

SEQ ID NO: 410496 - DNA, 75 bp, synthetic construct
  source 1..75: mol_type = other DNA
tacttacgccatctttacccttacaagttgtggagaaaaagcacatctacacgagatctgaatgaggcgagaaga

SEQ ID NO: 410497 - DNA, 75 bp, synthetic construct
  source 1..75: mol_type = other DNA
aagcggaagtcagctatgacggcagtgagcagcatttggaaatctcggttccgcaggcttacgtctataaaacat

SEQ ID NO: 410498 - DNA, 75 bp, synthetic construct
  source 1..75: mol_type = other DNA
agcttgaacagcgtatcgccgatttttttacgcttagtgatgagcataagaaagccagagtattacttgatactc

SEQ ID NO: 410499 - DNA, 75 bp, synthetic construct
  source 1..75: mol_type = other DNA
ctggaaagtgacagcccgtgccggtctgggctaccagttcgacctgctggctaatggcgaaaccgtattgcggga

SEQ ID NO: 410500 - DNA, 75 bp, synthetic construct
  source 1..75: mol_type = other DNA
tgtaatgttcatccttaactatataacgcatttcgatattatttataatttggttgacagatacttttcaatttt

SEQ ID NO: 410501 - DNA, 75 bp, synthetic construct
  source 1..75: mol_type = other DNA
cttgcgcgggatgtttatcacttgtcttgatcgtgccggagtgcctgaacagcggatcggagccattaccggaca

SEQ ID NO: 410502 - DNA, 75 bp, synthetic construct
  source 1..75: mol_type = other DNA
cattattttgacacttaagtttattaaacctatagagcttagaatagtttatatgctatatattttatacgcatt

SEQ ID NO: 410503 - DNA, 75 bp, synthetic construct
  source 1..75: mol_type = other DNA
acgaccataaatttgccctgattcaggacctgccgggcccggcctgtgaggacttaagcttcggggttatcgacc

SEQ ID NO: 410504 - DNA, 75 bp, synthetic construct
  source 1..75: mol_type = other DNA
gtggtcattaaggacgactcagtggcagacggtgcaatggcgaatatgctgcgggcgagggtcaccgatgcgttc

SEQ ID NO: 410505 - DNA, 75 bp, synthetic construct
  source 1..75: mol_type = other DNA
ctaaaagattgtctaaatactcaagtaatgtcatttttcttgggcaagacaaatatcaggatgcacaggatttaa

SEQ ID NO: 410506 - DNA, 75 bp, synthetic construct
  source 1..75: mol_type = other DNA
aatggctgacctacggcagcggctggctgtcaggcatgaaactcggcgacacaccgctggtggagtacacccgcg

SEQ ID NO: 410507 - DNA, 75 bp, synthetic construct
  source 1..75: mol_type = other DNA
tagtcagtttgagctctattttttcgaaaggcggagattgttcttataatggaaaaaaacatatcagtagttata

SEQ ID NO: 410508 - DNA, 75 bp, synthetic construct
  source 1..75: mol_type = other DNA
taattgcagatataaaaaaaaccaaccgtaaaggttggttttttcttgggatttttggtcggcacgagaggattt

SEQ ID NO: 410509 - DNA, 75 bp, synthetic construct
  source 1..75: mol_type = other DNA
attgcaactagtacaaaatgaattgcctggttcaggttttgaacccgcgagtagtgaacgtgtatttcatctttg

SEQ ID NO: 410510 - DNA, 75 bp, synthetic construct
  source 1..75: mol_type = other DNA
aatcagtgttgttagccctggcatctgaaaaagggcaggcatgggttgccagtgccattactgaagaatatctgc

SEQ ID NO: 410511 - DNA, 75 bp, synthetic construct
  source 1..75: mol_type = other DNA
aacaacccgacgaagattaaatcgctcgaaggtattgatatctgctgggtggaggaagcggaagcggtaacgaag

SEQ ID NO: 410512 - DNA, 75 bp, synthetic construct
  source 1..75: mol_type = other DNA
tctgggggctacggtcggatggcgaggcgctttcttgtgcctggtgcctatcgcggttgtcgcctttatctggca

SEQ ID NO: 410513 - DNA, 75 bp, synthetic construct
  source 1..75: mol_type = other DNA
taattgcagatataaaaaaaaccaaccgtaaaggttggttttttcttgggatttttggccacgagagtagtttaa

SEQ ID NO: 410514 - DNA, 75 bp, synthetic construct
  source 1..75: mol_type = other DNA
tattgacgggcaactggtttccaccattgagtcagcgatcgactaccgcatgttcccgctgatttccctcaatca

SEQ ID NO: 410515 - DNA, 75 bp, synthetic construct
  source 1..75: mol_type = other DNA
cctcgacaaggagaggcgagccagtcactggtgaccgcttatggtgagggcgctacgctaccggatctggacgat

SEQ ID NO: 410516 - DNA, 75 bp, synthetic construct
  source 1..75: mol_type = other DNA
ataccgcgccggaaagctacgctttgagcgaaattgaaatcggcacacaaattaacgccactacccgctttaaat

SEQ ID NO: 410517 - DNA, 75 bp, synthetic construct
  source 1..75: mol_type = other DNA
cagcaaaacatctatcaccgctggttaaaaggtgaaacaaaggcgcaaagggaaaaaatccagaagctgattcca

SEQ ID NO: 410518 - DNA, 75 bp, synthetic construct
  source 1..75: mol_type = other DNA
ggaaaaaattcagaagctgatcccagcaattctggcaattcttccgcgcgaactgcgtcatcgactctgcatctt

SEQ ID NO: 410519 - DNA, 75 bp, synthetic construct
  source 1..75: mol_type = other DNA
caggcactaactccggctatcctgactgttcttccgcgtgaactgcgttatcacctcagtatttttgacactgtt

SEQ ID NO: 410520 - DNA, 75 bp, synthetic construct
  source 1..75: mol_type = other DNA
atcctcgacgatacctatcagcgattcgtcgtaaatcctcccgatgatatttgtctgctgacggtgaactacacc

SEQ ID NO: 410521 - DNA, 75 bp, synthetic construct
  source 1..75: mol_type = other DNA
aatgcttgaacagttccatgcagatatacaggatcacttatcagaatacatccattcgataaatcagttgcctca

SEQ ID NO: 410522 - DNA, 75 bp, synthetic construct
  source 1..75: mol_type = other DNA
aatgcttgaacagttccatgccgatatacaggaccatttatccgaatacatccattctataaatcagttgcccca

SEQ ID NO: 410523 - DNA, 75 bp, synthetic construct
  source 1..75: mol_type = other DNA
ctttcgcagcgatgacacagccctgtctgcaaaagaaaagcagcgagtatggtgtcacaccgtgtatatgacgcc

SEQ ID NO: 410524 - DNA, 75 bp, synthetic construct
  source 1..75: mol_type = other DNA
gaatggatctcagaacaaatggaaggaagaatttgtacggtaattttagctggtacaaatacagccgatagaaaa

SEQ ID NO: 410525 - DNA, 75 bp, synthetic construct
  source 1..75: mol_type = other DNA
gggccgccagttctgatcgtctgcaccggcgactgcgggccgagtatcaccggaacgaatggcgaagcacttggt

SEQ ID NO: 410526 - DNA, 75 bp, synthetic construct
  source 1..75: mol_type = other DNA
aacaaccggataccgacttcaggtcagtttcgtcgtttgagatcagttaagatcgacaaggtcaaaaaacaacct

SEQ ID NO: 410527 - DNA, 75 bp, synthetic construct
  source 1..75: mol_type = other DNA
ctgacgacttcgccagtggtcgcatcgaaatgtatctggtcacgccggaagagatgattgatattcgcgggggag

SEQ ID NO: 410528 - DNA, 75 bp, synthetic construct
  source 1..75: mol_type = other DNA
tgcgggtaataatcatcgggggacagatttatggtaaggaaccatcatcgttgctggtttcgttgagttatccac

SEQ ID NO: 410529 - DNA, 75 bp, synthetic construct
  source 1..75: mol_type = other DNA
aagcaggaaactgcagaacgcctgctgaagaccgggctggtcagctatgaaaacgacgtgtcccgcctggtcaaa

SEQ ID NO: 410530 - DNA, 75 bp, synthetic construct
  source 1..75: mol_type = other DNA
caatagaatctaacatcctttctgaaaactatattggtactcccagtggtgtttctatcaagcgaaaatatcttg

SEQ ID NO: 410531 - DNA, 75 bp, synthetic construct
  source 1..75: mol_type = other DNA
gttgttggtattgcagatcatggtgccgttaatgcggtagacagacttcgtcagctctttaatgagcatggaatt

SEQ ID NO: 410532 - DNA, 75 bp, synthetic construct
  source 1..75: mol_type = other DNA
taaatcgactttgctggaggccattcgctttgctctgggtaaacagccttttggtgattcagcacaaaagcaaca

SEQ ID NO: 410533 - DNA, 75 bp, synthetic construct
  source 1..75: mol_type = other DNA
ttatgtctggtcccccttgcgatagctgcgttcatctggcaatggttcagcctgcctccgatggaaagcgataaa

SEQ ID NO: 410534 - DNA, 75 bp, synthetic construct
  source 1..75: mol_type = other DNA
atggggtacaaaactcttccatacacgtttcagcgaaacggcaactactacctgcaaatcaggctttccaatggc

SEQ ID NO: 410535 - DNA, 75 bp, synthetic construct
  source 1..75: mol_type = other DNA
tcatggactatgttgatcgccagtggaaagagcggattttttcagaagtggcaggtacaaacatgactaagatcg

SEQ ID NO: 410536 - DNA, 75 bp, synthetic construct
  source 1..75: mol_type = other DNA
gtcacagatcaaattcgatgaagatagtcagcgctactacttccttattgccgaaggagggcaggggaaaacgga

SEQ ID NO: 410537 - DNA, 75 bp, synthetic construct
  source 1..75: mol_type = other DNA
gccggggtcaaacctggcatgccgcgcaattctggtatcgtcaatcatggtatgcaaaaacgattgatttaaagt

SEQ ID NO: 410538 - DNA, 75 bp, synthetic construct
  source 1..75: mol_type = other DNA
gacccggaaggtgtattcccggtggttctcggtcacgaaggggccggcgttgtggttgaagtcggtgaaggcgta

SEQ ID NO: 410539 - DNA, 75 bp, synthetic construct
  source 1..75: mol_type = other DNA
acaactgttgaatgcggacgttacccggttgagattttcatgatgggcgaagaagcaaaactggcaggccagcag

SEQ ID NO: 410540 - DNA, 75 bp, synthetic construct
  source 1..75: mol_type = other DNA
gacgaaggctatctctcaagccaatgagcgctttattgaggtgatgttgattgtcttgggttcatcaactgatgt

SEQ ID NO: 410541 - DNA, 75 bp, synthetic construct
  source 1..75: mol_type = other DNA
attaaaaaagttgatgccagtggtaaacatgatgtcgctcagcgcctacaacagcgcgtcacggccattatgcgt

SEQ ID NO: 410542 - DNA, 75 bp, synthetic construct
  source 1..75: mol_type = other DNA
gatcgcctcgcttttggtgtttggcctacggtgacgcttgctcaggcaagagcaaaacgcgatgaagctaaaaag

SEQ ID NO: 410543 - DNA, 75 bp, synthetic construct
  source 1..75: mol_type = other DNA
agtggggtttccttgatttcgttaaccgtcaatggaaagagaaaattttctcccctgtgtctggcaaaaacatgc

SEQ ID NO: 410544 - DNA, 75 bp, synthetic construct
  source 1..75: mol_type = other DNA
cgtttcaacgaaacggtaactactatctacaaatccggctttcaaatggcaggatgtataaaaaatcacttcaca

SEQ ID NO: 410545 - DNA, 75 bp, synthetic construct
  source 1..75: mol_type = other DNA
attcccttagtcaaacgtggaaccattcacccggatcagtttggtgaacggctttcagatttcagcaaccgctta

SEQ ID NO: 410546 - DNA, 75 bp, synthetic construct
  source 1..75: mol_type = other DNA
cgcgtttatgtataacccaaattatgcgacgcgaagcggcagtttccagttggataatactggaagattaggaaa

SEQ ID NO: 410547 - DNA, 75 bp, synthetic construct
  source 1..75: mol_type = other DNA
tacgaacgttctggccggccatccggacacagaagatgctgttgtcaagtgtatttctgacattacttctgacca

SEQ ID NO: 410548 - DNA, 75 bp, synthetic construct
  source 1..75: mol_type = other DNA
acaaagagaagattgcagaggttgaaaagcttctacgccagcataacagcaatcccatttacggtgatttgtggg

SEQ ID NO: 410549 - DNA, 75 bp, synthetic construct
  source 1..75: mol_type = other DNA
aagctattcgcagagctcacgcagatccaacgcaaattcaacggtaacggaaagcttgagctgatgaccaaagtc

SEQ ID NO: 410550 - DNA, 75 bp, synthetic construct
  source 1..75: mol_type = other DNA
atgtccactataagtctaaaacaatcatacgaaaaaacgcatgcatattggagcggcgtatttgccatgacgctt

SEQ ID NO: 410551 - DNA, 75 bp, synthetic construct
  source 1..75: mol_type = other DNA
ggacaccacatctgggctgttgccgttttactcagtctgtgggggctacttgcaacggctgcgccagtggggtgg

SEQ ID NO: 410552 - DNA, 75 bp, synthetic construct
  source 1..75: mol_type = other DNA
ctgtcgggctggagtgtctgattgaactgttgattgcggggatcacagctatggtattactgctgggagccagaa

SEQ ID NO: 410553 - DNA, 75 bp, synthetic construct
  source 1..75: mol_type = other DNA
tgtttgcgccgccgggtatgctcgcactgggaacccttctgatgccctttataactgcccatcagagccacttta

SEQ ID NO: 410554 - DNA, 75 bp, synthetic construct
  source 1..75: mol_type = other DNA
ctgaggcggtggttaaggcggatctgatggtcggcggtgaggtttctgatcattacggaacgatgagtcaaatcc

SEQ ID NO: 410555 - DNA, 75 bp, synthetic construct
  source 1..75: mol_type = other DNA
ttatggagacgcgtaatacaccgcgtggactgttacggatcgatgccgcaacctccagtggtgctgcactttctg

SEQ ID NO: 410556 - DNA, 75 bp, synthetic construct
  source 1..75: mol_type = other DNA
tcccaacggtacgtaaagagttctacagcgctgagtatggtcgagtagttgagtcggaaatatgggttgcataca

SEQ ID NO: 410557 - DNA, 75 bp, synthetic construct
  source 1..75: mol_type = other DNA
gaacaggaaatcactggccgatgtcgtgatgtactacaacggcaggccagtcgattctttcgaataccttgaaga

SEQ ID NO: 410558 - DNA, 75 bp, synthetic construct
  source 1..75: mol_type = other DNA
actgggaacccttctgatgccctttataactgcccatcagagccactttaatccaacgatcaaacaactcattca

SEQ ID NO: 410559 - DNA, 75 bp, synthetic construct
  source 1..75: mol_type = other DNA
aatgcaatgcttacaggaggggaaggaaacgatactctgaagattaatggttctttcaaattgttaaatatgaaa

SEQ ID NO: 410560 - DNA, 75 bp, synthetic construct
  source 1..75: mol_type = other DNA
tacttcctgttagatacagatgttgaagcatttgatattcacaaaattgataaaactaaagacaatatattattt

SEQ ID NO: 410561 - DNA, 75 bp, synthetic construct
  source 1..75: mol_type = other DNA
gctggaggagctttcactactgtttactctagagagtattctaacgcagttaataatatagaaaagtctgtcctt

SEQ ID NO: 410562 - DNA, 75 bp, synthetic construct
  source 1..75: mol_type = other DNA
gaaatacgaatggatggttagattttaataccataaaaagaagaaatagcatcgatagccaagtttttattaaga

SEQ ID NO: 410563 - DNA, 75 bp, synthetic construct
  source 1..75: mol_type = other DNA
tgatgatgatgatttttttaccaataacaggatctctgattttgtttgttatttaattaaatatgattacgagtt

SEQ ID NO: 410564 - DNA, 75 bp, synthetic construct
  source 1..75: mol_type = other DNA
attcagtagaacaaggaaattatactgattcatggtataaaggagatactgtggacggatacacaacgtatactc

SEQ ID NO: 410565 - DNA, 75 bp, synthetic construct
  source 1..75: mol_type = other DNA
acagattcaattgtaaaaattcactcacctactgcaacttattcctacataaattcaaaatattacttaaatggt

SEQ ID NO: 410566 - DNA, 75 bp, synthetic construct
  source 1..75: mol_type = other DNA
tccggctggttattattcccggtgttgtgcgacatgtgcgtctgacaccggacagtgatgactatattcagttgt

SEQ ID NO: 410567 - DNA, 75 bp, synthetic construct
  source 1..75: mol_type = other DNA
cggagtatttgaaaaaacatggcacaccagagacgccggatgatctttcccgtgcgcctcgactggcgttcagcc

SEQ ID NO: 410568 - DNA, 75 bp, synthetic construct
  source 1..75: mol_type = other DNA
gaaaaaataccatttctttaggagagggaaacaacttatttattgttggtaactatgtaaatagtattgctgaaa

SEQ ID NO: 410569 - DNA, 75 bp, synthetic construct
  source 1..75: mol_type = other DNA
agggcagtaatccggctaaagcggggaataaagtggagtttgtggttgacgggcaggttccgggtgacaccaatg

SEQ ID NO: 410570 - DNA, 75 bp, synthetic construct
  source 1..75: mol_type = other DNA
ggcattgccatgagtgaagaaaaatacagcggaattattggtgcactgcgtggaaaatatattaattgtctggta

SEQ ID NO: 410571 - DNA, 75 bp, synthetic construct
  source 1..75: mol_type = other DNA
ctggtgatgcaattaaaaattcttaatattgttaataaaaactttattgagaatatgaagaaaatatttagccat

SEQ ID NO: 410572 - DNA, 75 bp, synthetic construct
  source 1..75: mol_type = other DNA
ggtggcaacgtggcttgcgcaacgaatttgtgggccattaacaccacctgcggaagaaaatcgcgaaatagcgca

SEQ ID NO: 410573 - DNA, 75 bp, synthetic construct
  source 1..75: mol_type = other DNA
cgacatgctggaaaaagccaatctctacgcgcagctctatattcgtcctaacgaacagaacctctcccgttcgct

SEQ ID NO: 410574 - DNA, 75 bp, synthetic construct
  source 1..75: mol_type = other DNA
aatgatatttaatataaattacgttataatgactgctataacctttctttttgttaaaaaaggactaaaagttag

SEQ ID NO: 410575 - DNA, 75 bp, synthetic construct
  source 1..75: mol_type = other DNA
attctgatccaacacggcggcgggacggaacttgccacgctgagaggaaaggcgctgattactgaagatggtgaa

SEQ ID NO: 410576 - DNA, 75 bp, synthetic construct
  source 1..75: mol_type = other DNA
agagatgatgcgtgtttggaatttatatagcacacagtccattagctctttatttaagacccttaacgttgcccc

SEQ ID NO: 410577 - DNA, 75 bp, synthetic construct
  source 1..75: mol_type = other DNA
actaagcgagttgaaacagagcgcttaattggtaagaaaaacaaagatcttggttatgatgatgagtatctcatt

SEQ ID NO: 410578 - DNA, 75 bp, synthetic construct
  source 1..75: mol_type = other DNA
atctttataaagagtggattcgtagtgatgatgtttcacctatatttatagaaactgaagataatttaagaacct

SEQ ID NO: 410579 - DNA, 75 bp, synthetic construct
  source 1..75: mol_type = other DNA
ataaagagtggattcgtagtgatgatgtttcacctttatttatagaaattgaagataatttaagaacctttaaca

SEQ ID NO: 410580 - DNA, 75 bp, synthetic construct
  source 1..75: mol_type = other DNA
tatctattgattactcagatatatttggaaatgaatatctcgatggttatatcaataacattataaaaatgattg

SEQ ID NO: 410581 - DNA, 75 bp, synthetic construct
  source 1..75: mol_type = other DNA
ctcgatgcgctggcggcaatcaaagagctggcaatccgcgtcagcgcattagagggcgacgctaaatctccggct

SEQ ID NO: 410582 - DNA, 75 bp, synthetic construct
  source 1..75: mol_type = other DNA
ggtattgttaaaacttctttattgttaaagataaaagaaaatacaggtacttactttcatggggttagccctgat

SEQ ID NO: 410583 - DNA, 75 bp, synthetic construct
  source 1..75: mol_type = other DNA
ctagcggatttagcccgactgcggtgataaatcgttctcaaataaaacaggtgccaggccacgaaaaaatccgtg

SEQ ID NO: 410584 - DNA, 75 bp, synthetic construct
  source 1..75: mol_type = other DNA
ttaagtggtagatacactttcggcatgagaaaaaatgcggttgtttcttcatttgtagctaataatagtagccca

SEQ ID NO: 410585 - DNA, 75 bp, synthetic construct
  source 1..75: mol_type = other DNA
acggtcagcgtgacggcaggcaacggcgcaacggttgctccgacggtgattacagagccggacggcacggtggag

SEQ ID NO: 410586 - DNA, 75 bp, synthetic construct
  source 1..75: mol_type = other DNA
atgtcagcacggcgcagatcgcggatctggtggtcacccgggataacgcggtggcagacggcgcgacggcgaaca

SEQ ID NO: 410587 - DNA, 75 bp, synthetic construct
  source 1..75: mol_type = other DNA
agcatcaacagcagcagtcagagccgggatgtgacgtttgttgccgatatcaggacggcgcagatcgcggacctg

SEQ ID NO: 410588 - DNA, 75 bp, synthetic construct
  source 1..75: mol_type = other DNA
acggcgggagtcagtgcagtcaccgccagcatcaacaacagcagccagagccgggatgtgacgtttatcgccgat

SEQ ID NO: 410589 - DNA, 75 bp, synthetic construct
  source 1..75: mol_type = other DNA
cacgcttcttggtgagaggattatggaccgcatgaccatgaacggtggtcggtgggtgacgtttaactgggatag

SEQ ID NO: 410590 - DNA, 75 bp, synthetic construct
  source 1..75: mol_type = other DNA
ttaataactagtggtaattataatccgagaatacacaaagataatatcgcggatgccggttattctatgcctgat

SEQ ID NO: 410591 - DNA, 75 bp, synthetic construct
  source 1..75: mol_type = other DNA
gcactcaaacgaaccacggtatcggctggcgttatttcacatcgagctggatgtcgggcataaacctgtttatcg

SEQ ID NO: 410592 - DNA, 75 bp, synthetic construct
  source 1..75: mol_type = other DNA
ctttagggctgacatcaggagttatcgaatcatatatcgataattttacggtgggcggcgcagtccccgattcga

SEQ ID NO: 410593 - DNA, 75 bp, synthetic construct
  source 1..75: mol_type = other DNA
gtgtcaccagccagacggcaggaatcagtgtggtcaccgccagcatcaacagcagcagccagagccgggatgtga

SEQ ID NO: 410594 - DNA, 75 bp, synthetic construct
  source 1..75: mol_type = other DNA
acggcgcaatggcgaacacgctgcgggtgaaggtcaccgatgcgttcgggaatgcgctgaatggacagacggtca

SEQ ID NO: 410595 - DNA, 75 bp, synthetic construct
  source 1..75: mol_type = other DNA
gcaaggatattcaggtcactattccaccctaccgatttacggtaatgcctgaaaccgacaacacttacccaataa

SEQ ID NO: 410596 - DNA, 75 bp, synthetic construct
  source 1..75: mol_type = other DNA
tactcagcgtttgctgccggtctgcgtgcccgtatcgattatgaaaaagggtggtggtggagcaaatcgaatcag

SEQ ID NO: 410597 - DNA, 75 bp, synthetic construct
  source 1..75: mol_type = other DNA
ggagatctctgttaccagccagacggcgggagtcagtgcggtcaccgccagtatcaacaacagcagcctgagccg

SEQ ID NO: 410598 - DNA, 75 bp, synthetic construct
  source 1..75: mol_type = other DNA
caacaacagcagccagagccggaacgtgacgtttatcgccgatgtcaggacggcgcagatcgcggagctggtggt

SEQ ID NO: 410599 - DNA, 75 bp, synthetic construct
  source 1..75: mol_type = other DNA
cagcgtgttggcggacaacggcgcaacgactgccccgacggtcatcacagagccggacgggacggtggagatctc

SEQ ID NO: 410600 - DNA, 75 bp, synthetic construct
  source 1..75: mol_type = other DNA
ggatttacctgtcagtgttttattagttgatgattttggtaatccggttgataacggtctggaattgctgacaga

SEQ ID NO: 410601 - DNA, 75 bp, synthetic construct
  source 1..75: mol_type = other DNA
aacactgcgcattctatagtttggaaaaacggggatactatagttgcttcagtatcacctcgaggtgaaattgaa

SEQ ID NO: 410602 - DNA, 75 bp, synthetic construct
  source 1..75: mol_type = other DNA
atgaatgacgatatcaggagcatactgccggtcagtgccagccgggcagagcgggtggtggactgtgtcgccgga

SEQ ID NO: 410603 - DNA, 75 bp, synthetic construct
  source 1..75: mol_type = other DNA
taccttccgtctgaacgtggagcagaaggatttaccggtactgatgaatgatcatcaggatctgaagcatgcggt

SEQ ID NO: 410604 - DNA, 75 bp, synthetic construct
  source 1..75: mol_type = other DNA
gtaggtacgttgtggggcgaatatggtaatttaaaaacttatgggaacgcttttagcggtacggattattggaca

SEQ ID NO: 410605 - DNA, 75 bp, synthetic construct
  source 1..75: mol_type = other DNA
agacggtcagcgtgttggcggacaacggcgcaacggtcgcttcgacggtcaccacagggccggacggcacggtgg

SEQ ID NO: 410606 - DNA, 75 bp, synthetic construct
  source 1..75: mol_type = other DNA
agccggacggcacggtggagatcagtgtcaccagccagacggcgggagtcagtactgtcaccgccagcatcaaca

SEQ ID NO: 410607 - DNA, 75 bp, synthetic construct
  source 1..75: mol_type = other DNA
agacggcgggagtcagtgcagtcactgccagcatcaacaacagcagcctgagccagaacgtgacgtttatcgccg

SEQ ID NO: 410608 - DNA, 75 bp, synthetic construct
  source 1..75: mol_type = other DNA
gcgtatcggcagacaacagcgcaacggtcactccgacggtgaccacgcagccggatggcacggtggagatcagtg

SEQ ID NO: 410609 - DNA, 75 bp, synthetic construct
  source 1..75: mol_type = other DNA
aacgttgcgggatgagtttggtaaccctgctttagggctgacatcagaagtcatcgagtcttatattgatagttt

SEQ ID NO: 410610 - DNA, 75 bp, synthetic construct
  source 1..75: mol_type = other DNA
ccgctaactttcgggtagtgggtcataaacccctgggagccaataccgcaggtctatcgattcctgtcaggtgta

SEQ ID NO: 410611 - DNA, 75 bp, synthetic construct
  source 1..75: mol_type = other DNA
aaagagcaaaagtgtgacgagagaccaaatcaaagcaaacaaaaagacactgattcttatttaataaggaaagtg

SEQ ID NO: 410612 - DNA, 75 bp, synthetic construct
  source 1..75: mol_type = other DNA
tattaaacagtataagggctttttagagtctggggttgtgtatgggaatcggtttaataattcatccttaaatgt

SEQ ID NO: 410613 - DNA, 75 bp, synthetic construct
  source 1..75: mol_type = other DNA
gaagcctgaaaaatttaaatctggatggatatgatgcactgcgctctgctgtgctgatgcgaacgttcgttttca

SEQ ID NO: 410614 - DNA, 75 bp, synthetic construct
  source 1..75: mol_type = other DNA
agcctttatctgcagttgatatgtaaattgaatgagttgagtataatccattacgatcttaatacaggtaatatg

SEQ ID NO: 410615 - DNA, 75 bp, synthetic construct
  source 1..75: mol_type = other DNA
gcggtaatagcggtagcttttccctgaaaatattgcagccgttcgttggctcggtcgtcattcctcctatggcgc

SEQ ID NO: 410616 - DNA, 75 bp, synthetic construct
  source 1..75: mol_type = other DNA
acctcgaagccacgcagtgaaatcggtgctcatctgtttaacgactccgcgaacaaaagcactaaaaccgcaact

SEQ ID NO: 410617 - DNA, 75 bp, synthetic construct
  source 1..75: mol_type = other DNA
tgttcgataatcgacaatacgctggaccttaagctcaatctgtatggaataaacgaatatgcgcttaaacccgca

SEQ ID NO: 410618 - DNA, 75 bp, synthetic construct
  source 1..75: mol_type = other DNA
ccgatgggcctgaaagcgaggcctatgacagattcaagcaggctggcctgatcctcgacctgcggcctctgttga

SEQ ID NO: 410619 - DNA, 75 bp, synthetic construct
  source 1..75: mol_type = other DNA
gcttacttctgtaacgtccttccgcggacggaagagtgcacgacagattcatggtctcagtttgaacggaattta

SEQ ID NO: 410620 - DNA, 75 bp, synthetic construct
  source 1..75: mol_type = other DNA
gcgacctctaagccgcgtagtgaaatcggtgctcacctgctcaacgactcctcgaaacaaagcaccaaaaccgca

SEQ ID NO: 410621 - DNA, 75 bp, synthetic construct
  source 1..75: mol_type = other DNA
gtttatctgacggatgccgttgcaattaagacgctggaagaaacggggatacgtgaagtatccgttggatatgaa

SEQ ID NO: 410622 - DNA, 75 bp, synthetic construct
  source 1..75: mol_type = other DNA
aaaaagccaatgcgcgaacataaacacgccaccaagttatttcttgccgctcgttccgatggtataggaaaagcc

SEQ ID NO: 410623 - DNA, 75 bp, synthetic construct
  source 1..75: mol_type = other DNA
catcaagcaggtttatctgctggcgagtccgagtcttttcaccgccattcaaggcaacccaaccgcatatcaggc

SEQ ID NO: 410624 - DNA, 75 bp, synthetic construct
  source 1..75: mol_type = other DNA
agggaaaacctggggttcctgacacagcaaaaaacaggcgcgttgcaggtgagctacgcgcctctgtttgttacg

SEQ ID NO: 410625 - DNA, 75 bp, synthetic construct
  source 1..75: mol_type = other DNA
gcgttattctgttggtggaagggttcccgccgtcacatgccgggaccatcaccgtgtatgaagattctcaacccg

SEQ ID NO: 410626 - DNA, 75 bp, synthetic construct
  source 1..75: mol_type = other DNA
acgtgacgtttgtcgcggatgtcaggacggcgaagatagcggatctggtcgttagccaggataacgcggtggcag

SEQ ID NO: 410627 - DNA, 75 bp, synthetic construct
  source 1..75: mol_type = other DNA
aggataacgcggtggcagacggtgcaatggcgaacacgttgcaggtgaaggtgaccgatgcgttcggtaatgcac

SEQ ID NO: 410628 - DNA, 75 bp, synthetic construct
  source 1..75: mol_type = other DNA
tgtcaccagccagacggcgggcaccagtgcggtcaccgccagcatcaacaacagcagcctgagccagagcgtgac

SEQ ID NO: 410629 - DNA, 75 bp, synthetic construct
  source 1..75: mol_type = other DNA
cagagcaaaagatatgggttcagccgcagtgttgattacgattttagttgctatcattatatggggagttttatt

SEQ ID NO: 410630 - DNA, 75 bp, synthetic construct
  source 1..75: mol_type = other DNA
cgaaaattttggccgtaagtcgctctggttaacgaagcaggatgtggaggcgcataaggagtcgcaggaagtgtt

SEQ ID NO: 410631 - DNA, 75 bp, synthetic construct
  source 1..75: mol_type = other DNA
aaaaagattatcccgcttcggatctgtttgcctttttgtggggggggcagatcgcgttacggagatcgaccgact

SEQ ID NO: 410632 - DNA, 75 bp, synthetic construct
  source 1..75: mol_type = other DNA
gcagccaaaaaatcagaaaccaacgcgaaaaatagcgaggcagcagcaaagagcagcgaaacaaacgctaaagcc

SEQ ID NO: 410633 - DNA, 75 bp, synthetic construct
  source 1..75: mol_type = other DNA
atgacaacactgtgcgccttgccgctgatatgtatgttcagacttttccaaatgagcaaggtcgattaacaataa

SEQ ID NO: 410634 - DNA, 75 bp, synthetic construct
  source 1..75: mol_type = other DNA
gcaaaaaaaaatacaagaccttactgtacgttataatgagctaattgactcgtcgactatcgactttaaaaatct

SEQ ID NO: 410635 - DNA, 75 bp, synthetic construct
  source 1..75: mol_type = other DNA
ctgctgatgccagagatcgagggacggttgctgaccctgactcgctctctggatagcgtcccccaacctaaaccg

SEQ ID NO: 410636 - DNA, 75 bp, synthetic construct
  source 1..75: mol_type = other DNA
gggcgatctgaatcttggtgggaagagcatcaaaaacatcaaagatatgacggcatcagggacaacaacaaccgg

SEQ ID NO: 410637 - DNA, 75 bp, synthetic construct
  source 1..75: mol_type = other DNA
gcggagggtgatgtggacgggggtgacggacggcgcgggccgccgttttcacctggtgctgaccacacaggcaca

SEQ ID NO: 410638 - DNA, 75 bp, synthetic construct
  source 1..75: mol_type = other DNA
atgagaacagctataattaaggtagtcagagtaggaacaagtgtctatgcaattgggggagggttaagaatatat

SEQ ID NO: 410639 - DNA, 75 bp, synthetic construct
  source 1..75: mol_type = other DNA
tataacgggaagcttgggaatactttaaatagtaaaatagataactatgtattttatagcgcgttgttacatctt

SEQ ID NO: 410640 - DNA, 75 bp, synthetic construct
  source 1..75: mol_type = other DNA
cagtttggttatatatctggaactttaatcgctgaatatgatgaacaacgttgtagtggtggtaagaatgatcac

SEQ ID NO: 410641 - DNA, 75 bp, synthetic construct
  source 1..75: mol_type = other DNA
actggcttaccgcgtggggtataactcttcaatgtattctgtttatctgcgtcgtgatggaacgttgccgatgac

SEQ ID NO: 410642 - DNA, 75 bp, synthetic construct
  source 1..75: mol_type = other DNA
aaatggctcaggcctgcaatgaaggaaatgtggccaacagcgaagagagctgggcaacggatgtgctggtggagg

SEQ ID NO: 410643 - DNA, 75 bp, synthetic construct
  source 1..75: mol_type = other DNA
ggggcgctggccgtgacggtgcggtgtcccccgtaaccgcccgcgcggcggccgctaactcgcagtacggcgccg

SEQ ID NO: 410644 - DNA, 75 bp, synthetic construct
  source 1..75: mol_type = other DNA
atgagcggaacctcaggttcctcgtctgatgccgctcttgcaacacgttacgctgccgagtatttttgtaaaaca

SEQ ID NO: 410645 - DNA, 75 bp, synthetic construct
  source 1..75: mol_type = other DNA
atcaaagatgagcgcgtccacatcctcaaggctaatgaggttacatcgggtaacattccagtcgtgaatgcgcgt

SEQ ID NO: 410646 - DNA, 75 bp, synthetic construct
  source 1..75: mol_type = other DNA
atccagcggttgggcatcgacaatcacatcgccataaatcagatcgacgccgatgcccgaaagcgtatccatcac

SEQ ID NO: 410647 - DNA, 75 bp, synthetic construct
  source 1..75: mol_type = other DNA
agtttgggcaacgcttctgggacgtgctgtttaacgaccatgaagaagcgcagtcactgatgaaaaacacgcgaa

SEQ ID NO: 410648 - DNA, 75 bp, synthetic construct
  source 1..75: mol_type = other DNA
tgaatattatgggtctgccaacacatccactaagcggcagaacgcctacccggttatgcgtctggtggccttaat

SEQ ID NO: 410649 - DNA, 75 bp, synthetic construct
  source 1..75: mol_type = other DNA
acgacctcgcatcgctacgtctcgcagttaggggccgatctgttaaccggtggttttaccgacagtgacagttgg

SEQ ID NO: 410650 - DNA, 75 bp, synthetic construct
  source 1..75: mol_type = other DNA
ggggcatattcagcgggacttttaagtcaggttaatgattctggaaatgtggaaaataacactcgtcttgaaacc

SEQ ID NO: 410651 - DNA, 75 bp, synthetic construct
  source 1..75: mol_type = other DNA
gggattcggctccgtacacagacgatgatgacaacgacatgcaggctgcataccgcgcgatgattgcagtagcac

SEQ ID NO: 410652 - DNA, 75 bp, synthetic construct
  source 1..75: mol_type = other DNA
cagcagcttgcctatctagcgctgaaacgctgggcgcgcctttattgccccgaagtgattcttggagtgtacacc

SEQ ID NO: 410653 - DNA, 75 bp, synthetic construct
  source 1..75: mol_type = other DNA
cagacctgggactgataactgcttttttcgaggcatacctggacgctgactacactgatcggggtctgctgacaa

SEQ ID NO: 410654 - DNA, 75 bp, synthetic construct
  source 1..75: mol_type = other DNA
gattttgctgtctcaatgaacggtgtgaaagtcgaacaagacggggcgcgtaatttgggggaaattaaacttggc

SEQ ID NO: 410655 - DNA, 75 bp, synthetic construct
  source 1..75: mol_type = other DNA
acacgatagctgatgttttcactgcaacagataaaaatgggaaagattatcttgtagttgtaattaaagcaactt

SEQ ID NO: 410656 - DNA, 75 bp, synthetic construct
  source 1..75: mol_type = other DNA
cctgatacaacatcacccttaggtttatttggaacgacatacttatcttttggtttgctagggattatttattta

SEQ ID NO: 410657 - DNA, 75 bp, synthetic construct
  source 1..75: mol_type = other DNA
aacaaaacgcccccgaccatcaaggccgaggtcggttaagatatcaaaaacccgttatcctgtgaaacatagtgc

SEQ ID NO: 410658 - DNA, 75 bp, synthetic construct
  source 1..75: mol_type = other DNA
ggtccggatatgcctactgttcagggtggcaactctccggtgattccagatggttgggtgatggtgccggttgag

SEQ ID NO: 410659 - DNA, 75 bp, synthetic construct
  source 1..75: mol_type = other DNA
tgactttgacagcgcgtttgagcatggaaaagcagtcggctggaacgcctgccgcgccgccatgcttcagggtgc

SEQ ID NO: 410660 - DNA, 75 bp, synthetic construct
  source 1..75: mol_type = other DNA
ttagtttaggacttattgctttggcggtgggtaatgcatatgcaacacaattgttggatgatggatttgccccta

SEQ ID NO: 410661 - DNA, 75 bp, synthetic construct
  source 1..75: mol_type = other DNA
accatcttcaggttttagagaaatactaacatttatccaatttatgctaattgtatccggtgtatatcatgttac

SEQ ID NO: 410662 - DNA, 75 bp, synthetic construct
  source 1..75: mol_type = other DNA
taacaagccagaattgccctcgctggcagatgccgttacaggttgttatctcacaccctacagtgaaaagcgcct

SEQ ID NO: 410663 - DNA, 75 bp, synthetic construct
  source 1..75: mol_type = other DNA
taaatgattcaccgagaagaacatcaatctcacaattgtgtgaaaaatacggtgtagaatttgagtttgttgatg

SEQ ID NO: 410664 - DNA, 75 bp, synthetic construct
  source 1..75: mol_type = other DNA
cattggtgcgctgggtacttttgtcaccggcagcgacactaactcgaatattttgtttggcaaactacaaactat

SEQ ID NO: 410665 - DNA, 75 bp, synthetic construct
  source 1..75: mol_type = other DNA
aactcgaatattttgtttggcaaactgcaaactattgcagccagtaagttacatatcgatcccaactggctggcg

SEQ ID NO: 410666 - DNA, 75 bp, synthetic construct
  source 1..75: mol_type = other DNA
gattcaacccactgaaagccgcaattgcttcactggttgctaataccgtacctacagcgtttggggcagtgggta

SEQ ID NO: 410667 - DNA, 75 bp, synthetic construct
  source 1..75: mol_type = other DNA
gaccagagctggttgataagctgaacgacatcatcgcccgacactatccgggagcactgccagcgagaagagagt

SEQ ID NO: 410668 - DNA, 75 bp, synthetic construct
  source 1..75: mol_type = other DNA
tgagcacatttgaacaactgcgccagaataaggatgaggtgtttgagcggggggtgatcaacgtcttcagagggt

SEQ ID NO: 410669 - DNA, 75 bp, synthetic construct
  source 1..75: mol_type = other DNA
aggaaaccagaactggttgacaggctgaatgatattattgcgaaatactatctggaaaccttatcgtccgtttaa

SEQ ID NO: 410670 - DNA, 75 bp, synthetic construct
  source 1..75: mol_type = other DNA
aaatggctcaggcctgcaaggaagggaatgtcgccaacagcgaagagagttgggcaacggatgtgctggtggagg

SEQ ID NO: 410671 - DNA, 75 bp, synthetic construct
  source 1..75: mol_type = other DNA
agcaactgcatcagagcaaaggtgaggtgtttgagcggggtgtaatcaatgtatttaaagggctatcctggaact

SEQ ID NO: 410672 - DNA, 75 bp, synthetic construct
  source 1..75: mol_type = other DNA
ccattcccgataaccggcatgatgtctccatccggtttatggattttgtgcgcgataatccgcatcagcagattt

SEQ ID NO: 410673 - DNA, 75 bp, synthetic construct
  source 1..75: mol_type = other DNA
gatttctccacaaagcatcgccattgccgtttcagcgaccaaaatggaagggcaagccaacaaaataatgtctgg

SEQ ID NO: 410674 - DNA, 75 bp, synthetic construct
  source 1..75: mol_type = other DNA
tagggggtattggaggtgttgcatttatatttctccctgcaagatttaaacttctcatggcattgtgcctatgtg

SEQ ID NO: 410675 - DNA, 75 bp, synthetic construct
  source 1..75: mol_type = other DNA
tttaaacgccccggctgggccggacgttttgatcaggaaggccagcaccaggattaccagcgcacacagtatgaa

SEQ ID NO: 410676 - DNA, 75 bp, synthetic construct
  source 1..75: mol_type = other DNA
atgattgcggttccgcccgctgtgcctgtgtggtcagtaccagacggaactcacgcccggcaccgtccgtcacgc

SEQ ID NO: 410677 - DNA, 75 bp, synthetic construct
  source 1..75: mol_type = other DNA
tttatagttagctcattaatgaaaaaacttataaaagacattagagacaataatggccgtataaaacaggtcttt

SEQ ID NO: 410678 - DNA, 75 bp, synthetic construct
  source 1..75: mol_type = other DNA
ggaagtggagtgctatgttttccggcgactggtaacagtatggagcctataatccctgatggaacgaccgtagct

SEQ ID NO: 410679 - DNA, 75 bp, synthetic construct
  source 1..75: mol_type = other DNA
cactttcccggctctgtgctaacggattaccgaatactgaagaactacatcaaaaccataggcggtgcagtatga

SEQ ID NO: 410680 - DNA, 75 bp, synthetic construct
  source 1..75: mol_type = other DNA
tggattaaacacacgatgggacccggactggcttatctcgccgcgtggacctactgggtggtgcatattccctat

SEQ ID NO: 410681 - DNA, 75 bp, synthetic construct
  source 1..75: mol_type = other DNA
gatgtcttttatcactgtctggggttttggcaacgttgttaataactatgccaaccaggggctggtggttgtttt

SEQ ID NO: 410682 - DNA, 75 bp, synthetic construct
  source 1..75: mol_type = other DNA
ggacatgccagtacaaaatcttaaagcctccgtgagttatggcgcactcaaagggttatggccgatagtgattgt

SEQ ID NO: 410683 - DNA, 75 bp, synthetic construct
  source 1..75: mol_type = other DNA
tgatcaacggagaaacggttctcagcacggatatcgccggcctgggggtgcggatagaaaacgccgccgacaact

SEQ ID NO: 410684 - DNA, 75 bp, synthetic construct
  source 1..75: mol_type = other DNA
tccacgagtcgacgcaaatagaaatcaagtcagtgattgcccgttgtcatttgcataacgtcaaaggttgtggga

SEQ ID NO: 410685 - DNA, 75 bp, synthetic construct
  source 1..75: mol_type = other DNA
gactggcttatctcgccgcgtggacctactgggtggtgcatattccctatctggcacaaaaccccaggcaattct

SEQ ID NO: 410686 - DNA, 75 bp, synthetic construct
  source 1..75: mol_type = other DNA
tattaatagcaattgaggccgttttaataatactttttagactattaccagacttaaaattgggtttgatattat

SEQ ID NO: 410687 - DNA, 75 bp, synthetic construct
  source 1..75: mol_type = other DNA
cattggcaacaatcagatgattgcggttaccaacaatcagatacagacggtgggcgttaaccagatagagacggt

SEQ ID NO: 410688 - DNA, 75 bp, synthetic construct
  source 1..75: mol_type = other DNA
atgtgataaacaaccatgctgagaccattggcaacaatcagatgattgcggttaccaacaatcagatacagacgg

SEQ ID NO: 410689 - DNA, 75 bp, synthetic construct
  source 1..75: mol_type = other DNA
gaacagccgcaggcggtaccgggacgcagtggttcaggcaccacgctggagaaccattttgcggtaatcccggca

SEQ ID NO: 410690 - DNA, 75 bp, synthetic construct
  source 1..75: mol_type = other DNA
cagcgcacacagtatgaagtgtatgactaccccggacgtttcaagagagcccacgggcagaactttgcccgctgg

SEQ ID NO: 410691 - DNA, 75 bp, synthetic construct
  source 1..75: mol_type = other DNA
gcgcaggtgctggacaaaatggcctacctgacgatatggcagggcgatgaaatacagcgccaggtgaaaggcgtg

SEQ ID NO: 410692 - DNA, 75 bp, synthetic construct
  source 1..75: mol_type = other DNA
ttacagagccagcacctgaacagcctggtgtatgaccgtgactacgggtggaatgacaacggcgacctggtgcgc

SEQ ID NO: 410693 - DNA, 75 bp, synthetic construct
  source 1..75: mol_type = other DNA
gcggtggtggaagaaaccggataaaacaaccgcattgtgcaaatatcgatcaaatatggtgctgctgtgtgaaat

SEQ ID NO: 410694 - DNA, 75 bp, synthetic construct
  source 1..75: mol_type = other DNA
atttaaaggaagtcactgcatggttgaaagatccatccagtaactggaaaaaattgccgtggaatgaatttaaaa

SEQ ID NO: 410695 - DNA, 75 bp, synthetic construct
  source 1..75: mol_type = other DNA
cccgtaggggcagagtttgaactattgcaggatgttttagcatcttcggataacgtcttctataaaccacgccgc

SEQ ID NO: 410696 - DNA, 75 bp, synthetic construct
  source 1..75: mol_type = other DNA
aacacgatcaccgcgaaaccgtaaaaaatgaccagacggtcacgatccaggaaggtaaccgccttcttacggtgg

SEQ ID NO: 410697 - DNA, 75 bp, synthetic construct
  source 1..75: mol_type = other DNA
aattatggagactattatgatgttgattattatgataacaatttgaaaaatgaagtttttgactggattggtaaa

SEQ ID NO: 410698 - DNA, 75 bp, synthetic construct
  source 1..75: mol_type = other DNA
aaagagaaaaaatatttaaacatgtcgaagatggtatggtctcgattgatgatgaattggccacagttgtagcta

SEQ ID NO: 410699 - DNA, 75 bp, synthetic construct
  source 1..75: mol_type = other DNA
cccggacgtttcaagggcgcccacgggcagaactttgcccgctggcagatggacggctggcgaaacaacgcagaa

SEQ ID NO: 410700 - DNA, 75 bp, synthetic construct
  source 1..75: mol_type = other DNA
gttttggtctggagtttgagaaatcagcctttggtaagtacaacgttgataatgctgtcaacgccaacttccgtt

SEQ ID NO: 410701 - DNA, 75 bp, synthetic construct
  source 1..75: mol_type = other DNA
cgcccggtaatgtttctggacacagaaacaggctctgactgggttaaaccccgctttgatgcggaaaatatcgaa

SEQ ID NO: 410702 - DNA, 75 bp, synthetic construct
  source 1..75: mol_type = other DNA
aattaacggttcttttaaaggctggcaggatcgctttattcctaatgccattcccgccgtcgatgtcgccgcgct

SEQ ID NO: 410703 - DNA, 75 bp, synthetic construct
  source 1..75: mol_type = other DNA
tacgaaggtcaacgtaataacttctatgatcctatcaaatctggcggtttattctttataaatgctaatgctgct

SEQ ID NO: 410704 - DNA, 75 bp, synthetic construct
  source 1..75: mol_type = other DNA
ccggcaactggctgaaatctcagcactgacaaaaagcattggtggtaaaagcgcccgggactgggcgatgaaaca

SEQ ID NO: 410705 - DNA, 75 bp, synthetic construct
  source 1..75: mol_type = other DNA
aagaccacggatcacactgggtactttccgatggttcccccctctttgaaagtccactatttgaaacaagaccta

SEQ ID NO: 410706 - DNA, 75 bp, synthetic construct
  source 1..75: mol_type = other DNA
ccgaatctgcatcaagggtgaagcgtgatttatctgaagtcgactccgagtcaacaatgaagcgtaagcgtttta

SEQ ID NO: 410707 - DNA, 75 bp, synthetic construct
  source 1..75: mol_type = other DNA
atggatctggagttcctggatgacccggaactcctggagcgcgtgaaggtacaggaggacctggagctcctggat

SEQ ID NO: 410708 - DNA, 75 bp, synthetic construct
  source 1..75: mol_type = other DNA
tgcagtttaacccgaccgaatccgtggccattgatattgcttatgaaggttccggcagtggcgactggcgcactg

SEQ ID NO: 410709 - DNA, 75 bp, synthetic construct
  source 1..75: mol_type = other DNA
ttttacgcctgaaaccacggtcaaagatggggtgaagaactttgttaactggtaccgtgatttctacaaagtttg

SEQ ID NO: 410710 - DNA, 75 bp, synthetic construct
  source 1..75: mol_type = other DNA
tctctatccactacaacaaattcagcctgcgtgatcccatcctgcacggagtaatagatgttatccgtaatgcat

SEQ ID NO: 410711 - DNA, 75 bp, synthetic construct
  source 1..75: mol_type = other DNA
tcaccagctacaacattttgacaatcgctgcactggttgccaacagtgacatgttagcgattattcccagccgtt

SEQ ID NO: 410712 - DNA, 75 bp, synthetic construct
  source 1..75: mol_type = other DNA
taaggtatccattacccgctcgcaactggcaatgctcctcgataagctggactggcgtcagccaaaaacatcccg

SEQ ID NO: 410713 - DNA, 75 bp, synthetic construct
  source 1..75: mol_type = other DNA
ttatacacaaagttctgatggaatagtgtcatgctggtatagtaaccatgaagatgataaaatgaatatcatcgt

SEQ ID NO: 410714 - DNA, 75 bp, synthetic construct
  source 1..75: mol_type = other DNA
gtgtcatgctggtatagtaaccatgaagatgataaaatgaatatcatcgtcggtgatgctgccaacttactgatt

SEQ ID NO: 410715 - DNA, 75 bp, synthetic construct
  source 1..75: mol_type = other DNA
aaaggaatttatacttttattaccctataataaatcactggagatgtatgaacttaacgagcaaaaaattcagta

SEQ ID NO: 410716 - DNA, 75 bp, synthetic construct
  source 1..75: mol_type = other DNA
gattctttaaaggatgagttacttgaaatttcaaatcagatagatcgaattaaagaccctgaatattatgcattg

SEQ ID NO: 410717 - DNA, 75 bp, synthetic construct
  source 1..75: mol_type = other DNA
tgatggttttggtattcagaggcaaatcaacacgattaaccagtttttacagtatgtggtcttagatcatcgtct

SEQ ID NO: 410718 - DNA, 75 bp, synthetic construct
  source 1..75: mol_type = other DNA
ttttgcgtggcggttatcttaaccacactgaggaggctgccaacatggctactacccctaccctcgtacattctc

SEQ ID NO: 410719 - DNA, 75 bp, synthetic construct
  source 1..75: mol_type = other DNA
ccacgtaaccgcctggacggaacgcgaagcgcgtagccgttgcccgtccggttgtgttgctgtattcgccgcccg

SEQ ID NO: 410720 - DNA, 75 bp, synthetic construct
  source 1..75: mol_type = other DNA
ccccgttcagtccaccgccagcgaaattggcgtttcctgcggtggaaattcttcactgtcaaaggaggctgccaa

SEQ ID NO: 410721 - DNA, 75 bp, synthetic construct
  source 1..75: mol_type = other DNA
atgttaacgggcgacccgtgtcgaccggggctttgctcagaccttctgacgcgtgctgtgattatttcgcttttt

SEQ ID NO: 410722 - DNA, 75 bp, synthetic construct
  source 1..75: mol_type = other DNA
tatggtgttacttattggcatctggcgcatcagcttcatggggttactgatcctacccacgtaatatggacacag

SEQ ID NO: 410723 - DNA, 75 bp, synthetic construct
  source 1..75: mol_type = other DNA
gcacactattgaagttttgcccggtttgcgctcgtgaagatacttttcattatggtgttacttattggcatctgg

SEQ ID NO: 410724 - DNA, 75 bp, synthetic construct
  source 1..75: mol_type = other DNA
aaagtatctcacctgttggagaagatatagttaaaaaggtgtctaaatatgtctctccaattgctcacatttggt

SEQ ID NO: 410725 - DNA, 75 bp, synthetic construct
  source 1..75: mol_type = other DNA
gccgagagtctgaaagattctgatatgtatctgctcggtaaagtggaccggtgtacggtatacctgatcaataat

SEQ ID NO: 410726 - DNA, 75 bp, synthetic construct
  source 1..75: mol_type = other DNA
agaaagatgccgatccgcctaaacaattaatatcgctgcacagactctttatttctctctgcacgttattactga

SEQ ID NO: 410727 - DNA, 75 bp, synthetic construct
  source 1..75: mol_type = other DNA
aaaacggcgaggcaaatcaccttgagagggatttaccagcggttactgaaggttgacccgctgaagtgcgtgctg

SEQ ID NO: 410728 - DNA, 75 bp, synthetic construct
  source 1..75: mol_type = other DNA
atggatttaaacatagaagactctagctcagaagagttactttcagataataccctcgagaaagacgaaaattct

SEQ ID NO: 410729 - DNA, 75 bp, synthetic construct
  source 1..75: mol_type = other DNA
cggcaaacaccatgtttgtgacccgccttcatgaacgtctggggcagacgcaatacgtcgatgcaattaccggag

SEQ ID NO: 410730 - DNA, 75 bp, synthetic construct
  source 1..75: mol_type = other DNA
caaaacctacaaagactatccatggattgcttgtgtgaaagtgagtgattgtgatgaagcaatctctaaagaacg

SEQ ID NO: 410731 - DNA, 75 bp, synthetic construct
  source 1..75: mol_type = other DNA
cacgccgtaattatctcgttaaatgttcctgcccaaactgcacccaagagtcagaacacagtttttcaagagtac

SEQ ID NO: 410732 - DNA, 75 bp, synthetic construct
  source 1..75: mol_type = other DNA
taataggagatgatttacttgaactttctggtgaaggggttgcaaggaaaaatattaggagaatatttggtaagg

SEQ ID NO: 410733 - DNA, 75 bp, synthetic construct
  source 1..75: mol_type = other DNA
attctacctctagtcgttgtttagctttagcagtgcaacaaaaatcaatgtatagaagatttttctttatatttc

SEQ ID NO: 410734 - DNA, 75 bp, synthetic construct
  source 1..75: mol_type = other DNA
gaaaaagccgccggtaccgatgagccggctggagcactatgccagtcaggatgaaatcgggctgctttataacag

SEQ ID NO: 410735 - DNA, 75 bp, synthetic construct
  source 1..75: mol_type = other DNA
gcccacgacttaacgctgaggcagatataaatttccgcgtcaggaaagcacagtttggcgatggatatgagcagg

SEQ ID NO: 410736 - DNA, 75 bp, synthetic construct
  source 1..75: mol_type = other DNA
acaggattctcttgatgaagagcatcgggctgtggaagtggcagagaagaagctggctgaggctaaagctgaact

SEQ ID NO: 410737 - DNA, 75 bp, synthetic construct
  source 1..75: mol_type = other DNA
ttccaactccgtgcagtccaccgccagcgagattggaacctccagcggtgggtatatcccaacgataaaggaggc

SEQ ID NO: 410738 - DNA, 75 bp, synthetic construct
  source 1..75: mol_type = other DNA
aacctatcaaagaaaatcgttcacgagagcggagtggaaaatttgggacacattagttaacgaaaagaaaattgg

SEQ ID NO: 410739 - DNA, 75 bp, synthetic construct
  source 1..75: mol_type = other DNA
ccctctgcatcagccagttccgctacagcgcacaaatccgcccttcttccgtggtgaccaaagactacaccttta

SEQ ID NO: 410740 - DNA, 75 bp, synthetic construct
  source 1..75: mol_type = other DNA
tgtcttgataaaaatacataaagatagtgataagtggaatttgtttaataaagtgatgatgaagttgagagaaga

SEQ ID NO: 410741 - DNA, 75 bp, synthetic construct
  source 1..75: mol_type = other DNA
tgaagtatggagatcagccgataaggattactactgttcaggtagtggagaagttgggaggggctgcaacaataa

SEQ ID NO: 410742 - DNA, 75 bp, synthetic construct
  source 1..75: mol_type = other DNA
acggcggcgaacctggatatcgatatcccgtatgcgacggacccggcaggaaaccggctgccggacccggaactg

SEQ ID NO: 410743 - DNA, 75 bp, synthetic construct
  source 1..75: mol_type = other DNA
gatcaatcctgtatcgcaaaataccaacttcctgcgaagaaaagtgcatcagggttataccagatagcggcgaca

SEQ ID NO: 410744 - DNA, 75 bp, synthetic construct
  source 1..75: mol_type = other DNA
tttttatttccgtttcctttaattctggttgctcaacatcaggaaatcaacatctcaaaaacgaaacatcacaaa

SEQ ID NO: 410745 - DNA, 75 bp, synthetic construct
  source 1..75: mol_type = other DNA
tttttatttccgctttccttatttctggctgttctacctcaggcaaccagactcttaaaaatgaaacatcaaaaa

SEQ ID NO: 410746 - DNA, 75 bp, synthetic construct
  source 1..75: mol_type = other DNA
ataaccttgaaaccaaatgtccattttgccaacaaaatacgcccagtagtttgaaatcggatttagaaagttact

SEQ ID NO: 410747 - DNA, 75 bp, synthetic construct
  source 1..75: mol_type = other DNA
aatcagttcaatgcctcgacttttatccctgttgtcggtttgctaactggcggttcccagactcagtctaaaact

SEQ ID NO: 410748 - DNA, 75 bp, synthetic construct
  source 1..75: mol_type = other DNA
gaggctgaacgcacaccgctggcccactacttccagttactgctcacccgtttgatgaacaatgaagagatcagc

SEQ ID NO: 410749 - DNA, 75 bp, synthetic construct
  source 1..75: mol_type = other DNA
atgaaccacgatatcccgctaaaatattttgatattgccgatgagtacgcgaccgaatgcgcagagcctgtcgca

SEQ ID NO: 410750 - DNA, 75 bp, synthetic construct
  source 1..75: mol_type = other DNA
gtatgtagttgccgaagttcttttaagggctaagggtaagtgccaaagctgtaagcgtgatgcgcctttcttgaa

SEQ ID NO: 410751 - DNA, 75 bp, synthetic construct
  source 1..75: mol_type = other DNA
aaactcaaaggaaaagattaaaatatatacaggcacttctaaattaatttatgatttattcggggttaaatcgga

SEQ ID NO: 410752 - DNA, 75 bp, synthetic construct
  source 1..75: mol_type = other DNA
acatctcgatgagcgtaggctaatgctacagtggtgggctgactatcttgatgccaaccgtaaagggatattacg

SEQ ID NO: 410753 - DNA, 75 bp, synthetic construct
  source 1..75: mol_type = other DNA
gcaaccctgagagaaattcagaagctcagtggagatcaggaaatcatcttcattggtgatcactatgcttataaa

SEQ ID NO: 410754 - DNA, 75 bp, synthetic construct
  source 1..75: mol_type = other DNA
ttatgtctagggttaaggaatggacctggaattgtagcatggggggcttattcatttatgattatagccccaata

SEQ ID NO: 410755 - DNA, 75 bp, synthetic construct
  source 1..75: mol_type = other DNA
ctagatccgttccaagccgtagaaatcatatccggtctaattaaccgtggtactactattatagaaattgaaacg

SEQ ID NO: 410756 - DNA, 75 bp, synthetic construct
  source 1..75: mol_type = other DNA
cacggttcagctattttatgaggaatctaaagataatgaacctttagcgaatatacatttgcaagcaataggttc

SEQ ID NO: 410757 - DNA, 75 bp, synthetic construct
  source 1..75: mol_type = other DNA
ataatcagactatatcactcccttgaaaaagggttagcaaatgaaaaattcaaaaaagaatcgtcattaaaaaac

SEQ ID NO: 410758 - DNA, 75 bp, synthetic construct
  source 1..75: mol_type = other DNA
aacgtgagcgcgaacaactggttccttatccgcgtttttttgccagtctggcaggctttgttacggcaggtgtga

SEQ ID NO: 410759 - DNA, 75 bp, synthetic construct
  source 1..75: mol_type = other DNA
aacgtgagcgtgaacaactggttccttatccgcgttttttttgccagtctggcgggctttgttacggcaggtgtg

SEQ ID NO: 410760 - DNA, 75 bp, synthetic construct
  source 1..75: mol_type = other DNA
cgcatttgccagtgcattcccgaacggccttccggttgggataggttctggcctgctgttcaccggtaatccgtg

SEQ ID NO: 410761 - DNA, 75 bp, synthetic construct
  source 1..75: mol_type = other DNA
acaggattatttttgatattgaagatggtgatcctgttgtattggaaataaaagaaattaagcgtagaagttcaa

SEQ ID NO: 410762 - DNA, 75 bp, synthetic construct
  source 1..75: mol_type = other DNA
cgcggtcagaagaggagcttaccgattattgccgaagcatgggattgcttgttaaacaggttaaagaatggcggg

SEQ ID NO: 410763 - DNA, 75 bp, synthetic construct
  source 1..75: mol_type = other DNA
ccgaagatcgacacctcggtaagcctgtggaaaggcgcgttgaaaccgctggcagcggctggctttattgccact

SEQ ID NO: 410764 - DNA, 75 bp, synthetic construct
  source 1..75: mol_type = other DNA
ttgaagtgtctccacaattcgatggatgcggagtaataaataattcatatggcgatatttattattcaaatgttc

SEQ ID NO: 410765 - DNA, 75 bp, synthetic construct
  source 1..75: mol_type = other DNA
tgccgggggatatgttctcaactgctgtggacttttcacggcaggtgctgacggcaggtgtgtcgatgttcagcc

SEQ ID NO: 410766 - DNA, 75 bp, synthetic construct
  source 1..75: mol_type = other DNA
tctatcccgctttttacaaagaaatacaaactctgtatttcgcctgtaacgggtattatctgctctgttgctgaa

SEQ ID NO: 410767 - DNA, 75 bp, synthetic construct
  source 1..75: mol_type = other DNA
gagtaccattttctctgtattaataaagggggggctctgccaataaagccgcgctttatcaggaaacaaaatccc

SEQ ID NO: 410768 - DNA, 75 bp, synthetic construct
  source 1..75: mol_type = other DNA
gagtaccattttctctgtgttaataaaggggcggctccgccaataaagccgcgctttatcaggaaaccaaatcct

SEQ ID NO: 410769 - DNA, 75 bp, synthetic construct
  source 1..75: mol_type = other DNA
tgaaatggacgaacagtggggctacgtcggtgctaaatcacgtcatcgctggctgttttacgcgtatgacaggat

SEQ ID NO: 410770 - DNA, 75 bp, synthetic construct
  source 1..75: mol_type = other DNA
ggtgcatattcaccatttttatttatattgaatgctgttatttataacgaaaccagatatttaggtaatcaaaag

SEQ ID NO: 410771 - DNA, 75 bp, synthetic construct
  source 1..75: mol_type = other DNA
aatacccggacggtaagcctccggtatgggcgaaggctacaaaaggagtgtttccgtcgtattgggaagaatgga

SEQ ID NO: 410772 - DNA, 75 bp, synthetic construct
  source 1..75: mol_type = other DNA
ccgcgcctgcatgattacgccttgtggctcttgggatgccttgccgtcatccagctagtttggacttttgctcct

SEQ ID NO: 410773 - DNA, 75 bp, synthetic construct
  source 1..75: mol_type = other DNA
gcacataaatgtgcaacatgacgttgcgcaggggcgtcgcgtggtagggcgtaaagtgggcctgacacatccgaa

SEQ ID NO: 410774 - DNA, 75 bp, synthetic construct
  source 1..75: mol_type = other DNA
actattcgctcgattctgctggaagtcgaacggctacacagtcatttgctcaaccttggtctctcctgccatttt

SEQ ID NO: 410775 - DNA, 75 bp, synthetic construct
  source 1..75: mol_type = other DNA
ttatttgcgagcgcgtgtatacacatatggctacgagcgcaaggaattttaactggattcaccttcctattttaa

SEQ ID NO: 410776 - DNA, 75 bp, synthetic construct
  source 1..75: mol_type = other DNA
tccgtcttgatgatggacgtttcctttctctatctagagttggtgcagaacctagcgtcgatgagcttcacatcg

SEQ ID NO: 410777 - DNA, 75 bp, synthetic construct
  source 1..75: mol_type = other DNA
attgggggcaaatcaaagtacggcttggtcaagacttcgtccctatgttctacgggagttgcattgagagaatgt

SEQ ID NO: 410778 - DNA, 75 bp, synthetic construct
  source 1..75: mol_type = other DNA
ggcaaggcagagaatgacagggcaggacaattcagtcgtattttagaccgcagaaaatttctcgaaactcaccgt

SEQ ID NO: 410779 - DNA, 75 bp, synthetic construct
  source 1..75: mol_type = other DNA
tttacaagatcacgatactaaacttgaaagctatattgttaataaccatacaaataaaatgatatcgatgttgca

SEQ ID NO: 410780 - DNA, 75 bp, synthetic construct
  source 1..75: mol_type = other DNA
ggatcaactttcagaaagtgatcaacagcgccgtgaatttattgccaatatctcccatgatttacggacgccatt

SEQ ID NO: 410781 - DNA, 75 bp, synthetic construct
  source 1..75: mol_type = other DNA
ttcccgtggaacagtagacctgtttgcatcattcaaagacatgcatggtgtgcttgtcgaaggtgcgattgcacc

SEQ ID NO: 410782 - DNA, 75 bp, synthetic construct
  source 1..75: mol_type = other DNA
tgtcacgttacgcgcgtggcagaggcgttacgggttgctgaaaccgcaacggacagacggcggtcatcgactatt

SEQ ID NO: 410783 - DNA, 75 bp, synthetic construct
  source 1..75: mol_type = other DNA
gaggtcgttccggaagttgaagcatggctgagtgttaaagcgtcgccgtggggaatatatctgactacgtactcc

SEQ ID NO: 410784 - DNA, 75 bp, synthetic construct
  source 1..75: mol_type = other DNA
gatgacatatattagcgaggttaaaaatatggttcttactgatgtgaaaagtaaagaacaatacgatgcactcat

SEQ ID NO: 410785 - DNA, 75 bp, synthetic construct
  source 1..75: mol_type = other DNA
ttgctgtagacattgacgacgttaacacagcgctgataccgctcaatgttcttgttagctggatttaccataaca

SEQ ID NO: 410786 - DNA, 75 bp, synthetic construct
  source 1..75: mol_type = other DNA
cggaaacgatgatctggcagcctgagttcacagataaaatactctccaggaaacccggggcggttcattacgggt

SEQ ID NO: 410787 - DNA, 75 bp, synthetic construct
  source 1..75: mol_type = other DNA
gccaaccgcctggagtcgttaggcaaacgcctgggacggggggaagatgggggcttgtgtattggctatatcgaa

SEQ ID NO: 410788 - DNA, 75 bp, synthetic construct
  source 1..75: mol_type = other DNA
atggcaataacattcagccagatatccctctccctgacggagtaaagccagtaagcatggattctctccttgatg

SEQ ID NO: 410789 - DNA, 75 bp, synthetic construct
  source 1..75: mol_type = other DNA
cgggaatatgacgaagcaattcacaaaggcagttggtggcgcggaagtgaaccgccccgggaatcctggagacta

SEQ ID NO: 410790 - DNA, 75 bp, synthetic construct
  source 1..75: mol_type = other DNA
gttaaccaaagatgtgatctcggatgacgggaaaactgtattaatccgtgctggcgcacaactccagggggaaca

SEQ ID NO: 410791 - DNA, 75 bp, synthetic construct
  source 1..75: mol_type = other DNA
acgtcttcgtaaggagctgaggttgcactgtaagcagaaacgcaagttcagggcgaccacaagctctgaccacaa

SEQ ID NO: 410792 - DNA, 75 bp, synthetic construct
  source 1..75: mol_type = other DNA
cgatgctggcgcatcttatccgacctacggggagcgcatgtgttggtcacataatgcgttcatgtcgcatccgcc

SEQ ID NO: 410793 - DNA, 75 bp, synthetic construct
  source 1..75: mol_type = other DNA
ttgtgtccagtacggcgaaaccgattacgatttcctgtgccggatggcggcggaggaaggcatcttcttttatga

SEQ ID NO: 410794 - DNA, 75 bp, synthetic construct
  source 1..75: mol_type = other DNA
aatatccgaaccgttctactcatgacaccggtcttggacaatacagtaaggataacgagtcgctggacaacaccg

SEQ ID NO: 410795 - DNA, 75 bp, synthetic construct
  source 1..75: mol_type = other DNA
gcgttaattctgaactatctgataaaacgatacaatttaaggggggaatccataatggtatccatacagaaaaca

SEQ ID NO: 410796 - DNA, 75 bp, synthetic construct
  source 1..75: mol_type = other DNA
agtactttcaacgcaaacttctatcctcaaggtcatgacagtaatgccgattggcgtactggacaccaatggtgg

SEQ ID NO: 410797 - DNA, 75 bp, synthetic construct
  source 1..75: mol_type = other DNA
ccatacagaaaacatcacggttcaaaaccacagtaataataaagagcgtgaaaaaaaatatcgcgatggagacaa

SEQ ID NO: 410798 - DNA, 75 bp, synthetic construct
  source 1..75: mol_type = other DNA
atgagagagattgtcgctggatccattctacagttattacgtcagactcaggatagttatttccctatcttagag

SEQ ID NO: 410799 - DNA, 75 bp, synthetic construct
  source 1..75: mol_type = other DNA
actccatgaagcccaacacaatgatgttacagcacaacgttgggtattgactgagcaagatgaacgacaaggaca

SEQ ID NO: 410800 - DNA, 75 bp, synthetic construct
  source 1..75: mol_type = other DNA
ttattctctcatggcagcggcaacgtaaatacgaaattaacttttaaactatgtcaatatggattaccagcgtcc

SEQ ID NO: 410801 - DNA, 75 bp, synthetic construct
  source 1..75: mol_type = other DNA
acggcaccctgatcaacaagctgaccgaaaagtacggcattacgggccgggtgatctacgtccacgatctctccc

SEQ ID NO: 410802 - DNA, 75 bp, synthetic construct
  source 1..75: mol_type = other DNA
attaccgtctatgaaggttccagtccggggacgctgaatgattttctcggtgccatgacggaagatgatgtcatg

SEQ ID NO: 410803 - DNA, 75 bp, synthetic construct
  source 1..75: mol_type = other DNA
tgataaacaggttagtttcacgcgcgcatcaacggcaacctatatcaacaaatctggtgaactgaaaacagcgga

SEQ ID NO: 410804 - DNA, 75 bp, synthetic construct
  source 1..75: mol_type = other DNA
ttattcaacgcaattatgggcagcctggcataaagccaaccaacgtccgctggtttcccatttccgccagatttt

SEQ ID NO: 410805 - DNA, 75 bp, synthetic construct
  source 1..75: mol_type = other DNA
tcttttacgcctttctggaaaatttgaatgggtggcgattggatgctgcggcccacacaggcacatacgctctaa

SEQ ID NO: 410806 - DNA, 75 bp, synthetic construct
  source 1..75: mol_type = other DNA
gccggtcgtcgtaagctgtggtatcgctggcagcagcgccacatgctgagccatatcactgaaaaactggataac

SEQ ID NO: 410807 - DNA, 75 bp, synthetic construct
  source 1..75: mol_type = other DNA
gcacctgtggcaggcgattacgttgtcgaaaacggtaccgagcgcctcggtcgccaaagctattctggatgaatt

SEQ ID NO: 410808 - DNA, 75 bp, synthetic construct
  source 1..75: mol_type = other DNA
tgtcctcccaggttgtcagagtgctaaggcgatttgcgctggttgcaacggccttggggttggcatcgcgcaatt

SEQ ID NO: 410809 - DNA, 75 bp, synthetic construct
  source 1..75: mol_type = other DNA
ggtgtggtgcagcaggaagtgattttcaaccgagtgctctatggggagcagtcgcgacaaatccgcgaaaaactg

SEQ ID NO: 410810 - DNA, 75 bp, synthetic construct
  source 1..75: mol_type = other DNA
accgtgtatgaagattcccggcccggtacgctgaatgactttctgggagctgcgacggaagacgatgttatgccg

SEQ ID NO: 410811 - DNA, 75 bp, synthetic construct
  source 1..75: mol_type = other DNA
tcgtgttgctatcgctggcggtggccggtctgtttctggcgaagcatgaaaacgccaggctgcgcgtctcgctgg

SEQ ID NO: 410812 - DNA, 75 bp, synthetic construct
  source 1..75: mol_type = other DNA
tatgatggtagtgcaacaacttttcttggcgatgcgtacattgatacgcaaacgcttgaaattaatatgacaggt

SEQ ID NO: 410813 - DNA, 75 bp, synthetic construct
  source 1..75: mol_type = other DNA
ttggtaaaaaatgtctacttcgacgaatcagggtttacaggtaataacttactttcaaaagatcagccttttttt

SEQ ID NO: 410814 - DNA, 75 bp, synthetic construct
  source 1..75: mol_type = other DNA
cctcaagctaagtaaagatagtgttaaagaagatttgcagttattagaagttagcttcttgggagcccttcctca

SEQ ID NO: 410815 - DNA, 75 bp, synthetic construct
  source 1..75: mol_type = other DNA
cttggaagtattgtatttttgctttctgatgcgtcaaaatatgtaacgggacaaaatattattgttgatgacggt

SEQ ID NO: 410816 - DNA, 75 bp, synthetic construct
  source 1..75: mol_type = other DNA
gccgtcctttacgaatactgcatatctttggtcatatttttttgcggggatgctctgcagggagttgaaagaaag

SEQ ID NO: 410817 - DNA, 75 bp, synthetic construct
  source 1..75: mol_type = other DNA
agttatgcagcagtcataactgatgaagaagaaagtaaacaatgtgtagattacataatacaaaagtactcgatt

SEQ ID NO: 410818 - DNA, 75 bp, synthetic construct
  source 1..75: mol_type = other DNA
tatcgaaccagttgttggttctaaaaattctgaaattatgatggacattcatgatttcgccaagaataacatctc

SEQ ID NO: 410819 - DNA, 75 bp, synthetic construct
  source 1..75: mol_type = other DNA
atccgctgtgaagagcgattggcattggcagtaaaacggccggaggcatttatttacggctccttcactgtaccg

SEQ ID NO: 410820 - DNA, 75 bp, synthetic construct
  source 1..75: mol_type = other DNA
agctggaagaccagagcgccaccatacagcagatacagcaggtccagtcagacacgaatgatgagctggctgcgc

SEQ ID NO: 410821 - DNA, 75 bp, synthetic construct
  source 1..75: mol_type = other DNA
ttgaagctgaactggttgaaatggatggcgaaccagatcacgtccatttgttaattaactatcctcccaaactgg

SEQ ID NO: 410822 - DNA, 75 bp, synthetic construct
  source 1..75: mol_type = other DNA
tcacaaacgaaatctttcgcgttccggcgcgccgcaagcctaagcccgcggttaagccatccgatatcccgaccc

SEQ ID NO: 410823 - DNA, 75 bp, synthetic construct
  source 1..75: mol_type = other DNA
atcattacaaacaaaaaataaaatatacttttacaatacgggaaaaggaggttatgaatttacttaaatttggta

SEQ ID NO: 410824 - DNA, 75 bp, synthetic construct
  source 1..75: mol_type = other DNA
actacggtaatcagtctgtggtactgacggaattatccggacttcagcgggtggagtatctggcgtttgtccaga

SEQ ID NO: 410825 - DNA, 75 bp, synthetic construct
  source 1..75: mol_type = other DNA
atgcacgatgcaccacaggatgtgctggtcgagagttatcccgaagaggaattctggcaggatctctggcgtgtc

SEQ ID NO: 410826 - DNA, 75 bp, synthetic construct
  source 1..75: mol_type = other DNA
cggagacggttcgattataaatattgcgtcaatgtccgggattattgtcaatcgtggtctggaacaggcccacta

SEQ ID NO: 410827 - DNA, 75 bp, synthetic construct
  source 1..75: mol_type = other DNA
cctgggcagtagaaagggctttgttttttcctcagaagaactgagacaggcacatattgaaggtattgcaatgta

SEQ ID NO: 410828 - DNA, 75 bp, synthetic construct
  source 1..75: mol_type = other DNA
gaatggactcccatcaactattcaactattttatgaaaaatctattgatgatgaatctatagcttcgttacatct

SEQ ID NO: 410829 - DNA, 75 bp, synthetic construct
  source 1..75: mol_type = other DNA
cgcagaaaactatgttgactgggtggggtattcccaaactaacggcttatctcaccacatacaagattttgatat

SEQ ID NO: 410830 - DNA, 75 bp, synthetic construct
  source 1..75: mol_type = other DNA
cccaacacgacaatgaacttaactttatctccatgctgccgctggcgggctatgacggctctttgcagtaccgtg

SEQ ID NO: 410831 - DNA, 75 bp, synthetic construct
  source 1..75: mol_type = other DNA
gcgctgatcatcaacgaataccgggagcagggcggtaccgccatcagcttcccagaagacatcagcagggcgcgc

SEQ ID NO: 410832 - DNA, 75 bp, synthetic construct
  source 1..75: mol_type = other DNA
ggcatatctccaatgtcgttaagcgcaccggggaaggcgttaaaccacgggagcatctgcggccggttgacatat

SEQ ID NO: 410833 - DNA, 75 bp, synthetic construct
  source 1..75: mol_type = other DNA
cgcaccggcgacaggcagcacggctttgcctacagcaatgaatgctcgttcctgaatagccttgtgctgggtatg

SEQ ID NO: 410834 - DNA, 75 bp, synthetic construct
  source 1..75: mol_type = other DNA
gaggcgatagcccctaatgatatttctcctgaaaatacaccagaagaaattgaacgactacagcaattcaaagaa

SEQ ID NO: 410835 - DNA, 75 bp, synthetic construct
  source 1..75: mol_type = other DNA
gcgctcgaagaggtgcaatcgcctggttacggacgctggaccaacctgtaccggtacctggctacagagtgcggc

SEQ ID NO: 410836 - DNA, 75 bp, synthetic construct
  source 1..75: mol_type = other DNA
agcgaagaagaccggagccttccgcgcaggagtcgcaactggttcctgcagcagctaccccatcgggcatcagtc

SEQ ID NO: 410837 - DNA, 75 bp, synthetic construct
  source 1..75: mol_type = other DNA
tggccacagacggggaccttgcaggcctgatagctatctcggatcccgtgaaaacaaccacgccggatgcgctta

SEQ ID NO: 410838 - DNA, 75 bp, synthetic construct
  source 1..75: mol_type = other DNA
cacatgatcttaatgattgcccatttattccctgtatggacggtttatgcttaatgcctgcattaatagcaaata

SEQ ID NO: 410839 - DNA, 75 bp, synthetic construct
  source 1..75: mol_type = other DNA
gtgggcctgcagaatgaatacaacggcatcatcgatgccgcctctcatccgcagctgtcactgattgctgacagt

SEQ ID NO: 410840 - DNA, 75 bp, synthetic construct
  source 1..75: mol_type = other DNA
gattggcatgctgaaaaatcagcttgccgtatcgcagcgaatcgcaagtgcgaatgaggatgcgcaggtcaggct

SEQ ID NO: 410841 - DNA, 75 bp, synthetic construct
  source 1..75: mol_type = other DNA
gatcgccggtgattccgatgatatgcgtgattatgctgactggctggatcgcaacgaggcgctgatgctgtcagc

SEQ ID NO: 410842 - DNA, 75 bp, synthetic construct
  source 1..75: mol_type = other DNA
tacaggaaatgcagggggataacctgctccgtgaactggtaagaatcactgcgcaaatgaactggcaactgaacg

SEQ ID NO: 410843 - DNA, 75 bp, synthetic construct
  source 1..75: mol_type = other DNA
ccgtcacccgacagatcatgccggagctggccaccatacagggcatcatggaggaaatggtccgtatgcagacag

SEQ ID NO: 410844 - DNA, 75 bp, synthetic construct
  source 1..75: mol_type = other DNA
ccgccggcttgaggaagcccggaagagcttcagcgtgccggactccatctgcagtgaatccgcctcaggagttgc

SEQ ID NO: 410845 - DNA, 75 bp, synthetic construct
  source 1..75: mol_type = other DNA
ataatcgtcgtatcatctacagggagatgaatgtttcaaggttattgacaggccttaaacatgttgatgtaaaca

SEQ ID NO: 410846 - DNA, 75 bp, synthetic construct
  source 1..75: mol_type = other DNA
aagaatgcgtggtagaaaacattattgttgctgatgataattactctcctgatgatttcgaagtcgtaaaatata

SEQ ID NO: 410847 - DNA, 75 bp, synthetic construct
  source 1..75: mol_type = other DNA
atgctctacaacagtttaaatgtagcaacgaataaaaccaccattttgcaaccagatgacaaaccgttcattcat

SEQ ID NO: 410848 - DNA, 75 bp, synthetic construct
  source 1..75: mol_type = other DNA
caagggaacgctgactgattttaaaaccgcgcatcgtgtcgggctggaaactttcccgacgctacgaaaagtatt

SEQ ID NO: 410849 - DNA, 75 bp, synthetic construct
  source 1..75: mol_type = other DNA
tggcgtcgtttattgccatgtgtggagatcacatcgttatgcctgaaaacgcgatgatgatgatacatgcccccc

SEQ ID NO: 410850 - DNA, 75 bp, synthetic construct
  source 1..75: mol_type = other DNA
gggaggaagatcaactggggctctggggctggttattaatgcagtggttctgtggaacacgctctatatgcagga

SEQ ID NO: 410851 - DNA, 75 bp, synthetic construct
  source 1..75: mol_type = other DNA
tgaaaagctggcaagtgtcattgcccagaacggacaggcgacacgtcagcagatgattttcagtaatgaaactca

SEQ ID NO: 410852 - DNA, 75 bp, synthetic construct
  source 1..75: mol_type = other DNA
aaatgtcgagaaggataacgcctataacgggatgaccctgcgtgaatgggctcgcatgtcactgacggagcgcgg

SEQ ID NO: 410853 - DNA, 75 bp, synthetic construct
  source 1..75: mol_type = other DNA
gcctcagccattacgaaaaaacggggaaatggcggctgagctggctgcggatatccgccgtttgtgggctgaatg

SEQ ID NO: 410854 - DNA, 75 bp, synthetic construct
  source 1..75: mol_type = other DNA
caggaaaaaccaccgatgaaattgccgccatgctggcggatgagacctggatgtcaggtgccgagtgtctggcac

SEQ ID NO: 410855 - DNA, 75 bp, synthetic construct
  source 1..75: mol_type = other DNA
acagcgcatcgtgtggggatgggcggattcccgtctctgcggcaggttcgcgaaggcgctgaatataagtatgtg

SEQ ID NO: 410856 - DNA, 75 bp, synthetic construct
  source 1..75: mol_type = other DNA
agctggggcgcgagtccacgccatccaataaaaataccccgcctcatatctatgccggaaacggaaacataacag

SEQ ID NO: 410857 - DNA, 75 bp, synthetic construct
  source 1..75: mol_type = other DNA
tcgaaggcgtaaccgcaagacagttccgcgattcacttatggctgcaaaaggcccggttacggttgccataaaca

SEQ ID NO: 410858 - DNA, 75 bp, synthetic construct
  source 1..75: mol_type = other DNA
ttgatgataacagccagaccaccttctacctggctgcgtcaaaaggctccgatacgattgaagtggcttatctca

SEQ ID NO: 410859 - DNA, 75 bp, synthetic construct
  source 1..75: mol_type = other DNA
gtgctctgggtaaaggagaagtgaatacccagagtgggcgaacctacgtcggactccagaacgaatacaacggca

SEQ ID NO: 410860 - DNA, 75 bp, synthetic construct
  source 1..75: mol_type = other DNA
atgaaaatctccacccaaggttgcggaagaaccacttttcatccgtcgttgacaaccgtgccagactccatctgc

SEQ ID NO: 410861 - DNA, 75 bp, synthetic construct
  source 1..75: mol_type = other DNA
cccctcaacagcccgcgacacagatggcaaatatcgatatcaccgcactggctcagcagttgcaacagcagatgc

SEQ ID NO: 410862 - DNA, 75 bp, synthetic construct
  source 1..75: mol_type = other DNA
acaggggttcaccgtggacggtgcgacattcaaggtgcgtatcgatgccggcgtggcgccgctggactggcgagg

SEQ ID NO: 410863 - DNA, 75 bp, synthetic construct
  source 1..75: mol_type = other DNA
gttcaggcgcaggtcgatcgcaatgacgagatttatcgccgtcagcgggagatgaaggaaacactggcggggctg

SEQ ID NO: 410864 - DNA, 75 bp, synthetic construct
  source 1..75: mol_type = other DNA
ttggcttcaactgcaatgatctggaatatcatctataacatgctatttgatcgctactggcctgctcatcaggta

SEQ ID NO: 410865 - DNA, 75 bp, synthetic construct
  source 1..75: mol_type = other DNA
tccttgttataattattacaatttatttcgtaatagcaaatgtaattgaagcaagtaattactataaagatatac

SEQ ID NO: 410866 - DNA, 75 bp, synthetic construct
  source 1..75: mol_type = other DNA
tcgcggttgtcgcctttatctggcagtgcatcagcctgccaagcatggatgcgaataccgcgccacacttcatgt

SEQ ID NO: 410867 - DNA, 75 bp, synthetic construct
  source 1..75: mol_type = other DNA
agaggctgccacgaaacgacagttatctgagcaggaaaaatccctgctggcgcataaagacgagacgctggagta

SEQ ID NO: 410868 - DNA, 75 bp, synthetic construct
  source 1..75: mol_type = other DNA
caacgttatatgcaaatacttcacgcgtcggctggattatcgccggctctgttgacggaattatggttgaaatct

SEQ ID NO: 410869 - DNA, 75 bp, synthetic construct
  source 1..75: mol_type = other DNA
ataataaaaggtagtagggatcgtgtatttttatctaaaaatactagtattcattgctctgggggggtattgact

SEQ ID NO: 410870 - DNA, 75 bp, synthetic construct
  source 1..75: mol_type = other DNA
tcctggacagtagcaacaatgtaatggtatttgattcagactatacagccattcaaaaaacgacgttgaatcaaa

SEQ ID NO: 410871 - DNA, 75 bp, synthetic construct
  source 1..75: mol_type = other DNA
tttcattcaggctgtgattgatataaaacaaaatatgaatgaaaaggttattgcctttgcatttgttagagataa

SEQ ID NO: 410872 - DNA, 75 bp, synthetic construct
  source 1..75: mol_type = other DNA
ccgtcaaggaagtcgctcgacttttttgtgtaagcgagcgcacgattctcaggtgggtaaataaaatccccgggt

SEQ ID NO: 410873 - DNA, 75 bp, synthetic construct
  source 1..75: mol_type = other DNA
gcaatggcaacgcaaagaaggtcacgggcaactgacggacgggattctggctttgcctgccatttcggctacggt

SEQ ID NO: 410874 - DNA, 75 bp, synthetic construct
  source 1..75: mol_type = other DNA
gtccgcaatggtgaggagttcttcgaaacgcagagccgcaatgtaaccgactggatgcctctaccagaaccgccg

SEQ ID NO: 410875 - DNA, 75 bp, synthetic construct
  source 1..75: mol_type = other DNA
acctgtaagccaaacttacaagttgaacgagctgtcgggcaactctccggtaactccggatggttggataagctg

SEQ ID NO: 410876 - DNA, 75 bp, synthetic construct
  source 1..75: mol_type = other DNA
cttcgggacgtgtacggtgataatccggctgcgctggcgaaggccacatcggcactgaagaacaccaggtctgcg

SEQ ID NO: 410877 - DNA, 75 bp, synthetic construct
  source 1..75: mol_type = other DNA
aaaagtgacggaggaagagatcagacaggcgctgaccgtgcgtgaaccactggtgagaaatgtggtgaatcatct

SEQ ID NO: 410878 - DNA, 75 bp, synthetic construct
  source 1..75: mol_type = other DNA
tgatgaacggttgtcgatatttaataaattggttacctcacttgctgccgagcatttaaatcagaaagcaatgaa

SEQ ID NO: 410879 - DNA, 75 bp, synthetic construct
  source 1..75: mol_type = other DNA
ccggcaggccgttccgggacaggaggtatttaccgcaaccgcagccacactgggtgctcagcgcgttcttccgcg

SEQ ID NO: 410880 - DNA, 75 bp, synthetic construct
  source 1..75: mol_type = other DNA
acagtcataccgggctcagtatttctgaggttgagcatatcaggcagagcgtgcgcgacattctggtcacgccgg

SEQ ID NO: 410881 - DNA, 75 bp, synthetic construct
  source 1..75: mol_type = other DNA
gctgcctggtttggcttatcttctatattgtagaagtcggcatgcctcatatcaccatccttttactaccgtttg

SEQ ID NO: 410882 - DNA, 75 bp, synthetic construct
  source 1..75: mol_type = other DNA
ctttgggatgggggatatggcatgatcctgatagctcccgaagagggacgatcaagagtaacgaagaagcattaa

SEQ ID NO: 410883 - DNA, 75 bp, synthetic construct
  source 1..75: mol_type = other DNA
tgtttgtattttcttcaaggtttgaagggtttggaatggtactactggaggccatgagggctggtttgccatgca

SEQ ID NO: 410884 - DNA, 75 bp, synthetic construct
  source 1..75: mol_type = other DNA
agatatttatggcgatggtacattaagaaaggaattagaagagattattcagtttaatgaaatttctaatataaa

SEQ ID NO: 410885 - DNA, 75 bp, synthetic construct
  source 1..75: mol_type = other DNA
gaatgtggggaaagtactctgagaaatcataagataattgcagttggtaggctggaatatcaaaaaggttttgat

SEQ ID NO: 410886 - DNA, 75 bp, synthetic construct
  source 1..75: mol_type = other DNA
tctaatccgttatcagccctgaaaccggataccgccgctaccggagaaccggttcctcttcagtttatggccgat

SEQ ID NO: 410887 - DNA, 75 bp, synthetic construct
  source 1..75: mol_type = other DNA
gagaatccgatggtattacaacaacaggacgtatgctctatcgaaacttgaaaatcacctcagctgtaagcgtca

SEQ ID NO: 410888 - DNA, 75 bp, synthetic construct
  source 1..75: mol_type = other DNA
ctgatattacatttgttggcggtattgagagagtaaacacaatacttgccaataaatttatcagcgaaggatact

SEQ ID NO: 410889 - DNA, 75 bp, synthetic construct
  source 1..75: mol_type = other DNA
tcgacgaaatattgcataacgccacaaagcagaatatttcggtgattgtcgtcactgacggggagcggatcctcg

SEQ ID NO: 410890 - DNA, 75 bp, synthetic construct
  source 1..75: mol_type = other DNA
ggatttcggtgaaaaaggtggcctgttcgaacacggcctgaaaaacaaaattctgaatgactactctgctgacgc

SEQ ID NO: 410891 - DNA, 75 bp, synthetic construct
  source 1..75: mol_type = other DNA
caggcggcggtttatccccgctggcgcggggaactcatcgtagttatactcgcagcagtaatgccgcccggttta

SEQ ID NO: 410892 - DNA, 75 bp, synthetic construct
  source 1..75: mol_type = other DNA
tacggcgggcattcagttgccagccggtttatccccgctggcgcggggaactcccgcagcgtacgcacgagagtc

SEQ ID NO: 410893 - DNA, 75 bp, synthetic construct
  source 1..75: mol_type = other DNA
ccccgctggcgcggggaacacggaccaaatacccgtccctcaatccacgccgtcggtttatccccgctggcgcgg

SEQ ID NO: 410894 - DNA, 75 bp, synthetic construct
  source 1..75: mol_type = other DNA
ggcgcggggaactcagtggcaggccggtaatatgaaaacgacagagcggtttatccccgctggcgcggggaactc

SEQ ID NO: 410895 - DNA, 75 bp, synthetic construct
  source 1..75: mol_type = other DNA
aaagcctggggactgggtgtgaaccgcgtcgaaccttgcgaactgacgctggcgctggacgaaccgaagccggat

SEQ ID NO: 410896 - DNA, 75 bp, synthetic construct
  source 1..75: mol_type = other DNA
tctctctcgcacactcggatccgtcaggaaaagacgtggcgtatcagcggaaaatgcttgatagaggtgtctggc

SEQ ID NO: 410897 - DNA, 75 bp, synthetic construct
  source 1..75: mol_type = other DNA
gcggctggcttgccggctacctgcgtgagtacctgctggccacggtatggataagcattatcaccctggtacgcg

SEQ ID NO: 410898 - DNA, 75 bp, synthetic construct
  source 1..75: mol_type = other DNA
gcctgtattacaaccgccaccgctattatgacccgctgcaggggaggtatatcactcaggatccgattgggctga

SEQ ID NO: 410899 - DNA, 75 bp, synthetic construct
  source 1..75: mol_type = other DNA
tatccccgctggcgcggggaactcagtgcaatagcacgtaaattacgtaaattagccggtttatccccgctggcg

SEQ ID NO: 410900 - DNA, 75 bp, synthetic construct
  source 1..75: mol_type = other DNA
ggggaactcagttgcccgatggacactcccagaccatcagccggtttatccccgctggcgcggggaactcactaa

SEQ ID NO: 410901 - DNA, 75 bp, synthetic construct
  source 1..75: mol_type = other DNA
cccgctggcgcggggaacacgaggcaattagtaaaactccggcaattgctgccggtttatccccgctggcgcggg

SEQ ID NO: 410902 - DNA, 75 bp, synthetic construct
  source 1..75: mol_type = other DNA
ctggcgcggggaacacgaggcaattagtaaaactccggcaattgctgccggtttatccccgctggcgcggggaac

SEQ ID NO: 410903 - DNA, 75 bp, synthetic construct
  source 1..75: mol_type = other DNA
tctctccagcaccattttgcgcaccccggacaaatacaccttacccatcgggctttataacctggtggcgcaaaa

SEQ ID NO: 410904 - DNA, 75 bp, synthetic construct
  source 1..75: mol_type = other DNA
tacgtcggagggatgatcccgatgaatacctggctgatgaaagggtatctcgatgcgatccctaaagacctggat

SEQ ID NO: 410905 - DNA, 75 bp, synthetic construct
  source 1..75: mol_type = other DNA
catcattgcctgcggagatggcgctaatgatattcctatgcttctgcatgccgggaatggcgtggcatggaaagc

SEQ ID NO: 410906 - DNA, 75 bp, synthetic construct
  source 1..75: mol_type = other DNA
ttctggttggcgtcagcgggcagccgggcttgttcagcgaagcggtgatccgggaaatgtatcgtcactgcccgc

SEQ ID NO: 410907 - DNA, 75 bp, synthetic construct
  source 1..75: mol_type = other DNA
gtactgcaaccgttgctgcatagcggcattatgctcgcaacccttagcgccgttgtgctgaacgtcttctttaat

SEQ ID NO: 410908 - DNA, 75 bp, synthetic construct
  source 1..75: mol_type = other DNA
ggagccaagagaaataggttaggttatggtttttctcctgaagatagcttttgttatagcattagtattcctagg

SEQ ID NO: 410909 - DNA, 75 bp, synthetic construct
  source 1..75: mol_type = other DNA
ggtttatccccgctggcgcggggaactcccgcagcgtacgcacgagagtcagtgcagtggcggtttatccccgct

SEQ ID NO: 410910 - DNA, 75 bp, synthetic construct
  source 1..75: mol_type = other DNA
acggtttatccccgctggcgcggggaacacaatcgtgtgtaaattcgcggcggctccactggcggtttatccccg

SEQ ID NO: 410911 - DNA, 75 bp, synthetic construct
  source 1..75: mol_type = other DNA
tatccccgctggcgcggggaacactggtgtgattccaattgccgcacggaacgccgcggtttatccccgctggcg

SEQ ID NO: 410912 - DNA, 75 bp, synthetic construct
  source 1..75: mol_type = other DNA
caacaggcatcgacatcacccaaaaatgtctggaagattatctgcaacatttaaagatttccccctcggtgtttt

SEQ ID NO: 410913 - DNA, 75 bp, synthetic construct
  source 1..75: mol_type = other DNA
tcggcgattttacatttgaaggcgcagcccgcagcgacgataactcacagtttggtcgtcatggaacctggcaaa

SEQ ID NO: 410914 - DNA, 75 bp, synthetic construct
  source 1..75: mol_type = other DNA
ctggcaaaacaaacatcggggtacgcgtggtgccggtttatccccgctggcgcggggaacactcgatcaggcggt

SEQ ID NO: 410915 - DNA, 75 bp, synthetic construct
  source 1..75: mol_type = other DNA
cggagctggcggtgatgctgggaaggctggagcgggagctgcggcagggcagcgtgagtgaagaaagccagcagt

SEQ ID NO: 410916 - DNA, 75 bp, synthetic construct
  source 1..75: mol_type = other DNA
tgcatcgcctgactatgtggagcaggttatcaggaccgccggattagtgcaggacagaacgggcgaaagggtgcg

SEQ ID NO: 410917 - DNA, 75 bp, synthetic construct
  source 1..75: mol_type = other DNA
cgcgaccggacgtggatcatcaccgtgaaggaagtgaacgctactaccgcgattatatcgcggcgaacagcaacg

SEQ ID NO: 410918 - DNA, 75 bp, synthetic construct
  source 1..75: mol_type = other DNA
atccacgcatgggttttgaactagaaggaaacgacaaacaatttaaccaggtctttgctgaaatggttgcctcgc

SEQ ID NO: 410919 - DNA, 75 bp, synthetic construct
  source 1..75: mol_type = other DNA
gctactacataagttcggtgacgcttacggcgaaagaactcctggaagcaacacgagcacactggtcggtagaaa

SEQ ID NO: 410920 - DNA, 75 bp, synthetic construct
  source 1..75: mol_type = other DNA
ttaaaggggcttgctggtatagtcgctgtacggtctgggattggtgctgtaggtggtatctggaacttaattagg

SEQ ID NO: 410921 - DNA, 75 bp, synthetic construct
  source 1..75: mol_type = other DNA
taagccataaggacgaggcactacgcattgcagataagattttgtcactcgataggtcagcgtcatattgcaagt

SEQ ID NO: 410922 - DNA, 75 bp, synthetic construct
  source 1..75: mol_type = other DNA
cttggggaccttatatcaagatttgactcggttgattttataaaaaatactacaacgacgcaattgctgactaca

SEQ ID NO: 410923 - DNA, 75 bp, synthetic construct
  source 1..75: mol_type = other DNA
tattttacttgccagggctatatacagaaaaccagctttgcttatccttgatgaagcaacgagtaatcttgacca

SEQ ID NO: 410924 - DNA, 75 bp, synthetic construct
  source 1..75: mol_type = other DNA
cagtcaccagtttgttttatatttatattattatttatcatcgaatttattaatatttgtttaccacaggtgaca

SEQ ID NO: 410925 - DNA, 75 bp, synthetic construct
  source 1..75: mol_type = other DNA
ttgttgaatccgttccctgtcttgtcattacggactcttcattaaaaggtctgctgtctggtaaagacaagagtt

SEQ ID NO: 410926 - DNA, 75 bp, synthetic construct
  source 1..75: mol_type = other DNA
attcagatcgcttttaccggggcaaatttatttctatcatctttgaaaaatgtttttattttgtatttaggaggc

SEQ ID NO: 410927 - DNA, 75 bp, synthetic construct
  source 1..75: mol_type = other DNA
caggaagcgttgcagtatgcgaatcaggcgcaggtgacaaagccgcagattcagcagactgaaccgccccgggtt

SEQ ID NO: 410928 - DNA, 75 bp, synthetic construct
  source 1..75: mol_type = other DNA
cctgaatgaagatctgccagttggtggctatgacgccgttgacctccagggtatcgcactggctaaccttcgtgc

SEQ ID NO: 410929 - DNA, 75 bp, synthetic construct
  source 1..75: mol_type = other DNA
tatagagcgtgtggattttgttctttattttgataaaacatctgacagtgaaacttttcattttacgaattatat

SEQ ID NO: 410930 - DNA, 75 bp, synthetic construct
  source 1..75: mol_type = other DNA
gtatagattttattggtaccgatacaacacctgctagtgcgatagaacgcgtggattttattcttggtttttata

SEQ ID NO: 410931 - DNA, 75 bp, synthetic construct
  source 1..75: mol_type = other DNA
cctgctggtcgctgacagctggtgctaacccggcatttatagcaaaccagatgggccatgcagatgcgcaaatgg

SEQ ID NO: 410932 - DNA, 75 bp, synthetic construct
  source 1..75: mol_type = other DNA
acgtgccggactccgccatcgaaaatcatatcagtcgagacatacttatgcctgctggtcgctgacagctggtgc

SEQ ID NO: 410933 - DNA, 75 bp, synthetic construct
  source 1..75: mol_type = other DNA
taacaaggctgtattgaccgatccggcatttgcctatatgtggaccggatacgtgaaagttattgccgtacatag

SEQ ID NO: 410934 - DNA, 75 bp, synthetic construct
  source 1..75: mol_type = other DNA
gcgaagcgctggagtcgatgattaagcatgaggcaactcgtccgttggtgttttcgccaaactactatcagactc

SEQ ID NO: 410935 - DNA, 75 bp, synthetic construct
  source 1..75: mol_type = other DNA
tttcttatgttgggcaaactgcagagggcgcacaaatgaagttggcccaatacattcagcaagttgatgataaag

SEQ ID NO: 410936 - DNA, 75 bp, synthetic construct
  source 1..75: mol_type = other DNA
cgctggataaccaggaagaagcagagaagctgaccattgagcctaccgttaaaaaccagtcgttaccattggcgg

SEQ ID NO: 410937 - DNA, 75 bp, synthetic construct
  source 1..75: mol_type = other DNA
agagtgtccagtatctccaaatggacagaaattatatccaagactcagtgcttcaattgcttctgttgtagctga

SEQ ID NO: 410938 - DNA, 75 bp, synthetic construct
  source 1..75: mol_type = other DNA
ttcttcaggcgcggcaggatggatgttaacaacaatatcaggaaaacctttaacattctctggtttatcaaagaa

SEQ ID NO: 410939 - DNA, 75 bp, synthetic construct
  source 1..75: mol_type = other DNA
atgaggggatctctcagtactcaacctgatgtggggcaaatcgctggttataccaacgcgatgaatgtgatctac

SEQ ID NO: 410940 - DNA, 75 bp, synthetic construct
  source 1..75: mol_type = other DNA
aatgataacccttattccgaatcgctcttccggacgattaagtattgtccatggtggccagagaatggttttcga

SEQ ID NO: 410941 - DNA, 75 bp, synthetic construct
  source 1..75: mol_type = other DNA
ccagaggccgcgatgatgcagcggtggtcgagtttaccggcaaggtgcaacgcattgctcagattcatcagctcg

SEQ ID NO: 410942 - DNA, 75 bp, synthetic construct
  source 1..75: mol_type = other DNA
atacgctcacggggctgatagcagcgctgtctcctgccgcccgtcgcagaatggccgcagatatcgctaagaccc

SEQ ID NO: 410943 - DNA, 75 bp, synthetic construct
  source 1..75: mol_type = other DNA
tacttcattacccttacaaacctgaaaataggtgggaaaacggttaaaaatcaaatgatctcccccgttgataaa

SEQ ID NO: 410944 - DNA, 75 bp, synthetic construct
  source 1..75: mol_type = other DNA
tatttactggtgaaaacaataaaacgtttagcactctgaccgttgatgaacttactgcaaataaatcagcatttg

SEQ ID NO: 410945 - DNA, 75 bp, synthetic construct
  source 1..75: mol_type = other DNA
gacactctcgctggtgagaatattaccgggaatggattcagctttagccagaatattaaaaaaggcgtatctgcg

SEQ ID NO: 410946 - DNA, 75 bp, synthetic construct
  source 1..75: mol_type = other DNA
tgctcaggacgtgcaatacccagaacggcagttgcttggtgttgactttagagacaatttgttgattgaaaaatt

SEQ ID NO: 410947 - DNA, 75 bp, synthetic construct
  source 1..75: mol_type = other DNA
acaatgaatacactggtaacggggttacgacatcattcccgtacaggtttcgaattttcagaaattcagaccttg

SEQ ID NO: 410948 - DNA, 75 bp, synthetic construct
  source 1..75: mol_type = other DNA
ctgatgttgtattggaaactaacgatgatatttatatcgttgagtgcaaaaatgttaagactttaccttcgatgg

SEQ ID NO: 410949 - DNA, 75 bp, synthetic construct
  source 1..75: mol_type = other DNA
tttgtttggtgagcatttggatgatttcttttacaagaaaaagcgggtgttcaacttatatagaaaagtcatttc

SEQ ID NO: 410950 - DNA, 75 bp, synthetic construct
  source 1..75: mol_type = other DNA
tgcgttgcacttcgtcagctgacatggttacggtcagtaacccaacaccttatttcattaccctgacagacctga

SEQ ID NO: 410951 - DNA, 75 bp, synthetic construct
  source 1..75: mol_type = other DNA
tcaaatgatttccccttttgataaataccaattctctctgccaaagggtgccaaaaacagcagcctgacgtaccg

SEQ ID NO: 410952 - DNA, 75 bp, synthetic construct
  source 1..75: mol_type = other DNA
agcgactaagttggatgttcctgtaaaatatgacagatgtggagccgttcagtattttggtgtggtgtttgagaa

SEQ ID NO: 410953 - DNA, 75 bp, synthetic construct
  source 1..75: mol_type = other DNA
gcaaggtagaataactagaccgcaagcattaagagaaataattaaatttttattgttttccattattgataatag

SEQ ID NO: 410954 - DNA, 75 bp, synthetic construct
  source 1..75: mol_type = other DNA
ccagcactgaaaagtgaaaaactacgcgaagaaatccgactcactaaagcccgtgcggaccaacaagaaattgaa

SEQ ID NO: 410955 - DNA, 75 bp, synthetic construct
  source 1..75: mol_type = other DNA
tcgatcgggacatcacactgcgtatggaagaagaaggaaaacccgatcctcgcaagctcgttacagctcaagatg

SEQ ID NO: 410956 - DNA, 75 bp, synthetic construct
  source 1..75: mol_type = other DNA
tcagggcctgccgatgctgagaatactgaccgacagaggcacggagtactgtggcaaagtagagcagcatgatta

SEQ ID NO: 410957 - DNA, 75 bp, synthetic construct
  source 1..75: mol_type = other DNA
attgattccagagcgccctacagcgaagtgctggaacaggcacagaaggcggtttctctggttgccatcgtttct

SEQ ID NO: 410958 - DNA, 75 bp, synthetic construct
  source 1..75: mol_type = other DNA
tctttgaaacaagcgaaagagttatgaaaggagatttcagtcagttagtgggaaatccagaagacatacagttta

SEQ ID NO: 410959 - DNA, 75 bp, synthetic construct
  source 1..75: mol_type = other DNA
gcgagaatggtgaagaatattactcgccattccacccaatggtgttggcttactacttaaatctttgtaatgaaa

SEQ ID NO: 410960 - DNA, 75 bp, synthetic construct
  source 1..75: mol_type = other DNA
ccgattcctattgtattggatgaagtgcagaacctcgatcatcgcctggagagcccattgggcaaaatgttaacg

SEQ ID NO: 410961 - DNA, 75 bp, synthetic construct
  source 1..75: mol_type = other DNA
ttctggttgagcagtttttactgcacgcgaaaggaaacatccgcgcaggctatcgctaccagtttaactctcctg

SEQ ID NO: 410962 - DNA, 75 bp, synthetic construct
  source 1..75: mol_type = other DNA
tgatcatattctggactatccctcagtcttaatgaatgcatgggctagcggtctgcaggacaaaaatattcatgt

SEQ ID NO: 410963 - DNA, 75 bp, synthetic construct
  source 1..75: mol_type = other DNA
gcgctattgggattgttacgcgcgtggacacgttgccagccagttcggcgaggaaccgatcgcgcgttttgttaa

SEQ ID NO: 410964 - DNA, 75 bp, synthetic construct
  source 1..75: mol_type = other DNA
ctacaggactctttcccggggatccgaaggaattctggctgcgtctgacccgtaaaaaagatgcgttacgactgc

SEQ ID NO: 410965 - DNA, 75 bp, synthetic construct
  source 1..75: mol_type = other DNA
aaccggcacggatgcggtgaacacgctgtatgacattgccgatatggctgaaccgcagttgctggtcagcggtga

SEQ ID NO: 410966 - DNA, 75 bp, synthetic construct
  source 1..75: mol_type = other DNA
caacagttatcttcgtggtgctgcagatgccagagtcatgctgatgctgggggatttcgccttttccgtggatac

SEQ ID NO: 410967 - DNA, 75 bp, synthetic construct
  source 1..75: mol_type = other DNA
cattgctattaataatatctgcgtttaattacgcttttgccgcaaataatgaaatcagcgaaaaggtatataatc

SEQ ID NO: 410968 - DNA, 75 bp, synthetic construct
  source 1..75: mol_type = other DNA
cgcaaatgccgcaactgcagtaggtgatgttgccactgttcaggctccagtagtatttagtgcacagaataccat

SEQ ID NO: 410969 - DNA, 75 bp, synthetic construct
  source 1..75: mol_type = other DNA
ttaacaatacaaaatttataaatgagaaatcatttataaatatgggaccaataaaggctattactcagcaatcac

SEQ ID NO: 410970 - DNA, 75 bp, synthetic construct
  source 1..75: mol_type = other DNA
agtatagagcgctcagacggaattggagaaatctttccagctctttatgatattctttcgaaaaataatagatca

SEQ ID NO: 410971 - DNA, 75 bp, synthetic construct
  source 1..75: mol_type = other DNA
gatccaacaccaaacccggagccgacacctgagccaacgccggacccagaacctacgccggaaccgacacctgat

SEQ ID NO: 410972 - DNA, 75 bp, synthetic construct
  source 1..75: mol_type = other DNA
gacggcaaaaatggaagtgttagagttaacggggtgtgggtagacatgcctgatggtgctaagaggttgtcaaca

SEQ ID NO: 410973 - DNA, 75 bp, synthetic construct
  source 1..75: mol_type = other DNA
cataatattgatagatcaagggaaatgggacaaattttagaggatgctggtatcccggatactcctgcaaacaat

SEQ ID NO: 410974 - DNA, 75 bp, synthetic construct
  source 1..75: mol_type = other DNA
gcagatacatttcaaataaccagcgcagctggagccagacgtttcaggggcggggcctaagaatccccatcgctc

SEQ ID NO: 410975 - DNA, 75 bp, synthetic construct
  source 1..75: mol_type = other DNA
tgctggccttcacggactgctcggggtacacgacgcggtatgagtacgaccagtacggtcaacaaatcgccgttc

SEQ ID NO: 410976 - DNA, 75 bp, synthetic construct
  source 1..75: mol_type = other DNA
ataatagcagaaaaaaagaaagagcccgaaatgacggacagatattatatcagttctgctgatttaaccgcaaag

SEQ ID NO: 410977 - DNA, 75 bp, synthetic construct
  source 1..75: mol_type = other DNA
cgccttccaaaaggcggataatatccctgctggaacatatacagcaacattctacattcaacaatatcagagcta

SEQ ID NO: 410978 - DNA, 75 bp, synthetic construct
  source 1..75: mol_type = other DNA
caatcggcgcagccggagcgaattgtcattgccgaaggtctggccaccaccgtaagcgcctggcggctacagagc

SEQ ID NO: 410979 - DNA, 75 bp, synthetic construct
  source 1..75: mol_type = other DNA
tggttcatggcggcttccggtcatcagtaccggcgaggccgatacggcaaccttcgcaagccaggcacacatcac

SEQ ID NO: 410980 - DNA, 75 bp, synthetic construct
  source 1..75: mol_type = other DNA
gatctattaccaatgaaatgattgttctgcagtacaatctttcagttgaacattttaatctgaatagttcactta

SEQ ID NO: 410981 - DNA, 75 bp, synthetic construct
  source 1..75: mol_type = other DNA
ccccaacagtccgcaggtctgccgtgtggctgacgcgttcgctgtactggaggcggcgcttgtcctgacgcgacc

SEQ ID NO: 410982 - DNA, 75 bp, synthetic construct
  source 1..75: mol_type = other DNA
gtatgcagccggaaaaccttcacggataccccacagccggagcgcacgccagggcgcttacccgtgcgtgcaaca

SEQ ID NO: 410983 - DNA, 75 bp, synthetic construct
  source 1..75: mol_type = other DNA
ggcacgcgaagccgggcggctccaggtacgcctgcgtatcggcgggggtcagcagcgtttttacaaagtgaaact

SEQ ID NO: 410984 - DNA, 75 bp, synthetic construct
  source 1..75: mol_type = other DNA
ttcccggcatgatttttctcttggagacgatgaatatgttcttgagtttatcaaagataaaaaatatccctatgg

SEQ ID NO: 410985 - DNA, 75 bp, synthetic construct
  source 1..75: mol_type = other DNA
atactgatggtatctattatcagttcagaacgctggatgctaccgctccgagttccactactattggtcagtgga

SEQ ID NO: 410986 - DNA, 75 bp, synthetic construct
  source 1..75: mol_type = other DNA
ctgggattcagtgattgataaaaaagtgtatgaaacctggataacgctggcgggagaagtctggaaattgatgct

SEQ ID NO: 410987 - DNA, 75 bp, synthetic construct
  source 1..75: mol_type = other DNA
tatacaataagcagatcgtagaatcatctactcttttatcattgtctaaaagtgattataaaggtgatgtcgtta

SEQ ID NO: 410988 - DNA, 75 bp, synthetic construct
  source 1..75: mol_type = other DNA
gggatgtcgtcagtttttaataaagccaaaaacccaccaatgtctatccatttttgctgggattcagtgattgat

SEQ ID NO: 410989 - DNA, 75 bp, synthetic construct
  source 1..75: mol_type = other DNA
ggccagtaccaatgccagtccaggaagtgttggacaatggagcgagaaagtatcagggatgtcgtcagtttttaa

SEQ ID NO: 410990 - DNA, 75 bp, synthetic construct
  source 1..75: mol_type = other DNA
accttctcgctaatgatgggcgtgccgggaaggctctgagcgatgggcagttaataaattctcaggctgaaatgt

SEQ ID NO: 410991 - DNA, 75 bp, synthetic construct
  source 1..75: mol_type = other DNA
tatagatgaatataatccattaagttacatgattcgacttaacactttgtcatataatacagcctcgttattaga

SEQ ID NO: 410992 - DNA, 75 bp, synthetic construct
  source 1..75: mol_type = other DNA
tcctttatctattttgtttttttcacatggtggggaaaagaaccagtactctccgcacatggctattcaagattt

SEQ ID NO: 410993 - DNA, 75 bp, synthetic construct
  source 1..75: mol_type = other DNA
aacatttataattacttatatgttggtaagttgaggtttaaattcagaaaacacgcctattctttacaagcattt

SEQ ID NO: 410994 - DNA, 75 bp, synthetic construct
  source 1..75: mol_type = other DNA
gcacattcatctggaaccggaggtgacatggtacgggtgggacggtgacaggctgacgacgatacagaccggcac

SEQ ID NO: 410995 - DNA, 75 bp, synthetic construct
  source 1..75: mol_type = other DNA
gccgcatccttcccgtgagttttgtgtccagtacggtgagactgattacgatttcctgtgccggatggcggcgga

SEQ ID NO: 410996 - DNA, 75 bp, synthetic construct
  source 1..75: mol_type = other DNA
gctgactatcgtaatgggcctgatgttgctggtttactggcgcgcttctcgtctgctgaataaaaaggtggaact

SEQ ID NO: 410997 - DNA, 75 bp, synthetic construct
  source 1..75: mol_type = other DNA
cgggtatccgtggcgggtggaagatgcatgcagccccccttgatatgtcgataacaccgactgtttcactgaacg

SEQ ID NO: 410998 - DNA, 75 bp, synthetic construct
  source 1..75: mol_type = other DNA
gtggatggtatggccggataccgggagctgtctgaagactacaccattcagggggagctgagtgacctgtccggc

SEQ ID NO: 410999 - DNA, 75 bp, synthetic construct
  source 1..75: mol_type = other DNA
gattcttccatcggcttgcgttccggcgcaatgagtaccgctaacaataatgtcggcggcgcagcgccagggaaa

SEQ ID NO: 411000 - DNA, 75 bp, synthetic construct
  source 1..75: mol_type = other DNA
agttatgacggactggatcgtagcgtggacgtggctatttcgcggttaagaaaaaaactgctcgataacgccgca

SEQ ID NO: 411001 - DNA, 75 bp, synthetic construct
  source 1..75: mol_type = other DNA
aagtgactatccccttattcggccctcaatatattcgttaccctatgcagccgggggacaaggggattgttatcc

SEQ ID NO: 411002 - DNA, 75 bp, synthetic construct
  source 1..75: mol_type = other DNA
gaaaaaagatgaaattatcgcagcatacaatcgtgcagaatatctgatagagcgacagagtttgatgcaatggtg

SEQ ID NO: 411003 - DNA, 75 bp, synthetic construct
  source 1..75: mol_type = other DNA
atatggccgggacggcgaattgtgctgacggggcatccgcaggcgaacctgaaccgggaatggcaggtggtggcg

SEQ ID NO: 411004 - DNA, 75 bp, synthetic construct
  source 1..75: mol_type = other DNA
atgacccggcctacctggtttggttcggtgaaattggcgtgcatgaattcgcgtatctggtgaaaaactacgtag

SEQ ID NO: 411005 - DNA, 75 bp, synthetic construct
  source 1..75: mol_type = other DNA
ggctcacactgctttgacctggtgcgccacctttccggtcaggaagtggtgtcggtgtatgccgccgggcagaaa

SEQ ID NO: 411006 - DNA, 75 bp, synthetic construct
  source 1..75: mol_type = other DNA
tctctcaggaatagaaattctcccgcatatcaattattacagttcatcaatgatggcgtcggcagcagcgattaa

SEQ ID NO: 411007 - DNA, 75 bp, synthetic construct
  source 1..75: mol_type = other DNA
agcaaaaataaaggatctggatcttcttcattcgccggaaactattggctcgcgtcctgatcttgctaaactaac

SEQ ID NO: 411008 - DNA, 75 bp, synthetic construct
  source 1..75: mol_type = other DNA
gtatgacgagtggggaaacctgctgggcgaggaaagcgcgcagcaccttcagcagtcactccgtctgccgggaca

SEQ ID NO: 411009 - DNA, 75 bp, synthetic construct
  source 1..75: mol_type = other DNA
ccaacagacaagaatccagacggtataccagccgggaagcttcacgccgctcctgagaatcgaaacagagaatgg

SEQ ID NO: 411010 - DNA, 75 bp, synthetic construct
  source 1..75: mol_type = other DNA
attgccccggagcgccgcgccaatcagcctgggcgcagaacaccgtcgatggcgaagagatcaacctgttcgata

SEQ ID NO: 411011 - DNA, 75 bp, synthetic construct
  source 1..75: mol_type = other DNA
tgattttagaactcgcaggattcgcgctattactggccttgtgtgatgttgtattgttcccttcgcccgctccaa

SEQ ID NO: 411012 - DNA, 75 bp, synthetic construct
  source 1..75: mol_type = other DNA
aggcactaaaggccgctactaataaaaaaggcaatactcatcaaaagaatatgcttaatatttttagtggtatgt

SEQ ID NO: 411013 - DNA, 75 bp, synthetic construct
  source 1..75: mol_type = other DNA
agaggctaccacgcttgttcttgaagaacttgttaaacttcttacgccagagcagcgtgaaaaactgaatctggc

SEQ ID NO: 411014 - DNA, 75 bp, synthetic construct
  source 1..75: mol_type = other DNA
agaagtggcggcgcagcaggtttctgatcagcaactggaaactgcccgcttccgcttcccgtacaacacgccaac

SEQ ID NO: 411015 - DNA, 75 bp, synthetic construct
  source 1..75: mol_type = other DNA
cggtcaaaaagcagattgatgagtttatccgccgctgggataacttcccgattgccccggagcgccgcgccaatc

SEQ ID NO: 411016 - DNA, 75 bp, synthetic construct
  source 1..75: mol_type = other DNA
gtttcacactggaagtggacggcctgccgccggatgcttttgcggtggtttcctttcatctgaaccagtcactct

SEQ ID NO: 411017 - DNA, 75 bp, synthetic construct
  source 1..75: mol_type = other DNA
aatcttgccgggagtttgattggacagaaactggcaataaatgaatttgtcgcttatctcaatttctcaccctat

SEQ ID NO: 411018 - DNA, 75 bp, synthetic construct
  source 1..75: mol_type = other DNA
ggtattatcggcggcgttggcggctggtttggttttgcacatgcctcgctggagtccattttaggttacctgttg

SEQ ID NO: 411019 - DNA, 75 bp, synthetic construct
  source 1..75: mol_type = other DNA
gtttattaaaataatggaacaaaaagcgcaactaccaatctatattgacaagaacaatttgaaagagagtatttt

SEQ ID NO: 411020 - DNA, 75 bp, synthetic construct
  source 1..75: mol_type = other DNA
ctgaacttacacaagaacgcctaaagaaactggcctctctcatccgcgacgttagagatgatgtggtcgacagac

SEQ ID NO: 411021 - DNA, 75 bp, synthetic construct
  source 1..75: mol_type = other DNA
cctgagccagtcaaaactcagaaagcatcaatctctgttaaaaggaaagataaaaaggccgagaatgatgactcg

SEQ ID NO: 411022 - DNA, 75 bp, synthetic construct
  source 1..75: mol_type = other DNA
gtttctaactccatcgcctatgccgggcagatggttcatgctgtcgggcctaaaaaacttggatctatcggctcg

SEQ ID NO: 411023 - DNA, 75 bp, synthetic construct
  source 1..75: mol_type = other DNA
caagccaaaccttgtattacctgggggctcggttattagaatgcatgagttcaaatgcttattcgtatgttgata

SEQ ID NO: 411024 - DNA, 75 bp, synthetic construct
  source 1..75: mol_type = other DNA
cgtcaaattgatgagttagaaggaatgttacgcgataacattcaggcgcaagcatatcgatatcaaatgaagcca

SEQ ID NO: 411025 - DNA, 75 bp, synthetic construct
  source 1..75: mol_type = other DNA
ttgagccgtttgtcgcaccatcgctcatgccgcaggctcgttggccttcgaaaggcggccatccattagtgctac

SEQ ID NO: 411026 - DNA, 75 bp, synthetic construct
  source 1..75: mol_type = other DNA
ggacggtaagaaagcggccatcggctcgatcctgatcgacaaagaaggctatgtgcttgaggacaaaggcgttgc

SEQ ID NO: 411027 - DNA, 75 bp, synthetic construct
  source 1..75: mol_type = other DNA
ccgaaagcgagtcagcaaagggcgcgtcagtgggcggcaagcccgccaaacataatcaatgtagccgtctcacgc

SEQ ID NO: 411028 - DNA, 75 bp, synthetic construct
  source 1..75: mol_type = other DNA
catgggttcgtccgggtgaagccgttcgcgcaaggtggtctgatattgatacaaccaacagcatttggaacattc

SEQ ID NO: 411029 - DNA, 75 bp, synthetic construct
  source 1..75: mol_type = other DNA
ctcggctccatcggtaaagaggttgtcgtaaaaaacaccttctttactgcgtatgcgttagctgatgagggcgat

SEQ ID NO: 411030 - DNA, 75 bp, synthetic construct
  source 1..75: mol_type = other DNA
tattgatagcgtcgagctaatggcgggttatcgagacaacatttatgcatctgccactcagtctatcaacgtagg

SEQ ID NO: 411031 - DNA, 75 bp, synthetic construct
  source 1..75: mol_type = other DNA
gccagcatggaacaaatatctttggtgaaaagttggttacgggaagctggagcgcacaacgtgttagtaaccagt

SEQ ID NO: 411032 - DNA, 75 bp, synthetic construct
  source 1..75: mol_type = other DNA
gggctattacgtcgtgattcgcgccgctgaactgcttaataacggtaaaaaagtccccctcgcgaattccgtcat

SEQ ID NO: 411033 - DNA, 75 bp, synthetic construct
  source 1..75: mol_type = other DNA
agcctgggcgctgaaatcgtcgttaagaacaccgtctggacagagttcgcgctggcggccacgggtgattacctg

SEQ ID NO: 411034 - DNA, 75 bp, synthetic construct
  source 1..75: mol_type = other DNA
ctcggatcaatcggtaaagaggttgtcgtaaaaaacaccttctttacagcttatgcgctggccgatgagggcgat

SEQ ID NO: 411035 - DNA, 75 bp, synthetic construct
  source 1..75: mol_type = other DNA
actggtgagaagcagggaactataaatgtctcccagatgttgacagggtttgcaactccagagctttcgccaacc

SEQ ID NO: 411036 - DNA, 75 bp, synthetic construct
  source 1..75: mol_type = other DNA
ctctggggtctgccgctgcaaaagatttgtatgataacgcgcagaacttcgatcatctatccaatgacagaacta

SEQ ID NO: 411037 - DNA, 75 bp, synthetic construct
  source 1..75: mol_type = other DNA
cgtgcagaatatctgatagagcgacagagtttgatgcaatggtggagtgattacgttcaagctcaaagatcaaat

SEQ ID NO: 411038 - DNA, 75 bp, synthetic construct
  source 1..75: mol_type = other DNA
tgtttctcaaattcttgatttaatggcttcattaaacataactgagttctcttggttttcaaccattgctccttc

SEQ ID NO: 411039 - DNA, 75 bp, synthetic construct
  source 1..75: mol_type = other DNA
ttcagatttacaataatcaggtactacctggcgtctctagcgcgcagtctaacgggagtgcgtcatttaaatgga

SEQ ID NO: 411040 - DNA, 75 bp, synthetic construct
  source 1..75: mol_type = other DNA
tactattacagggtatggaaaattcaaggtttggcatacaagaatggaatcctccatattggggttggtgggagc

SEQ ID NO: 411041 - DNA, 75 bp, synthetic construct
  source 1..75: mol_type = other DNA
agaccccttatctgatcccgcaaggggtctatccaacttatatgccaaaagcagaggatgaaatcgatcttttcg

SEQ ID NO: 411042 - DNA, 75 bp, synthetic construct
  source 1..75: mol_type = other DNA
ccgagctaatgaaacatgccagttcgtccgaatattgtggtttgaatcgaagaacacggcggtgcggagttcaga

SEQ ID NO: 411043 - DNA, 75 bp, synthetic construct
  source 1..75: mol_type = other DNA
attatttgtacttggttttagtgcctgtggcagaagtgttccggtctgaattccctaatggcactgcgccattca

SEQ ID NO: 411044 - DNA, 75 bp, synthetic construct
  source 1..75: mol_type = other DNA
cgccagtcaaaaaccgtgccgtataaagagatcgaacgctacggtattgatcgtaaccgttcgccgctgaagtaa

SEQ ID NO: 411045 - DNA, 75 bp, synthetic construct
  source 1..75: mol_type = other DNA
tgggtacagggtctgtggcaaccgaagaaaatacgatctctgtaggttcctctactaatcaacgtcgtatcacca

SEQ ID NO: 411046 - DNA, 75 bp, synthetic construct
  source 1..75: mol_type = other DNA
cgcttctgcaatggcgatgaccggtctgccgcaggcttacacgccgggtgccagcatggcctccattggtggcgg

SEQ ID NO: 411047 - DNA, 75 bp, synthetic construct
  source 1..75: mol_type = other DNA
ccgaagcaggcggcgtgcgctatgacaccaaagctgacggttctgttgattacagcaacatcactctcggcggtg

SEQ ID NO: 411048 - DNA, 75 bp, synthetic construct
  source 1..75: mol_type = other DNA
cagaacttcggcctccacctgtacgccccctcaacaacgggtaagaccacatgcgcgacactcgcggcgagtgtg

SEQ ID NO: 411049 - DNA, 75 bp, synthetic construct
  source 1..75: mol_type = other DNA
atgcagtggtgcgtgtgttcacgtcgtgggtgaaggacttcggcacacacgacaaagcgcagagccagattatca

SEQ ID NO: 411050 - DNA, 75 bp, synthetic construct
  source 1..75: mol_type = other DNA
tggaccgacgacaaccgcgcgtatcttctgccggatggtcatatcatcggtgacgaaaccccggtgctgttcatg

SEQ ID NO: 411051 - DNA, 75 bp, synthetic construct
  source 1..75: mol_type = other DNA
agtcgggagtttccgtcagtcacaccgcgcgtccctgccgcggtctggggcgagcgagaaattcgcgatatgtac

SEQ ID NO: 411052 - DNA, 75 bp, synthetic construct
  source 1..75: mol_type = other DNA
tgtgcaattaaggtcgaaaccatcaaagactgtcaggataaaatcgatgcagaaaatgaaaagcctgcgcaaagc

SEQ ID NO: 411053 - DNA, 75 bp, synthetic construct
  source 1..75: mol_type = other DNA
gaccttgcggttaagtttcatctctttaccgactacattgatgaagattatctacaacgtgttaacgcttttacc

SEQ ID NO: 411054 - DNA, 75 bp, synthetic construct
  source 1..75: mol_type = other DNA
gttacgacaccaaagctgatggttctatcgactatagcaatatcaccctcggtggtggcaacggcagtacgactc

SEQ ID NO: 411055 - DNA, 75 bp, synthetic construct
  source 1..75: mol_type = other DNA
ttagacttcgatgcatttaccgaaattatgcgtttgatctcattgcatggattagatgtcactgccttttataaa

SEQ ID NO: 411056 - DNA, 75 bp, synthetic construct
  source 1..75: mol_type = other DNA
aaatcagcgtatcaatggtggtaatcccttaagttatgataataccgatcaattactgaaagataatcaggatgc

SEQ ID NO: 411057 - DNA, 75 bp, synthetic construct
  source 1..75: mol_type = other DNA
ctgtgatgatgacctgacgccaatgattggggaatggaaagggtggcgacattgtgtcgtataccgcccgggtca

SEQ ID NO: 411058 - DNA, 75 bp, synthetic construct
  source 1..75: mol_type = other DNA
atgatgcttttttttaaaaaccccaaaaataaaaaatcaactggtattctatatctccagacgttattacatgaa

SEQ ID NO: 411059 - DNA, 75 bp, synthetic construct
  source 1..75: mol_type = other DNA
atttcactatgcgtcagtgggttggtaatgctgggcagtctattgtcagttatacatctgatacagttacgctat

SEQ ID NO: 411060 - DNA, 75 bp, synthetic construct
  source 1..75: mol_type = other DNA
caaatcagtaaccagaatgcacaggatcagttaagtatcttctcaagtactgcacagtcactatcacagggcatg

SEQ ID NO: 411061 - DNA, 75 bp, synthetic construct
  source 1..75: mol_type = other DNA
acctactacttcagcaacaaacactcaggtcttgacccttacgcattcgtgcagaacgagttgcgcagctatcag

SEQ ID NO: 411062 - DNA, 75 bp, synthetic construct
  source 1..75: mol_type = other DNA
cgcgctgaagctcgcaggatgcacaagaagcttggcggactgggagttatcgtcgtcgactatctgcaaaagatg

SEQ ID NO: 411063 - DNA, 75 bp, synthetic construct
  source 1..75: mol_type = other DNA
aatcctattatacttctatacggggaacacatattaccactaccttcgttagatatatctattttaaatttattt

SEQ ID NO: 411064 - DNA, 75 bp, synthetic construct
  source 1..75: mol_type = other DNA
ggcgttgacatggcgactgacgcgattgaggggctgactgaggaccacttcacagcaacgccccataaagtggct

SEQ ID NO: 411065 - DNA, 75 bp, synthetic construct
  source 1..75: mol_type = other DNA
gttcagcaccaccgtgaccgagactgtcggcctgaaaaacaaaaagcctgtgctgttcttcagcctggaaatgcc

SEQ ID NO: 411066 - DNA, 75 bp, synthetic construct
  source 1..75: mol_type = other DNA
caggtgcgagcggaagccaggcgaatgagcaagaaactgggtggacttggtgtggtcattgtcgattacctccag

SEQ ID NO: 411067 - DNA, 75 bp, synthetic construct
  source 1..75: mol_type = other DNA
ggataagaaatccaatgagatcacagctatcccagaacttcttaacatgctggatattaaaggaaaaatcatcac

SEQ ID NO: 411068 - DNA, 75 bp, synthetic construct
  source 1..75: mol_type = other DNA
ccgtttgtgcgcccggcatttgatgtgcgcagtgaacaggcggcacaggtggcgattgctcggatgaaccgggcc

SEQ ID NO: 411069 - DNA, 75 bp, synthetic construct
  source 1..75: mol_type = other DNA
tatcggttctacacaaaaacattattaaaaagtactctgaaatttatgtattatataatgaagtatttgaaagct

SEQ ID NO: 411070 - DNA, 75 bp, synthetic construct
  source 1..75: mol_type = other DNA
gtttagtgcgtgaaaaactacccacaagcggcgtcattatggttacacatcaacccggtgtctggaacctggccg

SEQ ID NO: 411071 - DNA, 75 bp, synthetic construct
  source 1..75: mol_type = other DNA
tttagttttcaattgctgaagacatcgaatcatattcatattcatattgttttgaggggtaatttatggatgcag

SEQ ID NO: 411072 - DNA, 75 bp, synthetic construct
  source 1..75: mol_type = other DNA
accgattgtgactcgcggctatgaatccagtaaacgagatgtgcggattgaaggcgcgggtatcttaggtggtat

SEQ ID NO: 411073 - DNA, 75 bp, synthetic construct
  source 1..75: mol_type = other DNA
aaaaggattcaggaaaaaggtgcattagaactttttggtaaagaagattttatacaaaaaagaattattttcaat

SEQ ID NO: 411074 - DNA, 75 bp, synthetic construct
  source 1..75: mol_type = other DNA
ttaactatcgccgatgcttttttcgatgagcacggggaaactctcgctgaagaactttataataaacaggggttt

SEQ ID NO: 411075 - DNA, 75 bp, synthetic construct
  source 1..75: mol_type = other DNA
aataaagaaacacagatagtcacgatggatcacatatttctctcagagagctatgaaatcttcatgccactcatg

SEQ ID NO: 411076 - DNA, 75 bp, synthetic construct
  source 1..75: mol_type = other DNA
agcacaagccggtaattataggcatcgacgtgaaggattaaaagttagaatacaagatgcggacctgaaaaatat

SEQ ID NO: 411077 - DNA, 75 bp, synthetic construct
  source 1..75: mol_type = other DNA
gtttcagatccaaaaggcacaaatattgtaatatctcggaataaagagataagtagtttaatgaataaagcctta

SEQ ID NO: 411078 - DNA, 75 bp, synthetic construct
  source 1..75: mol_type = other DNA
atacaagaagcaagaaggaaatccagaaattaagtctaaacgcagagagcgcatcaggaaattctttctgagcaa

SEQ ID NO: 411079 - DNA, 75 bp, synthetic construct
  source 1..75: mol_type = other DNA
atatgcaggttgggatgatgtttttctacaggcgttaagaaacatcgtccatgagtttcagccaagttataatgt

SEQ ID NO: 411080 - DNA, 75 bp, synthetic construct
  source 1..75: mol_type = other DNA
gcttgattgcgtcggtcaggctttaatctctttctatgaaaaacttccagaggaaattttatcagaaaataatgg

SEQ ID NO: 411081 - DNA, 75 bp, synthetic construct
  source 1..75: mol_type = other DNA
ggggagataaaaacggaaactgaaacaaccagattctatgttgattatgatgatttaatgctttctttgctaaaa

SEQ ID NO: 411082 - DNA, 75 bp, synthetic construct
  source 1..75: mol_type = other DNA
ggagcgggaactgcgtgcgggagcggtgagtgcggagagtgaggcatggcttgcgcagtgcgggctgacggtgga

SEQ ID NO: 411083 - DNA, 75 bp, synthetic construct
  source 1..75: mol_type = other DNA
ctgataccagggtggaacgtgtccgtcttaaagatggggattactttttccctgctgaacccgccataaaagcgg

SEQ ID NO: 411084 - DNA, 75 bp, synthetic construct
  source 1..75: mol_type = other DNA
gaagctgggtcccaatagacggtagtggtgcaggaattgcaatattattaacaggacagcaaaaatatacaaaag

SEQ ID NO: 411085 - DNA, 75 bp, synthetic construct
  source 1..75: mol_type = other DNA
tggaaaagataaaacagaataataatcttatttcgtttgatttttccgggcgcggtactgatgaatatttcgaaa

SEQ ID NO: 411086 - DNA, 75 bp, synthetic construct
  source 1..75: mol_type = other DNA
acttgatgctttatttattttattctacatgcgttatagaaatgcaattgatagacagataaatataaatatatt

SEQ ID NO: 411087 - DNA, 75 bp, synthetic construct
  source 1..75: mol_type = other DNA
tgaactttgcatcctattttagaaatgagcaagcccccgttgggttttataatatgaactttcaattttttaaca

SEQ ID NO: 411088 - DNA, 75 bp, synthetic construct
  source 1..75: mol_type = other DNA
atatgaaatatttatcaatcagactgagttttttggcactaaaggtggagcgagataagtgtctgattgatgctc

SEQ ID NO: 411089 - DNA, 75 bp, synthetic construct
  source 1..75: mol_type = other DNA
tgggaaggctggagcgggagctgcgtgcgggagcggtgagtgcggagagtgcggagagtgaggcatggcttgcgc

SEQ ID NO: 411090 - DNA, 75 bp, synthetic construct
  source 1..75: mol_type = other DNA
agttctttggggagcgtttcgaacggcaacgaataactattgaatttagtgaagagtttaagcaaatcgcaataa

SEQ ID NO: 411091 - DNA, 75 bp, synthetic construct
  source 1..75: mol_type = other DNA
tcttacaaacttagatgcgttgcgcagtgaaattaaaacgcctatcaaacctccaaaacttggaatgtatgaaga

SEQ ID NO: 411092 - DNA, 75 bp, synthetic construct
  source 1..75: mol_type = other DNA
tcctgccatgtattaaagatctgggactaattgagcagattgacgagaagatcaacctcaacggtggcgcgatcg

SEQ ID NO: 411093 - DNA, 75 bp, synthetic construct
  source 1..75: mol_type = other DNA
attggcgtttccggtggtggttctcaaaaccatgaatcagaggctgccgctatgctggctactacccctacccaa

SEQ ID NO: 411094 - DNA, 75 bp, synthetic construct
  source 1..75: mol_type = other DNA
ggtgacctggcagagtggtttaaaggtggaggcattaaaaaggttgtgtcttttctgagggacaccctgtatccg

SEQ ID NO: 411095 - DNA, 75 bp, synthetic construct
  source 1..75: mol_type = other DNA
tgggatttaatgagggcgagcttgccggactgagtgataaggcgcagttcgaaaaaattatcgacagggcgctgt

SEQ ID NO: 411096 - DNA, 75 bp, synthetic construct
  source 1..75: mol_type = other DNA
atagatctttcttatcaaaaaaaattgaattgccaagtatatctgagcctgttagtgattacttcattaagttgt

SEQ ID NO: 411097 - DNA, 75 bp, synthetic construct
  source 1..75: mol_type = other DNA
attaatataatgaggaatagtggttgggtaagtgtaagctttcttgatgagcatttaagagagtatcttctttat

SEQ ID NO: 411098 - DNA, 75 bp, synthetic construct
  source 1..75: mol_type = other DNA
atggttatagcgcaccagcaaaatctggtgtcgggattggcgtcccggtaattatcagagcgcacaacacgcgcc

SEQ ID NO: 411099 - DNA, 75 bp, synthetic construct
  source 1..75: mol_type = other DNA
ccacttggttaagtggtaatcttgctgcgaatacccagattagaattcctgtttatatggacatgaaaggagcta

SEQ ID NO: 411100 - DNA, 75 bp, synthetic construct
  source 1..75: mol_type = other DNA
aaatgttttgtacaatatagaaaaagatatagccaatgaaatagatattgataaagtgaatttcatgcataacct

SEQ ID NO: 411101 - DNA, 75 bp, synthetic construct
  source 1..75: mol_type = other DNA
ttacagataaatttgctaatctgactaaaataccagatgaaaatatgaatgaaaaaaatagaacgcaaaaatatt

SEQ ID NO: 411102 - DNA, 75 bp, synthetic construct
  source 1..75: mol_type = other DNA
ctggctgggataattccaccagcaggaaaaactccgccaacatttcatgaacaacgctctctatcagaacggctg

SEQ ID NO: 411103 - DNA, 75 bp, synthetic construct
  source 1..75: mol_type = other DNA
tctgggacataaatcgcctaaccagacagctaaataccatgatgatcgtggtaaggaatgggcaaaaatcaaggt

SEQ ID NO: 411104 - DNA, 75 bp, synthetic construct
  source 1..75: mol_type = other DNA
ctcattgatgacgagcagtttgatgaaatcaatattgtgcgcggtcagccagtatctggtggacggctgggtgtg

SEQ ID NO: 411105 - DNA, 75 bp, synthetic construct
  source 1..75: mol_type = other DNA
atgtctaatacctcggcaaatgaaattgtaccgcacttaccgctaattttcgaaaatgaagctaatgggattctt

SEQ ID NO: 411106 - DNA, 75 bp, synthetic construct
  source 1..75: mol_type = other DNA
gttactccggcggcgatagaggtagaaaagcgcgctgttgagcgtgaatcgaaaggccagtaccgcattgcagcc

SEQ ID NO: 411107 - DNA, 75 bp, synthetic construct
  source 1..75: mol_type = other DNA
ttgggcgttgatcttagagaggcttaccttcccggtgttgacatgagggattgttactttggtaaaaaaataatg

SEQ ID NO: 411108 - DNA, 75 bp, synthetic construct
  source 1..75: mol_type = other DNA
ttgggcgttgatcttggagaggcttaccttcccggcgttgacatgaggaattgttactttggtaaaaaaacaatg

SEQ ID NO: 411109 - DNA, 75 bp, synthetic construct
  source 1..75: mol_type = other DNA
tcgcgtaatggccaatttaccttctctacgggtgacttacatatttcgcctaaatattacccatatattcgagaa

SEQ ID NO: 411110 - DNA, 75 bp, synthetic construct
  source 1..75: mol_type = other DNA
tcagtttaactggagcgtgcgtacgttttagtgaacgtgtgatttttcaggatttaagttttaacgtacaaaagg

SEQ ID NO: 411111 - DNA, 75 bp, synthetic construct
  source 1..75: mol_type = other DNA
cagtggcagtatgacgaccacggctggctgacagaaatcagccacctgagtgaaggccaccgtgtggcggtccac

SEQ ID NO: 411112 - DNA, 75 bp, synthetic construct
  source 1..75: mol_type = other DNA
atactaaaggagttgctactgaagaagttgctactaaaaaagtactgctgaacaaattactgacaacgcaattat

SEQ ID NO: 411113 - DNA, 75 bp, synthetic construct
  source 1..75: mol_type = other DNA
tggcgatggttttctgaacggcacggtctgtacctgtacagtttacggagacacacaacgttttcactggcgggt

SEQ ID NO: 411114 - DNA, 75 bp, synthetic construct
  source 1..75: mol_type = other DNA
cgcggcgtttatcgtctttccgatgcattatggctggaccaggtgttaaagaatcgacaggcagtgcggtatcat

SEQ ID NO: 411115 - DNA, 75 bp, synthetic construct
  source 1..75: mol_type = other DNA
ataaggagatatgtactcagacgttgcagctgcataaaggcccaggtaacttgggcgttgatcttggagaggctt

SEQ ID NO: 411116 - DNA, 75 bp, synthetic construct
  source 1..75: mol_type = other DNA
ttgttaccttggtaaaaaaacaataatagataacaacgtcctttacttggaacctgggtggaatgctaacctgga

SEQ ID NO: 411117 - DNA, 75 bp, synthetic construct
  source 1..75: mol_type = other DNA
ttgttaccttggtaaaaaaacaatgaaaggtagcaatgatatcctttatgagagacctgggcggtgctaccccgg

SEQ ID NO: 411118 - DNA, 75 bp, synthetic construct
  source 1..75: mol_type = other DNA
tcaggataaacatgcgcttttccccatttttactgcgagttggcgagctcatcgtataatgaataagggtgttta

SEQ ID NO: 411119 - DNA, 75 bp, synthetic construct
  source 1..75: mol_type = other DNA
aagataacaagttcgatgattttatgcgtcaacatcgattcagtgaggtgaatttcgatacccaacagatgatcg

SEQ ID NO: 411120 - DNA, 75 bp, synthetic construct
  source 1..75: mol_type = other DNA
agttatatccattctggtgaagataacaagttcgatgattttatgcgtcaacatcgattcagcaaggtggatttc

SEQ ID NO: 411121 - DNA, 75 bp, synthetic construct
  source 1..75: mol_type = other DNA
ctccagagccagggagtcaatgacggaagaagaactgggtgctgaccgatgggttcagcatcatgaactgaccct

SEQ ID NO: 411122 - DNA, 75 bp, synthetic construct
  source 1..75: mol_type = other DNA
gggtggccattgctgctctgttcacaggaagttgttttagtacggtagccgcgccacctgcgccgtctcctgttt

SEQ ID NO: 411123 - DNA, 75 bp, synthetic construct
  source 1..75: mol_type = other DNA
caaagtggtgcagcccgcgttcaaactggcacgcgatggttttatcgttaacgatgctttggcagacgatctcaa

SEQ ID NO: 411124 - DNA, 75 bp, synthetic construct
  source 1..75: mol_type = other DNA
atatcggttatcgcgtacttgttacagtcagcgatcgcaacggtaaaccgttgccctttggcgctcttgccagca

SEQ ID NO: 411125 - DNA, 75 bp, synthetic construct
  source 1..75: mol_type = other DNA
ccggtactcacactggcagcttgatgcaccggaagacagcctcgccctgaaacacacttatacgggaagcattgc

SEQ ID NO: 411126 - DNA, 75 bp, synthetic construct
  source 1..75: mol_type = other DNA
gggagcacagagcgggaagaatgctgttgagaataactacttaagctctaaagaagcacgacaacttgatcagga

SEQ ID NO: 411127 - DNA, 75 bp, synthetic construct
  source 1..75: mol_type = other DNA
caggtgttccttgagccaaagggggatgaccggctgctggatgacgcatggaaagagcagatgctggaaacgctg

SEQ ID NO: 411128 - DNA, 75 bp, synthetic construct
  source 1..75: mol_type = other DNA
gttcatttatgacggtcaacgtagcttcacccgccgttttgataacagtacgaaggatttgagcgtactggagca

SEQ ID NO: 411129 - DNA, 75 bp, synthetic construct
  source 1..75: mol_type = other DNA
gcaggggttcaggcaccacgctggataaccactttgcggtaatcccggcagaccggacatggcggccacagccgt

SEQ ID NO: 411130 - DNA, 75 bp, synthetic construct
  source 1..75: mol_type = other DNA
gaagctgtcagcttcattgaccatattaaaagttgtcgaacaaacattactgatggtcaataaaaatgcaaatat

SEQ ID NO: 411131 - DNA, 75 bp, synthetic construct
  source 1..75: mol_type = other DNA
gactctataatgggtatttcggtaatggcacagtcaatatttccaataatggtctgattaataacaaagaatatt

SEQ ID NO: 411132 - DNA, 75 bp, synthetic construct
  source 1..75: mol_type = other DNA
aatcaatgaatctaaaacaatttttacatcgatggctcataatcggcacgtgactggtgtaacacttacacctca

SEQ ID NO: 411133 - DNA, 75 bp, synthetic construct
  source 1..75: mol_type = other DNA
aaatgactgtatattggtacagtatgtgggcacatagacgcgatctgtcgtggaagggatttatccaaatcccgt

SEQ ID NO: 411134 - DNA, 75 bp, synthetic construct
  source 1..75: mol_type = other DNA
gccaccggcagtgccgacgttaaaggaaccacgctgaataataccggtacgcttcagggtgcggagctgctggtg

SEQ ID NO: 411135 - DNA, 75 bp, synthetic construct
  source 1..75: mol_type = other DNA
gtgacggtattgaccattatctggccccttcccgggcgcaaccccggtcttccgcagccgtgatcggtgactacc

SEQ ID NO: 411136 - DNA, 75 bp, synthetic construct
  source 1..75: mol_type = other DNA
aaagctggccaaagaccagcacggcgcagatattcctgacccggcgctctttgtcaaaaaccttggtttgggaga

SEQ ID NO: 411137 - DNA, 75 bp, synthetic construct
  source 1..75: mol_type = other DNA
cggaagagatgtcttccaggagctctcacttggacaacagaaagcaaggtcactttgccatgttcaggagcgccc

SEQ ID NO: 411138 - DNA, 75 bp, synthetic construct
  source 1..75: mol_type = other DNA
taacaatgatagcttctcgtggaaatgttgcagacacagggataactgatcgtgtcaatgacataataaatgaca

SEQ ID NO: 411139 - DNA, 75 bp, synthetic construct
  source 1..75: mol_type = other DNA
gcataaaagaaattaaatttaatttatctgaaacagaacttagtgaagcttcagcttatttttgcgaaagaacaa

SEQ ID NO: 411140 - DNA, 75 bp, synthetic construct
  source 1..75: mol_type = other DNA
tggcgataatgatgcaatcgtaatcggtagaaagccagagctatttgatcatgattttgttaagaaggagttttt

SEQ ID NO: 411141 - DNA, 75 bp, synthetic construct
  source 1..75: mol_type = other DNA
aggctgatcctacaagccatactcgttccccatacaaaatggatatagtacgctttgttagtactttttcgctta

SEQ ID NO: 411142 - DNA, 75 bp, synthetic construct
  source 1..75: mol_type = other DNA
gcagtatcacctcacgaatggaatcgtcgccgtcctgcgcatcgcgatctggaagcggtgtggaacggaaaaacg

SEQ ID NO: 411143 - DNA, 75 bp, synthetic construct
  source 1..75: mol_type = other DNA
atgctgaaccagatcggggggcgctatatcaacggggttggttcagacaccgaccagatgcgctacctgatggat

SEQ ID NO: 411144 - DNA, 75 bp, synthetic construct
  source 1..75: mol_type = other DNA
ggagctgaacagccagctatggacggtcaacagcatcaagccgaacacagataacacggtatctctgaccgtcgc

SEQ ID NO: 411145 - DNA, 75 bp, synthetic construct
  source 1..75: mol_type = other DNA
gtcaacagcatcaaacctaacacagataacaccgtatctctgacagtcgctgaatacagcgacgccatctaccaa

SEQ ID NO: 411146 - DNA, 75 bp, synthetic construct
  source 1..75: mol_type = other DNA
accagcgagccgatcacgtttaccggttcgatgtatgtgctggtgacagacagcctgggtaacccgacactgcgc

SEQ ID NO: 411147 - DNA, 75 bp, synthetic construct
  source 1..75: mol_type = other DNA
ggtactcaaagcctgcggtgcggtagattacttctgtcagaatggtcacgggattatttcccgcaaacgtgttga

SEQ ID NO: 411148 - DNA, 75 bp, synthetic construct
  source 1..75: mol_type = other DNA
ataaacctctcgaacaccacggcgagacggctcactgcgtaacttgcgataaagatttcaccatccaggcacgtt

SEQ ID NO: 411149 - DNA, 75 bp, synthetic construct
  source 1..75: mol_type = other DNA
ccagttttaccagccgggtgaagtgatccccaccatcaatgaaggctacgggttcgacgacgtggacggccagga

SEQ ID NO: 411150 - DNA, 75 bp, synthetic construct
  source 1..75: mol_type = other DNA
accagcgagccgatcgcatttaccggttcaatgtacgtgctggtgactgacagtcttggtaacccgacactgcgc

SEQ ID NO: 411151 - DNA, 75 bp, synthetic construct
  source 1..75: mol_type = other DNA
agcagcattgacctttacggcctgtactcgatcgctgaaagcttacctgacgaacgcctgggttacttcgactac

SEQ ID NO: 411152 - DNA, 75 bp, synthetic construct
  source 1..75: mol_type = other DNA
ttgaattccatagaaataatgaaacaacatcctgtaaatatgattacgatggatacaaaatactcacctataaat

SEQ ID NO: 411153 - DNA, 75 bp, synthetic construct
  source 1..75: mol_type = other DNA
atgaagacggacgagtacaaaatgacgtacgaggccactcttcctggcggctacgacggcgtgcaggtgtcctac

SEQ ID NO: 411154 - DNA, 75 bp, synthetic construct
  source 1..75: mol_type = other DNA
cgccaaacaatagcctgaccggccagacgaatacggcgcgcgtctacaaagcaaaaccggacatctacggacaaa

SEQ ID NO: 411155 - DNA, 75 bp, synthetic construct
  source 1..75: mol_type = other DNA
attcgatcgccgaaagcctgcctgatgagcgccttggttacttcgactatacctttgatgatgagaacgactctc

SEQ ID NO: 411156 - DNA, 75 bp, synthetic construct
  source 1..75: mol_type = other DNA
aaggtttagtttatgctgattacaatgatcataactttgaagtgatgaagggaattagtgcgcgaggcattattg

SEQ ID NO: 411157 - DNA, 75 bp, synthetic construct
  source 1..75: mol_type = other DNA
ccatgcgcgttgcccatcctgcggggaaattattgaaatgaaagctctttgtccagactgccatcaaccgttgca

SEQ ID NO: 411158 - DNA, 75 bp, synthetic construct
  source 1..75: mol_type = other DNA
tggcgtggtgctcaacctgacgccttcttatccgcgctcgcaaaatccggctgatgttaaagccgcacactgcgc

SEQ ID NO: 411159 - DNA, 75 bp, synthetic construct
  source 1..75: mol_type = other DNA
gctatcgtattgaatttgtcgctgaacatttaaaatggctgcataaaggaattatcgaagggtgtaattgccttg

SEQ ID NO: 411160 - DNA, 75 bp, synthetic construct
  source 1..75: mol_type = other DNA
gtttctaggtgtcgctctctggacatttatttgggcaatttgcgcgacgatttttaccttcagttttggctttat

SEQ ID NO: 411161 - DNA, 75 bp, synthetic construct
  source 1..75: mol_type = other DNA
aggggacagagagttcactgacatgccctattacattatgtgaacctgaggatggggttttttatgaagaattct

SEQ ID NO: 411162 - DNA, 75 bp, synthetic construct
  source 1..75: mol_type = other DNA
ttttgcctcagggtaatttgatgtctaatattcctcaggaaacttggtctgagatacgtagtcagagtgttagtg

SEQ ID NO: 411163 - DNA, 75 bp, synthetic construct
  source 1..75: mol_type = other DNA
cgtctgggatgagctggcacgcgataaattattgccgctggaatataagaaacagttatggcaacgcacattaaa

SEQ ID NO: 411164 - DNA, 75 bp, synthetic construct
  source 1..75: mol_type = other DNA
aaaaacagtaatatttccgccgatgtgaataaaaaattaatgtctgtacccgtcgagagcgtacagctggagcag

SEQ ID NO: 411165 - DNA, 75 bp, synthetic construct
  source 1..75: mol_type = other DNA
tcttatttgtcgatcaacccgatctttcgcagttacgtgatttagtgaaaaccggggcaacgcggaaaattcgca

SEQ ID NO: 411166 - DNA, 75 bp, synthetic construct
  source 1..75: mol_type = other DNA
gtcaaagccagggcaacgatgatcaatcctgattcaccgttcatgcccgattggttttttgaaaactatgaaatg

SEQ ID NO: 411167 - DNA, 75 bp, synthetic construct
  source 1..75: mol_type = other DNA
aaattattgccgctggaatataagaaacagttatggcaacgcacattaaatttaatgatgagcaaacggcaagaa

SEQ ID NO: 411168 - DNA, 75 bp, synthetic construct
  source 1..75: mol_type = other DNA
ctgcatatgcaggcgaggtataaggccacacattatcccgtcaccgggggaaaggcaaatggacaggtatggttt

SEQ ID NO: 411169 - DNA, 75 bp, synthetic construct
  source 1..75: mol_type = other DNA
gttgaaatcattagtagaggtttctccttttttgatggagagttgcactagggttgttgttaatggcatggaggt

SEQ ID NO: 411170 - DNA, 75 bp, synthetic construct
  source 1..75: mol_type = other DNA
caggcttaagggtcatgcgacccagactctgcaagaaaagtacctgaatgccatcatccacgcaggcggcttgcc

SEQ ID NO: 411171 - DNA, 75 bp, synthetic construct
  source 1..75: mol_type = other DNA
atccttatattttaacattacaaaacatttcgcttttaaaatatgtatggctaatgtcattattttattgttcta

SEQ ID NO: 411172 - DNA, 75 bp, synthetic construct
  source 1..75: mol_type = other DNA
gactgcggtatggattagaaatagccataccaatgagcgttttctggtcaattcgtggattgaaaacagcagcgg

SEQ ID NO: 411173 - DNA, 75 bp, synthetic construct
  source 1..75: mol_type = other DNA
cctctcaccagaagcacatgaaagaaccagtgaaagcaaagtattaatttgtgatgaagacaaatcttccagaga

SEQ ID NO: 411174 - DNA, 75 bp, synthetic construct
  source 1..75: mol_type = other DNA
cgagcacttccagcggtggcggaattactaacgctcaattcacttatattaatcatggtgatgcttatgctcctg

SEQ ID NO: 411175 - DNA, 75 bp, synthetic construct
  source 1..75: mol_type = other DNA
ccgcttgcagtttctactgaatatggcatgagcctgcaaaatcgcgaatctatcggtcagttaggtgatgctgcc

SEQ ID NO: 411176 - DNA, 75 bp, synthetic construct
  source 1..75: mol_type = other DNA
gatcatctgaaggacatccggtcattgtttctaacagtgacacatccctgattcgttcgctgtatcgcaatttta

SEQ ID NO: 411177 - DNA, 75 bp, synthetic construct
  source 1..75: mol_type = other DNA
ccggttaggtattgaggtcctaaccatacttgaggactctctaaagaccatccaagagatgaccttagccgcagc

SEQ ID NO: 411178 - DNA, 75 bp, synthetic construct
  source 1..75: mol_type = other DNA
acgctgctagaggaggccgttcagactatcggcgatatgaccaaggcagttcaggagggagacactcaggcggcg

SEQ ID NO: 411179 - DNA, 75 bp, synthetic construct
  source 1..75: mol_type = other DNA
tccatgttttcattaccggcagacgctgaaggatatagtggaataataaattttcacagcaatgattatctttac

SEQ ID NO: 411180 - DNA, 75 bp, synthetic construct
  source 1..75: mol_type = other DNA
tgcacagattaaccctttggtttctcgtgcgcattgcgacaaagtgcgttcattccttgacgatgcgcaggcaca

SEQ ID NO: 411181 - DNA, 75 bp, synthetic construct
  source 1..75: mol_type = other DNA
gattgcgaacattcagaaagtacttgatgtaggctttgactctgtacattttgattgtggcgcaccggtcgttga

SEQ ID NO: 411182 - DNA, 75 bp, synthetic construct
  source 1..75: mol_type = other DNA
gcctaaccctcttaaaatgtacgcggtcgatgctgttgccgctattgcagaggtgagaggctggaacgcctgccg

SEQ ID NO: 411183 - DNA, 75 bp, synthetic construct
  source 1..75: mol_type = other DNA
cccctgcttattcacggaatctgtgggtaactttgcatgtgtccgcagcgcccgccgcagtctcacggccggagc

SEQ ID NO: 411184 - DNA, 75 bp, synthetic construct
  source 1..75: mol_type = other DNA
cactggataaaaaaagattatccctatttcttcgaaaagttaaaaaacaaatcgccgcaggccgctttgagttac

SEQ ID NO: 411185 - DNA, 75 bp, synthetic construct
  source 1..75: mol_type = other DNA
ttgcccagattgcggaatatattccccgtgcctgtcgtgatatgaagttaaaagaagccaaggcacggcttgcta

SEQ ID NO: 411186 - DNA, 75 bp, synthetic construct
  source 1..75: mol_type = other DNA
atgtttaaacagaacgaaaaagctatcgctcaaattgctgattatatcccgcgtgcgtgccggggtatgcagctg

SEQ ID NO: 411187 - DNA, 75 bp, synthetic construct
  source 1..75: mol_type = other DNA
tgggcgaaaaccgcgaaagataatgccaccctggaacgttatcgtcgggcgctgaatattaaatttaaccaaccg

SEQ ID NO: 411188 - DNA, 75 bp, synthetic construct
  source 1..75: mol_type = other DNA
atgtcagcctgacgctcaatgccggagaaattctgggtctggccgggctggtgggggccggacgcacagaactgg

SEQ ID NO: 411189 - DNA, 75 bp, synthetic construct
  source 1..75: mol_type = other DNA
gtcgccccggacaaccgtggtcactacagccaaccggtggtggatttaccggaaaccaaagcctgggctgaaaaa

SEQ ID NO: 411190 - DNA, 75 bp, synthetic construct
  source 1..75: mol_type = other DNA
aagtctcagtgcttcgaattaataacctaaaagtgcgagaagatattgattcgctgttaaagagttataattatt

SEQ ID NO: 411191 - DNA, 75 bp, synthetic construct
  source 1..75: mol_type = other DNA
ctactttatcccaacatttcggaccggatgatgaaaccttagttgagttaaagcttgaaattgaaaaaagaattt

SEQ ID NO: 411192 - DNA, 75 bp, synthetic construct
  source 1..75: mol_type = other DNA
aactctctgaaagttttaaaagagaaattaaatagctattattcagtcaatagtaaaacattacacactgttgaa

SEQ ID NO: 411193 - DNA, 75 bp, synthetic construct
  source 1..75: mol_type = other DNA
atacgaattctgtttatatagattatgaaaccgaagatgacacctccgatggggtttaccctaatcaaggtaacg

SEQ ID NO: 411194 - DNA, 75 bp, synthetic construct
  source 1..75: mol_type = other DNA
taaagataaagcaaaagcattattttcaaattatgtatacctgctgaacacaaaagcaaccatagagaacggtgc

SEQ ID NO: 411195 - DNA, 75 bp, synthetic construct
  source 1..75: mol_type = other DNA
ccacccgctattccgcactggtggaagcgtcaaccgcttattcccaaccttctgtcacaggaactgaaaaactat

SEQ ID NO: 411196 - DNA, 75 bp, synthetic construct
  source 1..75: mol_type = other DNA
aattacgatgtttcagcaataccgccaattccaatgacaaagcaggtcctcgaatggataacggaatacggagtt

SEQ ID NO: 411197 - DNA, 75 bp, synthetic construct
  source 1..75: mol_type = other DNA
tggctgggacggagacaggctgacgacggtgcagactgacaccacacgtatccagacggtatacgagccgggaag

SEQ ID NO: 411198 - DNA, 75 bp, synthetic construct
  source 1..75: mol_type = other DNA
actacacgcacgttcaggtcggggtcgacaaaaaacacgagctggacggactggatttgtttaccggtttcactg

SEQ ID NO: 411199 - DNA, 75 bp, synthetic construct
  source 1..75: mol_type = other DNA
ctggagtttgagaaatccgcctttggtaagtacaacgttgataatgctgtcaacgctaatttccgttactcgttc

SEQ ID NO: 411200 - DNA, 75 bp, synthetic construct
  source 1..75: mol_type = other DNA
agccattatatagagtaagaaaatctgaaacacctttagtagagcatgatgagatatttcacatccctttttcaa

SEQ ID NO: 411201 - DNA, 75 bp, synthetic construct
  source 1..75: mol_type = other DNA
ggaatatttatcaggagacattaaaacagcatatgatatattcgatgaagtcatgtcaaaggaagcaactataac

SEQ ID NO: 411202 - DNA, 75 bp, synthetic construct
  source 1..75: mol_type = other DNA
gagttagaaaaagtgaaaatcctctaacgtcaagagatgaaattttccatattccattctccaatagacattttg

SEQ ID NO: 411203 - DNA, 75 bp, synthetic construct
  source 1..75: mol_type = other DNA
catataaaagaggatgggagtgtaaaaaaattcattaagaaggttcaacaaatcactttctcgtcagatactgca

SEQ ID NO: 411204 - DNA, 75 bp, synthetic construct
  source 1..75: mol_type = other DNA
aaactgctggcatcaacagggagtacaggcgactcgtatgacaacgcgatggcagagatcatcaagggcctttag

SEQ ID NO: 411205 - DNA, 75 bp, synthetic construct
  source 1..75: mol_type = other DNA
aacagtgcatggatcgcctgctgcagtatgatgtacttgagataaaatctggcggcactttggcggcagagcatt

SEQ ID NO: 411206 - DNA, 75 bp, synthetic construct
  source 1..75: mol_type = other DNA
aagttcaaaaaactcggcatgattgactgggtttcacatggtaaattctcagttttctcggtagagaaatatgac

SEQ ID NO: 411207 - DNA, 75 bp, synthetic construct
  source 1..75: mol_type = other DNA
catttgcaggacagtcatgtgaaatggaggcaatatataaactctcaaaagagtatggattttcaattatcgaag

SEQ ID NO: 411208 - DNA, 75 bp, synthetic construct
  source 1..75: mol_type = other DNA
gaaatcagcgacgccaacagagctaagctgtcggcgtggctggcctataaaaatggagttaagtcggctgatgtg

SEQ ID NO: 411209 - DNA, 75 bp, synthetic construct
  source 1..75: mol_type = other DNA
tggaatttactcatgaatatgctttagcgatcgcatcgacaaaacaacaacattctattcgctcaggcaacaaga

SEQ ID NO: 411210 - DNA, 75 bp, synthetic construct
  source 1..75: mol_type = other DNA
tcacgaccgcaccaggtgatggtttgtacgttaactatgggctgaaagcgctgaacatccatggagggcaaaagc

SEQ ID NO: 411211 - DNA, 75 bp, synthetic construct
  source 1..75: mol_type = other DNA
tgccggctaccaggtcgatatgctgattacaggtgacgataaagacggaaaagtgatccatgatgcaggccatac

SEQ ID NO: 411212 - DNA, 75 bp, synthetic construct
  source 1..75: mol_type = other DNA
gctgtgaaggctgcgaagcatatttataatgccgggcaatgttcagtaattattacgatgggaaaacgaggtgca

SEQ ID NO: 411213 - DNA, 75 bp, synthetic construct
  source 1..75: mol_type = other DNA
atccctttctgtgctgtcgttgcatcctgtgcggtgtatttcccgttagccagctcatacgcggccttaacggct

SEQ ID NO: 411214 - DNA, 75 bp, synthetic construct
  source 1..75: mol_type = other DNA
actcggaagtgctgttggtcgcactgctgagctgtactaccccctttttcgtcgtgctcgcatcctcaagcgcca

SEQ ID NO: 411215 - DNA, 75 bp, synthetic construct
  source 1..75: mol_type = other DNA
ttatcattagctgctttcactgctttcggtgtcgcagcaagcgtttcagatgtgctgttggttgcactactgagc

SEQ ID NO: 411216 - DNA, 75 bp, synthetic construct
  source 1..75: mol_type = other DNA
ttttttggaaaaatccgtacccaacgtgaagcctgcggcttgacgaccgccgaactcgccaaattactcgatctt

SEQ ID NO: 411217 - DNA, 75 bp, synthetic construct
  source 1..75: mol_type = other DNA
aagatatcatcatccagtgggaaagcggagagtacgaaccgactatcagtatgcttatcccactggcaaatgttc

SEQ ID NO: 411218 - DNA, 75 bp, synthetic construct
  source 1..75: mol_type = other DNA
cactgataacagcactgcgggtgaaaaacatcgctcagtggttaccacgaaaattaatacttatttaccctatgc

SEQ ID NO: 411219 - DNA, 75 bp, synthetic construct
  source 1..75: mol_type = other DNA
ccattaccgggcgcagacgggtgacgctgattgcggaggggcgacgctgtgagcgcctggctccctgccggttgc

SEQ ID NO: 411220 - DNA, 75 bp, synthetic construct
  source 1..75: mol_type = other DNA
agtctccctgcgtaatcgcacccgccagtccggttccttcgccatcaggcgcattgtctttctggcgactgattc

SEQ ID NO: 411221 - DNA, 75 bp, synthetic construct
  source 1..75: mol_type = other DNA
ctggccatgttactggcattttcgcgtaaaactcttgtcaggatgaacgtaagcgattcatttcagcctgattct

SEQ ID NO: 411222 - DNA, 75 bp, synthetic construct
  source 1..75: mol_type = other DNA
cggataaatccgagttggcgctatgtgctttaggtggttcttggggagcgggaaaaacgtttgttgagaaaatag

SEQ ID NO: 411223 - DNA, 75 bp, synthetic construct
  source 1..75: mol_type = other DNA
ccgctgagtttggcgtgtcagtgcgcacactgcggcgtgattttcgtgaacgactaatgtatctggacctggagt

SEQ ID NO: 411224 - DNA, 75 bp, synthetic construct
  source 1..75: mol_type = other DNA
tcatccaccagcaggcctggtatctggtggcggaacacgacggacatatcgccgtattcaccctggatgagatcc

SEQ ID NO: 411225 - DNA, 75 bp, synthetic construct
  source 1..75: mol_type = other DNA
aattcgattacgtgaattggaaaaagagtttatccgtaaagataaaaccctatcagaagattattgttctgatca

SEQ ID NO: 411226 - DNA, 75 bp, synthetic construct
  source 1..75: mol_type = other DNA
ctgcgcggcttaagtaatgacgtctacttccaggttggtttgctgaccaccatcgggctttccgccaaaaacgcc

SEQ ID NO: 411227 - DNA, 75 bp, synthetic construct
  source 1..75: mol_type = other DNA
gtgaaaaaagtgtatgtccaggcaggcacgccgttccgtatgttgccggataacatcaaccaatggtatgtacgc

SEQ ID NO: 411228 - DNA, 75 bp, synthetic construct
  source 1..75: mol_type = other DNA
attttaacagacgagggttttattacatggagggatttcgatcgtatagcgtggcctatattaagaggtaaatgt

SEQ ID NO: 411229 - DNA, 75 bp, synthetic construct
  source 1..75: mol_type = other DNA
catggagggattttgatcgtatagcgtggcctatattaagaggtaagtgtatttgcttttcaagctgttcagtcg

SEQ ID NO: 411230 - DNA, 75 bp, synthetic construct
  source 1..75: mol_type = other DNA
agcagccgttggggtcttaggactggcttactataaaggctctcaggagcaggacgaatttaataaatctcttat

SEQ ID NO: 411231 - DNA, 75 bp, synthetic construct
  source 1..75: mol_type = other DNA
gagataaaaacggaaactgaaacaaccagattctatgttgattatgatgatttaatgctttctttgctaaaagaa

SEQ ID NO: 411232 - DNA, 75 bp, synthetic construct
  source 1..75: mol_type = other DNA
tgcaagcagtttgttatgttgtaaaatagcaaagcttaatggtgctgaaatggatttcatagggacttcgtttta

SEQ ID NO: 411233 - DNA, 75 bp, synthetic construct
  source 1..75: mol_type = other DNA
atggaagaaaaaattcttcctgcgctggaggcagttcccgggctcagtgcattactgctgaagatgaatcttcag

SEQ ID NO: 411234 - DNA, 75 bp, synthetic construct
  source 1..75: mol_type = other DNA
tatggcatgggtggaagagccgtcttactggggaatacgccatgtactggcaatgaatgctgtgcagatcacccc

SEQ ID NO: 411235 - DNA, 75 bp, synthetic construct
  source 1..75: mol_type = other DNA
attgagtgaggagagctgtatgttaaataaagaagataaaaaagatgcagccaaaattcgtaagattaatgaaac

SEQ ID NO: 411236 - DNA, 75 bp, synthetic construct
  source 1..75: mol_type = other DNA
tcgatttattctctagcattgagcaatatttacggtgggtaattgagaaaaataatgactataataaggaaaatt

SEQ ID NO: 411237 - DNA, 75 bp, synthetic construct
  source 1..75: mol_type = other DNA
tcaaaaatatactctgtaaatcaagatcccaatgtgggtaagccagttggtgcatatctgtttatgcagtcattt

SEQ ID NO: 411238 - DNA, 75 bp, synthetic construct
  source 1..75: mol_type = other DNA
gaaatggcttgcacctttttttcaatgaattaagttccagaagaactgcgttattgcaccacgcctcaaaagaac

SEQ ID NO: 411239 - DNA, 75 bp, synthetic construct
  source 1..75: mol_type = other DNA
atggtgtggtgtggtgttgcgacgcaattgctcgctgcgtatattttgctatttgatgagtacaatgagaagaaa

SEQ ID NO: 411240 - DNA, 75 bp, synthetic construct
  source 1..75: mol_type = other DNA
gctggtaagctcacaaagtttcaacaacgcttccgggaaactgctggcgttagatagccagttaaccaatgattt

SEQ ID NO: 411241 - DNA, 75 bp, synthetic construct
  source 1..75: mol_type = other DNA
ccggcgtcccggatgtcagtgcctttccccaccccctgttcagcaggattcaggcgcgtatcagtcgccgtcctg

SEQ ID NO: 411242 - DNA, 75 bp, synthetic construct
  source 1..75: mol_type = other DNA
cagttgcgcagcctgaatggcgaatggcgctttgcctggtttccggcaccagaagcggtgccggaaagctggctg

SEQ ID NO: 411243 - DNA, 75 bp, synthetic construct
  source 1..75: mol_type = other DNA
ttgttaattaaagcatttgataaaggtctaataaaacacaaagatgtaggaaaaatacgtgagatacttgactca

SEQ ID NO: 411244 - DNA, 75 bp, synthetic construct
  source 1..75: mol_type = other DNA
gttggctaaaagaaaataaaaatatggtggaggatattaagggagtttttccagagttaataaataaaaatatag

SEQ ID NO: 411245 - DNA, 75 bp, synthetic construct
  source 1..75: mol_type = other DNA
ttccagcgcactggcaaaggatttgaatcttccggttgttagtaaaggttttcagcatgaattctggcaaaccgt

SEQ ID NO: 411246 - DNA, 75 bp, synthetic construct
  source 1..75: mol_type = other DNA
gctttgttgttcaggatgcataccagattggctatcaagggatcaaaacgttgaacgcggccctttcggggcaag

SEQ ID NO: 411247 - DNA, 75 bp, synthetic construct
  source 1..75: mol_type = other DNA
cattaaagattctgatgctgagcaattatttagattccgccatgacaaattcaaaccagaggccctaagaaccct

SEQ ID NO: 411248 - DNA, 75 bp, synthetic construct
  source 1..75: mol_type = other DNA
gatttcaacggcggcatccatccaccggagatgaaaacccagtccaacggtacacccctgcgccaggtacccctg

SEQ ID NO: 411249 - DNA, 75 bp, synthetic construct
  source 1..75: mol_type = other DNA
atattactcagaattattagtcatcgttatttactggtgttaaccgtgcttatttttctggcactcattttacag

SEQ ID NO: 411250 - DNA, 75 bp, synthetic construct
  source 1..75: mol_type = other DNA
atggcagcaatatggttactaagagtcgatcttttatttgttgcgctctttcttgtttttatttcatggggggat

SEQ ID NO: 411251 - DNA, 75 bp, synthetic construct
  source 1..75: mol_type = other DNA
gccagatgtatggtaattgatgaggttgcattaatgtacggttgtgataaatcttgtttgaaagcgcaactggat

SEQ ID NO: 411252 - DNA, 75 bp, synthetic construct
  source 1..75: mol_type = other DNA
gcaaagcgcctacaatttgtctggaaggaaaagacaatcgtactggttcacatggtgcattacactcagctacag

SEQ ID NO: 411253 - DNA, 75 bp, synthetic construct
  source 1..75: mol_type = other DNA
atgaaccgggcaggctggtatcggagacatcgcgcagcggggagacagtacgctaccgctacgatgacgcgcaca

SEQ ID NO: 411254 - DNA, 75 bp, synthetic construct
  source 1..75: mol_type = other DNA
agttacgccgcagggtggcggacatggtccgtcgcggcgtggtggacgaggtgatcccgggtagcccggtgatgg

SEQ ID NO: 411255 - DNA, 75 bp, synthetic construct
  source 1..75: mol_type = other DNA
ctcagcagtttcctgcttgcaactaatcacgatgtaacggtcgttttgagcaaggtttacatcaaaaactgcaaa

SEQ ID NO: 411256 - DNA, 75 bp, synthetic construct
  source 1..75: mol_type = other DNA
aggtttcaggcccctatcgagagaagctaaaaattgcctaccggcttttccttagcagcctgtatcttgctacaa

SEQ ID NO: 411257 - DNA, 75 bp, synthetic construct
  source 1..75: mol_type = other DNA
agccgataaggctaccgcaaccgtctccggtattgaggtgattggcaactatgcgctggcggacggcaaagccaa

SEQ ID NO: 411258 - DNA, 75 bp, synthetic construct
  source 1..75: mol_type = other DNA
tgtacaatagaaaaaaagatatagctagtgaaatagatattgataaagtgaatttcatgcacaaagtctataata

SEQ ID NO: 411259 - DNA, 75 bp, synthetic construct
  source 1..75: mol_type = other DNA
cccagtatttgaaaattgtttttttgagggttgtaatttcgagaatgtgtcccttgttggctttgataaagtgac

SEQ ID NO: 411260 - DNA, 75 bp, synthetic construct
  source 1..75: mol_type = other DNA
aaggtaacgaatatttattcacggatagaagatatttataaatatagcaataatatgaagaataattacaaaaag

SEQ ID NO: 411261 - DNA, 75 bp, synthetic construct
  source 1..75: mol_type = other DNA
gaagtatagagagtatagataaaacggttcgagttcttaatgatgaatcagatgtatctgagctaacatatgaac

SEQ ID NO: 411262 - DNA, 75 bp, synthetic construct
  source 1..75: mol_type = other DNA
ataatgaaatagaggtatttaggctaaaccagcaacaagaaaacagacttaatgttgtaattcgaggtatcaatc

SEQ ID NO: 411263 - DNA, 75 bp, synthetic construct
  source 1..75: mol_type = other DNA
gtatttatgagcatagcaataatatgaagaataattacaaaaaggcactagccgatttacgaaacttattagata

SEQ ID NO: 411264 - DNA, 75 bp, synthetic construct
  source 1..75: mol_type = other DNA
aaagtgaaagtgaatggtcagccgcttcatctgagtcaggaggaagagatggcggtgtctgtattggctccgttc

SEQ ID NO: 411265 - DNA, 75 bp, synthetic construct
  source 1..75: mol_type = other DNA
tgggaaaatcacgcgtacatttagtaccagcaagccaggtgtctatacgttcacattcaacgcactgacgggtaa

SEQ ID NO: 411266 - DNA, 75 bp, synthetic construct
  source 1..75: mol_type = other DNA
agttgtctgtgatgccgcgagtgaacggccaaaatgccgttgctcagccactggtgctgaacgttgcaggtgacg

SEQ ID NO: 411267 - DNA, 75 bp, synthetic construct
  source 1..75: mol_type = other DNA
tatatgtttgcctcggaatgtatccctgcactgctgttcttaatgctgctgtataccgtgccagaaagtcctcgc

SEQ ID NO: 411268 - DNA, 75 bp, synthetic construct
  source 1..75: mol_type = other DNA
ggtaagcccgccattatccgatgtgacaatggcccggaatacatcagcgaagagctcaagcgatgggcgaaacag

SEQ ID NO: 411269 - DNA, 75 bp, synthetic construct
  source 1..75: mol_type = other DNA
tgaaaccatcaatgactggggaaacgtagagcattacaccctgaaaggagagagaggtgaatataaatgtgactt

SEQ ID NO: 411270 - DNA, 75 bp, synthetic construct
  source 1..75: mol_type = other DNA
aaatatgtgatgtcagtagatgaaatagaagaaagatacggcgtcagagagaagttgtgggactccagacaacat

SEQ ID NO: 411271 - DNA, 75 bp, synthetic construct
  source 1..75: mol_type = other DNA
gcgataaactgcatattgtgcagtgcgatctcgcctgcccccagagcgtgagcgcattgtgcgaacagatagagc

SEQ ID NO: 411272 - DNA, 75 bp, synthetic construct
  source 1..75: mol_type = other DNA
tctgggtaaatgtgaagaagtggcgaacaccatcgtcttcttaagttcctctgcctccagctacattgtcggcca

SEQ ID NO: 411273 - DNA, 75 bp, synthetic construct
  source 1..75: mol_type = other DNA
ttggaagtggtgctaacgcgaagacttatactgcctctgatttggacggtgcagatctccatgacccggcgaata

SEQ ID NO: 411274 - DNA, 75 bp, synthetic construct
  source 1..75: mol_type = other DNA
gcaccttcaacagtcactccgtctgccggggcagcagtatgatgaggagtcggggctgtactacaaccgcaaccg

SEQ ID NO: 411275 - DNA, 75 bp, synthetic construct
  source 1..75: mol_type = other DNA
catgtccaaagcacagatcctgcaacaggcaggtacttctgtactggcacaggccaaccaggttccacagaacgt

SEQ ID NO: 411276 - DNA, 75 bp, synthetic construct
  source 1..75: mol_type = other DNA
ttggctttatccctcaagccaggggtgaggaagtcaccgtgggatggtccgatctactggcaccgagccaggcag

SEQ ID NO: 411277 - DNA, 75 bp, synthetic construct
  source 1..75: mol_type = other DNA
aacgcgccgccaatgccagcgtcgaacgcacccggatgcgtaacctgaattctctgtttaacggcaccagtaaca

SEQ ID NO: 411278 - DNA, 75 bp, synthetic construct
  source 1..75: mol_type = other DNA
agtgaaacgttcggcgaagtgacgatgtactcgttcacagagctgccggttgacgggaacttcgacgctcgcccg

SEQ ID NO: 411279 - DNA, 75 bp, synthetic construct
  source 1..75: mol_type = other DNA
tggaagatctcccacgtccggtgtcgagaatttccatgctcctggaactggtacagaaaggccttccggagcaat

SEQ ID NO: 411280 - DNA, 75 bp, synthetic construct
  source 1..75: mol_type = other DNA
tgatgtcagaagagagggttctgaagaacagggaaatcactgttcgcctgaatgagcttggggagtcatccatga

SEQ ID NO: 411281 - DNA, 75 bp, synthetic construct
  source 1..75: mol_type = other DNA
cgggaagattattgccggagagattgttaatttctccagggagcctgaacgacgaaatgagtttatcatcagtgt

SEQ ID NO: 411282 - DNA, 75 bp, synthetic construct
  source 1..75: mol_type = other DNA
gtgatgcggcagacattcttaagaatggagcaacagctcttaagttaactgatctgaatttaagtgatgttactg

SEQ ID NO: 411283 - DNA, 75 bp, synthetic construct
  source 1..75: mol_type = other DNA
aatactatattagaagggtatggagctcgctttgaacggcataatataattccagaattcaaaatctctggagtt

SEQ ID NO: 411284 - DNA, 75 bp, synthetic construct
  source 1..75: mol_type = other DNA
tgtcattggatgaaggtagctccgataacacaaaaaaaaataaaaagaatagaactgtaggctttccaatagatg

SEQ ID NO: 411285 - DNA, 75 bp, synthetic construct
  source 1..75: mol_type = other DNA
ttgaaacggtatttttggcaataggcactccctctaaagtaaactctgaaagtacaaaagacttaaatagaaaaa

SEQ ID NO: 411286 - DNA, 75 bp, synthetic construct
  source 1..75: mol_type = other DNA
catcgcgaaattattcgcagccatgatattagttgttttttttacttggggatttgaatggctaatcttcaagtt

SEQ ID NO: 411287 - DNA, 75 bp, synthetic construct
  source 1..75: mol_type = other DNA
ggcggtcaccgaattcgataataaagcgactcatggctatccgccagtcctgaagtggcatcgtccatttctgtg

SEQ ID NO: 411288 - DNA, 75 bp, synthetic construct
  source 1..75: mol_type = other DNA
cgaacaaaaagttattaccacaacgaagaaagctgtaccggtaaaacagacagtcacggcacccgtctcatacca

SEQ ID NO: 411289 - DNA, 75 bp, synthetic construct
  source 1..75: mol_type = other DNA
ttggcataaacgtctatgtcatcatctttcactcgcttcagaagatgagtggcaacgctgtgtagataaagtact

SEQ ID NO: 411290 - DNA, 75 bp, synthetic construct
  source 1..75: mol_type = other DNA
tcgtgaactttctgttcaggcaactaacggtactaactctgacagtgacctgacctccatccagtccgaaatcca

SEQ ID NO: 411291 - DNA, 75 bp, synthetic construct
  source 1..75: mol_type = other DNA
tcaactgaggatccgctggcgcttctggataaagctattgcatcagtcgacaaattccggtcttctctaggtgcc

SEQ ID NO: 411292 - DNA, 75 bp, synthetic construct
  source 1..75: mol_type = other DNA
agtgcagtatgcaaaacagcaggcggagatccagacgctgcgtaatcaactgcgcgatattcttggcgctgcgct

SEQ ID NO: 411293 - DNA, 75 bp, synthetic construct
  source 1..75: mol_type = other DNA
tatggtttcccaccgctatataatgatttccgcaaatatctggctacgtttctggcaaataatggaatgcgtggt

SEQ ID NO: 411294 - DNA, 75 bp, synthetic construct
  source 1..75: mol_type = other DNA
ggcaagaaaaagcacctggaatatttaagcaaagcctgtcaaaaacatcccgctgcggcttttgccgcttatgct

SEQ ID NO: 411295 - DNA, 75 bp, synthetic construct
  source 1..75: mol_type = other DNA
cggacgataaggtgacaaccgatgatccactggccgatgacaccagaacagacggcaaaggtgggcctgccgata

SEQ ID NO: 411296 - DNA, 75 bp, synthetic construct
  source 1..75: mol_type = other DNA
aaactggagtgcagtgcggtgatcgtgggaggttcgccggacgtctttattggcggtgagcaggtgacctatctg

SEQ ID NO: 411297 - DNA, 75 bp, synthetic construct
  source 1..75: mol_type = other DNA
aggcctgggggaacgctgttatcaccctgacggacagcaatgccggttttatggatcgcgtcagcgccggcgcat

SEQ ID NO: 411298 - DNA, 75 bp, synthetic construct
  source 1..75: mol_type = other DNA
tgacggcgcaacccgccagtttgtgccactggccgctaatcctcgcgtttgtgccataccgctacgccaaccgac

SEQ ID NO: 411299 - DNA, 75 bp, synthetic construct
  source 1..75: mol_type = other DNA
atttgagcgctttaccagacggtatttacgcccaggtggcggtctactctgatcatttcagccatgtctcggtga

SEQ ID NO: 411300 - DNA, 75 bp, synthetic construct
  source 1..75: mol_type = other DNA
taattataaagcggtttatgtcagaacagcagatacaattactgaaggtcagggtaacgcgactgcggattatcg

SEQ ID NO: 411301 - DNA, 75 bp, synthetic construct
  source 1..75: mol_type = other DNA
aatcaaaaaagatctggatttcccggaagccggtgaggacacggcgctctgcgacaaggagaacaaaccaccgag

SEQ ID NO: 411302 - DNA, 75 bp, synthetic construct
  source 1..75: mol_type = other DNA
atgatgatttatgaaaaattgaaagctatgaggaaagctgaagggctttctcaacaaaatgtatgtcaacttctt

SEQ ID NO: 411303 - DNA, 75 bp, synthetic construct
  source 1..75: mol_type = other DNA
tttctctggcagcatgaccattcccgcccggtgggcagtgtacggtgcgccgggtcagcgaagggctggaaatca

SEQ ID NO: 411304 - DNA, 75 bp, synthetic construct
  source 1..75: mol_type = other DNA
atggtgacatcctggagccggagggcgcggagtttggcagtgcgataccgtttctctggcagcatgaccattccc

SEQ ID NO: 411305 - DNA, 75 bp, synthetic construct
  source 1..75: mol_type = other DNA
tgaaaagagtcacggcagagaagaaatccgtattcatattgtttgcgatgtccctgatgaacttattgatttcac

SEQ ID NO: 411306 - DNA, 75 bp, synthetic construct
  source 1..75: mol_type = other DNA
cccgactgctccaacatgtgccatgaaccgaccagtgtgggtttggcagcgagtatcggtgtaggtaaagggacc

SEQ ID NO: 411307 - DNA, 75 bp, synthetic construct
  source 1..75: mol_type = other DNA
gcaagtgccgcaggtcggccctcattgcttgatgacgaatttattcaaacgagttgtttatcggcgagaaattac

SEQ ID NO: 411308 - DNA, 75 bp, synthetic construct
  source 1..75: mol_type = other DNA
gtaaaagtaatctgcttttcgcaattcgactggttattgatcccactctgcctgattcagccaggcagcttaagc

SEQ ID NO: 411309 - DNA, 75 bp, synthetic construct
  source 1..75: mol_type = other DNA
cctgagcccaaagaaccgccgaacccggacgataaggtgacaaccgatgatccactggccgatgacacccgaaca

SEQ ID NO: 411310 - DNA, 75 bp, synthetic construct
  source 1..75: mol_type = other DNA
atcgtcttggttattgattttggatttaatttaagcgccacaagagaaatatcacagaaaaaaaataactttgta

SEQ ID NO: 411311 - DNA, 75 bp, synthetic construct
  source 1..75: mol_type = other DNA
ctcatccgcatcagcagcccgcgccagacccggagttacagctacagcaccaccggcaggctgaccggcgttcac

SEQ ID NO: 411312 - DNA, 75 bp, synthetic construct
  source 1..75: mol_type = other DNA
agaaagagaagatcgagaatgcttcgaaactggccgacatcgtgcaaaaaacatctggcttctacggtggcgaac

SEQ ID NO: 411313 - DNA, 75 bp, synthetic construct
  source 1..75: mol_type = other DNA
gaagtcaccgcgaacgaactggccgcctccgtacagatcccgttcaccatactgtttggtcagcagaccgggcga

SEQ ID NO: 411314 - DNA, 75 bp, synthetic construct
  source 1..75: mol_type = other DNA
atcttggcgaagcgatgggcgataaggtcaataagcttaaccgcggtaccgatgcggcggccgtaatgcaggccg

SEQ ID NO: 411315 - DNA, 75 bp, synthetic construct
  source 1..75: mol_type = other DNA
cgttgaccaaaggaccgcaaacggtcctttgggggccgggtaactctgccgggacaattcgtttcgatcgcgagc

SEQ ID NO: 411316 - DNA, 75 bp, synthetic construct
  source 1..75: mol_type = other DNA
tatctttattatcaacatgatggctggcttccagtcctgtttggcaacgacgagcggacacttaacggtcattaa

SEQ ID NO: 411317 - DNA, 75 bp, synthetic construct
  source 1..75: mol_type = other DNA
agaagtaaagataataatcttgaagcattttatctcgcaacacctgatggacgatttgaggcgcttaataataaa

SEQ ID NO: 411318 - DNA, 75 bp, synthetic construct
  source 1..75: mol_type = other DNA
aaaacggtttatccccgctggcgcggggaacactccagccacgcgcgcccaccattaatagcgcccggtttatcc

SEQ ID NO: 411319 - DNA, 75 bp, synthetic construct
  source 1..75: mol_type = other DNA
tcttcggtgatgtttattgcaattgacatggacaagttaaagctaataaatgacaccctcggtcatcaggaaggg

SEQ ID NO: 411320 - DNA, 75 bp, synthetic construct
  source 1..75: mol_type = other DNA
cagaccagcaccccatccgccagcaccgacatgattctgctggtgaaatccaccatcaccaccagaaacagcagg

SEQ ID NO: 411321 - DNA, 75 bp, synthetic construct
  source 1..75: mol_type = other DNA
gactggtgccgtcagaacaatagtaagcgtgcagcaagaaccgtattgacggggatgtgttattcagtcggcagt

SEQ ID NO: 411322 - DNA, 75 bp, synthetic construct
  source 1..75: mol_type = other DNA
ttctgcgtcgtttgccgctgatcttgaagacaatagtaagcgtgcagcaagaaccgtattgacggggatgtgtta

SEQ ID NO: 411323 - DNA, 75 bp, synthetic construct
  source 1..75: mol_type = other DNA
atggctgtaagacagcataccccacgacttgcgcacacacaaacggtctttgtgtggcgttttctggcactaagt

SEQ ID NO: 411324 - DNA, 75 bp, synthetic construct
  source 1..75: mol_type = other DNA
atgatactttggtctctgaaaaaagaaaccgatatccgtcgtggaaggcattgtgttttcctgaggcatgttcac

SEQ ID NO: 411325 - DNA, 75 bp, synthetic construct
  source 1..75: mol_type = other DNA
atgatactttggtctatgaaaaaagaaaccgatatccggcggggaaggcattgtgttttcctgaggcatgttcac

SEQ ID NO: 411326 - DNA, 75 bp, synthetic construct
  source 1..75: mol_type = other DNA
cccgcgcagaagaacatgaacgccgaggtgctgaataaccgcaccacggatgtgataaacaaccatgctgagacc

SEQ ID NO: 411327 - DNA, 75 bp, synthetic construct
  source 1..75: mol_type = other DNA
atgccgttcaaagagttattaacacaccttatctgcctcggcgatgaagaaccgcaggtgacggcatatggcctg

SEQ ID NO: 411328 - DNA, 75 bp, synthetic construct
  source 1..75: mol_type = other DNA
gttacgtaaagaaaaagaagatgcaattaatcagataaatcatgtccgtaacgtactacaacaaatcaaacaaga

SEQ ID NO: 411329 - DNA, 75 bp, synthetic construct
  source 1..75: mol_type = other DNA
catcacgtgattatgtggcgctggctgatcgcaacagtattcatgctggaaatgagagaggaaaacggcactgtc

SEQ ID NO: 411330 - DNA, 75 bp, synthetic construct
  source 1..75: mol_type = other DNA
atcagataaaacacactgtaaggcagaataacctcacaaacgggtatgcatctttctggtttgcttcatcagcaa

SEQ ID NO: 411331 - DNA, 75 bp, synthetic construct
  source 1..75: mol_type = other DNA
atatttgcgcattcctgcgtgagcttgttaagcattctccaggcgatttcggttatcagcgttcccgctggagta

SEQ ID NO: 411332 - DNA, 75 bp, synthetic construct
  source 1..75: mol_type = other DNA
ttatcctggtgcaagtgtacttgatatgggctgcggagcagggcatgccagctttgtcgctgcgcaaaacgtgag

SEQ ID NO: 411333 - DNA, 75 bp, synthetic construct
  source 1..75: mol_type = other DNA
atgatactttggtctgtgaaaaaagaaaccgatatccgacgcggaaggcattgtgttttcctgaggcatgttcac

SEQ ID NO: 411334 - DNA, 75 bp, synthetic construct
  source 1..75: mol_type = other DNA
cactcgatattctgattgactggctgcgtgacaacattaactgcgacacaccgattatcttcgacaatgacgaag

SEQ ID NO: 411335 - DNA, 75 bp, synthetic construct
  source 1..75: mol_type = other DNA
ataaaacggattcggcagcactgttgccctgtatcgaacaggccagagaggatgtccttaccctgcgtcatctgc

SEQ ID NO: 411336 - DNA, 75 bp, synthetic construct
  source 1..75: mol_type = other DNA
ggccggatggaaactatgctattatggggcaaacagctaggataacaataggcggtaaggacaacggggtgtttg

SEQ ID NO: 411337 - DNA, 75 bp, synthetic construct
  source 1..75: mol_type = other DNA
ttcaagcaggccatggatagcggcctgcttcacatgccgttctatcagtccatttcggtggaaattattgattga

SEQ ID NO: 411338 - DNA, 75 bp, synthetic construct
  source 1..75: mol_type = other DNA
atgcaagatgttagtgttattcttaaattaattgccagaggcttgattgatatcagaactgcagctaactctgga

SEQ ID NO: 411339 - DNA, 75 bp, synthetic construct
  source 1..75: mol_type = other DNA
cacgccgttgccgttaatcgttcaggtaaatgtttgttcgacagagcattacccaacgacgaaaacaaactcaga

SEQ ID NO: 411340 - DNA, 75 bp, synthetic construct
  source 1..75: mol_type = other DNA
atcatacgctatcggctggttatgctcagggtaaggtacaggactttaagaatattaaaggagtgaatctgcaat

SEQ ID NO: 411341 - DNA, 75 bp, synthetic construct
  source 1..75: mol_type = other DNA
tcagccatgcactcggccactggccgcgtattctcccggcggctggggattcaggtgctgaagaaccgtcatcag

SEQ ID NO: 411342 - DNA, 75 bp, synthetic construct
  source 1..75: mol_type = other DNA
atgatactttggtctgtgaaaaaagaaaccgatatccgccgaggaaggcattgtgttttcctgaggcatgttcac

SEQ ID NO: 411343 - DNA, 75 bp, synthetic construct
  source 1..75: mol_type = other DNA
tgcagatcctgatctgctggctgcaggacaatatcgactgtggtacggaaatcatcttcgataacgacgatactc

SEQ ID NO: 411344 - DNA, 75 bp, synthetic construct
  source 1..75: mol_type = other DNA
cactcaacgttctgattgactggctgcagaacaacatcgattgtgggaacgtgattatcttcgacaacgacaatg

SEQ ID NO: 411345 - DNA, 75 bp, synthetic construct
  source 1..75: mol_type = other DNA
cttatgctgctggtgttattattaatccgtggggcaatatgtctgtaaatattgggtatgagggaactaaggcag

SEQ ID NO: 411346 - DNA, 75 bp, synthetic construct
  source 1..75: mol_type = other DNA
aaaaagcgacggaacctctattagaaattattcatgcacgtcaatggattgaagagaaaatgcgccttgccggct

SEQ ID NO: 411347 - DNA, 75 bp, synthetic construct
  source 1..75: mol_type = other DNA
gtcgaggggatgagtcgggagctgctgctggagaaaaaagacggcagtaaaatctggacccgttttgcgctatcg

SEQ ID NO: 411348 - DNA, 75 bp, synthetic construct
  source 1..75: mol_type = other DNA
gagtgctgtgtggcaatggttaaaagcgtcaattgtgaatacgaagaagaagacccgatagaagcgcgttacacg

SEQ ID NO: 411349 - DNA, 75 bp, synthetic construct
  source 1..75: mol_type = other DNA
acctgaaccgggaatggcaggtggtggcaagtgaactgcacggcgagcagccgcaggcggtgccgggaaggcggg

SEQ ID NO: 411350 - DNA, 75 bp, synthetic construct
  source 1..75: mol_type = other DNA
cgggctatcaggcggggttcggagaaaaccggggcgacatcagcaacagcggggcgtattttgaacagccgctgc

SEQ ID NO: 411351 - DNA, 75 bp, synthetic construct
  source 1..75: mol_type = other DNA
ctgcaccacatgcaggcggacacggtgcgctttgcgtatgaccgcagcggctggctgacggcagagcacagcgtg

SEQ ID NO: 411352 - DNA, 75 bp, synthetic construct
  source 1..75: mol_type = other DNA
aaggcgaccagcaatctccataccgaccggggagaacgaagccggacaacgtttgtgtgggaagggttccggctg

SEQ ID NO: 411353 - DNA, 75 bp, synthetic construct
  source 1..75: mol_type = other DNA
attaccgggactgcggcaacgggctgaagtttgatctggttgcgcagccagaattactggagcagtcctcctacg

SEQ ID NO: 411354 - DNA, 75 bp, synthetic construct
  source 1..75: mol_type = other DNA
cacacaaagtgctcgtcgcgaaccggggcgaaattgcggttcgcattatccgggcctgccatgaatacggttttg

SEQ ID NO: 411355 - DNA, 75 bp, synthetic construct
  source 1..75: mol_type = other DNA
taacggtgaagcttttagaacaagttacattgataatgaagaggaatgtttgcatatagatggagtttggcttat

SEQ ID NO: 411356 - DNA, 75 bp, synthetic construct
  source 1..75: mol_type = other DNA
agatcaccggagtactgaaagggtctttatctgaggatgtctttcaggacagaggcacgattgccggttcggtgc

SEQ ID NO: 411357 - DNA, 75 bp, synthetic construct
  source 1..75: mol_type = other DNA
gcgaggaaatcttctgtgatgaacatggccgagtgcgggtgaaattcaactgggaccgttataacccggcagacc

SEQ ID NO: 411358 - DNA, 75 bp, synthetic construct
  source 1..75: mol_type = other DNA
gccgttcaccgggaagaaggcatcagcacttacagcagttataacccgcgcggtcaactggtcagtcagagggat

SEQ ID NO: 411359 - DNA, 75 bp, synthetic construct
  source 1..75: mol_type = other DNA
ttacaaccttgccaaaaactggaagtatagatactgccagaacagtgcacagtggaatgcacacaggagattatg

SEQ ID NO: 411360 - DNA, 75 bp, synthetic construct
  source 1..75: mol_type = other DNA
atgtggatgggtgaaatgcagtgggcgataccttgctttggtcttgtaacctctttgtcactactggagaagtct

SEQ ID NO: 411361 - DNA, 75 bp, synthetic construct
  source 1..75: mol_type = other DNA
aggattattgcctgtgggtgggtaacacgactggccggaaggtggatttacccactgaggcgcagtgggaatatg

SEQ ID NO: 411362 - DNA, 75 bp, synthetic construct
  source 1..75: mol_type = other DNA
gttgcgtcagataattatcaccagcggtcgtcaaggtaatttggttgcgcacttttgctgggcgtcgggcggttg

SEQ ID NO: 411363 - DNA, 75 bp, synthetic construct
  source 1..75: mol_type = other DNA
gctgacggcacaacatcgcaggtggcgatttactccaatggtaatgcgggcatggtgatttacccgtttgctgaa

SEQ ID NO: 411364 - DNA, 75 bp, synthetic construct
  source 1..75: mol_type = other DNA
ccgtcacggaggctgacggcacaacgtcaaaagtagcgatttactccaatggcacggcggggattgtggtttacc

SEQ ID NO: 411365 - DNA, 75 bp, synthetic construct
  source 1..75: mol_type = other DNA
tcgcctaaagaactggaacatgattacgcagtaataagaacgctgcaaaaattacaaattcaagaagtttgtaac

SEQ ID NO: 411366 - DNA, 75 bp, synthetic construct
  source 1..75: mol_type = other DNA
aatttactcagcaataaaatccaatccaagcatgaggttgattatagtagatttcaaatgtgcaactcatattcg

SEQ ID NO: 411367 - DNA, 75 bp, synthetic construct
  source 1..75: mol_type = other DNA
caatcagttatttgttgtgtcaaacgtcgaacccgacagtcatggcggatctcgtcttgtcctcaatgtggtaaa

SEQ ID NO: 411368 - DNA, 75 bp, synthetic construct
  source 1..75: mol_type = other DNA
atgacagagcatcgcaacgcgacgggctttacctgtacctaccactgggaagagattgaaggtttcccgcgcgtg

SEQ ID NO: 411369 - DNA, 75 bp, synthetic construct
  source 1..75: mol_type = other DNA
tatttattcagcaataaagtctaatcctagcatgagattaattgtggtggattttaaatgcgccacacatataaa

SEQ ID NO: 411370 - DNA, 75 bp, synthetic construct
  source 1..75: mol_type = other DNA
cggtacgtggcggcaaggtgattgccagcacacaaccggcacaaaccaccgtatatctggagcagccagaagcca

SEQ ID NO: 411371 - DNA, 75 bp, synthetic construct
  source 1..75: mol_type = other DNA
cagttgatgggctacgggcagattaacgatggcctgaatttaatcacccaccacagcgcaaggacgttgaatttg

SEQ ID NO: 411372 - DNA, 75 bp, synthetic construct
  source 1..75: mol_type = other DNA
agagaaagtaacgtgcgcgtgttcgacatccagcacatcaaaggcatggagttcgaggcggtgttctttgtcagc

SEQ ID NO: 411373 - DNA, 75 bp, synthetic construct
  source 1..75: mol_type = other DNA
tccaatggctggtcatccagagttatttgccgacttagggacagaaactgttggtatagaacttgaacataatca

SEQ ID NO: 411374 - DNA, 75 bp, synthetic construct
  source 1..75: mol_type = other DNA
tgggcgttaattattccgcaaatgcggccagtagtacgtccgtagaaattacagggcgcgtcgtggctgcaactt

SEQ ID NO: 411375 - DNA, 75 bp, synthetic construct
  source 1..75: mol_type = other DNA
aacgttccggtcttgataagttatgtcgggatggggtttcaatacctgattttgatagtgacttcatacctgtca

SEQ ID NO: 411376 - DNA, 75 bp, synthetic construct
  source 1..75: mol_type = other DNA
tgttgagaccatagacttacccaaacgtatgcctggcacattgatacagtggaacattaaggttgatttagatga

SEQ ID NO: 411377 - DNA, 75 bp, synthetic construct
  source 1..75: mol_type = other DNA
gaacacccgcgccggtgggggtgtttggtcccggctggaaagcgcccttcgatatccgcttacagatacgcgatg

SEQ ID NO: 411378 - DNA, 75 bp, synthetic construct
  source 1..75: mol_type = other DNA
tcattgacaatcgttcaaaaaaaatgaccaatgaagaaatacttaattttttgaaaaaagttctcattaaacatg

SEQ ID NO: 411379 - DNA, 75 bp, synthetic construct
  source 1..75: mol_type = other DNA
acatcatagtaagcgtaaactgaccgccgtatgtagccatcagacgagaattggtaacttagacgcccatctgat

SEQ ID NO: 411380 - DNA, 75 bp, synthetic construct
  source 1..75: mol_type = other DNA
gctctgcctcaacaggcaaatggtgcggtatcatcttattctgatgctcttagcatcatgaatggcctgttctct

SEQ ID NO: 411381 - DNA, 75 bp, synthetic construct
  source 1..75: mol_type = other DNA
acctctatgacccgctgggccgccggacgggaaaacgggtatggcggcgggagcgtgacctgacggggtggatgt

SEQ ID NO: 411382 - DNA, 75 bp, synthetic construct
  source 1..75: mol_type = other DNA
atcaaaaatgtcatggcattgtgctggtggcggaaaataaacagcgagctaaccagctaatggaagagtctgcgc

SEQ ID NO: 411383 - DNA, 75 bp, synthetic construct
  source 1..75: mol_type = other DNA
tgggcaggcaccggctttggcaacctggcgataccgcgagtgggtcaggaggtgattgtggacttcctcaacggc

SEQ ID NO: 411384 - DNA, 75 bp, synthetic construct
  source 1..75: mol_type = other DNA
ttgaaagcatggttctctgaagatacccctttcacattagctggtttgattgccaggagtgacgatgataaagct

SEQ ID NO: 411385 - DNA, 75 bp, synthetic construct
  source 1..75: mol_type = other DNA
gattatcatgataagatagtatctttaagtttttcattacccttatctgcattactggcagataacagtaatata

SEQ ID NO: 411386 - DNA, 75 bp, synthetic construct
  source 1..75: mol_type = other DNA
aaaaaagacaattattacactcaagaaatataccgaaaacattctccaaatggagaatactctaattctaccaca

SEQ ID NO: 411387 - DNA, 75 bp, synthetic construct
  source 1..75: mol_type = other DNA
ttatccttgcctttgtttttttattatccggttgcggtggtgataatggtgaattagccggaatatatatagaaa

SEQ ID NO: 411388 - DNA, 75 bp, synthetic construct
  source 1..75: mol_type = other DNA
tacgtgaaatcgctgcaggcgatggatttcagcaccatcgctgataaaacctcatataacgccattgaatggccc

SEQ ID NO: 411389 - DNA, 75 bp, synthetic construct
  source 1..75: mol_type = other DNA
acattatgagtatcaacttttctattcctggtctcagggtattaacagcctcattatttttgatgctatccggtt

SEQ ID NO: 411390 - DNA, 75 bp, synthetic construct
  source 1..75: mol_type = other DNA
ccattatttactggaagacgcggtaaataattacatcaccgtaaaaaatatcattacggctgccggtatcgaaca

SEQ ID NO: 411391 - DNA, 75 bp, synthetic construct
  source 1..75: mol_type = other DNA
taggctcactactcgcgacaacggtcgtaccttccactaactacacatcaggtggcgcgtcaggaagctccgtac

SEQ ID NO: 411392 - DNA, 75 bp, synthetic construct
  source 1..75: mol_type = other DNA
gccgggtgtacacctgatattcattgaagaaccagaagcccatctgcatccacaaatgcaggaggtttttattcg

SEQ ID NO: 411393 - DNA, 75 bp, synthetic construct
  source 1..75: mol_type = other DNA
cgctattcaggttatagcggaatcgcattaccggagtcatataacggtcttggtacacgtaatctgatatttatt

SEQ ID NO: 411394 - DNA, 75 bp, synthetic construct
  source 1..75: mol_type = other DNA
ggtggcggcgtggagtctggcgaacgaattgaagaggcactacgccgcgaaattcgcgaagaactgggagaatag

SEQ ID NO: 411395 - DNA, 75 bp, synthetic construct
  source 1..75: mol_type = other DNA
tggcgttctcactattgcaacgacgcatactcaggcacgttatagcttgcctgaggtcattaaagcttttcgcta

SEQ ID NO: 411396 - DNA, 75 bp, synthetic construct
  source 1..75: mol_type = other DNA
tcggcacgtcaccatcgaccacaggcattaaagcctggatatttcgggagggcaggtatcaggaggcagtgtata

SEQ ID NO: 411397 - DNA, 75 bp, synthetic construct
  source 1..75: mol_type = other DNA
cggttgctgcaggggctactatgtcagtatctggtgtggcaaatgcatttacctctgcgtttcctggaggggata

SEQ ID NO: 411398 - DNA, 75 bp, synthetic construct
  source 1..75: mol_type = other DNA
agcaggatcttaacgtcacccttgagcacgattactggggatcgagcggcaccggtggttactccgacctgaaag

SEQ ID NO: 411399 - DNA, 75 bp, synthetic construct
  source 1..75: mol_type = other DNA
tgcgggagccaactaacgccgatgccattcttggtctgacggaagtggatattgctgccggtgacaaagcggcag

SEQ ID NO: 411400 - DNA, 75 bp, synthetic construct
  source 1..75: mol_type = other DNA
agctgaagcggaagcgatgctgcgccaacaaccaccttccacgcgtattgatctcacgctggctgactgggcgca

SEQ ID NO: 411401 - DNA, 75 bp, synthetic construct
  source 1..75: mol_type = other DNA
tgatattggcaaatatgttgtcatggcaatggcaagttcgcttattatgccagcggccttacttttagtacgaaa

SEQ ID NO: 411402 - DNA, 75 bp, synthetic construct
  source 1..75: mol_type = other DNA
gttgtgatgcctgttataactgttatcgcactgttagtttatttttcgcgggatgttttaatttccattctcttt

SEQ ID NO: 411403 - DNA, 75 bp, synthetic construct
  source 1..75: mol_type = other DNA
tctacgtgcggtattccgccgccggatggcagggcgacatggatttaccgccgcagccgctgataccttacgccg

SEQ ID NO: 411404 - DNA, 75 bp, synthetic construct
  source 1..75: mol_type = other DNA
ggtgatgccatggtgctcggtgccggagaggcattcaccaacaatggaacgctgactgccggtaaaggcaacagt

SEQ ID NO: 411405 - DNA, 75 bp, synthetic construct
  source 1..75: mol_type = other DNA
tgggcgatgaacaacggatataaccatttcagcggaacggataccggtccgctggctgctgtcagggcaacggac

SEQ ID NO: 411406 - DNA, 75 bp, synthetic construct
  source 1..75: mol_type = other DNA
tgaaactgattgctgccctcacgaatcatggtaccctggccgcagggaaaacccttgccgtcacgtcgcaaaatg

SEQ ID NO: 411407 - DNA, 75 bp, synthetic construct
  source 1..75: mol_type = other DNA
aaccagggcaaatgggcgcaggcggcagcacttcagcgccagcgactggcgctcgatcccggcagtgtgtggatt

SEQ ID NO: 411408 - DNA, 75 bp, synthetic construct
  source 1..75: mol_type = other DNA
agcagtcgccggaaaaagccgaagcatttatcgcctcgctctctgccagccagcggcgcagcgttgatgacatcg

SEQ ID NO: 411409 - DNA, 75 bp, synthetic construct
  source 1..75: mol_type = other DNA
gtaactcattcggatatttatcattttactgataagtgttatttaaattactcacgagaagttttgagaaacata

SEQ ID NO: 411410 - DNA, 75 bp, synthetic construct
  source 1..75: mol_type = other DNA
cacggcgacgcacgttatctggtttatggcgggatcctgtttgccgcgtgggggaaatcggcccagctaccgatg

SEQ ID NO: 411411 - DNA, 75 bp, synthetic construct
  source 1..75: mol_type = other DNA
ttaacctactggatttaaagaaaagtttgataaccattgatgctatgggctgtcagaaagatatcgcttctaaaa

SEQ ID NO: 411412 - DNA, 75 bp, synthetic construct
  source 1..75: mol_type = other DNA
acaacaaggaaaggttaaacataaattatctgctattttgtttctcaccgtatgtgcagtaattgcaggtgccga

SEQ ID NO: 411413 - DNA, 75 bp, synthetic construct
  source 1..75: mol_type = other DNA
taaataatgatgtgtataaagaactgaaaaagtttatgcacgattacgacaaaacatccccggaaatgagaaaat

SEQ ID NO: 411414 - DNA, 75 bp, synthetic construct
  source 1..75: mol_type = other DNA
gaaacaatcggatatataacactaccctcagctttttcaaaatatggaaattcattaatcgaagatgctttcgat

SEQ ID NO: 411415 - DNA, 75 bp, synthetic construct
  source 1..75: mol_type = other DNA
ggcagcttcaccaccctgaactggcagttccgtcatgagcaacaggtttacggaccagtatccctgctggcatct

SEQ ID NO: 411416 - DNA, 75 bp, synthetic construct
  source 1..75: mol_type = other DNA
tatggctccagaagtaagaggtaaagttatgcttttcggacattggttaggtcagagagaaattccagatccata

SEQ ID NO: 411417 - DNA, 75 bp, synthetic construct
  source 1..75: mol_type = other DNA
ggcgctggcaccttcggtgtcggaggataattgcccggattacattcgtgaagcactggagtatatctgcgatgc

SEQ ID NO: 411418 - DNA, 75 bp, synthetic construct
  source 1..75: mol_type = other DNA
tcccctcgatatgcttgggatcacggtgtgctcgatcggtggaacaaatttcactccgtatgtgaagctcctggg

SEQ ID NO: 411419 - DNA, 75 bp, synthetic construct
  source 1..75: mol_type = other DNA
gcctagtctaccgttatttcctgggtactgacggggagaatggtgatgaaagggcaccgctgacaacgatcctga

SEQ ID NO: 411420 - DNA, 75 bp, synthetic construct
  source 1..75: mol_type = other DNA
atccaatatatcatgttttgaaagcgacttatcaaacaccatctttgtcaaatggagaaattaataatctcttca

SEQ ID NO: 411421 - DNA, 75 bp, synthetic construct
  source 1..75: mol_type = other DNA
attgattgtcgtgattggtgcaattctgatatggcctatagtgaatattggttatttaatatcagtgccggaaat

SEQ ID NO: 411422 - DNA, 75 bp, synthetic construct
  source 1..75: mol_type = other DNA
tttggtctggtttattgtatttccacttattataaatattggaaccatgcctcttttttcaataaatattgcgat

SEQ ID NO: 411423 - DNA, 75 bp, synthetic construct
  source 1..75: mol_type = other DNA
tcaggtgtcatggatgattcgttttttgtaggaccaattgcaaataatgctgaggtaaaaaaccttggcttattt

SEQ ID NO: 411424 - DNA, 75 bp, synthetic construct
  source 1..75: mol_type = other DNA
atgacatcaatgcgacagtatgattcaggttcgtgttctgaatcatgtgaagcattttcatgtcagcttggattt

SEQ ID NO: 411425 - DNA, 75 bp, synthetic construct
  source 1..75: mol_type = other DNA
ctgcattaacagagctttttgaagcattcggtaaagcctttgagaaggtaacacacggtatgagtcctagccaaa

SEQ ID NO: 411426 - DNA, 75 bp, synthetic construct
  source 1..75: mol_type = other DNA
ttcccagaaaatattattccagtaacagatagtaaatcggatggtataatttatttggccataagcaaagataat

SEQ ID NO: 411427 - DNA, 75 bp, synthetic construct
  source 1..75: mol_type = other DNA
atgcttcccctctctcatccgccagagaagtatcagtccgttgtgtgcaattccgttctgcatgatgaagagatt

SEQ ID NO: 411428 - DNA, 75 bp, synthetic construct
  source 1..75: mol_type = other DNA
cgtggccgttatgtgagcctgatggcggggccggtctggcaggtcagtgagcagctcagcctttatggcatggcc

SEQ ID NO: 411429 - DNA, 75 bp, synthetic construct
  source 1..75: mol_type = other DNA
cattctccgtggtgaggaaaatatctccattaatagtgataccctggtaacactacagaaattcggtgatgctgc

SEQ ID NO: 411430 - DNA, 75 bp, synthetic construct
  source 1..75: mol_type = other DNA
cgctgaacacgctcagtattgaccctaataaccccaaccagattattgccgaacaggtactaccggaggatgtag

SEQ ID NO: 411431 - DNA, 75 bp, synthetic construct
  source 1..75: mol_type = other DNA
cctcatggactacgactgaatttctaagctggctgagtgttcagggagctttcagtaccccctattggatgtgta

SEQ ID NO: 411432 - DNA, 75 bp, synthetic construct
  source 1..75: mol_type = other DNA
attttgttgggcgattaacacgtaatgaagtaaatgagtattattctaaagttgatgttttactatttccctcta

SEQ ID NO: 411433 - DNA, 75 bp, synthetic construct
  source 1..75: mol_type = other DNA
aactataatattagtgatattgagtttatagaatatccattaataaaaaaacgctggctgcgtaggataaaattt

SEQ ID NO: 411434 - DNA, 75 bp, synthetic construct
  source 1..75: mol_type = other DNA
gaaactggaccgagagtaattttggaggcgatgtctgaaggatgtgtttgcctgtcaactgatgttggttacgtg

SEQ ID NO: 411435 - DNA, 75 bp, synthetic construct
  source 1..75: mol_type = other DNA
agttatcagggattgtcgacgcctggcagcaggcgacagccagcggcaaacatattgatgaactactggcgacag

SEQ ID NO: 411436 - DNA, 75 bp, synthetic construct
  source 1..75: mol_type = other DNA
gattgagggagccacgttcgggctggataacgttgatccggcggtttttatcgatgctgaggtggataccttcga

SEQ ID NO: 411437 - DNA, 75 bp, synthetic construct
  source 1..75: mol_type = other DNA
cgcaactggtgacgcctgccgtgtttgtggatgtaccgggctgggacaaggctcagtttgctgacgggcagatgc

SEQ ID NO: 411438 - DNA, 75 bp, synthetic construct
  source 1..75: mol_type = other DNA
aataggttaagctttggtttttctccggaagatagttactgttatgagattaaaattccttgtgatattcaaagg

SEQ ID NO: 411439 - DNA, 75 bp, synthetic construct
  source 1..75: mol_type = other DNA
caaatgcttctgaatccttaaagaagcaactctgggcaatttatgcatttgatcagtttgtatataacattgaca

SEQ ID NO: 411440 - DNA, 75 bp, synthetic construct
  source 1..75: mol_type = other DNA
acgatgggcagcctggctcgcgcatcatgggagaaactggcggtgctggcggcggcgatggcgattgttttaccc

SEQ ID NO: 411441 - DNA, 75 bp, synthetic construct
  source 1..75: mol_type = other DNA
gcctcagcgttccccgacacactgcccggtaccgaatacggccccgacaggggtatccgcctttcggcggtgtgg

SEQ ID NO: 411442 - DNA, 75 bp, synthetic construct
  source 1..75: mol_type = other DNA
ctgatgctgccggggaaaggcgtaacgaaaaaacagcctccgttaccggatagcaagcaggctgaatgcagttta

SEQ ID NO: 411443 - DNA, 75 bp, synthetic construct
  source 1..75: mol_type = other DNA
ctgatgctgccggggaaaggcgtaacgaaaaaacagcctccgttaccggatagcaagtaggctgaatgtagttta

SEQ ID NO: 411444 - DNA, 75 bp, synthetic construct
  source 1..75: mol_type = other DNA
ctgatgctgccggggaaaggcgtaacgaaaaaacagcctccgttaccggatagcaagaaggctgaatgaagttta

SEQ ID NO: 411445 - DNA, 75 bp, synthetic construct
  source 1..75: mol_type = other DNA
tatggcttttctcccgaggatagtttttgtcataggatttttcttcctaagaatattgaattttataaacatgct

SEQ ID NO: 411446 - DNA, 75 bp, synthetic construct
  source 1..75: mol_type = other DNA
gggcggctaaataaagccttcgaggaaaaatttccgctgaaagaattaaataatcccaagcatgacagttacgca

SEQ ID NO: 411447 - DNA, 75 bp, synthetic construct
  source 1..75: mol_type = other DNA
ctgatgctgccggggaaaggcgtaacgaaaaaacagcctccgttaccggatagcaaggaggctgaatggagttta

SEQ ID NO: 411448 - DNA, 75 bp, synthetic construct
  source 1..75: mol_type = other DNA
atgagcgctacctatttcacgctattaaccactactggcgaatccgcgctggcgaccgccaccacacagggttca

SEQ ID NO: 411449 - DNA, 75 bp, synthetic construct
  source 1..75: mol_type = other DNA
ttccggaatccgtcacgtcttcactctgtgctgcgcattccgcagaatattatccgcttgcaaccgttgcatttt

SEQ ID NO: 411450 - DNA, 75 bp, synthetic construct
  source 1..75: mol_type = other DNA
tgtacagctgaagagtctgggcgttattggattttctgctggcggccatgtagcttcatggctggttaccaacaa

SEQ ID NO: 411451 - DNA, 75 bp, synthetic construct
  source 1..75: mol_type = other DNA
aataaagaaagagttaacaaaaaaataactggccgtttccctaataaaaaagaactaaaagaaaataatgaagtt

SEQ ID NO: 411452 - DNA, 75 bp, synthetic construct
  source 1..75: mol_type = other DNA
acccggttatcaatagcgatcatcagcatttaactatcatcggcgtgatgattgagcaccgaatttaccgcagaa

SEQ ID NO: 411453 - DNA, 75 bp, synthetic construct
  source 1..75: mol_type = other DNA
ttaccacgctttaagggtatcagttttgtattccctgccactcggctgtctcttatacacaaatccccacccggg

SEQ ID NO: 411454 - DNA, 75 bp, synthetic construct
  source 1..75: mol_type = other DNA
gggattaccattatagctttaatctttggtgtaacactatatagtgtatttatcttatattatttatatggtgat

SEQ ID NO: 411455 - DNA, 75 bp, synthetic construct
  source 1..75: mol_type = other DNA
tcatattgtttgcgatgtccctgatgaacttattgatttcacgtttgaatggaaaggactgaaaattcacaatgt

SEQ ID NO: 411456 - DNA, 75 bp, synthetic construct
  source 1..75: mol_type = other DNA
cggaagttcagcccggtcagttaccgcgcacatggcctgaggtgtactggcaatagcggacaccatcatttgttc

SEQ ID NO: 411457 - DNA, 75 bp, synthetic construct
  source 1..75: mol_type = other DNA
acggacacactggggatggtgacgtcattcagctatgcaggagacaagaatcgccagctgacccattacagcgat

SEQ ID NO: 411458 - DNA, 75 bp, synthetic construct
  source 1..75: mol_type = other DNA
catgtttatccacgtgatgtatcacctattttgataccaatcccctgcccggataccccagaaaaatcccttgcc

SEQ ID NO: 411459 - DNA, 75 bp, synthetic construct
  source 1..75: mol_type = other DNA
gcgccactggacagcccggcattcaccggcacgcccaccacaccaaccccaccggacgatgctgccggtctggaa

SEQ ID NO: 411460 - DNA, 75 bp, synthetic construct
  source 1..75: mol_type = other DNA
tggtggcgcaggcgcagcagagcgcggaagcggcagcggaaagcgagcgtctggccgggcaacatgtcgctgacg

SEQ ID NO: 411461 - DNA, 75 bp, synthetic construct
  source 1..75: mol_type = other DNA
tcgcgcaaaaatggactatgaccatttagtcagccagatccaacagttgggcgggctggaaggttttatcgccaa

SEQ ID NO: 411462 - DNA, 75 bp, synthetic construct
  source 1..75: mol_type = other DNA
taactattgttctaaagcttatcgaaaacatttttcgggttcagaaagaattttaattaaagatggctttgaaaa

SEQ ID NO: 411463 - DNA, 75 bp, synthetic construct
  source 1..75: mol_type = other DNA
acttccctggtttagggacagttaaaaaattgtctatgattcaccatatagaaaccctagccgatttcatggatg

SEQ ID NO: 411464 - DNA, 75 bp, synthetic construct
  source 1..75: mol_type = other DNA
agacactgctaatgtaatggctgaggcaggttttactccaattatagagcctgtgagagaggctctcaatggtct

SEQ ID NO: 411465 - DNA, 75 bp, synthetic construct
  source 1..75: mol_type = other DNA
agttgaagctgaaagggccgcagaaatgggtaactttcaccttcggggacatcgtgcaatgggcgaatatgagcc

SEQ ID NO: 411466 - DNA, 75 bp, synthetic construct
  source 1..75: mol_type = other DNA
tggcgtaacgatgtggaattacagcaatcgtgtaatacaagcaacatcccaccaaatactgcaaatgacgacata

SEQ ID NO: 411467 - DNA, 75 bp, synthetic construct
  source 1..75: mol_type = other DNA
tgaataattatatcaaaagggatgcggactacagcacgggcatggctgttactccactggttcctgaagaggttc

SEQ ID NO: 411468 - DNA, 75 bp, synthetic construct
  source 1..75: mol_type = other DNA
aaattaaaatcccattgcaggaaacaccaactaactgtggctttgaaggactggcttactcccctcaggaccata

SEQ ID NO: 411469 - DNA, 75 bp, synthetic construct
  source 1..75: mol_type = other DNA
ggtcagcgcagagcaataccttatttagcactatcaacaaacctgcaaccatcgttgaaatgacgaccgagggtg

SEQ ID NO: 411470 - DNA, 75 bp, synthetic construct
  source 1..75: mol_type = other DNA
atggatgacagcggcaacatctatatcgttggcgaacccaatcttttttatcgctttacgtcgacaaaatcacga

SEQ ID NO: 411471 - DNA, 75 bp, synthetic construct
  source 1..75: mol_type = other DNA
tgtatatgaacgagcccagactttacgcccgccaggcgctggaacgctttcgcgcgctgctgccggaggatgagt

SEQ ID NO: 411472 - DNA, 75 bp, synthetic construct
  source 1..75: mol_type = other DNA
tggtcattatatgaaaacatccagtgacctaaaaatattaacagaaaaactcaacgtattcacaatacttgaagc

SEQ ID NO: 411473 - DNA, 75 bp, synthetic construct
  source 1..75: mol_type = other DNA
aaggtacactggatgtcaaagtgagcgaagaagatggacgggtgaataacttccaggtttcagcggcctctaccc

SEQ ID NO: 411474 - DNA, 75 bp, synthetic construct
  source 1..75: mol_type = other DNA
gcaaaaaataagtctgtgtttctgtatatgaagtccagtcaaggaacgcgttatgtcgatcccgaattttccggt

SEQ ID NO: 411475 - DNA, 75 bp, synthetic construct
  source 1..75: mol_type = other DNA
tcttttgtcttaattaatgaggggaacgaacaaaagcgatactccctcaacgaagcccttgagtcagcccgggaa

SEQ ID NO: 411476 - DNA, 75 bp, synthetic construct
  source 1..75: mol_type = other DNA
tacctctacgacccgctgggccgccggacggggaaacgggtgtggcgtcgcgggcgtgacctgacgggatggatg

SEQ ID NO: 411477 - DNA, 75 bp, synthetic construct
  source 1..75: mol_type = other DNA
ctactcattcgagcgtggtaaggatgcggtcaatcagtatttctcagcaactttcaagggaacagaccagatcat

SEQ ID NO: 411478 - DNA, 75 bp, synthetic construct
  source 1..75: mol_type = other DNA
gatgagttaattctcggttatggtgttgatcctgaaagtttcaaagagaaacctgccgaaccaccatcaggattg

SEQ ID NO: 411479 - DNA, 75 bp, synthetic construct
  source 1..75: mol_type = other DNA
cggcggtggatgtggagtgggatgtggactcatcaacgggtaaggatcgttggcaaaagcgtaaacctgctgaaa

SEQ ID NO: 411480 - DNA, 75 bp, synthetic construct
  source 1..75: mol_type = other DNA
caattgtattgctcggcgacggtagaatgcgccgtcttacccctgtcgaatgtgaaaggctgcaaggttttcctg

SEQ ID NO: 411481 - DNA, 75 bp, synthetic construct
  source 1..75: mol_type = other DNA
agccttttccatctgccgttcttgcgcaccgttggcctcatgtcgccaatcttggcgacatgacaaaacttgcca

SEQ ID NO: 411482 - DNA, 75 bp, synthetic construct
  source 1..75: mol_type = other DNA
tttgcagtggaattgaagctgcgagtattgcctgggaacctttgggtatgcgtccggcctggtttgctgaaactg

SEQ ID NO: 411483 - DNA, 75 bp, synthetic construct
  source 1..75: mol_type = other DNA
ggaaataccagcaataccagatactgctgaggtttttgaatgtaatgggaataatataaaagaaattaggtactt

SEQ ID NO: 411484 - DNA, 75 bp, synthetic construct
  source 1..75: mol_type = other DNA
gagttgctggacaagttaaccaaaattacagatgccaggctttgcaaaggcttcagtgactgggctagttcagtc

SEQ ID NO: 411485 - DNA, 75 bp, synthetic construct
  source 1..75: mol_type = other DNA
ctttaagtttgaagagcaaaaacgcctggtgtctctgttgacggatgctcatcgccgaggtgcaaaggttctcat

SEQ ID NO: 411486 - DNA, 75 bp, synthetic construct
  source 1..75: mol_type = other DNA
aatccggcggccagcgtctggggtaatgtgggcgtgcagctgggtgataatggctacaatgacaccgcagtgatg

SEQ ID NO: 411487 - DNA, 75 bp, synthetic construct
  source 1..75: mol_type = other DNA
gttatccgaattgttattcttaaccgctaaaaaatgtgctctccataaaagtctgtcctacaaattcattaaaga

SEQ ID NO: 411488 - DNA, 75 bp, synthetic construct
  source 1..75: mol_type = other DNA
accaaagatattatgggagtcaaaacgcgcggtgaaatattaaaagatcggttatccgaattgttattcttaacc

SEQ ID NO: 411489 - DNA, 75 bp, synthetic construct
  source 1..75: mol_type = other DNA
ctgaaagataataatccagctatctttgatgaaattgtaacaaacaaagggaaggctcaaccttcgttgacctac

SEQ ID NO: 411490 - DNA, 75 bp, synthetic construct
  source 1..75: mol_type = other DNA
gttaaccgcatatatatttgccatatttccccagacgttaccgaaatgggggatggccatctgggatgcggcagg

SEQ ID NO: 411491 - DNA, 75 bp, synthetic construct
  source 1..75: mol_type = other DNA
cttagcaaaaaagttccctatcatttatttcatcttgttcaccgtttgttccccgtcttttatctggcaattgcc

SEQ ID NO: 411492 - DNA, 75 bp, synthetic construct
  source 1..75: mol_type = other DNA
cattattcattgatttaggcgcgcagaaacgtcccactgtgatttctattgttggtgctggggggaaaaccagct

SEQ ID NO: 411493 - DNA, 75 bp, synthetic construct
  source 1..75: mol_type = other DNA
aacttggcgtaaatggcaacctgaatccagcggccagcgtctgggggaatgtggcgtgcagctgggtgataatgg

SEQ ID NO: 411494 - DNA, 75 bp, synthetic construct
  source 1..75: mol_type = other DNA
aagcggcgaaatacacgtggatattccagccacaggcacaggctatctggatgggcgtcgatcataatgcgcaca

SEQ ID NO: 411495 - DNA, 75 bp, synthetic construct
  source 1..75: mol_type = other DNA
atgaaactgaaaaaactccccgggtttagtttaggacttattgctctggcggtgggtaatgcatatgctgaacag

SEQ ID NO: 411496 - DNA, 75 bp, synthetic construct
  source 1..75: mol_type = other DNA
agtaaaaaatggagaagtaaaatatattgataatgcgctagttataacaacgggtaatggaagttacggggtatc

SEQ ID NO: 411497 - DNA, 75 bp, synthetic construct
  source 1..75: mol_type = other DNA
tggtatctgactaacttccaggcaacgagcggcggtgaaacaaactccggaggaagttcagcgcctactgttgcg

SEQ ID NO: 411498 - DNA, 75 bp, synthetic construct
  source 1..75: mol_type = other DNA
aagatattgataatgcgctagttataacaacgggtaatggaagttacggggtatctgttgcaggagagggtagca

SEQ ID NO: 411499 - DNA, 75 bp, synthetic construct
  source 1..75: mol_type = other DNA
ccattctttgatgaattacaaccattatataataaattactagggaaagatgcagagcaattgtattcatttaca

SEQ ID NO: 411500 - DNA, 75 bp, synthetic construct
  source 1..75: mol_type = other DNA
ggtgatgattataccgcaggcgattttttcgatagcgtcagctttcgtggcgtgcaactggcatcagatgacaac

SEQ ID NO: 411501 - DNA, 75 bp, synthetic construct
  source 1..75: mol_type = other DNA
tgatgatgaagatacgccgatgtggtcgcgttattacaatttgttttacaccaaacgtggcaaactgcaggtcaa

SEQ ID NO: 411502 - DNA, 75 bp, synthetic construct
  source 1..75: mol_type = other DNA
gctggggcgaagctcccgatcaaatttgtcatatcaattaccagcttaccgaacaacaaattaactctgcgatta

SEQ ID NO: 411503 - DNA, 75 bp, synthetic construct
  source 1..75: mol_type = other DNA
aaaaagcaatgctcagataacaattaaacaaaacggctataccatctaccaaacctatgtttcgcctggtgcttt

SEQ ID NO: 411504 - DNA, 75 bp, synthetic construct
  source 1..75: mol_type = other DNA
caatatgctgaatattaccgtgccgccatgtttggtctgggatttaacctcggcgatttcggagcaatttcgttc

SEQ ID NO: 411505 - DNA, 75 bp, synthetic construct
  source 1..75: mol_type = other DNA
gggtattaatgaaaacatcaaagcagggtatatataccgctgcgttttggcgcgatagcgacgctggacggcata

SEQ ID NO: 411506 - DNA, 75 bp, synthetic construct
  source 1..75: mol_type = other DNA
ttaggtatagcaaagacagactcagatgattggttctctcaatggcaatttacatgcatactattatcaataatt

SEQ ID NO: 411507 - DNA, 75 bp, synthetic construct
  source 1..75: mol_type = other DNA
gttgagtgtgcacagcatccgaacgctgacaaactgcgtgtgacaaaagtgaatgtcggcggcgatcgcctgctg

SEQ ID NO: 411508 - DNA, 75 bp, synthetic construct
  source 1..75: mol_type = other DNA
tcattacgaactattgggaggtgtctggataaaagggagtatctaaaattagcaataaagcttgaaaactgttgg

SEQ ID NO: 411509 - DNA, 75 bp, synthetic construct
  source 1..75: mol_type = other DNA
ttataacagcgaaggaaaaaccgccaacggcagcgccagcatggattacaagggtgcgtttggtgatgccagagt

SEQ ID NO: 411510 - DNA, 75 bp, synthetic construct
  source 1..75: mol_type = other DNA
aaatacgaattgattgggctgatggcctatcctatccgccacagtttatcgcctgaaatgcagaataaagcctaa

SEQ ID NO: 411511 - DNA, 75 bp, synthetic construct
  source 1..75: mol_type = other DNA
tggtgagttcgcaatgtctggcaataacgtttctgatgggttatttgccagcccggagcgcgatattgccgccag

SEQ ID NO: 411512 - DNA, 75 bp, synthetic construct
  source 1..75: mol_type = other DNA
gggtataccgctgcgttttggcgcgatagcgacgctggacggcgtacagactaatagcggcataattgatgatga

SEQ ID NO: 411513 - DNA, 75 bp, synthetic construct
  source 1..75: mol_type = other DNA
aactgttgtcaacgattccgcaaacagagtaggtagagattacgatattgtcattacgctttccggactactcga

SEQ ID NO: 411514 - DNA, 75 bp, synthetic construct
  source 1..75: mol_type = other DNA
acttgaacttatcaatagtaaaaaaccagatttcgtagcggttgggcaagctgggttccaaggctacgtgatatt

SEQ ID NO: 411515 - DNA, 75 bp, synthetic construct
  source 1..75: mol_type = other DNA
ggatacagcatggcgagccactggtcgagagccgctacctctacgacccgctgggacggcgaatggcaaaacggg

SEQ ID NO: 411516 - DNA, 75 bp, synthetic construct
  source 1..75: mol_type = other DNA
atgccaggctttgcaaaggtttcagtgactgggctagttcagtcaaagaaggcgcatcgaatgacttgaaagaaa

SEQ ID NO: 411517 - DNA, 75 bp, synthetic construct
  source 1..75: mol_type = other DNA
ctgatagcgtacactttcatgtaaggaattttaaaagtttatttgattttattgaaaggcataagatatatcata

SEQ ID NO: 411518 - DNA, 75 bp, synthetic construct
  source 1..75: mol_type = other DNA
ataatataaaagaaattaggtacttccccaaaaatctgaaagaagcgcatattgaatataatgatattgaggttg

SEQ ID NO: 411519 - DNA, 75 bp, synthetic construct
  source 1..75: mol_type = other DNA
gctcagcagtccgtcggggatgagtgacaatggcgcggattcggtgtgggggattaacgtccggcatcatgtggt

SEQ ID NO: 411520 - DNA, 75 bp, synthetic construct
  source 1..75: mol_type = other DNA
aggtggtggagcaaatcctgacggaacacgggctgaaaggctgggagtatgagttcagcctcaaaaggacatatc

SEQ ID NO: 411521 - DNA, 75 bp, synthetic construct
  source 1..75: mol_type = other DNA
cccggaaactcaggggagaaggcgctgagctgaggactgatgactggataagtatccggggaggaaaaggaatat

SEQ ID NO: 411522 - DNA, 75 bp, synthetic construct
  source 1..75: mol_type = other DNA
atgattccgatgcctttgtgctggcctctgactatgaaggttttgctcttgtcgttgccgaagctatggcatgtg

SEQ ID NO: 411523 - DNA, 75 bp, synthetic construct
  source 1..75: mol_type = other DNA
tgttgatcagacaaaactctccagatattgtgcattcgcatatgtttcatgccaatatcttggtacgtttcgtaa

SEQ ID NO: 411524 - DNA, 75 bp, synthetic construct
  source 1..75: mol_type = other DNA
ttccgctctattcgatcacggattggcatcgaagttcgatcagcgattcgcatccattcgatcaaccgggaactt

SEQ ID NO: 411525 - DNA, 75 bp, synthetic construct
  source 1..75: mol_type = other DNA
agtatggagtacgatgctgccggacgtgtcatcagtctgactaacgagaacggcagtcacagcgacttcagctac

SEQ ID NO: 411526 - DNA, 75 bp, synthetic construct
  source 1..75: mol_type = other DNA
ggtgctggaacgcctgggctgggcgccgttccgcgcctccagcgacctgcaactggtgccgattcgccagctcgc

SEQ ID NO: 411527 - DNA, 75 bp, synthetic construct
  source 1..75: mol_type = other DNA
agcgacccggagtattactttgttgtggttctggcggggcagtcaaacagcatggcatatggtgaaggccttccg

SEQ ID NO: 411528 - DNA, 75 bp, synthetic construct
  source 1..75: mol_type = other DNA
gttaattaaagaggactgcggagaacatttccttgctttcctagaccgggatattaatcctctgggtagtggttt

SEQ ID NO: 411529 - DNA, 75 bp, synthetic construct
  source 1..75: mol_type = other DNA
gtcggagaacttgagccatatattgataagatggatgcagcttcgaaagtaaaaatagccctagctcagaataaa

SEQ ID NO: 411530 - DNA, 75 bp, synthetic construct
  source 1..75: mol_type = other DNA
tgaaaaagtatgcgaggttattaaacaagttgccgttcaagaaggttgggatgctacgcagtgtagaaactataa

SEQ ID NO: 411531 - DNA, 75 bp, synthetic construct
  source 1..75: mol_type = other DNA
aaaccgccatggcagctaatatgctgggtgttgacgtcattaatctcgctaatgaaggttgtttgtgcctgtttg

SEQ ID NO: 411532 - DNA, 75 bp, synthetic construct
  source 1..75: mol_type = other DNA
tgaagtctatatgattgaagctgatggaacacacacagaagtcgaggaattatatggcgcagaattacccagact

SEQ ID NO: 411533 - DNA, 75 bp, synthetic construct
  source 1..75: mol_type = other DNA
gcgcactataacttcgacaaacaaaaagaccggagttattacgctcacctgagaacccgacatggtgagcgtctt

SEQ ID NO: 411534 - DNA, 75 bp, synthetic construct
  source 1..75: mol_type = other DNA
atacctcgaaaaatcttccaccagaaagctacccagttggcgcaccaatcccgtggccatcagataccgttccgt

SEQ ID NO: 411535 - DNA, 75 bp, synthetic construct
  source 1..75: mol_type = other DNA
cagttcctcacagggaaaatcaggctatcactggtggtggacttcttcgatggaaaagttgtgagcagttctctc

SEQ ID NO: 411536 - DNA, 75 bp, synthetic construct
  source 1..75: mol_type = other DNA
aactggtgatgttgttctcgtagcgactcgcacagaacatactaacttgcgtgatttggatactactattgattg

SEQ ID NO: 411537 - DNA, 75 bp, synthetic construct
  source 1..75: mol_type = other DNA
gattgagcgacttgccatgccgttggatatccgaattaattcagctcatgcaaaagaaagagttcttcgccagga

SEQ ID NO: 411538 - DNA, 75 bp, synthetic construct
  source 1..75: mol_type = other DNA
gcacgcttactcccagaaaccgtccctggcaacttgccgatcatgacgggctggtgattgaagttcttcccaccg

SEQ ID NO: 411539 - DNA, 75 bp, synthetic construct
  source 1..75: mol_type = other DNA
tgctgatcatctgcatggtgcgtaaatcggagatgattgaagcgacatggagtgaagttaacttcaacgcgctgg

SEQ ID NO: 411540 - DNA, 75 bp, synthetic construct
  source 1..75: mol_type = other DNA
tcccaggcgatccgatcgtctggcgcaagaatctttccgaaaccaccaaagacaagatctacgacttctttatga

SEQ ID NO: 411541 - DNA, 75 bp, synthetic construct
  source 1..75: mol_type = other DNA
cagagctgcaaaccttgccatcatttgtcggctttgaacgcaccgcgaatcacgataattttggccttgcgttgc

SEQ ID NO: 411542 - DNA, 75 bp, synthetic construct
  source 1..75: mol_type = other DNA
ggcggaacgaatgtgcagggctttaaccagcagacgaacgtcaacgtgatcgccgagctggctaacgggaaaact

SEQ ID NO: 411543 - DNA, 75 bp, synthetic construct
  source 1..75: mol_type = other DNA
gttattcatgacttccggcgtactgccagcacattgctccatgagcaaggctacaactcagactgggtggagaaa

SEQ ID NO: 411544 - DNA, 75 bp, synthetic construct
  source 1..75: mol_type = other DNA
ttttgtgttttcgctacacttgcagtaacctgcacgggcgcattatttacaacagttcttgcagacatgatcatt

SEQ ID NO: 411545 - DNA, 75 bp, synthetic construct
  source 1..75: mol_type = other DNA
cccgcccggtgtacgccacctttgactggggcatccgtgacgctgacggttatcactttattctcgggcgcactg

SEQ ID NO: 411546 - DNA, 75 bp, synthetic construct
  source 1..75: mol_type = other DNA
ggtaggtaaacccgatatgggatgggcttccatgtcaggtacaatgagtactaatggttctcgcggtggcgttta

SEQ ID NO: 411547 - DNA, 75 bp, synthetic construct
  source 1..75: mol_type = other DNA
ggtttaaggaatcagttgccaataaattatctttgggtagcatgggtcattgaatcacttttaccttgtggcttt

SEQ ID NO: 411548 - DNA, 75 bp, synthetic construct
  source 1..75: mol_type = other DNA
tattagtaacatcgtcatcggtttagcagtagtttactccttcaatataatttattctacgaggtgcattggtgc

SEQ ID NO: 411549 - DNA, 75 bp, synthetic construct
  source 1..75: mol_type = other DNA
gtttgtctggttaaccccaattttagctatagatcaactgctcagcatggttataattagaatgaatcagctaaa

SEQ ID NO: 411550 - DNA, 75 bp, synthetic construct
  source 1..75: mol_type = other DNA
catcatgaaaggcctcagtcacccgtataaagggatggatccgaaagacatcaaatatccgctggaaatgtttct

SEQ ID NO: 411551 - DNA, 75 bp, synthetic construct
  source 1..75: mol_type = other DNA
agctacctatcaatactggtgattatctcgttcattgcggtttagcttgttttaataatggtgagcgtgaggagc

SEQ ID NO: 411552 - DNA, 75 bp, synthetic construct
  source 1..75: mol_type = other DNA
tgggcgctacgagatgtttcattttcgataaatcgtggcgaaaccgttggtatcattgggcgaaacggtgctggg

SEQ ID NO: 411553 - DNA, 75 bp, synthetic construct
  source 1..75: mol_type = other DNA
tatcaaaaaaaatatcattcagtcttctgctcttactttccccattcgcattaatatttttcagttataataatg

SEQ ID NO: 411554 - DNA, 75 bp, synthetic construct
  source 1..75: mol_type = other DNA
ttgttggatgattatagtataatttcctatatgactgatgaagaatcgccgattgaaatcaaagataataatccg

SEQ ID NO: 411555 - DNA, 75 bp, synthetic construct
  source 1..75: mol_type = other DNA
gtcctctaaggacttcacgcgtttattcgagattatcaggaaagaacaaacccgtaagcgccgacaagctcaccg

SEQ ID NO: 411556 - DNA, 75 bp, synthetic construct
  source 1..75: mol_type = other DNA
aggttacaaacctgagtaaatgttatcagatatatgcgcgtccaactgatcgtctaaaacagttttttgtgccga

SEQ ID NO: 411557 - DNA, 75 bp, synthetic construct
  source 1..75: mol_type = other DNA
cactggctatgcgccaccggcattacgcctaaaaagagtgatgtttgggccgagaaagataaagaaaaaattgct

SEQ ID NO: 411558 - DNA, 75 bp, synthetic construct
  source 1..75: mol_type = other DNA
acgcagggtgaagccgggctgaagcgggtggtgaaaaaggaacacgcggacggcagcgtcacgcagagtcagttt

SEQ ID NO: 411559 - DNA, 75 bp, synthetic construct
  source 1..75: mol_type = other DNA
ctcggcaatattcaactggccgctggtccacaaaaggataccaacaacccggcttcgccgatccagatttgtcca

SEQ ID NO: 411560 - DNA, 75 bp, synthetic construct
  source 1..75: mol_type = other DNA
atgataaacttaatgccatcgaaaagctcaggtcatttaaccggttattctctgataaagagttagacctttcca

SEQ ID NO: 411561 - DNA, 75 bp, synthetic construct
  source 1..75: mol_type = other DNA
aacagctgtatcttaatgagttaggatatgtttatggtaatgaagaaaaaacaaatgaaattgtaaaaaacaatc

SEQ ID NO: 411562 - DNA, 75 bp, synthetic construct
  source 1..75: mol_type = other DNA
attagaacaagaatgatggaaatcctccgggatgggaaaataaatatatgtgaatatattaataaagaacagtta

SEQ ID NO: 411563 - DNA, 75 bp, synthetic construct
  source 1..75: mol_type = other DNA
atccggctggaggcggtgtggctgacacacgacccggcctacccggatgaacagccgactgcgccgctggcgcgc

SEQ ID NO: 411564 - DNA, 75 bp, synthetic construct
  source 1..75: mol_type = other DNA
gataaaaactcaaactgtattgtcgattacaagcttcctgaagtctctcctggaaccttgctgaaccagcagaca

SEQ ID NO: 411565 - DNA, 75 bp, synthetic construct
  source 1..75: mol_type = other DNA
aggcgactgcggccagcggcagaggagacggacggtatccgtcagggctgcatgatggcgctgaaatcagcacgg

SEQ ID NO: 411566 - DNA, 75 bp, synthetic construct
  source 1..75: mol_type = other DNA
ataatcttttcacagaactcaccgatgattaccagcgctggttggcccgtcgtctgggagaacatgaacatgcct

SEQ ID NO: 411567 - DNA, 75 bp, synthetic construct
  source 1..75: mol_type = other DNA
caatcccccacgaccagcatcaggacgttaaaaaactggccggcaaacttgaagacggtcgtcaggccgtgcttt

SEQ ID NO: 411568 - DNA, 75 bp, synthetic construct
  source 1..75: mol_type = other DNA
atggaaatgcttgggaagatattagtgataattatttccataataattatattttgcgattattataatgttggc

SEQ ID NO: 411569 - DNA, 75 bp, synthetic construct
  source 1..75: mol_type = other DNA
gtaccgacctgcagaagcctgaagttatcgagaggcttgagcttgaaaggcgctactggcaggaaaaaggtattc

SEQ ID NO: 411570 - DNA, 75 bp, synthetic construct
  source 1..75: mol_type = other DNA
cctagaccattccccttgccaattccatggcccaaaagccctgcacagcagcaagcagatgataatgctgcaaaa

SEQ ID NO: 411571 - DNA, 75 bp, synthetic construct
  source 1..75: mol_type = other DNA
ggcgggattaacattgaccagacgcttgatggttcatgggcagtggctccatcaaggctggggcaagtgaacaga

SEQ ID NO: 411572 - DNA, 75 bp, synthetic construct
  source 1..75: mol_type = other DNA
tatatgatggctgtcagcacaaccgggcagtggctgatactcggctggccggagcgtgtgccggaggcggacgag

SEQ ID NO: 411573 - DNA, 75 bp, synthetic construct
  source 1..75: mol_type = other DNA
gtcgaggtgttagggccatttgttaattacggacaagtcgaattagctattcatgcaaaacttacatcagaacgc

SEQ ID NO: 411574 - DNA, 75 bp, synthetic construct
  source 1..75: mol_type = other DNA
aatagaaaaattcggccaattgcaggaagtaattgcagatctattagcctcaatgtccaactctcaggctaatag

SEQ ID NO: 411575 - DNA, 75 bp, synthetic construct
  source 1..75: mol_type = other DNA
tcgtactcaggagaaaaacagcggtccgcacggtgacgactttgaaccttttgttgaaatgaactggttccataa

SEQ ID NO: 411576 - DNA, 75 bp, synthetic construct
  source 1..75: mol_type = other DNA
acaatggtaatagcaaccagttgaaaaataacaccagggtaaggatttttagtggtcgaaatgtggaagagttta

SEQ ID NO: 411577 - DNA, 75 bp, synthetic construct
  source 1..75: mol_type = other DNA
caatgtgatttggtaagaaaatctctagaggatgaacatgtggataaagcaaaaatagcgagtattgtttcttgt

SEQ ID NO: 411578 - DNA, 75 bp, synthetic construct
  source 1..75: mol_type = other DNA
agacttacttagcgaaaaatttcatgccaacgaatctttcactcgctctggatctctttctcatgatgtttatga

SEQ ID NO: 411579 - DNA, 75 bp, synthetic construct
  source 1..75: mol_type = other DNA
agcgtcgggtactggcaggcagccgctatgatctggttgaacgtaataacaatatcgttcttgagtatcgcaaag

SEQ ID NO: 411580 - DNA, 75 bp, synthetic construct
  source 1..75: mol_type = other DNA
gtaccactaagccaggggaatatacatttacattcaacactctgacgtatggcgggtacgaaatacagcctgtga

SEQ ID NO: 411581 - DNA, 75 bp, synthetic construct
  source 1..75: mol_type = other DNA
tcctccagcctttcccgtaagcagggtgtaaccaaagaaccgcttttgctacttaaaaatgtgcgaggacttgaa

SEQ ID NO: 411582 - DNA, 75 bp, synthetic construct
  source 1..75: mol_type = other DNA
tgaaggaaatactttgtataaatcagttaaccatttgcatcgagatctgtcagaattaaatcatagaaagcttgc

SEQ ID NO: 411583 - DNA, 75 bp, synthetic construct
  source 1..75: mol_type = other DNA
aattactatgttatattttcgaaaaaggtaagttatatagagaaatatgtttggaaattcgtagtgagactctgg

SEQ ID NO: 411584 - DNA, 75 bp, synthetic construct
  source 1..75: mol_type = other DNA
cctgcacgacccaccaatgtaaaaaagcgccctaaaggcgcttttttgctattcaggcatcctcaatttcacttt

SEQ ID NO: 411585 - DNA, 75 bp, synthetic construct
  source 1..75: mol_type = other DNA
atgggactgaatccggcaaatatcggtcgcacacttgaaggtattggacgccggctgcgattgctcgttgacagg

SEQ ID NO: 411586 - DNA, 75 bp, synthetic construct
  source 1..75: mol_type = other DNA
gtattttcaaatgatattcaggtcgccggtaaatctgttcttgagcatttccatatggacggggatggcaaaaaa

SEQ ID NO: 411587 - DNA, 75 bp, synthetic construct
  source 1..75: mol_type = other DNA
acaaaatcacggcttcggtgaaaaactcccagaagactgccacggtgaagttcaaagcggatgccaaaactggcc

SEQ ID NO: 411588 - DNA, 75 bp, synthetic construct
  source 1..75: mol_type = other DNA
cgaacctgtttttgcttatgataaggctatgccggtttctatcttacttgcattaatatccgtagcgacttgctg

SEQ ID NO: 411589 - DNA, 75 bp, synthetic construct
  source 1..75: mol_type = other DNA
caccgccgcctctgactatcagtgccttgtaccctcaacatcgtcagcacagtgcggtaaccaaaaatttactgc

SEQ ID NO: 411590 - DNA, 75 bp, synthetic construct
  source 1..75: mol_type = other DNA
cagtttattttccgcttgtcaatttgcttataaagatgcaaaaaataaaaaagcgttcagtccatatatactagc

SEQ ID NO: 411591 - DNA, 75 bp, synthetic construct
  source 1..75: mol_type = other DNA
gtcagtaatgcaaccaatgccatgaaggctgtcgcaaaagttctcgtatccatcagaaacgataaggatcttgaa

SEQ ID NO: 411592 - DNA, 75 bp, synthetic construct
  source 1..75: mol_type = other DNA
tataaacttgaaaattatagaacgctattcactggcacttctgccgtaacaggcttcagccagattatgcacggt

SEQ ID NO: 411593 - DNA, 75 bp, synthetic construct
  source 1..75: mol_type = other DNA
atgcggcacaggcctacccgattttttattcaatccaaagtacaggtatcagtgaggatgaagtaattgaacaga

SEQ ID NO: 411594 - DNA, 75 bp, synthetic construct
  source 1..75: mol_type = other DNA
cgctttgcagagcgggtgaagcgttcgcagaacctggtcaaccggtggtgcactggcatcaaaaacatcgggccg

SEQ ID NO: 411595 - DNA, 75 bp, synthetic construct
  source 1..75: mol_type = other DNA
ctgacgtatggtgggtacgaaatgcagccagtgacggtgacaattaacgcagtggaggctgctactgaagaaggt

SEQ ID NO: 411596 - DNA, 75 bp, synthetic construct
  source 1..75: mol_type = other DNA
gtcggcagacaaccctgttggggggagtatgtgggtcgacattcaggctccggaaggggtgacggaggatgatta

SEQ ID NO: 411597 - DNA, 75 bp, synthetic construct
  source 1..75: mol_type = other DNA
agagttctatctgaacgtgagtggaaaccgagcgtggcgctggcgtattgaagatgggcggtttattgcctccac

SEQ ID NO: 411598 - DNA, 75 bp, synthetic construct
  source 1..75: mol_type = other DNA
gataataatattggcgctatgctcaagaaagatgttgaaaaactatcaactttagtcagtgaacgtagcccgcga

SEQ ID NO: 411599 - DNA, 75 bp, synthetic construct
  source 1..75: mol_type = other DNA
acatgaagataatatttcttcatatctcaggtttagattcatgcgtgcaggcttgtcgcaaaaaccatttaacat

SEQ ID NO: 411600 - DNA, 75 bp, synthetic construct
  source 1..75: mol_type = other DNA
gtggcgatagcggcaaaacaactcttcctgttcatatatcagtgcttgcagtgtacgaacaagatattaatcctg

SEQ ID NO: 411601 - DNA, 75 bp, synthetic construct
  source 1..75: mol_type = other DNA
taacgtggggcgttgtttgggaggggcaaatctttattatccaagaagcaattaaacttgcaggtatactcccaa

SEQ ID NO: 411602 - DNA, 75 bp, synthetic construct
  source 1..75: mol_type = other DNA
tcgtatgcgttacgaaggtggaaaccaagaaaggatattagctgagcagtaccgagaatgggcaaattcaatgcc

SEQ ID NO: 411603 - DNA, 75 bp, synthetic construct
  source 1..75: mol_type = other DNA
ggggagtatgacgagtggggaaacctgctgggcgaggaaagcgcgcagcaccttcagcagtcactccgtctgccg

SEQ ID NO: 411604 - DNA, 75 bp, synthetic construct
  source 1..75: mol_type = other DNA
atggctttccgcctcatacgctatgcggtagccgccatgcagcgccacctggaggcagggcataaaaaactgcca

SEQ ID NO: 411605 - DNA, 75 bp, synthetic construct
  source 1..75: mol_type = other DNA
gaatattctttttctgtcatgcatggtgaaggcgacattttgaatgcttttattcgcaagcatcggacaaaacga

SEQ ID NO: 411606 - DNA, 75 bp, synthetic construct
  source 1..75: mol_type = other DNA
gaatacgaaggaaaaataaaatatctgactttctcctacagtgatacgaccgcaaatagatgcattctccagggc

SEQ ID NO: 411607 - DNA, 75 bp, synthetic construct
  source 1..75: mol_type = other DNA
ggctgaactggtgcggctgctggacagactggaggaagaaatccgggcagaccgcgtgagcagtgaaagccgggc

SEQ ID NO: 411608 - DNA, 75 bp, synthetic construct
  source 1..75: mol_type = other DNA
aaattcgtgcttttgttgaagtggctcgtcagggcagcattcgcggagcgagccgaatgttgaatggctttgttg

SEQ ID NO: 411609 - DNA, 75 bp, synthetic construct
  source 1..75: mol_type = other DNA
tgtttataattacatcgctgaaaatattgactcttggatcgaagaagcaataaaaatacgaaaagaaaacaaata

SEQ ID NO: 411610 - DNA, 75 bp, synthetic construct
  source 1..75: mol_type = other DNA
catgatgaggagtcggggctgtactataaccgtcaccggcactacgatccgttgcaggggcggtatatcaccccg

SEQ ID NO: 411611 - DNA, 75 bp, synthetic construct
  source 1..75: mol_type = other DNA
gagaacccgcatcacctgtaccagccgtaccgcctgccggggcagcagtacgatgatgaatcggggctgtgctat

SEQ ID NO: 411612 - DNA, 75 bp, synthetic construct
  source 1..75: mol_type = other DNA
aggtcatgctcatggagtccatgatgatggtggggatagaatgaataacgtaaacttaaatgaaaatcctatccg

SEQ ID NO: 411613 - DNA, 75 bp, synthetic construct
  source 1..75: mol_type = other DNA
atgcgttgctgaattatttcaatcttgatgatatccctgagggtgacagttgggtacttaaaggttggctaggga

SEQ ID NO: 411614 - DNA, 75 bp, synthetic construct
  source 1..75: mol_type = other DNA
gaatgctggcagcgatccgcatcgtgattgcagtgatgaaactggtgaagcgtcagctcctgtagcaactgaaat

SEQ ID NO: 411615 - DNA, 75 bp, synthetic construct
  source 1..75: mol_type = other DNA
gtaccgaccagagcctggtcctgtgcgacaccgtgcgttatctgccggagtcctttgagatcccctggaatccga

SEQ ID NO: 411616 - DNA, 75 bp, synthetic construct
  source 1..75: mol_type = other DNA
gtttccaccagccgtggtcgcgccagtgaccgccatcccagtaatagccacgattatcacgatcgcctatctgta

SEQ ID NO: 411617 - DNA, 75 bp, synthetic construct
  source 1..75: mol_type = other DNA
cttctacgtctgaaagacaatataaatgactggttaaacgaagaattaaactaccttgaatgtgagtgggatcat

SEQ ID NO: 411618 - DNA, 75 bp, synthetic construct
  source 1..75: mol_type = other DNA
tcatgtcttttatgaggaagctattactattatttcgcgaggtgcacagcattaatcacattatcaaaaccttat

SEQ ID NO: 411619 - DNA, 75 bp, synthetic construct
  source 1..75: mol_type = other DNA
aatctgcatcaagggtgaagcgtgatttatctgaagtcgactccgagtcaacaatgaagcgtaagcgttttatgt

SEQ ID NO: 411620 - DNA, 75 bp, synthetic construct
  source 1..75: mol_type = other DNA
cagcctttactccacggataccatacggacaatgcagacagcctgttttttctctggaggaaaagcagcctcccg

SEQ ID NO: 411621 - DNA, 75 bp, synthetic construct
  source 1..75: mol_type = other DNA
atgcccagccgcacaataataaaatttctgattatatctttactcgttatattcgtttgcttgtcaagcatatat

SEQ ID NO: 411622 - DNA, 75 bp, synthetic construct
  source 1..75: mol_type = other DNA
tgcacccgagctgtttcagttctatttgtggcgtgcccgcaattggcggggtaataagaaaatggagcgtgaaga

SEQ ID NO: 411623 - DNA, 75 bp, synthetic construct
  source 1..75: mol_type = other DNA
tacaaaagcatgcagattcaatatattgcagaattcacgtaggcctgataagacgcgccagcgtcgcatcaggcg

SEQ ID NO: 411624 - DNA, 75 bp, synthetic construct
  source 1..75: mol_type = other DNA
caattcggcagaacgctatctaaaattacaaagccaaggaaatttaattagagatgaaatagaaagcacttattt

SEQ ID NO: 411625 - DNA, 75 bp, synthetic construct
  source 1..75: mol_type = other DNA
cgctcagcttcagacttacaaagccgtatttataatatattagaattggggttcattgaagagttttatcataat

SEQ ID NO: 411626 - DNA, 75 bp, synthetic construct
  source 1..75: mol_type = other DNA
gtgaatgcgctggagcaaaataccaatcaacaacttcaacatgaagcaactgcccgtatcgaaggtgatgcacaa

SEQ ID NO: 411627 - DNA, 75 bp, synthetic construct
  source 1..75: mol_type = other DNA
atcctgattaataataaaagttataaaataatagttggagctaatggacaatggtcgtttgatatccctgacaca

SEQ ID NO: 411628 - DNA, 75 bp, synthetic construct
  source 1..75: mol_type = other DNA
tatcaaattaccgctactgatctggccggtaatcaaacaactctgaaagaacagattgttattaaccatcaagaa

SEQ ID NO: 411629 - DNA, 75 bp, synthetic construct
  source 1..75: mol_type = other DNA
aaactcttttgcttatatcctgttttttttccaaatcctatttgctgtttttaatatttcaacaggctcgaatgc

SEQ ID NO: 411630 - DNA, 75 bp, synthetic construct
  source 1..75: mol_type = other DNA
tcatgaaactagggctggttctgaactatctaatagaattagagaacatagccgaaatatagcaaaaacatcgaa

SEQ ID NO: 411631 - DNA, 75 bp, synthetic construct
  source 1..75: mol_type = other DNA
tacaagctcaagataaatggacctcttggaaattctgttgacatggaactatccggagaggatatcaaagcaatt

SEQ ID NO: 411632 - DNA, 75 bp, synthetic construct
  source 1..75: mol_type = other DNA
ggcggatcatctgtttccagttctcagggggcaaatccttccaggcaggagggaagtgatgtaactggaaatgca

SEQ ID NO: 411633 - DNA, 75 bp, synthetic construct
  source 1..75: mol_type = other DNA
ataaaatcgaggtgatagcggaaaagacagaaaccatcatgcaacaatatcaggaaccacctctggaagaaagtg

SEQ ID NO: 411634 - DNA, 75 bp, synthetic construct
  source 1..75: mol_type = other DNA
aatcattaataaatacatcggcaaaagttgatgattctgcatttattcatagtgcacttgaggatgtttatataa

SEQ ID NO: 411635 - DNA, 75 bp, synthetic construct
  source 1..75: mol_type = other DNA
tcaaattttgactggaaatatgattagtaatgtacaaccaactttctcaggcaagactgaacctggtgtccgtct

SEQ ID NO: 411636 - DNA, 75 bp, synthetic construct
  source 1..75: mol_type = other DNA
aacgataacattacaaatgttgctactccaacaattaatggagaaactgctgcaggagcaaaagtaactttggtt

SEQ ID NO: 411637 - DNA, 75 bp, synthetic construct
  source 1..75: mol_type = other DNA
tttatctaaataataaacaatatacagttaaggcatcagttgatggtggctggttttttaaaatcacagaaccat

SEQ ID NO: 411638 - DNA, 75 bp, synthetic construct
  source 1..75: mol_type = other DNA
atgcttatttggtatatatgcaggcattaattacattttattttatcatgggttttttgaatttaattactctag

SEQ ID NO: 411639 - DNA, 75 bp, synthetic construct
  source 1..75: mol_type = other DNA
gccgatgccggaaaaattattccgcgtgatgccacatacccgtttacggatacaaacggcgtaacatactttcaa

SEQ ID NO: 411640 - DNA, 75 bp, synthetic construct
  source 1..75: mol_type = other DNA
tggcaaacgcgaagggaatcaaaacggacaaacagttcattaagctgaagctgaaacggccgctgtacctgcgag

SEQ ID NO: 411641 - DNA, 75 bp, synthetic construct
  source 1..75: mol_type = other DNA
ctggatgaacatgtgcctgatttcgtggcaaacgcgaagggaatcaaaacggacaaacagttcattaagctgaag

SEQ ID NO: 411642 - DNA, 75 bp, synthetic construct
  source 1..75: mol_type = other DNA
tattttatcggctacttgttcgagcatgggttacaagaattgatgtagctcttgatgtatataactgcaagctag

SEQ ID NO: 411643 - DNA, 75 bp, synthetic construct
  source 1..75: mol_type = other DNA
ggatcggcggtaagcgcaggctggcaaaacacattctgccactgtttcccaaacaccgctgctacgttgaaccgt

SEQ ID NO: 411644 - DNA, 75 bp, synthetic construct
  source 1..75: mol_type = other DNA
tgcgctctattcggactaaagattggctttcatttgctcaaagatataacgggccaaggcagaaaggatatgatt

SEQ ID NO: 411645 - DNA, 75 bp, synthetic construct
  source 1..75: mol_type = other DNA
agataaattaatctgggtaaatatcgttcgccatgatgaagtaatggctattagagacatgtatagaaatcagcg

SEQ ID NO: 411646 - DNA, 75 bp, synthetic construct
  source 1..75: mol_type = other DNA
gatttggtagaaacattcatacgcaactggccagaagcagcagaaatatttgaaatgaaaggtatttcaggctta

SEQ ID NO: 411647 - DNA, 75 bp, synthetic construct
  source 1..75: mol_type = other DNA
aattcaattgcgtgctgatttgtattccagtggtattggtggggttatatcaactttaagtaatattgattacat

SEQ ID NO: 411648 - DNA, 75 bp, synthetic construct
  source 1..75: mol_type = other DNA
ccgcttgagtttccggaaatattacgaagtgcagagtttcccagaactcctattaatggagtattaactcctata

SEQ ID NO: 411649 - DNA, 75 bp, synthetic construct
  source 1..75: mol_type = other DNA
tggctgtgctgcttatctcctctgatctggaagagatcgaactgatgacagatcgtgtgtatgtgatgcatcagg

SEQ ID NO: 411650 - DNA, 75 bp, synthetic construct
  source 1..75: mol_type = other DNA
atgaaaatgttgataggttatattccggtacatcttcggatatcaacaattgaggacaacccggaaatcacgttc

SEQ ID NO: 411651 - DNA, 75 bp, synthetic construct
  source 1..75: mol_type = other DNA
tcgcgagggctctggccggaaaaccggccagcgtgctcgcggccgccaccgaccggggaaaaaccacggccgcac

SEQ ID NO: 411652 - DNA, 75 bp, synthetic construct
  source 1..75: mol_type = other DNA
gcaacggaggcaatggtggtgctgctatatccgggagtaatataacgatcaacaattatggcagtattcgaccag

SEQ ID NO: 411653 - DNA, 75 bp, synthetic construct
  source 1..75: mol_type = other DNA
tatattaccggtggtcgtggtggtatgggggcttatggtaatggtggcggagatggtggtgtagctggcgctggt

SEQ ID NO: 411654 - DNA, 75 bp, synthetic construct
  source 1..75: mol_type = other DNA
ccggcggggatccggattgtgttgcctgaaatcacacaacaggtgtctgagtcgccatacagcctgtgggattaa

SEQ ID NO: 411655 - DNA, 75 bp, synthetic construct
  source 1..75: mol_type = other DNA
ctagattgaatagtaccggttctacaccgccgccactgttaatctcgctaccaatcatagttattgttttaagtg

SEQ ID NO: 411656 - DNA, 75 bp, synthetic construct
  source 1..75: mol_type = other DNA
ttcatgaacgtctggggccggtgcagtacaccgatgtcatgaccggtgagacgaaaaataccagcatgtggatgc

SEQ ID NO: 411657 - DNA, 75 bp, synthetic construct
  source 1..75: mol_type = other DNA
ccaactggacatgaacggccacagccagactgccggtaaactgaacggtgctgcaggctctgtactgaatatcaa

SEQ ID NO: 411658 - DNA, 75 bp, synthetic construct
  source 1..75: mol_type = other DNA
gcatcccaaagactacttatgattttattattgtttgtgctttagagaaagaagcagctgcttatatcgaggccg

SEQ ID NO: 411659 - DNA, 75 bp, synthetic construct
  source 1..75: mol_type = other DNA
atccgcagaagttatcggaaatcaagggtgtcttaaatgggattggatttgagataaacattaaagaatgcgatt

SEQ ID NO: 411660 - DNA, 75 bp, synthetic construct
  source 1..75: mol_type = other DNA
ggcagtataccgatatttgtattacgcccttctaatcccgatggagagatggctgtttacacattgagtatgtgt

SEQ ID NO: 411661 - DNA, 75 bp, synthetic construct
  source 1..75: mol_type = other DNA
cagaagccctggcattgattcaggagtacacgtcgcattcagatgaaggtatccgcaaagagatgctttatcgac

SEQ ID NO: 411662 - DNA, 75 bp, synthetic construct
  source 1..75: mol_type = other DNA
atgtcgtgcaggaagccattactggtcaggactatgaaagaattaatactgtcactgaacaacttctgtcagcga

SEQ ID NO: 411663 - DNA, 75 bp, synthetic construct
  source 1..75: mol_type = other DNA
tgtcctaggaagcacgtcgtcagtattggagaaaacttacaaacgctcgccgcagccccagcgaccgaacgttag

SEQ ID NO: 411664 - DNA, 75 bp, synthetic construct
  source 1..75: mol_type = other DNA
gataaagacgatatggtttattctggggcaggctcatcagaagtatttgctggtgaaggtcatgataccgtatct

SEQ ID NO: 411665 - DNA, 75 bp, synthetic construct
  source 1..75: mol_type = other DNA
ccggtttatccccgctggcgcggggaacactcgcggaatacaccgacgaggcgggcaaaaaacggtttatccccg

SEQ ID NO: 411666 - DNA, 75 bp, synthetic construct
  source 1..75: mol_type = other DNA
gatggttttgaacaggagtttattcgctttgatcagcgaaacagttggaacgctaaccttgtagctgcggccaaa

SEQ ID NO: 411667 - DNA, 75 bp, synthetic construct
  source 1..75: mol_type = other DNA
ttactctgcttggcgtgaagattttttcttcttgtccactctttcacggcatggacgtcttttagtttcggagca

SEQ ID NO: 411668 - DNA, 75 bp, synthetic construct
  source 1..75: mol_type = other DNA
gcgcccggatatcaaaatggttgtccactgcggcgacccggacgacgaggggcagctcctggttgacgaggtgct

SEQ ID NO: 411669 - DNA, 75 bp, synthetic construct
  source 1..75: mol_type = other DNA
aagggcaaatttatcccaactgccgccgggctggcgttaattgatgccctgcccgactcggtgacgcagccggat

SEQ ID NO: 411670 - DNA, 75 bp, synthetic construct
  source 1..75: mol_type = other DNA
tttcatgcaggccgcgcaaaaatcggtttatccccgctggcgcggggaactccaattcatatactgataaatcat

SEQ ID NO: 411671 - DNA, 75 bp, synthetic construct
  source 1..75: mol_type = other DNA
ggaatacattctaagacccccgccttcgcacaacaattaaaagagatcatggttgattatggatataagagtcta

SEQ ID NO: 411672 - DNA, 75 bp, synthetic construct
  source 1..75: mol_type = other DNA
agcctcgtctggaaagttgtgatcaagattttgaagatatgattgccagcaatcgagatatcatttatggcatca

SEQ ID NO: 411673 - DNA, 75 bp, synthetic construct
  source 1..75: mol_type = other DNA
ctgtcctgagttctgtatctgcgggagttagtgccgcctccagtgcatccctcataggggccccgataagcatgc

SEQ ID NO: 411674 - DNA, 75 bp, synthetic construct
  source 1..75: mol_type = other DNA
ctctcgttgagtatggttcacctgttgacttaggtcgttttattgctaataccactggcatagatcgccccaagg

SEQ ID NO: 411675 - DNA, 75 bp, synthetic construct
  source 1..75: mol_type = other DNA
atatgcggatggccatggtgggatcgccggcgtattttgctgcaaaccctgcgcctgaaacgcctcatgagctac

SEQ ID NO: 411676 - DNA, 75 bp, synthetic construct
  source 1..75: mol_type = other DNA
aagtggcccgaggatatgcagatctgtcaaaagcggagagtcagtgagatgagatggtgcgaaccgctggttgtg

SEQ ID NO: 411677 - DNA, 75 bp, synthetic construct
  source 1..75: mol_type = other DNA
atcagaatgtgcagagcaatgttatggctcatcaggaaatgagtttctttttagtagagtaaaaacaacctggca

SEQ ID NO: 411678 - DNA, 75 bp, synthetic construct
  source 1..75: mol_type = other DNA
ttatggatccgctcaaggcaaccaaatattatcaagtattgttattcgcgatttgactcctagatctgcctcgct

SEQ ID NO: 411679 - DNA, 75 bp, synthetic construct
  source 1..75: mol_type = other DNA
ggcttcagtgtatcgtaccgcgttgtcgaacaacgatattgcgatggctggtggtcagatcaccgaccagaacac

SEQ ID NO: 411680 - DNA, 75 bp, synthetic construct
  source 1..75: mol_type = other DNA
catatagagatcaaaggaataaaagttacgatagaaggcagtgatgatgtgacagtaaaaacacaggctcttaac

SEQ ID NO: 411681 - DNA, 75 bp, synthetic construct
  source 1..75: mol_type = other DNA
gggaaggatcagccgctggtgttctgcgataaagtttactacctgccggaagccttcccccttccgtttaacccg

SEQ ID NO: 411682 - DNA, 75 bp, synthetic construct
  source 1..75: mol_type = other DNA
tgaatcttctaaatgtatacagggaggcaagacagggattggttctgcgattacagaagctcagagtattctata

SEQ ID NO: 411683 - DNA, 75 bp, synthetic construct
  source 1..75: mol_type = other DNA
ggacaatgtggcgcaacatggcagttcgtggatggtcagcgccagatggtggcgaataacgaatatgttcacgac

SEQ ID NO: 411684 - DNA, 75 bp, synthetic construct
  source 1..75: mol_type = other DNA
cgatgcaggatttcaacgcgttcggcgtgacgcagggcattaccggtgactttcctgataccgtgtttcctcgtg

SEQ ID NO: 411685 - DNA, 75 bp, synthetic construct
  source 1..75: mol_type = other DNA
gacgatggcaaaagaggccgagaaggtcggtgttgatggcgttatggtgatgcctgctttggtttactcatctaa

SEQ ID NO: 411686 - DNA, 75 bp, synthetic construct
  source 1..75: mol_type = other DNA
cggtcagggaattgagctaagtgattttaaagtcacctttacgatcgactggttcaacatcagcagcgcgtcccg

SEQ ID NO: 411687 - DNA, 75 bp, synthetic construct
  source 1..75: mol_type = other DNA
tcgaacaacgatatcgcgatggccggtgggcagatcaccgaccagaacacagacggaaatatcacgctcagcggc

SEQ ID NO: 411688 - DNA, 75 bp, synthetic construct
  source 1..75: mol_type = other DNA
gtgggcagatcaccgaccagaacacggacggaaatattacgctaagcggcaccacatcgcagcctgccagcatcg

SEQ ID NO: 411689 - DNA, 75 bp, synthetic construct
  source 1..75: mol_type = other DNA
ttacgatagaaggcagtgatgatgtgactgaaccgccccgggaatcctggagactaaacttcctgagaaagaggt

SEQ ID NO: 411690 - DNA, 75 bp, synthetic construct
  source 1..75: mol_type = other DNA
cagtgccaaaggcatggcaggaatttgatgatgaagggcgcatgaaaccctcagcctggtatgacaggattgtgg

SEQ ID NO: 411691 - DNA, 75 bp, synthetic construct
  source 1..75: mol_type = other DNA
attgggaaggcctggatggtccggagcggattggttatttacacagtcgtcgcacccgggcgcgtgagatatttg
